United States Patent Application Publication US 2004/0123343 A1 - sequence listing, part 27

SEQ ID NO: 75395 - DNA, 900 bp, Oryza sativa
  Clone ID: PAT_MRT4530_7548C.1
atggcgccggaaggggacggagatggcggggtcgtggtgacggcccgcgtgctgcgcaccggggagacggtggaggtcgccggggatttgctcgtcgcggcggatggctgcacgtcggcgatccgccggcgattcctccccgaactcaagctgaggtactctggatactgtgcatggcgtggcgtcttcgatttctccgggaaggaggggtgcaccaccatggtcgacatccggagggcctacccagagctcggcaactgcctctacttcgacctggcatacaagacgcacgctgtgctctacgagctgcccaagaaccggctcaactggctctggtacatcaatggcgatgaaccagagctcatggggagctcggtgacgatgaaggtgaacgaggccacggtgagcgagatgaaggaggaagccgagcgcgtgtggtgccccgagctggcgcggctgatcggcgagacggcggagccgttcgtgaacgtgatctacgacgccgagccgctgcccgggctgtcgtgggcgggagggcgggtggcgctggtcggcgacgcggcgcacccgaccaccccgcacgggctgaggagcaccaacatgtccatcctcgacgcccgcgtgctcggctgctgcctcgcgaggtggggcggcgatggcaacgccgagccgacgtcgacgccgcggcgggcgctggccgagtacgaggcagcgcggcggccggtcgtggcggcgcaggtgctgcacgcgcgcaggctcggacggctcaagcagggcctgggcatgggcagcgccggggacggggaggggttcgacgcgaggacggcgacggaggaggagatttcgcagctgcggcagagcagcatgccgtatttcagtggcgcgccaaccattgagtga

SEQ ID NO: 75396 - DNA, 237 bp, Oryza sativa
  Clone ID: PAT_MRT4530_75490C.1
atgtatagatcattctgcttgccactttggattgatgtcgtctgcactttatatgacctttggaacggtagtctgcttcggagaccagggaatgtggtggcagctcgatggctcacaggaaaagcaggggaagaggaagggcgcaaagagacagggaaagtggacttagaatatggaaataagattcacttcaaacttttcaataatttagtacactttcctgcaggtggccactga

SEQ ID NO: 75397 - DNA, 564 bp, Oryza sativa
  Clone ID: PAT_MRT4530_75491C.1
atggaggatcatcgaggacgtccaagtaaaggtggaggcccaaaccaattcgacctcggtgcaattcggagtccaggaccagtctgcactaaaacgggcgcccaggtcgcatacgtgctcggattggggcgttctttccaatggttttggtcccacgtccaaatactttccgagtcaatgggtgataaccagaggagacgtggtgttgtgattgcggggctcaagagcgtgcgcgttcaagaagccggatcgatttgtgtcgcgactccgcccaaatcgttttttatcagaacctttcggaagatcgggaaccctagtgcacatcaagtggtatcagaggccgttgcaaagtctgtccaagatgccttcactaaaattggcttcctgaaccacatggagaggttggacaagcagatatccacgctaactgatcgggttgccgcgttggagacaccttccaatgaggaagtggtgagtggtgacgacgatgctcattcggaagacacggtgtatgattccagtggctatattgacacaccagctacaaggcaagcacggctatga

SEQ ID NO: 75398 - DNA, 482 bp, Oryza sativa
  Clone ID: PAT_MRT4530_75492C.1
atggaggggacaaggagacacttggagaaggacttagagccatggaggaccattggggacgtccaagtcaaggtggaggcccaaaccaagtcgacgtctggtgcaattcggagtctaggaccagtctgcactaaaacgggcgcccaggtcgtatacgtgttcgaattggggcgttctttatatggatggaaagctaagaagatatcctttccaatggttttggtcccacgtccaaattctttctgagtcaacgggaattgaccgaacaacttaacgtccagaatctgtcccggtgctgcgtcaccgtatttgggcctttggcccgttttgacacgggtgataacctgaggagacgtggtgctgcgattgcggggctcaagaacgtgcgcgttcaagaagccggatcgatttgtgtcgcgactccgcccaaatcgttgtttatcagaacctttcggaagatcgggaaccctagtgcacatcaa

SEQ ID NO: 75399 - DNA, 468 bp, Oryza sativa
  Clone ID: PAT_MRT4530_75493C.1
tgttctcgtcgcacacggtggtatactggccaatgtatatgctagggcgcttgtggcctgtgttggtatttcttagcgatatcctctatccgatgccctcctggtacatcgagaagccatccctgactgtcgagttccttacgacagcctatcattaccatacaaccggggctaaatacggaggactaccatcctcagtaaattaacttaggactatatacacgcgcggaggaatatccgtactgaggtgtcactatcagtggcccacctctcatccgcagcatataaccccaaataatgatatcccgtaatctagacaccatgcctaaactaccagatactactctaatatcatcgtcatatcatagagtaattgcataagcaaacattgcccgtaccgatgcatctcccagataagctagcagtataatcagtataacatgaacataatgtaaagctggcattcat

SEQ ID NO: 75400 - DNA, 1199 bp, Oryza sativa
  Clone ID: PAT_MRT4530_75494C.1
ccacgcgtccgcattgatggaggtagctgcaacaacttggtgagttctgatttggtcaagaagcttggcttgaccacacgtacacatccatatccttaccatattcagtggttaaatgattccggaagagcaaaggtaacacaggtttgtagggtttcgttttccattggctcatatgcagattctattgattgtgatgtggttcctatgcaagcttgttcacttttgttgggtcatccttgggaacatgataatgatgctacacaccatggtaggagtaataaatacacttttgtgcataatggaaagaaaattactttgctacctttgacccctgctgaaattgtagaagctgataaagagcgagctgctagtttgaaacttaatgaatctgaaaatcagcaagttgctaaatttgtttttccaactaaaaaggataagctttcacctagctctaaggttgagggaattaagttgaagggtggtgttatgcttgcaacaaaatgtgacattgctgaaatttcagatgatgatatttgctattccttgatatgcaaacaagtattgggtttctctagatgatattgctagttcgataccttctattgttactaaccttttgcaggagtataaggatgtcgttccagctgagataccctcgagattgccacctatgagatggatagagcatcaaattgatttgattccgggagcatcactgccaaaccatgctgcttatcgaaccaaccccgaggagactaaggaaattcagcggcaagttcaagatcttttggaccacgggattctatcgccgtttcgtcaaagatttcagcacctttgctgcaccattgaatgagctgacgaagaaaggggtggtcttccattggggaaagacacaggagaagtcgtttgacactttgaaggacaagcttacacacgcaccattgctacaacttccaaactttggtaagacttttgagttagaatgtgatgctagtggagttgtcattaggggtgtgttgatgcaagatggtaagcctgttgcatactttagcgagaagttgcatggtcctgttttgaattattccacgtatgataaggtattgtatgctcttgtacgttctttagaaacgtggcgtcattatttgtggcctaaagaatttgttattcactccgatcgcttaaatatcttcgctctc

SEQ ID NO: 75401 - DNA, 391 bp, Oryza sativa
  Clone ID: PAT_MRT4530_75495C.1
cctctatctgatgccctcatggtacttcgagaagccactctgactgccgagttccttacgacagcccatcatgaccatacaactggggctaaataaggaggaataccctccccagggaattaacttaggattatatacacgcgcggatccaggaatacccgtactgagctgtcaccatcagcggcccacctctcatccgcagcatataaccccaaataatgatatcccgtaatctagacacaacgtctaaactactagatactactctaatatcattgtcatgatatagagtaattgcataagcaaacattatatctgcaccaaagcatctcccagataagctagccgtatattcagtataacatgaacataatgtaaagtaggcattcat

SEQ ID NO: 75402 - DNA, 315 bp, Oryza sativa
  Clone ID: PAT_MRT4530_75496C.1
atgtttgcttatgcaattactctatatcatgacgatgatattagagtagtatctgttagtttaggcgtggtgtctagattacgggatatcattttttggggttatatattgtggatgagatgtgggccgttgatggtgacagctcagtacgggtattcctccgcgccgatatataatcctaagttaatttcctggggagggtattcctccgtatttagccctggttgtatggtcatgacgggctatcgtaaggaactcgacagttaggggtagcttctcgaagtactaggagggcatcggatagagggtattagc

SEQ ID NO: 75403 - DNA, 413 bp, Oryza sativa
  Clone ID: PAT_MRT4530_75497C.1
gcatgagaaaaattatagctaacaccctctattcgatgccctcctggtacttcgaaaagccacccctgactgccgagttccttacgacagcccatcatgaccatccaaccggggctaaatacggaggaaaaccctccctaggaaattaacttaggattatatataggcgcggaggaatacccgtattgagctgtcaccatcagcggcccacctctcatccgcaatatataaccccaaataatgatatatcgtaatctagacaccacgtctaaactactaggtactactctaatatcatcgtcatgacatagagtaattgcataagcaaacactatacccgcaccaaagcatctcccagataagctagccgtatattcagtataacatgaacgtaatgtaaagtaggtactcat

SEQ ID NO: 75404 - DNA, 447 bp, Oryza sativa
  Clone ID: PAT_MRT4530_75498C.1
atgagtaccaactttacattatgttcttgttatactgaatatacggctagcttatctaggagatgctttagtgcgggtataatgtttgcttatgcaattactctatgtcatgacgatgatattagagtagtatctggcagtttaggcgtggtgtctagattacgggatatcattatttggggttattatattgtggataagaggtgggccgctgatggtgacagctcagtacgggtattcctctgcgcctatatataatcctaagttaatttcctgggagggtatttctccgtatttagccccggttagatggtcatgacgggctgccgtaaggaactcgacagtcaggggtggcttctcgaagtaccaggagagaatcggatagaggaatccactttaggtccatcaaataggggtcgagtttcaattatatccctcaaccacaca

SEQ ID NO: 75405 - DNA, 218 bp, Oryza sativa
  Clone ID: PAT_MRT4530_75499C.1
gtgtaaacattgaggacacatcatatggcaagcaaatgggaaataaacgattctcaaactacaaaatctcaatcagcacgggaaagaggattgattaccaaaaggggagcaggagcgtcattctttggatgaagactggccatggctttgagggggctaagaagcacgaccttccaaaatcagctccttttgaatcaaccatagagggaaacagcatg

SEQ ID NO: 75406 - DNA, 442 bp, Oryza sativa
  unsure (1)..(442): unsure at all n locations
  Clone ID: PAT_MRT4530_7549C.1
caacaataggatttttangtatggaaaaagtaaacgcgagggtcttctcaacttgtaatcggaataaaaaatatcttcgaaccgtaaaaccagatatgcgaggtacttaactatataaaaccgatcacctaatgtccctcggtggttttaacccggtatttatctacatggcggctgagtcagcgcgggacccacgtgggccccacatgtcagctggccacgtcatcactctctcccctcctctccctttctcctctctctcactcttctgtttgggtaggcagctggggaggacgtcggtgggttgctgccttcggtggggcgaggagggagaggacgagggcgtcggcggccggcgacgggcgacacgacgacggcggctggcgactggcgacgcgccgccgccattgttctcgtccgccattgcagaagccacaggcac

SEQ ID NO: 75407 - DNA, 270 bp, Oryza sativa
  Clone ID: PAT_MRT4530_754C.1
atggagggaatggagcgcgatgcttgccgccggaatgggagactcgacggtgtcgtggccctatggacaatacagaagaagcagaactgcggcaagaacaacgagaaggcagtgaagaggaaagcacctagtcctgattccggcagcaatgaaggtaatacatcggcggaggagcagaacaaaaactccaccggtgttaagaagggcggcaaggagagaaaggggaagaagaagaagaagaagaagaagaaaggcaacaatcctccatag

SEQ ID NO: 75408 - DNA, 245 bp, Oryza sativa
  Clone ID: PAT_MRT4530_75500C.1
atgggcaaaatgaaagcaaaaactcttgtgagctgtatattgagaaattgtaacacattattgagagtttgaccagattcagaaccaggtgcagcataacactgagggaacacattcctttgttaagggaattacctcaccatggccgaccaaaaacagaatgtactcctcacccaatgccgtgttggtaacattctggagaacatactctgctaaatgacagctagaaataggaggtatatacg

SEQ ID NO: 75409 - DNA, 767 bp, Oryza sativa
  Clone ID: PAT_MRT4530_75501C.1
gctaataccctctatccgatgccctactgatacttcgagaagccacccctgactaccgagttccttacaacagcctgtcatgacccatacaaccggggctaaatacggagaaataccctccccaggaaattaacttaggattatatataggcgcggaggaatacctttactgagctgtcaccatcagcggcctacctctcatccgcaatatataaccccaaataatgatatcccgtaatctagacaccacgtctaaactaccagatactactctaatattatcgtcatgacatagagtaattgcataagcaaacactatacccgcaccaaagcatctcccagataagctagccgtacattcaatataacaagaacataatgtaaagtaggtactcatatactcagaaagtatttcaataccagaaatgtatatagaagagtattataataaaagtacaaagcttacaaaagaggaaagaaaagctactagagccagacccgaactcttccgaagacttccggactcctgattcctattctaattctattccaccagctagatactactaaactaaacttgagaggaatgagagagctcttgcttgaggtgtgtgttgaagtgaagagagtgagctccttatatagaggtaggtatgacggttgtggaaggggaattgtccgaagtgccctccaaccgtcattgggatgcaatcctggacgtccaagccaaaacctggacccaacggcgccgggattggttcagccga

SEQ ID NO: 75410 - DNA, 1369 bp, Oryza sativa
  unsure (1)..(1369): unsure at all n locations
  Clone ID: PAT_MRT4530_75502C.1
tcatggcccattaaacaggacagcctcgatcaaattatcagcccattagaagtaacgggccattcaacgtgtgactgatctaacttaactgatttcagcccagtttaacgtcctcaatgtttacacctgacgacgttaaactgggctgaaatcagttaagtttaacgtcgtcaggtgtaaacatcgcggaccccgcgggtggcaaccggccgggcaacgtgtgactgagctaacttaacttgatttcagcccagtttaacgtcgtcaggtgtaaacattgaggacacatcatatggcaagcaaatgggaaataaacgattctcaaactacaaaatctcaatcagtactcgcttcagcatcgaccatctcaatctgacttctacacatttcatcaggaaactgccttgagggaggaactcgctaagtaaaatgtcgatccatcctagtcagcatagtcaggttttgtacatcagtcgttctttctactacgagtaggcacgggaaagaggattgattaccaaaaggggagcaggagcgtcattctttggatgaagactggccatggctttgagggggctaagaagcacgaccttccaaaatcagctccttttgaatcaaccatagagggaaacagcatggtggtcatagttacaacaaatccagcttacagttgtctggttgggtgcaggttgggtgttctttggaacaggatcgcgtcataccacccttgagataacgcgcattgaagatccagaaaaagaaaacatgtacaatgttgatagctctgcttatcccaagatcaacattatgcagcattaaagctgcggaagctcctgtgggttctccattgatgcccttagtatcatgcccgccctccgcttccgctcatcctttacttcctccttcaagaaagacggatcctcccctcagattccaggggttttgaattcaacacagctgataacggcttcttatcaattccaatcttgaggtgcanccggtgccctctctttgggaacaatgctcttctgattctgattgttgtcccaacctggcccagtatcaatgtccatcatgtttgcagcctgaatcgctggtgcaaatgcgtcgaggacagagattttcctcctctgtggttgcatagcaacatcagacacctccttctccccaggtggcaatgcaggctcaaggaatggatttctcttgctcccagccacctgtatctccttccccttttccgcagtattctctgtaaccgctggcctaaatccatcagcacctgcaagtgccaaccgccgctgcaagctgagcagtgacttctcagccttcctccgctgccgcacctgctcaaccttgtccacctggcctt

SEQ ID NO: 75411 - DNA, 465 bp, Oryza sativa
  Clone ID: PAT_MRT4530_75503C.1
atgagtacctactttacattatgttcatgttatgctgaatatactgctagcttatctgggagatgctttggtgcgggtatagtctttgcttatgcaattactctatgtcatgacgatgatattagagtagtatctgatagtttaggcgtgatgtctagattacgggatatcattatttggggttatatattgcggatgagaggtgggccgctgatggtaacagctcagtacgggtattccttcgcgcctatatataatcctaagttaatttcctggggagggtattcctccgtatttagccccggttgtatggcatgacggactgtcataaggaactcggcattcaggggtggcttctcgaagtatcaggagggcatcggatagaggaactagtgatgcttgcaatgcatatatatcttagaataataaaattccactatattaggtatactaacctcttgcagg

SEQ ID NO: 75412 - DNA, 455 bp, Oryza sativa
  Clone ID: PAT_MRT4530_75504C.1
ctgatgcccagacctatctcgagctacctccactctaccgaccacacccagacttcccccgtcttcatcgctgcccgatgccctttccctaagatactgttaacagtaaaatttgcctgctttttgactgccaataagggtttcatcggggtttcagccgatgagttatttagatgttgcatcggcttacaaggattgcatccgaatggtttctactggactatattattgttatattatattatcaacagtcgattgcatttatattgttatttacatcaagtatcacattccacatcaaacacatagccgatagctcaaaaccctatcaatatcggctggatcaaactgattggcacgcccgcatctcatcaatctttagacctacactggagctaagcagatctcctaggccagtgtgtgtttttcgcatcaatagacacccgagccggccg

SEQ ID NO: 75413 - DNA, 459 bp, Oryza sativa
  Clone ID: PAT_MRT4530_75505C.1
atgaatgccaactttactttattttcaagttatactgattatactactagcttatctgggagatacataggtagaggtatagtgtttgcttatgcaattactatatgtcatgacaatgatattagagtagtatctgatagtttagacgtggtgtctagattactgggtatcattatttagggttatatgctgcggatgagaggtgggctgctgatggtgacagctcagtatgggtattcctccgcgcgtgtatatagtcctaagtaaatgtcctagggagggtactcctccatttttagccccggttgtatggtcatgacgggctttcataagaaactcggcagttaggggtggcttctcgaagtaccaggaggtcatcggatagagagtattagctacttccctagccaccgtcgggtcgccctcggccggctctgccgtgcgtgccgtgttcccctg

SEQ ID NO: 75414 - DNA, 414 bp, Oryza sativa
  Clone ID: PAT_MRT4530_75506C.1
atgaatgccaactttacattacgttcatgttatactgattatactgctagcttatctaggagatgcatcggtacaggtataatgttttcttatgcaattaatctatgtcatgacgatgatattagagtagtatatatagtttaggcgtggtgtctagattacgggatatcattatttggggttatatgctacggatgagaggtgggccgctgttggtgatagctcagtacgggtattcctccgcgcgtgtatatagtcctaagttaatttcctggggagggtactcctccgtatttagccccggttgtatgggcatgacgggctgtcgtaaagaactcggcagtcaggggtggcttctcgaagtaccagaagggcatcggatatatgaacgtggcagctaccgaactcatctgt

SEQ ID NO: 75415 - DNA, 256 bp, Oryza sativa
  Clone ID: PAT_MRT4530_75507C.1
aacaagcagtctccaatgctaccaaagatcgagacgtggggcctcttctgctctgcgcaccacatgggtaactgtcggatgggcgccacagcgggcgacggcgccgtcgacgcccgcggcgagagctgggaggcagggcggttgtacgtgtgcaacagcagcgtgctacccactgcggtgggcgtcaacgccatgaacaccatacagtccgtgcgcgtattgcgtcgccaatggcatcgctgactccctgtccgac

SEQ ID NO: 75416 - DNA, 427 bp, Oryza sativa
  Clone ID: PAT_MRT4530_75508C.1
atgagtacctactttacattatgttcatgttatactgaatatacggctagcttatctttgagatgctttgctgcgggtgtagtgtttgcttatgcaattactctatgtcatgacgatgatattagagtagtatctggtagtttagacgtggtgtctagattacgggattacattatttggggttatatattgcggatgagaggtcggccgctgatggtgacagctcagtacgggtattcctccgcgccggtatataatcctaagttaattccctggggagggtattcctccgtatttagccccggttgtatgctcatgacgggctgtcgtaaggaactcggcaatcaggggtggcttctcgaagtaccaggagggcatcggatagaggacaaatacaagcacaactcagtcattttttctgcattct

SEQ ID NO: 75417 - DNA, 1066 bp, Oryza sativa
  Clone ID: PAT_MRT4530_75509C.1
gagcacgaggaaagaaacagcgcctccccacatcgccgcgcccgcgcctccatcgcctcccgcctcccgcctccccacctcgccgcgccggcgcccccatcgtcaccgtcgaccgtccgccatcgccgccctcctctctctcgcactcaccccgtcacccgacgccgccctcatcggccttcccctactcgttccactgccgaaaccctagacccgcaccaccctcgccctcgcgaaatcctcctcgccgccatcgttctccatcgccataccaccgtcgcgccgccacgccttgctccgctgatgccgccaaatcaccgtcgcccggctcgtcggtctcctccgcaccgttcccgatctccgccgacaaaacatcgtcggactcctcgccggttccttctcgccaccaccgttcgccgccgccagaccgccgtcgcgctgccacgatctgcggagcccagcctccatcggctgggtcggcgccagatcgacaggagccaccggcagctccacttgcgccgtcatcgggaaccgtgaaacgacctccatgggctgcgcctgcgccagattgacgggagccgccggccgctccacttgcgacgtcgtcgggagccgtcgaccgacctcctccatgggctacgcagccgccgaatcgatgggagccgccggccgctccacctgcatcgtcgccgggagctgtcgaccgacctcctccatgggctgcgcagccgccgaatcgacaggagccgccgaccgctccacctgcatcatcaccgggagccgtcgactgacctccgtcggctgctaacttgccatatttgttcttcagatagcttaatatgtaagatgctaagaaacaactacaatcagagacctcttgtgcccatatcctgttgtttccattcgacgtcctcagtaactcctcatcatattttttaatcttgctctgtaggacagggctaatcctggtgataataaggttacggatggcgcccacgtttgctgcctggccatcactgacgccaccaccaccgactgctgccgaatcgccctcggctgccgccat

SEQ ID NO: 75418 - DNA, 382 bp, Oryza sativa
  Clone ID: PAT_MRT4530_7550C.1
gactacggtaatggagggggaggaggagggggaggaggcggttagcattgcgaaggaggtggttgtttacgtggagggaggggggctcgggtttcattaattgtggactctagaatccctggaggacgcccttcccataaagcaagccttggttcggatttactgctttgcttaaacattctatgtgattttcgtatgatttgttttttttaggctaccaaaaaatatgtttcgaaatggttaactaccaccattaaggtgctgaaatatcttagacgggtgaaaaagaaatggtttactactattcaaaaaaagaccaaatcattagaacagatcttacatgttacgctagatgaattatttttacataaaacaaagcaat

SEQ ID NO: 75419 - DNA, 251 bp, Oryza sativa
  Clone ID: PAT_MRT4530_75510C.1
gctgttccatccccgtcctcctagccagtgcccattccccacctgacctgcgcatcgtcgggacgcaggcggcgccggcagtgtcggccccgaccacgccggcgccggcggaggcagtttcggcgctggcgacggtgttaaggaccgcgacgacgacggtggccgatggagctgtcatattggtccacaccttcaagatcacaagcatctggggtaactcaaacaagcccaataacaaggagcagggctag

SEQ ID NO: 75420 - DNA, 309 bp, Oryza sativa
  Clone ID: PAT_MRT4530_75511C.1
gctatgggtagtagaagggtaaatggttggtatggagttcggatagcaagctgattgaggtaggataaatattagctaggggaacagctaggatcacacagagcccaatagctaactgtgcagcgtgctgtggaggtcgagggaatagtgtagctccgaccactataggcatcgaggcgtggggtgccagtagcagcacttcgaccttaggtttggttttgccgggctttacaaccaacggcctgatgtcggggatagtaaaccgcgagcgtccccatggaaggtgtaaagttccaactggcggctttt

SEQ ID NO: 75421 - DNA, 240 bp, Oryza sativa
  Clone ID: PAT_MRT4530_75512C.1
ggtccagtatgataaataaataaataaataaataaataaataaataaagctgtgtatgagcgtgtgtgtgctcatgcatgtgtgtgttcacggttagcttttttttttttaaattcttgcatcaataaaaagtactacggagtacgtatgtactctttgaacaatgcgttatacgacaaatgagatgtgtgtcctcaatcgttttatctgaaaagatatcagcaaaaaaaaaaaaaaaaa

SEQ ID NO: 75422 - DNA, 270 bp, Oryza sativa
  Clone ID: PAT_MRT4530_75513C.1
gtctcatgagacgcactcctcacgcacgggagcaggagcgatgggttctcctcctgcccatcgcctgctcctcctcctcgcgggcgacggcgtgctccaccgctcggcggcggcggcggagggggtcatacggctgccgagggggagggcgggtgccgtttaccaagaaccacgtcaacttggaccaggcaaaggcacttatggatgcttaggttaagagggatgagacaaagcgggtccgcatggaatgtgcggttcaccctagacgca

SEQ ID NO: 75423 - DNA, 343 bp, Oryza sativa
  Clone ID: PAT_MRT4530_75514C.1
cccacgcgtccgcccacgcgtacggccatgtggtctcatccaattgcaagggatgagatatggagtggtaagtattctcactttaggtctgattacacaattgtgaagttaatgagacagtccttgatactatattactagtcaatttttatatccttgcttgcagtatgaactatgaagttattatgaatcacagcaatacaacataattgaatttttgtattcatcataatgtggtgaaaagttcaaagtaaaactacactgtgggtaataccaccaaaaagaaaatcaaattcacaatgttgcaaactacaggttcccatctgctcatctactggaggac

SEQ ID NO: 75424 - DNA, 1176 bp, Oryza sativa
  Clone ID: PAT_MRT4530_75515C.1
atgcggccgtacagaggccgcggcggaggcggccagagatgcgacactgaagcacaatcttgtgaacccgcggtgactccagcgtcgtcgtcgtcgtggtcctacgcggtggagccatccaaggccagagacgacgatggtgagctcccggaggccgggcgcatccacctccgttgctgtcatgtcgtaggaatgatgaagccagagctcctcaagcgtagtggcggcggcgtcgagccacaggacatcggtgagagcgcggaaggcgctgccggtggcattcaggattccgaggaccgcgctgccaagccagaggcgcatcgtgtgaaaccccccaagcaagggaggacggcggggcacgccggcaagcccctcagactcctcatctccatgggaagttcgagcgtgaacgtccccgtgacgcagccaccgccgcctctgcatccagcgccgctgcggcctccgcatccagcaccgccgcatcccactccaccggctctctatcccacgacaacgacgacgacgctggagccgccgcgggctgccgtgctcgctgggagagggagagagagagacggcgctagcccgacccaccaggctgaacaaaagaagcatggggcatgggggttgccccgcggtttatctgccaccgccgagtccaccgtcgccaccgcccgtatccatcatcgctaccccttcgagtctgggcaccccttctcccgaagttatggggctagtttaatagaagcccaaagagaacccctttttgactctgtacccttgattccaccgccgctgtccgcacccaccatcactccagtgttcgccgctgccacgtccctcctatgtccatcggcggcttgccagccggagtttggccaacggcccccactcctcatcggagtcggagtctggtcgaacccgtatgtcattccccactctgttcgggagtgtgaggctcgaagaaccgtgaggaacgacggggaaggtgctgtggaggccgagggcaacgtgctgcaaaggctctggtcgccgagggtggtggcggcggccaccaaccctagtccggcgcccatcatggtgatggtggcgactcctcatcgagcgacagatgagatggcaaagacggtgagcacgatcgtggcgaggaaggccgagaacggcatcgatcattga

SEQ ID NO: 75425 - DNA, 245 bp, Oryza sativa
  Clone ID: PAT_MRT4530_75516C.1
gctttataccctactctgacccaaatgcttccagtcacctacaccgtcctacccacctcgctcccttacacactcccgcgctgcacccgcgccgacaccttacgcacacggattcttcacgggtccagtggtgacgggcgtagtagttcagggcgttcagagtgattacgggccactgactgacgatgtggctaggctggaaacatccccatggcaggtgcgttagtaagatgggaaagccgcaa

SEQ ID NO: 75426 - DNA, 573 bp, Oryza sativa
  Clone ID: PAT_MRT4530_75517C.1
atgaggaacggcgcgaatggtggcgcgaaggccggggtggcgcgctgcagcggctctggcatgatgggtgccctgacggccggcaaggcaggggctgtggtgacggtcgccgccaccaatccgacgccgctccccaactcccacgccacaatgtttcggtcggatcagaaccctagccacacacacgggggagccaccactcttcactccgtcatcgtctcgctgtcacaccagagcctttgcagcacgttgccctcggcctccacagcaccttccccgtcgttcctcacggttcttcgagcctcacactcccgaacagagtggggaatgacatacgggttcgaccagactccgactccgatgaggagtgggggccgttggccaaactccggctggcaagccgccgatggacataggagggacgtggcagcggcgaacactggagtgatggtgggtgcggacagcggcggtggaatcaaggatagggtcaggggcatcagacctgcttttgacatatctatcctatccttatttgggtaccatatgcacctctttgggcttctattaaactag

SEQ ID NO: 75427 - DNA, 453 bp, Oryza sativa
  Clone ID: PAT_MRT4530_75518C.1
ttgtgttatacaggttcaggggttcttataaaagaagtaataccctactcttgtccggggatgaatccgccgagtgtattattgattgtatgattcgggaaaaatcagcatatgcccctagaggcgcccggaccccccttatatatgggaaggagtccggattacaaaagataatctatattcctaacggaatatgaagatagaggtaaaatacagccataaccgactaagtctcagggtgtttccttgatacacaagttaagaaacaaacccgagatacagataagatattctatctacattaggtatcctgtacccagttcgaataccgtcgccgtgtagatatgggatacccataatctccacagtcgccgtctctctcgtcgccaccgtcgccggcttcacgagagaaaagccatggctgcagcctcgccatcagcgcgcgccaaggtg

SEQ ID NO: 75428 - DNA, 2243 bp, Oryza sativa
  Clone ID: PAT_MRT4530_75519C.1
tcacccgcacgacgacggcacgacgcgacgcgttgcccgagctgacggcttgacgacgcctccgtccccgtccggcaccaacccatcccaacccaacgctccccttttccactgaccaattgatagcccaacctcacctctcctctcctcctcccccctcctctcctcctcgcctccgcaccagcagtttcgtgcaccgcacttcacccacctacctcccccaacctccccatcaaaaactagtagtagcagtatccacccatccacgcacgcgaccgagcgcgatcgattcgaggcggcggcggcggaggaggaggagggggagtagatccggcgggcggcagcgatgatgaagtcgctgctgccgcagagccagctgcggcggtcggcggcggcggcttcggcggcgcggtcttcgggaggaggcgcggggtcgggcggcgccgatggggccggctccgacggcggcgcgggcgggcgtgcccccgccacgtccacgttctggttcctcctccacgcgctctgctgcctcgtctcgctcttcctcgggttccgcttctccaggctcctcttcttcctgctcttctccaccaccgcgctctactcctccacctcgtcgtcctcctcctccgccgtgctccgcgccacgacgacgacgacgaccaccaccacaaccaccacgaccaccaccaacaccttcaccctctccttccaagccaacccaaaccctcccccatctaacctctccaaccacactgccctggacgcggcgggggcggccgggcacacgcagagccacgtggtggtggggcggcatgggatacggatccggccatggccgcaccctgaccccgtcgaggtgatgcgggcgcaccggatcatggagcgcgtgcaggaggagcagcggaggtggtatggcgtcaaggagccgcgccatgtcctggtcgtgacgcccacctactcccgcgcgttccaggcgctccacctcaccggcctcctccactccctccgcaacgtgccctacccgctcacctggatcgtggtcgaggcaggcggcaccaccaacgccaccgcgtccctccttgcacgctccgaccttaccatcgttcacatccccttccctgaccgcatgcctcatgactgggctgaccgtcacgcaaccgagaatcgtatgcgcctccacgcactgcgggtgatccgggaaaggaagatggatggtgtgattgtgtttgcggatgacagcaatgttcatagcttggagctgtttgatgaggtgcagaaggtccagtggatgggtgcggtgtctgtgggtatactcgcacatactggaacagcagaccagccacgacttagtgaagaggacaagcagaatatgcctcttccagttcaaggccctgcctgcaactcttctgggcacctagccgggtggcacacatttaactcattgccttttgccgggaaaactgccactgttgttggagaggcagcaccggttctaccaaggggtttggagtgggctggttttgtgttgaactctaggattctttggaaagaggcggagggaaaacctgattgggtgaaggatctggatgctgtgggtgagaacggcgaggaaatcgagaacccccttattttgttgaatgatccatcctccgttgagccattggggaactgtgggaagaagatcctcttgtggtggctccgtgttgaagcgcgagctgacagcaaatttcctcaggggtgggtaattgagccacctttggacatagttgttcccgccaagcgcaccccatggcctgaaactaccgctgagctttcggctgaattagtagattccaaacaagatcaggagggtaggcggttgtcaagaaccgacagatcatctcggtcccgaagcaccacaaagcggaaggagaactgaagcaaaataaacacatcttgtaatgtatatcttacatctgcacaaactacaataggaaccatgtctggttaatctggtgggtattatgtttattttttttcctgatgttttgctaatgtggcagcgcttcatactcgtatgtcttctgtagaagactgtttttttattggtagctgtattatctatgttgtaatatacagtgcaatctgaatcaaggaaatggaagctggatcctggatatcataaaaaaaaaaaaaaaaaaaaaaaaaaaaatcaaaaaaaaaaaaaaaaaaaaaaaaaaaaaaaaaaaaaaaaaaaaaaa

SEQ ID NO: 75429 - DNA, 446 bp, Oryza sativa
  Clone ID: PAT_MRT4530_7551C.1
tcgcccacgcgttcgtccactcgtccgcttttggtgcaatcacatgatgttcaccgactgttgccttatgcttagaatcatgaaatgctcatatgcaatcggacttgcccctagagcatgggaaaagtccaataacatgaactagattggttattgcccactgttgaaagtaaatcgtagatattaatgaactgtaggtctttttctcaaaaccattatttaatagtttttctggatcaccactatgatttgtactatatggttcgctattttttaattttaaaattaatcatttttattactctgtgattttattctagctacatctcttattgattctctcttttatctctttcatttctcttttttcattcttcctttttttttcttacttctcttgtattcttctttttacttcctatctttttttcttttttctcatcttc

SEQ ID NO: 75430 - DNA, 1262 bp, Oryza sativa
  Clone ID: PAT_MRT4530_75520C.1
gtggatatcgtgtgggtaaagctgggcagacgctgcagagtcgatggatctaattgtgatagtgaagaaaagcttagttatgatcaattagaacatattgctttcaaatttgctgagaaacttaaaacatgttctaatatgcttgatgagagggattgcactattgagattctgaatgctgacattgatagattaaaatcttcgattcctaatgatgatgattgcaaatcttgtgaagttttattttctgaaattaatgcattgcgagatgtcaattctattaattgcaagaaattggaatatgaaattgaaaaatctaaaaaaaaatggagtcttcttttggtcttggatttgctttgcatgcttgtgttgttgatgaattggttttgacaaagaacattttgacaaaatacaaagttactttttctgcaagttctttgttcaatgttttaggtgcaaaaaggattaaacaaaacaaagatgttttggtttctcaaaattgttcaaagtgttttttgaatgagatgaaattgaaagatgttttaggactggttgagcatatggaaaatattgtgaaatctgatgaagtgcttgttctttttgtggaaaagatgcacatttggttagtttttgttttcgacttgcccgtaaacagaaaaaggaaagagaaattgcttttgcaaaacgacgatggcaaaaatcgggttttggttcgaggagcacggttagaccgacactgactaagatgccaggcccggtcagaccgcagggacaacggtggtcaaaccggcttccgggcgattttgcacgtaattcaaatcggacttttgtgaaacgacaaggtaagttttcagaaaataatgagtgccgaatccttggaaacagtcttgacgacaaggacatacccgacgtgacttgaggtcagccttggtcaatggtgaggaccgggactatgctcagagaggagtagaggtctagtgcggtcggaataccatatgagaaggtgactagagtcaggattcttagaggtcgatcaactttggtcaacggtggggatcaggactaaactcagggaggagttgaggtccagacggtcaaggataccgaataacgaagttggatacgatatagtatacggtggatggacatcgtgtgggagaaatcttcgtaataggcttcacgaggtgtgcatgcaagtgtcggtgttcgcgaaggaaattggttgaggaaattcggagtatatggttgctacagtactcatg

SEQ ID NO: 75431 - DNA, 252 bp, Oryza sativa
  Clone ID: PAT_MRT4530_75521C.1
atgaccgaaaaaccgaagaccgagatcgaaatttttggtcagaccgaatgctcgcccctaacaggaagggagcgccgggccttctatggctgccgccgccctcccctcttccggtcagatctgagagggagggaaggggacggtggtatcgcctgcatcgattttaggcatgatcttaagaggtctgtctataaaaatgactatatttttgcaggtggacgtcttaagatcccaccagtaaaaatcaactag

SEQ ID NO: 75432 - DNA, 2799 bp, Oryza sativa
  Clone ID: PAT_MRT4530_75522C.1
cctctcaaataattattgatgctataactgtcggtattctcgggcctgtgtacctactgatgcggacatcactacctcggatacacacaacaatcctccaacggtcattcaaggaccgataacaagagctcgaacaatggaggggacaaggagacacttggagaaggacttagagccatggaggatcatctgggacgtccaagtcaaggtggaggcccaaaccaagtcgacgtcgggtgcaattcggagtccaggaccagtctgcactaaaacgggcgcccagcattactatctgtcattggattgtgtaccactcatatacatatatttggccttcctagctccacatattacttctgcacagcacaggttcttgatccctgcaatcgctgactacgccttctaggtatcctttgctttgctgactcaaaaggacatcacggaggccgttgcaaagtctgttcaagatgccttcactaaaatcggtttcctgaaccacatggagaggttggacaagcggatatccacgctatctgatcaggtcgccgcgttggagacaccttccaatgaggaagtggtgagtggtgacgacgatgctcatcctgaagacacggtgtatgattccagtggctatattgatgcactggctacaaggcaagcatggctacgacatcgcctacgcacaaaccgcacaggtatgggtggcactcgccaccaacaaggtaataataataatcatgtgcccgatgatccttatgctaaggttaagtttaaaataccatctttttcgggatattatgatgctgagaaataccttgattgggagatgacggtagaacaaaagtttaatgcccaccttgtacccgagcaacatagagttagacaagccagtagtgagttcaaggattttgctattatgtggtgggctgggttatctgatgagggggtactacctactgcttgggaagaacttaaggtagctatgcgcgataggtttgttcctccatcttatcatagagatttacgcaagaaactgatgcgtttggaacaaggggataaatctgtacaggattactatggtgagctacaaaagggtttgtttcgatttgttatgcttgcagagaaggaattacaggggtgcgaccatcagggcaagagcaaggcaagcacatacactccgcgcacgacgccatctgcgggactgcccaaggccatttcgtttcgggcatccttccagccagcgggcaagcgaccagcagcattcggagcttctgcggcaccaaaaccatctccaccaccacgaccagcagagtcaggtaaaggatcctcgcaggtacccgccaagagtgcctcatatgtcgcctcgacgggacgcattcagtgccaccgttgttaagggtttgggcatgtgcagaaagattgccctagtcaacgggcctatgttgctacagaagatggctacatcaccacctccgacgtggaagaggaagaggaggaagaagaagttgaggatgaggatggcgaagctttggtcgtgatgacacaacggactacagaaccatcattgtgcagcgggtgctcagcacgcagattttctttgtcatcaacaaccgtcgtgcacgtgtgatcattgatggaggaagctgcaacaacttcgtggttaaacgattccggaagagcaaagattctgttgattgcgatgtggttcctatgcaagcttgttcacttttgttgggccgtccttgggaacatgataatgatgcttcacaccatgcaagtggctaaaactgtttttccacctaaaaaggataatctttcacctagttctaaggctaagggaattaagtcgaagggtggtgttatgcttgcaacgaaatgtgacattgctgaaaattcagatgatgatatgtgctatttcttgatatgcaaacaagccttggtttctttagatgatattgctagttcgatacatcttgttgttactaaccttttacaggagtatgaggatgtctttccagccgagatacccccaggattgccaaaccgtgctgcttatcgaactaacctagaggagactaaggaaattcagcggcaagttcaagaccttttagaccacgggtatgtacgtcaaagacttagtccctgtgcagttcctgtaattttggttcctaagaaagatggttcttggcgaatgtgtgttaattgtagagccattaataatattactatctgatatcgtcatcctattcctaggttagatgacatgcttgatgagttgtgtggctctataattttcacaaagattgacttgcgtagtggctatcaccaaattagaatgaaacttggagatgaatggaaaacagcttttaaaactaaatttgggttgtatgagtggttagtaatgccttttggtttgattaatgcacctagtactttcatgcgcttaatgaatgaggttttaaggccttttattggacgatttgtggtagtgtactttgatgacatattgatttacagcaagtctttgaatgaacacatggatcatttacgtgctgtttttaatgctctacgcgatgcacgtttgtttgctacccttgaaaagtgcatcttttgcacggaacgagtctcctttcttggatatgttgttactccacaggggaattgaggtggatgagtcgaaaattgaagccataaggagttggccggttcccgaaaccatcacacaggtgaggagctttcttgctctgtgtgatcctagccgctccgccgccactcacggttgtcggagtaacacttccg

SEQ ID NO: 75433 - DNA, 384 bp, Oryza sativa
  Clone ID: PAT_MRT4530_75523C.1
atggatccacacactgtgtggtcactggtggtgaatccggctatcctacgatcgtgggcgacagatccaaccatcccgcagtcactggcgatgaatctagacgccagcgatagatccgcctgccccacggctgtcgatggggcatctgtccgtctggcggttgccaacgatgaatccgctcatcctataatcgttgttgaccggaaccgagtgccacaaggttggcagcgctggatccgcccaccccgttcttgtgcccgtgccaaagttggcacatcgctcccgtgctcatgcgacggagttgtcgacgctgctaccgccttagccacctccagagcgtccgcctttgctggtacacgatgtggaggagatgaggtggagtag

SEQ ID NO: 75434 - DNA, 860 bp, Oryza sativa
  Clone ID: PAT_MRT4530_75524C.1
atgactgaaaagtatagaattgctggtagtaaaggtaggcaagaggttaatcttgaaccgggtgatttagtttggttgcacttgcgaaaggatagatttccggaattgagaaagtctaagttgatgcctcgtgctgatggcccttttaaaattgttaagattaatgataatgcatataaacttgagttgcctcccgagtttggggttagtcccacgtttaacatttcagatttgaagccatacttgggagaagaggatgagcttgagtcgaggacgacttcaattgaagagggggaggatgatgcggacatcactacctcggatacacacaacaatcctccaacggtcattcaaggaccgataacaagagctctaacaatggaggggacaagcagacacttggagaaggacttagacccatggaggaccatccgggacgtccaagtcaaggtggaggcccaaaccaagtcgacgtcaggtgcaattcggagtccaggaccagtctgcactaaaacatgcgcccaggtcgcatacgtgctcggattggggcgttctttatatggatggaaagctaagaagatatcatttccaatggttttggtcccacgttcaaattatttccgagtcaatgggaattgaccgaacaatttgatggccagaatctgtcccggtattacgtcaccgtatttgggcctttggcccgttttgacacaggtgataaccagaggagacgtagtgctgcgattgcggggctcaagagcgtgcgcgttcaagaagcaagatcgatttgtgtcgcgactccgcccaaatcgttgtttatcagaacctttcgggagatcgggaaccctagtgcacatgta

SEQ ID NO: 75435 - DNA, 630 bp, Oryza sativa
  Clone ID: PAT_MRT4530_75525C.1
atgcatctcacaaaccacaaagaatcacaaataacaaagaggataacaaagagagaaggagggggagagatagatccgccgatcgccgacgccatcaccccatctccacgccgaccgctgacgcatgccgctgctccgccgggcccccatgcatgcctcccctccgccggatttgcaaggggagggaggggaggggtcacgcgtcgccagatccaccgccccctctgccggatctgcaaggggagggaggggaggggccgcgtgccaccggatctgcaaggggaaggaggggaggggcgcgcaccgttggatccaccacccccatgcctcccctctgctggatcttcaaggggaggggagggaggggaggaggggccgccgtggtcgcccgccgccgcttgctcccgcagtcgagggagagggaggggtcgcgcgccggccgcatgttgtcgcgccgccggccggccaagagagaggggaagagaggagaggagagtgggaggagaggaggagaggagtggagtgggagagagggaggtggaggagcgggcggagtgggagatggtgcgcgcgggcgcggttaaaagcggtgggcccgtgcgggtgaaaattcgtgtgcggttggcttag

SEQ ID NO: 75436 - DNA, 3493 bp, Oryza sativa
  Clone ID: PAT_MRT4530_75526C.1
gggtgtcggggctggcttaactatgcggcatcagagcagattgtactgagacttggcttgactacatgtacacatccacatccttaccatattcagtggttaaacgattccggaagagcaaaggtaacacaggtttgtagggtttcgttttccattggctcatatgcagattctgttgattgcgatgtggttcctatgcaagcttgttcacttttgctggggcgtctttgggaacatgataatgatgctacacatcatggtaggagtaataaatacacttttatgcataatgggaagaaaattactttgctacctttgacccctgctgaaattgtagaagctgataaagaacgagctgctagtttgaaagttgatgaatctgaaaatcagcaatcacctagttttaaggttgagggaattaagttgaagggtggtgttatgcttgcaacgaaatgtgacattggtgatatttcaaatgatgatatgtgctatttcttgatatgcaaaccagccttggtttctttagatgatattgctagttcgatacctcctgttgttactaaccttttgcaggagtatgaggatgtctttccagctgagatacccccaggattgccacccatgagagggatagagcatcaaattgatttgattccaggagcatcattgccaaaccgtgctgcttatcgaaccaacccagatgagactaaggaaattcagtggcaagttcaagacctttaggaccgcgggtatgtacgtcaaagccttagtccctgtccagttcctgtaattttggttcctaagaaagatggttcttggcgaatgtgtgttgattgtagagccattaataatattactatccgatattgtcatcctattcctaggttagacgacatgcttgatgagttgtgtggctatattattttcacaaagattgacttgcgtagtggctatcaccaaattagaatgaaacttggagatgaatggaaaacagcttttaaaactaaatttggtttgtatgagtggttagtaatgccttttggtttgactaatgcacctagtactttcatgagcttaatgaatgaggttttaaggccttttatggacgatttgtggtagtgactttgatgacatattgatttacagcaagtctttggatgaacacatggatcatttacgtgctgtttttaatgctctacgcgatgcacgtttgtttgctaaccttgaaaagtgcatcttttgcatggaacgagtctcttttcttggatatgttgttactccacagggaattgaggtggatgagtcgaaaattgaagccatcaggagttggtcggttccccaaaccatcacacaggtgaggagctttcttggtcttgcaggattctaccaccgtttcgtcaaagattttagtacttttgctgcaccattgaacgagttgacgaagaaaggcgtggtcttccattggggaaagacacaggagaagtcctttgacattttgaaggagaagcttacgcatgcacctttgctacaacttccaaactttggtaagacttttgagttagaatgtgatgctactggagttggcattggaggtgtgttgatgcaagatggtaagcctgttgcatactttagcgagaagttgcatggtcctattttgaattattccacatatgataaggaattgtatgctcttgtacgttccttagaaacgtggcgtcattatttttggcctaaagaatttgttattcactccgatcacgaatcgcttcaatatcttcgctctcaaaataatttgaatcgtaaacatgcaaaatgggttgaatttattgaatcttttccttatgttatcaaacacaagaaagggaaagataatgtgattgcagatgctttgtctaggcgctatactttcttatcccaacttgaatgtcggatttttggacttgaatcaattaaagaacaatatgcacttgatcctgattttaatgaagtgatgataaattgtaaagagggacgtacttggaacaaatttgtgatcaatggtgggtttgtttatagagctaaccgtctatgcattccagttggttccgttcgtcttttgttgatacaggaagcgcatggaggagagttgatgggacattttggagctaagaagacggaagatgttttggccatgtatttcttttggccaaggatgagaaaggatgttgacaggttcatggcacgttgcaccacttgtcagaaagctaagtctcatttgaatccacatggtttgtatatgcctcttcctgtaccttctattccttgggcagatatttctatggactttgttttgggattgtctagaactaagagggggagggatagtatttttgtagtggtggatcatttttctaagatggcacatttcataccatgtcataaaagtgatgatgctgttcatattgctgatctatttttccatgagattgttcgcttgcatggtatgccttctattgtttcagatcgtgatgcaaaattcttaagtcatttctggcgcacgctatggaacaagttgggtacaaagctattgttttctacaacatgtcacccacaaacagatggacaaacggaggtagtcaaccgcactttaggtaccatgttgagggctattttgaagaaaaatttgaagatgtgggaagaatgtttgcctcatatggagtttgcatacaatcgggcaacacattctactaccaaggtaagttcttttcaggtagtgtatggtttcaaccctcgtgctccaattgatatgttgcctttacctactagtgagagggttcataatgatgctaaggcacgcgctgaatttattttgaaaatgcatgagtcaaccaagttcaacattgaaaagatgactgaaaagtatagaattgctggtagtaaaagtaggcaagaggttaagcttgaaccgggtgatttagtttggttgcacttgagaaatgatagatttccggaattgagaaagtctaagttgatgcctcgtgctgatggcccttttaaaattgttgagaagattaatgataatgcatataaacttgagttgcctcccgagtttggggttagtcccacgtttaacatttcagatttgaagccatacttgggagaagagtatgagcttgagtcgaggacgacatcaattcaagagggggaggatgatgcggacatcactacctcggatacacacaacaatcctccaatggtcattcaaggaccgataacaagagctcgtgcgcgacaattaaatttagaggggacaaagagacacttggagaaggacttagagtcatggaggaccatcggggacgtccaagtcaaggtggaggcccaaaccaagtcgacgtcgggtgcaattcggagtccaggaccagtctgcactaaaacgggcgcccaggtcgcatacgtgctcagattggggcgttctttatatggatggaaagctaagaagatgtatgcctga

SEQ ID NO: 75437 - DNA, 5154 bp, Oryza sativa
  Clone ID: PAT_MRT4530_75527C.1
atggcgcatcagatgggctggcagaggacgacatcgctgcgggcggagatctcgctgaagatggagtcacttggaaatcgcttttgcgccggaggaatcgccggagagagagaaggagttcttgctttcgggttgagctgcatcggtttcgatcttcaacaagaggtaaaacttgttatggcagcttgcgttctcaggattagtgcttccatctttatgacactgtgcttccagtgtatctttcgcttttccatatacacctaggaagccaggaaggtttatgcaaaggttctcagtgaggtgcatcacgtcgattgcatggcagacgtccaagaattcccaatagggtaactcccaaaatatagagttctttttccagatcgttgcgtgaccatcttcgctctctataggctggcttccaggcctctttccaaacactactttaagatctttaaccatagcaaacactgttttcccgctgcgatgtttaggcttcgtacggtggtccatcttatgttcaaagtgcttgcctttcttccgtaccgggtggtttgcagcaaggaatcgacgatgacccatgtacacaaccttcctacagtgcttaagatacgtactttctgtttcatccatacagtgagtgcaagtcttgtaacccttgttggctgccttgaaaggttgcttagcaggaattctcttctttgttggctgcccgtcaacttcacctggatcctctcgtctaatcttgtaacgtagtgctttacaaacagggcatgcttctaagttctcgtactcctcaccgcgatataggatacaatcattcggacatgcgtgaatcttctgaacttccagttttttatagtcctcctttgcatcctgcaacatccgaccaagatcatccgctgcgtcattatcgccagcatccctatccacctcacccgtttgatttccttcaaatccagcgtactgagcccagtcgggaatgttctcgtcctccgcttcatcttcttccatttcaaccccttgctcaccgtgggatatccaacaattatagcttggcatgaaccacttattgcatggacaacaaataaaaccgttacgcttgttagcttcggccactctcaaaaaataatgcacgcactcgataaattctttggacctccggtcagcgtacatccattgctgatccatctgagcgcccattttagtgcagactggtcctggactccgaattgcacccaacgtcgacttggtttgggcctcctccttgacttggacgtcctcgatgatcctccatagctctaagtccttctccaagtgtctccttgtcgcctctaaatttaattgtcgcgcacgagctcttgttatcggtccttgaatgaccgttgcaggattgttgtgtgtatccgagttagtgatgtccgcatcatcctccccatcttgaattgaagtcgtcctcgactcaagctcatcctcttctcccaagtatggcttcaaatctgaaatgttaaacgtgggactaaccctaaactcgggaggcaactcaagtttatatgcattatcaatcttctcaacaattttaaaaggaccatcggcacgaggcatcaacttagactttctcaattctggaaatctatcctttctcaagtgcaaccaaactaaatcacccggttcaagcttaacctcttgcctacctttactaccagcaattctatacttttcagtcatcttggtagtagaatgtgttgcccgattgtatgcaaactccacatgaggcaaacattcttcccacatcttcaaatttttcttcaaaatagccctcaacatggtacccaaagtgcggttgactacctctgtttgtccatctgtttgtgggtgacatattgtagaaaacaatagctttgtacccaacttgttccatagcgtgcgccagaaatgacttaagaattttgcatcacgatctgaaacaatagtagaaggcataccatgcaagcgaacaatctcatggaaaaacagatcagcaatatgaacaacatcatcacttttatgatatggtatgaaatgtgccatcttagaaaaacgatccactaccacaaaaatgctatccctccctctcttagttctctcaacatcctttctcatccttggccaaaagaaatgcatggccaaaacatcttccgtcttcttagctccaaaatgtcccatcaaccctcctccatgcgcttcaagagcatacaattccttatcatacgtggaataattcaaaacaggaccatgcaacttctcgctaaagtatgcaacaggcttaccatcttgcatcaacacacctccaatgccaactccactagcatcacattctaactcaaaagtcttaccaaagtttggaagttgtagcaatggtgcgtgtgtaagcttgtccttcaaagtgtcaaacgacttctcctgtgtctttccccaatggaagaccacccctttcttcgtcaactcgttcaatggtgcagcaaaggtactgaaatctttggcgaaacagcgatagaatcctgcaagaccaagaaagctcctcacctgtgtgatggtttggggaaccggccaactctttatggcttcaattttcgactcatccacctcaattccctgtggagtaaccacatatccaagaaaagagactcgttccgtgcaaaagatgcacttttcaaggttagcaaacaaacgtgcatcgcgtagagcattaaaaacagcacgtaaatgatccatgtgttcatccaaagacttgccgcggtccaaaaggtcttgaacttgccgctgaatttccttagtctcctctgggttggttcgataagcagcacggtttgacaatgatgcccctgggatcaaatcaatttgatgcgctatccctctcatgggtggcaatcctgggggtatctcagcactcttcaacttaattccctcaaccttagaactaggtgaaagcttatcctttttaggtggaaaaacagatttagccacttgctgattttcagattcatcaagtttcaaactagcagctcgctctttatcagcttctacaatttcagcaggggtcaaaggtagcaaaataattttcatggtgtgtagcatcattatcatgttcccaaggatggcccagcaaaagtgaacaagcttgcataggaaccacatcacaatcaacagaatctttgctcttccggaatcgtttaaccactgaatatggtaagggtgtggatgtgtacgtgtagtcaagccaagcttcttgaccaaatcagaactcaccaagttgttgcagctgcgtgctgagcacccgctgcacaatgatggtcctgtagtccattgtatcatcacgaccaaagacttcgccatcctcatcctcaacttcttattccccctcttcctcttccacgtcggaggtggtgatgtagccatcttctgtagcaacataggcccgttgactagggcaatctttctgcacatgcccaaacccttggcaacggtggcactgaatgcgtcctgtagaggcgatagatgaggcactcttggcgggtacttgcgaggaacctttacctgactccgctggtcgtggtggagatggttttggtgccgcagaagctccggatgtagctggtcgcttgctcgctggctgggaggacacccgaaaagagacggccttgggcagtcccacagatggcgtcttgcgcggagtgtatgtgcttgccttgctcttgccttgatggtcgcgcccctgtaattccttctctgcaagcatagcaaaccaaaacaactggttgacagagttaaattccttagaatcaacaatgtcctcaaactagaataaaaatgacaaatagcatcctcgaccccctccactatgccacagcgtctcacacccttttttagctcaccatagtaatcctgtacagatttatccccttgttccaaacgcatcagtttcttgcgtaaatctctatgataagatggaggaacaaacctatcgcgcatagctaccttaagttcttccccagtagtaggtagtaccccctcatcagataacccagcccaccacataatagcaaaatccttgaactcatgactggcttgtctaactctatgttgctcgggtacaaggtgggcattaaacttttgttctactgtcatctcccaatcaaggtatttctcagcatcataatatcccgaaaaagatggtattttaaacttaaccttagcacaaggatcatcgggcacacgattattattattaccttgttggtgatgagtgccacccatacctgtgtggtttgtgcataggcgacgtcgtagccgtgcttgccttgtagccggtgcatcgccactggaatcatacaccgtgtcttccggatgagcatcgtcgtcaccactcgccactggaatcatacaccgtgtctccaacgcggcgacccgatcagttagcgtggatatccgcttgtccaacctctccatgtggttcaggaagccgattttaatgaaggcatcttggacagactttgcaacggcctccgtgatgtccttttgagtattttcttggagagttcgtagttgctcttggctgacatagtcagcgaaattctggggactcttctcaccttcgttacttctagggaacaaagtcatagtaatccatttgtgcatgagcctaagtgtagggttatggatatcattcgtcctagatttcttgcaaattggagcaccagaaatgtcttcccaaaacctatttttctcgaacccataaattcctttctggagatcgattttacagaaatcgtgaaaaccaagaagtgtactcaatcctttccatgtaagtgtatattccttatggaaaaagcgaaaggaaattccatcttctatttctttcaaagtgcacagaaattgcaaagtaaacaaatgagaaccaggctcatctaccacagcaaatctctgccaaccaacagctttccaaatagcacaaaagccaacatctatacttatctttttcagcagctccggagagtactctcgcgtgtgagcatactcccggtcactcagcttgtagtaggcttgtctttcccgatcatcgacaaggtcaaggtcggcatcgttcaggatatgttgcggagcgtcggcatcctccat

SEQ ID NO: 75438 - DNA, 507 bp, Oryza sativa
  Clone ID: PAT_MRT4530_75528C.1
tgatggatggctaccgagttgataagagcatgcctaaatttgataagaagagcagagtggattatgtcctatgtataagtgggatgtacacccatgagaaggaattgaaggcacaagttaaagtcgatagggtcatcatggaaagaaatcccgggctattcttacttctgaattctttgttgccaagctcttgacgacttcaatgcgatcgataatcaattttttgaaggtaaatgtgcgggttgatttcaaagatcctgataggatacccttttgggaagagatgaagcttattactgattctctagagtcgcttcctttcagaagagacgaagcttagtaatggttctctaaagtcgcttcctttcctagagtacttgttaacgtgctctttgcatgctagagttagcaggagacaatttaaggtttagaaaacctcgcgcagtaaagatttgtattgctactactatactggttctcgcactgtttgcttattactatactaag

SEQ ID NO: 75439 - DNA, 168 bp, Oryza sativa
  Clone ID: PAT_MRT4530_75529C.1
atggcgagtaggcttcacgtcctccggattgtaggctatggtggtggtgctggcgctatgattcggtcatctaaacccctcaggggctcaggacagcctgagaatacaaccgacgacgcggacgaggaaacatcaacagcagcagcagcagcggaaccaatgaactaa

SEQ ID NO: 75440 - DNA, 216 bp, Oryza sativa
  Clone ID: PAT_MRT4530_7552C.1
atgtcgttggcgccatgtttcaacatgacggcgccaatgatattggcgccatcctctccgccctcgggtgaaagtttattcacaaatgtgaagtgggacggcgccaacgacattggcaccgaggaccaatttgaggatggcgccgacgtcattgacaccgtcatgttggaccacggtgccaacgacattggtgccgtggaaaggatcatttattaa

SEQ ID NO: 75441 - DNA, 694 bp, Oryza sativa
  Clone ID: PAT_MRT4530_75530C.1
cgtgtatgccatggcgcacccttgccaactcctcctcgcggccacgctagcttcatcatgcgtgcaccttttattgtcaagcaatgcgtattgctcttggaaactaaagaaattttttcatgaaagtatagaattgttgatagtaaaggtaggcatgaagtgaagatttaacctagtgatttagtttggtcgcacttgagaaaggatagatttccaaaattgagaaagtctaagttgatgcctcacgctgatggtcctttcaaaattgctgagaagattaatgataatgcatataaacttgagttgcctcccgggtttggggttagtcccacgtttaatatttcagatttgaaacaatacttgggagaagaagatgagcttgagtcgaggacgacttcaattcaagaggggttgaatgatgcggacatcactccttcatggaccgataacaagagctcgcgcgcgacaattgaatttcgaggtgagctcgttcctatgttcttttttgtacgaatttgataatagattgctacctaatgattatattgtgattagcaacaatggagatgacaaggagacacttggagaaggacttagagtcatggaggatcatcgaggatgtccaagtcaaggtggaggcccaatccaagtcgacttcgagtgcaattcagagcccatgcaatttggtttgcat

SEQ ID NO: 75442 - DNA, 496 bp, Oryza sativa
  Clone ID: PAT_MRT4530_75531C.1
ttttccaatggtttaggtcccatgtccaaattctttccgagtcaatgggaattgaccgaacaagttgacgtccagaatctgtcccgctgctgcgtcaccgtatttgggcctttggcccgtttcgacacgggtgataaccagaggagacgtggtgctgcgattgcgggactcaagagcgtgcgcgttcaagaagccggatcgatttatgtcgcgactccgcccaaatcgctgtgtatcagaacctttcggaagatcgggaaccctagtgcacatcagggcttcccacgaccaaaacggccaaaaggggaggagcacgacagagaggaggaaggtacagccggtgaagaaattgacccatcaccgctgtccgcgatgccgagcagcaggattcaggcgcggggccccaaattcgacggcggcttcacaagatgcacctgcattgccaccaacatatggcgggttctatgtgcccaaccgcccatatacgttgttttga

SEQ ID NO: 75443 - DNA, 618 bp, Oryza sativa
  Clone ID: PAT_MRT4530_75532C.1
atgttggacgaatacctggtcgatcaatctgccaccgccgtccgccgccgcgaggccgcccaggcctccgcccgttggcgcgccgcccgccgccgcgaggccgccgcccgggcctctgccccgccacgccgcaaggccgccggccgcccgatctatcagtgggatgatgggactattgtagattttggccgaccgagtaaagatggtttctccataagtggtaaccaggccgacgcctcccgaccgctggccaccgccaccccaccgtcggccgcaggatttggactcaacgagtttgggggacacggatctgatggcagccgccttcctactggccactggatctcgtggacttatgggacgcatatccggccaccgcggcctctccccccgaccactagccgccttctcctccgccacctgactgtcaggcgccagatcgggcctccgccacctccattccatagccggcgtccgcggcctcccctcctcccccgattcttcctctgccaccctaccggcagcagctggatcccccaaccgaccgccagcatcctccaccgtctcctttacccaagagcgctgccgccgtttctgactcttgtaggttatgcttga

SEQ ID NO: 75444 - DNA, 4194 bp, Oryza sativa
  Clone ID: PAT_MRT4530_75533C.1
atggacatctctaggacaaatgaaggctacacgagctgcggcccggtagtcgagatgtcatggcacagggctggtgtcctgctgctaggggctcaatcctgcctacctgtcccggaggttccggccgtaggtggggttgggtcggtactcttgtctatggctaggatgggttggaaactatgtcatgtcttccgtccatatgccgtggtggtaacgaagtcaagagcaactacgaactctccaagaaaatactcaaaaggacatcacggaagccgttgcaaagtctgtccagatgccttcactaaaatcggcttcctgaaccacatggagaggttggacaagcggatatccacgctaactgatcgggtcgccgcgttggagacaccttccaatgaggaagtggttaagttaaaaataccatctttttcgggatattatgatgctgagaaataccttgattgggagatgacagtagaacaaaagtataatgcccaccttgtacccgaacaacatagagttagacaagccagtagtgagttcaaggattttgctattatgtggtgggctgggttatctgatgagggggtcctacctactacttgggaagaacttaaggtagctatgcgcgataggtttgttcctccatcttatcatagagatttacgcaagaaactgatgcgtttggaacaaggggataaatctgtacaggattactatggtgagctacaaaagggtgtgagacgctgtggcatagtggagggggtcgaggatgctatttgtcgtttttattctggtttgagggaggaaattcataacattgttgattgtaaggaatttaactctgtcaaccagttgtttcggtttgctatgcctgcagagaaggaattacaggggcgcgaccatcagggcaagagcaaggcaagcacatacactccgcgcacgacgccatctgcgggattgcccaaggccgtctcttttcgggcgtcctcccagccagcgggcaagcgaccagctgcatccggagcttctgcggcaccaaaaccatttccaccaccacgaccagcagagtcaggtaaaggttccacgcaggtacccgccaagagtgcctcatatgtcgcctcgacaggacgcattcagtgccaccgttgccaagggtttgggcatgtgcagaaagattgccctagtcaacgggcctatgttgctacagaagatggctacatcaccacctctgacatggaagaggaagaggaggaagaagaagttgaggatgaggatggcgaaatctttggtcgtgatgacacaacggactacagaaccatcattgtgcagcgggtgctcagcacgcagatttttttcgtcatcaacaaccgtcgtgcacgtgtgatcattgatggaggtagctgcaacaacttgtggttaaacgattccggaagagcaaaggtaacacaggtttgtagggtttcgttttccattggctcatatgcagattctgttgattgcgatgtggttcctatgcaagcttgttcacttttgttgggccgtccttgggaacatgataatgatgctacacaccatggtaggagtaataaatacacttttgtgcataatgggaagaaaattactttgctacctttgacccctgctgaaattgtagaagctgataaagagcgagctgctagtttgaaacttgatgaatctgaaaatcagcaagtggctaaatctgtttttccacctaaaaaggataagctttcacctagttctaaggttgagggaattaagttgaagggtggtgttatgattgcaacgaaatgtgaaattgctgaaatttcagatgatgatatgtgttatttcttgatatgcaaacaagccttggtttctttagatgatattgctagttcgatgcctcctgttgttactaaccttttgcaggagtatgaggatgtctttccagctgagatacccctaggattgccacccatgagagggatagagcatcaaattgatttgattccaggagcatcattgccaaaccgtgctgcttatcgaaccaacccagaggagactaaggaaattcagcggcaagttcaagaccttttggaccgctggtatgtacgtcaaagccttagtccctgtgtagttcctgtaattttggttcctaagaaagatggttcttggcgaatgtgtgttgattatagagccattaataatattactatccgatatcgtcatcctattcctaggtcagacgacatgcttgatgaattgtgtggctctataattttcacaaagattgacttgcgtagtggctatcaccaaattagaatgaaacttggagatgaatggaaaacagcttttaaaactaaatttggtttgtatgagtggttagtaatgccttttggtttgactaatgcacctagtacattcatgcgcttaatgaatgaggttttaaggccttttattggacgatttgtggtagtgtactttgatgacatattgatttatagcaagtctttcgatgaacacatggatcatttacgtgctgtttttaatgctctacacgatgcacgtttgtttgctaaccttgaaaactgcatcttttgcacggaacgagtctcttttcttggatatgtagttactccacagggaattgaggtggatgagtcgaaaattgaagccataaagagttggccggttccccaaaccatcacacagctgaggagctttcttggtcttgcaggattctaccgccgtttcgtcaaagatttcagtatttttgctgcaccattgaacgagttgacgaagaaaggggtggtcttccattggggaaagacacaggagcagtcatttgacactttgaaggacaagcttacacacgcaccattgctacaacttccaaactttggtaagacttttgagttagaatgtgatgctagtggagttggcattggaggtgtgttgatgcaagatggtaagcctgttgcatactttagcgagaagttgcatggtcctgttttgaattattccacgtatgataaggaattgtatgctcttgaagcgcatggaggagggttgatcggacattttggagctaagaagacgaaagatgttttggccatgcatttcttttggccaaggatgcgaaaggatgttgagagaactaagagggggagggatagtatttttgtggtggtggatcgtttttctaagatggcacatttcataccatatcataaaagtgatgatgctgttcatattgctgatctgtttttccatgagattgttcgcttgcatggtatgccttttactattgtttcagatcgtgatgcaaaattcttaagtcatttctggcgcacgctatggaacaagttgggtacaaagctattgttttctacaacatgtcaaccacaaacagatggacaaacggaggtagtcaactgcactttgggtaccatgttgagggctattttaaagaaaaatttgaagatgtgggaagaatgtttgcctcatgtggagtttgcatacaatcggacaatacattctactaccaaggtaagtccttttcaggtagtgtatggtttcaacccttgtgcttcaattgatattttgcctttacctactagtgagagggttcataatgatgataaggcacacgctgaatttattttgtcaatgcatgagtcaaccaagttcaacattgaaaagatgactgaaaagtatagaattgctggtagtaaagttgagaagattaatgataatgcatataaacttgagttgcctcccgagtttggggtcagtcccacgtttaacatttcagatttgaagccacacttgggagaagaggatgagcttgagtcgaggacgacttcaattcaagagggggaggatgatgcggacatcactacctcggatacacacaacaatcctccaacggtcattcaaggaccgataacaagagctcgtgcgcgacaattaaatttagaggtgagctcgttcctatgttcttctttgtatgaattcgagaatagattgctacctaatgattatattgtgctttggaacaatggaggggacaaggagacactaggagaaggacttacagccatggaggatcatcggggatgttcaagtcaaggtggaggcccaaaccaagtcgacgtctggtgcaattcggagttcaggaccaatctgcactaa

SEQ ID NO: 75445 - DNA, 1850 bp, Oryza sativa
  Clone ID: PAT_MRT4530_75534C.1
ttgtttttttgttttttttttgttagcataaaagcaagcgaaatattagcattaccaggtgcttatttagcatagctagtggctagtgcaatgcaatattactgaaactcatcaacaagtggttcaggctttcgcatgacaaataacacagctaaatatcttcaaaacataagtcactcaggctagaagttagagctctttccaatcaaaaaagcacattttcaacaaacaagcaatgcattgcttctacatgctgtgacagaaaactaagcagctcggcatgaggcgccgctattggagcactgtgaaacgtcgaaagggtcctttgacatgttgaatgccccctggaagcaccatgctgtaccatccgaaggaaacgggctctcacacacaatcaccttacagtcttcattggccaatttgacagaagccatgaaagtcctcatgctggaatgcagacgatcagctgaagacgaatacgattgtgccagcacaatgacaatcttctccagcacctgcccacgctcagcgatgaacttgacgaaatcaagctcgctcctatgtactctgaattcacggatgatcaccttcttgatatgcttctgaaggcaatcgattgggccagtctgctgcaagaacttgggattgagcatgccagggggcttgtggatagtggtctcgcactgaatgtagagtgtctcgacgttgggaaaacatctgaggaagataggcaacatcttgacttcattgtggttaaaaagtttcacctgaattcccaacacccggacgctgcggaccatgttttttgggctcaccttagtcccggccttgatgatggtgttgccaatgttcagttcatgcattccaggcaccaagaatccaaggaagcgcaggttgggtgcatggccaatcttgatcttggtacacatgttgatggagcaaccatcctcgtcgatgacgccaccgaccccgcaaatttcccagaacatgagcctctcgaggcgcgcggcatgctccacggtgatctcttccacgacggactcgcacaactccacgcagcgcaggctatggctggcgacgcggaggcgcactagctcccggtggccgacgatctcgaggttctccaggacggggcatctgtcgagcagcaaggcgaggtcccgcacacccatgacgagggagcagaggccgagctcgcggaggtgggggaaggcgccggcgcgctggatggtggcgacgtccgggaacctcaggaagccgatgtagaggcaggtgagggagctgcacctgaagagcgtggccgggaggcgcacgccggcgtcgagcttggacgcctggtggaccaagacgagctcctggacgcccttggcggcgaggaggtgacgtggacgctgcggaagggcccccgggtgcgcggcgagggccctggacacggcggacgcgacgtcgcgcgtgccgtcgacggcgcggcgcaggacgccgccgaggccgtccacctggtcgatctcggacacgggaggcggagggggcccggtgtgcttgaggtgggcgtcggcgaggacgagcggcaccgagcgccagaggcggcgccagcgcgtggagagcgcggaggtgagcgcggcgtccctggcggggaggcgggagaggatgtcgcagaggatcccgacggggagggcgccggtgcggtcgcccccgtcgcccggcggcctcgccgcggcggcgcaggcgaggggcgcgtggagggacacagggtgcgtcgggccaggcagcacccccccgttcttggtcaccatcttcatggtctcgtcgaggcccatcagatgcagcatgttggtctgcatcgagtccat

SEQ ID NO: 75446 - DNA, 198 bp, Oryza sativa
  unsure (1)..(198): unsure at all n locations
  Clone ID: PAT_MRT4530_75535C.1
attgnggggccaaaaaaaaaaatccccttacttttttaattggggttgcaatggtttttttatcacaattatttggtggccagcaaacagaactttaattgccaaaatttttgctttcggaaccagttccctctttttttacacccggtagtttatcaaacaagcgttaaattttatggtgcccggtcccgtgttttt

SEQ ID NO: 75447 - DNA, 1352 bp, Oryza sativa
  Clone ID: PAT_MRT4530_75536C.1
aaattgcaaagagggacgtacttggaacaaatttgtgatcaatggtgcatttgtttatagagctaaccgtctatgcattccagttggttccgttcgtcttttgttgatacaggaagcgcatggaggagggttgatgggacatttggagctaagaagatggaagatgttttggccttgcatttcttttgaccaaggatgagaaaagatgttgagaggttcgtggcacgttgcaccacttgtcagaaagctcagtctcgtttgaatccacatggtttgtatatgcctcttcctgtaccttctattccttgggcatatatttctatggactttattttgggattgcctagaactaagagggggagggatagcatttttgttgtggtgaatcgtttttctaagatggcacattttataccatgtcataaaagtgatgatgatgttcatattgctgatctgtttttgcatgagattgttcgcttgcatggtatgccttctactattgtttcagatcgtgatgcaaaattcttaagtcatttttggtgcacgctatggaacaagttgggtacaaagctattgttttctacaacatgtcaccgacaaacagatggacaaacggaggtaatcaaccgcactttgggtaccatgttgagggctattttgaagaaaaaattgatgattgagagggttcataatgatgctaaggcacgcgctgaatttattttgaaaatgcatgagtcaaccaagctcaacattgaaaagatgactgaaaagtatagaattgctgatagtaaaggtaggcaagaggttaagcttgaaccgggtggtttagtttggttgcacttgagaaaggatagatttccggaattgagaaagtctaagttgatgcctcgtgctgatggtccttttaaaattgttgagaagatgaatgataatgcatataaacttgagttgcctcccgagtttggggttagtcccacgtttaacatttcagatttgaagccatacttgggagaagaggatgagcttgagtcgaggatgacttcaattcaagagggggaggatgatgcgaacatcactacctcggatacacacatcaatcctccaacggtcattcaaggaccgataacaagtgctcgtgtgcgacaattaaatttagaggtgagctcgttcctatgttcttctttgtatgaattcgagaatagattgctacctaatgattatattgtgattaggaacaatggaggggacaaggtgtcgcaactgagaaaattaccttttcccgaacgctagtgtattaatccccgtcccaggaaaagccggggtacaccacacaaacatgatacaaaaggcac

SEQ ID NO: 75448 - DNA, 1308 bp, Oryza sativa
  Clone ID: PAT_MRT4530_75537C.1
atgtcgctgcccaaggacggcttcccggtctcattggaacctatccagcaccattgcctcatctggaacctttcagagttcttccatcatcgtatagctgacaataagacagctaatctccaggtacgctttcttgatgaccctcgcacggacaatccaccattttcagtgtatgtgatccatttgtacctcgtggaaccgaacaattctgatgtgaccatggctaccacggatgcaaccattgctcacatcatggatgaacaagaagatatcgagatcaagtactccaagtgctggaatccgattcggccacctactacactgctgacttcaaacggccaccgaatctgcatacgacctccgttttcggcccgaatagggttgatctgcaccggcaagatcagcaacccacggagagatcgtgatgcaaaattcttaagtcatttttggtgcacgctatggaacaagttgggtacaaagctattgttttctacaacatgtcaccgacaaacagatggacaaacggaggtagtgtatggtttcaaccctaatgctcctattgatattttgcctttacctactagtgagagggttcataatgatgctaaggcacgcgctgaatttattttgaaaatgcatgagtcaaccaagctcaacattgaaaagatgactgaaaagtatagaattgctgatagtaaaggtaggcaagaggttaagcttgaaccgggtggtttagtttggttgcacttgagaaaggatagatttccggaattgagaaagtctaagttgatgcctcgtgctgatggtccttttaaaattgttgagaagatgaatgataatgcatataaacttgagttgcctcccgagtttggggttagtcccacgtttaacatttcagatttgaagccatacttgggagaagaggatgagcttgagtcgaggatgacttcaattcaagagggggaggatgatgcgaacatcactacctcggatacacacatcaatcctccaacggtcattcaaggaccgataacaagtgctcgtgtgcgacaattaaatttagagactgagccacaaactgagccttacccactagatatgtggaagtacggtagtgctttgcaacagaggcccgagcttaatccttatagtggccggggtgctacttcccacaactggcatgcacccaaaccccaccggaaaacaggttttaggggttttgaaagaggaagagaggtgtatgtcctattccaccataatccaaccattccaaagtgtccaagtgatatgagaattcccaaagtctaa

SEQ ID NO: 75449 - DNA, 414 bp, Oryza sativa
  Clone ID: PAT_MRT4530_75538C.1
atgagtacctactttacattatgttcatgttatactgaatatacggctagcttatctggcagatgctttggtgtgggtataatatttgcatatgaaattactctatgtcatgacgatgatattagagtagtatctggtagtttagacgtggtgtctagattacgggatatcattattcggggttatatattgcagaggaaaggtgggccgctgatggtgacagctcagtacgggtattcctccgcgccagtatataatcctaagttaattccctggggagggtattcctccgtatttagccccggttgtatggtcatgacgggctgtcgtaaggaactcggcagtcaggggtggcttctcgaagtacctggagggcatcggatagaggacaatggtatatccgtgcgcttgcgg

SEQ ID NO: 75450 - DNA, 1969 bp, Oryza sativa
  Clone ID: PAT_MRT4530_75539C.1
atgtcaggtaacgaaggtgagaagagtccccaggattttgctgactgtgtcagccaagagcaactacgaactctccaacaaaatactcaaaaggacatcacggaggccgttgcaaagtctgtccaagatgccttcactaaaatcggtttcctgaaccacatggagaggttggacaagcggatatccacgctaactgatcgggtcgccgcgttggagacaccctccaatgaggaagtggtgagtggtgatgacgatgctcatcctgaagatacggtatattatgatgctgaaaaataccttgattgggagatgacagtagaacaaaagtttaatgcccaccttatacccgagcaacatagagttagacaagccagtagtgagttcaaggattttgctattatgtggtggactgggttatccgatgagggggtactacctactacttgggaagaacttaaggtagctatgcgcgataggtttgttcctccatcttattatagagatttacgcaagaaactgatgcgtttggagcaaggggataaatctatacaggattactatggtgagctacaaaagggtgtgagacgctgtggcatagtggagggggtcgaggatgctatttgtcgtttctattctggtttgagggaggaaattcagaacattgttgattataaggaatttaactctgtcaaccagttgtttcgatttgctatgcttgcagagaaggaattgcaggggcgtgaccatcagggcaagagcaaggcaagtacatacactccgcgcacgacgccatctgcgggactgcccaaggccgtctcttttcggacgtcctcccagccagcgggcaagcgaccagctgcatccggagcttctgcggcaccaaaaccatctccaccaccacgaccagcagagtcaggtaaaggttcctcgcaggtacccgccaagagtgcctcatctgtcgccttgacgggatgcattcagtgccaccgttgccaaggatttgggcatgtgcagaaagattgccctagtcaacgggcctatgttgctacggaagatggctacatcaccacctccgatgtggaagaggaagaggaggaagaagaagttgaggatgaggatggcgaagtctttggtcgtgatgacacaacggactacagaaccatcattgtgcagcgggtgctcagcacgcagatttttttcgtcatcaacaaccgtcgtgcacttgtgatcattgatggaggtagctgcaacaacttgtggttaaacgattctggaagagcaaaggtaacacaggtttgtagggtttcgttttccattggctcatatgcagattctgttgattgcaatgtggttcctatgcaagcttgttcacttttgttgggccgtccttgggaacatgataatgatgcttcacaccatgcaagtggctaaaactgtttttccacctaaaaaggataatctttcacctagttctaaggctaagggaattaagtcgaagggtggtgttatgcttgcaacgaaatgtgacattgctgaaaattcagatgatgatatgtgctatttcttgatatgcaaacaagccttggtttctttagatgatattgctagttcgatacatcttgttgttactaaccttttacaggagtatgaggatgtctttccagccgagatacccccaggattgccaaaccgtgctgcttatcgaactaacctagaggagactaaggaaattcagcggcaagttcaagaccttttagaccacgggtatgtacgtcaaagacttagtccctgtgcagttcctgtaattttggttcctaagaaagatggttcttggcgaatgtgtgttaattgtagagccattaataatattactatctgatatcggcatcctattcctaggttagatgacatgcttgatgagttgtgtggctctataattttcacaaagattgacttgcgtagtggctat

SEQ ID NO: 75451 - DNA, 679 bp, Oryza sativa
  Clone ID: PAT_MRT4530_7553C.1
caaacttgtccaaagacaggtcaccttctggacgaggcggaaggggaaaaactcatttcctgtcacataaccatcaaagaccacaccactacggtagagctgatatgtcagcagatttgactccttcggaggaattgagacatatttatgatcctgatgcaaatgacttgggaatcccctcttcactgcacatatcaataccttctccatcttcggaagctccaagggaaattgtgcatggcaatggttttattcagcctccagctaagaaacttgagtttgggaccttgggagcattgcctttggaagttacatcccaagagcttggtattaacagattgaatactgcttctgacagccaaccttcagcgtctgcaagccctatgtctctggcacataatcctggaattagttctaatcaaatgaggaatgctcagccatatcatctcaaggacaacggtgatttcccaccgctatctagttgatgccatatagttcattgcatatcagagacaacttggtccaagaaagatactgataaatggtgcgagcgcctggtgcaacatagcaggggttgttccgcaagacaaacatcatccatcatgtacatcctatcattaacttcacattctcctatcttcaattcacccttgctgttgctttccaaaaaaaaaaaaaa

SEQ ID NO: 75452 - DNA, 456 bp, Oryza sativa
  Clone ID: PAT_MRT4530_75540C.1
atggccgccacctgccatcgccgtgcaagggagtgggaagcctgcgactacccacctgactcaccgtgcaagggagatcggggatccggttttaccagaacaacacaaagtcacaccgtgcaagggagatcggggatccggttttaccagaacaacacaaagtcacagagcatattgcatactgatcagaatatcatatcactcatctccgataccaaatgcgcccacataaatcttacaatgctatctacacaaatgaaggaacatagcatagacaactacggggagaaactatcctgcaagacacgcgacgggttaagcgaggatgagcagagcaactgctcgatcagggagggatcggaggggacgctatgtggacaccccgagtattataccatccagtgtccaacacgaccaccacatactgttggaggagtgggatccaaacacgcataa

SEQ ID NO: 75453 - DNA, 465 bp, Oryza sativa
  Clone ID: PAT_MRT4530_75541C.1
atgaatgccaactttacattatgttcatgttatactgattatacttctagcttatttgggagatgctttggtgcgggtataatgtttgcttatgcaattactctatgtcatgaagatgatattagagtagtatctggtagtttagacgtggtgtctagattacagggtatcattatttggggttatatgctgcggatgagaggtgggccgctgatggtgacaacttagtacgggtatttctccgtgcgtggatatagtcctaagttaatttcctggggagggtactcctccgtatttagcctcggttgtatggtcatgacgggctgtcgtaaggaactcggcagtcaggggtggcttctcgaagtaccaggaggacatcggatagaggcaaaaggtagaacccgcaataataaagccgatgaatggagttctcaaaacaagatccgatgaatgggcccaaacgaa

SEQ ID NO: 75454 - DNA, 442 bp, Oryza sativa
  Clone ID: PAT_MRT4530_75542C.1
atgaatgcctactttatattatgttcatgttatactaaatatacggctagcttatctgggagatgctttggtgcgggtatattgtttgcttatgcaattactctatgtcatgacgatgatattagagtagtatctggtagtttagacgtggtgtctagattacgggatatcattatttggggttatatattgtgggtgagaggtgggccgctgatggtgacagctcagtacgggtattcctccgcgccggtatataatcctaagttaattccctggggagggtattcctccgtatttagcctcggttgtatggtcataacgggctgtcgtaaggaactcggtagtcagggatggcttctcgaagtaccaggagagcatcggataaaggaaaaggggattcatgcatcttttaaaggtagaactacaatctatagttttgaaa

SEQ ID NO: 75455 - DNA, 388 bp, Oryza sativa
  Clone ID: PAT_MRT4530_75543C.1
atgagtacctattttacattatgttcatgttatagtgaatatacggctagcctatctgggagatgctttggtacgggtataatatttgcttatgcaattactctatgtcatgacgatgatattatagtagtatctagtagtttagacgtgatgtctagattatggaatatcattatttggggttatatattgcggatgagaggtgggccgctaatggtgacagctcagtacgggtattcctccacgctggtatataatcctaagttaattccctggggagggtattcctctgtatttagctccggttgtatgatcatgacaggctgtcgtaagaaactcggcagtcaggggtggcttctcgaagtaccaggagggcatcagatagagg

SEQ ID NO: 75456 - DNA, 387 bp, Oryza sativa
  Clone ID: PAT_MRT4530_75544C.1
atgaatgccaattttatattatgttcatgttatactgattatactgctagcttatctaggagatgcataggtacgggtataatgtttgcttatgcaattactctatgtcatgacgatgatattagagtagtatatagtagtttaggcgtggtgtctagattacgggatatcattatttgggttatatgctgcggatgagagatgggccgctgatggtgatagctcagtacgggtattcctttgtgcgtgtatatagtccttagttaatttcctggggagggtactcctccgtatttagcctcggttgtatggtcatgacgggctgtcgtaaggaactcggcagtaaggggtggcttctcgaaatactaggaggacatcggaaagagg

SEQ ID NO: 75457 - DNA, 388 bp, Oryza sativa
  Clone ID: PAT_MRT4530_75545C.1
atgagtatcaactttacattatgttcttattatattgaatatactgctagcttatcagggagatgctttggtgcgggtatagtgtttgcttatgcaattactctatgtcatgacgatgatattagagtagtatctggtagtttagacgtggtgtctatattacgggatatcattatttgatgttatatattgcggatgaaaggtgggccgctgattgtgacagctcagcacgggtattccttcgcgcctatatataatcctaagttaatttcctagggagggtattcctccgtatttagccccggttggatggtcatgacgggttgtcgtaaggaactcggcagtcaggggtggcttctcgaagtaccaggagggcatcggatagagg

SEQ ID NO: 75458 - DNA, 159 bp, Oryza sativa
  Clone ID: PAT_MRT4530_75546C.1
atggtgcaaggttcagaaatcaaggaggaggaggaggaggaagaagccatcgattgcagcatacctgagccatctgaagaagtgttgaaactgtggatatatcagcagagggaaggttggatcagggagacagatagaaatgtgagcaatgggaactaa

SEQ ID NO: 75459 - DNA, 391 bp, Oryza sativa
  Clone ID: PAT_MRT4530_75547C.1
atgaatgcctactttacattatgttcatgttattctgaatataccgctagcttatctgggagatgctttggcgcgggtataatgtttgcttatgcaattactctatgtcatgacgatgatattagagtagtatctggtagtttaggcatggtgtctagattatgagatatcattatttggggttatatgctgcggatgagaggtgggccgctgatggtgatagctcagtacgggtattcctccatgcgtgtatataatcctaagttaattccctggggagggtattcctccgtatttagccccggttgtatgatcatgacgggctgtcgtaaggaactcggcagtcaggggtggcttctcgaagtaccaggagggcatcggatagagggta

SEQ ID NO: 75460 - DNA, 315 bp, Oryza sativa
  Clone ID: PAT_MRT4530_75548C.1
atgtttgcttatgcaattactctatgtcatgacgatgatattagagtagtatctgctagtttagacgtggtgtctagattacgggatatcattatttggggttatatgttgcggatgaaaggtgggtcgctgatggtgacagctcagtacgggtattcctccgtgcgtgtatataatcgtaagttaattccctgaggagggtactcctccgtatttagccccggttgtatggttatgatgggctgtcgtaaggaactcggccgtcaagggaggcttctcgaagtactaggagggcatcggatagagggtattagc

SEQ ID NO: 75461 - DNA, 387 bp, Oryza sativa
  Clone ID: PAT_MRT4530_75549C.1
atgaatgtcaactttacattatgtgcatgttatactgattatactgctagtttatctgggagatgctttggtatgggtatagtgtttgcttatgtaattactctatgtcatgacgatgatattagagtagtatcaggtagtttaggcgtggtgtctagattacgggatatcattatttggggttatatgctgcggatgagaggtgggccgctgatggcgacagctcagtatgggtattcctccgcttgtgatatagtcctaagttaatttcctggggagggtactcctccgtatttagccccggttgtatggtcatgatgggctgtcgtaaggaactcggcagtcaggggtggcttctcgaagtaccaggaaggtatcggatagagg

SEQ ID NO: 75462 - DNA, 351 bp, Oryza sativa
  Clone ID: PAT_MRT4530_7554C.1
atggcgaccggtccggcagggatacagcggcgatggcgagtgcctcaaatcgtgggggctgtctccttcggtgaggcgcaggacctcgtcgccggccgcttctttgatcccatcgaggtctcctggaagatcaagaagtggctatgccctgcgccggtggccggcggcacattggaggttaaacattcccccgtcgagctgatgtcgcaggcggagatgatcgtgctaggcggctcgaggctcgtccgagccgagcccgagcttgactgcaagctcgaaggccctgagctggtgatggtgaatatgatagccacacaaatatttgggaggaatcgggagaaggcaaagtaa

SEQ ID NO: 75463 - DNA, 515 bp, Oryza sativa
  Clone ID: PAT_MRT4530_75550C.1
acggacctcttttacccgtcgacgtgtgggggacagccctccactacccagcagaggaggccaggggcgacggtggtagcggcggggctatcccccacgcggatctggcggcggcggacttcgggatactattgcggtgcttcacgatggttggaccaggtggaataggagttcttttacccaggagcatgagtgacggtttagtctacgaattgtggcatttggtggcttctgttgtggttgctatggtagaaggggactctaaggtgaaaaccttgctctgcttgccggggctagcaacggtgatgccgttgggcaccgttaaccttcttgaaggcgttgctattggagttctcgttcaactgtacttcaagggaattctccaagtgagttgtcatgtcacgcggtgccggtgtcaccaagatcctcgtcaaggagacccgcagcatgtgatggtgccatttctgttccaccatcagctggctgctctggctcaagaataccgcagttcgtag

SEQ ID NO: 75464 - DNA, 208 bp, Oryza sativa
  Clone ID: PAT_MRT4530_75551C.1
tgccctgctttccctagtctgggccaacttgtctagtgccctagctgccattcaattgcaatctgtgcaccaatgctgctgttggcagcaggctggttatgctgtcatttgtggctgcctctttcctgcttttccttctgcttccactttgcacttctgctttgctgcttctgtgatctgtttctgtgctttgctgtgctgcagctgt

SEQ ID NO: 75465 - DNA, 205 bp, Oryza sativa
  Clone ID: PAT_MRT4530_75552C.1
tgcttgttctcccccatttgtttcgtttttgttcggttccggttcaatttcgtgtttttttcttatgcgtggggttggtgggaaagcatggttgccccggatgttgagtaccgctgattcatccgcggtctggcctgggccactctcgaccgttccttctaagccgccttttacatcttgggtgataccctctagcccatgatct

SEQ ID NO: 75466 - DNA, 496 bp, Oryza sativa
  Clone ID: PAT_MRT4530_75553C.1
atgagcacctactttacattatgttcatgttatactaaatatacggctagcttatctgggagatgctttggtgtggatataatgtttgcttatgcaattactctatgtcataacgatgatattagagtagtatctggtagtttagacgtattgtctagattacgggatatcattatttggggttatatattgcggatgagaggtgggccactgatggtgacagctcagtacgggtattcctccgcgccggtatataatcctaagttaattccatggggagggtattccttcgtatttagccccgattgtatggtcatgacgggctgtcgtaaggaactcggcagtcaggggtggcttctcgaagtaccaggagggcatcggatagaatgtcggttaactagaatttgttaagcaggtttaagaattaaaacactaacttgggtacattgctcggcttgccataaccgagggcgcggctattcggggctgcaggaat

SEQ ID NO: 75467 - DNA, 201 bp, Oryza sativa
  Clone ID: PAT_MRT4530_75554C.1
atggcgacggtggatctggaggaggacgcagctagcaagacagaggctggcgatgggtggattggtggagggcaccaagcaatgcgaaggctggcgacgaccacatcttttgtggatcttgttgtaggtggcggcagaggaaggcgcaggcggcaatggtgtgaccacgacatcaagtggtccaacactgttcatctttaa

SEQ ID NO: 75468 - DNA, 754 bp, Oryza sativa
  unsure (1)..(754): unsure at all n locations
  Clone ID: PAT_MRT4530_75555C.1
gtgaagttcccagcataaggtgttagcaagatgcaagcattggaggagctcacaggtctcacgctcttctgtcaaccaggaagctttttgaaggagctaggtgagcttaccaagctgagagtactagttgtatattggaaggcttaccatgctagagattctgatgaggcccaagccgagcataaaaagagctgcaagaagattttcacctcctcacttaatgcactggacaggcatagcctccattctctggattttgttgtgtttatggaacgcttcttgtttgatccgtggttccttgccctacaaaacctcaagagattcggcgtcgaaagcacgccccggatgataaacattccaagttggattcgccttgctgccaagcttgagaaattagagctcagtaaagcatatgttactcagaacgatttcgaaatgcttggagacctgaaagctctcgagtatcttgcccttccttgttcagacacacgaggatcatggctcaccatcagcaaccatggtttccgatgtctcaagtttgcgtttctttgcaacgtgttgtttatgcctgattccatgcctaatctgaaggacctccngattgacatagtattggatgaggttggtgagaacgattctgtcttcgagcacctccccagcaccctctgcagagtcaatgtagatattattggcaatccaccttcaactccaagagatgtggcctaaaattggaagaaaaatcttgacgtagcaa

SEQ ID NO: 75469 - DNA, 1920 bp, Oryza sativa
  Clone ID: PAT_MRT4530_75556C.1
atggccaccaccacctcccctctcgttgtcgtcctcctcgccgtcgtcgcggcgatcgccgtctcgctggtgcaaccggcgttcgccttgccggccggtctcccggacatcaagtctctcactaatccatggtcggcgttcaagaacctctccgggtgccacttcggcgacgagaggcaaggccttggcaagctcaaggactacctatggcacttcggctacctctcctatccgtcgtcgtcgtcgttgtcgccgtcgttcaatgatctgttcgacgccgacatggagctggcaatcaagatgtaccaggggaacttcggcctcgacgtcaccggcgacctcgacgcggcgaccgtgtcccagatgatggcgccgcggtgcggcgtcgccgacgtcgtgaacggcacgtccaccatgggcggcggcggcggcgtccgcggccgcgggctgtactcctacttccccggctcgccgcggtggccgcggtcaaggacgacgctgaggtacgcgatcacggcgacgtcgcagacgtccatcgaccgggcgacgctgagcaaggtgttcgcgagcgcgttcgcgcggtggtcggcggcgacgacgctcaacttcacggaggccgcgtcggcggccgacgccgacatcaccatcgggttctacggcggcgaccacggcgacggcgaggcgttcgacgggccgctcggcacgctggcgcacgcgttctcgccgaccaacgggcgcctccacctggacgcctcggaggcgtgggtggccggcggcgacgtgacgcgggcgtcgtcgaacgccgccgtcgacctggagtccgtggcggtgcacgagatcggccacatcctcggcctcggccactcgtcggcggcggactccatcatgttcccgacgctcacgtcgcgcaccaagaaggtgaacctcgccaccgacgacgtcgccggcatccagggcctgtacgggaacaaccccaacttcaagggcgtcacgccgccggcgacgagcagccgggagatggacagcgccggcgccggcgagctctcccggccgtggcgacgcttgctcgacggcgccgcgggcttgctcgtcggagctatagtttggaggggctcggtgaatcccaaggtaactagcagctcgtacgggacgtcgtgggcggaccagtgggactacggcagcgacccgccgccgccgtcgtcgtcgtcggggaagaggagcggcggcggaggaggaggaggagggaagaagggtatggagaagacgaaggcggcggcggcgagcgggctgaggaaggtgaaggaggggacggcgcatgggttccagtggatcaaggacaagtaccagcagaagaagtccggtggcaagaagcacggcgaccagcagagctcggagatcgccggctactgatcgttgataccacatcatatcgttgatgatgatttgaggtgttcttgcgtgtagataggtcgatcgggggtcattctttggaccgatcgatatatggacgttaatttgttcgtctttgtgtgttatttgtatataggagatgagatttactccggtccaacaaaaagtaactcgaggtaccgatacctcacggtaccaaattgtttccgatcgttggatctagctgggtgggttgggcatcgttagatccaacgatcggaaatgattttgtaccgcgaggtaccgatacctcgagatactttttgttggaccgaagaaaaactcatataggagatgggtgctcttgttcgtagtttgtttgattctgttatttttttctcttgtagatataaaagagattgggatttgtttcgctgaaaaaaaaaaaaaaaaaaaatcttgttcgtagtttgtttgattctgttaatttttttctcttggagatataaaagagattgggatttgtttaaa

SEQ ID NO: 75470 - DNA, 1803 bp, Oryza sativa
  Clone ID: PAT_MRT4530_75557C.1
atgattacaacctcgtcgccatcgtcgcagccggtcaggctgcagcaacgatggacatgccggagcagagcggcgtctcctgctcctcttcttccaccgccggcaaccgggcggcggcgtcggcggcggctcgtcgccgactcccagaagacggcggcttctctccgggtccgtgctattgccgctgagagcgaacaggcttctcctctacccgagcctccgccattgctcaccgaggaggaggaggaggaggagaagatgctcgccaactacgtccccgtctacgtcatgctcccgctgggcgtggtcaccgcggagaacgagctggaggacgcggcggggcttcgggcgcggctgcggcggctgcggcgggaggccggcgtggacggcgtcatggcggacgtgtggtggggcatcgtcgagggcgccgggccggcgcggtacgagtggcgcgcgtacagggagctgttccgcgtggcgcaggaggaaggactcaaggtgcaggccatcatgtcgttccacgcctgcggcggcaacgtcggcgacgccgtcaccatcccgctgccgcgctgggtccgcgacgtcggcgacgacgaccccgacgtgtactacacgagccccggcggcgcgaggaaccatgagtacctcaccatcggcgtggacgtccggcctctgttccacggcaggactgccatccagttgtatgccgatttcatgaagagcttcagagagaacatgggtgacttcttggactctggcctgatcgtggacatagaggttggcctcggccctgcaggtgagcttagatacccatcctacccagagagccaaggttgggaattccccggcatcggacagttccagtgttatgacaaatacctggaggaggacttcagagcggcggcgacagaggccgggcacccggagtgggagctgccgggcgacgccgccggagagtacaactacacgccggaggacacgcggttcttcgcggcggacggcggcacgtacctgaccgaggccgggaggttcttcctgacgtggtactccagcaagctgctcgagcacggcgacagggtcctcgacgaggcgaacatggcgttcctgggctgcagcctcaagctcgccgcgaaggtgtccgggatccactggtggtaccggcacccgagccacgccgcggagctcgccgcggggtactacaacgtgcccggccgcgacgggtaccgccccgtcgcgcgcatgctggcgcggcacgacggcgccgtgctcaacttcacctgcgccgagatgcgggactcggagcagccgccggaggcgatgagctcaccggagcggctggtgcggcaggcgctgagcgcggcgtggagggagggcgtcgaggcggcgtgcgagaacgcgctgagcaggcacgaccggcgcgggtacaaccagatgctgctgaacgcgcggcccaacggcgtcggccccgccggcggcggcggcgcgccgccgcgccgcgtcgccgccgtgacgtacctccggctgtcggacgagctcctgacggcgaccaacttccgggccttcaaggccttcgtcaggaaaatgcacgccgatcaggattgctgtccggatccggcccggtacgggaggcccatgaggcctctggagaggtctgggccggaggtggccatcgagcggctgctggacgcgacggcgccggagccgccgtatccgttcgacggcgagacggacatgagcgtcggcggcggcctcgccgagttgatcgactgggtgttcgacaaggtcgagtggatattctgttag

SEQ ID NO: 75471 - DNA, 519 bp, Oryza sativa
  Clone ID: PAT_MRT4530_75558C.1
atggcgcagggacgggcgatcggtgaggacggcggtgcggatgtcggcactcaagacagcacgcacggtgcggcggcaggaaggcgtttggcgttgtggtccggaagggagcagcggcggcaagggacacggaggcagcgaccacacgggacgcagaggcggcggcggcgaactccgcctccagccgccgcctccgcctccgccactggtcgggatggcgctcgggatgagggtggtggctggtggcggaggaggctggaggcggagctcgggatgaggcgaggctacggcagcgaggtcggcttcgcaagcacgacagaggaggcgaggcgacaatggaagagcgtggctgcggaggaagcgaggcgaggcggcggcggcgatggcgtcgacttcttcattgacaacggcccgatcgaccactacgacgacctcgccaatcgcatccatgaccccaatggatctccgatgccgttgcccctgtccaggagcatctccgatggcttccccgtgctgtag

SEQ ID NO: 75472 - DNA, 3237 bp, Oryza sativa
  Clone ID: PAT_MRT4530_75559C.1
gcccccgggggaggcaaaatagacttttgcggaggaatttgattaggaaggatttggattcggaaatgagctcgacgatagatcggggttttgagatctgagatggcacggacactagacaacaagcaaagaaacaaatttcgcaatttaggtttttaagagataattttcccgctaggcgccacgacggaacgggcgctacatttagtgagcctagaataccttaatcttagtcaaaacagtcttgttgattccattccaaccaagatcattaacttaaaggagctcaagtccttggatctttcagataataacctctctggacatattccggagcaaattggtaatttagtgaggttgaggtccttaaaacttaattctaatcaactttccgggcacattccaaacaacttagggaatttggctaaactctgtttcttgtatcttcaaagcaacaaactttcttggcacattcctcaagaactaggttccctgttgaacttaaaggacctacaactttacgataacaagctcataggttccatcccaaacagcttagggaatttgaccgaacttagtgtcttgagcctttctggaaacaccttgacgggttctatcccaaataacatttgtaatttgactaaattctccatcttatctctttggagaaaccaactatctgggtacatttctcaagaactaggtaaaatgttgaatttagagagcttatatctgagtgaaaacatgctcacaggttccatcccgaatagcttagggaatttgactaaactctctttcttggatctttctagaaatcaactttccgggcacattcctcaagaactaggttacttggtggacttaaagaatttatcactttatgacaacgtgctcacaggtttcatcccaaacaacatagggaatttcactaaactcagtatcttgagcctttctggaaacatgctcacaggttccatcccaaacagcttagggaatttgcctagactctccaccttatctgtttggagaaaccaactttctgggtgtatttctcaagaactaggtaacttggtaaatttagagaacttataccttagtgaaaacatgttcacaggttccatcccgaacagcttagggaatttgactaaactcactgccttacatattcgttctaaccaactttctggatccattcctaaagaaattagcagcttaatgaatctaaatattttgcatatcgatcaaaacaacctttctggtgaattaccattgggtctgtgcgctggaggccagctacagaatttcactgctcaggataacaacctggttgggccattgccaacaagcttgctaaactgcaaaaccctggttagagttcgtcttgagcgaaatcaacttgaaggagatatctccgagatgggccttcatccaaaccttgtctatattgacatgagctcaaataaactatatggacaattatctcatcgctggggtgagtgcgccaaacttaccactctacgtgcatcaaataatcgtattactggagtcataccatcgagcatggggaaattgtctcagttagggagacttgatgtttcatcgaatgaaattgaaggacacattccaccagaaattggtaacgtagtgtctctattcaatttgagccttgcaaacaacatgctccagggaaccataccaaaggaagtaggttctctacaaaatttggagtatttagacttgtcatcaaacaacctaagtggacagatacatggatcgattgagaactgtttgaaacttagattactaaggctaggccataatcgcctcgatggaagcattcctgttaaactagggatgttggtaagcctccaagaattgttggatctaagtgacaattcattttctgggatcataccaagtcagctgggtgctttgagcatgctcgaagctctgaatctttcacacaacacactgaacggcagcataccatcatcatttcagggtatgatcagtctctcatccctggatgtatcatataataatttggaagggccagtgccacatattaacttcttggaagaagctccgattgagtggttcatgcacaataaaaagttgtgtggtacagtcaaagctttacccccttgcgaccttaatcagaaaggtggccagggaaagaaattcaaatccattttacttggtatagttggtgctgctggcatgtctattgtgtttatcatgtcactagtggcatggcaatgcaaaaggaagaaatatggggaacaaagcgaaaatggagttggagacgcaaaagtgttttcagtctggaactttgagggaggagaagcatgcaggcagatttttgaaacaacaaaatatttcaacgaaactcactgcattggaactgggggaaatggatctgtctacagagctcagttaccaacaggtgagatatttgcagtaaagaaaattcatatgatggaatatgacgagctaatatttaagcgagaaatagatgctttgacgagaattcggcatcgaaatattgtgaagctctttgggtactgttctgcagtccacggcaaatttcttgtctacgaatacatggatagaggaagcttgtcaagatatttggagaaccataacattgcgattgaattggattggatgcgaaggataagtattgtcaaagatgttgctaatgctttgtcttacatacatcatgattgctttgcacccatagtccatcgagatataacaagcaacaacattttgctcgatcaggaattcagagcttgcatatctgattttggtatagccaaagttctagatgtggaggcatcgaactgcacgaagcttgctgggaccaaaggttaccttgccccagagcttgcatacacaacaagggtgacagagaaatgcgatgtttatagcttcggagtgcttgtctttgagctgttcatggggcatcatcctggtgatttccttttgtccttctccatggccaaggaaagtacaacattgaaggatttgttggacgcccggatcccacttcctaaagctgagacagcaagtgaaatatttagagtgatcatggctgctgtccagtgcttggaccccaacccatcacgtcgtccaacaatgcaacatgtaactcggatgttttctacagctgaaggacctagcaatcctgaccatctacatgttgacataatcatccctgcgtactaccagtga

SEQ ID NO: 75473 - DNA, 423 bp, Oryza sativa
  Clone ID: PAT_MRT4530_7555C.1
ggggacggaaaacccaaaccccccaagggggaagaaacgggacgggcggtaaaaaaaaaaaaaaaaaaacttccccccagggttaaggtccaaaacaccccaaggacaaactaaatcacttgggggctcaaaaataaaaggcccccccagttaaaaaaccaccccccccctcagggggaaagcaactagctgaacaagggggggatttgcccggggggggggggcattacgggaaaattccaaaaccccagggaccttggccttaaaagcctcggggggcccaaggggaggggaaacttttgggggggccctctccaaaagaaggccagggaccctcgggggcggaaaatgccccaggggatcaacaaggggggaaaaacttttaccaagcaaaaatttttgttgaacggggggggaaatggc

SEQ ID NO: 75474 - DNA, 931 bp, Oryza sativa
  Clone ID: PAT_MRT4530_75560C.1
atggagatcttgctggcgaaggccgtgcagcgtgcagctcgcgcacgatgtcagtcaggtcgcaatcgtgcccgcatgactcgccgccgccatggtgcgtggggaggctctgcacctgcgtgtcgccgtcacaggaggaggctaatgcggcggcaacggctctgggcgcagactcggttttggtcgcaaaggatgacgtcggagatctacgagtccatcgggaagaagctctctgacgctgttgccgagctcgcgtccttcctactgccatccaatgtgtgccctgatcgacctcctcaccttcctctacaagtccatcgcctcccacaagaagagaagcagctgggcaacctcctgttgtttgaagggataaggagatggagagagaagatgaaaggaaagagggggaaggggatgaagaagacatggcaatttggtcctaaaagaataatggaggggacaaggagacacttggagaaggacttagagccatggaggatcatcgaggacgtccaagtcaaggtggaggcccaaaccaagtcgacgtcgggtgcaattcagagtccaggaccagtctgcactaaaacgggcgcccaggtcgcatacgtgctcggattggggcgttctttatatgtatggaaagctaagaagataacctttccaatggttttggtcccacatccaaattttttccgagtcaatgggaattgaccgaacaagttgacgtccagaatttattccggtgctgcatcaccgtatttgggcctttggcctgtctcgatacgggtgataaccagaggagacgtggtgctgcgattgcggggctcaagagcgtgcgcgttcaagaagccggatcgatttgtgtcgcgactccgcccaaatcgttgtttatcagaacctttcggaagatcgggaactcagtgcacatcaa

SEQ ID NO: 75475 - DNA, 360 bp, Oryza sativa
  unsure (1)..(360): unsure at all n locations
  Clone ID: PAT_MRT4530_75561C.1
cacgtaattccttcctttcctttccttctccactccgccatccgcaaccgccacgcaaacttcctctntntntctnttctcggcgcgaatccagaaccttctagaaggagagggagaggagaggagggcccccgcccccacgggtcgccatggccgacgcgtactggaggtacgncgccgccgccgacgccgcgcgcnaccaccaccaccaccagctgcccctctccgnngccccgncgccgggatgcccgccccgccgnctgctgcttctaaggtcgccgccgccgggcagccgntcaaggggcccgccccgccgacttttncgatgtaactgggtgcttctgaaatggtgggtaatta

SEQ ID NO: 75476 - DNA, 2631 bp, Oryza sativa
  Clone ID: PAT_MRT4530_75562C.1
gaggagatcagcgacggcgagatcaacgagaaaggagagggcgagggagaggggagaggagtattgacctttgggctggcccacccgccgagaggcaccctggctgccgacctggctgggcaaatgctgccgagcgccataccaagcaccccgaacccggcccagggcggccgaagtgggggcgcacacggcagtgacaggcgggctatcatagcctacccaacgggggccctagggcggacgaacccgctagccagcagcggtagctatgcgcccactgtgaacgccagcgccgacgccgacaccgccttgaatgagctcgaaagccggcggaacaatggaggggacaaggagacacttggagaaggacttatagccatggaggatcatcgaggacgtccaagtcaaggtggaggcccaaaccaagtcgacgtcgggtaacgaaggtgagaagagtccccaggattttgctgactgtgtcagccaagagcaactacgaactctccaagaaaatactcaaaaggacatcacggaggctgttgcaaagtctgtccaagatgccttcactaaaatcggcttcctgaaccacatggagaggttggacaagcggatatccacgctaactgatcgggtcgccgcgttggagacaccttccaatgaggaagtggtgagtggtgacgacgatgctcatcctgaagacacggtgtatgattccagtggttatattgacgcactggctacaaggcaagcacggttacgacgtcgcctacgcacaaaccgcacaggtatgggtggcactcgccaccaacaaggtaatgataataatcatgtcgccgatgatccttatgctaaggttaggtttaaaataccatctttttggggaaattatgatgttgagaaatatcttgattgggagatgacagtacaacaaaagtttaatgcccaccttgtacccgagcaacatagagttagacaagccagtagtgaattcaaggattttgctattatgtggtgggctgggttatctgatgagggggtactacctactacttgggaagaacttaaggtagctatgcgcgataggtttgttcctccatcttatcatagagatttacgcaagaaactgatgcgtttggaacaaggggataaatctgtacaggattactatggtgagctacaaaagggtgtgagacgctgtggcatagtggagggggtcaaggatgctatttgtcgtttttattctggtttaagggaggaaattcagaacattgttgattataaggaatttaactctgtcaaccagttgtttcggttagctatgcttgcagagaaggaattacaggggcgcgaccatcaaggcaagagcaaggcaagcacatacactccgcgcacgacgccatctgcgggactgcccaaggctgtcttttttcgggcgtcctcccagccagcgagcaagcgaccagctgcatccggagcttctacggcaccaaaaccatctccaccacgaccaggagagtcaggtaaaggttcctcgcaggtacccgccaagagtgcctcatctgtcgcctcgacgggacgcattcagtgccaccgttgccaagggtttgggaatgtgcagaaatattgccctagtcaatgggcctatgttgctacagaagatggctacatcaccacctccgacgtggaagaggaagagagggaagaagaagttgaggatgaggatggcgaagtctttggtcgtgatgacacaacggactacaggaccattattgtgcagcgggtgctcagcacgtatgtacagcagcatgacaagttgcaacgctataatttgtttcagattttcttcgtcatcaacaaccatcgtgcacgtgtgatcattgatggaggtagctgcaaaaacttgttgagttctgatttggtcaagaagcttggcttgactacacgtacacatccacacccttaccatattcagtggttaaacgattccggaagagcaaaggtaacacaggtttgtagggttttgttttccattggctcatatgcagattctgttgattgcgatgtggttcctatgcaagcttgttcacttttgctgggctgtccttgggaacatgataatgatgctacacaccatggtaggagtaataaatacacttttgtgcataatgggaagaaatttattttgctacctttgacccctgctgaaattgtagaagctgaatctgaaaatcagcaagtggctaaatctgtttttccacctaaaaaggataagctttcacctagttctaaggttgagggaattaagttgaaggatggtgttatgcttgcaacaaaatgtgacattgctgaaatttcagatgttgatatgtgctatttcttgatatgcaaacaagccttggtttcttttgatgatattgctagttcgatacctcctgttgttactaaccttttgcaggagtatgagaatgtctttctagctgagatacccccaggattgccacccatgagagggatagagcatcaaattgatttgattccaggagcatcattgccaaaccatgctgcttatcgaaccaacccagaggagactaaggaaattcaacggcaagttcaagaccttttggaccgcgg

SEQ ID NO: 75477 - DNA, 243 bp, Oryza sativa
  Clone ID: PAT_MRT4530_75563C.1
ggcacgaggtggctggccagcaaaggattgctagcgtggcggagaccggttgagtggtggagtgctaggttgctggtgacaaatttggagagggatctacatgcaaaagccatgcttggagacttctgggccaacaaccacgtctagggttgttcccccctttagggcattttcgagctaacgcctcctcccctggtaagattattcgggtgaaaatgaagcccttttgacagatgatagtgg

SEQ ID NO: 75478 - DNA, 4322 bp, Oryza sativa
  Clone ID: PAT_MRT4530_75564C.1
atggaggggacaaggagacacttggagaaggacttagagccatggaggatcattgaggacgtccaagtcaaggtggaggcccaaaccaattcgacctcgggtgcaattcggagtccaggaccagtctgcactaaaacggccgcccaggtcgcatacgtgctcgaattgggacgtaacgaaggtgagaagagtccccaggattttgctgactgtgtcagtcaagagcaactacgaactctccaagaaaatactcaaaagggtatcacggaggccgttgcaaagtctgtccaagatgccttcactaaaatcggtttcctgaaccacatggagaggttggacaagcggatatccacgctaactgatcgggttgccgcgttggagacaccttccaatgaggaagtgagtggtgacgacgatgctcatcctgaagacacggtgtatgattcgagtggctatattgacggaccagctacaaggcaagcacggctacgacgtcgcctaggcacaaaccgcacaggtatgggtggcactcgccaccaacaaggtaataataatcgtgtgcccgatgatccttatgctaagatgacagtagaacaaaagtttaatgcccaccttgtacctgagcaacatagagttagacaagtcagtagtgagttcaaggattttactatcatgtggtgggctgggttatctgatgagggggtactacctactacttgggaagaacttaaggtagctatgcgcgataggtttgttcctccatcttatcatagagacttacgcaagaaattgatgcgtttggaacaaggggataaatctgtacaggattactatggtgagctacaaaagggtgtcagacgctgtggcatagtggagggggtcgaggatgctatttgtcgtttttattctggtttgagggaggaaattcagaacattgttgattgtaaggaatttaactctgtcaaccagttgtttcagtttgctatacttgcagagaaggaattgcaggggcgtgagcagcagggcaagaacaaggcgagcatgtacactctgtgcacgacgccatctgtgggactgcccaaggccgtctcttttcgggcgctgtcccagccagtgagcaagcgaccagctgcattcggagcttctgcaacaccaaaaccatctccaccacgaccagcagagtcaggtaaaagttcttcgcaggtacccgccaagagtgcctcatctgttgcctcgacgggacgcattcagtgccaccgttgccaagggtttgggcatgtgcagaaagattgccctagtcaacgggcatatgttgttacagaagatggctacatcaccacctccgatgtggaagaggaagaggaggaagaagaagttgaggatgaggatggcgaagtctttggtcgtgatgacacaatggcctacaggaccatcattgtgcagcgggtgctcagcacgcagattttcttcatcatcaacaatcgtcgtgcacgtgtgatcattgatggaggtagctgcaacaacttggtgagttttgatttggtcaagaagcttggcttgaccacacgtacacatccacatccttaccatattcagtggttaaacgattctggaagagcaaagattctgttgattgcgatgtggttcctatgcaagcttgttcacttttgctggggcgtccttgggaacatgataatgatgctacacatcatgaaaattactttgctacctttgacccctgctgaaattgtagaagctgataaagaacgagctgctagtttgaaagttgatgaatctgaaaatcagcaagtggctaaatctgtttttccacctaaaaaggataagctttcacctagttctaaggttgagggaattaagttgaagggtggtgttatgcttgcaacgaaatgtgacattggtgatatttcaaatgatgatatgtgctatttcttgatatgcaaacaagccttggtttctttagatgatattgctagttcgatacctcctgttgttactaaccttttgcaggagtatgaagatgtcttttcagctgagatacccccaggattcccacccatgagagggatagagcatcaaattgatttgattccaggagcatcattgccaaaccgtgctgcttatcgaaccaacccagatgagactaaggaaattcagtggcaaggaattgaggtggatgagtcgaaaattgaagccatcaggagttggtcggttccccaaaccatcacacaggtgaggagctttcttggtcttgcaggattctaccaccgtttcgtcaaagattttagtacttttgctgcaccattgaacgagttgacgaagaaaggcgtggtcttccattggggaaagacacaggagaagtcctttgacactttgaaggacaagcttacacatacacctttgctacaacttccaaactttggtaagacttttgagttagaatgtgatgctagtggagttggcattggaggtgtgttgatgcaagatggtaagcctgttgcatactttagcgagaagttgcatggtcctgttttgaattattccacgtatgataaggaattgtatgctcttgtacgttccttagagacgtggcgtcattatttgtggcctaaagaatttgttattcactctgatcacgaatcgcttaaatatcttcgctctcaaaataatttgaatcgtaaacatgcaaaatgggttgaatttattgaatcttttccttatgttatcaaacataagaaagggaaagataatgtgattgcagatgctttgtctaggcgctatactttcttgtcccaacatgattgtcggatttttggacttgaatcaattaaagaacaatatgcgcttgatcctgattttaatgaagtgatgttaaattgcaaagagggacttacttggaacaaatttgtgatcaatggtggatttgtttatagagctaatcgtctatacattccagttggttccgttcgtcttttgttgatacaggaagcgcatggaggagggttgatgggacattttagagctaagaagacggaagatgttttggccatgcatttcttttagacaaggatgggaaaggatgttgagaggttcgtggcacgttgcagcacttgtcagaaaactaagtctcgtttgaatccacatggtttatatatgcctttttctgtaccttctattctttgggcagatatttctatggactttgttttgggattgcctagaactaagagggggaggatagcagttttgtggtggtggatcgtttttctaagatgacacatttcataccatgtcataaaagtgatgatgttgttcatattgttgatctgttttttccatgagattgttcgcttgcatggtatgccttctactattgtttcatatcgtgatacaaaattcttaagtcatttctggcgcacgctatggaacaagttgggtacaaagctattgttttctacaacatgtcacccacaaacagatggacaaacggaggtaggctaccgcactttgggtaccatgttgagggctattttgaagaaaaatttgaagatgtgggaagaatgtttgcctcatgtggagtttgcatacaatcgggcaacacattctactaccaaggtaagtccttttcaggtagtgtatggtttcaacactcgtgctccaattgatattttgcctttacctactagtgagagggttcatcatgatgctaaggcacgcgctgaatttattttgaaaatgcatgagtcaaccaagctcaacattgaaaagatgactgaaaagtatagaattgttggtagtaaaggtaggcaagaggttaagcttgaaccgggtgatttagtttggttgcacttgcgaaaggatagatttccggaattgagaaagtctaagttgatgcctcgtgctcatggtccttttaaaattgttgagaagattaatgataatgcatataaacttgagttgcctcccaagtttggggttagtcccacgtttaacatttaaaatttgaagccatacttgggagaagaggatgagcttgagtcgaggacgacttcaattcaagagggggaggatgatgcgaacatcactaactcggatacacacaacaatcctccaacgttcattcaaggaccgataacaagagctcgtgcgcgacaattaaatttagaggtgagctcgttcctatgttcttctttgtatgaattcgagaatagattgctacctaatgattatattgtgaataggaacaatggaggggtcaaggagacacttggaaaaggacttagagccatggatgaaatccggag

SEQ ID NO: 75479 - DNA, 5173 bp, Oryza sativa
  Clone ID: PAT_MRT4530_75565C.1
gttcttgatcactgcaattgctgactacgccttccaggtatcctttgctttgctggattttgctgactgtgtcagccaagagcaactacgaactctccaacaaaatactcaaaaggacatcacggaggctgttgcaaagtctgtccaagatgccttcactaaaatcggcttcctaaaccacatggagaggttggacaagcggatatccactctaactgatcgggtcgccgtgttggagacaccttccaatgaggaagtggtgagtggtgacgacgatgctcatcctgaagacacggtgtatgattccagtggcatggctacgacgtcgtctacgcacaaaccgcacaggtatgggtggcactcgccaccaacaaggtaataataatgatcgtgtgcccgatgatccttatgctaaggttaagtttaaaataccatcttttttgggatatgatgatgctaaaaaataccttgattgggagatgacagtagaacaaaagtttaatgtccaccttgtacccgagcaacatagagttagacgagccagtagtgagttcaaggattttgctattatgtggtgggctgggttatctgatgagggggtactacctactacttgggaagaacttaaggtagctatgcgcgataggtttgttcctccatcttatcatagagatttacgtaagaaactgatgcgtttggaacaaggggataaatctgtacaggattactatggtgagctacagaagggtgtgagacgctgtggtatagtggagggggtcgaggatgctatttgtcgtttctacactagtttgagggaggaaattcagaacattgttgattataaggaatttaactctgtcaaccagttgtttcgatttgctatgcttgcagagaaggaattacaggggcgcgaccatcagggcaagagcaaggcaagcacatcgacgccatctgcgggactgcccaaggccgtctcttttcgggcgtcccagccagcgggcaagcgaccagcagcatccggagcttctgcggcaccaaaaccatctccaccaccacgaccagcagagtcaagtaaaggttcctcgcaggtacccgccaagagtgcctcatctgtcacctcgacgggacgcattcagtgccaccgttgccaaggatttgggcatgtgcaaaaagattgccctagtcaacgggcctatgttgctacagaagatggctacatcaccacctccgacatggaagaggaagaggaggaagaagaagttgaggacgaggatggcgaagtttttggtcgtgatgacacaacggactacagaaccatcattgtgcagcgggtgctcagcacgcaggtacagcagcatgacaggttgcaacgccataatttgttttagatttttttcgtcatcaacaactgtcgtgcacgtgtgatcattgatggatgtagctgcaacaacttggtgagttctgatttggtcaataagcttggcttgactacatgtacacatccacatccttaccatattcagtggttaaacgattccggaagagcaaaggtaacacaggtttgtagggtttcgttttccattggctcatatgcagattctgttgattgcgatgtggttcctatgcaagcttgttcacttttgctggggcgtccttgggaacatgataatgatgctacacatcatggtaggagtaataaatacacttttatgcataatgggaagaaaattactttgctacctttgacccctgctgaaattgtagaagctgataaagaacgagctgctagtttgaaagttgatgaatctgaaaatcagcaagtggctaaatctgtttttccacctaaaaaggataagctttcacctagttctaaggttgagggaattaagttgaagggtggtgttatgcttgcaacgaaatgtgacattggtgatatttcaaatgatgatatgtgctatttcttgatatgcaaacaagccttggtttctttagatgatattgctagttcgatacctcctgttgttactaaccttttgcaggagtatgaggatgtctttccagctgagatacccccaggattgccacccatgagagggatagagcatcaaattgatttgattccaggagcatcattgccaaaccgtgctgcttatcgaaccaacccagatgagactaaggaaattcagtggcaagttcaagacctttaggaccgcgggtatgtacgtcaaagccttagtccctgtccagttcctgtaattttggttcctaagaaagatggttcttggcgaatgtgtgttgattgtagagccattaataatattactatccgatattgtcatcctattcctaggttagacgacatgcttgatgagttgtgtggctatattattttcacaaagattgacttgcgtagtggctatcaccaaattagaatgaaacttggagatgaatggaaaacagcttttaaaactaaatttggtttgtatgagtggttagtaatgccttttggtttgactaatgcacctagtactttcatgagcttaatgaatgaggttttaaggccttttattggacgatttgtggtagtgtactttgatgacatattgatttacagcaagtctttggatgaacacatggatcatttacgtgctgtttttaatgctctacgcgatgcacgtttgtttgctaaccttgaaaagtgcatcttttgcatggaacgagtctcttttcttggatatgttgttactccacagggaattgaggtggatgagtcgaaaattgaagccatcaggagttggtcggttccccaaaccatcacacaggtgaggagctttcttggtcttgcaggattctaccaccgtttcgtcaaagattttagtacttttgctgcaccattgaacgagttgacgaagaaaggcgtggtcttccattggggaaagacacaggagaagtcctttgacattttgaaggagaagcttacgcatgcacctttgctacaacttccaaactttggtaagacttttgagttagaatgtgatgctactggagttggcattggaggtgtgttgatgcaagatggtaagcctgttgcatactttagcgagaagttgcatggtcctattttgaattattccacatatgataaggaattgtatgctcttgtacgttccttagaaacgtggcgtcattatttttggcctaaagaatttgttattcactccgatcacgaatcgcttcaatatcttcgctctcaaaataatttgaatcgtagacatgcaaaatgggttgaatttattgaatcttttccttatgttatcaaacacaagaaagggaaagataatgtgattgcagatgctttgtctaggcgctatactttcttatcccaacttgaatgtcggatttttggacttgaatcaattaaagaacaatatgcacttgatcctgattttaatgaagtgatgataaattgtaaagagggacgtacttggaacaaatttgtgatcaatggtgggtttgtttatagagctaaccgtctatgcattccagttggttccgttcgtcttttgttgatacaggaagcgcatggaggagagttgatgggacattttggagctaagaagacggaagatgttttggccacatatttcttttggccaaggatgagaaaggatgttgacaggttcatggcacgttgcaccacttgtcagaaagctaagtctcatttgaatccacatggtttgtatatgcctcttcctgtaccttctattccttgggcagatatttctatggactttgttttgggattgtctagaactaagagggggagggatagtatttttgtagtggtggatcatttttctaagatggcacatttcataccatgtcataaaagtgatgatgctgttcatattgctgatctatttttccatgagattgttcgcttgcatggtatgccttctattgtttcagatcgtgatgcaaaattcttaagtcatttctggcgcacgctatggaacaagttgggtacaaagctattgttttctacaacatgtcacccacaaacagatggacaaacggaggtagtcaaccgcactttaggtaccatgttgagggctattttgaagaaaaatttgaagatgtgggaagaatgtttgcctcatatggagtttgcatacaatcgggcaacacattctactaccaaggtaagttcttttcaggtagtgtatggtttcaaccctcgtgctccaattgatatgttgcctttacctactagtgagagggttcataatgatgctaaggcacgcgctgaatttattttgaaaatgcatgagtcaaccaagttcaacattgaaaagatgactgaaaagtatagaattgctggtagtaaaagtaggcaagaggttaagcttgaaccgggtgatttagtttggttgcacttgagaaatgatagatttccggaattgagaaagtctaagttgatgcctcgtgctgatggcccttttaaaattgttgagaagattaatgataatgcatataaacttgagttgcctcccgagtttggggttagtcccacgtttaacatttcagatttgaagccatacttgggagaagagtatgagcttgagtcgaggacgacatcaattcaagagggggaggatgatgcggacatcactacctcggatacacacaacaatcctccaatggtcattcaaggaccgataacaagagctcgtgcgcgacaattaaatttagaggtgagttcgttcctatgttcttctttgtatgaattcgagaatagattgcaacctaatgattatattgtgcttaggaacaatggaggggacaaggagacacttggagaaggacttagagccatggaggatcatcggggacgtccaagtcaaggtggaggcccaaaccaagtcgacgtcgggtgcaattcggagtccaggaccaggattagccttctcggcgaggtcatccgcgtttcgacacgggtgataaccagaggagacgtggtgctgcgattgcggggctcaagagcgtgcgcgttcaagaagccggatcgatttgtgtcgcgactctgcccaaatcgttgtttatcagaacctttcggaagatcgggaaccctagcgcacatcaagtggtatgagagctctaggttcaccgtcag

SEQ ID NO: 75480 - DNA, 2168 bp, Oryza sativa
  Clone ID: PAT_MRT4530_75566C.1
cccaggcgtccgcccacgcgtccgagcacgcggccgcgccgccgccgcctcctccattaccgagaagaagagaaacctctcttctactgttggatccaactactacctacccgcacgccgcaatgtcgctcgccaccagctcctcgatggccggtggggcggcggtggttccacgcagcgcgacggcgacgacggcctcggcgttcgtcacgatgaagcggcgcgccacggccgtgcgcgccgtacacgcggcggagccgtcgaagaacccgcccgtcggcgtcccgtccgcggcgaagacgtcgtcgccgtcggtggcggcgccggagaaggcccccgtggcggccgcgcccgcgcctgtggctccggctccggcggccacgaagcaggtggcgccggcgaggtgggcggtggacagctggaggacgaagaaggcgctgcagctgccggagtaccccaacgcggcggagctggaggcggtgctcaagacgatcgaggcgttcccgccgatcgtgttcgccggggaggcgaggcacctggaggagcgcctcgccgacgccgccatgggccgcgccttcctcctccagggcggcgactgcgccgagagcttcaaggagttcaacggcaacaacatccgcgacaccttccgcgtcctcctccagatgtccgccgtcctcaccttcggcggccaaatgcccgtcatcaaggttgggagaatggcggggcaattcgcgaagccgaggtcggaggcgttcgaggagagggacggggtgaagctgccgagctacaggggcgacaacatcaatggcgacgcgttcaacgagaagagccgcatccctgacccgcagaggatggtccgggcctatgcgcagtccgccgccacgctcaacctcctccgcgctttcgccaccggaggatacgccgccatgcagcgcgtgacgcagtggaacctcgatttcacccagcacagcgagcagggcgacaggtaccgtgaattggcacacagggttgatgaagcccttggctttatgtctgctgctgggctaacagtggaccacccgttgatgacaagtactgatttctggacctcacatgagtgccttctcctaccctatgaacaatctctgacccgtcaggactccacaactggtcatttctacgactgctctgcccacatgctatgggtgggcgaacgcactcgccagctcgatggtgctcatgttgagttcctcaggggtgttgccaaccctcttggcatcaaggtgagtgacaaaatgaaccccaccgagttggtgaagctgattgagattttgaacccatcaaacaagcctgggagaattaccatcatcacaaggatgggggcagagaacatgagggtcaaattacctcatcttatccgtgcggtccgccacgctggacagattgtcacatggattactgatcccatgcacgggaacaccatcaaggcccgctaccgcacccactgtgacccaaggctgaccattctggccgaggtacgagcattcttcgatgtgcatgataaacaagggcggagcccaggaggtgtccacctcgagatgactgggcagaacgtaaccgagtgcttctgcacttccgaaaccggggacttcgatggaaacggggagggctaccacacccactgcgacccgaggctgaacgcgtcccagtcgctggagctctccttcatcatcgccgagaggctgaggaggaagaggatccggtcgtcgaagctgaacaacatgttgccgttgccacccttcggtgtctgaatctgaaatgggtaagggaaaccaggggaagacggaggaattccgaacggtgtagataagatagctgcagcaagaactcgacgaccgcctattccatttgttggtgggatgctcttggtgaaatcctatattttgcgagcttttttttctgttgtaacttttcagttggtatatatatgctctgtaatatcatgccaggctgaaaggctttgacatttcggtttttctatgtttctatcatggataagagaataaaatgcaagatagaagaaggctttgtgaataaaaaaaaaaaaaaaaaaaatcccctaacttgatttgctgtgttcccttggttaaaactcgcctgcgaaaaaaaaaaaaaaaaaaaaaaaaaaa

SEQ ID NO: 75481 - DNA, 336 bp, Oryza sativa
  Clone ID: PAT_MRT4530_75567C.1
acacagaaagtagcttccgagctcattatctttaatagtatgtttttattcccacgcaaaaccaacaggtagatgctagatagatccataccatagccggggttgacagcatcatgtcaaacaaaaccattctccgacagaaaccaaaccacacaccaagcttttcgctgttaacttctccctaactggttggaagcagttttatttggatcatacacactcgcaaagatcaaattttatcaaacatttttggggggcataggcatgatgaccatttatttgtaagcgtccggtttggcaatgcgataccacccttacgtgcttgaacatcccggg

SEQ ID NO: 75482 - DNA, 711 bp, Oryza sativa
  Clone ID: PAT_MRT4530_75568C.1
atggcaactgatggccacataacacacttcgctcatccacagcacctgcttctcaagacccggtatgacagcacctcgcgccatgtctgcgacatctgccgagccaagctctccggcctcgtcggctaccgctgcaacgcctgcgacttcgacatccatcaggcctgcgccgattacttcaagaagaccatctccttcttcgcccatccgtggcataccctcactctgagctccatacccgatggaagcaccacgtggtcgtgcgacctttgcagggagaattgcccccggggaaacttcgtgtaccgctgcatccagtgcgccttcgacgtgcaccctctctgcattttgctcccgcaaacgatccgtagcccgcttcaccagcagcatgatatccacatggtcccttcatggggccgctgctccgcctgccgtgaagatttggacctttggtactaccagtgtggcttttgtctgtttaagctacatatccgttgcgtctctggcgcgccaagtggtgtcgagccttgcaccagcaacgctgccatccgaactaccagtgatgctcagagcattgccatcgttcggcggagctgcagctctggtatcaccaagtttctcgtcaagaaaagcttcatggtcgcgattaacctagcaacaggcgggctggcatcgccggtgctcgacgtccttgaagctgtcctcgattaa

SEQ ID NO: 75483 - DNA, 273 bp, Oryza sativa
  Clone ID: PAT_MRT4530_75569C.1
atggccccacatgcgacggagagtcagtggcacgcgacggtggtgcggccggacagtggtgcctatgcggaggagctcggccgagcaacggcggcgccgatgcggcggggcgcatggccggaggagccgcgccgcccgagcagccgcgagcgcctccccacggcgaccggcgccataggaagaagaagagaatcgaggaaagaagaagaaaatgttgccaccaagatttatcgcaggaaagcaacagaaaaattcacctgctgctgcgtctaa

SEQ ID NO: 75484 - DNA, 1131 bp, Oryza sativa
  Clone ID: PAT_MRT4530_7556C.1
atgtccactgagtcacaagataattctagtcattccgatgagtccatcactagtgagaagcttgatgatatgacatgggaagaaattaatgaccctatggaagctcagcttgaagctcggttggaagctcaacttgaagcgagattgatggctcacctagctggtagctctaatcagctggggggctacacaaggaggtacattagtagagatcatgaagatgaccacaacagattatttgctaaatatttttctgagagtccattgtacaccgatgatcagtttcggaggagatttcgcatgagaaggcatctttttttgcgcattgtacaagctcttggtgtttggtctccatattttcgtctaaggcgagatgcatttggcaaggtgggtctatcaccattgcaaaaatgcaccgctgccatgcgaatgttggcatatggtacaccagctgatcttatggatgagacctttggggttgcagaaagtacaacaatggagtgcatgatcaattttgttcaagatttatggatttggcatgctttctttggtgctgctggttcaaacaatgatattaatgtgttggaccagtctccattattcactgaaatgatacaaggaagagcacctcctgttcagtttaccataaatggtacacaatataacatgggatactatttaactgatggaatttatccggagtgggctgcatttgccaaatcaatcaccaggccccgaagtgctaagcacaaattatatgcccaacgtcaagaatcagcaagaaaagatgtggaaagagcctttggggttttgcaaaaacgttgggccatcatacgtcacccggcgcgtatttgggaaagggaagagcttgcagatataatgtatgcctgcattattttgcacaacatgatagttgaggatgagagaggctcatatgatataccggatgacaatacatatgaacaagggcagtattctcctcaaatgacagggcttgaccatggaccaatatatggatttcaagaagttttagagcaaaacaaggctatccatgaccgacaaacacatcggcgtctgaagggagatttgatagagcacgtgtggcagaaatttagtggtcagcaacaataa

SEQ ID NO: 75485 - DNA, 219 bp, Oryza sativa
  Clone ID: PAT_MRT4530_75570C.1
atggagaaacctctcttcgagctgtctgctcctaggggcgaattctatgagccacctccttcatcggagccaatttatacaactggctatgaaattcaccccgaactaatcagcatggacaccgccctcccggccgccaccgctcccgcctggctggctgccgcgcccgcccagccgctgctactgcccggccagccaccaccactcccgcccggctag

SEQ ID NO: 75486 - DNA, 388 bp, Oryza sativa
  Clone ID: PAT_MRT4530_75571C.1
acgaatgccagctttacattatgttaatgttatactgaatataccgctagcttatatgggagatgctttggtgcgggtataatgtttgcttatgcaattactctatgtcatgacgatgatattatagtagtatctggtagtttaggcgtggtgtctagattatgggatatcattatgtggggttatatgctgcggatgagaggtgggccgctgatggtgacagctcagtacggatattcttccgcgcgtgtatataatcctaagttaatttcctggggagggtattcctccgtatttagccccagttgtatggtcatgacgggctgtcgtaaggaactcggcagtcaggggtggcttctcgatgtactaggagggtatcagatagagg

SEQ ID NO: 75487 - DNA, 388 bp, Oryza sativa
  Clone ID: PAT_MRT4530_75572C.1
atgagtacctactttacattatattcatgttatactgaatatacggctagcttatctgggagatgctttactgcgggtataatgtttgcttatgcaattactctatgtcatgacgatgatattagagtagtatctggtaatttaggcgtggtgtctagattacgggatatcattatttggggtaatatattacggataagaggtgggccgctgatggtgacagctcagtacaggtattcctccgcgcctatatataatcctaagttaattccctggggagggtattcctctgtatttagccccggttgtatgatcatgacgggctgtcgtaaggaactcgacagtcagggatagcttctcgaagtaccaggagggcatcggatagagg

SEQ ID NO: 75488 - DNA, 150 bp, Oryza sativa
  Clone ID: PAT_MRT4530_75573C.1
atggagcgccaggctgtacgttccggtggagcggtcgtcgacgggcacaacctatggagccgacgagcggtcatcttcaagagggagggatgcagggcagagctgcagaggacatgccagcggccactcgatgttcgtgcagcctgctag

SEQ ID NO: 75489 - DNA, 417 bp, Oryza sativa
  Clone ID: PAT_MRT4530_75574C.1
gtagccgttaatccccggagaggcatttcctcgaacacctgccgcgcgcgccgtccgcccccaaaaaccctcgccccaaaccccgcgccggccgaagcggcggctccgtgcggatgccctcccgtcccgtcccggcgcgccccggccggcggtagtaggaagtgtgggggcgcctagcgtatgatgcggcgcttctccccggccgccgcggcgctgctcctccgacgctcgctcgccgccgccgccgccgccgcctcaccagcgctccgctcgggtccgagacagctggtgcgtgcctcgcttcttgacgaaagtttgtctacacagacgagttcagcggcttcaaccatggctgtgcagtaccaccaagggtgtagttcagcagaggggatgagtttgaggttcttgaggctttca

SEQ ID NO: 75490 - DNA, 464 bp, Oryza sativa
  Clone ID: PAT_MRT4530_75575C.1
atgaatgccaactttacattatgttcatgttatactgattatactgcttagcctatctaggagatgctttggtacgggtatagtgtttgattatgcaattactctatgtcatgacgatgatattagagtagtatctggtagtttaggcgtggtgtctagattacatgatatcattatttggggttatatgctgcgaatgagaggtgggccgctgatggtgacagctcagtacgggtattcctctgcgcgtgtatattatcctaagttaatttcctggggagggtactcctccgtatttagccccggttgtatggtcatgacgggctgtcgtaatgaactcgatagtcaggggtggcttctcaaagtaccaggagggcattagatagaggccaacaacacagatccatatcaaaaattgacatcattcacatatgcagttcaaatggcacaattttgcacagcaa

SEQ ID NO: 75491 - DNA, 387 bp, Oryza sativa
  Clone ID: PAT_MRT4530_75576C.1
atgaatgccaactttacattatgttcatgttatactgattatactggtagcttatctgggagaagcataggtacgggtataatgtttgcttatgcaattactctatgtcatgacgatgatattagagtagtatctggtagtttaggcatggtgtctagattacgagatatcattatttggggttatatgctgcggatgagaggtgggccgctgatggtgacagctcagtacgggtattcctccgcacgtgtatatagtcctaagttagtttcctgggagggtactcctccgtatttagccctggttgtatggtcatggcgggctgtcgtaagaaactcgacagtcaggggtggcttctcgaagtactaggagggcatcggaaagagg

SEQ ID NO: 75492 - DNA, 422 bp, Oryza sativa
  Clone ID: PAT_MRT4530_75577C.1
gagtaactaaaactgaagaacatcctaaatctgactaagcaaaatttataaggatcgggcgagctacaatactgcattgtttgggatttgggcacctgatcaacaatactgcttatatatactctgacgccctggtgccaactcaagtatagggtttcagaaacagagtgtagaatcctcaacgaattttaagattacttaagcatacggggatatcctctacattttcttctgtatccccggggaaaccaccaatgccagttgaagttgaagggctttcatttttcatcccacttcgggatggcacttgaacccaaaccccactatttctgactttgaatggtgtactctttctatctttaactttattgggctcaattttgggcttagcaagcacacgggagatatccttatcactgttt

SEQ ID NO: 75493 - DNA, 387 bp, Oryza sativa
  Clone ID: PAT_MRT4530_75578C.1
atgaatgccaactttgcattatgttcatgttatactgattatactgctagcttatctgggagatgcatcagtacgggtatagcgtttgcttatgcaattactctatgtcatgacgatgatattagagtagtatctggtagtttaggcgtagtgtctagattacgggatatcattatttggattatatgctgcggatgagaagtgggccgctgatggtgacagctcagcacgggtattcctccgcgcgtgtatatagtcctaagttaatttcctggggagggtactccttcgtatttagccctggttgtatggtcatgacgggctgccgtgaggaactcggcagtcaggggtggcttctcgaagtaccaagagggcatcggatagaga

SEQ ID NO: 75494 - DNA, 516 bp, Oryza sativa
  Clone ID: PAT_MRT4530_75579C.1
gcgaaagagaagttgagaacatcctggaggtgaatccggtactggtgaggaaatcgaacggcaaatggcgcatgtgtgtcgatttcacagacctcaacaaggcgtacccgaaggacgatttccccttgcctctatccgatgccctcctggtacttcgagaagccacccctgactgccgagtttcttacgacagcccgtcatcaccatccaaccggggctaaatacggaggaatacccttctcaggaaattaacttcggattatatataggcgcggaggaatacccgtactgaggtgtcaccattagcggcccatctctcatctgcaatatataaccccaaataatgatatctcataatctagacaccacgtctaaactaccagatactactctaatatcatcgtcatgacatagagtaattgcataagcaaacactatacccgcaccaaagcatctcccagataagctagccgtatattcagtataacatgaacgtaatgtaaagtaggtactcat

SEQ ID NO: 75495 - DNA, 492 bp, Oryza sativa
  Clone ID: PAT_MRT4530_7557C.1
ttgttgtttacttgcagatgcctagtatagggggaatttcttaaggatgtgcggtgtgcatcacatggatataagttattcttaacaccagaattaagtttgtttactgttttctattccaaaacagcaaagaaaatcaagtaagtgtttccaagaaagtggtgaaccaatgattaactagttatctactatgtttttaagtggtaataatatgtcaatgcaccatgcatgagatagttgcttgattccttgcctcatttgcccaaagcatctcatattttcttttgatgtctgtttacctttatgaaactgtatcccttgctagaatgtcataatgtatgaacaaaaatttgtgccaattgacatattttttgtacttgtttattccaaattcccaatgatcaggtgggtttggcagttatttatttgggatgagtgaaacaatagccaagcaagcaacagaggctaaagatgctcaaaatttcaaggatc

SEQ ID NO: 75496 - DNA, 426 bp, Oryza sativa
  Clone ID: PAT_MRT4530_75580C.1
cgatgtatgagctctaatctaagcagactgcatatgcttcaggagttaaaaaaaaaataataaaaagcagactatacaacactaacgagggaagaggtataaataattgaaataagccgaagtccaatataaatatgataaataaatgtaacacaaaaatacaaaaaaatggggcggcctttttaaagatccaaattttacttccgcgtgcttgcaagacaatattttttttttgggtcaccctaatttaaattcattgcccgtcttttaaaacactttggcctggaaaaacctgggctttacccaattaattccccttgaagaaaatccccttttccccggttggcttaatagcaaaaaggcccgccccatttccctttccaaaaattgccccaacctgaatgggaaatggaaccccccttttat

SEQ ID NO: 75497 - DNA, 210 bp, Oryza sativa
  Clone ID: PAT_MRT4530_75581C.1
atgctcgccgccaacgcgcacgcgccacttgtgcccgcgacggtgccggtgtttgcttcacctcgtgccacggcccagcggcggctggagcggcatgctcgctggatgcgacgcgtggccatgggcggcgccgtgaggctgtggctggaggtggtctgcgtgttagcgtgggtcacgcttggtcactcgggccagcagcacagtgactag

SEQ ID NO: 75498 - DNA, 451 bp, Oryza sativa
  Clone ID: PAT_MRT4530_75582C.1
atgaatgccaactttacattatgttcatgttatactgattgtactgctagcttatttgggagatgcattggtacgggtatagtgtttgcttatgcaattactttatatcatgacgatgatattagagtagtatctggtagtttaggtgtggtgtctagattacgggatatcattatttggggttatatgctgtggatgagaggtgggccgctgatggtgacagcttagtatgggtattcctccgtgcgtgtatatagtcttaagttaatttcctgtggagggtactcctctgtatttagccccggttgtatagttatgacaggctatcgtaaggaactcgatagtcaggagtggcttctcgaagtaccaggagtgcatcggatagaggaccaatctgaccggccatctggccggtccgaccgcacctctgactgccggttagaccgacaca

SEQ ID NO: 75499 - DNA, 435 bp, Oryza sativa
  Clone ID: PAT_MRT4530_75583C.1
atgagtacctactttacattatgtccatgttatactaaatatacggctagcttatctgggagatgctttggtgcgggtataatgtttgcttatgcaattactctatgtcatgatgatgatattagagtagtatctagtagtttagacatggtgtctagattacgagatatcattatttggggttatatattgcggatgagaggtgggcccctgatggtgacagctcagtacgggtattcctcctcgccggtatataatccaaagttaatttcctgggaagggtattcctccgtatttagccccggttgtatagtcatgacaggctgtcgtaaggaactcggcagtcagaggtggcttctcgaagtaccaggagggcatcggatagagggtattagaaaatatgatctacatgtttgtttactttttatgtattgt

SEQ ID NO: 75500 - DNA, 271 bp, Oryza sativa
  Clone ID: PAT_MRT4530_75584C.1
tagcgatgcgcggcctggcgacgacgatgaccttagcgccaacttgcgtgctatccgagctgatccagcaccggtggcggtgagctcagctcaagcagatctagtggagacgacggtatcgggtctggtgttgagctacgacgtgcggtctgacagaggtgacatggccaacggcgccgaggaagggggaggaggggaacagctcctggccgagcaccgacgtgacgagcgcggccaccacgtccacaagcagcgcctgcgcgccgatgtt

SEQ ID NO: 75501 - DNA, 189 bp, Oryza sativa
  Clone ID: PAT_MRT4530_75585C.1
aagtggatagtttgtttttagtttaatgaaggaatacactacaaacagggaattacatggcccaaccaaaggaggtcttggactgagaagataattcatcaaagctaataggcaagcacgcagagcagtcccaaaggtaacacccaacggaaagttattaccatatagatccaagggggcttataaaaa

SEQ ID NO: 75502 - DNA, 459 bp, Oryza sativa
  Clone ID: PAT_MRT4530_75586C.1
atgaatgccaactttacattatgttcatgttatactgattatactgctagcttatctgggagatgtattggtatgagtatagtgttttcttatgcaattactctatgtcatgacgatgatattagagtagtatctggtactttaggcgtggtgtctagattacgggatatcattatttggggttatatgctgcggatgagatgtgggccgctaatggtgacagctcagtacgggtattcctccacgcgtgtatatagttctaagttaatttcctggggagggtactcctccgtatttatcctcggttgtatggtcatgacgggctgtcgtaaggaacttggcagtcacgggtggcttctcgaagtaccaggagggcatcagatagaggaaaagggagagccacccttcccctattggactagtcttttagggagattgggcattttcctgagtaggtgt

SEQ ID NO: 75503 - DNA, 383 bp, Oryza sativa
  Clone ID: PAT_MRT4530_75587C.1
atgagtacctaatttacattatgttcatgttatattgaatatacggctagcttatctgggagatgctttggtgcgggtataatgtttgcttatgcaattgctctatgtcatgacaatgatattagagtagtatatggtagtttaggcatagtgtttagattatgggatatcattatttggggttatatattgcggatgagaggtggaccactgatggtgacagctcagtacgggtattcctccgcgccgatatataatcctatgttaattccctggggagggtattcctccgtatttagccccggttgtatggtcatgatgggctgtcgtaaggaactcggcagttaggagtggcttctcgaagtaccaggagggcatcggat

SEQ ID NO: 75504 - DNA, 543 bp, Oryza sativa
  Clone ID: PAT_MRT4530_75588C.1
atgcggatgccgtcgaggtgcatggcggcggcgtgcggccgaaccgtgcggcggcggcggcggcggttgggagcggcggcggaagctggtcaacaccctgccgcctcccccgcccccgcctctgccttcgctgccgccgggccctatggcgtggctaggcctcgacggtcgggcagctgggctgccgcggtgcccttagcggccagtagcggcgcggcacggctaggtggggcaaggaggccggacaaagggggcgccggcgggtggcaccggagccggagcggcagcgtttctggcattggtgcaggcccagatggcaatgcaaagggagttggcggcgtgggggaagctcaggctgctgaagcaatgccacctagtcccaggttctccttcggccagatctggcgaggaggccggtgggtggttgaacggaggggtcctgggtcagctctcagggatggtggttcgatgaagtcggccgacggaggggcgtcagttcgggtgtggcggaagccatgtgccgccgatgttcagatgtcatga

SEQ ID NO: 75505 - DNA, 1335 bp, Oryza sativa
  Clone ID: PAT_MRT4530_75589C.1
ttagaacatatccccctgatgagaaatcgcggcggtcgcctccatcaccgacgccgccacctctgccatccggcaggtccttcggcccgacgactcggcctcacctgacgaccgtgccgccgccacggctctcatcgacgcgacttcggccgcgactgccaaggccgtccaagcggtgatttctgctctcgtcatcacgcctatcaacgacacggtggccacagcgtcaagttctaccttcccgacaacggtcaccgttgacgccgcggctcttcgcgccaccctcggacttcctccagccagcgcgaccacgcaaccgcccatcggcctcggctcttcttcaccggccgaccacgctagcctgttcgctgcactcagccctagcacgaacagcccgccggctccatgtccgggggcgctctgccaacctctgacactgtcgatgcccttcatgcccaggcggtgtctgttctcaatgtcaaggtgcttgtccccgtcgtcctcgacctcctggagaccatcattcagcctgatggtaacgcacgcctcgtctgtctctccctcgagcagatgttcctcggccactaggaacagcgcgccatcaacctcacggctgaatttcacacgttcgtccaaggtgacctcggcgtgaacgactactgttgacgtctcaaggctatggctgacactcgcggtgagctcggcgaccccgtcaccgaccagcaacttgtccgctccaccaactcctccaccgccctcatgaattgcacgccacggggttcgggaacctaaatcaaggcggcggcaacacacaaggtggcggcggcaacaacaaaaatcgctgtcgacgcaacgggaacgggggcggcaccgccggcggcaatggcggcgccgctcagggcacatgtggccaaagcgtagggcaggctgcccctcagcctcgcgctggacaggcctggcccactcctcagcacccctgggtcggcacgattcaaatgtggctgggcggcccgatgctgcgtgctccagggattttgggccctcggcccacttctccttttgcgggcgtggcaatgtccggtgggcaagctgccctcccgcagccggtctcccaggccggcccttaccaggaccgtgatcgccaggtgcaatagcttcggtgacttgtactcctttctggcgaacttcttcacctccattgccagttccttcgctgccactaccaccacactctggcatcgccggcttggacacattggtcacgacgccctcacccgttttgctcactccttggtcatctctcctcccaaatgcggctcctccaccgtatgccat

SEQ ID NO: 75506 - DNA, 1476 bp, Oryza sativa
  Clone ID: PAT_MRT4530_7558C.1
atggggcccggaacctggcgcaaggcctacggcgcgctcaaggactccaccaaggtcggcctcgccaacttcaacagcgagtacaaggatttggatatcgccattgtgaaggcaaccaaccacgtagagtgcccgcccaaggagcgatacctcaggaagatactctttgcgacctcggcgaatcgaccgcgatccgatgttggttactcaatatgtacattggctaggagattatccaagaccaagaactggattgtcgcattaaaaacattgatagtgatacatagattgctcagagaaggtgatgggacatttaaagaagacttcttgaactattcttatagaggaactattttgcagattccacaattcaaggatgattcgagccctttagatgaacgggtcgagtgctttagaattctaaaatatgatgttgaagcggatcgcctggtgaaattaccccaagcttctggcaagcctgaaggtgcagcctgcacaaattatcttgtacaatatgcattggcccttgttttgaaggagagcttcaaaatatactgttcgatcaatgatggcatcatcaatcttgttgatatgtatttcgatatgcaaaaatatgatgctatcaaggcacttgaaatttataaacgagctggctatcaggcagaaaagctttctgctttttatgagcactgcaaacgtcttgaattggcaaggactttccagtttcctactttgaggcagcctcccccttcattccttataacaatggaagagtacatcagagaagcaccccgtgtcagcatagcaagtaaaagtttggaaagcgaggagcagaattcacctagtgataacgaagatgaagctccacaggaaacagagaaaccagtggatgaggaggaacaagaaccttcagagcctgaagaagagccacagcctacagctgagtccgtggaaggaacagagccggtaccactagcaactactggggatctgttaaatttcgacgaagaagtaaaccccctgattgcaaatattgaagaaagtaatgcactggctctgcaattgtggcaccaggctggaggatttgacaagctactgctagacagcctgtatgaagatgaagcaaggaggcagcaaatagccagtgcaacctacaacggcagcgttgcaggaaacccatttgatcccaacgatccatttgcaatgtctaataacttcgcgccaccgtcgaatgttcagttagccatgatgcaacagcagcatcaggattatcaggagcagcagcagcagtattatcagattcagcaacagcagcaaatggtgacgttgccgccgcaaacataccatcagcagcagcagacacagtattctgctcttccttctcatgatggattatccaatccatttggtgatccattcggtggccttgttgcgatggctaatcctccaaagcaaaacaattcaaatttagtctga

SEQ ID NO: 75507 - DNA, 679 bp, Oryza sativa
  Clone ID: PAT_MRT4530_75590C.1
gccctgtgccgttgcgcgcgcgatgagaaaaaaattgttatgtgggccccatatgaaaaaatttgatatatttaatgtatgtatgctttaaccaagacagcttataactaacttatttttttcgcggcagcagagtatgtgattggtaatggggaaaacacaatgttcttgacctctaactggctgggcaaaggttgcattgctcggcagtggccgatccttctttacacttatgttagccgatcaaatctaacagtggctcaagcgctggtacagcacactctttccaatgaagcaattggtgaattctttcatatatgggatgaagttcagagactctcccttacttctgaagcggataggatcaaatggaagctaactggtgatgggtccttcccagctgtatcctctgcttatgaacttttcttcatggccacggagatctgccctttaggagaactcgttcggcactcgagggcgccatcacgggtgcggttcttcatgtggcttgcgctccagggtaaatgcttaacggccgacaatctttaaaaacagaactggcccaacgacgagctatgccctctctgtcgtagagaggatgaagactgtcaccatcttttcgtgacctgtccgtactccaatgcggtgtggagatcactgagaagctctggtcaggact

SEQ ID NO: 75508 - DNA, 1476 bp, Oryza sativa
  Clone ID: PAT_MRT4530_75591C.1
atgggcaagtcaccatctgttggtgtcttacatgaagatgattgtgatgaagtcaaattctttgagaaaccaagaaagaatttgcaaagtgatgatgagaatgtggatgagcgaccaggttggcttccagatggatggataatggaggtctatcgtggtgatgatggcaccatctgccggtattacatatgtcccttttccggaatcactttcacaatgaagccagaggtgttgtattatcttttctcagagatggatcagcgcttcttggaatcaaagaactgtgttgtaggcaacaaccttacgcggcgccatctccggccgccaccaccgtccatgtcactccaacgtggcctggacaatacacggagcagcggcgaccatcaccggctcggacgcgccaccgacattgtccgcgatgccgccgaagcccaccgcccgcttgatgcggtcgcgggcgtggtgaccatgctcaccgacctgcggagcagcttggtcagcggcaaggacatggccggctgcagcaacggcccggtccgcgaggtcagcacgacagacggggcaggtgacatgcgcggcgagccacacgtcgatgcaggcggtgtggaacacatggcagcacccggggaggaggcagagcttctcgccgtcgtccacaaactcggcgaggcagaccgcgcactcgagcgccccatgcccggccttcaccgccctcgctgtcgccgaaaatataccgcaaaacatttgcatatgaaggatttgctcaccattgttgccatgttggctgctcatttccaaacattgttggaagagagcttgaggctgctcctccatttctatgtgtacccaccagatagagttcgactgttctcaaaagatgatgtactactctacattaaagaaatgaagatttctgaatttgatacagatggacaatgcaacacaaggctgccacaaggatgggtaaaagaagtggtctttagaaagacaaataccagcagaattagaagagaccagcactacaccgatcccattaaaaattatgtattccgtactatgagatattctgaaaaacgtataagttctaagccatctactttaaaaaggtttagtgttgtactgtgtcgggcgcctagtcctattttggatctgctggtgtcatctccatggtgtggaggggtggtggtggtgctggaggtggcgattgctggtggtcgtctgggcagttgtggctttggtggcagtgctagtgacggcatttgtggtggatttggctacacggtgctggaggccacactaactgtagcagttgctggtgaagatagcgactctgattgttcagataaactgcatgagccaggacaaaacaaggtcaatcatgtgaagactactctaaaaggcaaagaagtaatggcctcaaccactgtcaagcgccctagagggaggcccccaaaacgaggaaaggctagaaagtga

SEQ ID NO: 75509 - DNA, 547 bp, Oryza sativa
  Clone ID: PAT_MRT4530_75592C.1
actgttaacaatggaatttgcgtcaggttcggagaagaaggaagaagatcgacgaggatctgttttgttttgttgcaggaaattcggtttgttttttggaaacacaccgaataatccggtgcgtggagccgcgtggagtccggataaattagacatgacttatccggttcggttacgtggggtgtagatcttgaaggcgccctgatcaagcgttgtaatatctctatataaagcgagccgctgcatccaagcaatacacacgaaatcaatatagggtttgtctcctcctctgtagtgcgccgtcgctcatagtctactccatcctgctcaccggccatcgggagagtaggtcaccggaatcttcgccttcgacgtcctgcactgggagaaggcgacaataaggtttttgggaagcgctttgcgcgactgcttgctattagtccataacagctcatcttccacttagctcgagtgctgcgtgctgtcgtatatgcccggtaccgcaacttattcctgttgtgcagccgatctttcaaaaccctcggtg

SEQ ID NO: 75510 - DNA, 284 bp, Oryza sativa
  Clone ID: PAT_MRT4530_75593C.1
tcgccaggagagctctcgcttttcgccgccgacggcgacggcaacggcaacgaggaggtgaaaccgtaaagacggtcagagacggcgcgcgcaatgaaggccgccgccgccaccggcggcggcgggagaggagacctcgcggccaccctcctccgctacctcatcatcttgattgttccgttcaccgtcctctacatcctgtacaccctccacgccattctctcctccacgccgtcctgcccacctgatcgccccatcgtcacctcctccgtttctctgtccca

SEQ ID NO: 75511 - DNA, 371 bp, Oryza sativa
  Clone ID: PAT_MRT4530_75594C.1
gaaaagggaatgggacaaattccaattgttgcgtggcgggtgggttaaaaggtgtatttactacgggaatctgggggggctctaagtatacttttaggggggggaattacacaatggagtaaacttgggaatatttggttttagggtgaaatggttttttggttaaaattcccaaaaataattgggtcggagtaataaagggttatgcatggggggcccagggggtgacctatttataaataattggggaaaccaaattggcgagttttaagtgggaaaacctgtccggccagttttttttattaatagggcaaccggggggggggggggtgtttttatttgggcacaagaggggtttttttttttacaag

SEQ ID NO: 75512 - DNA, 1885 bp, Oryza sativa
  Clone ID: PAT_MRT4530_75595C.1
ctgcaggaattcggcacgaggtgatgacgagttcgtcttcatcgcttccggtgtcggctcatccgtccgaggatggaacaaggcgtgccgtctgatttgtgattgaggggtgtttacatggaggcagcggcgaaggttggtcggctcacacggagcagcctgcaggcggcttcctgcccggctgtgaacggcggcgtggtcgtcttcttcgccgcggttgtcgccggagctctcgtctccgcttcctggatgtctacgggcgccagggtaaggtgcactgccactagtagctacgtttaatctggcgattcgtttctagctcgtggtttggagttcatgttgctagtgtaactaaagaaagcaattccgtcagctgcactgcactctctggatcgtaaaagatgggaaaattcgatacatagcgcgattgtccgataatgaaattcaccaagcccgtgccagtttcaggtcacttcgatccctatgatcgccacccggaacatggcacagcatgcggcagcgagtccggaaccagagccgactctgccacgcctcggcaatctcgcgcccccaccacggcaaccgccaccgccagcacctgccccggcgatggatggcagaacagagacgtcgccgtcgtcctcctgcccggcatacttccggtggatccacgaggacctgaggccgtggcgggacgcggggatcacgcgcgaggcgctggcgcgcgctcgcgtcaccgccagcttccgcctcctcgtgctgggcggccgcgccttcgtgcatcggttccgcccggcattccagacccgcgatctcttcaccatctggggcgtcctccagctgctccgccgctaccccgggcgggtccccgacctcgacctcatgttcgactgcgccgactggcccgtcgtccgcacgcacctctaccgcgggaagcacgctgccttcatgcctccactgttcagctactgcggggatgacaggactctggatatcgtcttcccggactggtcattttggggctggccagagatcaacataaagccgtgggatgccctgcggcaagacctgaaggatggcaataatagggtgaaatggttggatagagtaccttatgcatactggaaaggaaatccagcagttgctgtgacacggcaggaattggttaactgtaatgtctctactacaaaagattggaatgcaaggatctacaaacaggattggttcagagagagcaaggcagggtacaaggactcaaatttgggtagtcaatgcacgcacaggtacaagatctatatagaagggtcagcatggtcagtcagtcagaaatatattctagcatgtgattcaatgacactgctggttacaccaagatactatgatttcttttcgaggtcacttatgccgattcagcattattggcctgttcataatgacaataaatgtgactccataaaatatgcagttgactggggcaactctcacaagcaattggcacagcgcataggaaaacaagccagtgatttcatcgaagaagatgttaatatggaccgtgtttatgattacatgcttcaccttctaactgaatatgccaagctcctaaggttcaggccaattaaaccacctgaagctgttgagatctgtcctgattctttggcctgccaagctgaaggccttgagaagaagtttcttatggaatccatggtgaagtctgcccgtgatgcaggtccgtgtgatctgccacctcctttcaaccctcaagagctcgcaatgattaagcgaaggaaggacaattcgatcaagcagattcaaacatgggagagaatatctgggagggcttagttgcttagagatgatattgttagctagaaatatttatccaaac

SEQ ID NO: 75513 - DNA, 2739 bp, Oryza sativa
  Clone ID: PAT_MRT4530_75596C.1
atgccttcgacgagcaaatgcaaccgcatcagccgcgtcgccgatgaggaggaggaggaggagatcgttgccgtctcctccgacgccgacgaatcggagtcagagtcggaggtggggagtggagcggaggaggaggatgacgactacgtgggggagagtagtgactcggccggcggcagcggcagtggcagcggcgacggcgacggcgacgaggaaggaggtaggagcgacattggcgatggcgagggcgagggcggcgggcggcgagttcggagcgcgtgtcgcggcgtgagagcgaacgaccgggagaggaaatcgcagaatgtggatgccctcgtcaggggaaatctagttgtaagaaggcagccacttattccacgtattctttcggtttctgatgcggcagcaatagctcgaaagccattcaaacctccctgtcaaaatggatacagtgaaaataatgagcaacttgctcggcgcctttcagctcgtaaaagatttgtcccatggggttcggtgcagccatttgcagttacaaatattcttccacaatcacctgctgtttctagtgatgattccgtagaaaatgaggaatcccttccaccaggcatagagccattgattttgtggcaacccgaggggcgtgacaaggaaaacagcaatttttctgcaatcaaggttgatcacttgcttgtacgttacctccgaccccatcaaagggaaggagttcagtttatgtttgattgtgtatctgggttgttaaatgatgatggaatatctggttgcattttagctgatgacatgggattggggaagactttacagtcgataactttactatacacccttctttgccaaggatttgatgctaagccaatggttaaaagggctgtcgtcgtaacccccacaagtttagttagcaactgggaatctgagataattaaatggttaaaaggcagagtgcagttgcttgctctttgtgaaagcacacgcgctgatgttctttctggaattgaaagtttcttaaaacctttgagccgtcttcaggtactcatcgtatcttatgagacattccgcatgcattcttcaaaatttgaaaggccgggaagctgtgacctcctcatatgtgacgaggcccacaggctgaaaaatgatcagaccctaaccaataaagccttggctgcccttccttgtaaacggcgtatcctgttatcaggcaccccaatgcagaatgatctggaggagttcttttcaatggtaaatttcacaaacccaggagttctgggggatgctacatatttccgcagatattatgaagcaccaatcatttgcggaagagagcccacagcaagtgcagaagaaaagaacttgggatctgagagatctgcagagctcagtgcaaaagtaaatctgtttatattgagacggacgaatgccctgttatccaatcacttgccaccaaagatcgttgaagtagtgtgctgcaagttgactgctttgcaaactgcgctgtacaaccacttcatacattcaaaaaatgttaaacgcttgatatctgaaggaacaaagcaatccaaagttttggcttatattactgctcttaagaagctatgcaaccatccaaagctgatctatgacaccataaaaagtaataattcagggggctctggttttgacgactgcctgcgcttttttcctcctgaactgttttcgggaaggtcaggttttgtgacattggatctgtttgcacaattatgtcgggaaaggagatacccgtatattaggcttgatggagcaacatccattaataaaaggcaaaagttggtgaaccaattcaatgatccatccagagatgagtttgtctttctacttagtagcaaggcaggtggctgtgggcttaatttggttggtggaaatcgattgattctctttgatcccgattggaaccctgccaatgataagcaggtatatcagcgtcagatgtcgaaagaaggtctccaaaaagttattcagcaggaacaagcagatggcaaaatgcaggggagttctctttcaacagaagatctgcgtgatctttttaccttccatgaacaaatcaggtctgaaatacatgaaaatttgaagtgcaatcgctgtaacaaggatggatgtatggttctcgatggtagcaaatttgattcagcagccactgagcatgaggcttctaactcaggagagaacagttacattgatattggtggatttggagcgatctctggatgtgtgcagaaaatgaatagttcgaatcaacagattggaagtccttctgaagaagatttaggaagttggggccatcattctgatccatcaactgtacctgatactatactccagtgttcttctggtgatgaggtttcttttgttttcacaaatcagatcgatgggaaacttgttccagttgaatctatggcgcgagctgcaactcatcgaacacatgaagtgactgttaatgcagaaaaagaagtgggaaaaatcaattcttctaatgtacctggaaccgaacggcaatctctacttggaaaaaatctgaagatgatgggattcaatttaaagaattcgtctatgaaattcccaactaagtccagaagaatgctgccaaactgtttgcaagggatgaacaaaaccagcacatcttcagatcatcaacaaactaaaaagcttcatgttatttctgatgcgtctgatgatgattttgtatga

SEQ ID NO: 75514 - DNA, 3135 bp, Oryza sativa
  Clone ID: PAT_MRT4530_75597C.1
atggcggggcttggccggagctcgcgcggcgcctccgggaagcgcggcgccgcgtcctcctcctcctcctcgtcggtgtcctcctcctccgccgccgcctccgcgtgcgtctactacgccaccacggccgtgctcgtcacgctctgcgtcgccggcgcctacttcctcacgtccgcctcgtcggcgtcgcttgcgggctctgtcgtcgatggcgacggcggcggcggcggcggcggcggcggcaccgtcacgacgacgtaccggcacaccacgcgctcgtcgttcgcgtacgaggtcagtaggcccgagaggaaggcgcccccggcgccgccgcgcgatgtcgagcgggtcgatgacgcggcggcggcgcgggggagaatcgctgacgaggagggcgccgaggaggagcacggcgatggcgacgacgacccgcgtgggaagcccgatcttgatgaccatggcgccgacgaggaggagaccaagagcgccgtcgcggccatggacgacgcccagcgacgcgaggaggatggcagcgtgtcatccagcgaggccaacgccgaagaggaggaggcggcggcgacgactggagcgcgccgcgtccgcgtcggggaggacgaggaagaagccgcgcgagaagagagccaagagctgcacctgcagatgccgctaggagagtctcgccctcgcgccgccgccgccgtggaggagaagagcttggacggcggcgtcgaggaggagagcaacgccgggcagcggcagcgcgaggaggagcagatcgatcatggcgtcgacggcggcgcgagcttgcgccgtgaagcgcaggaggaagggcagatcggtgaagggtacgtgatggcggatcacggcgaaggcgaggagatgctgctcgagcagcagcagcagcaaccggaggaggagcgtggcggcgatgcagaggcggcgcgcacgtcggagtccgacgccggcggcgaggtcgacccggaggacaagccaaccgtgtcagagcggacggaggagatggtcgacacgctccccggcgaggaagaccgcgcggaggtgtccgccaccggcgtcgacgagcagaacgcgtgggcgacgcaagccgatcactcccaccaggagaaagaccggcgcgacgaggcggctggcgtcgacgacaacatcgccgacgccaccgccggcggcggcggcggcggcgaggagccggagtggcggctgtgcaacgtgaaggccgggccggactacatcccatgcctggacaacgacaaggccatcaagaagctgcggccggagaactaccggcggtacgagcaccgcgagcggcattgccccgacgagggcccgacgtgcctcgtccccctccccgccggctaccgccgccccatcgagtggcccaagagccgagacagggtttggtacagcaatgtgccgcacacgaagctggtggaggtgaaggggcaccagaactgggtgaaggtgagcgggcagtatctgacgttccccggcggcgggacgcagttcatccatggcgcgctgcactacatcgacttcctgcagcagtcggcgcgggggatcgcttgggggaagcggacgcgggtggtgctcgacgtcggctgcggcgtggcgagcttcggcggctacctgttcgaccgcgacgtggtggccatgtcgttcgcgcccaaggacgagcacgaggcgcaggtgcagatggcgctggagcgcggcatcccggccatctccgccgtcatggggtccaagcgcctccccttccccagcaaggtgttcgacctcgtccactgcgcgcggtgccgcgtcccgtggcacgccgacggcggcgccctcctcctcgagctcaaccgcgtcctccgacccggcggcttcttcgtctggtcggcgacgcccgtgtaccagaagctcaccgaggacgtccagatctggaaggccatgaccgcgctcaccaagtccatgtgctgggagctcgtcgccatcaagaaggaccgcctcaacggcatcggcgccgccttctaccgcaagccgacctccaacgagtgctacgagacgcggcggcggcagcagcctccgatgtgcagcgacgacgacgacgccgacgtcgcgtggtacatccgcctcaacgcctgcatgcaccgcgtccccgtcgccccgtccgaccgcggcgtcgcgtggccggcggagtggccgcggcggctgcgcgcgccgccgcactggctcaacgcctcccgcgccggcgtgtacggcaagccggcgccggaggacttcgccgtggactacgaccactggcgccgcgtcgtcgacaggtcgtacctcaacggcctcggcatcgactggtccagggtcaggaacgtcatggacatgagagccacctacggagggttcgcggcggccatgagagaccacaagatctgggtgatgaacgtcgtcaatgtcgacgcggcggacacgctgccgatcatcttcgagcgagggctgatcgggatgtaccatgactggtgcgagtcattcagcacctacccgaggacatacgacctcctgcacgccgaccgcctcttctccaagatcaaggagaggtgcgccgtgctgccggtggtggtggaggtggacaggatcgtgaggccggggggcagcatcgtcgtgcgcgacgactccggcgccgtcggcgaggtggagaggctgctgaggtcgctccactgggacgtgcggctcaccttctccaagaacggcgaggcgctgctctacgccgagaagtcggattggcggccggagttgctcgccgacccgttgtgatgatctccagcgaccggcgcgcggcgtggccatctcatctcaggatggcaaagcagcactccccaacacaagattagatagaactcttctcctcttttcttttcttcttttttttgtcttttttttgtctgcttctttgattggtagcacttgacatagttctgtagtggttattatcctacaaacacaaataatgcagccatcagcaacaacaatggtagtatatgcatggttttgtcactgttctagtatagtatgtgtaccttctgagcactaacacaaaagtacagaactgagatgtctgatggcttgggctctgttggtagtttcatc

SEQ ID NO: 75515 - DNA, 970 bp, Oryza sativa
  Clone ID: PAT_MRT4530_75598C.1
cccacgcgtccgcaaatcaccgcgacctccacctccacgcctccgcgcgcgatgctccgcctccgccgcctcaccggcgccgtctccggcggcctcgcccgctacctctccacgcgcgccgcgtcgccggcgcggcccccgtgggcgctgctccagctgtcgaagatggaccggtccggggcgtcgtcgcagccgggcgcgtcgctccacgccgactacccgccgtgcgtctcctacctcaccttcgccgccagcttcgtcgacccccgcctccgccacgacgccgagtccgagatgttcggcacggtctccacggacgtccgcgccacgagcggcgacggcctcgtccccgtccgcttctacgactcccgcaaccacctccccaccgtcggcagccgcggcggcgagccgatgcgcgagtgggccctcgacggcgtcgaccgcgaccgcaccgaaggcaacgtcgcctgccgcatcaacatctgcacggcgagcagcggcggcctcctcctcctccgcaccgtgttcgatctcgcccaggtgcccgaccatgtcaagttccccatccccatctccaaggacgacaccacctggcctccgctccccggcctcaagtcccacacggaggtctcccgcgtcgtctgcccaatcacgaccgcgaccttctgcctcgcctcgccaccgcgcgtctcccagctcgtcgtccccatccgcttcatcgtgtccctcgctgtccccgtcgacgacggcagcaagggggaggtcatctcccgcggcaccatctgcgcggcgaacagcggcggcctcttcctcgtccgcaccgcgctcgagctagtccaagttcctgcccatggcggaaaccccgtcttcatccccaggcccaaggatgacacctggccgccgctccctggcctcaagtccgacaccaaagtcgtccgcgtcgtctgcaaccctctcaccggcggcgagc

SEQ ID NO: 75516 - DNA, 236 bp, Oryza sativa
  unsure (1)..(236): unsure at all n locations
  Clone ID: PAT_MRT4530_75599C.1
atccatccctcgccccatagttttcttcaccatgtttgcttgttcctcttgtgcgatggctccctagcccagcgactattaggccagagcactagtcaatggcagagttctctgtcgtggaagtcgagaggatgtagatttgataggttnaagcatttgagccaattcggagtgtgaggtctcaagctggtcacaactgagttcttccgagttctctaatgagtgtcagttacgag

SEQ ID NO: 75517 - DNA, 363 bp, Oryza sativa
  Clone ID: PAT_MRT4530_7559C.1
gcagaactcaaaaccattgcctcgtattaaaggtcgatttctgtagacctcgcagttactccagttatgcctaccatgttgggtaacactcgtaaaataacaaaatcttggtctgcaagacctcagaagacatgtcaatgagtgaatgtcttaaaatgactaaaggttgttttggatgctgaatccacctcttggttgctaacctgctacaaaaagcttcacttgaaattaacggcgaataaggcgataaaatgtttccaccaatgattcaagaatgacgatccaagaacttctcaatcattaccgagaaggtggcaaaccccacacatccaacacatgtagctttaggaccaccttttgcag

SEQ ID NO: 75518 - DNA, 441 bp, Oryza sativa
  Clone ID: PAT_MRT4530_755C.1
tcaatccgagctcatataaagcttcctcgtgatctcctcttccgtttgccccctttcccgtgctctctcgtgccccgtagcgtcgccgccgcgtgcacgaagtccgccgccgccgccggccatcttcggtcgcgtcgcgccgccgtctccgccgtcgcctttggtcgccgccaccgccattaggtgcgccgtggtgtggagaagctcggccgccccttcgttttcgccgccgaccaccggagcaccctcgacgtcgtcgacccgagccgccgccgccttcttcttcgtcgccggccgccgtcgtgcatctttcggtgtagtggtgagtaccaacgggttcgcctcgttgccctctacgcgttgatgccctccaaccccgccgccgatgtccctagcgccggcgagctcgtcgacccgagccggccgtcgtgctgacgtcat

SEQ ID NO: 75519 - DNA, 377 bp, Oryza sativa
  Clone ID: PAT_MRT4530_75600C.1
cacggcccacacgtacgagaaagtatactcaacacatgggagacactgatcactcactgcggtaactgaaactgcgaccatgtgagacaagtgcggaaactgggaccgagctgacgcgagccagtgcgtgaagaaaggaaccagctctggcgtgaggatacctgaagccaagaagagccactttgaggaggccgcccccggtgaggataaccggacttgcaagggcggaagcagatgctcctgcacccactgcactcgcggccagcgaggtaactacctaaccgagcactcaccgacggcgagtcacctacctgaattaggccacaatacaaaccaccgatatgagtgaggcgtgtgtgagcgctgaatatagctga

SEQ ID NO: 75520 - DNA, 185 bp, Oryza sativa
  unsure (1)..(185): unsure at all n locations
  Clone ID: PAT_MRT4530_75601C.1
tcatgtggtgaagtgncccgcaagtggtgcccgtgtgtgtgccccgtaagtaggtagtggtcccgtgtgtagtgtcgtgtgtcggtgtgtgtcgtgtgtgtagtgtgtccgtgtgtgtcgtagtgtgtntgagagggcccgtgtgtcgtgtcacgtgtcgtgagtggtaggaagggtggtgctcc

SEQ ID NO: 75521 - DNA, 3004 bp, Oryza sativa
  Clone ID: PAT_MRT4530_75602C.1
atgggcatcattaacaacacccacattagagatggcaatggccccgaaacccgacagtcgggtgggtgtgtagtagactctgcgggcctggacgggggaaatctacacttttactgctacaccctggaatttgatgggggtctgatcgttgtggggggtcgcttgccggtgaaggaggctgctcttcggcaaatggttgggtgggtgggtcactgggtgctcaccgttttccggatctgggattctgagtttagtaaattcaacattttggacctacatgagttgattaacaagtccattccattgtccttcatggaggcttcatcttggttgtgctaccaagctcgtggttttggttcatccagagtatggttatggcttcttctagctcttgttcttctgaattgcagcctggtactctcagcctcgccgtatctggtcggtatggggagcttcgacataacaggacctgcagcagatgttaacatgatgggatatgcaaatactgagcagattgcatcgggaattcacttcaggctgaagtcacgtgcatttattgtggctgagcctaatggaaagcgtgttgtgtttgttaatatcgatgcttgtatggcatcacagattgtgactataaaggtgcttgaaaggctaaaagcaagaaacattgaggaacccagatgccctcatgttcactggtatggtgatctttataatgagaacaacgtggctatcagtggcatccacactcatgctgggctgagaacaacgtggctatcagtggcatccacactcatgctgggcctggaggttatcttcagtatgtagtttatattgtcacgtctcttgggtttgttcgccaatcctttgatgtaattgttgatggcatcgagcaaagcattgttgaagctcataacaacctccgtcctgggaaaatatttgtgaataaaggtgacctccttgatgctggtgtgaatcgcagcccaagtgcatacctaaataatcctgccgaagagagaagcaagtacgagtataatgttgataaagaaatgaccctcatcaagtttgtagacgatgaactgggtccagttggaagtttcaattggtttgcaactcatggaacatcaatgagccgtacaaattctttgataagtggtgataacaagggagccgctgcacgcttcatggaagactgggctgaacaaatgggcttgcccaaacagtcagctcatgcaaattctgatgatttgagatctttgcacaagacatctgtacttcctcggagagtttctactataattcctgaaccaaatgagataactgatgacttgatacaattggcatcatcctatgaggccaggtggcaggcggttggcaggttcaagtatcactaggcgcattagaagtactcaacaaaacaaacctaaatttgtttctgcattttgtcagtccaattgtggagatgttagtccaaatgtgcttggaacattttgcatagacaccaatctttcctgtgacttcaatcacagcacatgtaatgggaaaaatgaactttgctatggacgaggcccaggataccctgatgagtttgaaagtacccgtgttattgggaataggcaatttctaaaggctagagatctctttgattcagcttctgaagaaatacaaggcaaaattgactataggcacacttatttagatttctcaaaacttgaagttaaagtttctacaagtgcaggcggtcagcagaccgtgaaaacatgcccagcagcaatgggctttgcttttgctgctggaaccacagatggccctggagcttttgatttcagacaaggagatgtcaagggaaaccctttctggaagttagtaaggaacttgttaaagacaccagggaaggaccaagttgaatgtcattctccaaaaccaatattgctagacactggtgaaatgaaggaaccatatgattgggcgcctgcgatacttccagttcaaatgattagaattggtcagctggttatcttgtgtgttcctggagaattcacaacaatggctggcaggcgtctacgtgatgctgtgaaaactgttcttacaagtggaaacagtgaatttgataaaaatattcatgttgttcttgcggggctaacaaacagctactctcagtacattacaacttttgaagaataccagatccaaagatatgagggagcatcaacgttgtatggtccccacaccttgagtgcctatatccaagaatttcagaaacttgctatggccatgattgcaaacaaagaggtcccaacaaatttccaacctcctgatatgttggacaagcaaattggactacttcctggtgttgtttttgactcaactcctcttggtgtcaagtttggggatgtcaactcggatgttcctggtaactcaacattcaacaagggtagtactgtgaatgctacattttattcagcatgcccaaggaatgaccttcttacggatggtacctttgcactcgtcgagaagctagatggtaacaataattgggttcctgtctacgatgatgatgattggtcattgcgtttcaagtggtcaaggcccgcaagattgagttcaagaagttttgcaactctagagtggacagttcctgaagacgctgctgctggtgtttacagattgaggcattttggtgcctccaaaccaatgtttggttcggtcaggcattttacaggaacctctcgtgctttcgcggtgcgttagttgatacgccttgagctttttatggcttatgaaggtttacagcaccaacttcatacatggaaaccctgccattatatccatagggcttatctgcttcttatttacttgtatttgagggtaataacactgttcaatcttatggaagtgtgaaactgctgtcccagtgcatgaactaagaatgggaaatatacagaatgtacataggtgctctttttatgtaaacatgcatgcttcttgtgatttccaaaaaaaaaaa

SEQ ID NO: 75522 - DNA, 460 bp, Oryza sativa
  Clone ID: PAT_MRT4530_75603C.1
gcactgctcatcgatttctcttcctgacggcgacaatggcgtggaagaacagcaagctctcggcgtcgacagtggcggtggcgctggtggcgctgacggtggtggtgggcggccctaacgattttgttggtgcggtcaataaaggaatcctacagataacactggcgcgcatgtatgtagcattaaacacggtgcggggtgaggtgatcaccgaccggctgcggggcgatccgccgtcctggtgcgcgtgtcgggacgcactacccgcgcccggtgagcccctgggcagggacagcatgggcacgttgttgacgccagccgtgcctcctcctgctggacgaggacctccaccatggcgcgcaacgcggatgaacggcagggggccgccacctccctcaggtgggggaaggaccgggcccgcacccccggcggggagcccaacgccaaccggcgcggcaag

SEQ ID NO: 75523 - DNA, 388 bp, Oryza sativa
  Clone ID: PAT_MRT4530_75604C.1
atgagtacctactttataatatgttcatgttatgctgaatatacggctagcttatctgggagatggtttggtgcgggtataatgtttgcatatgcaattgctctataccatgacgatgatattatagtagtatctggtaatttaggtgtggtgtctagattacgagatatcattatttggggttatatattgcggatgagaggtgggccgctgatggtgacaactcaatacgggtattccttcgcgcctatatataatcctaagttaattccctggggagggtattcctccgtatttagccccgattgtatggtcatgacgggctgtcgtaaggaactcggcaatcaggggtggcttctcaaaataccaggagggcatcatatagagg

SEQ ID NO: 75524 - DNA, 443 bp, Oryza sativa
  Clone ID: PAT_MRT4530_75605C.1
atgaatgccagcttagtattatgttcatgttatactgattatactgctagcttatctgggagatgcatcggtacgggtataatgtttgcttatgcaattactctatgtcatgacgatgatattagagtagtatctggtagtttaggcatggtgtctagattacgggatatcattatttggggttatatgctgccgatgagaggtgggccgctgatggtgatagctcagtacgggtattcatccgtgtgtgtatatagtcctaagttaatttcttggggagggtactcctccgtatttaaccccggttgtatgatcatgacgggttgtcgtaaggaactcgacagtcaggggtggcttctcgaagtaccaggagggcatcgggtagaggaggtctataaactttagatgtatagaaatactatatatagaaaatatttgaattc

SEQ ID NO: 75525 - DNA, 411 bp, Oryza sativa
  Clone ID: PAT_MRT4530_75606C.1
atgaatgctaactttacattatgttcatgttatactaaatatactgctagcttatctgggagatgctttgctgcgggtataatgtttgcttatgcaattactctatgtcatgacgatgatattagagtagtatctggtagtttagacgtggtgtgtagattacgggatatcattattcggggttatatgctgcggatgagaggtgggctgctgatggtgacagctcagtacgggtatttctaagcgcgtgtatataatcctaagttaattccttggggagagtactcatccgtatttagccccggttgtatggtcatgacgagctgtcgtaaggaactcagcagtcaggtgtggcttctcgaagtactaggaggacatcggatagaggttttctctacatgatcttcccac

SEQ ID NO: 75526 - DNA, 2154 bp, Oryza sativa
  Clone ID: PAT_MRT4530_75607C.1
attcaagacatctactcttgatctaccattgagctaactccggatatataaacagaccgaacgtttcgtcccaggggaatgtgaaagttagcgaatttgcccggcgaaaatggcagcacttggccgcgcgagctcgtcggcgccggtgcttgccgccgccgccgccgccgccgtgctcctctcgctctgcctcgccgcgctctcggaagagcaagagcaactggagaacctgcggttcgtgcggcacgcgcaggacgcgccgctggtgtcgagctacaactacatcgtcatcggcggcggcacggcggggtgcccgctggcggcgacgctgtcggagcactcgcgcgtgctgctgctggagcgcggcggcctgccgtacgccaacatgtcgagcgagcagcacttcacggacgcgctggccgacacgtcgccggcgtcgccggcgcagcggttcatctcggaggacggcgtggtgaacgcccgggcgcgggtgctcggcggcgggagctgcctcaacgccgggttctacacgcgggcgagcaacgagtacgtgcgcgccgccgggttgggacgcgcggcttggttgaactcgtcgtaccggtgggtggagcgctcgctggtgttccgccccgacgtgccgccgtggcaggcggcgctccgcgacgcgctgctcgaggtcggcgtcacgcccgacaacggcttcaccttcgaccacgtcaccggcaccaagatcggcggcaccatcttcgacaactccggccagcgccacaccgccgccgacttcctccgccacgcccgcccccgcggcctcaccgtcctcctctacgccaccgtctcccgtatcctcttcaaaagccaagacggggtgccgtacccggtggcgtacggggtggtgttctcggacccgctgggggtgcagcaccgggtgtacctccgcgacggcgacaagaacgaggtgatcgtgtcggcggggacgctggggagcccgcagctgctgatgctgagcggcgtcgggccgcaggcgcacctggaggcgcacggcatcgaggtgatcgtggaccaacccatggtcgggcagggcgtcgccgacaacccgatgaactcggtgttcatcccgtcgccggtgccggtggagctctccctggtgcaggtcgtcggcatcacccgctccggcagcttcatcgagggggtgagcgggtcggagttcggcatgccggtgtcggacggcgcgctccggtgggcgcgcagcttcgggatgctgtcgccgcagacggggcagctcggcacgctgccgccgaagcagaggacgccggaggcgctgcagcgggcggcggaggcgatgatgcggctggacaggagggcgttccggggaggcttcatcctggagaagatcctcgggccggtgtcctccggccacgtcgagctgcgaaccaccgacccgagggcgaacccgtcggtgacgttcaactacttccgcgaggcggaggatctggagcggtgcgtccatggcatcgagacgatcgagcgggtgatccagtcgcgggccttctccaacttcacctacgccaacgcctccgtcgagtccatcttcaccgattccgccaacttccccgtcaacctgctgccgcgccatgtcaacgactcgcgctcgccggagcagtactgcatggacaccgtcatgaccatctggcactaccacggcggctgccatgtcggcgccgtcgtcgacgacgattaccgggtgttcggggtgcaggggctcagggtgatcgacagctccaccttcaagtactcccccggcaccaaccctcaggccaccgtcatgatgctcggcaggtatatgggtgtgaagattcagtccgagagatggaagaaatgatgaacaaaagataatttcgtttcaggagcaaaaaaatgcatgtaattcaaggaaaagaaaatgttcaactgtccttagagtttagagtagattttatttgcacccacttaatttttactcttctctagacataggttcagtatctgcttgttgattatgtaaccttgaagaagcattgcaaaaacaaagcggaaacttatgttaccaagggcatgtcgaagaaataaatggattagatttcattgacacgtaaaaaaaaaaaaaaaaaaaaaaaa

SEQ ID NO: 75527 - DNA, 388 bp, Oryza sativa
  Clone ID: PAT_MRT4530_75608C.1
atgaatgtcaactttacattatgttcatgttatactgattatactgctagcttatctgggagatgcatcggtacgggtatagtgtttgcttatgcaattactctatgtcatgacgatgatattagagtagtatctggtagtttaggtgtggtgtctagattacgagatatcattatttggggttatgtgctacgaatgagaggtgggcctctgatggtgacagctcagtacgggtattcctccgcgcgtgtatatagtcctaagttaatttcctggggagggtactcctccgtatttagccccggttgtatggtcataacgggttgtcgtaaggaactcggtagtcaggggtggcttctcgaagtaccaggagggcatcagatagagg

SEQ ID NO: 75528 - DNA, 339 bp, Oryza sativa
  Clone ID: PAT_MRT4530_75609C.1
atgaatgcctactttaaattatgttcatgttatactgaatatgctgctagcttatctagaagatgctttggtgcgggtataatgtttgtatatgcaattactctatgtcatgacgatgatattaaagtagtatctggtagtttagacgtggtgtctagattacgggatatcattatttggggttatatgctgcggatgagaggtgggccgctgatggtgatagctcagtacgggtattcctccgtatttagccccggttgtatggtcatgacgggctgttgtaaggaacttgacagtcagggtggcttctcgaagtactaggagggcatcgaatagagg

SEQ ID NO: 75529 - DNA, 2262 bp, Oryza sativa
  Clone ID: PAT_MRT4530_7560C.1
cgggctgcaggcgcgtcggttcactcgccggacgccggcggcgcatcatctcggcacaagcaacggcgatcgccgccggcggcggaggaggacatgatcagtgcgcgcgcgcgcgcgtgctcgcttgtgctgaatcgaatgcttcgatcatctgagtaggcacccatggcgcggtgcgccgatggatccctctcatttttagcaaccgccgaagtagccgggcagcttccaccaccaccaccaccaccaccaacgcgcgagcctcgcctcccctcgtctcgctcttcctcttcgtctcccagctaaaattggcacaccgttcgatccaccccccccccccccccccttgctttaggctgcgggcgcggcggcggcggcgggcgacggcgagggcagcatatggggcccggaacctggcgcaaggcctacggcgcgctcaaggactccaccaaggtcggcctcgccaacttcaacagcgagtacaaggatttggatatcgccattgtgaaggcaaccaaccacgtagagtgcccgcccaaggagcgatacctcaggaagatactctttgcgacctcggcgaatcgaccgcgatccgatgttggttactcaatatgtacattggctaggagattatccaagaccaagaactggattgtcgcattaaaaacattgatagtgatacatagattgctcagagaaggtgatgggacatttaaagaagacttcttgaactattcttatagaggaactattttgcagattccacaattcaaggatgattcgagccctttagatgaacgggtcgagtgctttagaattctaaaatatgatgttgaagcggatcgcctggtgaaattaccccaagcttctggcaagcctgaaggtgcagcctgcacaaattatcttgtacaatatgcattggcccttgttttgaaggagagcttcaaaatatactgttcgatcaatgatggcatcatcaatcttgttgatatgtatttcgatatgcaaaaatatgatgctatcaaggcacttgaaatttataaacgagctggctatcaggcagaaaagctttctgctttttatgagcactgcaaacgtcttgaattggcaaggactttccagtttcctactttgaggcagcctcccccttcattccttataacaatggaagagtacatcagagaagcaccccgtgtcagcatagcaagtaaaagtttggaaagcgaggagcagaattcacctagtgataacgaagatgaagctccacaggaaacagagaaaccagtggatgaggaggaacaagaaccttcagagcctgaagaagagccacagcctacagctgagtccgtggaaggaacagagccggtaccactagcaactactggggatctgttaaatttcgacgaagaagtaaaccccctgattgcaaatattgaagaaagtaatgcactggctcttgcaattgtggcaccagggaatgaaaacaaggcctcagcttcacaagatttgtttgcgctggacaagtctgggtgggaattggcactggttaccgcaccaagtacccacacaagtcgaccagttgacaatcagttggctggaggatttgacaagctactgctagacagcctgtatgaagatgaagcaaggaggcagcaaatagccagtgcaacctacaacggcagcgttgcaggaaacccatttgatcccaacgatccatttgcaatgtctaataacttcgcgccaccgtcgaatgttcagttagccatgatgcaacagcagcatcaggattatcaggagcagcagcagcagtattatcagattcagcaacagcagcaaatggtgacgttgccgccgcaaacataccatcagcagcagcagacacagtattctgctcttccttctcatgatggattatccaatccatttggtgatccattcggtggccttgttgcgatggctaatcctccaaagcaaaacaattcaaatttagtctgaattcgcacattcttttctgtatcaccctccgatttttgatcgtatctccttttccaattttgaggagcaacttgtatagtccgacgattttcaatactgcatcctgacgatgcaatgtaatactcacatttggaaactgatatgatcattcaaatgtcgatgtaccaaaatcaaaaaaaaaaaaaaactcgagactagttctctctctctctctcctcgtgccgatgtcctgcagcccggggatccactagtttagagcgccgccac

SEQ ID NO: 75530 - DNA, 1266 bp, Oryza sativa
  Clone ID: PAT_MRT4530_75610C.1
ttatggcaggctgtggcggcgcgagtcagaaaagcagtagccgatgtcggcgtggacgaacacccaaagcagctcgtcgtgataattgatgccggacgcttcctcctcaaggccgaccggcctccactgcgccatcgccatctccgccgcagtaatcatgctccgcggctgctcctcgtcgccacaccgcttgaagaaggaaggagagcaagagagaaggggtcgtcgtcgccgctgctccagcgtccgccctcccgcccgccgtcgggtgcgctggcaacggctccgcgggaaggggtgggggaggccgacgacaactcgcgggggaggggcgttagtgatgccgtctgtggcggcggccaaggcggtggccggcggcgagtcggcgcagaccccatcgtccgtggagaggagagaagggaggaggaagacggggaggagaggattgtgtgggctccacatgacaggggctcccacatttttttccgcaaagctgccgtggaaatgttcgagaaggcttgccattgcttcgacgatcacaacgtgtacagcgagtgcaaggaggagcttcggctgggggtggagggggcgttccatgtggggaaggagagcgtggacgagtactgcggtgggccgtgcctgatggagacgaagatggcgctgcagtgcgtggaggaggtcgcccacgacggcttcaggttctacagcggcgcctcgctgcccgcggtcaaggccgcgctcgacaccggctgcagctacactcctgacagagggacgtttgagattagggagcgtaagcagtgcggcgacgagtactaccactacagccaccacgagcagacgacggagcagcaatacggtgggtactatggcagcgaggagggcgaatacccaactacgactagtacgcttcctgcttcagactactgctacggcgccggcgccagcagcctaggccttcgctacagcctgctgcagatgctcatgctcttctccgcttctatggggacaggcgagatgccaaagggtggcctcttgcaccatggccgtgacaaccttaggccagaaccgagaacggttgttgaacacacgactgttcctttccttccaaatagaccaagcaccaagagtcacaatcgtatcgaacccatgacgacgctccctcgaaactttgagccggcaagagtagtgccactcatggaaggaatcagcgccagaggggaaacactgagggaggccgaggctcgaaaggacagtccaccatag

SEQ ID NO: 75531 - DNA, 316 bp, Oryza sativa
  Clone ID: PAT_MRT4530_75611C.1
atgtttgcttatgcaattactctatgtcatgacgatgatattagagtagtatctggtagtttaggcgtggtttctagattacggtatattattatttgggtttatatgctgcggatgagaggtgggccactgatggtgacagctcagtacgggtattcatccgcgcatgtagatagtcctaagttaatttcctggggagggtactcctccgtattttagccccggttgtgtggtcatgacgggttgtcataaggaactcagcaatcaggggtggcttctcgaagtactaggagggcatcggatagagggtattagt

SEQ ID NO: 75532 - DNA, 493 bp, Oryza sativa
  Clone ID: PAT_MRT4530_75612C.1
atgccacatcatcaccctctctctttgccctcctttcccttcctcctcctctttctctctctctcacttctctgcgcaggctggccgacaggcggggaggaagccggcgtggtgaggccggagaggaggaggaagtcagcggccgacgacgggcgatgcggcggcgatggtggcggcaatgttggacaagggacaggcgcagcttctccagcgcatgcgaggcgcaggacgagcggcccacggttgtcacagcaaggaggggaacccggtgccgggggtgcacaacggcatggtggaagacggcggctcgtccagcggcgcggccatccgccggtgcggcgtccctggcgcgggggggtgtggctgtgcaacgtacggcattttccgacggaggagggcggcatcagcatggccatgcaagtctagggtggcggttacggcatgggctacccggcagcgaccgtgtgcaatggcagcgcagcgcggcgcctga

SEQ ID NO: 75533 - DNA, 385 bp, Oryza sativa
  Clone ID: PAT_MRT4530_75613C.1
atgagtatctactttacattatgttcatgttatactaaatatacggctagcttatctgggagatactttggtgtgggtataatgtttgcttatgcaattactctatgtcatgatgatgatattagagtagtatctggtagtttaggcgcggtgtctagattacgggatatcattatttgttatatattgcagatgagaggtgggccgctgatggtgacagctcagtacgggtattcctccgcgccggtatataatcctaagttaatttcctggggagggtattcctccgtatttagccctggttgtatggttatgacgggctgtcgtaaggaactcggcagtcaggggtggcttctcgaagtaccaggagggcatcggatagagg

SEQ ID NO: 75534 - DNA, 431 bp, Oryza sativa
  Clone ID: PAT_MRT4530_75614C.1
acgaatgccaactttacattatgttcatgttatactgattatactgctatcttatctgggagatgctttggtgcgggtataatgtttgcttatgcaattactctatgtcgtgacgatgatattagagtagtatatggtagtttagacgtggtgtctagattacaggatatcattatttggggttatatgctgcgaatgagaggtgggccgctaatggtgacagctcagtacggatattcctccgcgcgtgtatataatcctaagttaatttcctggggagggtactcctccgtatttttagccccggttgtatggtcatgacgggctatcataaggaacttggcagtcaggggtggcttctcgaagtaccaggagggcatcggatagaggactccaatatgtccaaaactcatgttttggtgcgttttgaa

SEQ ID NO: 75535 - DNA, 359 bp, Oryza sativa
  Clone ID: PAT_MRT4530_75615C.1
atgaatgccaactttactttaatccaagttatattgattatactgttagcttatctaggagatgcgtaggtacgggtatagtgtttgcttatgcaattactctatatcatgacgatgatattagagtagtatctggtagtttaggcatggtgtctagattattgggtatcattatttgggattgatggtgacagctcagtacgggtattcctccgcgcgtgtatataatcctaagttaatttcctggggagggtactcctccgtatttagccctagttgtatagtcataatgggctgtcataaggaactcggcagtcaggggtggcttctcgaagtactaggagggcatcggaaagagg

SEQ ID NO: 75536 - DNA, 2046 bp, Oryza sativa
  Clone ID: PAT_MRT4530_75616C.1
atggcgagtaggagtaggttggtagcacgtcggagcaagcctgagctggtggcgccgtcacggccgacgccacacgaaaccaagcttctctccgacctcgacgatttccgcaaccactacgagtacaccccactcgtcgccttcttccgcagctccggctccggcaacgacgtcccatcgccgccgacgatgaccatccggacagcaattggggaggcgctcgtgtactactacccactggccggccgcctgcgcgagcttccctgcggcaagctggtggtggactgcaccgaggaaggggtggtgttcgtcgccgccgaggctgacctgcgcctcgctgacctcggcgagccactgctgctgccattcccgtgctctggcgagctgctcgtctgcgacaacgcgagatcagatagcctgcatgtcgccgtcgttgacaagccattgatcttcatgcaggtgacggaattcaaatgtggaggatttgccattgccatgcaagggaaccactgcgtcgccgatggttttggggccagccagttcatgaacgccatcgccgacctcgctcgcggcgagccgcgcccgctcgtgctccccgtgtgggagaggcacctcgtcatggcgcgcgcgccacccagcgtcgccgccgcgtacccggcgttcaagccgctcatcgacggcgccagcagcaacgacgtgatgctctccacgccgcttgacaccatggtgacccggcacttcctgttcggccggcgagagatggccgcgctacggcgcctcctccccgcgcgcctcggccggcgctgcacggacttccagctgctcgccgccacgctgtggcggtgccgcacggcggcgctgccctacgccccgcaccggcgagtgcatgcctacctcccccttagcatgcacggaagacggtggctacacatcccggaagggtactacggcaacgcgctcgcctactccattgccgacgccagcgccggcgatctgtgcggtgggacgctagggcagacggtggagcaggtctgcgaggcgaggctacaggtgacgggggagtacgtgagatcgacggtggacttgatggcgtcgctgcgtgggcgcggcatggtgttcgacggggtgtacgtggtgtcggacctgaggcggctcttcgcagagctggactttgggtgcggagagtgggtggtcagcggcatggcgcagccgatgctggcgacgttcctggtgaggtgcaggaacgccgacggcgaggacgcggtggcagcgtcgatgctgttgccgccttcggtgatggagaggtttgcagaggagcttgctgggctgatgatgagcaaggaggaatatgaagacgaacgagttcatcacggtgttgccagtcttcatgtgcgtgatcctcgttgtgctgcaggggatgctcaaccacgagctcaacaagccaaagtaccagtgcagtacggctgcgcctgcgtcgagcactcgacgctggaccagctggttggcagctgcctgatcccgagcccgacgccctggctgaccctgttccggccagaccacgtcgtggcgatgattccacaaattccaaaagcacagcagatagaaaacccgagagtgtttagctgggatcattggtgggggaaggagagtcgatacccccactatcgttggaatgctgagatggatattgaggctcgtccagaactccatagcaaacggacagtggaggcacaggttcctcttagtagagaggcgctctctaaccagaagccatgcaaagaactggatcttcaggggagctttgttttcccagaaaaatttccagttagggcagggaggcagggagccacactcagcaagggcagcctagctacatcggcgccgagctgccaacccaattctgcgctgtgcgcctgcgcggctgatttccgctgcctgttcgcattttccgcacgaggtgctcaacagctcaggtgcaggcgcggctgctgcttcttgcttgccgccggctgccctccagtactggatgaggacgacggtcactga

SEQ ID NO: 75537 - DNA, 426 bp, Oryza sativa
  Clone ID: PAT_MRT4530_75617C.1
ataagtacctactttacattatgttcttgttatactgaatatacagctagcttatctgggagatgcattggtgcgggtataatgtttgcatatgcaattactctatgtcatgacgatgatattagagtagtatctggtagtttagacgtggtgtctagcttacgggatattattatttggggttatatattgcggatgagaggtgggccgctgatggtgacagctcagtacgggtattcctccgtgccggtatataatcctaagttaattccctggggagggtatttcttcgtatttagtcccgtttgtatggtcatgacgggctgtcgtaaggaactcggcagtcaggggtgacttcccgaagtaccaggagggcatcggatagaggaatatgtctcacgtccaagctctaggccaaagcccatc

SEQ ID NO: 75538 - DNA, 103 bp, Oryza sativa
  Clone ID: PAT_MRT4530_75618C.1
tgcagtccggccggattccggtcgccacgcgtcgatctaatgacacatttccatctgattctaatggctcacagacatataggatcaatgggatgaggaacat

SEQ ID NO: 75539 - DNA, 894 bp, Oryza sativa
  Clone ID: PAT_MRT4530_75619C.1
caggaattcggcacgaggctttgatattctctctctgtcgggctcttctgctcgcagaggatggcggcacgagggtagcagaacaggtggtttgagtgtggcacttgctggaagcgatggacgtatacgtgggaggttgtgttgctggaatgctgatggcagcaacgcccgtgcaggttgtagtggggagtttcattgctgaaggtaaaaaaggcaaggaagaacatctgaaacgtgagccaacatctgccccgacgccgaaccacgcagctggctttggcgcagccacggctgccagtcctccgtctgatggatcatcaagcgaccactccgatgacccagggagtcccatgggacctaatggcagcacattcaataattcaggtcatcccatgcattcttcgtatgctcctgttagctggtcgctatctgggaatcaaggccgttacgatcccgacctgaagatgatgaccgactagataatcctgtgtttttaagctctgttagctgttgacccagtagagtgtagggatcagggattcagtgtttcctgcaccgacaccaccggcagcgttggccaataatccggtgcgctagtagtaatcagtatcacaatgcctgaacaaaagagatcaggaacaaataagtagccccagcgcatggcttggcctgtcaggtagctaatttttatttttctcaatcggtagcttatttagcatgctttgtcagttgtcagcctagttgtacggttttcttatgaatgtttgtacacctttttcttttctcgctagtattcggcgtgtacgaatcttaattaagattggaatgacatgttattggatattgtcgttttaaaaaaaaaaaaaaaaaaaaaaaaaaaaaaaaaaaaaaaaa

SEQ ID NO: 75540 - DNA, 622 bp, Oryza sativa
  Clone ID: PAT_MRT4530_7561C.1
gtgcgcgctcgtccaaagccgccgccgaatgcgattttgcttctacccgaggtgaattgcgccaattcttgccgcgcggttggattgaagatagacggtggtatcccctctcacaattcaaaccattcacccccgagtcagccattttcaccctcgccgccgccgcgcgtcgtgcccggattggcgccaacacatcgccagccgaattcgcatgcagtcaagccaatccttcgccgtatattagaccctaaccgaagccctgcgtcgagttttacctcgccgcaccaagccgagcaccgccgcccccgcgctgctctgttcttcgccgccgaggagtttttccggccgcaatccttcatctcggcatatctcgccgccaacccatccacaattcaaattaatccctccgccgccgctcgccgtcgccggagaaccctagctccctcccctctttggttgcaaccactttccccctctatcgcccgatttggggaaacggccggaggtagaagaagagaagagagagagactgacagccctaggtcttgaggattcttctgactcaatagataatatcaatcaatctcaggacatcgagcaaggcaagttaccatataccttt

SEQ ID NO: 75541 - DNA, 210 bp, Oryza sativa
  Clone ID: PAT_MRT4530_75620C.1
atggaggtccacggtgccgtttcggcactgggcagagagcaaggcggcagatcgcggcctagggcaacatggcgtcgttggacctcggaggctagcgaggatgtggcgctagcatcagaccctccttcaccggtcggcgaggagactgtgagggaggacagatcacatgtggttgtgattgcagctgaggaggcggtggctgcggcgtag

SEQ ID NO: 75542 - DNA, 594 bp, Oryza sativa
  Clone ID: PAT_MRT4530_75621C.1
tctgctccaggttgggttggcatccattcgccactgtgggtcccagtcctttggggactccgggcaaatgcaagccagccagcagtcaagctccctggaaccctgtgctgccagggacttcggcacagcaagtgccagatgcaagttgccagagtcagactagcgttgagcattgcttggtgcagtggcagtggtcacatgaggagcggcagaccagcagtcagccaggtgatgatcatcagcaagcaacagcaggcagcccagggtagcagacagccagcagacagatcagccagggatgcgcagagcagcagctgacaggactaacaggccaggtgcaacctgcagcacactggtttctttgcgctagccaccatgtttgggcgtgccatggattaacttccgtagtaattaattaacttaggccattggcttaattaattattgtaattagttatccagggttactggataattaattatcagatatttgctagtagcatctatcatgtttggatctgctttcccgtgaatgtgatgataataataatcagaagaaataaataagaagattggatcaaaaaaaaaaaaaaa

SEQ ID NO: 75543 - DNA, 1833 bp, Oryza sativa
  Clone ID: PAT_MRT4530_75622C.1
atgtgccaccgccttccacctcccccttggccgacatgcgaagaagggaagaggagagggaggaggaagaaggcctcgcggcggaggaggaagaaggaagaagaaggcgaggcgatgccgcgggaggggacgcggatggcggggctgtgggagcgcgaggtcggctgcctcccgcccaagctcttcgccaactccgtcatggcctcccaggactttgtgcggtctctcggtgtccagaagaggctgcggaagcacaggggctgtgtgaataccatcagctttaacgaggatgggagcttgctcctgtccggttcggacgatcgggccgctgtactgtggaattggcaagaggggacgcctaccttcgcgttccacactggccacagcgacaatgtgttccatgctctgttcatgcccttctcaggtgaccggagcatcatcacatgcgctgctgatggacaggtgaggcattcgcaaatacaagaaggtggtcgtgtaattacaaatgagctagttgatacagaggtagcagtgcacaaactagctattgagcctggaaatcctcacacattctttagctgcggagataatggctccgtttttctttttgacctaagggagaaatatgttgctgaactctttaaatgcgcagaagttgatcattttggtggtgataccattgaactctatgctattgccatagacccgagaaagcctagttgttttgcagttgctggatctgatgagtatgtgagaatatatgatagccgcaagattgatggacatcgtaacaagcacaccatgaagggtgttaatttccttgggcccaactgtgactatgttaccactggatcagactgtggccgtgtatttatttggaggaagaaggatggggagcttatgcgggttatgaaaggggataaacagattgtgaactgtgttgagcagcacccttatgggattgttattgcaaactgtggcattgataaagatatcaagatttgggctcctggtggaagtgagaaccctgacgaggttgagacagattcttgttgctctgatatcagtgagtcctatgactcggtttactttgatgattacatattttcctcggattttgattcatctgaagaggacgacgaagacgacgacgacgatgatgatgatgatgacgatgacgaagaagatggccttagtgttagtatcaacgaagacatgagctatgaagagaaagatgcagccagcgaccatgacagcgataggcggacgcacggctgcaagttccgtgtcgtgctgggtgtctcgccgtcgccgccggggcgagcatggagccgccaccacgacgacgacgacgaggaggtcgccaaggcgcacgagcccaccagcctcgcctcgtacggcctctccatctcgccgctctccaaggatgcggccatggggctggtggtgagcgccgccacggggaggggctggacgacggggtcggggatggagggcccgcccaaggccgccggtgggggagaccggccggaggtgtccacgctgccatggtcgctcttcacaaagtccccacggcggcggatgcgcgtggccttcacctgcaatgtgtgcgggcagcgaaccacgcgcgccatcaacccgcacgcctacactgacggcactgtctttgttcagtgctgcgggtgcaacatattccataagctggtggacaacctgaacctgttccatgagatgaaatgctatgttggtccagacttccgctacgaaggagatgcaccgttcaactatctcgaccgtggcgaggatggtgacaacatatttccaattctgtga

SEQ ID NO: 75544 - DNA, 3219 bp, Oryza sativa
  Clone ID: PAT_MRT4530_75623C.1
atggcagttgtagcaggggcgatgactgccctcattgccaagttgactaccctgctgatggaccaatacaagctgcagaacagtgcgaggggcgacatcatatttattaaagccgagcttgagagcattcaggctgcccttgagaagttgtttgaggtgcaggtaactgatcgccaggttaagatttgggagagggatgtgagagagcagtcgtacgacatggaggatatcatcgacaatttcatggttcatgtcgaaacccatttgctagccaagccacatgaactcaaaggattcatgaagggaagtttgagcttgttgagaagagcaatggttcgctatcgtgttgctaccgacatcaaacgtatcaggaggcttgtcaatgagacgagtgcacgccgtgataggtataaggttggtactattgttgctgctgccaagactgagaccgcaattgatccccgtttaattggtatctatggagaggctactaaacttattggcataagtggacctaaggaagaattgaccaagctgctgatggattccaagggcaactcaaagaataaactgaaagtgatctccatcgttggagttggtggtttaggcaagacaactcttgctaatgtcatttatcaacagcttagaggacaattcgagtgtcatgcttttgtttcagtatccttaaagcctgatctaaagaaggtcctgagcagcatactccgtcaattcagtgaacaaggttatgcttggacagaaacatggtgtgctcaggaaatcatcaacaaaatcagagatgaaattaaggaaaagaggtacttgattgtaattgatgatatatgggagaaatcagcatgggaatgcatcgagtgtgctttaatagaaaatgaccgtggaagcagaataatcacaacaagcagagtgcttgatgctgccacgccatgctcttctgaggttgatcataccgtttacaagctgcagccactttctagtgataactcaaagaaattgttctacaaaaggatattctactgtgaagatggttgtccattggaactgaaggatatatctgaaaaaactttaagaaagtgtgagggagtcccgttagccataatcaccataggcagtttattggccatgagaccacaaaatttataccaatgggatagggtacacaatttaattggttctggacttgagaaaagccatcatgtggagaatatgcggcacatattgtctattagttattatgatttgccagcccatttaagagcttgcttcctatatctaagtatatatccagaggattacaatatacagaaagatcaactgatacgcagatggatttctgaagggtttatacttggagaagatatggatactttgcatgaaggaggtaaatacttcaatgagctaataaatagaagcatgattcaaccagcatacatcgacagtcatggaagggtgcatgcttgtcgtgttcatgatatggtgcttgatcttatcacatcattgtcaaatgaaacaaattttgtgacatcattaggtggtcagcagcccacatatcatccaaacagggctcgccggttatgccttcaaaacagcatatatgaccatacgatacgacaggagaaaatgaagtggccccgcgtgaggtcactaatcgtattccctcatgctaccaacttgttgccatccctttcgagattccgtattttgcgcgtactggatttagaaggttgtcaagacttgaagaatcaccaaattgagggtatcagtgatttgtttcatttgaggtctctagtactgaaggatacaaatattggtagtctccccaaaaagattggcaacctaagttgtttacatacactggacataaggcacactatcataactgaacttccatcaacagtcgttcatctaagaagactggtgcgcctactaattgatgcatcggtgaagttacctgatggaattgggaaaatggaatgcttacaggaaatatcactggttggtattagcaagtctccaaactttttgaaggagctagggagtttgacagaactaagaatactccagatttcagagagtactggtgcgtggcatgatagttatgagaatactttgattgattctttgtgcaacctgcacaaaatctgtgacctgtacatccatggctgtaaactgtccacagagttcatatcaaatataagatgctctccgcgatatctccgatatctttcatgtggccaattatccatattgccaaggtggatcaattcatccttattgtccctctccaccatagatttgatacttaatgtactccgacaggatgatcttcgtagtcttggtgccttacaatctctatgttgtctccgtcttaatgtgttcaaaattgaaccagaaaggttggttgttggcactgagcatgcaaagttccactggctagctgagttttcgtttaccactaatgccatggggcttatatttagccaatattctatgccaaggcttgaaaaccttgagctagcttttaatgttcgagagacaaagtattttgatattggcttggagcacctgtcctctcttaaggatgtcactgcaagaattgattgcagggattccagtatttttgaggtgcaaaatgcagatgctgccattcggaggattgcatatatgaactccaaccaacctaaggttcatgtgatcaggcattatgaacacatgttaatggatgaggtgaagatccagaaggaaacggaggaggaaaaggagatattggaaaataggattggtccatggggtggaaatggtggggtcacttgtgacatcaaggttgcacccaaacgcttggaaagcattactatttgtagcggcataatcatcgatgcacttgcattttcttacttggacaaagatggagagcgacacacgactagtttatggggtggtcttggtggtagtgttcaactgattgatcttgatgaaagagagtttcttatggaggttattggaactgtgggtccattcaatgtgttatctgaggctataacatcacttacacttgtgaccaatgtacgtagctatgggccttttggacaaccacagggtactcctttccgtactccacggaagaaaaacagttgtatcgtgggattctttgggcgttcaggaacatatcttgatgcagttggggtctattttcaccctatgtag

SEQ ID NO: 75545 - DNA, 285 bp, Oryza sativa
  Clone ID: PAT_MRT4530_75624C.1
atgagcagccgccgcgccgtgcggcccagccgagggactgcgaaagcagcggcccaagctgctgctgccgccgccgcggtgaagcgagctgcgactctgcgagccaatgccaagacagtgcgggtggtggccgcacaggacgttttgcacgtcaaagcactgtccgattacgcaaccgtgcacgagatgtctcctactagtactggagtaggagtagatacgtttgccctggccgtcttggaaaatgcgagtgtgacgcacggtttatttcgctacggttttcgt

SEQ ID NO: 75546 - DNA, 231 bp, Oryza sativa
  Clone ID: PAT_MRT4530_75625C.1
atgagagatggcgccaagaagagcaagctgtcatggtccaagagccttgtgctgaagtggttcaacatcagggggaagtcctatgacttccatggcgatgatgcagctgctgcatttgggaggagaggaggaggaggagaggatgagtggaggagcagcagcttttccaggagggaatcctgcacggtcaagaagagcaggacaggtgattctattctagtaccaatctga

SEQ ID NO: 75547 - DNA, 267 bp, Oryza sativa
  Clone ID: PAT_MRT4530_75626C.1
atgagcagccgccgcgccgtgcggcccagccgagggactgcgaaagcagcggcccaagctgctgctgccgccgccgcggtgaagcgagctgcgactctgcgagccaatgccaagacagtgcgggtggtggccggtaaagttcaggatcgccgcggtggtggccactggctcgatcgagtgctcgacacatcgtacaccagcacaggacgttttgcacgtcaaagcactgtccgattacgcaaccgtgcacgagatgtctcctactag

SEQ ID NO: 75548 - DNA, 1909 bp, Oryza sativa
  Clone ID: PAT_MRT4530_75627C.1
tcctccctctcgttctccccgggctccatcctcctgtgttttttctttttgtagtacacaattctgtaaattgctataacgcgctctgtccacaagcaaaatcatgtccaccaaatatataatatcccagtacacaattaggaaatagaatgaaaggaaaataacttattggttgttattacccaaggggacaaacctacactacacctgaaattgaacaagaaaaaacagccgttgtacagtagtacaagacgccaatggctctgagcatccaactccttttgtgttttaactgtttacatcaggaagtccctggggtcagtgacgtatccggtgagggctgaagccgccgcggtgaacggcgaagccaggtagatctgcccttccttgtgccccatcctgccggggaaattcctgttcgtcgtcgacacacacaccataggttcattcatgcgagcatatgtatcacgaggaccacccaaacaagcaccacaactagggctagctggtgtatcacaaccagcctcctcaaatatctgtgagcaagttttgccaccggctcctggtacagggatgctataaatgtccatccacaccttttgtgtcgccggaacgagaaaagtgggaactttaaccttcttccccgaagctaagaacaccttcgcagcagcaaagaagtcctcagttttacctccagtacaagaaccgatatagacccggtcaatcttgacatctttgcactctcttgctagagcacggttgtcaggtgaatgtggcttggcaataactggctccaatttggatacatcaaaccggtagtcactaacaaatctggcctgagcatcactatagacaggctcgtattcaactgatgtcttgccctcaagatagttaaatgtagtttgatcggcaggcacaacaccattcttgccaccagcttcaataaccatgttgcacagtgtcattcgctcttccatatttagactttccacagttgatccaacaaactccatggatttgtatgttgcgccagatacagaaatctcaccaataatttgtaaaatcagatcctttgcaagtaaataaggtggcatttctccatctaatacaaacctgatagttggaggcaccttaagaagagccttcccagtgcccatcacaaaaccagcatcagtgtttccaattccagttgcaaattggccaaaggctccagcattgcatgtatgagaatcagtaccaaggagaacctcgcctggtctgcaatgaccctcttgagcaagagcaacgtggcaaacacccttgtagtctggatttgctttgaaattgctcaggtccttgatgtcatagaagtacttgatgttctgctccatacagaaatccctgaggatatcaacatttcggtttgctcgctcatcgctggtgaagatgtagtggtccgggatgatgaccaccttctctcggtcccaaaccttggcgtcctccccgaactcccgcttgaagatcccgatggtgccagggccgcagacgtcgtgcgtcatcagcacgtcgacgtccacccacacgttctccccgggctccaagctggcgcgctccgacgccctcgccaggatcttctctgtcatcgtcatggcgctcttcaccgagccagtggaggacggggcgcggggggcgcgggcgggcgtggcgacggcgcggaccctccccgaacgcgccctcctcccactcaccctccgctgcagctgctgctgcgacggcgccacggcggcgggggcaggcccgttcttgtgggcgaaggcggcggccttcccagcgacgggggaggcggcggagatggaggccatggcggcggcggcggcgcgcggtggtggccccggccaaatggcgaacacctgtggggtgtgaggtcaag

SEQ ID NO: 75549 - DNA, 742 bp, Oryza sativa
  unsure (1)..(742): unsure at all n locations
  Clone ID: PAT_MRT4530_75628C.1
gagacaaaccctaaacccgccggcggcgtgcggcggcggcggtaatggaggtggatatggaagcggagggtgcgagcggcgagctcggccacaagagggcggatctggagaagcccacggaggaggagagagcttctaacggcggcggcgacgccgccaagacgccgtcggaggatcaccacgacagtgcccgccgccgcgccatggcgatggagaatgacgacgacgacgacgagtactacgacgaaccccttccgaatcccttggacgcctaccgccagagctgggcccgttcctacggcaccaatggcgccaccttcgaggacgagacggatctccctcctatgccaaacacagacattccagtgctgcccccttctgcgcagcctatggaaacaatgcaggtcttcacggtgaaggtgacccagatcaccggcggcctccggtggccgctcggcgtctacggcgtggtcgccgtgcgagactccatggaccacaagcgcaacgtcctcttccgccgcggcaggaacgaatgccagaccctaacttcgctgcaggcatgtgcaaattgttcctaccccattatcttataanagttgctcggtatcanaatttacgacttanacatgttgcgttggaatatatgtcttagaatatnagttaattggttgtttgggatcacagtanaagatattcattttggatgntaacgtgatattcgattaagttaacattaacattg

SEQ ID NO: 75550 - DNA, 1407 bp, Oryza sativa
  Clone ID: PAT_MRT4530_75629C.1
atggaaggcgaggagcagcagagggtgaagacgacgagccaatgggtgtcccacgtcgagcacctgctcgacgccggcggcaacccatcggaggaggaggcgaggcggtggcggaggcagtcggtgtaccgcgtgccggcgtacatcaagcatcgcacctcctacggcgcaccgcagctggtgtcgctcggccccttccaccacggcgtccccgagctccggccggccgaggagcacaaggagagggcgctcctgcacctgctccgccgcggcggcggcggcggcgatgggcggcggctgcggctgggtagcctcgtggcgtcgatggaggaggtggtggtggagctgcaggacgcgtaccaggggctgggcgccaccaagtggagggacgaccgcgacgggttcttgaagatgatggtcttggatgggtgcttcctgctcgaggtgatgcgcgcggcggccgaggcggcgcagggcgacggtgacggcgagggcgtgggcggaggctacgcggcgaacgaccccgtgttcagccgccacggcgagctgtacgtgttcccgtacgtccgccgcgacatgctcatgatcgagaaccagctgccgctcctcgtgctccagcggatcgtcgccttcgtccacggcggcgccgcccctgaagcgagcgacgacgcgatcaacaacatggtgctcagcttcgtgtcgatgatccctgacccgccggcgatgagaggcggcggcggcctggcgctccacccgctcgacgtctgccaccggagcctgctccatggctcgccgccaaggccgtgccatacggggaggcgagaggagttcgtgccgtcggcgacggagctcgaccaggcgggcgtccggttccgtcccagccggacgcgcagcctccacgacatcagcttccgccacggcgcgctccgcatcccgcgcctcgccgtggacgacacgacggagcacaagctgttcagcctgatggcattcgagcagctgcacggcgccggcgccaacgaggtgacggcgtacgtgttcttcatggacaacgtgatcaagtccggcgacgacgcgcggctgctgggcgcgagcggcgtggtgtccaacgggctgggcagcgacgaggcggtggcggagatgttcaaccggctggcgagcgaggcggagctggaccggcggagcgcgctgcacggcgtgcacggggaggtgaacgcgtacagggagaagcggtggaaccagtggcgcgccagcctcgtccgcaaccacgccggcaacccgtgggcgatcgtctcgctcgtcgtcgccttcgtgctcctcgtcctcaccgtcttgcagaccgtgtacaccgtgctgccctactaccaggagcaggcggcagccggcgaggctgctctccgcgaactctga

SEQ ID NO: 75551 - DNA, 504 bp, Oryza sativa
  Clone ID: PAT_MRT4530_7562C.1
atgaggatgaggatgcgcgtaacgggtggactgctcaccagagccctagcgctgtgtgacctcgcgccgccgtcgtcgccgctgctccagccgtgcgccgccgccgttccagtcgtcgccgtcgctcgggaaggtcgtcatcgtggtcgccgtcgcgtcgccgtcctcgtctgctcctccgccgttgctgtagactgccggagcaccgtcgccgccgtcgacccgatcttctccgccgcttcgacctcgacgccgttgccgtccgttgatcttccgctgcttctttggtcaccggtgagttcgccgcgtcgcgctctacgtcctggtgccctccgttctcgtcgtcgcgccatcgttcgccggcgagcttgcgccgcccgagccgccgccggtggtgacgtcaccgctgacgtcatcgtggccgtttgccgtgagccggtcgtggaccgttcgatctcggccgtccgttttggatggatcgatctcggccgtccgtttccgtga

SEQ ID NO: 75552 - DNA, 246 bp, Oryza sativa
  Clone ID: PAT_MRT4530_75630C.1
atgaccaattattatagagaatttattccggtcattgcaagtgccaacgagaggacactatcccgaaatgcagatccccgatcccatgaacgcaggaaagatttgctcctgcggacctggaagccaggaatcatgtgcagcaagtgcaatgaaatgattgtgaatcgcaaacggaacccagttccaacgtacaaatcacgtcagtttttcttcctggacataacatctcacaacagattagccaac

SEQ ID NO: 75553 - DNA, 215 bp, Oryza sativa
  Clone ID: PAT_MRT4530_75631C.1
atggccggttctggaagcagatggctagaaaaagggaggagcatcaaggcagcaaggaggcaaggccggcctggagaggaactaagaactgaagacagggcaaaagacatcggtgtcgaccatgtttccggcgaggaactccgtgcttcacgggacaatccagacaactgcgacaaccacctccaacttcaccaccagcgcagagacgatcgctg

SEQ ID NO: 75554 - DNA, 386 bp, Oryza sativa
  Clone ID: PAT_MRT4530_75632C.1
cgccgccgccgccgccgttacccgtgccgccgccgctctccgctcgccgttgccgggatggagggggaggaggaggagaacgtggggccgttccgccgtaccagcgcgcggacttctgcggatggccacacgcatggtctccgtgctcgccagctccgacaaccgcgcgcaggctgaactagctcgtcttgaagcgcttgagagtgataatgcttgccctgaggtcgtatatcttaacgatgatgatgaatatggatctgtaaatgaggaagaccatgttctttatgcataggaagtagtcaaagaatatgaagtcgtatgataggctatgggaaggcatctgagaatatggcgttttgattttttatggacgttttacaggaggc

SEQ ID NO: 75555 - DNA, 2343 bp, Oryza sativa
  Clone ID: PAT_MRT4530_75633C.1
atggcccctcgcaacccgaacccatcttacgtgacgggccctgatctcggcaggatcgatgatgacgccaccgcctatctcggggtttcgcttgtagacgaggatgagttgatgaagctggtcacctccggcgtgctggcggagaagcaggccttcgccttaggaaaggctgtggtgccgaagcccggcgacaaccggacggtggtcttcgctgtgttcttcgaagcgggccttcggtttccgtgcaacgtgttgttgcctgagattcttcgcttttttcaggcgtgccggcccgctggtttcgaatcgagcgccgggctcttcggtgctattttttacgccaccataaactcgaagacggtggtcactcccccagggacgaaaaagacggcgttcgagatcatgaacttcaatgttcgccccgagcgctctgatctatgcccgatcaacggcaccatgtccaagtgggatcgccactggatatcgaagtggttttaccaatccatccccttcgaggctgggtccgagtcggcgaaagctctccgatggcgtcgcagggcgatcgcgccgaataggaagcccaaggtcactgtcgatggtgccatggaagcccggttcgccctgcttcgcaaaatctgctcccgccttagctgccgtgacctggtggaagagttctgtatgcttcggatcttccctctctcccagacgtggcaagtcgaggtgagcccagacgaggaggtcgatggcttgccgaagctcgtcatgccagagggggcaaacatgttaactcttgctcaggccgacaccgaagctcggaagatgatcggtgatgtgtcggtcaccgaatacagccagctacttacacggcaggcggccgaccgggcgaaccgagtgtacgatggcaatcttcctccccgggcgaagccgtataaggccaacggtgatgaagggacttccatgaagcggacacgcaggcaagttaaactggctccccggagcgaagggcccctgccactaccaacttcgacgccgatgatgaggacactgtcgatgaccatgacggcgaagaggaaggggaagaggacgagacggaggttgcggacgagcccgccgacaaccgcaccgagacgcgtgggtacaccccaactccaagcctcgaccatgtcaaaactgggtggagtcgaacagctcccccctccgccgaaaggatttggagggggcgaaggcgctggtttcgtttgtggcgggcaagagcctgggttttcgaccgctcctggtgctgcggtcggtgttggcggggtgggagggagtgttgcccttgggacttcagcatctgctgaccgggtcgtgaaggttgcggccaggctcttcggaagccctgtgcgcaaaccggtggcctcgccgctcgccgtccagaagtggaaaaagacggttgccgaaacatcggcttcagagtattcccttgcggcgccacacttcgcccccggtgacttcgagactcgggcggaccttatccccttcgtcaagggggtaagtaatctcgtttctctggctgggagcccgagcctattcttcgagctgaacgagttcgacgagggctgttccgccatcaagagtttagctgttcggattcttgcggctcattgttcgaccgaacgaaccgtgcgggctcgtcttgacggttttaaaggccgttttcgagctaaggacgacgaactgggtcgcaagagccttgaaatggagagcctcgccaacaccctcaaggaggcgaaggctgaaaacaagcggctccaagctgagcttgagaaagggagcgaggcaaaggccgagatcgagcgtctcaaggccgagccgaagatggaggctctttgccaagaggtcagcaaggcagaggaaaccgcttcaacggaggcgcagcggttcacgcaggatatgtcgaaagccactgaatctgccaagaccgtgtgccgtacgcttcgccttgcccttactgacatgggggcgagggtgcgaggagtccctggcgaagatgcttctgccttcaccttctcggagtggacacaacaggctggtgggttttcgccgaaaggtgtatgttcggcctccttttggggattggcggaacaagaatgtgagaaattcgtcacggttaaaaacctgccgaagattaagtattcctgtcgcgagatgataataaacgccaaaagcgggcacaccccgggtgaaccctggacgactacgatcatgtccatgtggaacgtcaggaggacatggcccgcttttggcgaaatcaccgaaggactgatcgctaggaagcgatcgcccagcgccactatggcttag

SEQ ID NO: 75556 - DNA, 669 bp, Oryza sativa
  Clone ID: PAT_MRT4530_75634C.1
atgtcgtcgtcgcctgagccgctcccgcgtcctgccaccaccgcagccggcttcgctgccgcgcaggcaagcccggccaccgatcagtttttcccctccaccaccgaaaaccacccccaccgccaacctgaggccgacgctgcattttccgcctccagccgcctcctgctgccgtcccagaccaccttaatatgcgccgtcgcctccatcggcttctccgtctggtgccgccccttcgccctcgccattcaccgccggagtcctctccttcccgtcgaggtcatcccggcctccgtccgccgtttccaccccgtggagccgccgcgggagcaccatcccgcagtcgtcctgaggagctcgccgccgcgctcatcgcccctcgccgcccggcgcacggtgaggcctccttcctcccttttcccttctgcctcccttgtccggcgccgcgtcgtgctgccatcgccggcggccgtccgcgcgtgtgccgccgccttgtcgggctggccggcgagcccgccccttgccgctctgttcgccacccatggaccactcccgtggtctgggtccacggtgccgccaggccgcggtggaccgagtccaccgtgcgcccgccccttttgtgtcgctgacgtgcggggcccgcgtgtcagcgccggcgccccttgctga

SEQ ID NO: 75557 - DNA, 311 bp, Oryza sativa
  Clone ID: PAT_MRT4530_75635C.1
tttttactacaatcaggctcggcgacctgaattatgtattgaactagtattcgtacctggccgcgcaaagttacaaaaacataatatccacaacagcttacacggtgctctcaaagccaatagatatactaaaggaaacagggaatatgtagttgcggggagaaaataggcaagcagaaccctattgtgcaggaaatagccaggttccccaaaagctacacatttgaccggtcaaactacaggatcaatagcgggaaataaatcatgaaagattgtcgtttcaataattaccccgaccatccgctggtttt

SEQ ID NO: 75558 - DNA, 441 bp, Oryza sativa
  Clone ID: PAT_MRT4530_75636C.1
ggagaaaaggattgacgctaaatctagacaggaaaggtggatatccaaattcaactagcatggccaaaaaaatatgcttatataaaaatatcaaccacttgtccttgtcaataatcaaaacttcaaagaggaacatacgcctgaattgccatttgatgcttcacattttaacagtaacaaaaatgacagggcctggaaccagggagatgatcaccaagggcgattgccctgaatgctgtaaattcaggattgcagtacacaaaaagccctgctccatgtgaacttgtcatcctacacaaatgcctgtctttttttgagggatacacatatgcttgtctctccaacaagcctaataaaagggggcggccggatgaaagagccgggctgacgcgcccgctgtccccgtggggtcgcgccgtgcgccgctcccttcctaatgcc

SEQ ID NO: 75559 - DNA, 654 bp, Oryza sativa
  Clone ID: PAT_MRT4530_75637C.1
atggccagatgtctcgagcacgcagctcaacaagataatagaatgtctaatactgcaattatcccttcgactgagctagtgcaaggggcgccggcgctgacacgcgggccccgcacgtcagcgacacaaaaggggcgggcgcacggtggactcggtccaccgcggcctggcggcaccgtggacccagaccacgggagtggtccatgggtggcgaacagagcggcaaggggcgggctcgccggccagcccgacaaggcggcggcacacgcgcggacggccgccggcgatggcagcacgacgcggcgccggacaagggaggcagaagggaaaagggaggaaggaggcctcaccgtgcgccgggcggcgaggggcgatgagcgcggcggcgagctcctcaggacgactgcgggatggtgctcccgcggcggctccacggggtggaaacggcggacggaggccgggatgacctgggagggcgatggaatgattaggggaaagggaggaggcgcgaggcggtggaaaaaaagcggccagaggccggcaacatgggaagtagctcacctcgacgggaaggagaggactccggcggtgaatggcgagggcgaaggggcggcaccagacggagaagccgatggaggcgacggcgcatattaa

SEQ ID NO: 75560 - DNA, 1325 bp, Oryza sativa
  Clone ID: PAT_MRT4530_75638C.1
ttttttttttttaagggtactaaaatactcatctcattacatgatgcactaagagcattttaaaatgggaagagaaaaaaaagtctggtcaagaagaggtttgaccatctaattaacagtactccactctagctagcaaccacacgagaggagaggcttctattgagaagcctccccgtcaactacagctcgatcggtcccgtgtccggcgccggcgatcgtcgccggcggcggcattacatgacgctacacgagctcgggttctcctcgttgaacatgttgctgtaagactcctgcggcggcgacgaccgcatgcccggcgggccgtacaggtactccggcggcggcggcggcggcatcatcatgggcgggtacggcgagtagccgtacgacatctgcggcggcggcggcatgggcgtcggctgcatggacattaccggcgtgggcgcgtagtacgaggacacgctcgcgctcgggtgcgccacattgtagctcatcaccggctgcggcgagtagtacgggaacccgccgtgagggcgctccggcgacgacagcgttggcgccggagcgggcatcgacggcgcgggtgcggccggtggcgccttggcagctggcttctccggcgccgcggcgtccgcctcgccgccgccgtccttctgcttgttcttcttcttcttgcccttcttcccgccggactcctccccgccctcctcctcgtcggcggcggcggcggccgattctttgttaggctcaggcgagcccttctccttctcgggcacctcgccctccttcttggcggcgtcgtccttggccggcttcttcgcctcggctttcttctccttctccggcttcttctccgagctctcagtcccagcttccttcgccgcctccttcgccttcttctccgcgcccttcccgcgctccccggccggcgccggagcagcagctggtggcggcgcggcggcgacctcgtcgggcttctgcttcgccgcggcggcgaccggcggcgacggccacaccgtggcgtgcttccctgacttgtgcagccgcctgacgagcacgtcggcgccgacgctgctcgtcaccgtcaccttgtgctgcgccgcgtcgattgtcaccttgtacacgccttcgatgttctggagcaccttcttgaccttcttcttgcaaccctcgcagtggatcgacactcggagcacggtggtcgtgtactgcagtggctctgcttctcctgacgccatggatgaaggcttagctagctagctacctcgagacggagtagcttcgagctaagctgagctctgtggcggcggcgcgtgcgagtg

SEQ ID NO: 75561 - DNA, 641 bp, Oryza sativa
  Clone ID: PAT_MRT4530_75639C.1
cacgcattatatatggtctcttatgttgagctagattgctacctcaaaggtatgggatgctagctagctgcctcttatgttctattgttctcacttctgagcactatgaagtccaacatgaaacaagagaactgttttgtatagaacatgctattgatcagcacaaccaatttctctgagtttatttcttgctgaatagagcgagattgcagtgttctggacttccagcagagagaattgcaactgctagactaaattttttttgaggggtggcggcactggtttatgaggttgctaaacatacaatgtccagaaacttacatgccatgggattatatttgcttgccacagtaggccttacaaatgtatggttgttactttacattttacatttttggagatttggggaaacaaagccaatagctgttaaagtaagaagctgtgaaaagaccaccggacatgtttctgtacaaataagtattgttacagtattaagaaaacgtggcgcttaatgaaatgatttatgctgtcattcagcataacctttggcccgtcactgctctgcttgcataacctttgggttgttgtatgaattgaacctgattatttgatattcaaccgttggcggtaaaatttccttt

SEQ ID NO: 75562 - DNA, 897 bp, Oryza sativa
  Clone ID: PAT_MRT4530_7563C.1
atggccgaggcggagctgctgctggagcgcagccgggcgatcaccctgaacggccgagacaagcgaggccgcgccctcgtcaggatcgtcggcaagtacttccccggtaagctgggctcggcccgggcgatcaccctgaacggccgacacaagcgatgccgcgccatcgtcaggatcgtcggcaagttcttccccgcgcgcgcgctgggcgggcgggcggaggcggcgttgagggggtacgtgcggaggcgcgtgctcccggagatcggggagcgggagttcgtggtcgtgtacgtccactccctcgtcgaccgcggcgacaacttccccggcgtcgcagcgatccgcgcggcgtacgaggcgctgcctgccgcggccaaggagcggctgcgcgcggtgtacttcgtgcacccgggattccaggcccgcctcttcttcgccaccttggggcgattcctcttcagctccgggctgtacgagaagctgaggtacatgagcaggctcgagtacctgtgggagcacgtgagcaagggggagatggaggtcccggaatgcgcgcgccggcatgacgaggagctcgagcgccgcccgctcatggactacggcatcgaggctactgaccgccggtgcatgttcgacgccgcgtccatggacacctcggcgtccctgcactcgctccggtgcatctcgtaatcgtggtggccgctcgactgtagcatccgtagctggcctcgccccggtcctatattcgtagctagcgaaggcactgccgcactgtcgtagtttgcaggccctgttgttcttcgttccatctgtacaaaatagtagtatttgtggaagtaaaagagataataaagagaaacagtttgaaatgcttaaaaaaaaaaaaaaaaaaac

SEQ ID NO: 75563 - DNA, 308 bp, Oryza sativa
  Clone ID: PAT_MRT4530_75640C.1
gggaattaaaggggatttacgtaatttgtttggacaaaaaaagggaggagtaattgattggggggggaagaccacacaggtagcagctgcatggggtaattaaaattttagctatatatggatcgagacgggggaccaattccatttttgagactgggggcagaccatatgaaatgatatgaccagtagtcgggggggggcaattggtcgtgcgggccctggccgatgaaaatgatgtcggaaatgagcgcggctaaggcggcccccacaaaggggccgagccagtagacccaggggtttgcccaaac

SEQ ID NO: 75564 - DNA, 470 bp, Oryza sativa
  Clone ID: PAT_MRT4530_75641C.1
ggcttagcttcccttctcactcgcacgcgccgccgccacagagctcagcttagctcgaagctactccgtctcgaagtagctagctagctaagccttcatccatggcgtcaggagaagcagagccactgcagtacacggtgagccttgatctgaatgaaatcaatgcctccatcaggaggctagagcttagctctaatgctcgatctttgcgaagacgacgacgacgccattgttgttgtttagctgacgtctagctgttcttgttggtgcagaccaccgtgctccgagtgtcgatccactgcgagggttgcaagatgaaagtcatgaaagtgctccagaacatcgaaggcgtgtacaaagtgacaatcgacgcggcgcagcacatggtgacagtgacgagcagcgtcggcgcccacgtgctcgtcaagcggctgcacaagtcaaggaagcacgccacggtgtggccgtcg

SEQ ID NO: 75565 - DNA, 423 bp, Oryza sativa
  Clone ID: PAT_MRT4530_75642C.1
atgagtaccaactttacattatgttcatgttatactaactgtacggctagcttatctgggagatgctttggtgcgggtatagtgtttgcatatgcaattactctatgtcatgacgatgatattagagtagtatctggtaagttagacgtggtgtctagattatgggatatcattatttggggttatatattgcggatgagaggtgggccgctgatggtgacagctcagtacgggtattcctccgcgcctatatataatcctaagttaatttcatggggcgggtattcctccgtatttagccctggttggatggtcatgacaggctgtcgtaaggaactcggcaatcaggggtggcttctcgaagtactaggagggcatcggatagagggtaagccaccatgtcctgaccatggtgcgtgttgg

SEQ ID NO: 75566 - DNA, 381 bp, Oryza sativa
  Clone ID: PAT_MRT4530_75643C.1
atgaatgccaacttatgttcatgttatactgattatactgctagcttatctaggagatgcataggtacgggtataatgtttgctattacaattactctatgtcatgacgatgatattagagtatagtatctggtagtttaggcgtggtgtctagattattgggtatcattatttggggttatatgctgcggatgagtggtggggcgctgatggtgacagctcagcacgggtattcctccgcgcgtgtatatggtcctaagttaatttcctgggaaggttactcctccgtatttagccccggttgtatggtaatgatgggctgtcgtaaggaactcggcaatcaggggcttctcgaagtactaggagggcatcggaaagagg

SEQ ID NO: 75567 - DNA, 286 bp, Oryza sativa
  Clone ID: PAT_MRT4530_75644C.1
gaaaccgaacacgattcgttcaaagggaaagattaaaaaaccgtacacaatccgaaatcgcatttctagttgggtttctagaagcgccacctcccacatccccagctctccgggcccgacacgtgtcccgcacaacctacgaaatcaggcgtactcgccactgacaggtggtcccagggccgtgatggacccaccagtcagtgacacgggaggcggtccttatttactacgcgcgcgcgcgagacccggccataataccgccttttgttgttaattggatagtttt

SEQ ID NO: 75568 - DNA, 391 bp, Oryza sativa
  Clone ID: PAT_MRT4530_75645C.1
atgagtacctaccttacattatattcatgttatactgaatatatgactattagcttatctaggagatgctttggtgcgggtataatgttggcttatgcaattactctatgtcatgacgataatattagagtagtatctgatagtttaggcgtggtgtctagattacgggatatcattatttggggttaaatattgcggatgagaggtgggccgctgatggtgacagctcagtacgggtattcctccgtgccagtatatcatcctaagttaattccctggggagtgtattcctccgtatttagccccggttgtatggtcatgacgggctgtcgtaaggaactcggcagtcaggggtggcttctcgaagtaccaggagggcatcggatagagg

SEQ ID NO: 75569 - DNA, 449 bp, Oryza sativa
  Clone ID: PAT_MRT4530_75646C.1
cctattcgcaatatttagattgcatcttatacattctagttaactgatatactagctaataccctctttccgatgccctcctggtatttcgagaagccacccctgactgccgagttccttacgacaacccgtcatgaccatccaaccggggctaaatacggaggaataccctccccagaaaattaacttaggattatatataggcgcggaggaatacccatactgacctgtcactatcagcggcccacctctcatccgcaatatataaccccaaataatgatatcccgtaatctagacaccacgtctaaactaccagatactactctaatatcatgtcatgatatagagtaattgcataagcaaacactatacgcgcaccaaagcatctcccagataagctagtagtatattcagtataacatgaacataatgcaaagttggtactcgt

SEQ ID NO: 75570 - DNA, 243 bp, Oryza sativa
  Clone ID: PAT_MRT4530_75647C.1
atggcgaagctcaccggcgtgcggtgcgaacggggctccagcggtggaggggctgacggcgtggccctcgggctcgcgaatccgatggcggcgatggcgcggctcagcgcagcggctagtggcgaccgaagctacggcggcggcggcggagaggagggcgactgtgctagggcgaaggagggcacgggggagctcggcgaaatggggaaaaagagagagggaggggcggtggtgcttaaatag

SEQ ID NO: 75571 - DNA, 315 bp, Oryza sativa
  Clone ID: PAT_MRT4530_75648C.1
atgtttgcttatgcaattactctatgtcatgacgatgatattagagtagtatctggtagtttaggcatggtgtccagattacgggatatcattatttggagttatatgatgtggatgataggtgggccgttgatggtgatagctcaatacgggtattcctccgcgcgtgtatatagtcctaagttaatttcctggggagggtactcctccgtatttagccctggttgtatggtcatgacgggctgtcgtaaggaactcagcagtcagtggtggcttctcgaagtactaggagggcatcggaaagagggtattagc

SEQ ID NO: 75572 - DNA, 444 bp, Oryza sativa
  Clone ID: PAT_MRT4530_75649C.1
ttttttttttttttttttttttgcaaaatttctcaaccatttagatgaaattcgcaccgtttcaagcagggtctaggaccaacaaatcctagaatcaaacatggtacattcaaatttcaaattcaaaccagattacataggcttatttactactccggtaagcgatacgggcggcggcggcgcggctgccggcgagcggcggcgggggtcagacggaggtggagacgcggaccttgaggccgtgagccatggagaggatggtcatcatccggtacttgacggggtggtcctcgacgaggtcgaaggtgtagaagcggaagaggatggcgagcgccatcttcatctggaggtaggcggagtccttgccgaggcagatccgcggcccggcctggaacgcggtgaacttgaacggcgacgcgttccggaacgcgcccgccgtcgccg

SEQ ID NO: 75573 - DNA, 518 bp, Oryza sativa
  Clone ID: PAT_MRT4530_7564C.1
atcactatattgtaagcggggacgcccgggggtaccccgccgcaatacccccggcgacgccaccacgcgctcttcactggtgaagctgactacaaccagcggggatccattttcatccctggggctagaaccgagctccaccccacgcagataccccaccagtcccccttggggtcatcccaccgtaacacgccgagacctgtcgaatgagggcaccacatgccccgcaccaagctgacgtgctacaccttacaagctcacccacgcacaagctgctgccactgcatcaacagcgccgttggccagacaggaggactgcagccggacatgccaggcgacggcgatggctcgcatgacccaggaccaccggtaggccagcccgccgagcaagtgggaggcccgtgctggaggaggccgtcaaggggtgcacagcagcacccgccaagaaggcatctgtggcaacacccgggcaggccaagcaggcagccatgtccccctaagctacacccaactggatg

SEQ ID NO: 75574 - DNA, 421 bp, Oryza sativa
  Clone ID: PAT_MRT4530_75650C.1
atgactacctactttacataatgttcatggtatactgaatatacggctagcttatctgggagatgctttggtgcgggtataatgtttgcatatgcaattactctatgtcatgacgatgatactagagtagtatctggtagtttaggcgtggtgtctagattacggaatatcattatttggggttatatattgcggatgagaggtgggccgctgatggtgacagctcagtacggatattcctccgggccggtatataattctatgttaattccctggggagggtattccttcgtatttaaccctggttatatggtcataacgggctgtcgtaaggaactcagcagtcagggtgtggctcctcgaagtaccaggagggcatcggatagaggcaaaacctatttttcccaagcataactagttc

SEQ ID NO: 75575 - DNA, 174 bp, Oryza sativa
  Clone ID: PAT_MRT4530_75651C.1
atggtacgttgcgccgcgccggcttccgcgcggcggcaacatgccgtggcggtggccgcagatgcctcgactgcaaagcatgtcggcgcggggtgcagcggccagctgcagccgtggtcgtcttaccgcgcgcggtccgcggtgcttgccgtgccaagacgtggagctatgcca

SEQ ID NO: 75576 - DNA, 388 bp, Oryza sativa
  Clone ID: PAT_MRT4530_75652C.1
atgaataccaactttacattatattcatgttatactgattatactgctagcttatctaggagatgcataggtacgggtataatgtttacttatgcaattactctatgtcatgatgatgatattagagtagtatctggtagtttaggcgtggtgtctagattacgggatatcattatttggggttatatgctgtggatgagaggtgggccgctgatggtgatagcttagtatgggtattactccgcgcgtgtatataatcataagttaatttcctggggagggtactcctccgtatttagccccggttgtatggtcatgacgggctgttgtaaggaactcggcaaccaggggtggcttcttgaagtaccaggagggcatcggatagagg

SEQ ID NO: 75577 - DNA, 388 bp, Oryza sativa
  Clone ID: PAT_MRT4530_75653C.1
atgagtaccaactttacattatgttcttgttatactgagtatatggctagcttatctgggagatgctttggtgcgggtatagtgtttgcttatgcaattactctatatcatgacgatgatattagagtagtatctggtagtttagacgtggtgtctagattacgggatatcattatttgaggttataaattgcggatgagaggtgggccgctgatggtgatagctcagtacgggtattcctctgcgcctatatataatcctaagttaatttcctggggagggtattcctccatatttagccccgattggatggtcatgatgagctgtcgtaaggaactcggcagtcaggggtggcttctcgaagtactaggatgacatcggatagagg

SEQ ID NO: 75578 - DNA, 631 bp, Oryza sativa
  Clone ID: PAT_MRT4530_75654C.1
atgagtacctactttatattatgttctggttatactgaatatacggctagcttatctatgagatgctttggtgcaggtatagtgtttgcttatgcaattactctatgtcatgacgatgatattagagtagtatctggtagtttagacgtggtgtctagattacgagatatcattatttggggttatatattgcggatgagaggtgggtcgctgatggtgacagctcagtacggatattccttcgcgcctatatataatcctaagttaatttcctggggagggtattcctccgtatttagccccggttggatggtcatgacgggctatcgtaaggaactctgcagtcaggggtggcttcttgaagtaccaggaggacatcggataaaggacaacttgtgccatccatcccatggcctcgatcggttcgtcggtgttcagccaagcacttgctcctccagcactgagttgggtcctttggcgtcaagcctcccttcggggcgcgacgtggatagcgcggcgatcgaacacgtgactccaaatcgctgtgggagcttcagttgggggcaggttttaatttatctgatgtagaaggagagcaggaaggagaagaaaggctacagagtgttttaga

SEQ ID NO: 75579 - DNA, 491 bp, Oryza sativa
  Clone ID: PAT_MRT4530_75655C.1
tttcattttctaccttttctggaaatcaaccctgagcgtttaaaagtctgagtaaaatgtttggttttgtagctgatgtttgtttccaaactttcgcatgagttcacaattttcaatataacccactgaaatctgagaagacaatgtttcggatcagtccaataacacttggtcagtcatacatcatagttgatgggaaatgcttggaccagtctaatgacgtttctctgctggatagagctaataataacttgcgatgcgctggacttctgataaagtaatttccttagggccacctgatgtaggttatgaggacagatcagttgaaatgtcatcaggctggggtgaacctggactatgaaatgaaacattgacatttaatcaggctaagtcccactaccagtggcttgttggctaacctattaccaaagccttagcaacaatggttatgttgacagcactagccacaagtgctcagatctactgtagat

SEQ ID NO: 75580 - DNA, 389 bp, Oryza sativa
  Clone ID: PAT_MRT4530_75656C.1
atgagtacctactttacatgaatatttttgctatactgaatatatggctagcttatctgggagatgctttcgtgcgggtataatgtttgcttatgcaattactctatgtcatgacgatgatattagagtagtatttggtagtttagacgtggtgtctagactacgggatatcattatttggggttatatattgcggatgagaggtgggccgctgatggtgatagctcagtacgggtattcgtccttgcctatatataatcctaggttaattccttggggagggtattcctccgtatttagccccagttgtatggtcatgacgggctgtcgtaaggaactcggcaatcaggggtggcttctcgaagtaccaggagggcatcagaaagagg

SEQ ID NO: 75581 - DNA, 233 bp, Oryza sativa
  Clone ID: PAT_MRT4530_75657C.1
ctatacactatctatgacctagcattcacacctacacaaacttaaatcctctacatctacacccctcttcttttttttttaatacaatattaaaaacaaccttcgtatttttttacattcaaaaccaactctattctattaaataatccttcacacaatataaaaatataccactccacctaatattacccacacatcttacatacactcctttattacacaacccttcctct

SEQ ID NO: 75582 - DNA, 639 bp, Oryza sativa
  unsure (1)..(639): unsure at all n locations
  Clone ID: PAT_MRT4530_75658C.1
agaggaaaaaaatttttgtgatttttttgcccactttagaattagaatcccacttccagaattgcatgtcgaacacctatctttacatcaatgcaacatggtcatggtaggaatcttctaaaatcacaagtacatgcaaaatattatgtacactatactcgaaccagatttcttggttgtgcttttaaaacgtgcttgctaaaactcttcatgttcttaagacggcttactgttaaagatcatgaagtcttcagtccactgggagtgcaaagccatggctgtccacgtgaactgcaaactcttagctagggtatttttgttcataccattgctaaaaccagtccatatcccaaaatatcgatgcctgaattctgcaatacattgctgtatagctgagaacattgtacatgaaaacgctgaaagtacttcagatccttgctgtgtctggatccatccatagctacccatacttaacagttcatatcttgctgctaggatatggagtgaatggtgaccctgtaaaagctctttgtggcagtaagcctgcttttgctcgacgtgctgtggcaatcttggtttcactatggattgtcttggccaaactcagactatttgacagtgatccacggacgcntgggc

SEQ ID NO: 75583 - DNA, 1437 bp, Oryza sativa
  Clone ID: PAT_MRT4530_75659C.1
atggagcaggtctcgtgcttcgccgccgccgccgccgccgtcctcgttgttctctcgctcgctcgcatgctcctcgcgccgcgcagggagtgggacgggctgaacctgccgcccagcccgtcgcggctgccgttcatcggcagcttccacctcctccgccgcagcccgctcgtccaccgcgcgctggccgacgtcgtgcggcagctcggcgcgccgccgctcatgtacatggagatcggtgaggtcccggccatcgtcgtgtcgtgcgccgacgcggcgcgcgagatcatgaagacgcacgacatcaacttcgcgtcgcggccgtggccgccgactgtccagaagctgcgcgcgcaggggaagggcatcttcttcgagccctacggcgcgctgtggcgccagctccgcaagatctgcatcgtcaagctgctcagcgtccgccgcgtcagctcgttccacggcgtccgcgaggaggaggccggccgcctcgtcgccgccgtcgccgcgacgccgccgggacaggccgtgaacctcaccgagcggatcaaggtggccatcgcggacaccacgatgcgccccatgatcggtgagaggttcgagaggcgggaggacttcctcgaggtcctcccggagatcgtcaagctcgcctccggcgccttccgccagcggcagcagcaaaaggaggccatggccgcgccgccgcctgacatcgccaaggaggaggaggatgacttgatggatgagctcatcaggatacacaaggaaggtagcctcgaggtgcctcttactgccggcaacttgaaagctgtcatcctagagctcttttgtgcgggaagtgagacatcctcgaatgcgatccaatgggcaatgtcagagctggtgaggaacccaaaagtgatggagaaagcacagaacgaggtgcgaagcatcctcaaagggaagcccacagtgactgaggccgacatggtagacctaacgtatgtgaagatgattgtcaaggagactcataggctgcatccggtattgccattgctcaccccaagggtgtgccagcaaacttgccagatcatggggtatgacgtgccccaaggcagtgtcatattcataaagtcgtgggcaataatgagggaccccaaacattgggatgacgccgagacattcaaaccagagcggtttgaggatagtgagatcgatctcaagggcacaaactatgagttcactccatatggggccggacgcaggatctgccctggcttggcattagcccaggtcagcatagagttcatcctcaccatgctgctctaccactttaactgggaactccctaacggggcagcaccggaggagttggacatgactgaggacatgggcctcaccatccgaaggaagaatgatctctacctgctcccaactcttcgtgtgcctcttaccgcatag

SEQ ID NO: 75584 - DNA, 347 bp, Oryza sativa
  Clone ID: PAT_MRT4530_7565C.1
ggggcgcgggttggagacgggggtcgtcgacgacgttgggatcactcgctttaccggggcggctatgacgcccgaccggataacgttaagagggccctcgacaccgccttggactatatgtttctagagatcgactgccttgcggctctggtcgtacacaggtggggttacgaggaaggcctatcggtagctcggatacagtccagtggatgctggattccaacttcatgttgcgcagcgactgaactcaaggggtgccgcgaactgccatgtgctagaaatgggtgactttctccaggttaacgggctctctggcagctgattgaccagtgactctattcttgagg

SEQ ID NO: 75585 - DNA, 1545 bp, Oryza sativa
  Clone ID: PAT_MRT4530_75660C.1
atggagcaggtctcgtgcttcgccgccgccgccgccgtcgtcgtcgtggttctcttgctcgcccgcatgctcctcgcgccgcgcggggagtgggacgggctgaacctgccgcccagcccgccgcggctgccgttcatcggcagcttccacctcctccgccgcagcccgctcgtccaccgcgcgctggccgacgtcgcgcggcagctcggctcgccgccgctcatgtacatgaggatcggcgagctcccggccatcgtcgtgtcgtccgccgacgcggcgcgcgaggtcatgaagacgcacgacatcaagttcgcgtcgcggccgtggccgccgaccatccggaagctgcgcgcgcaggggaagggcatcttcttcgagccctacggcgcgctgtggcgccagctccgcaagatctgcatcgtcaagctgctcagcgtccgccgcgtcagctcgttccacggcgtccgcgaggaggaggccggccgcctcgtcgccgccgtcgccgcgacgccgccgggacaggccgtgaacctgaccgagcggatcgaggtggtcatcgcggacacgacgatgcgccccatgatcggggagaggttcgagaggcgtgaggacttcctcgagctcctcccggagatcgtcaagatcgcctccgggttcagcctcgacgacctgttcccgtcgtcgtggctcgcctgcgccatcggcggctcgcagcgccgcggcgaggcgagccaccggacatcctacgagctggtggacagcgccttccgccagcggcagcagcaaagggaggccatggccgcgtcgccgcctgacatcgccaaggaggaggaggatgatttgatggatgagctcatcaggatacacaaggaaggtagcctcgaggtgcctcttactgctggcaacttgaaagccgtcatcctagatctctttggtgctggaagcgagacatcctcggatgcgctccaatgggcaatgtcagagctgatgagaaacccaagagtgatggagaaagcacaaaacgaggttcaaagcatcctcaaagggaagccatcggtgaccgaagccgacgtagccaacctaaagtatctgaaaatgattgtcaaggagactcataggctacacccggtgttgccgttgctcatcccaagggagtgccagcaaacttgccagatcatggggtatgatgtgccccaaggtagtgtcatatttataaactcgtgggcgataatgagggaccccaagcattgggatgatgccgagactttcaaaccggagcggtttgaggatggtgagatcgacctcaagggtacaaactatgagttcacaccatttggggctggacgtaggatctgccctggcttggcattagcccaggccagcatagagttcatgctcgccactctgctctaccacttcgactgggagctccctaacagggctgcaccggaggagctggacatgactgaggagatgggcatcaccatccgaaggaagaaggatctctacttgctcccaactctccgtgtgcctcttaccgcatag

SEQ ID NO: 75586 - DNA, 221 bp, Oryza sativa
  Clone ID: PAT_MRT4530_75661C.1
gactccaagttatggcatccagactgttccaaccgtggtctccgtcctcctcctcagcttccccgtcctcctctccgcctcccccgcccccctggactgggagagtcagttccacccctgggagcccttcccgcacaacccgctctccggctaccccggctacgtgatcaccgcgcctgcccgggccacggaccgcgccgcccggagatggccaaggcgcg

SEQ ID NO: 75587 - DNA, 367 bp, Oryza sativa
  unsure (1)..(367): unsure at all n locations
  Clone ID: PAT_MRT4530_75662C.1
gcaccaggtccaacccaccaccgtccagtccgcctcgatcccgaggatctccttcccaaagcatccctgattccttcccaaacgcctaaaccccaccaccgccaccgcccatggccgacggcgccagcgcgaaccccggcgacccgccctcgccggcctcggcgaggtcggggcagcggaagcacgtccccgactggctcaacagcccgatctggtccgcgcctccccctcccgcgcgccaccgcgccccgtcccctcctncccgnccgncccctgctccccctcctnccacgcagccctgacctcccccgccgccgtcctgccggtgcggcggaggcggaggctcctaccacggctgcgacggcga

SEQ ID NO: 75588 - DNA, 366 bp, Oryza sativa
  Clone ID: PAT_MRT4530_75663C.1
atggctaaacccaaagaagtcaaaatccggaggcaacccagcaaaaggatcctctatctcctcctcgggctcatcgggctcagcctcaaagcccggaggaggctgagtggaggtggaagagatgtccccagctgcaggagtgctcgcacgggaggaatgatcggccttgatgaggtgcaagtgaagctacagagaagcacagaccgggagaggtggttgatgctgctagcaccaccatttttgggcacaaaggtccagcggatccaacggcgacgtagacgtcgccgatccggctgcaccgatggtgccggcagcttcccgtggacagatcaggtggtgatgacggcgttggcagcttcacgctga

SEQ ID NO: 75589 - DNA, 881 bp, Oryza sativa
  Clone ID: PAT_MRT4530_75664C.1
aagcaccaaaaagagaggacgatgcaacgagctcaaacgaacgaggcctgaggaggatcctctggaggaggaggagggggatagccatagccacggccaaacccaaagaagtcaaaatctggaggcaacccagtaaaaggatcctctatctcctcctcgggctcatcgggctcagcctcaaagcccggtggggagggaggaacatccacgtgaagacactcgttgagctgcgcctgcatgtgcttgacgcgcctagccatcttcttcacctcattccgagctttgcggttctttttggcctccgcagagcaaaggccaaaagagactccgcaaaatgtggaataagggagacgactcacgacgagccacaggagagtggcgctcacgagtaggaggaggctgagtggaggtggaagagatgtccccagctgcagaagtgctcgctcgggacaaatgatcgaccttgatgaggcgcaagtgaagctgggggtgaggcacctcatgatgataccgtagaagcgtgactatctcaatcatcctcatgatgtgaggggcatagaccaaccccttcttatactgaatcgaagcccaacggatttcctcccaaacaaagtcaaagacatgaaagcgatggggggggggaggattgaacctaagaagcacagaccgggagaggtggttgatgccgctagcatcacaatctttgggcacaaaggtccagcgtatccaacgtgacgtagacgtcgccgatccggcttcaccgatggcgccggcagcttcccgtggacaaatccggtggcgacgacggcgttggcggcttcacgctgatgttcctaattttcttcccgttctttttactgtgtagctctaggatcgtcttt

SEQ ID NO: 75590 - DNA, 809 bp, Oryza sativa
  Clone ID: PAT_MRT4530_75665C.1
ccgcgcgcgtggacgagctgcggatggaggccacgagccgaattatttggattcaattctcaaccattgcaaaacttagacacagagagagagcagcggctactcgcctcgccacgcccacggcctcggctcgcgccgtcgtcgccaccggatctgtccacgggaagctgccggcgccatcggtgaagccggatcggcgacgtctacgtcaccgttggatacgccggacctttgtgcccaaagatggtgatgctagcggcatcaaccacctctcccagtctgtgcttcttaggttcaatccacccccccatcgcttcaatgtctttgactttgtttgggaggaattccgttgggcttcgattcagtataagaaggggttggtctatgcccctcacatcccgggcgagcacttcttcagctagggacatctcttccacctccactcagcctcctcctactcgtgagcccatctcctgtggctcgtcgtgagtcgtctcccttattccacattttgcggagtctctttggcctttgctctacggaggccaaaaagaaccacaaagcgtggaatgaggtgaagaagatggctaggcgcgtcaagcacatgcaggcgcagctcaacgagcgtcgtcacgtggatgttcctccctcccaaccgggctttgaggctgagcccgaggagatagaggatccttttattgggttgcctctagattttgacttctttgggtttggccatgactatggctatccccctcctcctgctccagaggatcctcatcaggtcccgttcgcttgagcttgttgcc

SEQ ID NO: 75591 - DNA, 1344 bp, Oryza sativa
  Clone ID: PAT_MRT4530_75666C.1
atggagagcccgaatcagaaccagcagcaggagagcagcagcggaagcagcgtgatgtgccagctggaggacaagctgccatatgcattctacatcggagatgaagaactctctgtccagcttggtgcttacatgcagcaaaagaatgcaaatgttgaggttaccctgcgcatagtatatcaaccgcaggcaattttccgtatcaggccagtcaaccgatgctctgctacaattgctggccatacagaagctgtactagcagtttccttcagtcctgatggaagatgtttggctagtggttctggtgataccactgttaggttttgggatctgagcacacagaccccattgttcacatgcaaaggacacaaaaactgggtcctctgcattgcatggtcgcctgatgggaatcatcttgttagtggaagcaagtcaggggaacttatattatgggacccgaaaacaggcaagcaattggggactccacttacggggcataggaagtggattactgctgtatcttgggagccagttcatttgcaatctccttgccgccgttttgtaagtacaagtaaggatggtgatgcacgtatttgggatatgaccacaaggaagtgtgtcattgcccttacaggtcacactaattcagtgacttgtgtgaagtggggtggagatggtttgatttacactggttctgaagattgttcaatcaaagtgtgggaaacttctcagggaaaattggtcaaaacactgcagggtcatggtcactgggtcaattcacttgctttgagcaccgagtatgttttgcgcacaggggcatatgaccatactggcaagacatattcaacagcagaggaaatgaaggaggcagctcttgcgagatacaagaagatgaggggcaatgcacctgagagactagtttctggttctgatgattttacgatgtttctctgggaaccaacaattagtaaacagcccaaagcccgcatgactggtcatcaaaagctcgtaaaccatgtctacttctctcctgacgggcagtggctggcaagtgcctcctttgacaaatctgtcaagttatggaatggtattacaggcaaatttgttgcagctttcagagggcatgttgcagatgtctaccagatcagctggtctgctgacagtaggcttctattgagtggaagcaaggattccaccctaaaggtctgggatattcgaacacgcaagttgaaacaggatttgccagggcacgcagatgaggtgtacgctgtggattggagccctgacggcgagaaggttgcatctggaggcaaggacagggtcctcaagctatggatgaactag

SEQ ID NO: 75592 - DNA, 288 bp, Oryza sativa
  Clone ID: PAT_MRT4530_75667C.1
atgtctctgagtcctgcttggagattgcctgacctgcgatataaaagggaccccctgggaggacctgcgggatcgaatctcacagccaacgccaccaccacagcctacgaaacccttgcatcaacgtaccccaataccctctatatccggtctacgggtatcaccacatgggcgcgaccgcgcgagctggcggccgacaagcgctgcgcggtgaacaatgtgacgctgaatatgcgttggcacgctgacttagcctcccatctgcggtggcacgacattcagcgctag

SEQ ID NO: 75593 - DNA, 170 bp, Oryza sativa
  Clone ID: PAT_MRT4530_75668C.1
cggaattgttggtatttcttaatgacattactagaaatataattcccagcaatggcgcagaaatactcttgatatattatggttacagagttcatccgcaagcgcatggatataccattgtagcatttcacccaagagtattccaagagtatcatatttatttaatcccg

SEQ ID NO: 75594 - DNA, 370 bp, Oryza sativa
  Clone ID: PAT_MRT4530_75669C.1
atggcgctcgtggctaagggtgagcccaacggaggcgcgtgcaaggacggggaggtgatggacctcccctggtcggagatgttccgctccgcgtcgctgcggctgccgaagcaggaggagccgacgacgacgaagaagccgcaggggaaggggaaggcgtcggcggcggaggaggatatcgggggcttgtcgctggagcccgacgcgcggctggcgctgtacatcgcgatggcgcacgcggggctcgccacggcgctgctcgtggtgtacgggctgtacaggctgctcgccgacttcctccgcccgctgcagtgggcgctgctctgctccatcccgctcagggagacccaccgcgcgcttttcgtctttt

SEQ ID NO: 75595 - DNA, 120 bp, Oryza sativa
  Clone ID: PAT_MRT4530_7566C.1
atgttgctcactacaagtagctcatccaatgagataaccggacaggactccagtgtatccggatattgggccgagagcccagatagcccatctggcgacatgccctccttgggccggatg

SEQ ID NO: 75596 - DNA, 1615 bp, Oryza sativa
  Clone ID: PAT_MRT4530_75670C.1
tgtcgggacctagttcctgggggtctgtcccacctgcaatatgcagacgataccattcttttcatcaaggtgggggatgacaatgtgagggttttaaagttccttatgttctgttttgaagagatgtctggtatgaaaataaattaccaaaaaagtgaagcatatgtgttgggagtagataaagaggaagaaataaggatagctaatatgtttaattgtaaagtaggaacaatgccttttacctatttggggttgccaatgcactgtgaaaaagttgggatgaaagaatttagactgataatccagaaagtggaaaagagattacaaacttggaaaagtggttatcttatggagggagagagatcaaaatcaactcctgtttgtcgagtgctccaatgtatgcgatgggtttttactatctgcctggggattttcataagaagatggactccctgagagggaacttttactggcagggtttgggagagaagaaaaagtaccacatgatgaaatgggagggtttgataagacctaaggattttggaggtttgggttttatggatactaagattatgaatttgtgcctgcttagtaaatgggttgtgaggctagaaagaggggatagtgatgtgtgtctggaggttttaagaaagaaatatcttgatcagggtgggttttttcaaagctctcctcaaggaggatctcaattctagaagggtctgcatgaatgtaagaaggttttggaaagattagtgatgaaagaggtacataatggggaaagcacttacttctggattgatgtttggtgctgccaatgtagtctaaaaactcttttcccaaatcttttcgctatcaattaccaccaaactgctactgttaaggatttgtttgaagatgggggctggaggttggactttaggagaaacttggatgctgatggagaggcagagctagcacagctcactcaactgattcagggagttgttctggaggagggcaatgatctaatgatttggccacataacagtaagaaagggtttactaccaagtccatgtatagagaattaacttttttttggggggggggggtagggatcttgggatgatggctgtctggaaaagtaaaattccactgaaaattaaacatttcatctatatgacagatcgggggaggctaccttgtgcttcccaattgattaaaagacagtggaaaggagggaacgaattttgtaaactttgtggcaaaactaaaaccactaaccatgttctgttctcttgtcctttagctgcgtttacctggtgtgtggtaagagatgctttgggattagcccagattcctattaattttagaaattgtttgggtttgatgaagggccaaaaagttctgaaggtttgggttatgcttattgccggcgtgtgctgggttatttggttaaccagaaatgaacgggttttttcaaatattctggtgaagtctcctttgcaggttgcttacaaatctttatcttttgttcagcgctggtgtattctgctaaaggaagatgatcaagtaactatgaagaggtggtgcgagttgcggatggaaaaactcaaccagctaaagccgtgtagtctt

SEQ ID NO: 75597 - DNA, 410 bp, Oryza sativa
  Clone ID: PAT_MRT4530_75671C.1
atgaatgccaactttactttatgtttaaattatactgattatactgctagcttatctgggagatgcataggtacgggtataatgtttgctattgcaattactctatgtcatgacgatgatattagagtagtatctggtagtttagtcctggtgtctagattactaggtatcattatttggggttatatgctacggatgagaggtgggtcgttgatggtgacagctcagtatgggtattccttcacgcatatatatagtcctaagttaatttcttagggagggtactcctccgtatttagccccggttgtatggtcatgacgggctgtcgtaaggaactcgacagtcaggggtggcttcttgaagtaccatgagggcatcagaaagaggaaaatggtgctactgattctat

SEQ ID NO: 75598 - DNA, 1542 bp, Oryza sativa
  Clone ID: PAT_MRT4530_75672C.1
atgacaacgaggaggacaagaaaggagagaaaacaaatgggagggggtggtaagtgcaaaagagggaaaagaggaaagattgcagccaagcgaagaaggggccaggtgcggtgttgcagcagcagcagcagcagcggaggcgcaagaagacgagctagagagagagaatcagaggagagcttgggtgagatgggtgagtgcagaggaggaggaggaggaggagatgggctgatcaagctgttcgggaagacgatcccggtgcagccggatgccaagtttttgattcttggctctgcgtctcttggggaattttcggatgttcagcagcatagtggcagtagcagcagctcaaccgaatccgacgtccaagaaaccgccgctgtcgccgtcgccgacccctccccgcggtcggaggtcgtcgacggcgagagcccgccgcagccgggcggcgaggcggcgagccatcagcagcagcagaaggagatgaagctgaagaagccggacaagatcctgccatgcccgcggtgcagcagcatggacaccaagttctgctacttcaacaactacaacgtcaaccagcctcgccacttctgcaagcactgccagcgctactggaccgccggcggcgccatgcgcaacgtccccgtcggcgccggccgccgcaagaacaagaacgccaccgccgccgcccacttcctccaccgcgtccgcgcctgcgccgccgccgccgccatgcccgcggcgccccacgacgccaccaacgccaccgtgctcagcttcggcggcggcggaggcggacacgacgcgccgccggtcaccctggacctcgccgacaagatgacgcgcctcggcaaggaggggctcgtcgcccatgcccggaacgccgacgccgccgccgcgtgcagcgaggtgtcgagcaacagggacgacgagcagatcggcaacactgtagcaaaacctgcaaacgggttgcagcagcatcctcctcctcctcatcatcatcatcattcagccatgaacggtggcggcatctggccctactacacctcggggatcgcgatcccgatatacccggcggcgccggcgtactggggctgcatgattccacctcctggagcttggagcctcccatggccggccacagtccagtctcaggccatctcatcatcatcaccacctacaagtgctacaccttcagtctcctccttcacactaggcaagcatcccagagagggtggtgatcatgaggcaagagatcaccatggcaatggtaaagtgtgggtgccgaagacgatccggatcgacaacgccgacgaggttgcccggagctcaatccggtcactcttcgccttcagaggcggcgacaaggcggatgataacaacgacgacgatggcaccggcgtgcacaagctcgccaccacggtgttcgagccaaagagggacagcaagacggcgaaacatccggcgatcacgagcttgccgctcttgcacaccaaccccgtcgcgcttacccgatccgcgaccttccaggagggatcttga

SEQ ID NO: 75599 - DNA, 369 bp, Oryza sativa
  Clone ID: PAT_MRT4530_75673C.1
ctcacgcgtccgggtgttgaggttttgcgacgcgtgcggtggggaggcggtgcggctgttttgccgagccgacccggtgatcctctgcgccgggagcgacgcacggccgcacgggcctgggtcgcagccacgcgcgggtgtggctctgcgaggtctgcgagcacgcgcccgtgggggtcacgtgctgggccgacgccgccgcgtcttgcgtcggcttgcgacgcgacatccactccgccaaccccgtcgcgcgccgccacgagcggctccccggcgcgcccttcttcggcgcgcttgcctacacgcccaagcagggttctggtgcccacggcggcgacgcggtggcggtcgacgatgacgggagcaacg

SEQ ID NO: 75600 - DNA, 388 bp, Oryza sativa
  Clone ID: PAT_MRT4530_75674C.1
atgagttccaattttacattatgttcttgttatactgaatgtacggctagcttatctgggagatgctttggtgcgggtatagtgtttacttatgcaattactctatgtcatgacgatgatattagagtagtatctggtagtttagacgtggtgtttagattacgggatatcattatttggcgttatatattgcggatgagaggtgggccgctgatggtgacagctcagtacgggtattcctccacgcctatatataatcctaagttaatttcctggggagagtactcctctgtatttagccccggttggatggtcatgacaggctgtcgtaagaaactcggcagtcaggggtggcttctcgaagtaccaggagggcatcatatagagg

SEQ ID NO: 75601 - DNA, 388 bp, Oryza sativa
  Clone ID: PAT_MRT4530_75675C.1
atgaatgtctactttacattatgttcatgttatacttaatatatggctagcttatctaggaaatactttggtgcgggtataatgtttgcttatgcaattactctatgtcatgacaatgatattagagtagtatctggtagtttaggcgtggtgtctagattacgggatatcattatttagggttatatattacggatgagaggtgggccgctgatgctgacaactcagtacgggtattccttcgccccggtatataatcctaagttaattctctggggaggatattcctccatatttagccccggttgtatggtcatgacggactgtcgtaaggaactcggcagtcaggggtggcttctcgaagtaccaggagggcatcggatagagg

SEQ ID NO: 75602 - DNA, 1715 bp, Oryza sativa
  Clone ID: PAT_MRT4530_75676C.1
gagtcacgcaagcctctagtctgctaaggtgggcgtcgccatcgggagaactcaggccacaagaattcctcctctccgaaaactctcccctctctctgctgctgtggccgcatcatctcctcctcatcttcttctccacagcctccagctaggccatggcgtccaccgtctccttctccccggccaacgtgcagatgctccagggcaggagctgccacggccacgcggcgttcgggggctgctccgccgtgccaagaaccgggccaaggatgcgttccgtggccgtgagggtcagcagcgagcaggaggcggcgccggcggtcagggcgccgtcggggaggaccatcgaggagtgcgaggccgacgccgtggccgggagattcccggctcccccgccgttggtcagacccaaggctcccgaaggaacacctcagatcaggcctcttgacttgacaaagcgccctcgtcgcaaccgcaggtcgcctgctcttagggccgcattccaggagaccaccatctcacctgccaatttggtgctcccgctgttcatccatgaaggggaagatgatgctcctattggagctatgcctgggtgctataggcttggttggaggcatgggcttcttgatgaggtctacaagtctcgtgatgttggtgttaacagttttgtgctgtttccaaaagttcctgatgcattgaagtctcaatctggagatgaggcatacaatgataatggtttggttccacggactattcgcctgctcaaggataaattccctgacattgttgtctacacggatgttgctctggacccttattcatctgatggtcatgatggcattgtcagggaagatggagtaattatgaatgatgaaacagtttatcaactgtgcaagcaggctgtttcacaggcacgtgctggtgctgatgtagttagccctagtgacatgatggatggccgtgttggagcaatacgtgctgctttggatgctgagggtttccatgatgtctccattatgtcctatactgcaaagtacgccagttcgttttatggcccattccgagaagctttggattcaaatccaagatttggggacaagaagacttaccagatgaacccagctaactacagagaagcgcttctagaaactgctgcagatgaggcagaaggagctgatattcttctggtaaaacctggattgccatacttggatgtcatccgtcttcttagggacaattcagcattgccaatcgctgcatatcaggtctctggagagtactccatgatcaaagctggaggagcactgaacatgatcgacgaagagaaggtgatgatggagtcgctcatgtgcctgaggcgagccggcgctgacatcatcctgacgtatttcgcgcgtcaggccgccaacgtgctgtgcggcatgcgatccaactagcaggtcaactctgaatctgaaaaaagctgagcagctaaaacccagccatctctgaaacttttgcatgtccccaggtcatcatcatgtgaggctcgttttgcactctatagagagcatttgtgtagtcagtaattagtgctagctttgcaaatatcattctggaataatgttttttgtatgacagtgcctctaattggtgtgtaatttgcggtgaggaaataatataatctgcaattctgtgcaaaaaaaaaaaaaaaaaaaaaaaaaaaaaaaaaaaaa

SEQ ID NO: 75603 - DNA, 315 bp, Oryza sativa
  Clone ID: PAT_MRT4530_75677C.1
atgtttgcttatgtaattattctatgtcatgacgatgatattagagtagtatttggtagtttaggcgtggtgtctagattactaggtagcattatttggggttatatgctgcggaagagaggtgggccgctgatggtgacagctcggtacgggtattcctccgcgcgtgtatatagtccttagttaattccctggggagggtattccttcgtatttagccccggttgtatggtcatgatgggctgtcgtaagaaactcggcagtagggggtggcttctcgaagtaccaggagggcatcggaataagggtattagc

SEQ ID NO: 75604 - DNA, 597 bp, Oryza sativa
  Clone ID: PAT_MRT4530_75678C.1
atggccgtctccgcccttctcccgcctattgcggctgcgccgcctctcgccggaagcacactttccttcggtgttccctaccagaacaagagaaggatcctaacgatgcgagtctactgcgctgctgatgaagaagaggaagtcaatgacttgggagtcaacgtggcactatccatgctaaaattttacaaaacaatcattggccttgcgcccttgccttttgatatcaactatatctctatagcttgctctcctttatgtgaacaggagaaatatcacccttactaccctcaagctgccgttatgtgccaacttgcagtggtcatggatatgatcccccaaggtggtttgatgaggaagagctaccaaagcaatgacagcctgctggtcaataacaaaagcattcgatgtgccatactaattaaaaatatgaccacaaaggtgaaaaagttggacttgtatgcagctctgaagaatataacatgcatctttgccaactatccaccaaggacaactgcagttgtaaaattttcagccaacttccagctgtcaggtaaactatatagaagaaccatcaactatttatttaccaattga

SEQ ID NO: 75605 - DNA, 388 bp, Oryza sativa
  Clone ID: PAT_MRT4530_75679C.1
atgaatgcctactttacatgatgttcatgttatactgaatatacgcctagcttatctgggagatgctttggtgtgggtataatgtttgcttatgaaattactctatgttatgatgatgatattagagtagtatctggtagtttagacgtggtgtctatattacgggatatcattatttgggattatatactgcggatgagaggtgggccgctgatggtgacagctcagtacgggtattcctccgcgcctatatataatcctaagttaattccctggggagggtattccttcatatttagccccggttgtatggtcatgacgggctatcgtaaggaactcggcagttagggatagcttctcgaagtaccaggagggcatcagatagagc

SEQ ID NO: 75606 - DNA, 549 bp, Oryza sativa
  Clone ID: PAT_MRT4530_7567C.1
gcacgagcgctaagtagccctcggttctgtctcctatttcgccgccacgccgcgcccggatgccggtcttcctctccgcctccaccgagcccagaatccctgctcctagccccgtcgtccgcgcgggcggcgagacgagtttagggtttaggagggcggccccctggggctccgctgcgacctccttcgacgacgggtgccggtccgacgccggcgcggccgaccccgttagcctccgcctcggccgtgcgcgtgggggcgatggccgagggccgcgctccccacggtcggccccgcggagccggcggggggcgacgcgaccgcgaccacggcgagggccgctcctggcggctgattccagggtctgcgccccgctgaatccgagcagggttttcctcttttgcgcctctctggattgtgatgcactgagggatcatgggatgagcaaactacaaactcgggcacgaaagggatcgataggatgaggatcagctcaagaatgagaaggtagagaggctctaccttattaccattgtattaatggtggtc

SEQ ID NO: 75607 - DNA, 388 bp, Oryza sativa
  Clone ID: PAT_MRT4530_75680C.1
atgagtacctactttacattatgttcatgttatactaaatatacgtctagcttatctgggagatgctttggtgcgggtataatgtttgcatatacaattactctatgtcatgatgatgatattaaagtagtatctgatagtttagacgtggtgtctagattacaaggtatcattatttggggctatatattgcggatgagaggtgggccactgatggtgacagctcagtacgggtattcctccgcgccggtatataatcctaagttaatttcctggggagggtattcctccgtatttagccccggttgtatggtcatgacgggctatcgtaaggaactcagcagtcaggggtggcttctcgaagtaccaggagagcatcggatagagg

SEQ ID NO: 75608 - DNA, 315 bp, Oryza sativa
  Clone ID: PAT_MRT4530_75681C.1
gtgtttgcttatgcaattactctatgtcatgacgatgatattagagtagtatctggtagtttagatgtggtgtctagattacggaatatcattatttggggttatatattgcagatgagaggtgggccgatgatggagacagctcagtacgggtattccaccgcgcctatatataatcctaagttaatttcctagggagggtattcctccgtatttagccctggttggatggtcatgacgggctgtcctaaggaactcggcagtcaggagtggcttctcgaagtaccagaagggcatcgaatagagggtattagc

SEQ ID NO: 75609 - DNA, 3258 bp, Oryza sativa
  Clone ID: PAT_MRT4530_75682C.1
ggctatgctcaagtgaggttcctacaggggttcagtcaagatgctaagatcatgtatgaagaagcaagccaagttgcaactgatgcagttggtagcatcagaacagtagcatcttattgtgctgagaagaaagtgatgacaaaatacaatcagaaatgtcaagcttctagataccagggaataagaacggggatagttggaggccttggttttggtttctcaaacatgatgttgtttatgacctctgctctttgctactatgttggtgcaaagtttgttagtcaaggcaactctacttttggcgatgtcttcaaggctttcttttctttagttgtggccatgctgggagtatcatcaactgctgccatggcttctgactcgagcaaggctaaggattctgcttcttccatatttgcaatcttagatagaaaatctcaaattgattccagcagcaacgaaggtttaaccttggagcttgtcaagggtgacattgaatttacgcatatcagtttcagatacccatcccgtccagatgttcaaatcttcagtgactttaccttgagcatcccctctgggaagactgtggcacttgttggtcagagtggcagcggcaagtctacagcaattgcgttactagaacggttttatgatcctgattctggtgtaatcttattagatggtgtagaaatcaagaaactagagatcagttggttgagggaccagatgggattagttagccaagaaccagtgcttttcaatgatacgatccgtgccaacatagcttatggaaagaatgaagaagtaactgaggaagagattgtggcagctgctaaggcagcaaatgcccacgagttcatatcaagtatgccagaggggtacagcaccagtgtcggagagaggggaacccaattatcaggtgggcaaaaacaacgaatagccattgcaagggccatcgtcaaggatcccaggatactactcctagatgaggcgacgagcgcattagatgctgagtcagagcgcatcgttcaagatgcactggaccatgtgatggttggaaggacaaccgttgttgttgcacaccgcctctcaacaatccaaggcgctgatattattgcagtcctgaaggacggtgcaattgttgagaaggggaggcacgaggcactcatggggattgccagtggagcttatgcttcacttgtggaacttcgccataatacaccaaatttagatggctacaagaccaaaaatgctaatagcgacgcaggattagaaatttcctgctcgtctgcttactcctcccctacaaactacaatttcatctatgtgacactacttcaaagcatcaaaaactcagtaaatatgatcccaactagcatagcacaagaggaatctacaacagccaacggcggcgcgaagactacggagactcggaatgcagcggacgccgtacggtcggttccggcggcggcgaggactgcggcggcgggcggcggcagcggcggtcgcctcgcctttcgtcgcggagcctttgagcctttggaggcgaaggggaggaaggaggacttcgtggtcgtagcgcgcggggcggcggcgtcggccggagcgcgggcggcggcggcgcgcgggcagcggtctgccgcacgggaggcgcgcgggcggctggaggcgcgcgggcggctggaggcgcgcgggcgacgggacggcgcgcgtgcagcggccgcggcagcccgtgggctgacagccggcggcgggggcgggggcggggcgagcggtggcgcgcgggctgagcgccgacggcagcgaactccgatgcccgccgccgccgccgccgcgagactgcgccgccgcggccaccgccggaagaagttcgtgtacagaccgaagccaccgccggagccgcacccattcctcctccacctcaagtcgctcccgtcccccgtcgccgccgcggccgcgctcctctccgcgccgaggcgcctccacgaccaccccttcgccgcctgcgtgctctaccgcctcgcccgcgcgcgcctcttcccgctcgtgcccccgctcctcgccgcgctgcactcccgcggcgcgccgctccgtcccaccgtgttcgccgccgtcatcgaccacctcggcgccgcttcccgccccgacgccgcggtcggcgtcttccgcaccgtcccggccttctgctcccactccgccgccacattccattccctcctcaacgcccttgtgtccaatggccgcacggatgccgcccgggacatgctcccgctcgccccgaagctcggcgtccgcctcaacgccgtgtcgtacaacatcatcctcaagggcgcgtgtctccgggacgggttcatgggcgcccgcggcgtgctcgacgaaatgctcagccggggtgtgcgaccgacggtggtcaccttcaacacgctggtggggtcggcgtgccgggagggtgagctgggcgcggcggagcggctcatcgacgagatggcgcgccgtggcgtggcgccaaacgcggccacctacgccctcctgatgcgggggctctgcgacgccgaccgccacgccgacgccgagaagctgatgttcgacatggagtaccgcgggtgccaggccgacgtggtgaactacggcgtgctgatgagctcccgcgcgaggcacggcgacgccgacggcgtcagggagctcctctccgccatgcgcaagcggaagctcaagcccgacgacgcgagctacaacatcctgatcaggtgcctgtgcgacgccggcagggccgacgaggcgcacagggcgctgctcgagatgcagctcaggggcaccgtgccgggcgccgccacgtaccgcgtcctcgtcgacgggtgctgcagggctcgcgacttcgacctgggtctacgggtcttcaacgcgatgatggcgagcggacactgcccccaagctcgcaccttcaggcaccttgcgagagggctcggcgaggacggcaaggcggaggaggcgttcttcgtcttggagcagatggcgaggagggagatgagcttggatgcagatgggtggcaagctgttgtcacgaaattcaaagactcagagagcaaaagagcctacaactccaacttgagacatttctcaacagatttctggctttctgcattccagcagatcaaaaggcttcagcccaagcgatccaactcccgcttcacaagacaactccatcttgacccaacagaactccaccacatgcatcttgctgatgacagtgcagtgctgtag

SEQ ID NO: 75610 - DNA, 494 bp, Oryza sativa
  Clone ID: PAT_MRT4530_75683C.1
atgagtacctactttatattatgttcatgttatactgaatatacggctagcttatctgggagatgctttggtgcgggtataatgtttgcttatgcaattactctatgtcatgacgtggtgtctagattagtatctggtagtttagacgtggtgtctagattacgggatatcattatttggggttatatattatggatgagaggtgggccgctgatggtgacagctcagtacgggtattcctctgtgccggtatataatcctaagttaatttcctggggagggtattcctccgtatttagctccggttgtatggtcatgacgggctgtcgtaaggaactcggcagtcaggggtggcttctcgaagtaccaggagggcatcggatagaggaacctggtgtaggcgtatctcaatcacctgaaaaaggacttttaggtggtgagcgatcgctactatctactggtcgagaatcaggtgtaggcgtatctcgatcacc

SEQ ID NO: 75611 - DNA, 243 bp, Oryza sativa
  Clone ID: PAT_MRT4530_75684C.1
atggcgactgcggaccggccgttgtttttgaatttacttttcaggactggatatttccatttatcaggatcaggcattgaaatattcctgatcatgcccaaagttggtgctttctgctcgtcgtggagacgcggagagtatctgatccgtgaaagcaatggcacgtgggtggggcctgaaaaggaagcatcaagcatggtgcaacgaagagccaagggcatggaaaatggttgctccacgtaa

SEQ ID NO: 75612 - DNA, 1406 bp, Oryza sativa
  Clone ID: PAT_MRT4530_75685C.1
aaccagacaataaatcaatctgacgatgtcgaggatcagacttatgtatgaatgggccaagaactcagaaatgacacgaccaattggaccaaaattcacaagtctatagagaggagaagtccaggaggccgccaaccaaaaatgtgctggattggaccagcccatggttcggccgaactaaggggttcggccgaacccccatctgctccgttggatgcagggtttggcgtggacgtccaggattgctctccaatgacggttagagagcatttccgaccattccaactgccataaccgtcactgggaggctataaaaggacttcaacctccccactctcttcacacacctcaagcaagagctctctcatattctctcaagttagtttagtgttatctagctagtggaataggaatagaatagaaatcgggagtccggaagccttcggaagagttcgggcatggctctagtagctttcctttcctcttctgtaagctttgtactttatttagaatactcttctttatacatttatggtattgaaatactttccgagtatatgaatgcctactttatattatattcatgttatattaaatatactgctagcttatctgggagatgctttggtgcaggtataatgtttgtgtatgcaattactctatgtcatgacgatgatattagagtagtatctggtagtttagacgtggtgtctagattacaggatatcattatttggggttatatgctgcggatgagaggtgggccgctgatggcaatagctcagtacgggtattcctccgcgtgtgtatataatcctatgttaattcactggggagggtattcctccttatttagccccggttgtatggtcataatgggctgtcgtaaggaactcgacagtcaggggtggcttctcagagtaccaggagagcatcggatagaggggtcgtgcatgactggtttcaacttgccgggaaacttcaaggaaaatctagaagctttcatccggagcatcaggtcgcgagtcattgctccgcagaaaactctaccgacagagaaaccagttgtaccaacgccatcatccttcaagactatggctgacaagacccttcgcgagttcgctgctccctctgctgagaatgtggccatttggccacagatcaacatgggagacgtggatttcgacttgaagtccagcctcgttacgttggcacaggctagcccgttctgtggcaagcctaacgaggatgccaacgctcatctacagcagttcctggagatctgtagcacgtgcaccatgaagggcgtcggtcccgacgccgtcaggctaaggctgtttccgttctccctcctcgggagagtgaagcagtggttctacgccaatcatgctgctgtcaacacctag

SEQ ID NO: 75613 - DNA, 426 bp, Oryza sativa
  Clone ID: PAT_MRT4530_75686C.1
acactttaaagcaacctgagcgggttaccgaaacttctcctctatctgatgccctcctggtacttcgagaagccacccctgactgccgagttccttacgacagcccgtcatgaccatccaaccggggctaaatacggaggaataccctccccaggaaattaacttaggattatatataggcgcggaggaatacccgtactgagctgtcaccatcagcggcccacctctcatccgcaatatataaccccaaataatgatatcccataatctagataccacgcctaaactaccagatactactctaatatcatcgtcatgacatagattaattgcatatgcaaacactatacccgcaccaaagcatctcccagataagctagccgtatattcagtataacaagaacataatgtaaagttggtactcat

SEQ ID NO: 75614 - DNA, 1293 bp, Oryza sativa
  Clone ID: PAT_MRT4530_75687C.1
atggacgagtgggaggagctggcgcggacagtgccggcgacgctcatgcaagtcggctccgggatggaagccgtcaggaagatccaggtcgcccacaggaagatccaagggcgcgctggtttgatgcgcaacatacgcttcgggatgccggcggccatcgccatgagcctcttcgacgacccggcccccgtcggagtttgccccaccgtgaccctcgaggaggcccgctgcgagatctcgcggggcgccgctcgccacgcgatggccgaccacgtcttcgttcgctacgtcgagctcctcggcatccagcacgagccgccgtgcaccagcagggacacccaccaccgggaggccatccgcttcaccgccatggccctggagaaggtcagggaagccgcgtcgcttgcagaggcggccaaggacgccgtcgacatcgccgagacgctcctcccgcagcccgagctgaagacggagtgggcgttggcggcccaggacctcgcggaacgcgccgactacgaagccacccaggcgctggagtttgtgaaacgggcgcgcgacgtcgtcgctctcgagttcttcgacacctggaagattctgcgtcgcgggagagctcgatcggcggagatgaaggagtggagagagctagcgctgaaagtgccgggaaccatcatgctcatcggcgacgccgagctggaaaccctcgagttgatccaagccgccgtcagcaagttccagaagcatgtcgagttgctgcaagaggtacgccatgggacggcgacggccaccgccgtcgacaacttcaccgacccggaccccgagggagccttgcccaccgagctcctcgagaacgcacgccgcgggatgtccaagagcgccgttcgccatgcgaaggcccaccacatcttcgctcgctacgccgcgttcctcggcatccaaggcgacgaggagtaccgcagctgggacaacaagcaccaggaagccgccggcagcatggtcgcggcgctgaagaaagtcatcgacgccgtctcggatgctgaggcagccaaggacgccgtcgccatggtcgggatcctcccctaccagtgcccgctgtgggaattgtgggcgttgagggcgcagaaccagacctccttgtcctccttcaacgccaccctcgcgatactagacgtgcgacaggcgcgcgaggccttttttgtggaggtcttacgcgcctggttgattctgcgtcgctatggatctcttcaactcctggatgattctgcatcgctctggagttcctcgacgcctgcatga

SEQ ID NO: 75615 - DNA, 1383 bp, Oryza sativa
  Clone ID: PAT_MRT4530_75688C.1
atggaggccaaactggcagagaatctagctcgatcagggcctaccgctaatgctaatcccgtgtcaaaggattggtccctgaccagtatcctagaagatttggttgatctgccatgggggaaatttaaggaattgagcaaaatacttgagaaattggctgaagaagttgaagaaataaggggaagaattcagaaagtgaaggagaaaacaacagtgcttggcaactttgttaatctcgcacatcctatgcaggtatttcctgatgagatgagtaaggtggacaaaagcaaattaatgtgtgatgcatgcgagtatggaaaacatacacgaaccacatacataagcagaggacttcgaagcattttgccatttgtgttggttcactctgatgtatggacttctcctattgcttcgatttcatcggatacggaaggagaggagtttgaaacagggggagaagaaactaatcttcctattgctataagaaagggggtaagaagcaatgcaggtaaacctccacaaaggtatggttttgaagctcaaggtgtgaatgatgataagaataacatagccaattatgtctcttatgcttctttgtcatccacatataaggcctttgtgacatcactaaattcagtggaaattccaaatgattggagggaagcaaagcaagacccaaggtggcatcaagctatgctagaggagctagaggctcttgaaaagaacaaaacatgggaccttgtaccattccctaaagggaagaaagtggttaactgtaaatgggtttatacagtaaagcaaaatcctgatggaaatgtggaaagatacaaggcaaggcttgtggctaagggatatagtcaaacatatggaattgattatgatgaaacttttgcaccagtagcaaagataagcacggtaagaactcttatctcttgtgcagctaattttgattggccattgcatcagttagatgtcaagaatgcattcttacatggagatcttcaagaggaggtgtatatggaaattccacctggatttgctacctcacaaactgaaggtaaagtgttgagactgaaaaaatctttatatggccttaaacaatcaccaagagcatggtttgatcgttttagacgtgcaatgtgtggtatgggttataaacagtgcaatggagaccacacagttttctatcgccataatagaggtcttaaaactattcttgttgtgtatgttgatgacatgattatcactggagatgattgcttgaagatatctaggttgaaagaaaatctaagcaaggagtttgaggtcaaggatctgggccaattaaaatattttttgggtattgaaattgcaagatctcctagaggaatagttctttcatag

SEQ ID NO: 75616 - DNA, 1303 bp, Oryza sativa
  unsure (1)..(1303): unsure at all n locations
  Clone ID: PAT_MRT4530_75689C.1
atgggggaaattcaaggaattgagcaaatacttgagaaattggctgaagaagttgaagaaataaggggaagaattcagaaagtgaaggagaaaacaacagtgcttggcaactttgttaatctcgcacatcctatgcaggtatttcctgatgagatgagtaaggtggacaaaagcaaattaatgtgtgatgcatgcgagtatggaaaacatacacgaaccacatacataagcagaggacttcgaagcattttgccatttgtgttggttcactctgatgtatggacttctcctattgcttcgaacggagtagctgagaggaaaaatcgacatattctggaggtaactcgttcactcatgtatacgatgaatgtaccaaagtttctatggagtgaggcagtcatgacagcaacatatctcatcaatcgcatgccatcacgaatacttgggatgaagactccatatgaaatggtgtttgggaagaatgaattcattgttcctccaaaagtgtttgggtgtacttgttttgtcagagatcatagaccatccgttggaaaattggatcctcgagccgtcaagtgtatttttataggttactcttctgggcaaaagggatataaatgttggagtccatctgagcggcgaacttttgttagtatggatgttacttttagagagtctgttccgttctatggagaaagaacagatttgagttccttgtttgttgatcttgacaatccaattattgatgaggatggacaagagggggagaatggatcatcaggtgataaaccatctgatcagtgtgatactatacagatttcatcggatacggaaggagaggagtttgaaacagggggagaagaaactaatcttcctattgctataagaaagggggtaagaagcaatgcaggcctttgtgacatcactaatcnaagtggaattccaaatgattggaaggaaaaaaaccaagacccaaggtggcatcaagctatgctagagaagttagaggctcttgaaaagaccaaaacatgggaccttgtaccattccctaaaggaaagaaagtggttacctgtaaatgggtttatacagtaaagcaaaatcctgatggaaatgtggaaagatacaaggcaaggcttgtggctaagggatatagtcaaacatatggaattgattatgatgaaacttttgcaccagtagcaaagatgagcacgttagatgtcaagaatgcattcttacatggagatcttcaagaggaggtgtatatggaaattccacctggatttgctacctcacaaactgaag

SEQ ID NO: 75617 - DNA, 166 bp, Oryza sativa
  Clone ID: PAT_MRT4530_7568C.1
atggggattgggatcaagagacagatcagtaaggaccgacaagccagattcgtcgacagatcacaaccgatttttggccccttcctccggccgtgtgtgagtccgacattccaagtccccgcggtcggatttctcaaccccggcatcggcctcgcactgcaacaag

SEQ ID NO: 75618 - DNA, 2568 bp, Oryza sativa
  Clone ID: PAT_MRT4530_75690C.1
atgggggaaattcaaggaattgagcaaatacttgagaaattggctgaagaagttgaagaaataaggggaagaattcagaaagtgaaggagaaaacaacagtgcttggcaactttgttaatctcgcacatcctatgcaggtatttcctgatgagatgagtaaggtggacaaaagcaaattaatgtgtgatgcatgcgagtatggaaaacatacacgaaccacatacataagcagaggacttcgaagcattttgccatttgtgttggttcactctgatgtatggacttctcctattgcttcgaacggagtagctgagaggaaaaatcgacatattctggaggtaactcgttcactcatgtatacgatgaatgtaccaaagtttctatggagtgaggcagtcatgacagcaacatatctcatcaatcgcatgccatcacgaatacttgggatgaagactccatatgaaatggtgtttgggaaaaatgaattcattgttcctccaaaagtgtttgggtgtacttgttttgtcagagatcatagaccatccgttggaaaattggatcctcgagccgtcaagtgtatttttataggttactcttctgggcaaaagggatataaatgttggagtccatctgagcggcgaacttttgttagtatggatgttacttttagagagtctgttccgttctatggagaaagaacagatttgagttccttgtttgttaatcttgacaatccaattattgatgaggatggacaagagggggagaatggctcatcaggtactgaagaagacacacaatcaagaagcatgaaatttgtggttggctcaatcccatatcctgttagtgaacccattcatgagaaaaattggagaaggccacgtgaagaagaaaatctacaagtttatactaggaggaaaacaaggtctttggaggcgcaaacaatggggcaacatgagtctcctatggatgggatggagcagcaacaatcttcaattgttgctgaagtaggtgataaaccatctgatcagtgtgatactatacagatttcatcggatacggaaggagaggagtttgaaacagggggagaagaaactaatcttcctattgctataagaaagggggtaagaagcaatgcaggtaaacctccacaaaggtatggttttgaagctcaaggtgtgaatgatgatgagaataacatagccaattatgtctcttatgcttctttgtcatccacatataaggcctttgtgacatcactaaattcagtggaaattccaaatgattggagggaagcaaagcaagacccaaggtggcatcaagctatgctagaggagctagaggctcttgaaaagaacaaaacatgggaccttgtaccattccctaaagggaagaaagtggttaactgtaaatgggtttatacagtaaagcaaaatcctgatggaaatgtggaaagatacaaggcaaggcttgtggctaagggatatagtcaaacatatggaattgattatgatgaaacttttgcaccagtagcaaagatgagcacggtaagaactcttatctcttgtgcagctaattttgattggccattgcatcagttagatgtcaagaatgcattcttacatggagatcttcaaaaggaggtgtatatggaaattccacctggatttgctacctcacaaactgaaggtaaagtgttgagactgaaaaaatctttatatggccttaaacaatcaccaagagcatggtttgatcgctttagacgtgcaatgtgtggtatgggttataaacagtgcaatggagaccacacagttttctatcgccataatagaggtcttaaaactattcttgttgtgtatgttgatgacatgattatcactggagatgattgcttggagatatctaggttgaaacaaaatctaagcaaggagtttgaggtcaaggatctgggccaattaaaatattttttgggtattgaaattgcaagatctcctagaggaatagttctttcacagcgaaagtatgtattggatctgctcagtgatacaggtaaaggcatatggttcaagaagaatggacacctagatgtggagggatattgtgatgcagattggggcagttgtcttgatgataggaggtcaacatcaggctactgtgtatttattggtggcaatctggtatcttggaggagcaagaaacaatcagttgtgtctcgctcgactgctgaggcggaatacaggtcaatgtcaatgagcttgagtgaattgttatggttgaaaaatcttttggctgaattgaagctgtcgacaagcacttccatgaagttgtggtgtgacaacaaatcagccataaatattgctaacaatccagtccagcatgatcgaacgaagcatgtggaaatagatcgcttctttattaaagagagaatggatgagggaaccttaaacttaggctttgtaaactctggtgaacaagtagctgatagtttaacgaaggcattaggtgctagagagtgcacttcttcgtgtagcaagatgggcatgatagatatttatcgcccatcttga

SEQ ID NO: 75619 - DNA, 314 bp, Oryza sativa
  Clone ID: PAT_MRT4530_75691C.1
ccgcgccgcggatcatccattcaccacaattcatatattatagttgaagcatatgagtagaatccaacatctatgaagatcattttcagatttgctctccttgctattgttgcatgcaatgcctctgcgcggtttgatcctctcagtcacaggtataggtaatatcaactacagtcgcatctcctactacagcagacagcgctcagcccatgcaccgagttcgtaagggaacaggatagcatagtgtgaatccccttctggaaaccaggtacgattcaattgataaacaaccaagtcatgcaccagcagtgttg

SEQ ID NO: 75620 - DNA, 3347 bp, Oryza sativa
  Clone ID: PAT_MRT4530_75692C.1
gtttttatgctacccgcagaatttggagctagacaagccaatgttgatgaagttgaggatgcctcggctagattgatgttgtcactagaacaggcgatttttgagaaaccggatgggacagaaaatcggcatctcaagccattgtacattaatggttatgtcaatgggaagccgatgtctaagatgatggttgatggtggggctactgtgaatttgatgccatatgccacattcagaaagttaggaaggaattcagatgatctcatcaagactaacatggttctcaaggagtttgttgacaatccatcggagactaggggtgttttgaatgcggaactgacagtcagcaggaagggttcctatagcttgttgctcggaagggattggattcatgctaattgttgtattccttcgaccatgcatcaatgcttgattcaatggcaaggcgacaagattgagatcgtgccagccgacagccaattgaagattgagagcccaaattattattttgagggcgtcacggagggtttaaacgtctacaccaaggacacagtagatgatctcgattgcaagaatttatctcctgaattcagaaccaagttgatagagctttaaaggaatataaagattgcttcgcttgggagtattatgagatgccaggactcagccgatcaattgtcgaacatcggcttcctattaaaccaggggttagaccataccagtagctgccatgaagatgcaaagccgatttgcttgaggctgtcagggctgaggttacacgtttatatgatgctggttttattcgtccatgccgatatgctgagtgggtttctaatatagttccagttatcaataaaaatggcaaagtcagagtgtgcattgatttttgggatctaaacaaggctaccccaaaggacgagtacccaatgccggttgccgatcagttggttgatgctgcttcgggacataagatattaagttttatggatagcgatgcaggatacaatcagatctttatggcagaagaagatgttcataagataactttcagatgtcctggtgcaatcggcttgtttaagtgggttgtaatgactttcggcttgaagagcgctggagctacatatcggagggccatgaattacatattccatgatctgatcgcctagttggttgaagtttatattgatgatgtggtgtcaaatcaaaggatatagagaaccacatagccgatttgaggaaggttttcgagaggaaagtatggcttgaaaatgaaccccacaaagtgtgcttttggcgtatcggctggttagtttttgagatttcttgttcatgagatggggattgaggtgactcaaaggagtattaatgcaattaaaatgttgcaagagttgatcggcaagataaattttgttagaaggtttatctccaatttgtctaggaggttaaggcattatctattgtccaatgaatgcattgtgatatgtaaagccgatgtggtaaagtacatgctatcggcttcgattctgaaagaaagagttgggaagtggatatttgctttgacagagtttgatcttcggtatgagtcaccaaaggcgattaaggggcaagctatagccgatcatcgtgatgacgcaatcggctcagtcgaaattgtgccttggactttgtttttcgatggatcaatgagcactcatggttgtggcatcggcttagtcataatttctccttggggggcaagttttgggtttgcttatactattaagccttatgcaactaacaatcaggttgtatatgaagcggttctcaaggggttgcaattgctaaaggaagttgaagccgatgctatcaagattatgggtgattctttgttggtaatctatcaattggcaggagaatatgaatgcaagaatgatacattgatggtttacaatgagaagtgccgacagttaatggatggatttcggctggtaactttaaagcatgtgtctcgagaacaaaatgttgaagctaatgatttggctcaaggggcatcgggatataaactgatgatgaaggatatcacaatagaagttgccacgatagcagccgatgattggagatttgatgtttttcaatatttacagaatccatctcaatcggcttctcggaaattgcgctataaagctttgaaatacactttgttggatgatgagttatattatcggacgattgatggggtgttgcttaagtgtttatgtgccgatcaagccaaggttgcgattggtgaggtgcatgaaggaatttgtggtactcatcaatcggctcacaagatgaagtggctgcttaggcgtgcaggatatttttggctgacaatgttggaaaattacttcagatattacaagggatgtcaagattgtcaaaagtttggagcgattcagcgagcaccagcatcggctatgaatcctatcatcaagccatggccattcagaggttggggaattaatatgatcggtatgattaatccaccttcgagcaagggacacaagtttatattggtggcaactgattactttaccaagtgggtagaggcgtttcctttgaagaaggttgattcgggggatgctatacaattggttcaagagcatattatttaccgatttgggattcctcaaactattacaaccgatcaagggtcaatcttcgtgtccgatgagtttgttcagtttgctgatagcatgtgtatcaaattgttgaattcttcgccatgttatgcacaagctaatgggcaagctgaggcatctaacaagagtttgttcaagttgattaagagaaagatttctgattatcctcggcaatggcatactaagttggctgaagcattgtggtcctatcggatggcttgccatggatcgattcaagttcctcattataagcttgtttatggacatgaggcagttttaccatggtaagttagattcggcttgagaagaatggatctacaagataaattgacagccgatgagtattataaccttatggccgatgaaaaagaggacttggttcaatcaagattgagagctcttgcaaaagttaccaaggataaggaacggattgctcggcattataataagaaggtggtgcctaagtctttttccaaatgagagcttgtttggaagttaatcttgccgataaggactcgggataacaaattcggcaaatggtcaccaaattgggaagaaccgtttcaaatccataaggttgtgtccaaaggagtttatatgttgcaaggatttgatggagaagtttatggacgagcacttaatagtaaatacttgaagaaatattacccaagtgtttgggttaatgca

SEQ ID NO: 75621 - DNA, 2670 bp, Oryza sativa
  Clone ID: PAT_MRT4530_75693C.1
atggaggccaaactggcagagaatctagctcgatcagggcctaccgctaatgctaatcccgtgtcaaaggattggtccctgaccagggagatagcgattggtgggaagaaaatgtccggttatctgatctccagatggggtcaatgtgcaccccgtactggaattgagcaaatacttgagaaattggctgaagaagttgaagaaataaggggaagaattcagaaagtgaaggagaaaacaacagtgcttggcaactttgttaatctcgcacatcctatgcaggtatttcctgatgagatgagtaaggtggacaaaagcaaattaatgtgtgatgcatgcgagtatggaaaacatacacgaaccacatacataagcagaggacttcgaagcattttgccatttgtgttggttcactctgatgtatggacttctcctattgcttcgaacggagtagctgagaggaaaaatcgacatattctggaggtaactcgttcactcatgtatacgatgaatgtaccaaagtttctatggagtgaggcagtcataacagcaacatatctcatcaatcgcatgccatcacgaatacttgggatgaagactccatatgaaatggtgtttgggaagaatgaattcattgttcctccaaaagtgtttgggtgtacttgttttgtcagagatcatagaccatccgttggaaaattggatcctcgagccgtcaagtgtatttttataggttactcttctgggcaaaagggatataaatgttggagtccatctgagcggcgaacttttgttagtatggatgttacttttagagagtctgttccgttctatggagaaagaacagatttgagttccttgtttgttgatcttgacaatccaattattgatgaggatggacaagagggggagaatggctcatcaggagaggagtttgaaacagggggagaagaaactaatcttcctattgctataagaaagggggtaagaagcaatgcaggtaaacctccacaaaggtatggttttgaagctcaaggtgtgaatgatgataagaataacatagccaattatgtctcttatgcttctttgtcatccacatataaggcctttgtgacatcactaaattcagtggaaattccaaatgattggagggaagcaaagcaagacccaaggtggcatcaagctatgctagaggagctagaggctcttgaaaagaacaaaacatgggaccttgtaccattccctaaagggaagaaagtggttaactgtaaatgggtttatacagtaaagcaaaatcctgatggaaatgtggaaagatacaaggcaaggcttgtggctaagggatatagtcaaacatatggaattgattatgatgaaacttttgcaccagtagcaaagataagcacggtaagaactcttatctcttgtgcagctaattttgattggccattgcatcagttagatgtcaagaatgcattcttacatggagatcttcaagaggaggtgtatatggaaattccacctggatttgctacctcacaaactgaaggtaaagtgttgagactgaaaaaatctttatatggccttaaacaatcaccaagagcatggtttgatcgttttagacgtgcaatgtgtggtatgggttataaacagtgcaatggagaccacacagttttctatcgccataatagaggtcttaaaactattcttgttgtgtatgttgatgacatgattatcactggagatgattgcttgaagatatctaggttgaaagaaaatctaagcaaggagtttgaggtcaaggatctgggccaattaaaatattttttgggtattgaaattgcaagatctcctagaggaatagttctttcacagcgaaagtatgtattggatctgctcagtgatacaggtatgcttggatgtcggccagcttctacaccaattgaacaaaatcataagttatgtgctgaatctggagatccagttaataaagagagatatcaaagacttgtgggaaggttgatatatttgtgtcacacaagacctgatataacttatgctgtgagtgtggtgagccgatacatgcatgatcctagaagtggtcacatggatgttgtgtatagaattttgagatatttgaaggcaagcccaggtaaaggcatatggttcaagaagaatggacacctagatgtggagggatattgtgatgcagattggggcagttgtcttgatgataggaggtcaacatcaggctactgtgtatttattggtggcaatttggtatcttggaggagcaagaaacaatcagttgtatctcgctcgactgctgaggcggaatacaggtcaatgtcgatgagcttgagtgaattgttatggttgaaaaatcttttggctgaattgaagctgtcgacaagcacttccatgaagttgtggtgtgacaacaaatcagccataaatattgctaacaatccagtccagcatgatcgaacgaagcatgtggaaatagatcgcttctttattaaagagagaatggatgagggaaccttaaacttaggctttgtaaactctggtgaacaagtagctgacagtttaacgaaggcattaggtgctagagagtgcacttcttcgtgtagcaagatgggcatgatagatatttatcgcccatcttga

SEQ ID NO: 75622 - DNA, 779 bp, Oryza sativa
  Clone ID: PAT_MRT4530_75694C.1
taggagaatatgaatgcaaaaatggtacgttgatggtatacaatgagaggtgccgggagttgatggatggatttcggctggtaactttaaagcatctcgttcaagagtatattatttaccgatttgggattcctcaaacaattacaaccgatcaagggtctatctttgtgtctaatgagtttgttcagtttgccgatagcatgggtatcaaaatgttgaattctgcgtcgtattatgcacaagccaatggacaagccgaggcgtctaacaagagtttgatcaagttgattaagagaaagatttctgattatcctcggcaatggcatactaggttggctgaagcattgtggtcttatcggatggcttgccacggattgatttgaggcagttttaccatgggaacagatttgcagaatgagttgtcagctaatgaatattataatctcatggccgatgagaaggaagatttggttcaatccagattgagagctcttgcaaaagctaccaaggataaggaaagggttgctcaacattataacaagaaggtggtgcctaagtctttttctgagggagagcttgtttggaagctaattttgccgataggaacgcgattttcatggcgtgacaagtggtcaccaaattgggaaggaccgtttcaaatccataaggttgtgtccaaaggagcttgtatgttgcaagggtttgatggagaagtttatggacgagcacttaatgacaagtacttgaagaaatattacccaagtgtctgggtcattgca

SEQ ID NO: 75623 - DNA, 2469 bp, Oryza sativa
  Clone ID: PAT_MRT4530_75695C.1
atgggggaaattcaaggaattgagcaaatacttgagaaattggctgaagaagttgaagaaataaggggaagaattcagaaagtgaaggagaaaacaacagtgcttggcaactttgttaatctcgcacatcctatgcaggtatttcctgatgagatgagtaaggtggacaaaagcaaattaatgtgtgatgcatgcgagtatggaaaacatacacgaaccacatacataagcagaggacttcaaagcattttgccatttgtgttggttcactctgatgtatggacttctcctattgcttcggttactcttctgggcaaaagggatataaatgttggagtccatctgagcggcgaacttttgttagtatggatgttacttttagagtctgttcagttctatggagaaagaacagatttgagttccttgtttgttgatcttgacaatccaattattgatgaggatggacaagagggggagaatggctcatcaggtactgaagaagacacacaatcaagaagcatgaaatttgtggttggctcaatcccatatcctgttagtgaacccattcatgagcaaaattggagaaggccacgtgaagaagaaaatctacaagtttatactaggaggaaaacaaggtctttggaggcgcaaacaatggggcaacatgagtctcctatggatgggatggagcagcaacaatcttcaattgttgctgaagtaggtgataaaccatctgatcagtgtgatactatacagatttcatcggatacggaaggagaggagtttgaaacagggggagaagaaactaatcttcctattgctataagaaagggggtaagaagcaatgcaggtaaacctccacaaaggtatggttttgaagctcaaggtgtgaatgatgatgagaataatatagccaattatgtctcttatgcttctttgttatccacatataaggcctttgtgacatcactaaattcagtggaaattccaaatgattggagggaagcaaagcaagacccaaggtggcatcaagctatgctagaggagctagaggctcttgaaaagaacaaaacatgggaccttgtaccattccctaaagggaagaaagtggttaactgtaaatgggtttatacagtaaagcaaaatcctgatgaaaatgtggaaagatacaaggcaaggcttgtggctaagggatatagtcaaacatatggaattgattatgatgaaacttttgcaccagtagcaaagatgagcacgttagatgtcaagaatgcattcttacatggagatcttcaagaggaggtgtatatggaaattccacctggatttgctacctcacaaactgaaggtaaagtgttgagactgaaaaaatctttatatggccttaaacaatcaccaagagcatggtttgatcgctttagacgtgcaatgtgtggtatgggttataaacagtgcaatggagaccacacagttttctatcgccataatagaggtcttaaaactattcttgttgtgtatgttgatgacatgattatcactggagatgattgcttggagatatctaggttgaaacaaaatctaagcaaggagtttgaggtcaaggatctgggccaattaaaatattttttgggtattgaaattgcaagatctcctagaggaatagttctttcacagcgaaagtatgtattggatctgctcagtgatacaggtatgcttggatgtcggccagcttctacactaattgaacaaaatcataagttatgtgctgaatctggagatccagttaataaagagagatatcaaagacttgtgggaaggttgatatatttgtgtcacacaagacctgatataacttatgctgtgagtgtggtgagccgatacatgcatgatcctagaagtggtcacatggatgttgtgtatagaattttgagatatttgaaggcaagcccaggtaaaggcatatggttcaagaagaatggacacctagatatggagggatattgtgatgcagattggggcagttgtcttgatgataggaggtcaacatcaggctactgtgtatttattggtggcaatttggtatcttggaggagcaagaaagaatcagttgtgtctcgctcgactgctgaggcggaatacaggtcaatgtcgatgagcttgagtgaattgttatggttgaaaaatcttttggctgaattgaagctgtcgacaagcacttccatgaagttgtggtgtgacaacaaatcagccataaatattgctaacaatccagtccagcatgatcgaacgaagcatgtggaaatagatcgcttctttattaaagagagaatggatgagggaaccttaaacttaggctttgtaaactctggtgaacaagtagttgatagtttaacgaaggcattaggtgctagagagtgcacttcttcgtgtagcaagatgggcatgatagatatttatcgcccatcttga

SEQ ID NO: 75624 - DNA, 573 bp, Oryza sativa
  Clone ID: PAT_MRT4530_75696C.1
tcaatcccaaataggtttccgggaggtgggtcccacttgtcggtcactggactcggaggctgcggcccgcacggcgaacggagcggcggcgcagctcgcgcgatcaatcgtcggcggcagcggcggcggcggcggcgggatggggctcggggggcgaggcgtggtgggggagaggtggtcgcagcgcgtcctctggctctgcgccatcggcagcgccgtgagcctgtactacgtggcggtggagaggcaggcgcagaaccgcgcgcgggcggtggccgaggggctcaaggccctcgacggcgccggcgccggagaggacgtgtgacttcgctgtgtgctggagaggtgatcccggcctgtgtagagacggcctctctgttcgagctcgaaacgagttatatttttgcttaccttgtttcttgtttcatgaaattttcgcaataataatgtactagtaattgccccctttgtcattgcgataactggattacaatttgcgatatgggagccagaaatgatggccgaaatgaatgtcatctgtttgttctaaaaaaaaaaaaaaaaaaaaaaaaa

SEQ ID NO: 75625 - DNA, 174 bp, Oryza sativa
  Clone ID: PAT_MRT4530_75697C.1
tttttatctaacgtacatatccggggggaggaagcttaccctttttgttcacttctgcctgatggtgcaaatagtcatcccctggatttgacagacacataatgtatgttctagaaccacgactaatactatatcaaaatgtttgtttatcagaacatgacatagatgtatatc

SEQ ID NO: 75626 - DNA, 2754 bp, Oryza sativa
  Clone ID: PAT_MRT4530_75698C.1
atgggggaaattcaaggaattgagcaaatacttgagaaattggctgaagaagttgaagaaataaggggaagaattcagaaagtgaaggagaaaacaacagtgcttggcaactttgttaatctcgcacatcctatgcaggtatttcctgatgagatgagtaaggtggacaaaagcaaattaatgtgtgatgcatgcgagtatggaaaacatacacgaaccacatacataagcagaggacttcgaagcattttgccatttgtgttggttcactctgatgtatggacttctcctattgcttcgaacggagtagctgagagtaaaaatcgacatattctggaggtaactcgttcactcatgtatacgatgaatgtacccaagtttctatggagtgaggcagtcatgtcagcaacatatctcatcaatcgcatgccatcacgaatacttgggatgaagactccatatgaaatggtgtttgggaagaatgaattcattgttcctccaaaagtgtttgggtgtacttgttttgtcagagatcatagaccatccgttggaaaattggatcctcgagccgtcaagtgtatttttataggttactcttctgggcaaaagggatataaatgttggagtccatctgagcggcgaacttttgttagtatggatgttacttttagagagtctgttccgttctatggagaaagaacagatttgagttccttgtttgttgatcttgacaatccaattattgatgaggatggacaagagggggagaatggatcatcaggtgataaaccatctgatcagtgtgatactatacagatttcatcggatacggaaggagaggagtttgaaacagggggagaagaaactaatcttcctattgctataagaaagggggtaagaagcaatgcagtaaagcaaaatcctgatggaaatgtggaaagatacaaggcaaggcttgtggctaagggatatagtcaaacatatggaattgattatgatgaaacttttgcaccagtaccaaagatgagcacgttagatgtcaagaatgcattcttacatggagatcttcaagaggaggtgtatatggaaattccacctggatttgctacctcacaaactgaagacgctgatataacttatgctgtgagtgtggtgagccgatacatgcatgatcctagaagtggtcacatggatgttgtgtatagaattttgagatatttgaaggcaagcccaggtaaaggcatatggttcaagaagaatggacacctagatgtggagggatattgtgatgcagattggggcagttgtcttgatgatatgaggtcaacatcaggctactgtgtatttattggtggcaatttggtatcttggaggagcaagaaacaatcagttgtgtctcgctcgactgctgaggcggaatacaggtcaatgtcgatgagcttgagtgaattgttatggttgaaaaatcttttggctgaattgaagctgtcgacaagcacttccatgaagttgtggtgtgacaacaaatcagccataaatattgctaacaatccagtccagcatgatcgaacgaagcatgtggaaatagatcgcttctttattaaagagagaatggatgagggaaccttaaacttaggctttgtaaactctggtgaacaagacatcttgcatcatgtatattctcttatgccattgaaagatgctgctcgtgctgcttgtgtgtcacatggatttctacgttgctggagacgctatccaatccttatattaaataacaaaacgataggtttgattaagagaaaactcagtttggatgacatggaaagctatgctgtcagtaaaattgaccatattattaagagccattctggcattggggtgaaagtgcttaaacttcaactgttcgcctgtccgaatataagtgcagctgttcttgacaaatgtgatatagtccagtttaaggtaccttgcctgatgcaacagctcaagtacctcgaggttacaaaatgtcaaatgctacaagtgatagagatagatgctcccaaactctccacttttatctatggggatgttggagttaaaatctctcttggagatccactgcaggtcaaggacatacgtctgatgggttacaatgaagccgacaccgtctgttatgctcgtaccaagcttccatccattttgccaaatattgaatcacttgtcgtgtcatctcctaatgagatgaccagtacgccagtggtgcccagcaagttcctccacctcaagttcttggagatttatcttaaagaattatttgcctcacttcccagctatgatttcttttctctggtttctttcttggatgcttcccctgccttggagactttcatcttgcacgtagagcagcagttcgaaaggcatgattcgattcttgatggagaacctacggatttgaggcgaattctgcacgacggacatgccaacctccagaatgtgacgatcaccggcttcaattctacaaagagcatgattgagctaacaactcacattcttgagaatgcaccatcgctcaagtgcattacgctggatacagccaacttctctggcaagaaccatttggcgatgggcgaatgctctcctatgatgagaggagggatcttggaagcacgaagagctttcgaggcagccagaagacacatcgcggggaaaataccctcctttgtcgagtataagtttctggaaccctgcaggcattgtcattttgggtactga

SEQ ID NO: 75627 - DNA, 438 bp, Oryza sativa
  Clone ID: PAT_MRT4530_75699C.1
ggagcacagaatcaaacggatcaataccaatctgcagaaacacattatatacactagtcagtgcaatcatacagatataagtatcatggtcagacgacacatcaagcgacacaagcagtcaacctcaggtcgcacacatatataacattgctcaaacacctacatatatgttttaattacaagaacctgaatactaccccatccttggattccatattggaaccttgatctaacagacgaagccagaggccacggcaactcttttgtgtacatgcgatcaatgaacgggagaaactggcaggaaacacagcatgcacgataatctcttgattgtataaactgtttaattggcgaggtgcatgcactggcaaacttatgcacaggacacctgcgctttctgctcatgcacttccttcctgctgaacagtagagccactg

SEQ ID NO: 75628 - DNA, 850 bp, Oryza sativa
  Clone ID: PAT_MRT4530_7569C.1
gtgacagtccgtccccctcccaggacgacggcgacacccaaggaggcggggaagggagatggcaggcgacggggaagaggtggcggctggcggcgggggagaggtcggcgccggggcagcgcgaagaccggcggcaggcaggggcagtgtcacggtgggcgggcgacggcagcggcggctcgctcgcgccgtggtcacggcgccggcgtcggtgtcgcgtggcggtggctcactggtggccagcctcctgttcggcagggggcatcttctgcccgtggtgggtctcgtgactcatgggcggcgatgtgcggacgtggagttggcgggatgacggcttgtgctggctgaagatgctaacgaaagccttgccgtgcttttggccggttcgacaacgacagcgcccgtgggcgtcgtttccctccttggaggcgttgtcatggcgttctttcatatccccacaaatctccaggtgaaaacctcgttacgatttacggacaagcggcggcggcgttacgcgtcgtgtcctccttgggggtgtcgcttcggagaagttccaacgcatcgatgactgttgatggtccttttcggttcaaaatctttcataccttgtgttcggagaggctgcaccttcttggggtccgcttcattcttgtggtgggcgacacgctcttcggttgtttctgctgatgagtcgaagcttctcgctgatgggctcggcaatgataacacctcttctgcgatgtgggagcaattgtgttgcttttgtgtttagcttggcggcgacgtcctgcgattgggctccgccgctattgttagttatgtagcaacaatgggggccgggggggggggg

SEQ ID NO: 75629 - DNA, 286 bp, Oryza sativa
  Clone ID: PAT_MRT4530_756C.1
tttttcttttttaattaaacgatcaaactatatgcatttaactgataactagtcacacgtgtggatccaaatagaaaatatttatcatatgttacaacaaacaggacgcagacaatgccaatagtcgatactttctaagatacattgacattgtcctactcataaactttcactttttactttatttctccttctttactaacccaatatcaatttcacaatttctatacttttaatttattcattcacttaaatctttttttatatttttactttatttattttt

SEQ ID NO: 75630 - DNA, 2913 bp, Oryza sativa
  Clone ID: PAT_MRT4530_75700C.1
atgggggaaattcaaggaattgagcaaatacttgagaaattggctgaagaagttgaagaaataaggggaagaattcagaaagtgaaggagaaaacaacagtgcttggcaactttgttaatctcgcacatcctatgcaggtatttcctgatgagatgagtaaggtggacaaaagcaaattaatgtgtgatgcatgcgagtatggaaaacatacacgaaccacatacataagcagaggacttcgaagcattttgccatttgtgttggttcactctgatgtatggacttctcctattgcttcgaacggagtagctgagaggaaaaatcgacatattctggaggtaactcgttcactcatgtatacgatgaatgtaccaaagtttctatggagtgaggcagtcatgacagcaacatatctcatcaatcgcatgccatcacgaatacttgggatgaagactccatatgaaatggtgtttgggaagaatgaattcattgttcctccaaaagtgtttgggtgtacttgttttgtcagagatcatagaccatccgttggaaaattggatcctcgagccgtcaagtgtatttttataggttactcttctgggcaaaagggatataaatgttggagtccatctgagcggcgaacttttgttagtatggatgttacttttagagagtctgttccgttctatggagaaagaacagatttgagttccttgtttgttgatcttgacaatccaattattgatgaggatggacaagagggggagaatggatcatcagtggaaattccaaatgattggagggaaaaaaagcaagacccaaggtggcatcaagctatgctagaggagctagaggctcttgaaaagaacaaaacatgggaccttgtaccattccctaaagggaagaaagtggttaactgtaaatgggtttatacagtaaagcaaaatcctgatggaaatgtggaaagatacaaggcaaggcttgtggctaagggatatagtcaaacatatggaattgattatgatgaaacttttgcaccagtagcaaagatgagcacgttagatgtcaagaatgcattcttacatggagatcttcaagaggaggtgtatatggaaattccacctggatttgctacctcacaaactgaaggtatgcttggatgtcggccagcttctacaccaattgaacaaaatcataagttatgtgctgaatctggagatccagttaataaagagagatatcaaagacttgtgggaaggttgatatatttgtgtcacacaagacctgatataacttatgctgtgagtgtggtgagccgatacatgcatgatcctagaagtggtcacatggatgttgtgtatagaattttgagatatttgaaggcaagcccaggtaaaggcatatggttcaagaagaatggacacctagatgtggagggatattgtgatgcagattggggcagttgtcttgatgatatgaggtcaacatcaggctactgtgtatttattggtggcaatttggtatcttggaggagcaagaaacaatcagttgtgtctcgctcgactgctgaggcggaatacaggtcaatgtcgatgagcttgagtgaattgttatggttgaaaaatcttttggctgaattgaagctgtcgacaagcacttccatgaagttgtggtgtgacaacaaatcagccataaatattgctaacaatccagtccagcatgatcgaacgaagcatgtggaaatagatcgcttctttattaaagagagaatggatgagggaaccttaaacttaggctttgtaaactctggtgaacaagacatcttgcatcatgtatattctcttatgccattgaaagatgctgctcgtgctgcttgtgtgtcacatggatttctacgttgctggagacgctatccaatccttatattaaataacaaaacgataggtttgattaagagaaaactcagtttggatgacatggaaagctatgctgtcagtaaaattgaccatattattaagagccattctggcattggggtgaaagtgcttaaacttcaactgttcgcctgtccgaatataagtgcagctgttcttgacaaatgtgatatagtccagtttaaggtaccttgcctgatgcaacagctcaagtacctcgaggttacaaaatgtcaaatgctacaagtgatagagatagatgctcccaaactctccacttttatctatggggatgttggagttaaaatctctcttggagatccactgcaggtcaaggacatacgtctgatgggttacaatgaagccgacaccgtctgttatgctcgtaccaagcttccatccattttgccaaatattgaatcacttgtcgtgtcatctcctaatgagatgaccagtacgccagtggtgcccagcaagttcctccacctcaagttcttggagatttatcttaaagaattatttgcctcacttcccagctatgatttcttttctctggtttctttcttggatgcttcccctgccttggagactttcatcttgcacgtagagcagcagttcgaaaggcatgattcgattcttgatggagaacctacggatttgaggcgaattctgcacgacggacatgccaacctccagaatgtgacgatcaccggcttcaattctacaaagagcatgattgagctaacaactcacattcttgagaatgcaccatcgctcaagtgcattacgctggatacagccaacttctctggcaagaaccatttggcgatgggcgaatgctctcctatgatgagaggagggatcttggaagcacgaagagctttcgaggcagccagaagacacatcgcggggaaaataccctcctttgtcgagtataagtttctggaaccctgcaggcattgtcattttgggtactga

SEQ ID NO: 75631 - DNA, 3171 bp, Oryza sativa
  Clone ID: PAT_MRT4530_75701C.1
atgggggaaattcaaggaattgagcaaatacttgagaaattggctgaagaagttgaagaaataaggggaagaattcagaaagtgaaggagaaaacaacagtgcttggcaactttgttaatctcgcacatcctatgcaggtatttcctgatgagatgagtaaggtggacaaaagcaaattaatgtgtgatgcatgcgagtatggaaaacatacacgaaccacatacataagcagaggacttcgaagcattttgccatttgtgttggttcactctgatgtatggacttctcctattgcttcgaacggagtagctgagaggaaaaatcgacatattctggaggtaactcgttcactcatgtatacgatgaatgtaccaaagtttctatggagtgaggcagtcatgacagcaacatatctcatcaatcgcatgccatcacgaatacttgggatgaagactccatatgaaatggtgtttgggaagaatgaattcattgttcctccaaaagtgtttgggtgtacttgttttgtcagagatcatagaccatccgttggaaaattggatcctcgagccgtcaagtgtatttttataggttactcttctgggcaaaagggatataaatgttggagtccatctgagcggcgaacttttgttagtatggatgttacttttagagagtctgttccgttctatggagaaagaacagatttgagttccttgtttgttgatcttgacaatccaattattgatgaggatggacaagagggggagaatggatcatcaggtgataaaccatctgatcagtgtgatactatacagatttcatcggatacggaaggagaggagtttgaaacagggggagaagaaactaatcttcctattgctataagaaagggggtaagaagcaatgcaggtaaacctccacaaaagtatggttttgaagctcaaggtgtgaatgatgatgagaataacatagccaattatgtctcttatgcttctttgtcatccacatataaggcctttgtgacatcactaaattcagtggaaattccaaatgattggagggaaaaaaagcaagacccaaggtggcatcaagctatgctagaggagctagaggctcttgaaaagaacaaaacatgggaccttgtaccattccctaaagggaagaaagtggttaactgtaaatgggtttatacagtaaagcaaaatcctgatggaaatgtggaaagatacaaggcaaggcttgtggctaagggatatagtcaaacatatggaattgattatgatgaaacttttgcaccagtagcaaagatgagcacgttagatgtcaagaatgcattcttacatggagatcttcaagaggaggtgtatatggaaattccacctggatttgctacctcacaaactgaaggtatgcttggatgtcggccagcttctacaccaattgaacaaaatcataagttatgtgctgaatctggagatccagttaataaagagagatatcaaagacttgtgggaaggttgatatatttgtgtcacacaagacctgatataacttatgctgtgagtgtggtgagccgatacatgcatgatcctagaagtggtcacatggatgttgtgtatagaattttgagatatttgaaggcaagcccaggtaaaggcatatggttcaagaagaatggacacctagatgtggagggatattgtgatgcagattggggcagttgtcttgatgatatgaggtcaacatcaggctactgtgtatttattggtggcaatttggtatcttggaggagcaagaaacaatcagttgtgtctcgctcgactgctgaggcggaatacaggtcaatgtcgatgagcttgagtgaattgttatggttgaaaaatcttttggctgaattgaagctgtcgacaagcacttccatgaagttgtggtgtgacaacaaatcagccataaatattgctaacaatccagtccagcatgatcgaacgaagcatgtggaaatagatcgcttctttattaaagagagaatggatgagggaaccttaaacttaggctttgtaaactctggtgaacaagacatcttgcatcatgtatattctcttatgccattgaaagatgctgctcgtgctgcttgtgtgtcacatggatttctacgttgctggagacgctatccaatccttatattaaataacaaaacgataggtttgattaagagaaaactcagtttggatgacatggaaagctatgctgtcagtaaaattgaccatattattaagagccattctggcattggggtgaaagtgcttaaacttcaactgttcgcctgtccgaatataagtgcagctgttcttgacaaatgtgatatagtccagtttaaggtaccttgcctgatgcaacagctcaagtacctcgaggttacaaaatgtcaaatgctacaagtgatagagatagatgctcccaaactctccacttttatctatggggatgttggagttaaaatctctcttggagatccactgcaggtcaaggacatacgtctgatgggttacaatgaagccgacaccgtctgttatgctcgtaccaagcttccatccattttgccaaatattgaatcacttgtcgtgtcatctcctaatgagatgaccagtacgccagtggtgcccagcaagttcctccacctcaagttcttggagatttatcttaaagaattatttgcctcacttcccagctatgatttcttttctctggtttctttcttggatgcttcccctgccttggagactttcatcttgcacgtagagcagcagttcgaaaggcatgattcgattcttgatggagaacctacggatttgaggcgaattctgcacgacggacatgccaacctccagaatgtgacgatcaccggcttcaattctacaaagagcatgattgagctaacaactcacattcttgagaatgcaccatcgctcaagtgcattacgctggatacagccaacttctctggcaagaaccatttggcgatgggcgaatgctctcctatgatgagaggagggatcttggaagcacgaagagctttcgaggcagccagaagacacatcgcggggaaaataccctcctttgtcgagtataagtttctggaaccctgcaggcattgtcattttgggtactga

SEQ ID NO: 75632 - DNA, 3700 bp, Oryza sativa
  Clone ID: PAT_MRT4530_75702C.1
cagcctgcatgtgaatgatgttataactgggcaggtatggtcatattgtggcaaggtgcggcgctgtgaccagaggggttctgcggcgacgtcgacggctgaggcggagcggcgacgtcggacagcggaggcggagcggcagtgttgacggcggaggcggcgacggctgctgcagaggttctcgacgcgagcagcgtgaaggaggagcagggcgcacgctcgctggttgagctgcgcaaggatttggtgcagcacaagctgcttggcaactttgttaatctcgcacatcctatgcaggtacctaactcaacttggatattagactccggagcatctagacatgttacaggaatgtcgagtgagtttacatcatatactccatttcagtcatcatttaaagaaacaattcaaactgccgacggaactttacgacatgtgaggggagtgggaacagtcaaatgtactccatcaattacattgtcgtcagttttatatgctccctcttttcctgttaacctagtatccgtaagctcgttggttgatcatatggattgtcgaattactattgaccgagagaattgtctaattgaggagagaagaactggaagaaagcttggaaccggcgttaggcataatgggttgtggtatctagatagaagagggacggacaaagcactatgtagtgctttgttagctagcacaagtgaagaggaggctaaattgattctaaaacattgtcaattgggacatatgtcctttgatactatgtctaaggtatttcctgatgagatgagtaaggtggacaaaatcaaattaatgtgtgatgcatgcgagtatggaaaacatacacgaaccacatacataagcagaggacttcgaagcattttgccatttgtgttggttcactctgatgtatggacttctcctattgcttcggtaagtggagcaaagtactttgtcacctttattgattgccactcacgaataacttgaatatatctcataagacgcaagagtgaagtattgaaatgtttcaagaatttctatgcttgggttaggaatcaattaacacttgtgttaagttattaggagcgataatgggggagaatatgtgaatgatgaatttaggagttttctctcagcagaaggaatagtacatcaaacttcttgtgctgacacacctccacagaacggagtagctgagaggaaaaatcaacatattctggaggtaactcgttcactcatgtatacgatgaatgtaccaaagtttctatggagtgaggcagtcatgacagcaacatatctcatcaatcgcatgccatcacgaatacttgggatgaagactccatatgaaatggtgtttgggaagaatgaattcattgttcctccaaaagtgtttgggtgtacttgttttgtcagagatcatagaccatccgttggaaaattggatcctcgagccgtcaagtgtatttttataggttactcttctgggcaaaagggatataaatgttggagtccatctgagcggcgaacttttgttagtatggatgttacttttagagagtctgttccgttctatggagaaagaacagatttgagttccttgtttgttgatcttgacaatccaattattgatgaggatggacaagagggggagaatggctcatcaggtactgaagaagacacacaatcaagaagcatgaaatttgtggttggctcaatcccatatcctgttagtgaacccattcatgagcaaaattggagaaggccacgtgaagaagaaaatctacaagtttatactaggaggaaaacaaggtctttggaggcgcaaacaatggggcaacatgagtctcctatggatgggatggagcagcaacaatcttcaattgttgctgaagtaggtgataaaccatctgatcagtgtgatactatacagatttcatcggatacggaaggagaggagtttgaaacagggggagaagaaactaatcttcctattgttataagaatgggggtaagaagcaatgcaggtaaacctccacaaaggtatggttttgaagctcaaggtgtgaatgatgatgagaataacatagccaattatgtctcttatgcttctttgtcatccacatataaggcctttgtgacatcactaaattcagtggaaattccaaatgattggagggaagcaaagcaagacccaaggtggcatcaagctatgctagaggagctagaggctcttgaaaagaacaaaacatgggaccttgtaccattccctaaagggaagaaagtggttaactgtaaatgggtttatacagtaaagcaaaatcctaatggaaatgtggaaagatacaaggcaaggcttgtggctaagggatatagtcaaacatatggaattgattatgatgaaacttttgcaccagtagcaaagatgagcacggtaagaactcttatctcttgtgcagctaattttgattggccattgcatcagttagatgtcaagaatgcattcttacatggagatcttcaagaggaggtgtatatggaaattccacctggatttgctacctcacaaactgaaggtaaagtgttgagactgaaaaaatctttatatggccttaaacaatcaccaagagcatggtttgatcgctttagacgtgcaatgtgtggtatgggttataaacagtgcaatggagaccacacagttttctatcgccataatagaggtcttaaaactattcttgttgtgtatgttgatgacatgattatcactggagatgattgcttggagatatctaggttgaaacaaaatctaagcaaggagtttgaggtcaaggatctgggccaattaaaatattttttgggtattgaaattgcaagatctcctagaggaatagttctttcgcagcgaaagtatgtattggatctgctcagtgatacaggtatgcttggatgtcggccagcttctacaccaattgaacaaaatcataagttatgtgctgaatctggagatccagttaataaaaagagatatcaaagacttgtgggaaggttgatatatttgtgtcacacaagacctgatataacttatgctgtgagtgtggtgagccgatacatgcatgatcctagaagtggtcacatggatgttgtgtatagaattttgagatatttgaaggcaagcccaggtaaaggcatatggttcaagaagaatggacacctagatgtggagggatattgtgatgcagattggggcagttgtcttgatgataggaggtcaacatcaggctactgtgtatttattggtggcaatttggtatcttggaggagcaagaaacaatcagttgtgtctcgctcgactgctgaggcggaatacaggtcaatgtcgatgagcttgagtgaattgttatggttgaaaaatcttttggctgaattgaagctgtcgacaagcacttccatgaagttgtggtgtgacaacaaatcagccataaatattgctaacaatccagtccagcatgatcgaacgaagcatgtggaaatagatcgcttctttattaaagagagaatggatgagggaaccttaaacttaggctttgtaaactctggtgaacaagtagctgatagtttaacgaaggcattaggtgctagagagtgcacttcttcgtgtagcaagatgggcatgatagatatttatcgcccatcttga

SEQ ID NO: 75633 - DNA, 404 bp, Oryza sativa
  Clone ID: PAT_MRT4530_75703C.1
cagactgcggcggcggcgacggcgcgacggcgaggaccatcgtcgaggccttcccacacgtcaagtgcactgtgctggaccttcctcgcgtgattggcgacaaaacactgatggggttgtgagctatgtggccggtgactgctcagcttcatcccacctgcacaagctgtgatgctaaaggttgtacttcaccattggagtgaccaggattgcgtgaaaatcctagctcattgcaagaaagctattccatcacgagaggcaggaggtaaagtgatcatcattgatgtagtgattagttctacctccggaccattgctggaagccgagctccttatggatgtgggcatgatactgatcggcaaaggccaacagcgagatgaaaacaagtggtgtgatctcttcaa

SEQ ID NO: 75634 - DNA, 936 bp, Oryza sativa
  Clone ID: PAT_MRT4530_75704C.1
atggcggttgcgtgttgggttttgggcctcggcgattttggagtagcgcgcaagttgccggtggcgtccgcatcgacggcgtggttagagagctcgcaagcgcaagcggaggcgaggcgtgcagtgcatgcgaagagtgtagaaacttccatcgccaacggggaggtgactgtggcggcggcatggcccagcaaccgcgcgctctgtgtgcggtccgtcggcgaggaggtcgaggacgaacacttccgcaccatatcttccccccgccgacgtgtcacgtgcctcgccagcagcgcccaatcaacttgcgcgaggggaacagcaaagacgtcgggtcgcggcaggctacgggctacggccaccgggaggaacttcggcagagggcccttccagacttcccgtaccgggcggcgtcgagggcaccgaccgcaggaggagctagcgcgagcccgggcgaagacatgcggcaggcaacgagatgttcggcgtcggcgaacgacgtcgatggcgatagtggtggctgatggcgaggatgaggaggccgccgccgatctgagcccaaacgacgaggagcgcctcgccaccatcttccgcgcggacgtgcctctccttcgcatcaggggaggcacgcccatctggacaaactgcggcggagatccccccatccactcgccgtcgacgtcgagggcaacgacgcgcgcggaccgcggacgcggcttgtggcgactggcgagcgaacagccgcccaccgccgccggagacgatgtgctcgtagaaaggtggcaatggcgcgtgcgctgcgtcctgtgtcgcggggagcacgatgcagctctcgccctcggccggcagcgaacggagttggaggaagaagggtgccgtgcaggtgcgaagccaggatttgagattagcggggtgtggggtgaagataaaccatga

SEQ ID NO: 75635 - DNA, 169 bp, Oryza sativa
  Clone ID: PAT_MRT4530_75705C.1
gaaagctgccggcgtcgcgccgtgcaggggccagcctgccgtccatcatcaatgcctatgtcagggtctcgggccggctgcacatgggccgctaggcaacccgtcgccaagaagaaacagaacagaactggcaatcggcggcttcggccacggcggcggcggcgactag

SEQ ID NO: 75636 - DNA, 494 bp, Oryza sativa
  Clone ID: PAT_MRT4530_75706C.1
ggggaaaccccccaaatacccaaatgattaatttcactgaaaaaaacccggggtccttacattacacaaatttataccttgatacccccctaattgccaaaacaaccccctttttaattaattaataacccccgggtttaattcaacaataattaacccccccccaaaccccccttttttgggggggtttttttggggactaattaaggggggggacccccccgggggaaaggttcgggtgctttctgaattcacttgccccactttcaatcggggcaagaacaactggggccccactttcaacccccgttttccttcccggggggaacctccttaaaaggggtttttttgggtttaactttaaaaaccccctaactgggacctttttttaccccctgggttttttcaacacaatcccaattgccccccttttcccacctgggcgaaaatttaatttcctaagggagggaaaaattaatcccttgggttgcccc

SEQ ID NO: 75637 - DNA, 157 bp, Oryza sativa
  unsure (1)..(157): unsure at all n locations
  Clone ID: PAT_MRT4530_75707C.1
cgtggaggtcttcttcccccacgacgacccgccaccgccagagagccccagcaagagccaacgactgggtggacgagggagcaactggggcggttccatgaacgagccgccgcaggaaggaatgccggcaagggcgcnagaactacgccccgcaggt

SEQ ID NO: 75638 - DNA, 341 bp, Oryza sativa
  unsure (1)..(341): unsure at all n locations
  Clone ID: PAT_MRT4530_75708C.1
cgcgtacgcggacagcgctgtgtggtcgacgcgcccttcacgtccgtttcatcgaaccacactaccatcacgcctgctatgttgcttttgtgaaagaaatacgagagactccaaatgtgaagtacggtgcanctgacccccatcaaacaactgcatacaggaacctactacacctgatcaaagagttacaagcggttgatcagtacccaaaataatcttaccctgtacagggctaggatatcccatctaagccaatgaacagatatttgacaagatcgcatgaacatgccaatcaaagacgccgagcaaatcaaacgatcgatcgactgaaatcaggcata

SEQ ID NO: 75639 - DNA, 1289 bp, Oryza sativa
  Clone ID: PAT_MRT4530_75709C.1
ctcactatagggggggggcgtctagaaccgccggccgggattcttagtgaccaccccccatatcacatcctctccttcctcttcctctgctcactcagctctcccccgcgcgcgccaccgtcgtcgccatgtcgggcaacatcgccttcggccgcttcgatgactccttcagcgcggcctccctcaaggcctacgtcgccgagttcatctccaccctcgtcttcgtcttcgccggcgtcggctccgccatcgcctacaccaagttgaccggcggcgcgccgcttgacccggccgggctggtcgccgtggcggtgtgccacgggttcgggctgttcgtggcggtggccatcggcgccaacatctccggcggccacgtcaacccggccgtcaccttcggcctcgccctcggcggccagatcaccatcctcaccggcgtcttctactggatcgcccagctcctcggcgccatcgtcggcgccgtcctcgtccagttctgcaccggcgtggcgacaccgacgcacgggctgtccggcgtgggcgcgttcgagggcgtggtgatggagatcatcgtcaccttcgggctggtgtacaccgtgtacgccaccgccgccgaccccaagaaggggtcgctcggcaccatcgcgcccatcgccatcggcttcatcgtcggcgccaacatcctcgtcgccggccccttctccggcggctccatgaacccggcgcgctccttcggccccgccgtcgccagcggcgactacaccaacatctggatctactgggtcggccccctcgtcggcggcggcctcgccggcctcgtctaccggtacgtctacatgtgcggcgaccacgcccccgttgccagcagcgagttctaattacccatttcgccatcggcaacacgcataaaaatggtggtcactccatcgtcagaatcttgtgaggatgtgttgtgaaggactgatttggttcagatggggaagaaggcttttgttgcgaggatgtgacacttgggtgatgatcgatccatgtttagtttcttcttgattaatttgtaatgtgatcagtgtggagcaagttggatgagatgcatgtttaagatcgaacacttctgttgagtttcattgtgagatttcatttgattcgggccatgtcatttcagtttgtttgtagcctccaaaataagcttgtgtcttctcctcgcaaataggaaatcagaaataaaattgttccgggaaaaaaaaaaaaaaaaaaaaaaaaaaaaaaaaaaaaaaaaaaaaaaaaaaaaaaaa

SEQ ID NO: 75640 - DNA, 2375 bp, Oryza sativa
  Clone ID: PAT_MRT4530_7570C.1
atggcgttccagttccacacgctactatcagccgtaacaatatggctgggcgtagcggctgctacggcgaggctccatgccgccgtcgccggagcacgagcgccgccgccgccgccgccgcccggcaactgccaaaggaagtgcggcgacgtagacatcccctacccgttcggcgtctggaacggcagcgagtccgacggctgcgccgttccaggcttctacctgaactgcgacgtcgacgacaaccacgtctacaggccgttccacgggaatgtggaggttctcagcatctccctgccgaccgggcaggcccgggtgacgaactccatctcctccgcttgctacaacaccagctcccgcgacatggactacaacgactggcagatcaacttcaccggcacgccgctgacgatctccgacgccgacaacaagttcaccgtcgtcgggtgccagacgctggcgtacatcaccgacgacgacaacatgggcaagtacacgagcgggtgcgtcgccatgtgccagggaggcgacctgacgagcctcgccaccaacgggtcgtgctccgggataggctgctgccagacagccatccccaggggtctgaagtactaccgcgtcaggttcgacacgggcttcaacacctcggagatctacaacgtcagccgctgcagctacgcggtgctgatggagtcgaaggccttcagcttccggacgagctacgtgagctcgctggaatttaacagcagcaacggtggcagggtgccgttggtggtggattgggctatcggaaacgagacttgtgataaagcccgcagaaaggttgacacctatgcatgtgtcagccacaacagcaagtgcttcaactcgtccaacggaccaggctacatctgcaactgctccgaagggtaccaaggtaacccctacctgcaggacgggcagcacggttgcacagatatagacgagtgtgcggatccgaagtacccttgttccgtgcctggaacttgccataatcttcctggcgggttcgagtgcttatgccctcgcagtcgtcccaaaggcaacgcattcaatgggacatgcgagagagatcaaacccttcatactggaggaaaagtagctattggaatttccggttttgctatcgttggcctcgttgtttttcttgtacgagaagtgatccagcacaaacgaagtatcaaaagacaagctctgcagagacagactgacatgtattttcaacaacacggaggacagatcttactagaactgatgaaagtagagagcagcgctgagttcaccctctacgacagagagaagatcgaggtagccacaaacaatttcgccaaggagaacattgttggcaaaggagggcaggggaccgtttacaaggctgtcctcgacggcaccactgttgcgataaagaggtgcaacgaggttgatgagagcagaagagccgacttcgtgcaggagctggtcatactctgtcgtgtcaaccacccaaatatcgtcaaactagtcggctgctgcctgcagttcgaggcccccatgctaatctatgagttcgtgcagaacaagacactgcaagagctactggacctccaaaggagtaggaagttccacgtcacactggcgacccgcttaaggattgctgcagaatccgccaatgcacttgcacatctccactcactgccgcgcccaatactccacggcgacgtgaagccagccaacatacttcttgctgaaggattggttgcaaaggtgtctgactttggttgctcaacgattgatgagaaaacccaagctgttgtaaaaggtacaccgggatatctcgacccagactatctacttgagtaccagctcacagccaagaatgatgtatacagctttggggtcattcttcttgagctcctaacgggtaagaagccactttcaaaagaacggacgagcttgatcccaatatttcaaggggcaatggaaagtggcaaactcgttgagctcctggacagtgacatagtagatgaagccaacatgggagttatctgtcaggcagcatcactagctagtcaatgcttggctaatccaagttcatcaaggccaacaatgaggcaagtggcggagcagcttcgacgactagcattggcagatgaagtacaacaatgcccacaaccgccgctagtgctcgatggcctcatcctcacagagatggggagcacaacatcatcatggtacacaggaagtggaacaagcggggtttataaccttgagaacaatgtcgttctaagcacagaattcgctagatgatccatagaccccttgtgctttattgagtgttataatgtcttgttttatctctgttttaaaaaaaaaaaaaaaaa

SEQ ID NO: 75641 - DNA, 297 bp, Oryza sativa
  Clone ID: PAT_MRT4530_75710C.1
atgtgggacagggaggccagcgacgggcggtgcggtggcgtggcgacgcggcggcggcgggccgggagcaggcgggggaagagctgtgcgtgggcgacgggcgacggaggaggagcggcagaaggcggagcgtaccccggcctgtgctgctgcttgtctctccctcttgaccgcatttctctctggctcacggtgtcgctgctgttgcaggtggcggagcagctacgggcggtgactgcgcatcgccggaagacggagcgtgccgagggggaggtgctcgccatcctggagtcctag

SEQ ID NO: 75642 - DNA, 1112 bp, Oryza sativa
  Clone ID: PAT_MRT4530_75711C.1
cctccttacaactattgacacgtccaattattggttactgaagctgaacccagggaagtatactttcggagtaccatcggggaagttacttggttttcttgtctccggacgaggaattgaagcaaaccttgagaaggtcaaggccatcgagaacatgaagtcatccacaaaactcaaagaagtttagaagttgacaaaatgcatagcaacactaagttgattcgttgccagtatgggagaacgagaaccgtctttcttcgctttccttaaaaagtaggacaaatttgagtggacgcaggatgtcgagaacgcgtttatcgcgctcaaacggtacttgtccaaccccctgtactggttgtccgtcaaccagtggaagagctattcctttatattgccgccacaccttattctgttagtaccgtcatagttgtcgagagggacaaagtacaacaccccatatactatgtcagcgaggtcctccacgacgccaaaacccaatatccccaaatacagaagctgctctacgctgtgattatgacatcatggaaaccgcttcactacttctaggcccacaaagtcacggtcatctcttctttccccctatgcgaggtggtcaggaacaaagatgttgtaggacgcattgccaagtgggtcatcaagcttagccaatttaatgtccacttcgttctgagaacagctatcaagttccaggttctcgcagattttgttaccgactggactattcctgataacagtatagctgatcaaacagataacgagacatggaaaaatgaccttcgatagagcactcaacagccaaagagcaggggcaggatttattctaacatctctaactggagatcggttcagacatgcaatacacctcaattttcgagcaaccaataacattgcaaagtacgaagggctaccatccgggttacgagccgccgtagcactcggagtaaagcgattaattgtgaaaggggactcagagttggtcgccaatcaagtgcacaaggactacaaatgctccaaccccgagttagccaaatacctcaccgatgtcaggaagctggagcgaaagtttgacggtgtcgaaattcggcatcaaa

SEQ ID NO: 75643 - DNA, 381 bp, Oryza sativa
  Clone ID: PAT_MRT4530_75712C.1
atggctgacaagacccttcgtgagttcgctgctccttctgctaacaatgtggccattgggccgcagatcaacatgggagacgtggatttcgacttgaagtccagcctcatcactatggcgcaggctagcccgttctgcggcaagcctaacgaggatgccaacactcatttgcagcagttcttggagatctgtagcacatacactataaagggacaaatgctctacggcattccactccaagttcttcccgatgggcaaaaccaatgcccttcgtggaagtatttcaagttccagcaaacaagggacgagtccattccggaagcatgggaacgacttcaggagtacgtggccgcctgtcctcatcatgggatggacgactag

SEQ ID NO: 75644 - DNA, 405 bp, Oryza sativa
  unsure (1)..(405): unsure at all n locations
  Clone ID: PAT_MRT4530_75713C.1
ggtaatgctcatgctgatcttactggtattaaggaagaaactaaggttctgtggcgcacaattacacgacagtcaatgtagtggtggaattgtggcctttagatacaatgatttatgtcatgctactaaaaatttctctgaaaagctgggaggaggtggttttggttctgtattcaagggagtgctaagtgactcgactattatagcagtgaaaaagcttgacggtgctcgtcagggagagaagcaattcagggctgaggtgagctcaattggattgatccaacatatcaaccttgtcaaattgattggttttctgttgcgagggtgatgggagactacttgtgtatgaccacatggtaaatggttctcttgatgcccatctgtttcagttttnngggggggttt

SEQ ID NO: 75645 - DNA, 1794 bp, Oryza sativa
  Clone ID: PAT_MRT4530_75714C.1
cccgcgtccgcttcttcttcttcttcttcctcaagactaccaatccaatctcctcctcgccgccatcgcgatctccgccgccgcccgcctgtcgcggccatggcatccaccaagatcaaggtcgccaaccccattgtcgagatggacggtgatgagatgactcgagtattctggaaatctatcaaggacaagcttatcttcccgttcttggagttggacattaagtactttgatctcggacttccataccgtgatcaaaccgacgataaagtcacagtggaggcagcagaggctaccctcaagtacaatgtggccatcaagtgtgcaaccattacaccagatgaagcaagggttaaagagttcagcctaaaatccatgtggaagagcccaaacggcacaattagaaatatcctaaatggcactgtgttcagagaaccaataatctgcaaaaacatccctcggcttgttccaggatggactaagcccatttgcattggaaggcacgcatttggtgatcagtaccgtgcaacggatgcagttatcaagggacctggcaagcttaaattggtttatgagggaaaagatgaggagattgagctggaggtgttcaacttcactggtgctggaggagtggcacagtctatgtacaacactgacgagtccatccgttcctttgctgaggcctctatggccactgcttatgagaagaaatggccattgtacctcagcaccaaaaacacaattttgaagaaatatgatggcaggttcaaagatatctttcaggaggtatatgaaacaaaatggagagccaagtttgatgatgcaggaatatggtacgaacatcggctgattgatgatatggttgcctatgcccttaagagtgaaggaggctatgtttgggcttgcaagaactatgatggagatgtgcagagcgatctaattgcacaaggttttggatcattgggtttaatgacatcagttctggtatgccctgatgggaaaaccattgaagctgaagctgcccatgggactgtcacccgccattacagtgttcaccaaaaaggtggtgaaactagcacaaatagcattgcctcaatatttgcctggacaagaggacttgcacacagggcaaagctagatgacaatgctaggctactggacttcactcagaagcttgaagctgcctgcattggcgctgtcgagtctgggaagatgaccaaggaccttgctctgcttgttcacggatcttcaaatgtcacgaggagtcattacctgaacactgaagagttcatcgatgctgttgctgacgagctcagatcaaggctggcagccaactaaagctaatcaaatcaagtgattttgctgttattgatgtgatccgatgcacttcgattatacatttctagaaccgcatcattcgacgttacaaatattttttttctttgaattttgaatcacttggtaggcgcagctatcaataaatatcttggtatttataaagtttgaacttttattcgtgagaaagctccattataactactttgatgattaaatcatggccgtgtagcttagttcttctatgccaaaagagcaagtagaactatcctaaaggtacccaccacaagtggtgtttgtgctttgtaccatacaaacaagactgtttatttactacagtatatagcttggaataaaaaagcaggtgcaaaaaagttggtaaaaactcgtgccgagggtcagcccggggatccattcaagcttccgaagggtggaatgggaggcatagctctttgatag

SEQ ID NO: 75646 - DNA, 615 bp, Oryza sativa
  Clone ID: PAT_MRT4530_75715C.1
tccatccttaatctgaacagccttcgatatttgtaaggaattcttttatggcgattatttctgttgtagaaatacatcttaagctaatgtccatgcctcatcgtcttgaatggaaacacaattcaggtttcttgggaacaatagccttacaggaagcctgccagatgtgaagagctcctcactaaataatttgtatgctaaaatgattttcggcattgcaatgatatattcatttcatacgttcgtaatcctaggctttttgcagagatttttcgtacaaccaactcatgggacactttccttcatgggctaccaataataatttacaactgtaagttgaaagttctgaaatttcagacaaatatatattgatttagacactctctacattatgtgaaattattgcctgacaagttagacgtatttttttgtacaaggaatttggtggcaaacaaatttaatattcgaagcaacaacgataggtacctataacatatttgcaaatatttatttttgacgtcaccttcctcataatttttatttcttgtttctgttatgcgcacagtattctaccttcaggactaaactggctacagaaagacactccttgtttcc

SEQ ID NO: 75647 - DNA, 297 bp, Oryza sativa
  Clone ID: PAT_MRT4530_75716C.1
cgggaagctgtgagaagtaatgcatgcactttgacatgcatacgtactcggttgtatgatgcatatagatggttatacatacatatatatacagatatactatatgattggctaataagtaatagctgatcttgtactttatttaagttttaacgatcttgttagtttgtctttatgatttacttattcatcttgttggtatgggaataaactagtaaattctactgtacatttgcactagtttgttctttcccattccctatatatcaaaataaattaaattaaaaaaaaaaaaaa

SEQ ID NO: 75648 - DNA, 143 bp, Oryza sativa
  Clone ID: PAT_MRT4530_75717C.1
gcggctttgtttttttttttttacctaactagttctcataatgctattatcttttctaagaaacgcacgcacgatgggcgttagcataatagatacgaactggtgggaccgtgttacccacagaacgctaaacaggatcaaag

SEQ ID NO: 75649 - DNA, 796 bp, Oryza sativa
  Clone ID: PAT_MRT4530_75718C.1
atggactacggcgacggggaggtgcggctggtgaggaggaaggggaagaagaggctcgctccgcctccgcctccgcctccggcggcggagaggggcgagagggacaggttggacgagctccggcgggactaccgcgatgtgctcaaggataatgagatgaagaggaggaagctagagagcataaacaagcgaaagctcgtcctgctttctgaagtcaagttcttacaaaagaagttaaattctttcaagaagaatgattcgcagcaagtacggctgaagaagaaagctccgcgagtcccatctcatgtgggaatcaatgatgcttcagctttttatggggcgagtactgaagtgccatctaccagtaaaagaacagatttagatttaaatcaagattctgcaatgaatgatgagctttctgatttcccggggcaccataaccatttggaacttaaaaaggctgaacaggctggagtagatgaagatattatgactgccgatgtcaacctatcagcttgtagggataccggaaactctccggcaagcgatgataagaggagtgtttcatggcaagaccgtgtagcgttgaaggtctagtccttccatagatgtggctatgaaataacatccttctcagatgattgactgcactctgcttatttttttctgaaatattttgcagtgctttgtatatcacaagagtcttagttagacatgccttaatgcaagctcgatctgatgatgtgatgttatgaaatatccacccagattttgaactgacgcacattgactgcat

SEQ ID NO: 75650 - DNA, 2216 bp, Oryza sativa
  Clone ID: PAT_MRT4530_75719C.1
tcccgcgatcatcatgattattatcttgttttttgggattaaaatatgctaatttatgaccaaatttccaacattccaaaaatttgataggtcttttttggtagttggttttgtggcattactaaaaccacatgctttcgatggtccaaattataaaagatggaaagcatgtgcactattgtggttgatggctatgcaatgcttctttgcttcacggggcaagatgtccgaacaacctgtctcacctgagaaggaggctaagtttgaggtgacggattgcctgttccgtgtagcattaatcaatgtactagctgacaacatagtggacatgtatatgcacatgccttcagggaaggacatgtgggatgcacttgaggccaagttcggagtctccgatgctggcagtgagttgtatgtaatggagcagttctatgactacaacatggtcgatgactgatctgtagtggaacaagctcatgagattcagatgctggcaaaggaacttgagaacaacaaatgtgtgttgtcggataagttggtggcaggtggcattattgccaaattgccacattcgtggtcggactttgccacttctctgaaacacaagaggcaagagttcagtgttactgatttcattggctctttgggtgttggagagaaggcgagggcaaaagacaaccgcggctaaaaggtcgagggaggttctagcgccaatttggtgcagaagaagaacccccatgcatctcacaacaacaagaaagtcaaacctgatgtcaaacccaagacaacaatcaattctaagaagaaaggcaaggaaaaagtgaaaggcgactactttgtgtgcggtaagcttgggcattgggccaaggattgtcctgatcgcaaggacaaaaattctgcaaacatggttgttagcaatggcagaggaacaatggggtacggtaatttttacctacaattctctctatttttcactcacctaattggcgggttgataatggtgctaatagtcatttgtgtgctgacattttcctgttttcttcttatcagatcgccggaggttcttccttgttgatggggaacagatcgcttgcagctattcatggtgttggtatggtagttctgaagtttacttcgggaaagaccttgcagctgaagaacgtgcagcatgtcccctcaataaagagaaatctagttagcggctctcatcatgtagagatggttttatacttgtgtttaaatccaatagatgtgtcgtatctaaatatggaacttttattggttaaggttatgatagcggaggcttgttccgcttttctttagatgataggtgtaatatagttgtgaaccatgtaagcaatgatgatgagtccaatgtgtggcaatagccactttgccatgtgaattttggttgtatgacacgcttagctaacatgagtttaatctcgaaattcactttagccaagggttctaagtgtcatacttgtgttcaatcgaaacaacctcgcaagcctcacaagcatcagaggcgagaaatttagcacctttagaacttgttcattccgatatgtgtgaaatgaacgtcgtgttgactaaaggaggaaagaaatacttcatgacacttatagatgattgcactagattttgttgtgtacttattgaaaacaaatgatgaagcattgcattactttatgatctgtaaggctgaggtagaaaccaacttgaaaggaaaatcaaacagttggggtctgatcagggtggagagtatttttctaccgagtttacttcattttgcgaagagtttggaatttttcatgagaggatgcctctctattcaccccagtcaaatggggtagccgaaagaaagaaccgcactctaactgagttggtgaatgccatgttagacactgcgggactttccaaggaatggtggggtgaggcaatattgactgcttgtcatgtcctgaatagaatttctactaaaaaaagaagtaacatcattcgaggaatgggaaaagaagaagttaaatctctcatacttgcgcacatagggatgtttggctaaggtcaatgtgcctatagtcaaaaagcgcaaacttagactaaaaaccgtagattgtgtgtttcttggttatgttatccacggcgtgggatatagattcttaatagcaaattctagagtatcacagcagccagcgtagagttttctttcgtca

SEQ ID NO: 75651 - DNA, 516 bp, Oryza sativa
  Clone ID: PAT_MRT4530_7571C.1
atggagaacactcggccgacaacgaggaagtcatcgtcgtggacgtcaagccccattcctgcttcacgccagcacaagccgtcatcccgccaactccacgtccgcacatcgccgcccatgagtcacgagacccaccacgggcagaagatgccccctgccgaacaggaggctggccaccaacggccagatccagccaggctcgggggcgacgaccagctagggcgcgccgccgcaacatccatcgtccaccatcaccaaagccgaagccgacaccgacgccggcgccgtgaccacggcgcgagcgagccgccgctgccgtcgcccgcccaccgtgacactgcccctgcctgccgccggtcttcgcgctgccccggcgccgacctctcccccgccgccagccgccacctcttccccgtcgcctgccatctcccttccccgcctccttgggtgtcgccgtcgtcctgggagggggacggactgtcacaccatgaagttcttttcccaagcctaaattga

SEQ ID NO: 75652 - DNA, 293 bp, Oryza sativa
  unsure (1)..(293): unsure at all n locations
  Clone ID: PAT_MRT4530_75720C.1
gctcttctctctgggaagcaactgctggggaggccattgcaatcttcagtctccaagtcttctttctccaggaaggcacccttcatggtcaaggcagaagccactccccctgccaagcaaggtgctgacaggcaacttgggttcgcatccaagcagccctgagctaccggatggacgcttncggagacttcggtcgacccgtgggctatcgacccgaggaccgggggtcatcggccacgggctgcctcggcgagggtcaacgccggcggcgatgatggcgtcgtcggcatggt

SEQ ID NO: 75653 - DNA, 117 bp, Oryza sativa
  Clone ID: PAT_MRT4530_75721C.1
ccccgggctgcaggcaagttcttctgagaatggtgtggatgctgaaaatgtgggaagtaatatgtcaaacagaggaaatgaaatgaacagtgtcaacaagaggaaggatggggatgc

SEQ ID NO: 75654 - DNA, 633 bp, Oryza sativa
  Clone ID: PAT_MRT4530_75722C.1
gaggcgaggcccgatggatccatgctcgccttgttctgggacacgttcgcgcgcgtgcaagaagcgcacgccagcttggacgagtacatctcgaactggtccccgcgcggccggtcctcggcccggggggctctcaacgagtactatgagagcaacggaaaggatatggagtcagggaaagctgcgaagccgaaggaactcggtagtaaaatgtaggtctaaaaagctggattacatctgtatatgtcaatggggacatctcttcgattctcgccaattcagttcgattttatgtcgtatctgtctaccatgcagcaattcctttgtttgcttcatttgtgtagctaagctagagaactgtgtgaagtttcactgggaagttgatacctcttctgctgcaactagcaggcccggacacaatctgtaatctgttcgtgccaaagcgttgaaaaaagtccagtgcggcaaaaagcattttgttggctcctcgcaccaatgtgtagccctacgtattctttacaacattttgcgttgtaattgcatggtgctaatattccgcgagggggggccgtgctattttttcaaacgcatgtggtcacaacatgtgcaacaagctacctctgagcatttctg

SEQ ID NO: 75655 - DNA, 2049 bp, Oryza sativa
  Clone ID: PAT_MRT4530_75723C.1
atgcccgcggccgcggcggcgcaccacctcgccggcgtcgccgcagccttcctcctcgccgtcctcctccacgtccacctcgccgccggtgaagacgaacctccaccgtggtacctgtgcgacccctacagcgcgagcggccgctactcggagaacagcacgttccaggccaacgtcaaccgcctctccgccaccctccccaggaacacctcctcgtctccggccatgtacgccacgggcgccgccggcgacgtcccggacaaggtgtacggctacgcgctctgccgcggcgacgtcgccgacgcccacgcctgcgagcgctgcgtcgcggccgccctccgcgacgcgccgcgggtgtgcccgctcgtcaaggacgcgctcgtcttccacgacctctgccagctccgctactccaaccgcaacttcctcctcgacgacgactactacgtcgccacgtactcgctccagcgctcctcccgcctcgtgagcgcgccggcgccggcggcggtggcggcgttcgacgcggccgtggccatgctcgccaacgccaccgcggagtacgccgcggcggcgaacacgtcgaggcggtacggcacggcggaggaggagggcgtcgacggcgacggcgacagcggccgccccaggatgtacgcgctggcgcagtgcacgccggacaaggcggcggacgtctgccgggcctgcctcacgacgctgaccaccgtgcagctgcccaagctctacagcggcgggaggacgggaggtggggtgttcggggtgtggtgcaacctccggtacgaggtgttccctttcttctccggccgcccgctgctgcatcttccggcgttcgtggaggcgccgccgccagcgacgtcggcggcggcgaccagaagaggagagaaaaagaggaataagacaggtatagttctagccattgttatgcctacaattgctgcaatgctgctcatcgtcgtagcatacttttgttgttggaggaggagacgaccagaagaacagacgtttctgccctacgatattcaaagtattgattcgcttctactcgatctatcaacactacgagctgctacagatgattttgctgaaactaaaatgatcggcagaggagggttcggtatggtttacaagggagtcctgcctgaaggtcaagaagtagctgtgaaaagactttgtcagagttccggacaaggaatagaagagcttaaaagtgagctagttttagttgctaagctttaccacaagaatcttgtaaggcttattggtgtttgcttggaacagcaagagaaaatacttgtctatgaatatatgtcaaataaaagccttgataccattcttttcgatatagacaaaaacatagagctagattggggcaaaaggttcaagattataaatggaattgctcaaggcttgcaataccttcacgaagattctcgattgaagatagtgcaccgagacctcaaagcaagcaacattctattagactttgattacaaccctaagatttctgattttggcttggcgaagatatttgatggggatcaatcaaaagatatcactcatcgaattgccggaacatatggatacatggcgcctgaatacgccatgcatggtcattattcagtcaagttggacgtatttagtttcggcgttttggtactagagatcgtcactggaagaagaaatagtggctcatatgatagcgggcaagatcttgatctcttaaaccatgtgtgggggcactggaccaggggaaatgttgtagagttgattgatccatccttgggcaaccatcctccgatcgagcagatgttgaagtgcatccacatcgggctgttgtgtgttcagaaaagacctgcaagcaggccgacgatttcgtcagtaaacatcatgcttagcagcaacactgttcgtctcccttctctatccaggccggctttctgcatccaggatgttagtgccagtgacagctctaatccgcattcaacagcggtgtcttcgaatgatatgtcaatcacagatcttgtgccgagatga

SEQ ID NO: 75656 - DNA, 1046 bp, Oryza sativa
  Clone ID: PAT_MRT4530_75724C.1
gcacgagggttacgttgatcgatcagtttgagagtttgctagcgctagatagagctatagtatagggctcgaagatgacgacgagctcatggagcggcctgcttgtgatatcctgtatgttattgatgagctgggcggcggcggcggtggacatgtcgccggtgcggttcgacgccgcctacatgccgctcttcggaggggacaacctcgttccctcgcctcacgcccgcaccgtcctcctcaaactcgaccgcttcaccggttctggattcgtgtccaagtcggcgtaccaccatggattcttcagtgcttccatcaagcttcctcatgactacaccgccggcgtcgtcgtcgccttctacctgtccaatggcgacgtgttcccggggcagcacgacgagctggacttcgagctgttgggcaaccggcgaggccacgcatggcacgtccagaccaacatgtacggcaacggcagcaccgggcgcggccgcgaggagcgctacctcctccccttcgaccccaccgccgccccgcactcgtacgccatcgcctggacccccgccgccgtcatcttctacatcgacgccatccccatccgcgagctcgttcgctgctcctccggcgactaccccgccaagcccatgtccgtctacgccaccatctgggacggctccgcctgggccaccgacggcggcaggcacaaggtcgactacgcctacgcgcccttcaccgccgtcttctccgacctcgtcgtcaccggtggtactgacgacgaccactgcgccgccatgggcctgatgacgtcggaggtggccgtgatgacgccggcgaagcgcggctccatgcggcggttccggtcgcggcacctgacgtacagcgcgtgctacgacacggtgcgctacaacggcaccggcgtcgtcttcccggagtgcgacgagtcggagcaagacaacttccacgcatggggcgagtccaagcgtgtcatcaacagcagatccagttccagcgccacatacgccactggttcaggcgtgcgcatcgactaa

SEQ ID NO: 75657 - DNA, 1082 bp, Oryza sativa
  unsure (1)..(1082): unsure at all n locations
  Clone ID: PAT_MRT4530_75725C.1
atgaccatgaacacaccacggccgcggtcgcaaccaccacctcctcatcctccactgttcaagccaaccacacctcccccaccaccactcctctccacctccacctccacctcccctccccacgacttctccttcgcccactacctctcctccccgcctccgtccgtccaacgccgcggtcgcgccgacatgtcccgcacaccacccctcggccgcgtcggcagcgacctcagccacaacaactactcctccaaagcaaaccagcaccggcaaaccggaagcagcagcagcagcaaggagaaggacagggagtacaaggccaagagcaaggcgtcgtcgcctttcttctccggcctcggcggctcgtggaggtcaggcttgagcagagacgaggaggtgaagaggaaggcgaaggcgaagacgagagggctggacgtggggcagtgggtgaacgagtacatggcgtccatggtggagcacctgctcgcctccttctcccggcacggcggcggggagagggagaagcgggagcagcagcggcggaggccgcactcgttctcggcgcacggcccgagcgccctgagggagcagcgggagcggtggaggcggcggcgcgggcagctctcctcggcgccggcgtcgctgcgcgcgtcgccggtgaacagcggccacctctccgtgggcgggtcggtgaaggtctcgacgtcgtcggaggagagcaccatggaggagctgcagagcgccatcgaggccgccatcgcgcactgcaagaactccatcaccgtggccaagtgaatcgatcgatcgaggctagtgtgtaaaatgtaaaactgtaaatgcgtggtacggagatgcacatgtgccgatccccatgcgtgtcgcgcgcgcgcgcacacgacacgtaccgagagcatatattgatccaggtttncccgtaccttttgcgagcttcagaaaaaatcaccagattcgatactctctcttgttcatgtgtaaagatgtaagaacagatggatgaccatattcaagcgctatatatccggataatatgtcttgatttnccaaaaaaaaaaaaaaaaaaa

SEQ ID NO: 75658 - DNA, 314 bp, Oryza sativa
  Clone ID: PAT_MRT4530_75726C.1
gttgagtgcttgtgcttcacggaaaaagaaaaaaaaaatgaaagggggtcctactgaactagtagcagaacactagttatagagctgaattctgaacgcatctatggtgaggccatatggagatggaggcagcaatgaaactgaggaaactttgattcgaatcgcgtttaagggagaacagtccgtacttatggtgctagtaacagcaagttacattggttcaggtagggtggaggtatgacgaacaggctaggatacccggggctttattgaggcccccgggttgggccctgcctgggccctgggcctttagc

SEQ ID NO: 75659 - DNA, 404 bp, Oryza sativa
  Clone ID: PAT_MRT4530_75727C.1
gagcttagatatgattatatttctgttgtcaattaaacaccgattcatgaatattattagaagcagaacaagaaacactatgaccaagcattagtacctgatcatgcatctaacagtacagatcaacttgttaaactctatatcattaacctaatcctccgcttaattacctattaataatctctctctctctctcggttcacttttgggaacattaacacaaagcctcagatcaggagttccacacgcgcccaccgtgttgcccagctttttcggccggccgccgcaccgccgcactcttggcgcctccgcctccaccgcccatgatgccgccgcctctcagtccgacggacagtcgctcgccccgtacgcgcgtactcttctccggtcgtccgacagcttcc

SEQ ID NO: 75660 - DNA, 449 bp, Oryza sativa
  Clone ID: PAT_MRT4530_75728C.1
ggaaacgccgccgtcgtcgtcgtcgtcgtcgccagcgatgaactcccggaaggcggcttgtcgccatagtcgttcgggatcagtgctcctccacacatcgtgatattcttatgatgtttttgtctgatctgattcaagtagtttgagttatccttgcaagttattgaaggtgtgtgtctgaatatctgatggcgtgtgctctgaatatctagttatttataggtgttcatataggtggctggccgggtaaggcattttttaaaatattttataaggataaatatgttttaaaaataaactcactttttttttgacaaataaaaaaaaaaaaaataaaatcacattatttaacctcaatcgcattaaacactataaattccattaatatcttttcaattcatataaaattcattcaattcatttaaaataggggggcggcctttttaagg

SEQ ID NO: 75661 - DNA, 482 bp, Oryza sativa
  Clone ID: PAT_MRT4530_75729C.1
gtttcgtctcctggaaacaccccacccgcttctcgtctcctcgtctcctcgttcgtctctcgcctcgtcttccccgtcctccgcgcgattccccaaccctccccgaagccgcagtccaccgcaagtcgcctgcctcctccgccccgcgccccctccccccgtgcgccggcgatcgccggtgcccgccaggttatttcttgtggcatggcaaggatacatattggtcttggcttgttctttcatgaatgatgtccttccgttcgaaggacagaaatgtgcaaccacgatttaattggccatggagaagcgaatcaccattatcagcacaactgctcattgatattccacctgaaatagagttatcggactacagaaggttgccagggtcaagaagggagagcccatgtggacttctccatggtgaaggcttcaaggacgaaccaattgctgacttgatattttctttgaaggctttatgaata

SEQ ID NO: 75662 - DNA, 984 bp, Oryza sativa
  Clone ID: PAT_MRT4530_7572C.1
atgctctccgtttcccgcggagacctccggaagtgcatcctcgccggcaacagtggcgttgctgccactgttccgcctctgccgcgtctcctgccacgacgtcgcccgaatttcgccggaacaccgccgtgccacgccggcctctccatccgcctcgccggaatttccccggtcggcccttcctccacacgtgcaccgtcggccgcgccaccaccacctccggaatcacagcggcgagccggcgacatcttccttggcatcgcctcccctccatccaaacccctccgcggtccatcgtcgtcgtctccgttcatcctcgtcgtcgacgtcccgtcggtcacccagctcatcgtcttgctgcgccgccaccatcatcgtcatcacagcggcgtgttccgcgccgtcctcgcatccgtccccgtcgtcgtcttcgtcctcggctccacgtcgtcaagcctcgtgctggccgcgtctcgccttcgtccaaggatcgccgccgaacttctgtcgttccggaggttcccgaagcgtggttcacggtcgtcgtcgaaggttcggaaggccgttctctgcgaggttgggtcggtgcttttgtcatggctaggatgggtaaaggggttatgtcacatcctttatgacgggttccacggccgtcgaatgcagacttttcctgggacggggattaatacactagcgttctggaaaagcgagtcccccggcggcatggtgtccaccaccgcctgcaccttgggcaatgtgggcagcggtagcggctgcacttgctgtgatttgctgaaggacggtgtttcgagccacacggttgcactccacgaccataagaacctcagccatggtaggacaaggtggcggttcatcaccacggcttcgggaaccctccggagcatcatgggattgagagcgagtgctgggatgagtcatcctatggatatgagattaaacataattagtgatgggagcaactaa

SEQ ID NO: 75663 - DNA, 616 bp, Oryza sativa
  Clone ID: PAT_MRT4530_75730C.1
gtgcattttcactgtgctttgcagagaaaaaggatggaggagacgtacaccgtgaaggtgggtgaagcaactccggccgccggcggcaagccgtcggccgggccagtctaccggagcatctactccaaggatggcctcatgaagctccctgaagatatcctgtccccttgggacttcttcagtggagcagtcaagcagtaccccaagaacaagatgctgggccagcgcaaagtttcagatggcaagaaggtcattaagattggatcagccatcagaagcttaggtgtcaagccgggtggtcactgtggcatatatggatcaaactgtccagaatgggttatggctatgcaggcttgcaacagccaaggaatatgctatgttccactgtatgacacccttggtgcaaatgcagttgaattcataatggatcatgctgagatctctatagcatttgtgcaggaaagcaagatacaatcagtattatctgtagtcaagaagtgcagagcccacatcaaagcaatagttagttttggagatgtgacaagtgaactgaaaagagaagctgaacagttaggagtatcttgcttttcttgggaagaattttcttcaatgggaa

SEQ ID NO: 75664 - DNA, 733 bp, Oryza sativa
  Clone ID: PAT_MRT4530_75731C.1
tcactggctactccactccaatgcaataacctcctcatcttcaagctctcatcagctagcaatccatattctcagcagagaaaaagatctgcattttcactgtgctttgcagagaaaaaggatggaggagacgtacaccgtgaaggtgggtgaagcaactccggccgacggcggcaagccgtcggccgggccattctaccggagcatctactacaaggatggcctcatgaatctccctgaagatatcctgtccccttgggacttcttcagtggagcagtcaagcagtaccccaagaacaagatgctgggccagcgcaaagtttcagatggcatggctggtgactatgtgtggcttaacatatgaagaagtgtaccagaaggtcatataagattggatcagccatcagaagcttaggtgtcaagccgggtggtcactgtggcatatatggatcaaactgtccagaatgggttatggctatgcaggcttgcaacagccaaggaatatgctatgttccactgtatgacacccttggtgcaaatgcagttgaattcataatggatcatgctgagatctctatagcatttgtgcaggaaagcaagatacaatcagtattatctgtagtcaagaagtgcagagcccacatcaaagcaatagttaagttttggagatgtgacaaggtgaactgaaaagagaagctgaacagttaggagtatcttgcttttcttgggaaga

SEQ ID NO: 75665 - DNA, 318 bp, Oryza sativa
  Clone ID: PAT_MRT4530_75732C.1
atgagctttaaatctagttacctcgtcggcggggttggcagcgatgagccgcgcgggacatggacgaccatcgtgaatggccgcaagggcgcggtgggcgtggaggacggagggcgaatcgctgtgttggacgacgacgacggcggcgcggcggtgacgcaggatgaaggccctatgcatggcgggagggatggggcgctgggggtgagggcgtgcgtggattcttgccgcggccgcgtgttggaggagccggccgggatcgcgggggagggaaggagcgcattggtgggggcaatgcgggaagtggtgagggcgtag

SEQ ID NO: 75666 - DNA, 398 bp, Oryza sativa
  Clone ID: PAT_MRT4530_75733C.1
cattgtactcatgcgggaacaggaagaaaaaaaatatcacagtatcacgagcagtacgcgcgatcaatataaagcaaacggagccattgcaaccaacacatgcattacaacccaactagacaggccctacttagcttaggagtgtatatggatgacaaatactaatgacaaagcacaggtgacctagaatgcccgacgaattaaaaaaacctacaaggtggtatttgtaaaaccgggaaaagtgccagcacatgcgagtaaaggtaccgacctccctgtattgagcaattgcagactgttcgcctacgccccgagatgctcccgattgtgaaacacctgtgccacaaccacttagagcaataagttaccaagtgtctgatgcagcctagatgccccat

SEQ ID NO: 75667 - DNA, 705 bp, Oryza sativa
  Clone ID: PAT_MRT4530_75734C.1
atggaagttgcgattacaaagggaatagcagaactcgatgataccgacgagaccgtagtcgagtatgtggtaaccataaccctgacaacatccaacgaccagatcgaccccacgatccccacgccctatttcctgccgtatccaccctcacgatcccggccctacgccctcaccacttcccgcattgcccccaccaatgcgctccttccctcccccgcgatcccggccggctcctccaacacgcggccgctgccaccagatcagcggaaatccgcccgcgcccccaccctcagcacccattcctcccgctgtgccgtccgttgtcgccgtcgtccagcgccacggccgccggaccggcaagaatccacgcacgccctcacccccagcgccccatccctcccgccatgcatagggccttcatcctgcgtcaccgccgctgccggatcgacgggaatccgccgtgcccccaccaccagcaccccatccctctcgccgttgctccgtatcgcctcaccgtgcccttcgtcgtccaggaccgtcacccacgacaccggcgacgaatcaccgccatcttacacttccattgcaccgccgccgtcgtcgtcgtccaacacagcgattcgccctccgtcctccacgcccaccgcgcccttgcggccattcacgatggtcctggaagaatgccattgcagcgcccaagcttag

SEQ ID NO: 75668 - DNA, 513 bp, Oryza sativa
  Clone ID: PAT_MRT4530_75735C.1
atgatgctaagagacatgtggattcgccggggtgtgtcggggaggacccctgggcttcctggcacaatatggtctggacctaatctggtgttggtctgggacccctctcgttggcatatggtgaacctgtgtcggctttcgaaatgccttgtcatgaaagccttaaggtctctagtcgtggccgttctgcacggactggatgatccggaggttattaaaactgttcgaacagccgtgcccacggtcatgggcggatgtgagaaagatacagtggccctgacccagggaggggcggatgtgtcgtcctcaaccttgggtgtgacgggtctcaatggcggcgatgatgatgacaacaagcggcaagggcttggctttgaggttggggtcaacgagatggcgaagtcagatggccttgcggggaagagacctgctgcaacatggagacggttggaaacagagcttgaggtgacgccggatccacgtggagcttggggcggtgacagatccaactag

SEQ ID NO: 75669 - DNA, 781 bp, Oryza sativa
  unsure (1)..(781): unsure at all n locations
  Clone ID: PAT_MRT4530_75736C.1
tgcactcttacgtaagctcggattcggctccgagctgggaattaggtactgcacggcctgctacctccgagttttcttncaggcggacaacaccttaatttggcacgctgcttcttcagcttgagaaatggcacaagaaacctttctattcacatctgaatctgtaaacgagggtcaccccgacaagctgagcgaccagatctctgatgcagagctcgatgcgtgccttgaacaggaccctgacagcaaggttgcctgtgagacatgcaccaagaccaacatggtcatggtctttggagagatcacaaccaaggccaacgtagactatgagaagattgtccgtgacacatgccgcgaaattggattcatctctgatgatgttggtcttgatgctgacaaatgcaaggtgttggtcaacattgagcagcagagccctgatatcgcccagggtgtgcacggtcacttcaccaagcgcccagaggaggttggtgctggtgaccagggtcacatgtttggctatgccactgatgaaacccctgagtacatgcccctcagccatgtccttgcaaccaaactcggtgctcgcctcaccgaggttaggaaaaatggtacctgagcttggctgaggccagatggcaagacacaagggactgttgagtactacaatgacaatggtgccatggtttcagttcgtgtccacactgtcctaagtttcacccaacatgatgagactgtgagcaatgaccaaattgctgctgaccttaagagcatgttatcaagc

SEQ ID NO: 75670 - DNA, 1421 bp, Oryza sativa
  Clone ID: PAT_MRT4530_75737C.1
tgttgtttgttttctttcttttctgctgctcttcttgcccttgtttgtggtccccagaggagagattctggttccgttaccgatcgtgcttctgcttcaaccttctcgtgcgactgaccgtctcttgcaggcactcggcccttgctgtcctgggatttacgcctcgagggggctctcgccgtcccatgtgcagtgccaaggcgagcgcttgctggcgctgccgaggggccccctcctgtctacattcggttcctccttccccgctgtgcttcgttgctcgcggtgcctccgccggttacaaccgtcctccattacaccttcgactaccaattgaagaggtacttctatctctttcttgacaattcatgcccttgaatgtgatcccaagaggagagattcaagattcttaactgattgacaaacttcttcaagcttatggagcaagatactgtcacttttaggaattctgcccttggattcctggaaattatgcctggaggaggctgtcaccttcgcattaggagagtcaagtctatcgattggtgtaacatcagaagggccttctccagagtatattctgtacttccaactttggtgttcttggattctcttggaagcttctctgattataaccgtctttagaagatctggattgtgaacaccatgaaattgtagttcatccaatggagcaggtttccccgaggctatgctttctactttaaatgtatataagctataaacagattgcagacaaccttgctctattataacatcaactaccaattgaagaggtacttctatctctttcttgacaatgcccatgaacggtatatatgaaggcctactagccttgtacactatcttattctcagtaacatagagtttgcgggaaaagatatccttcttcagcacatatcttttgtacggcaggtagagaagcatgagcaggccaaccccccatgccagaacaagcagcagtgatatcacggcccatatgatcgtgtcatactgcagatagttgggcatcagctcctgaaacgaggctcggtacagcaccttggaggaagcttcggcctcctcgccgctctctgcttcatcgggtaccacatttcctaccaaacgttcgcccgaatcacttctatgatgcaacgtcaccgcgcggccactcagcatacctaactagcctatcaatcgactgaagccgggtaggagatgaactcggagtcggcgctgggccagcggtggtgggagctcgggcgaaacctccgccacggatgctggaagcggcggtcgtctcggcgaggatctcctcctccgtcttcgtccaaacctccaaaattctcctcgaccggacgcgtgggcggacgcgtgggcggacgcgtgggcggacgcgtgggcggacgcgtgggcggacgcgtggg

SEQ ID NO: 75671 - DNA, 273 bp, Oryza sativa
  Clone ID: PAT_MRT4530_75738C.1
atggaggtggcggcaccagccatgctggcgccctcctccctggggcggcgccagcatggctggcgccctcctcttgccacgtcagttcgcgtgcgccacggtggcaggaggacggcgccagagaggctggcgccgtcccgttggatgacggcgacagccactctggcgcccaaaaaggaccatttctgggataagttttttcagggagataaaatacatagagcacatgaagagaaacaacagaactcgatagatgcctgctcagggcaatag

SEQ ID NO: 75672 - DNA, 3540 bp, Oryza sativa
  Clone ID: PAT_MRT4530_75739C.1
gtatctcacaccggaacaaaaacgagaagccagcgaagaggcaaatcaaatcgaatcgcccaaaggaggcgacgagccaccggctgcagcctgcagcgggagaggtctcaggtgcgggggagcagaggcctcgtcggcgagcgcggggacgccccatcgcggtgccccaccgccggcgaacggggcgtcgcggggttcggcggggatcccgccgtggagcggcggcggcggcggcgtcgtagccggagcactccgatcgtggcgaatgtcggtggggagagccgcggtaaggtccgcgaaaacgtcggccatcctgtaggagatgtggagattgggcattggagtactggagattgaagttctgcgagggtgatttgctgctgtgaaattgctgaagttttggtaagagattgggaaccatggattcacggatggatcaatacgaggttatggagcagattggccgtggcgcctttggtgctgccatcctcgtgaaccacaagaccgagaagaaaaagtatgtgctgaagaaaattcggctcgcgaggcaaacagagcgctgtcgcaagtctgctcatcaagagatggcccttattgctcgcctgcaacatccttacattgttgagttcaaggaagcatgggttgagaagggctgctatgtttgcatcgtgacgggatactgtgaaggtggtgatatggctgaactgatgaagaaagcaaatggaacatactttccagaggagaaactactgaaatggtttgctcaattggcattagctgtggactatctgcattcaaactttgttttgcatcgtgacctcaagtgctcaaacatatttctcacaaaagatcaggacatccgtcttggggattttggcctggctaagactttaaaggcagatgatttaacctcttcggttgtgggaacaccaaattacatgtgcccagagctgcttgcagacattccttacggattcaagtcagacatatggtctcttggatgttgtatgtacgagatggctgctcatcggcctgccttcaaggcatttgatatggctggactaattagtaagataaatcgctcctccattggccctttgcctccatgctactctccatctatgaaatcacttatcaaaagcatgctcaggaagagtcctgaacatcggcctacggcatctgagattcttaaaagcccataccttcaaccttatgttaatcaataccgcccatttgctgatatatcacatcccattcactcactggagaaacccattaccagttcacggagcagtcagaaaagcatgtctggtagtcagtgtagtagtatttctggaagcgatattgacagtatacagtcaagtgaaaggaacacatcagggccatctacaagttccaacaacacgattgatactgaaggtgctgaagctactgatcatgtatcagtgaaaaactgttcaagatctgatgatgttaaaagcaataaggaaactgtgggtcctgaattagagaggcaagattcatctaaatccatccatgttgatcagcggcctagaaacgagattaagcagccaaaaatcatcaagaagatattaacaactctaagagaagagagcaagctcaggcaaaataattcacctattagagctagccgtgtaaaactaaattcaccaagtaatagagaacaattgtctgatgattcaaagcatagcagtgacatctcctccagttcaaaatctagtgaagtgacatcacgagaatcagcaaaggtcatctgtgaacctgtgaaacgggcacaagcatctcctcctctgaagcatttgtcccctattgtcgaacattctccaaaagctaaaattaaacaggatgagccgctgcagccagaccctgccaagcaggcaatggaagatgttgatgcagctgttggaaaggtcaagaacaggacaccaccaagttattctagacgccttagtatcccccctcgtaggccactgggagcagagagtccacttcatgctgacacaaaacgagctcacaataaggtcatcaaggagcgtgcaaaaagtccttgtcgacctgtccatggtccagataatgatatcattgagcctccaggttttccaatggctcccccaagtcctcttgggggtgttcaaatgaaagttggcaatgcacgggcaaaatctgctccaccgagggctgtatctatcaaggaagacagcagtgattgttccagttccacaattgcttatgctgaaaataccgagctgtctgaaccatcaaaacaagattcatcagcccagttggtttcatcttgtaagtgctcaatccctggcgctgccatacaaaaacatgacctaacagcaatgcctagctcggagctaaacaccaccaatttccagaagagtatggctagtaatgatgatgtttgtgaaaacttagccttggagccatcttctgatatatctgagcaggtgagtattttcaaggacaacgtgccctgcagtaagatatcacagagcactgccaatgccattgtacagaatgatgaggataagttcacagtgcaagaattgctttcatcagtagcagatattgccccatttgtttcaacgaaaaacttcgcactagaaaaaggatcccctcctattcaatcactggaaagaacatcatctccccatttgaaccctccaattgaggatgtcatacatgtcataagacacagcagcttccgtgtctgcggtgaacaggcagttgcagagaacgctgaaatgggagtccaaagttcagatgttggcaagcttctcaacgtggtaagagaagaggtggattcgagaagcatcccatcaaataatcttgtgcctcacagacttcctgattgtgctgcacccaagcccaatatttcggaaactaataccatcagctcgaaaacagcctgttcagatgttgtaaaatttcttactgtccctgaagtaaattctactactactgctatcaacaatggattcaaggaggaggcaagcccaacgaaggaaattctagatgtcaagtctttcaggcagcgagccgaggcccttgaaggactcctggagctttctgcggatctactgcaacacaataggctggaggagcttgcggttgttctaaagcctttcgggaaggataaggtatctcctcgagaaacagcaatctggttggccaaaagttttaaagggatgatgaatgatgaagcgagtcgcagttcaatgtgagtacatataatacccatataaggccataacattaacctttttccgttgtttttggtttgtgctctgcatctcgaattgttgcttgatcacatcacccttatttacatcgtgtgatccattggtcccatgtttgcgtctttagttttcattctttacggtacattttgtaaatagtccagactcttgaacagaaataagacatgtcaaagtatgatgtaaatttatataataatcaagctaatgaaatgactggtttgatccaatgtttctttaaaaaaaaaaaaaaaaa

SEQ ID NO: 75673 - DNA, 516 bp, Oryza sativa
  Clone ID: PAT_MRT4530_7573C.1
gatttattcgaatgatggatgtgctacttacaacgtaaccatcaggagtccattgcataacgtcccattttattgtgatgttcccatttggatccagcgaatcataagcttctgcaagaaaaaaaagagagagaatatgaattaagcattaagttacatcccgattccgatttaaaaggtacacaccacacaactaataagaaattcgcggtgaatattatttctaaaaaaaaaatctgaattagaagtagtaagaaatttgcactaatttctctgtcctgaactgaacagatccatcaccgaaatgcttgagatgaagattcagcgaagatagcaaagactggtgctggtaaggaagctctgtgtgtgctcctcccaattgccctaagctacctaattcgacctcagaattcgtgcaagcatgagagaaatggaagtccctagtgaatttggagcccaaccaggagtaccaaaaacagaaagaagccaatgacgccgaactggagccaccgcact

SEQ ID NO: 75674 - DNA, 441 bp, Oryza sativa
  Clone ID: PAT_MRT4530_75740C.1
atggcgccggaggagacccctcttgccgccgctgctgcggacgacggtggcggcaacgagctctcggctctcgctatccttgacgacgacgctgcactcggggctcacccggatcagcggcgccgcatactgctgcagcgaagcaaacaactggctctcgtcgccgtcgatgatcttcagcagcgaccgacggctacataccccgtgtcagacagggggaacaaggccccgctgtgccccgtgcgacgcttccgcctggacccggtctgcggcgctgacggggtcacatattggtgttgctacccagaggccgcctgtgctggcacacgcgtgcggcatggcgccggtactgcaagggtggggctggctcaacgcccgtctccgggcatgtgctactggctgtttatgctcgacactacaatcatgcttgtcttcctctga

SEQ ID NO: 75675 - DNA, 717 bp, Oryza sativa
  unsure (1)..(717): unsure at all n locations
  Clone ID: PAT_MRT4530_75741C.1
ttttttttttttttttttggccgtggaacttcatatatattacaaactttacctcatgaatcaaacttatatggtttagtaatatgaaatgttagaaatagattcactctaaagaaataagcaattgtcaagcttcgaaatccacacggcaatcggcaaccaccagacatttggtgttaactcaaaagataaacatatggtagcacaatcttgaattatcggtaagatgaaaaaaagaagagaacttctaaagtcaatcttgaatggcagcacaatccattcgcctcactcgcacttgccattccactccaactctcctctacctgcagcgagctgccattcccctccaactcccctctacctgcagcggacacaaacacacaaccataaaagaccaagaacccaaaacaaaccattccgacactaaacctagtgcttgcatataaatggagaccatactaatgataccttggtacctgcgacctaattttctggactacataaaaggatagttagtaaggacaaatgatatgaaaacagattaaagtttcgttttctaccatagtaagatagtgaacgattgaaaaacaatccaatggctcaatctgtgataaaagaagaagnaaagaaaaatggtagagtacattatcactggaataatccactccaaaaaatgnactcaagtaatacactaatttggaaacacgtatnatatat

SEQ ID NO: 75676 - DNA, 1980 bp, Oryza sativa
  Clone ID: PAT_MRT4530_75742C.1
atggcggaagagagagaaaattttgagagtcaatgggtgccttctgacgtcatagaggaaaccctcaaggagatgatggcgcacggggtgttaccagccaaggagaacatcggatggcatccagcatttggtgaggcttttccgacccccgatactcacgagattgtcgtcttcacccatttcttctatggtgcttctcaagctcttgagttgctggaccgactgctgaggctaaaggaacaaggccttcaagaagagcagattactcagcacttcataaagtgtcgactggctccaatcaaagagagatctcgcacggccttcgagtacgacggaaagactgatcccaaccgagaagaccccaactccctcgaattcaagatcatgaaggagaggatgtataaaatcttctcatctggtattgtggtcagcttctcacatttgctgccgatcgtgccatacaacgccttcaatcctcctccagcggccaagctaccgggggtccaaagattcaacccgtggcccaaaagagatgctattccgcccagtcaaacggtttctcgaaaaaggaagatgatcgtaagcgatgatgacgatagtgacgatgggccagttggcaagcagccaaaaaaggctattccaccgaagaagaaaacaaccagtcacccaatgccaaaaatccgaagatcttccaggaaaccatcggacattgatccgactggtaaaaactctgatccctctactagctcgggagcggctgaagaagaaaagactagctctgctgctgttgccgggactaatacctccaaagaaaatccaccgactagcagtcagtcggcaactggtgaaactgaagctgacaacgagcccccgactggaaaccaatcggcatctgccgaggcgagcaccagccaggagcccccgactggaaaccagccgggtgaggataaagagaatccccagcagcaaaatgtagatggggaaaaaaatattcctgagacggaagagcagaccagcagacctcctctgaaccaagatacagatgctggacctgaagctagtacctttgacaaggtggagggacctgctcggccaccaccgacaattatcacaggcccaatgattggcgacgaagaagaaattcttcggattaaatcaactgaagattctcggccacctattttggttaaatggtgggacgacgagatgcagccacagggtattgtgataaacaagcaaaaagaggacggtgaagtggctctgctgacaaggactctcaaccaggctactcgtcttttaaacagaatccatcttcggaacgaggcaaaaaccgatacccttgaaaagctggtccctcatcttggtactctggaagaaaccagagccaaactgcatgaaaccaaggaggaggccaggaatacagaacatgaacttagggataggattgccgagctccaggatgccaactttgaattgagtggttcctcgaaagttcaagcagccaaaatctccgaactggaaaagcgaatcaaagccttagaagacgaagctgctctacccaaggagaaagatttggcggtcaaagaatttgaagatcataaggggaagacaaaggcacaattcgacttcttgatcaacaaagccatgtatttgagcaatagtggtacgagctccttggacacagtagaaatttttgataagttaaggactgctctagatgtgtacttcaaaaatatcaaggaggctggaaatatgggagcaagcatggcattggcaatgaccaagtctctgtaccccaaaatcaatgtcgatgctattgatggctttgcagctggcacaagtgaagaagacgcacatgatctgattaatgatgcccaaaaaactgctgaaagaattgctgttgatgtactagataggtttcagaacactagccttagtcctgctaactctgatgatggagaagatgactctgacgagtga

SEQ ID NO: 75677 - DNA, 357 bp, Oryza sativa
  unsure (1)..(357): unsure at all n locations
  Clone ID: PAT_MRT4530_75743C.1
cccacgcgtccgagctactagacttccgctccatgtaaacgcctgagcacgcgcgactcacgtgcgtctcacgtcacctcaccgcccggcgcccgccatggccatcatgcacgcgcgcttcgaggtctccgacgtcgtggcggcgaggttccagcagcggcgggagcagcccggcgtcggtctccggcccgtccgacagcnacggatccagctgcagcagcagaagcgccgccgacgagctattcccggacgcgcgcaactttccctccacctccgnctctgtgccggtgctcgccggcgtcggtttccacccgatctttncgacgtcgctgtccgtgctctccgacttcgacgtga

SEQ ID NO: 75678 - DNA, 402 bp, Oryza sativa
  Clone ID: PAT_MRT4530_75744C.1
atgtgccgcctcgacccgtcgaccgtgcccggtgcaacggacggcacatgccgtatgcacacccagaccacggccgttgtctcttctccccggaaaaaaccacgggaggaggtttacgtttttctcacggatcagttcactagccagccccctatagctcctgctcgcggccgcggcacgcgcgcggcgtggtgccaaccagattaccggagcaaggcgtggcgtgcgcggctcccccctcttccggcaacgaatcccgcgccccgatctgggacggtgacgctctcgatcggtcggtttcgcaaccgcttccgatccgctgcccccgcgcccccgcggcacaggcactgcacccacattgatttcgcgacggcgatgcgcctatcttctttctcagcttga

SEQ ID NO: 75679 - DNA, 1422 bp, Oryza sativa
  Clone ID: PAT_MRT4530_75745C.1
atgggaatggttgcaagaaaatggatcagtaaaagacaggagggcagggcagtgaggcagttagcggtgagtggaagcagcacgggagcggcggccttgcttcctgttggtgtggcgaggcataggacagacggccagatggggggtcgcagcctcgcagggttggatggacaggtgcgtcgatggggcggggaaggtgaagtggccggcgctagaagggggaggcgaagtggaaccggcgcgcagagtggcgccaggaggaggacgcgaagcggggcacagtgtggatgcggtgcgggggcggcggcgcgagatgcaggaggggagttgatgcgcgtggggccgccaaagcagagtgatgcgggagaggagagaaggggagcgtggagccggcgaagcagcgagatgtgggagaggagaggagagaagcgacgcggaaggaagggctcgatgcggatccaacggtggggacaaaaaaggttttctaaaaagaacataaatctacatcgagaggcctatcgatttgtgccatcgcgcaatgctgggaaagccatccatcccgcgaacaagcgacatggtgtccatcccgatacttctctagtggagggagttcaatcccaggacaatttagttgaaaagcttgctgctgttccagaagtgatattgtctccatctaagaagagtaagaggagaggtagtgacatcattcaacacgctctagaaagggcagagaagataaaggctgacagaaatctagaaaatcaaaaggctaaagaggatcaattagaggatatctttttactacatcagttatgtagtgaaattatggatgagacatggttaaggaaatatggtcctccacagatgaagggtgaaacagatttattaactccgggggagattgatattagatatgtttggagaaatagactagcatgtttgttgagagaagaagaaattaagtggtatcggcgagctaagactaaagatattttagaagttgctataaacataataattggggttgcccaaaaagtcattagtcctactcaaactgcttttattcctggaagaaatattatggaaagagttgttattttatatgaaattatacatgaaattcatcgcaaaaacaagagtggggtaattcttaagattgactgtgagaaagcttatgataagcttgggaatttttccgtgagatatcttggtattcctatgcattttagaatacttagtaacaaggataggaaaacaatcgagggaagaattgaaaagaaacttagtagttggaaaggagatgagcacaagaataagtataggcttaacccaaagatcaaaggtactcttggagttcataatcttaaaattcaaaatcaatgtcttttgagtaaatggttgtttaggcttataaatgagtag

SEQ ID NO: 75680 - DNA, 284 bp, Oryza sativa
  Clone ID: PAT_MRT4530_75746C.1
ctcccgaatcgagtggcatgcacatccccaaatccccaaatcaaataacatctcaactccacatcacaaatcttaaagttactcatacacacaaatcaaatacatcccaaatcctaaacaatacaaaatacatcacagattatacatctcagatctatacaaatgtccaatgaatcacaaaattatacatctcaataatcacagattataaaaaaaaacggccgctcgctgccgccgggcgtggcccaaccggccgtcggccgcctgcccgccgccgcggggcg

SEQ ID NO: 75681 - DNA, 882 bp, Oryza sativa
  Clone ID: PAT_MRT4530_75747C.1
gttgtcacctccacgaacccaccaaatctccatcgctgcggctacactgctccggccatggccatcgccgccatcacgggcggaggacggcgccctccctgccgccgcgggccggccgccgtggccccacccgcgaggttctcctgccgctgcggcacccaccctgttcccaggaggaatgtactatccacaatgctatccacttcaacagtcatcctcttcggatcaaaacaaatcacactagcggagataaccggtgccacattcagggagtacattgacacatttgatggctactccttcctctaccctaaaagctggatccaggtccgaggagccggtgccgacatattcttcagagacccttttgtccttgatgagaacatgtcagtcgagatatcgtctccttcatcgtcaaagtatgtgacggttgaagatcttggcccccctgagaaggctgcagagagagtgctgcaacagtacttgacagagttcatgtcgaccaggctgggcgttcgacgaacctcgaacatcctgtcagcatcgtcgaaggttgctgacgatggcaagctctactatgaagttgaggtgaacataaagtcttttgccagcaacaacgagctggcggtgatgccgcaagacagggtgcagcggctggagtgggaccggcgctacctgtcggtgctcggcgtcgagaacaagcggctgtacgagctccggctgcagtcgccggagcaggtgttcaaggaggaagaaggtgacctgaggagagtcatggactctttcagggtcaacaagacgttgagtgaggccaggtgtggtgatcttggcattcccaacaatggcagccaccaattcagggtccgtgcacgctttcattag

SEQ ID NO: 75682 - DNA, 340 bp, Oryza sativa
  Clone ID: PAT_MRT4530_75748C.1
ttttgttttttataatcttttgggggtttcttttttttttttttttttttttttttttttaaaaacaaagattttcccccccaaacttttggataacacgggcatgacctggattttgcaaccccatggtggtcaggcaaatatgaggcaatttaacccaacttttaaacggaaattttacattcccaaaacttctctaatctttcccgaaaaaagggacaccccccttttttagcatcccaaggttgcgggggtaacaggcgttaaaaaccaaaagggaggggacccccccagggtccaacaccccatttgggccggccaaaaaatttggggggggttt

SEQ ID NO: 75683 - DNA, 243 bp, Oryza sativa
  Clone ID: PAT_MRT4530_75749C.1
atggcaacgacattgaaagctgaagaagaaatgttggttctttttatccagcagtggcacaagtcacaagtggaaatatgggcgcgagcagtcgagcagcgcggcgcagccaccgcaggggttgatgtggtgacggcgtcgtcggcgcaggatgcagggagccaccgcgcgcgaccagcacacctcctggccgtggccgctgccggaggcatgacatggggttccgcgcgccgggctggctga

SEQ ID NO: 75684 - DNA, 1257 bp, Oryza sativa
  Clone ID: PAT_MRT4530_7574C.1
atggcagaggtgaccagcgtgggaacaaagtcgtccatcaataacaatgaagacaccaagacaccagtcggcggcggcaaaggcaagccggtcggtgaagacgtggacgcctatgaacggtggcggagacaccagtcgacggcggtgaaggcaagccggtcggtgaagacgtggacgcccatgaacagtgtcgcctccccttccccggcatgctctccgtttcccgcggagacctccggaagtgcatcctcgccggcaacagtggcgttgctgccactgttccgcctctgccgcgtctcctgtgcgtcggccgttgtcgccaccacctctcccggcaccggaactccgtcctcttcctcggctaggccacgacgtcgcccgaatttcgccggaacaccgccgtgccacgccggcctctccatccgcctcgccggaatttccccggtcggcccttcctccacacgtgcaccgtcggccgcgccaccaccacctccggaatcacagcggcgagccggcgacatcttccttggcatcgcctcccctccatccaaacccctccgcggtccatcgtcgtcgtctccgttcatcctcgtcgtcgacgtcccgtcggtcacccagctcatcgtcttgctgcgccgccaccatcatcgtcatcacagcggcgtgttccgcgccgtcctcgcatccgtccccgtcgtcgtcttcgtcctcggctccacgtcgtcaagcctcgtgctggccgcgtctcgccttcgtccaaggatcgccgccgaacttctgtcgttccggaggttcccgaagcgtggttcacggtcgtcgtcgaaggttcggaaggccgttctctgcgaggttgggtcggtgcttttgtcatggctaggatgggtaaaggggttatgtcacatcctttatgacgggttccacggccgtcgaatgcagacttttcctgggacggggattaatacactagcgttctggaaaagcgagtcccccggcggcatggtgtccaccaccgcctgcaccttgggcaatgtgggcagcggtagcggctgcacttgctgtgatttgctgaaggacggtgtttcgagccacacggttgcactccacgaccataagaacctcagccatggtaggacaaggtggcggttcatcaccacggcttcgggaaccctccggagcatcatgggattgagagcgagtgctgggatgagtcatcctatggatatgagattaaacataattagtgatgggagcaactaa

SEQ ID NO: 75685 - DNA, 197 bp, Oryza sativa
  Clone ID: PAT_MRT4530_75750C.1
catgcactggcacacgtaagctaggatgctactatagttttagcggccttcctttttttttttttaggactctatgagcaagaccatggagaccgaacatagcgcagataattccaattgcgaactactttttttcccttagagacgaacggaacaattcttatattattgcttccttctttttttgggcccttact

SEQ ID NO: 75686 - DNA, 1060 bp, Oryza sativa
  Clone ID: PAT_MRT4530_75751C.1
tatgaaaaccaagggtacgtagttcaggaggtttatgttctaagcaaccaaaattattgttgcagcgaagacgacgggctcgtcgagctgctatggtgcaatggccacgtcgtcatgcagagccaggcgccgcggaagccgccgaggccggagaagacgacggcggcggcggcggcggcgatggcggaggatgagtcggcgtcgtggtttcagtacccggtcgacgacgtgcttgagaaggacctgttcaccgagctgttcggcgaaatgacggcggccggcggcggcggcggcgacgtccgcagggcggcgtgcaaggaggagcgcggcgcggtcgccgcgttccagagcaggatgatgccgccgccgtggccggcgagggggaaggcggagttcggtgacgtcgacgacgtgtgcggcgtctcggaggtcacggtcggcgagtcatcgatgctgacaatcgggtcgagcatctgcgggagcaaccacgtccagacgccgccggtggggaacgggaaggccggcgccggcaccgccggcgccgccagaagggcgcacgacacggcgacggtggcgtcgtcgtcgatgaggtcgaggtcctgcaccgccaaggccgagccgcgcgacgtcgcagccgccggcgtcggcggcaagcggaagcagcgcggcggcgccgccatggagtccgggagccccagcgaggacgtggagttcgagtccgccgccgcaacgtgctcgccggcgcagaagacgacgacggcgaagcggcggcgcgccgccgaggtgcacaacctctccgagaggaggagaagagataggatcaatgagaagatgaaagcattacaggagctcatacctcactgcaacaaaacggacaaagcatcgatgctggatgaagcgatcgagtatctcaagtcactgcagctccagctacagatgatgtggatgggcggcggaatggcgccgccggcggtgatgttcccggcggctagtactagtatcgtaccacaaagaatgcttcaaggcctgaaatttcgacccaaatacccgaaatttccgg

SEQ ID NO: 75687 - DNA, 2988 bp, Oryza sativa
  Clone ID: PAT_MRT4530_75752C.1
atggagggagaagaaaaagtttcaccatttcttgatgtgcccaaggatatccccattgccaccaagtccctcaccatcaagacgacgaacaccaatggcgggcgcggcggcggcgactggtcgaaccccatctcgccggccatctccttctcgccgtacctcaactcgccgtcgccgccgtcctccgcgttcgtctccgcgctgcagtcaccctacgtctcccctcgcctcgccgacccgccgccgccgcagcagccgcagccgcagacgccgcgacagcggcagcatcgggagaccaaggcgtccgatgtcgccgcggccgccgcgtcgacgccgacgtcgtgcaccgacgtgtcccactcggaggacaccgacgcgccgagcgcctcccgcggcggcggcggcggcgcgccgccgcgcgggtcgttcaccttcccggtgccgcgcgtctcgttcacccggggcatggtggcgtcgcccatgtccaccaccaagctccggagctgcgacgtctacatcggcttccatggcggcgcgggcgcgggcgcgggcgcggcgctcaccaggttctgcaagtggctcaaatccgagctcgagctccagggcatcgcctcgttcatggcggaccgggcaaggtactccgacgcgcagagccacgaggtcgcagaccggatcatctgctcggtgaccttcggcgtcgtggtggtcaccatggccagcttcctcaacccgttcagcctcgaggagatccggttctttgctcagaagaggaacctggtgcccatcctgttcgacaccgaggtgctcgacattgccgggctgttcgatgatgacaaattcgaaggtaacaaggaaggtgtggaagcatttgaggggctaatgcgatgtcatgagttcaagctcgagactgatgagagcaactggagaggttgtgtgtcaagaacagcagccgtgctgcaatcgaagctcggccgaaggtgcattggtgagaaggagagccatggtgttgagtgcctgccatttccgcggaacaagcattttgttggaagggagaaggagctctctgagattgagggcatgttcttcgggcgcgcagacgatgccggagaagatttcgggtgcccaagaggtgccatgactactggtgaatcaagcgttggtgcttcagatggttttgctgatgaggatagtgacactgtgaggacatccaatggcaggttcatcagcttggatttgcgcaagtgcaagcaacctatgttagaggcatttgttgatcctgtcatagggaagttctcgggtaaagggagaagcattctgaggcagagatcaaagaacaagaagtcaagattcaggtgtagcagcaagagccatggcaatgccggtgtgatctgcatcaatggcgcttcgggcatcggcaagacggagcttgcattggagtttgcgtaccgatactcgcaacgatacaagatggtgttgtggattggaggtgaggccaggtacttgaggcagaatatactgaatttgtcgatgtatttgggattggacatcagtgctgaggctgagaaggagaggggcaggatcaggagcttcgaggagcaagaacatgatgcatttcaaagggtgaagcgagaacttttcagggatgttccttaccttcttatcatcgacaacatcgacaatgagagggattggtgggaagggaaggaccttcatgacttcatacctaggaacactggagcaagccatgtcattgtgacaacacgactacccgttgtgatgaacattgaaccaatgcagcttctgcagctctcatttcctgaagctgtgatcctgatgaagaggaaaatgaaggaggactacccttccgaggaaattgaagttcttcgaaaattcgatgagcggttgggcggactgagctttggcttgtggattgtcagttctctgttgtccgagttgatgattgctccttctacgctgtttgaggctgttgaccagatatcgttgagcgataccatgctcgctcttggtgccaatgatgaaagcttatggcagaacaatttgttcctgattaaggtactagtcttctgctttgcattgatggacagggtgaaagggggtagccttgccttgagaatgatcactgctggttcatggttagctccagctcccatgtcatcaaccctactagctaccatggccagcaagctaccaacaaaagccaatagcattcagttgtggggtgaatccctcaagacggcattgttatgcggcacacactgcttcctagctccacaagcaaagaaggctgaggtggagtcatccctcttactagtaaaactcggcttggcacgaagaacaacgcatcacccgggcttctggatccagtttcacccaatcatgctgctgtttggcaagatcaggggtggtttggcacctgcaactgcagctgtatcaggtgtcataaggtctagaaacatatctgtgtactcagaccacatgtgggctagtgcgtttcttgtgttcggcttcaagtctgaaccacctgttgttcagctcaagccgggtgacatggtgctcttcatcaagaagatggcgctgcccctcgcaatccaagccttcatgacattctctcggtgtggttcagcattggagcttcttaaggtgtgcaccaacatcctcgaggacgcagagaagtcgctcgcatcgcggatacaggacttgaagcaggggccattgtgctggaagaagaagctgcagacgaacagccatgccgatgagttcatctggcaagaggtgacactgctcaaggcaacgctgctcgagacaagggcgaagctgctgatgcgaggcgggttattcgacagcggcgaggagctctgtagaacctgcatcagcatcaggactgtcatgcttgggcatgaccattcccagacactggctgctcaggagacattggcaaagctggttagatacaggagtaaaatctga

SEQ ID NO: 75688 - DNA, 279 bp, Oryza sativa
  Clone ID: PAT_MRT4530_75753C.1
ttcctagctcacgcagaggcgacgacgacgcgcaggcgcactcgccctgctccctccccgcgatctcgccgtaggggatctcgtctgcggcgaggaagcaaaggccgagggggcagcggctggggaggggaggggaggggagcgtacatatttcattagagtccaaacttgagaatagtcctctgataagctcgtcacatcacatcactgaataaacctgccggcactcgacaaattaatctttgggcattccctagtgtctgctccttatggaaccta

SEQ ID NO: 75689 - DNA, 1068 bp, Oryza sativa
  Clone ID: PAT_MRT4530_75754C.1
atggccggagagatcattccagacggcggcggcggcggcgcggtgttggcggcggagagcgtgatgctgccggcgagcatggtgctggtgcagctcttctccgtcgtgctggtgctgctgtccaagctcgccctcagcaccggcatgcggccgttcgccctcctcgcctaccggaacctcgtcggcgccgtcgccgtcgcgcctctcgccttcatctttgagaggaaaaataggaaaatcccgagcattgtggagtggtgctggatttcgcttaatgctacatttgggttgggcagagaagttggtgtttacagactggcctggcaagataaagctcttcggtatcataacatgtgtgggaggaacaatggtagtgagcttgtacaaagggaaactgctgcatcacccttggccttcccacctgttgaaattccacacgcagaaagcatcaggctatgcctatcatcacaatttgttagccggtaccaaatcaagtctttcaagttgaaacctgccaatttcaggtttatgcttgtagttacttctcagggagttgtagtgcaatgtatggttaggcttgcgagcgtcttcccgtacaggtattgggcaactacgctgacatgtctttctggaagcctgcaagcctttgtgattggcattctgatcagccctacaaaatctgcctggaccctcaaatgggacatgcagcttctgacagtggtttattcaggggtgttcaacactggtatctcatttgtcctgatgtcattggcggtcaagcatcgtggaccgatctacccatccatgttcaactcgttatcgctgatcgtgatggtgatcatggactcagtgttacttggtacaagtatcttcttaggaagcattctggggacagcattcatcattgtggggctgaatgcgtttctatgggggaaaggcaaggagctgaagcaagctgtggcgcagcacaccagccacaagcagaacacagaccacaacgagcagggcccccaaattttaagtggcggccctgcaaaacactgtaggggtagcaccaaaacaaggtag

SEQ ID NO: 75690 - DNA, 456 bp, Oryza sativa
  Clone ID: PAT_MRT4530_75755C.1
acttgagcacaagaacaagaaaattggtagcttttattcagtcgctatatccttggccagaagatcagtaattgctggaacaaagaatcgagtgtgtatatatacgtgaaaaaaacattagcctacaaagtgtggagtgagatgaactatatgctacctacttgttacacataattcacccaaaaaaaagctacacttattaacagttcggatattaggttggacctgcataaaggccagggtgattcccgtggtcatatgaaccaataattttactctaacttacagtgattggtcaaaaatgagttatttcttaaccttgcagtgagaatcttccctgttcaccaaggcctcagccaaatttacaggcctttactttttggggtagaacctttagtaccagccggggacatcatttagttttgcacttgcttgaattattcagctttttgcatt

SEQ ID NO: 75691 - DNA, 444 bp, Oryza sativa
  Clone ID: PAT_MRT4530_75756C.1
ttttctgacgagtttttacctgccccagccgccagccgccgggcgcctaggccgaggcgccgtcgacgtgccagcccagccgcctgcccgcctcgccggacgaccactcgccctgcgccccgtcgcccgtggcggcacggccccccggccgccgcgcgcactcgcgcgtagcgcccgctgacgctgtcgtgacgccgcgtcgccggctgggggcctgcccggtccggcgaccggcggtccccggtcaccggtcagagcagaactgcagcagcgttatataatggatcctaaaatgaagcaacttcaagaagcactggctgacattgaaactgatgcagagcagcttcttctggcaaggcatcagttaggggaaaacgataggataaggaatggtaatagggaagcactgacagccctccggaaagagccaagacaaccaaacta

SEQ ID NO: 75692 - DNA, 424 bp, Oryza sativa
  Clone ID: PAT_MRT4530_75757C.1
ttttgttgtttttttatgtttttgggcttattttttattcttttccgttatacacagaggccggggacatttgccaaattctttgccagggccacgggtaccagggcctttgcttggggggtcaatggggtcaggaaactagaattactgttcttcgcgcacaaataatggggagattaggacaacatcaactttgagccttgtgccctgccctagccgaccgtcatataaagcacacaccttcataagccgtcgtgtatacacagactgccgggccacgaccacatgggccgtgtgcaacctggtgaccatgggggaagtaacggccaccagtttgacaagtgcgcgatcggagacaactgccaactgttgaggcttgcgatccacttggggggcttagatgaagcaggactgggcgatcctg

SEQ ID NO: 75693 - DNA, 272 bp, Oryza sativa
  Clone ID: PAT_MRT4530_75758C.1
cccacgcgtacgggaaaccctaagcgaagcggaggagagaagagcaatgagcatccctgagcaagcgcggcggcgagcggcggcgagggggagggcatcctggcgctccttctcccggtcttaggtggcggcgcatgggcgcgaggcggcgaagatggcgaagaagctgctgcggagcacggggaaggcggcctggatcgcggggaccacctaggaggtcctcgtcgtcccgctcatcatccagatggaccatgagcggcggtttaacgacc

SEQ ID NO: 75694 - DNA, 192 bp, Oryza sativa
  Clone ID: PAT_MRT4530_75759C.1
aacccttaatcccttatcttcccatttatcaactttttatcatccaatagattataataataaaaggggggggaagtagcaattatcttgccaggggggcctgattttcagcaggggatatatttgggaggtttctaatacatgggggaagaagggaagggtttggcccctgtgtagtagggaggagatccc

SEQ ID NO: 75695 - DNA, 435 bp, Oryza sativa
  Clone ID: PAT_MRT4530_7575C.1
atggcggtggcggcggcggccagatgcggagctccgacgcgcgcccgccgctccagacctcgagagttgcggcggcagaggttggatccgccgccgccgaactctggagcggcgacggcttgcggatccgccatccccgacctcggaagcggcaggcggtggcgttgggagttagcggcaacggtggtcctcggatccggcggcgccaccctcgggagagctggctccactgccgtcgggaatggctacggatgcggcgatggggacatcggcgactgcggcctgctcgcggatcccgccgcctctcctccctctctccttcgtcttcttcgaccccagcggccgaaggtcacgggcggcgggcagcgacagtcatcggtggtgagccgggcgccgaccaggctggtagcggggagcagggggtggcgacttaat

SEQ ID NO: 75696 - DNA, 244 bp, Oryza sativa
  Clone ID: PAT_MRT4530_75760C.1
ctggccaaaacaaatctattttgtctcggttaaaagggaaccttacggggaaaaattaggtttacagtagtgttatttaaccggggggattaacaaagatatggggcttctgaaaaactggacaacatccacaaatttgacaactaaggccagacgcataaatcttaactgggtacatgaggggattgaaaagggttcgaaagggtccttgggagttagcatggtgggcatgcaatgttcaaag

SEQ ID NO: 75697 - DNA, 2006 bp, Oryza sativa
  Clone ID: PAT_MRT4530_75761C.1
atggtggtgcagaagaatcagcggaagccaggagaggcttcttggcccaaggttgtgctgaagaaatggctcaacctcaagagcaaggattcggagttcaacgccgacgaggaagacgacgacgacgggagcgacgttgatgagcaagatgagaatgtggagggcggcgcgccgtacaggctgcggcggcgaaactcggagacgctgcgcgcgcagtacatcaacaccaaggagctcaagctctgcgtcggcacctggaacgccgccggcaaggtcccccccggcgacctcgacatcgccgactggctcggcgccggcgccggcgagcccgccgacgtctacgtgctcgggttccaagaagtggtgccgctgaacgccggcaacgtgttcggcgcggaggacgcccggccggcgcaggcgtgggaggagctcatccgcagcgcgctgcggcgggcgcggccgccggcgagtagtcggccccggtacaagtgctacagccaccctccctcgccgtcgcgcggggacgcgacggccgccgccgccgccaccgatgacgacgagctcttccctggcaccgatacggacacggacaccaacaccgatgacgactcgctcttcagctcgccggcggagtccgagcagcagaacgtcgccgccaccccgaggaggctgaccaggctgaaccatttcactgccgccgccgacgccgccgccgccatggacgactccggcgacgagcatcagcagcggacgcttctcaagacactgagcaggtcggacagggtcggcctggcatggccggagcagccgctggacctgctcgccaagcacgccacggcgacggcgagtaccaccatgccatcgtcaagatccttccgaacctacaactcattcaggccgtctcgcgccgccgccgccgccgaccagtcgaacgacgacctcgccatgatcgccgacctcgtcatggacctcgccgcggcgcgcaagaggcgttcgccgtacgtgaggatcgtgagcaagcagatggtgggcgtcttcctgacggtgtgggtgaggcgcgggctgagaaggtgcgtccacaacgtgggggtgtccaccgtcggcgtcggcgccatgggctacatcggcaacaagggcgccgtgtcggtgagcatgtcggtgtaccagaccatgttctgcttcgtgtgcacccacctcgccgccggcgagaagcccgccgacctccacaagcggaacgccgacgtgcaggagatccaccgccggacgcacttcgccggcgtcggcatgccgagaaacatctatgaccatgagaggattttttggttgggtgatctgaattatcgcatcgacgtcgcgtacgagagagcacacgagctgatttcgacgatggattggactcagctggcagagaaagatcagctgaagcgagagctaaggaagggtcgggcgttcgacgggtggacggaaggggtgctggagttcgcgccgacgtacaagtacgagctcaactcggccaagtacatcggcgacgaccagcgcggcggcaggagaacgccggcgtggtgtgataggatactgtcgttcgggaagggggtgaagctgatgagctacgggagggcggagctgacgatgtcggaccaccggccggtggtggcgacgtacgcggcggaggtggaggtgttcagcagcaggaagctgcagagggcgctgacgctcacggacgccgaggtggaggccggcaccgtcgtcgccgtgccggaccacctcgccggtattgagggccagagaggatcggttactgcaaggataaacttgacactgtagcgctctcatgtgtaaacactgtaatcgtgtaatcgcccatggccgagacggattctcttctttctcaagctcacaatccactggtgcatttgccattttgcttcatactgagtgaacccggagaaactttcgtgttataccactcgaactaattttttggtaccagtattgttttcaatcct

SEQ ID NO: 75698 - DNA, 565 bp, Oryza sativa
  Clone ID: PAT_MRT4530_75762C.1
ccggccggggcccttaaacccatctcctctcccctctccctcccaattcgatgcagccgcggtagcaattcgcatcgccccgccctcctcgccgcgcggattcgctcgccgaccccgccaccgcacccccatggacgcctccgacggatccggcaatgcctccggtggagccggcaccggcgcgtccgcgtgctggtgctactccctgctcggcatgcggaagaacgcgtacgccaccgacgtgcgcgccgtctaccggaggctcgacatgaagtggaacccggaccggtgcgtgagcgaccccggctgagggcaatcgtgtggcttcagctggatccaagaggcgtactccgttctggccaacaaggggaagcgagccatgtacgacaccgtgctggtagatcctgtgaacgacgacgaccaggattagtacgatttgatgcaggagatgctggagaggatggataacgggcaaaacgagaaggcggacccactaaaggaccagcagaagatgctggaggacatagttagattggatggtggaagccgtgattggggctacaat

SEQ ID NO: 75699 - DNA, 435 bp, Oryza sativa
  Clone ID: PAT_MRT4530_75763C.1
atggctttgcgcgccctcgtgtgcgccccccagccggcgaagcaggagccactcagcggtcatcgctgcacgcgcgcaccagcttgccggaccactgtcgttccgctctctcgtcgccggagagaaatgggatcaggagagagggatttgggagctagggttttgcccctctcctcggtcggcgcttcatccggcgcggggacgattggagccgtccatcagatcagacggctcagattcgcccagtgtcgggccgtcgtcgccgttgattacgctgcgcctaatgggccacggaagtgcatcggaccgtccccgcatatgtgggccgcgctcagctgctcagcttgcgggccatcgaatggactcaactcgccgaagatgggccagcccaagtttgggctggcttgggaagacctgggccgaaagcaaatttga

SEQ ID NO: 75700 - DNA, 2253 bp, Oryza sativa
  Clone ID: PAT_MRT4530_75764C.1
atgggcatgctgaaaataggcaagaactgcagtgtttgcaaggagtggcaagaacactgctactggagccatatggccgatgactgtaagcacttcttgacgtatatggttggggacttcaccgagagcatgatcgtgcctagtagatttgccaacaatttcaacgggcacatttcagaggtcgtgaatctgaagtcacctagcggcaaaacatggagcattggagtagcctacagtgacaccggtgaactagttcttcggtcaggctggaaagagttcgtggatgctaatggcgtccaggaaaatgactgcctgctcttcaggtacagtggcgtctcctccttcgatgtgctcatctttgatccgtccggctgcgagaaggcgtcgccgcatttcgtcgagaaccgtggatttgggagagaagagaagtctgcaggagctgaaggaggaggcagagatggtgacaagaatggccatcaccaacaccagctggagatgacaccccacaagaacagcagcagcccctgcatcatcgaaatgaaatggggtagaaatcaatccagactctgcatcattgacatgtatgcggccatgggcattattgttgtaacaactaatattggtacatacatgcatgaacgtgcttgccttgcagagcaagatcatcgcgaagagaagaaggaaggggacgatgaagacgaagatgaagatgaagacgaagacgttgacaaagatggagaggacaggtactacttctgcaggcacggcgggcgagtgaccgagtacaacctgagcaagggagacaaggaggagatctcgcgcgtccccgtgccggtggagcctggcaacccggtgttggtgaaggtcatccacgccagccacctcctctccagccgctacagcacagtaggcgtgtcgccggagttcgccggcaggtacctggggccggccatggcgagggaggtggtgatggagaggggaggaggaggaggaggaggggatcagtggcacgtccggttcgtgcgccgggagagcagccgcggcttccacggcaccgggtggcgtcggttcgcccgtgacaatggcctcctcgcccacgacgtctgcctcttcgagctcaggttggtggacggcgccggcgccggcgaccgcctgcgccgccggccgaggccgacgatggccgtgcacgtcctccggcgggcaagaactgcagcgtttgcaaggagtggcaagaacactgctactggagccatatggccgaccacaaccgtgcctgctagatttgcaaacaatttcaacgggcacatctcagaggaagtgaatctgagatctcctagcggcgaaacctggagcattggagtagccaacagcgacgccggtgaactagttcttcagcctggctggaaagagttcgtggatggcaacggcatcgaggaaggagactgcctgctcttcaggtacagcggcgtctcctcctccttcgatgtgctcatctttgatccgtccggctgcgagaaggcgtcgccgcatttcgtcgggagccatggattcgggagagcggagaactccgccggagctgaacaaggaggcagaaacggccgccgcacgccgccgatcgtcgacggcgataatggccatcgccaccacctggagatgacgctccacaggaacagctgcaggagcatccccagagcatgcaaacgcagcttattcagtgatgaaacagaagcgaaagaaaacgatggcgaagatgaagatgttgtcgcggccgcggaaggcgggcgctacggggagtactacttcagcaggcacggacgggtggccgagtacaacctgagggaggaagacagggaggagatctcgcgcgtccccgtgccggttcagcccgggaacccggtgttcgtgcaggtcatccacagcagccacgtccgcagcagcaagtactgcattgtaggggtgtcgccggagttcgcgggtaagtatctgggggcggtggagagggaggtggtgctggagagggcgagcaggggaggggagtggcacgtcccgttcgtgcaccggcagaacacccgcggcttctacggcgccggctggcgtcagttcgccggcgacaatcgtctcgtcgcccacgacgtctgcctcttcgagctcacgatggtggacgccgcggccagcggcggcggaaaccgccggcgacgctggagccggcggccgacgatgaccgtgcatgtcctccgtcggcagctctcgtga

SEQ ID NO: 75701 - DNA, 1907 bp, Oryza sativa
  Clone ID: PAT_MRT4530_75765C.1
atggcggcgccgccgggacgcggcggagccgacgggtactgcgacctccctgacgtgaggctcgagttggacccgggtaaggtcagaggcggcggaggtgggtttaccgtctgcttctggctctacctctccagctccgcgaggccttcctctgtcatcctccatcaggtagcggaaggaggtggcgacaaggtgccatttcttgcattgggtgaagggaataaactgattctcttcccattgctggggtttcacagggaagcccctactcctgatagttcttacccatggactgacataaccaatctaactgaagttaatgagtgtccccttgacaattggttccatgtcgggtgtgaggttaccgaaaacattatgcgtcttcatattgatggcgacctagttgctgaaactcatcttcattcgctgtacaacgaaccagactatcaggacgctgcagccgaccatagggttctgggaagcgaggacaagctcgaaggatatgtatataacatggagttgtcatgtatgctaggaaacatacaacaacaatttgcaaagaacccaccatttaaattatctattgactactcatgctctgatggaatcgaagagggtgatgatggtatttggaatattgtgggtgggaagatcgttgcttcactcgtctatgctgacaatggagcgttagttgaaaaatcaagagatgattcagaacctcctttgctaattagttgtgatggaattgaatacccagctgtaagcaggcctctaccaattattcgtgggcgtgcactatttaaactcaagatttctcagctatcttctaaatgcgacaataagctcttccgtatttttttctctacacttggcatgaaaagatatacttttttggaggcgtattccaaacctattcgttgtatatctcgaaaccgcaccagccgcccattgggttctgcaaagcggataggctctgcatcaatggatgatattaaatcaatcaataattgtgaagggtttggtcacagtggaaaagcaaatggtcggttgcagacacacgacccaagttcagtgaataaacatgcaaaaaagatggtgctagacaaaggagcacaggatgtcatggtgtctgattctacagcatcagattacgacagcatggatgcaggaagttcttggagtttatcagatggagatgatgttgaatccttttcggacgctgagattttcagatattgtttagatggtacacatgagcggtcaaagtttctcagagctgcagctccttctgttaacgaagatgacttgataaaacttgcaaatcaggtctctttgtatagtggatgcacccatcacagaaaccaaatattaatatcaaagcaactgctccaagagggtgctgacatttggagtataatctcaaagaacaatgaacgtgctctttggtcatctgcagttcctgaaatgaaagcaaaatttttggaaatagtccatccttccaacaggggtttgtcggagcaggattttgaggttttaagaggaattgctggttgtggtgatgacattggaagagacgagtttgataagctatggtcctggttatacccagttgccattgctttgtcaaaagacaaaataaacaggctatgggatttcacagcacatagatggatagagggattgattacattacaggaaactgagaatgcgctaagaagttccagggaccggcttatgaagccaggaacatttgtccttagatttcctactacccgaagctggccacatccagatgccggtagcctggttgttacctatgttggctccgataactcaattcatcatagacttttgtctcttgatgtcagggttgatcgcctgccatcctctatgcagagctaaaggag

SEQ ID NO: 75702 - DNA, 193 bp, Oryza sativa
  Clone ID: PAT_MRT4530_75766C.1
ccgtgctcgcggtgacctcgagcatggcggactaccaccaccaaaaccaggcggcgctacaccccgggacccgttctcgcagccaggaatgggctacccgagggacccgctcccgcatcgccgaggcgaaggagagacgccagtccgtctaagcgcagcacggccggcgacgcccagcaggaccgtcaagact

SEQ ID NO: 75703 - DNA, 347 bp, Oryza sativa
  unsure (1)..(347): unsure at all n locations
  Clone ID: PAT_MRT4530_75767C.1
cccacgcgtccgcccacgcgtccggaggaggaggaggaggaggagaagctagcggcggcggcggcaatggcgacgagcgggctgaggagctgcagcgcggtggncnttcctagccttctggctccgtcattcaacaagatccgtctgacggtttttgcttacgccctttcctgtataaggcctatcttctccaggaatgtatttatttctangtatattgtaccatgaattccaaaatctagaggcatgcatgcaaatgttgattgttgtacgagtcatttatagcaggaatacttgagataagtcgagcttacgttttgtacggctgtaagaactgatgactgtta

SEQ ID NO: 75704 - DNA, 133 bp, Oryza sativa
  Clone ID: PAT_MRT4530_75768C.1
atggagtcggttcggctagcggttgacgtcagcgaggtgaggtggcggctgacgtcggtggcagtagcggtggagaaggagcaacaaggccgcacagcgatggcgcgtcggctcggcgaaaaggcagcggcgt

SEQ ID NO: 75705 - DNA, 843 bp, Oryza sativa
  Clone ID: PAT_MRT4530_75769C.1
atgtctggtgcaaccactgcattttcagggtcaacctaccccactgccaatgttttctatccatacatagctaaagttaagattgcaatattagcttctagagcacaagcacaaactgcactgttagaagctgcaaggttagggcagcagtctagactttatgaacctgaccctaatgatgtattgctggtgactatggctgatgcaatgttggaaaaattcaataaatattgggagaacacaaacaatatcatgatcattgctacaatccttgaccctaggttcaaaatgaggtacattagatggtgcttcagtgaattttttggtgagacaaggtttcctgttgtgtccaacatggcaaagaggttcttggctgttccagctagcagtgtgtcatcagagtccacttttagtaccgggggaagaattcttgatgactaccggagttctttgaagccagaaacagttcaggctttggtttgtgcttcaagctggataagagcctctcaaaatgacaatagtgcacctatccctgtgggagaaaatggagatgatgacatcgaaatagtggacttccccaattgctacaagcctacaccctatgggagaaagggagtgtgggactatgggagaaagggagctgccaattgccatgctatttgtgttttgtgtttatgtgcaactgtgttggatgaaatcatgaaaatgatgaaccttgcaggctgcagctttactagatatgcacttatgctaaatattggtgtattgaataactcagaatgtgtcattgtgactgtggagtactggagtgcggacgtttatggacttgggaaatgtgtttaa

SEQ ID NO: 75706 - DNA, 504 bp, Oryza sativa
  Clone ID: PAT_MRT4530_7576C.1
tgcgccggctggtgccgccccggcattcccggcgcgacccacgacgccgctgctcctatctactcactaatgttgcacaagctgccataactgacgttgttgcgggcgagatccaaggggggagggttatctgccatggcgaacgataccagaccactaccacaccctgggggtgagatgcagaccctctctgcctcgccgtagatcaatgaacgtgctatgacactgacggcgaatcacctacttgccagacgatgaatgctgagaacccagatgcgaagataaatatgaggtgctacgagaggcgtacctaggtttaagcgatccttcacaaaggcaggctaatgataagcatggaacgtgaagggcttgctgaagattaacataatggatcctgatactggctttggaaagcaatttggaagtgactattatgactatgatgttggacagcgagaactggcatacatagcctgaggggaagtctaggaaaacttatgctgt

SEQ ID NO: 75707 - DNA, 254 bp, Oryza sativa
  Clone ID: PAT_MRT4530_75770C.1
taatcacccgccggagaggaaggccgccgccggcgccatgctcagggtcgccgggaggcgcctcaccaccgccctcgcctggcgccccgccgcggcggccggcgccaggggcccgctcgccgggggctccctccccggcgactacgaattctcgcgtgcgccccaagggccgggctaccccggggagtcctcgtacttagccgcttctaggggcttttcctcagaaactcttgttccagggtacccggatgtta

SEQ ID NO: 75708 - DNA, 2229 bp, Oryza sativa
  Clone ID: PAT_MRT4530_75771C.1
ctagttgcttgccaccacacaattggggaagtccactatttcgatgccatcatctccattttctcccacagggataggtgcactattgtcattttgagaggctcttatccagcttgaagcacaaaccaaagcctgaactgcttctggcttcaaagaactccggtagtcatcaagaattcttcccccggtgctaaaagtggactctgatgacacactgctagctggaacagccaagaacctctttgccatgttggacacaacaggaaacctatgggcatttaccttccaataattgagtaagttgaaagtgctatcttcgagggacacatttggttcatctagatagatgagtaactcagactttgaggattctttagcatttgactgcaaaaaggattgaaatccacttggaataattgaagccaatgaggtggtagtagagattgaggatgaggccgagtgaccattgtgtggactgttcccaccttggttgtggcgacatatccgctcatactttctgtagagtttttccatctcatcagttatggcagcaacctctgttacacaccttgtctcaccaaaaaattcactgaagcaccatctaatgtacctcattttgaacctagggtcaaggattgtagcaatgatcatgatattgtttgtgttctcccaatatttattgaatttttccaacattgcatcagccatattcaccaaaaatacatcattaggatcaggttcatacagtccagtctgctgtcctaaccttgcagcttctaacagcctagcttgtgcttgtgttctagcagctaatattgatatcttaacttttactatgtatggatagaagacattggcagtggggtaggttgaccctgaaaatgcagtggttgcaccagacattgttcccaagattggctgaattttctcaaacaaatcccattcagattgtaaaggtagccattcatatttggtgtctgattcagcataataatcaaaaccatttctatactcaatgcatgtctctagcatccgataggtcgaactccaccttgttttaacatcaatagacaaccctctaccaactttaattgaataagtgttgcacacacccacaaacttatacatacgggctggagacttcttaaagtacttcacagtgttcctaacattggttatcaaagattgaatttgttgcaggccatcattaacaaccaaattaactatgtgggcagcacaacgaacatggaaataatctggatcaaactgagcattctttctagcagcaagcttagacttcaaatttgaaacagcggtgtcattgtttgaagcattatcaagggttattgtcatgaccttgtcctctattttccaatcaaccaagcaatcaaaaatagcttgagctatgacaataccggtgtgaggaggctccacctcaacaaagtttaggacacggcattgcaaaacccaattaacatctatgtaatgagccaccaaacacatatactgaaggttttgatttgatgtccacatatctgtagttaaacttatggtctcagcctccctaagacttttcctgagatgttccttttcagattcatacaatttcatgcattcactttttatggccttgcgaccaatgaattcatagctaggattcatccacttcatcaaggcattaaaccctttatgctcaacaattctaaatgggtaatcatgtagaattatcatacgggcaatcaaaagtttagtgtgatcatgatcatactcagtaggatgcacaaccatagaaccatcagctaaaggaaaatcaagtgtaccttgagctttagcctttgcaagcttgttcagatatattgtgcacttatctaagtgacgatttagtgttgtagtggttcccccagggcgatatgcatagttgtgatgacaaaacctacactttgccttacattccattttccctttttccttcttggagggaacattgatcaccttataatatttccaacaactagcacgctttcctcttgttatcttaactttagaaggagatagtgaaatacctgcctttggcctttttgcacctcgtttttgagtctttgatgtgtcatctccatcctctccctcactgctgcttcttgacgaaggtaggctcaccgacatctcatcattcaagtcaaagctgttttcttcatcctcccctccatctgaaatggccaccatgtccat

SEQ ID NO: 75709 - DNA, 498 bp, Oryza sativa
  Clone ID: PAT_MRT4530_75772C.1
atgacgagcaacagccacgcggcggcggcgagcaggcgcagcaagaagcagacaagcggcggcgttctagcttgcacggcgacggcaagtcgacggcaggaaatggacatggtggccttttcagatggaggggaggatgaagaaaacacctttgacttgaatgatgtgatgtccgtgagcctaccttcttcaagaagcggcaataagggagaggatggacatgacacttcaaaggctcaaaaacaaggtgcaaaaaggccaaaggtgatcaatgttccctccaagaaggagaaagggaaaatggaatctgatggttctatggttttgcatcctactgagtatgatcatgatcacactaaacttttgattgcccttatgataattcaacatgattacccatttagaattgttgagcataaagggtttaatgccttgatgaagtggatgaatcctcgctatgaattcactagtcgcaaggccataaaaatgaatgcatga

SEQ ID NO: 75710 - DNA, 579 bp, Oryza sativa
  Clone ID: PAT_MRT4530_75773C.1
gtcacaatgcatgctctctctttctttttaaacatggcatatcaacaaagaggcatctacaaaaaaaaaaaagcctctgatccacattcgcgcttcaaaatcgtctacacattttacatagctggagtgtggacgggggtattcacactgtggagtcggtacacaaggaagaaaatggtagaaacatcaagatgaattgatacgatctgattgcgcaattgcacgtaccaagggtgcacaaaactcaaatcccatggccaaacacgtataggtcagtatgtcccttggaaggatagtcgatcccgcaatgtatcgaaaatagaagccgcggctgtgttctgtgcaagtgtaagctttaggcgaccaaatagctcatcactatctttgacctgtgaagctgcttctgcagcttcctttgccatcttgatccgtgcatatgcctcagattcgtcacgaggatctgtcaactttggaatgtacttaagagcttcagttttttgaccagcatcaatacatgcttccacaaaaggtttatagccttctgggggccctctctctttcgaaaacttttccaacgca

SEQ ID NO: 75711 - DNA, 135 bp, Oryza sativa
  Clone ID: PAT_MRT4530_75774C.1
atgaagatgatgcagacgacgactgccctctatgcttgctgccacgattcgagattcgacgaccgccggtcttcatactcctgcaggcgacctcgagatgtcctctgtgcgaagaacaatggggagggcacagca

SEQ ID NO: 75712 - DNA, 3052 bp, Oryza sativa
  Clone ID: PAT_MRT4530_75775C.1
gaaggctgaaaaagtaatggttaagccgaaatcggatggacgtgcagattgatttgtcacaatgcatgctctctctttctttttaaacatggcatatcaacaaagaggcatctacaaaaaaaaaagcctctgatccacattcgcgcttcaaaatcgtctacacattttacatagctggagtgtggacgggggtattcacactgtggagtcggtacacaaggaagaaaatggtagaaacatcaagatgaattgatacgatctgattgcgcaattgcacgtaccaagggtgcacaaaactcaaatcccatggccaaacacgtataggtcagtatgtcccttggaaggatagtcgatcccgcaatgtatcgaaaatagaagccgcggctgtgttctgtgcaagtgtaagctttaggcgaccaaatagctcatcactatcttagacctgtgaagctgctcctgtacccacctgtgccttaatgacccgtgcatatgcatcaggagctgacattggggtttttgcatcgaaacagtttattttgcagcctttgtttttatatcgctcagatcgttcacgaggatctgtcaactttggaatgtacttaagagcttcagttttttgaccagcatcaatattcatgttgtgatcttagcaattttgcatgctcttcagaggcttttgattcaactacatgctccttggtctcagcaaaaagtctgtgggcctgctcaatgagccgaacttgtggaccatggcagaggagatcccttgcttgccattggattcctctccaattcccttgactctttcaataaaagaaaggcagcatcctcaagtctcccatgttgatagaaagaagtcctttagagcttcatgcttggaatgtcttgcatataccataaacgaatgctcttcagaaggccttgcattgataacgccaaactaatccaatggagcactcttgtctacagctaccttctgccagatatggagaagcacaaggtacacaagatcagtatccccacgattcctctccaattcccttgactctttcaataaaagaaaggcagcatcctgcaatttctctcgatagtttaggaagtaactcatgctaggggatataactaactgaagtctccctgttgatagaaagaagtcctttagagcttcatgcttggaatgtcttgcatatgccataaacaaatcacgagccaaaggccttgcattgattacgccaaaaaaatccaatggagcactcttttctacagctaccttctgccagatatggaaaagcacaaggtacacaagatcagtatccccactctcaattgcctttgacaatgccttgtcttgttcatcaatgcttagcagtaacggaatcttgtcaagcaagccctcaagaaggactgtatctgggatagctgctgatgctgttatcttctcacatgcccaatgcataatcacgacctccgggttgaggttgaggtactcagagatgcgaagtgccaaaaggtgctggttggcattgatcagacgtccaatgagtaccggtgcagtaagtaacttgtactgctgaatggtaagtggcatcccaatctgaggatcacgtacagcatttagaacccgtaatgttttgcacatttcttgaaaacgttcatgtggaaattgactgcagaaagccaggccataagtagcagctctcagtaacgcatgttggcgtgaaatatcaaactcatggccagcagcatctatacatgcttcaattgcctcaggcaaggaagaagaaatcaactgataattatcgtatgctatgaatgccataaagtgcactaagctaacaccaagtccatgacaaatgtagaaggcaaacatgcacttggcactttgtttgtcataatgatctctagcatcatacagcaatgctgctggggacatgcttccaatgccaaaaattgatgtagtggaatcagggactcggtgtaggaattccatatttgagtttgagaggattcttacaccatcacactctggaatgagctttatgggttcatcgtaattatacagcaccggatctccatttggaccaaccatcaaaagagctgctgaccagtaaagaagcacgctgtccaatccacaccaagctatttgatctggtggcaatgcggaatcacactcatactcgaagattatcttggagaaatccgtagggatgacgagcaggcgcccatcgtgcgcaaatgcggcaagcagcttcccattgggggaaactgccatcttctgcacaggtccaatctccagctccaacccgagtgtctgcacatcatcctcatcaaccgccagcactcgatcaccaaccgcaagcagtacctctgggctcccggacatgacaaactgcggctccaccacagccatgcacagcacctgctcgtcctggccaacgcaagggtcggcgaactcacgcgggtgagggtccgcggcgtcgatgtccgtggtcaccacgacgcggttgtcctccgtgaggacagctacgccgcctccccagaaggcagcgtcggcaacgccgccggaggacgtggggagcaggggcacgggggtggggctagggttgggcttcagatcagggaggcggaagcggaggagggacccatcggagagcagcgcgacgaggttgagggagctggagaacgcgagcgagtggaggcgggggagctggggcggccacggggaggacgcgatggggtggccggaggaggagtagaggaggaggcggcgccgcgacggctccgagtggagctgcacgatcttcgagtcgtcccggacggcggcgatcgggcccccgaacggcgccgcggcgacgatgtgcgtggagaggtcgaggcggccgagcacgccaccgctccccccgccgccgccgccgccaccggaggtggaggacgaggacgcggcggcggcggaagggggcgaccagggcagcggggagtagacggtgatgcggcggtagaaccggtcggagaggaggtcccactccgccgcgacggagacggaggaggacat

SEQ ID NO: 75713 - DNA, 348 bp, Oryza sativa
  Clone ID: PAT_MRT4530_75776C.1
cacccgaatctacccgggcatggcggagctgagccacacctgcggacacctccactgcctgctcctaggccgatacgtcggctccgacagggcggagctcataggcgagatcctaaaatacaacggcaataaggacacctagacatatacagattcatcactacgcaatttacatgcatgcaggaaccgttattaaagtaatgactgcactactctatggaacatgattgaaagaccacaccaccacactagctagagaagatcaagcttgatacatactgtggactatatgagcaaacctatataggtgatgccgacacgtagaatactagaagactggaacgtcaa

SEQ ID NO: 75714 - DNA, 177 bp, Oryza sativa
  Clone ID: PAT_MRT4530_75777C.1
atggcatcctactgccatccaagagtgtcgcccgtccctgaccttgttctttgtggtgagccctttgttctcagtgtagaacttgctggggtttatggaagctgtgatagtgacctcgtcctctgcggcactgccattggacaagggcctaagtgtgatgctcataggccctcatga

SEQ ID NO: 75715 - DNA, 509 bp, Oryza sativa
  Clone ID: PAT_MRT4530_75778C.1
ggaacttcttatactcaggcatcgagatatgtagagggatctcattgcagccggtacatgtatcgatgaatcttcctattatggaggctccatgatcaccagggcaggcctttaactcaaacggggtattatgacagtgaacaccctagcagttggcaaaaataggaatggctgcaacaaaaggcatgcagacttgctatagtgtctttataaaacacttgaacgcggctaacagaccaccggtgatgttgacatggaccgcgcaactagcctgtaggtatatgttatggcccttggctaatatcgcccttaatgagttcacgttgcgtaacagatacgccgacccctgtgaccataatattctaagatacaccacctgacatatgaactccgatgatgaagggacagttggctggcctatatggttgtcagggaaaactcccaatgtgtccgcattagcagactctgtgctgatgtatgaaagtgacattcccagcttgatcatagaa

SEQ ID NO: 75716 - DNA, 399 bp, Oryza sativa
  Clone ID: PAT_MRT4530_75779C.1
atggggagtggcgtggagatggagggatgtgcagagaggagcgggagggacgtggggaaggggaaggaagctaccgagccaaatccttccaccggagccgtccccggcatcggatctaaccactcacaaccctccccgccgtatccaagcgcccgcatcctggtagacgaggaactccgtagggagatgcagaagcgagggggagcggcgtggagcagggagagatgtgcggggaggagagggacagaggtagggagggaatctagacgccgccacgtcgatggaatcaatccaggagggggcggcggggagaaacgcgagagaatgagagagagacgcgagagaaatctgggaggcgataaggaatcggttttttatgggacaaagccctccctctag

SEQ ID NO: 75717 - DNA, 567 bp, Oryza sativa
  Clone ID: PAT_MRT4530_7577C.1
tcattgctgccgtctccgatgaggacatcgatggcgtcccgcggcggccctccttgccctcttgtcctggatgatcctttgtatcagcctcgccatcttcttcttggcctgcatgtaaccaacaagtgcgatgaccaaatttttcgcacgaactccacagcgcttcacgatctgaaccaacatcccgatcaccgatacttgacgccccagatgatgaggcagaagatggtgaacaggaggacgaagcactgaagcagaggaatccgaggaggatctggcagcggcgggagatgccgctgtcgccagcgcggtccttgtccggtccctcgtgcgctcgccggacttgcgggccccgtcgcggagggtgccggagaagcggctgacggaggaggaccggagtggcgacaggatgcggccggcgaggacggcggagtggcggcgtgcggatggggaaggcgaggacggcggcggggcggcgcgatgtggaccgggaggggcggcgccctctgctagacgacaacgacgatgacgtccacagtacggcaattcttcccctctgtagcacat

SEQ ID NO: 75718 - DNA, 1489 bp, Oryza sativa
  Clone ID: PAT_MRT4530_75780C.1
gagcagaaagtttattggacagttttatttatagaacatagctcgactcgttgacttcttttcagtcagattattaagcaaactatcctatgaatatccttgccgtttaaccaattcatggaattttcacctgaggtttcaataaacattaagaacatatcctttctagaaagagaaaaaaatccaagagcctgaaaatgtgggggaagaatgaactaaacaatatccccggttggccaagcaaacatagtgaatttgcctaaatctgaagagcagaagcaataggtcctgccagactgagaatttcaaacggctgcctgtccttgaccgcattgacagtgagagggcatgaatcagtaatccagaagtggcttagcccatgacccggaccctctccattatcaggctgaaatttctcccacgacttgttggggaaaatgccatgtgtcacgtatgcactaacctttgctgctccatgctctgccaatactttctggcattcaatcaatgtaccacctgactgtaccaagtcatcaactataacaacatggcggcctctaggatccccctcttttatccgtactattctctgttccccttctctaactttgttgcatacaaccattgggaaatgttgaagttgcttatagaaccgtttccatgcaccgtcatcaggaaaagctatggttatattgtcagaatcaggtagttcctgaagcctacttttgagtaggggaatgccactctcaaaacatggcaagactgagtctccaaagtagaatctctcttgcaaagcatgaatatcaaagatcactagacttgaaggaccgcctcttgatattggtatatttgacaaaattctagcaagtgtgaaggctgtggcaacatctccttcatcttccatccgctcagacgtcccagtagggaaaaatgggagtataagagtgaatgacgaaataaacagctttggcagagcatatataattgatagttgctcaaatatgacacttggcgaactaaatgatgctaagaaagcaacatgttgtccgcggattgtgtgggcattcgagatgaataaatttggaaacccatcggcaaatgtcctccatgagatggagcgcagctcgatgtcgtcgttccgggcgaccacctgctcggcgagctcccgcatctcctcgcagtggaagagcaggacgttcttgtgcgccccgacggcgccggtcatcttcggcacggccaacggcgcgagcacgggggccgccaggtggatgccgctggcgttgctgacgatgctgctgcccgtggcgctcgcgccgccgaggtggaggcttgcgtggagcctgccggcggccgaggcgcggggggaaggcctcgcgaatgcggatgcggggctcgggctggggctggggctggggcccgggcgtcgggttttggcgccgaacgccgcggcgggggaggcggaggcggaggcggaggcggccgttgccat

SEQ ID NO: 75719 - DNA, 635 bp, Oryza sativa
  Clone ID: PAT_MRT4530_75781C.1
gcacgaggggtagagaacctcgggcagacaaggtatcaattcttgcaagtaaatttccggagtgaagtgtcaatcagaagctgtgatcttctgccaactagctggatgtctgttgcatggtaccctatatatagaatccctactggaccaacgctcaaggatctcgatgcatgtttcttgacatttcactacctatcaacagcgacacgttccagggatgctgaccccagtacaccagcctgccccccttctgggggctttaacagctgcatgaatgcagctggtaagctaacattgcccgtctttggactggcaccgtacaagttgcggagttctgtttggtcgtcgaatgggcctcatgagcagcagctcgcagcctcattgatgcaggcagcggacgactggctccgggaccgtcaagtgcatcatccagacttccggttcttccttacacactacaacaccgtatggagataacaaggtgtttacccctttctttgtaaatggttgtgagcgttttttctgttgtcggctgagccgggctacctgtaacactatatgtttgacgtacagtcgtgtgacgtaacgtttgcactactgaacttctgtatcagtcatcggcttatcgccagaca

SEQ ID NO: 75720 - DNA, 2353 bp, Oryza sativa
  Clone ID: PAT_MRT4530_75782C.1
gggagagagagaactagtctcgagttttttttttttttttttttaagacttggaaaaataaaaaactatttgctctttttacatgctacttatatacagagccaagaggtcatttcagttctatggcaaataactgtacaacttagaagtgttattatatattatatacaaaaagaacacatggactatgatcatgcaaacaaaacattacaaaagttcccccaagtaagcatctcctagacaaaaaaaagttggaggcaaagactaatactcgtggggaacaaaacaaagcttgcttgaagtttaccacggaatcaatttaactttcacttctttgtgcaccaatatttcccatgtaaaagttagttctggacatatctctcctgttgtccggtcagctgggcactgcatagatggctcctcaaattagctatgtacctatggatacgttgctgatcagatgatgaaagggaaaacggcggattcagtggcaaattagttgcttcttgcaatacaaatgtgagcaagatgattgcttttgagtatagcgccaccgatctattttggtatcccaaaacttcctttgcagcaccagttgttccatatattaaagctgtctggaatatgatctccactgcatctggcatctcggtgttatcattgttgtcccgcaacctatgtgatatcttctctgcacggtcatatgccttgataaagccactttcagcccaggaacagacagaaacgagcctggtgaaatccaatccttgtactacatttcgagatggacgatggtcattcttaggcaggaaattgacatgagcttgggtcaaaaaaaatccatcatgtgtagcatccgtggataaactacatgcattaagggcctcgttccaaatagctaatattataagttcaacagatagtgcctccaagtccagccctttaaaaagcttctcctctgcaagttctgtaagaacaacaatatactggttaaggagttgaagccttgtgtaacaataaggtggatttagcagattttctgcagctgttgattcatgggaagtagacaatggggtgcatccattgctttttatagcaacccctctactgactgaatttctgttttggttccaagcagaccgtttaacagtggacctatcatagctggcaggttttgcacctgtaccatccttcattgacttttcaagtgaagacaaaatttccgtggaagtagagttcgcctgaacaagtacatattctcgttcaatccattcccatgaatcaaatgcttgcaaatttctagaatccacgctttcagacttatctttcaggacatccgaagaaatgatctggcatgtatcccttaataaatcagcaggatgattgggctcactgctaatctctcttttcctttgaatgcttccaccagagtaaagggtcgacccagttgttgacaaaaacttgtgattgaagaattcctcaaaagaaattctcttctttggatcaagacgtaggagccctcggcacaggtcaatgaaatcaggatgtaaatcatccttgatttctttagggaacttaacgccgttagattcatggatgttttgcctcagcttgaatagattagccccataaaaaggcaatttccctgtgactagctgaaaaagaataacaccaacactccacaagtctgcctttgcatcgtaatcctcacatcgcataatttctggcgccatataggatggagatccacacattgtagcagctaaattttcttgcacaagagacctagcaaacccaaaatctccaattttcagtgtgatggcatcaccattagttgatagcagaagattctgaggcttgaggtcgcggtgcacgattgatcttcccctcagcatcttgagcccttccgcgagctgccgcatgaagtccctcgcggtggcgtccggcaaccgggcgtcctcgccgcccttcgtcctgtacccctcgaggtcgcctccattgcagtactccagaatcaggtacagattctcctcctggatggtgtcgatgaggcgaaggatgttggggtgggaaagggtggagaggatggccttctcctcgaggattccgccgcggacgcgctcgtcgatcctcctggggtcgatctccttcaccgccacgacatcgccggtgcggaggtgcgtcgcgaggtacaccttcgcgaacgagcccaccccaatctcctccagcagcttgtactccccgaccacccgcggcggatccaccatcctcttctccgccgccgcccccgccgacctcgccggcgccgcagccatcgtcatggtggtcggcgaggcgtgtagcggacgcgtgg

SEQ ID NO: 75721 - DNA, 762 bp, Oryza sativa
  Clone ID: PAT_MRT4530_75783C.1
aacagcttcgtcgtctgggacccgcacgtcttcgccgacctcctcctcccgcgcctcttcaagcacaacaacttctccagcttcgtccggcagctcaacacctacgtgagcacccctaatcctaatcctaatccctttccttgtggagatagtaccaagaagaagaggagcctccccggcaacccagacccggaggcggaggtgatcgcgctgtcgccgcgggcgctggtggcgacgaaccgcttcgtctgcgaggtctgcaacaaggggttccagcgcgaccagaacctgcagctccaccgccgcggccacaacctcccctggaagctccgccaccgcgccgccgctgtctccgccgtgacgacagcggcgccggcgccgaggaagagggtgtacgtgtgcccggagccgacgtgcgtgcaccacgacccggctcgggcgctgggcgacctgaccgggatcaagaagcacttctcgcggaagcacggggagaagcggtggcggtgcgagcggtgcgggaagaggtacgccgtgcactccgactggaaggcgcacgtcaagaactgcggcacccgcgagtaccgctgcgactgcggcatcctcttctccaggaaggacagcctgctgacacacagggccttctgcgatgccctagctgaagagagtgcaaggcttcttgctgctgcaaacaacagcagcagcatcactactaccacctgcaacaacagcaacatcagcagcaacaacaacaacaacaacatt

SEQ ID NO: 75722 - DNA, 217 bp, Oryza sativa
  Clone ID: PAT_MRT4530_75784C.1
gaaacaccacatgcctcgagccagtataaatggcttccaagttggaagttggaacaccaaacagagtaaaggttgtcacagcagcagcagcgagcacctaaccgagtaaatttgcctagctagccctgctgccatcgtgccagcggccacactgatacatcgctttctcgcttgtttattacagtatcatataatactacaaccacgcccccccccc

SEQ ID NO: 75723 - DNA, 255 bp, Oryza sativa
  Clone ID: PAT_MRT4530_75785C.1
atgagtcgtggtgcgctcatcaagaaggggaaagatggatgggaaatgcttgtcaagctcggttctttaaagaatagcatcctcgtcttcctagtgaaaagcgcattgggattctctacttgtggtggtatagtgctgcttttagtgatttggagggtgcctcccgtgggcatgcctgctacgctgattaagcgggtaggcagatggattgatctactcgttcaacttgcttgtgttggtgagttgttctattat

SEQ ID NO: 75724 - DNA, 3045 bp, Oryza sativa
  unsure (1)..(3045): unsure at all n locations
  Clone ID: PAT_MRT4530_75786C.1
atgcgccccctccacacgtggccctcccgcacctcaaccccgaccgcccgcccaatcatcttgcaccacgcgtccgcccctccctggactcctctcggtgggtgggaagggagaggagagagggagaggggggagagggaagcgcagacgacgacaacacaggtcgcgagtggaggaggaggagaagcgagcaagcgcaacgcgattctccgccgcgtcaccgaattggaggattttctgcccttcccttttgccgtggctggagatgcaaccgtcgcacgagggaacaagaaagcaagggagatgtgcagaagaagtcagtgaggtcacggagaagaacagaagaaagaggcaaaagtaaaatgtccaatagtacaagtggcttctcccagaaccaaggacagcatcgaccagccagttcgcattcattggccaaagcccctgcgcaaccccttcagactcctcaatacttgctattacatgataacaagaacatgggacaacttcagcaggctaatcagtttattttccctgactatggatatccttcatatcaatttcctggcattcctctgatgtcaaatgttcaggctgaaagccatcaaacaaagccagctactacaaattaccgaacttcaatagattccccaaaacagtcaagttccgcagaaaagtcacaagatataccatcaagaccattgatgatgacaccccaagaaaagattgaaaagcttaggcgtcgacagcaaatgcaagcactgatagctattcagcagcagcagcagcagtttggtcaagatggttctggcagcgataccatggtacctcaagcgtactcaccaaagagcaaaaatccagattccttagggagttctgttgtcatagatgataatgcaaataaagttttctcactagagctgattccaactggccatgaagagattcagaagagttctgggattcctgatgacccctttatagaagaaaaaatatattatcagcttcaagatgctcttgcgaagttggataccagaactcggcgttgtattcgagacagtttactccgtttgttcacatagtgtctcagagagactaattactagtgacagacgtagtgctaaccagaataaacaactatcttctgatcatggatcttcgcttctgattaatgaaacatctggtggaactaccgaacaagaaagcaaggtagtagacgctaatgctaaatctggagagcaagctgagcataaaaatcatctgaataatgaatattctggaaaaccaaatcagtttccaaaggagggagatgtgcagaagaagtcagtgaggtcacggagaagaacagaagaaagaggcaaaagtaaaatgtccaatagtacaagtggcttctcccagaaccaaggacagcatcgaccagccagttcgcattcattggccaaagcccctgcgcaaccccttcagactcctcaatacttgctattacatgataacaagaacatgggacaacttcagcaggctaatcagtttattttccctgactatggatatccttcatatcaatttcctggcattcctctgatgtcaaatgttcaggctgaaagccatcaaacaaagccagctactacaaattaccgaacttcaatagattccccaaaacagtcaagttccgcagaaaagtcacaagatataccatcaagaccattgatgatgacaccccaagaaaagattgaaaagcttaggcgtcgacagcaaatgcaagcactgatagctattcagcagcagcagcagcagtttggtcaagatggttctggcagcgataccatggtacctcaagcgtactcaccaaagagcaaaaatccagattccttagggagttctgttgtcatagatgataatgcaaataaagttttctcactagagctgattccaactggccatgaagagattcagaagagttctgggattcctgatgacccctttatagaagaaaaaatatattatcagcttcaagatgctcttgcgaagttggataccagaactcggcgttgtattcgagacagtttactccgtttggcccatagtgtctcagagagacaaattactagtgacagaagtagtgctaacaagagtaataaagatgatgatgaagtttcagaagacacatctaaaagaagattcgaagattcctacagacgcacctgggggaccatcagaaaatcaccagaatgggcaagaaatgacactgcagccttcactgtaattcgatttttgctcggtccaattatctccaagatgtggggctagtcataattctgtgtatctgatggcccaatttctctgcgaatggctggtgtttctccctagagtatgtggcaggggacgccttgattaaaggtttcaacccctgttaactgcctcttaagatggccattgccattcccctcagaacctcctctgtcagtgctcattacgggatgtgggctactgtatgaaaatcaccagaatgggcaagaaatgacactgcagccttcactgtaatgtaagatgtattaatggaagattttgctcaaagaccagtgagatcataattctttgtgtatctgatggcccaatttctctgcgaatggctggtgtttctccttagagtatgtggcaggggaccaatgaattgctcaacatcaacatggttagctgcctctaaagatggccattgccagtccgctgatcacctccactgtcagagatcattacgtgatgtatcctgctgtatcagtttcaccatcctagtgccttgtgtcatatcccaaaaaaaaaaaaaaaaacaacactgtacagtttagactggattcatgccgaggtgacactttgggtgtgtatgttagagttcactgaaagagagcgaacatttggctctagaaatacttttgtcgttggaaattcctcgatcttattccccagaaaaaaaaaaaaaaaaaaaaaaaaaaaaaaaaaaaaaaaaaaaaaaaaaaaaaaaaaaaaaaaaaattcgagggggggccnnncccc

SEQ ID NO: 75725 - DNA, 1674 bp, Oryza sativa
  Clone ID: PAT_MRT4530_75787C.1
atgcacttgacacttagccctgggaggaaggcggcgcacgcccgcacggcgagccacccgtgccactacccggaactcgcgcggctcgacggcggtgtgcgggagctcatgtcgtggacggcgacgtcccgctccggcggcgaggggagctcgggtctcgcgctcgtggaggccgtgctcgccgcgctcggcgaggtcctcgagctgccggtggccgtcgcggcgctccacggtggcgaggcggcggcggcggcgcgcgacgacgctttcctcgtgctcgccgacgcgtacggcacgttcgagtcggcgctgctcgcgctgagggagagcgtggcgggggcgcggtgcggcgcccggcgcggcgacggcgccgcggtcgccgcggcgctgcgcgcgcgcaggcggacggagaaggagctgtgccgcctcgcgggggcgatgcgccaggcggcgtcgaggacgccggcggcggacgccaccacgggcgacggcgtgggcgacgcggtggcggatgcggccgcggccatcgcggcggcgtcggaggcggtcttcctggggtgcgccgcgatgtcgccggacatgtcgtcgtcgatggccagctcgccgctatccaaaaactggctggcgaggctgcacctgcacgtcgtaccggcgtccaagaaggtgtcgccggcgacggcgacggcggcggcattggagaggctggaggaatgcattggcgagctggagagcgggagcgagaaggctaaagagtccttgcctttagtagttgagcttaagataagctccaaccaggaacaggctttgtggctcttctctgaaacctgggaggttttggcagcggtgagctcgatgattggaatgcaattgacgatcaggccggcggcggcgaggtcggccagcttgccgagggagcactcgcacccggtcgtggcgcggctcgacggcggcatcagcgcgctcaggtcatggtccgccgccgcggcgaggttgtccggtgttgacggcgacgggaggtgcgacgggctcgcgctcgtggaggacgtgctggcggtgctcggcgagcttcttgggctgccgcaggccgcggcggccatccaccgcgccggcggcggcgccgcatgcgagcgcgcgctcgacgggttcctggcgctcgccgacgcctacggcacgttcgagtcggcggtgctcgcgctcaggcagagcgcggcggagctgcgcgccggcgcgcggcgtggcgacggcgcgacggtcgccacggcgctccgagcgcaccggcggacggagagggagctgtgccgcctcgccgccgcgatgcgacacgcggtgcggcgcacgccggcggcggcgtcgaggacagcgaacgacgccgacggcgaggtggtcggcatcgtggcggaggcggccgcggtgaccgcggcggcgtcggaggcgatcctcctccggtgcgcggcaatgtcgcgggacgtgccggccatggtgcagacagcggcatcgcacaagtgggcgtggcttggcgtgactcgggcggccaagaaggcggcgtcgccggcattggagaaactggaggagctggaagaatgcattggtgagatggagagtggcagcgagaaggtgttcaggaggttgctgcagacaagagtttcactcctaaacatccataatcccttgtaa

SEQ ID NO: 75726 - DNA, 289 bp, Oryza sativa
  Clone ID: PAT_MRT4530_75788C.1
ctaaagaggatgtaaagttgttgccactctccttcattcttaatacaaaagatgtgcaattcttttgcacattctcaaaaaaacttttatttgtgcatcagtacaacagcattgacgatatgaacattgcttaaattttgttgagttaaaacattattttcgtaagtaaaccaaaagaacggtttgtgctttgctaggaggtaatttttcccttcttttcgtgtgtaagaaagaaagataccaaagaaacttttatacccattcccacaaatcccacttcttccacata

SEQ ID NO: 75727 - DNA, 240 bp, Oryza sativa
  Clone ID: PAT_MRT4530_75789C.1
atggaacctactccaatgttcaggctgctgcacgccggccgtgtcaggcacatcggcggcggcgggcctatcggcggcgaggacaccggcgccggcggtggcggcgtcacctggttctgcgtgctgagtagcctccggccagcaccgtgctgcggcggcggcggcggcgcatcgccgacggcgaggaactggattcctggaagcctggaggccagcagcccagcaccaagaaagtactag

SEQ ID NO: 75728 - DNA, 222 bp, Oryza sativa
  Clone ID: PAT_MRT4530_7578C.1
atggcgaggacggcgaatgcgacggcgatcttcttcatctccatagtatcacagccggcgggctttggaggcggtgcggcgtgggtcgacggcgacgcgccgccgcccacgacgactcgaggcgcgcgggtggaggcggtggtggcgctggcgttcaagacggcggtgaccgacgacccgtcgggggcgctgccgacgacccgtgccggtgggccggcgtga

SEQ ID NO: 75729 - DNA, 483 bp, Oryza sativa
  Clone ID: PAT_MRT4530_75790C.1
aaaaacctctccttgaaattttggtttttggtcccgcaacgtttcagtggcagatgaaacactgtggtttccccctcagtttccccccattccaattcccccgccaaggggggggaaaacccacctttttttttcaaaagtaaaccgggtttgggggttcttcccaccgggattgcctaaccctacccacagacattgggttccacgggccccagttttttcaaaaccggtgggttttgacggcttcgccctcgcacccgaggggacctggcggctttggatatcctcctttcgccctggcgatctgggggcggttgatctggggggccgaacccttgtgggtagggggggccttgccctcgtggtccttgggggttttgggcccgcagccagggtctccccagagattgttggggtcgacccccgggggctttttgttgccggggcccgcattctcctctggggccgggttccttggggggg

SEQ ID NO: 75730 - DNA, 459 bp, Oryza sativa
  Clone ID: PAT_MRT4530_75791C.1
atgagacggccggccgggtcatcatcggcggcggcgttggcaatggccatcttgttgggggttcttgtgttgatggcactggtcatggacggcggcgagaagaccggtgcgccggcgatcgccgccgggaggaggatgctggtcggagcagcagacgcagggcagatgaggactctggaggatttcaaggccgatgatcctttccaggacagcaagaggagggtgcctaatggccctgatcctattcacaacagctgtgatgtgagcgatgtgctggggaaccggcaagtcaggaagatctccgggccgagcgtagcggcacgcatcccgaggcatggaaggttccgattcaaggaaggcaggcatatctgtggagcaaagagatggttgcattgcaaggaggaacaaaacaagaacaacattatgatggggtctggctgtggatgttggtgtaactag

SEQ ID NO: 75731 - DNA, 400 bp, Oryza sativa
  Clone ID: PAT_MRT4530_75792C.1
gtgttttttttggcgctccggtgccgccgttttcggggagcgtggttgcctgatccaggaacaggatcggaggccaggtcccatgcatgcatgttaattagactgccactgatcacttgattccattagccattagctgtgtctcatgcagacggacacggcatacaacacacatagatcgatcggaggttgattgcccggtcatgacgacgacggccgccggccgagccaccctgtgcgcggcgagggaggagcacgagctcctggccacccggctgaatgtgaacggtatccggccgtcgcattgcgctcggggatccatcctcatgtacctgaccgtgccggggctctccatgatgcccatgcgggtgatggcctacgacttcatctgctgcgtcaa

SEQ ID NO: 75732 - DNA, 601 bp, Oryza sativa
  Clone ID: PAT_MRT4530_75793C.1
ccgggatcgccatgaagagttcctgctccttaatttccccggtttctttgtaatcagacgggtcggcacatacatctggaccgaataactagcatcccgtcgcttggattcatcaacatcatacttgggttgtttgagcttgtaatctttgcccaaaaagtggagttccagcttgcctgtgtagtcagaaatcggcgaaaaactattcaattcctcgattaaaccttcctccaaaaaccagtggaaactagcgtgttggatttcaattaaatcgggcaacatcgtggtggcaaggtttgtcatggtggctcagaagtctccggaaatttgcggtggttggggttagggaaggccggggagaggttaccaggggggcgatacccccagattaggcaggcaccggtagtttaaaaaggttgcgggcattagtagtggtttgttgggcaagggtttctagggggacatggcgcagggcagcgatcgcctcggccacatggcggacaaaggctggttcattgcgtttaccccgttggggcactggcgccaaaaaggacaaacggtttccaccaacaggcgatcgggggggaccatctgggcactg

SEQ ID NO: 75733 - DNA, 888 bp, Oryza sativa
  Clone ID: PAT_MRT4530_75794C.1
atggaggaggtggaggtggaagaagatgggaaggaggaggattccaaaatcccccaaaccaacctcaacaattccaacctccaaggcgatttcaaggggatggagctaagggggaaaagggtgatgaatccaaaagtcctcagcaagggcactaaggtggaggtaaatgtctctgaatggactagtgaatctgcagctataggaaaaatgcatgttgtctgggtaatagtagaaggactccctgatgaaatgaagcaaaggggagaatgcagtcaaatccaatgtcccagtatagagcaggttgagttgttggctgaggaggataagaacaaggctttgcagattatacaagacagggagttggcactggtgctgcaagagaaggaagcaagaggtcagttcagtggggataaagctgctgaagataacatacctgaacacctcatgttggagtttgagaaggcctccaagtctgctccacatgacgtgtcagtagctcgagagacacaagaaggacagtttgctagcaattgtgaggatggtgtggaagtggaaggtgatgaggaagggaagctgcagctaggagacagtgaagagctttttgattcacaagattccgaggatgcctttgccaaaagcttgggagtggtgctacctaaagaggagatgggaagtcaagaggaggaaagaagggcaagcaagagattcagagacagggaggacaagaagactctagagatgacaatgaataggaaagaagcacaaaatgcattcctcaacaaaggtcagggctcatcccctcttcatcatgattcaagtatttctcttgctaacttagctagtcttataggagtcagccttggctgctctattgaggctgttgattag

SEQ ID NO: 75734 - DNA, 1386 bp, Oryza sativa
  Clone ID: PAT_MRT4530_75795C.1
atggcattcctctcgaaattctttccgatgggcaaaaccaatgcccttcgtggaaggatttccaatttccagcagacgagagacgagtccattcctgaagcatgggaacgtcctcatcatgggatggacaactcgctaatcctgcaaaatttctataatggactcactacaatgtcccatgaccatctggacgcggcagctggaggagcgttcttctctaagacggttcgaggagccattgatctaatagagaagatggtctccaatatgggttggagcaaggaacgactccaaacccgacagcaaggtatacacacagtcaaggagacggaattactcgctgccaagctagacctcctcatgaagcgattggacgaccacgacaatcggccacaagacaccgtcaaggccttggacttacacgtcacgtgtgaggtttgcggtggcacgggtcattctgggaacgactgcccggaaacccatgaagaggcgatgtacatgggcaaaaacaacaacgagtatcgtccacaaggaggtcaggggtggaaccagccacgcccgtactatcaaggagaaaacaacaacagtaacttctctaaccaaccctccttgaaggatctcatttttgtgcaagctaaaaccactgatgctttaagcaaaaagctagctgccaatgacaagatcctagagaacatcaacgttcagctagatggtttcacttcctcttttcaaaaccaactgatcttcaataaaatgatagaaacccagctagctcaattggcttctctagtccctgcaaatgaaattgggaggattccgaggcggggaggtaagtccactcgtgatcggccgtatcctaaccctgcaggaactaatggggtagctagagaagcgccatctagtgactcggctaacaaagaggttcaaccagaaaaggccgtgccgcaagaatactacgacacacgattgttgtcgtttcctcaacggagtaggaaaccatcagtagacgagcagttcgctcgttttgttgaagtaatccaaaagattcacatcaacgtgtcgttgttcgatgctatgcaagtgccaacatatgcccgttatctcaaggatatactcaacaacaagagaccgctcccaacaacggaggtgattgagctgacggagcaatgcagcaacgtcatactccacaagctctcggaaaagaggaagcatccagggtgtcccacgatcacttgctcgattggggcacagcagttcaaccaagcactccgtgatctcggtgtcagtgttagtgtcattccaatggacgtctttgacaagctcaacttcacggtgttggcaccaacaccgatgcgcctacaactggctgactcgtcagtccgttaa

SEQ ID NO: 75735 - DNA, 255 bp, Oryza sativa
  Clone ID: PAT_MRT4530_75796C.1
atggagatccaatatgagcttaattcggatagggatccgaacaggagtcctacgggtcttggaggcccgagtgatggatcctatatattcgtgaggggtgtgaccggcggatcattgcatcaccgtgggagtacggcgaggagaacgcacgaggaggagaaggtcgagccggtgcgatcgactacttcctctacatcgacatgcgctacttcgcgagaattcattcgatttctgtcttgtatttgtcgaaaagat

SEQ ID NO: 75736 - DNA, 2169 bp, Oryza sativa
  Clone ID: PAT_MRT4530_75797C.1
atggatgcatacgaggcgaccaaggtggtgttctcccggatccaggcgctggaccctgaccacgccgccaagatcatgggcctcctgctcatccaggaccacggcgacaaggagatgatacgcctcgccttcggccccgaggcgctgctccacagcgtcatggcgcaggcgcgcaaggagctcgccctcctgccgccgcctcaggcggcgtcgtcgtcgcccaccgtgccggcagcccactcgccgttcctgctgtcgaggcagaactccggccgctgccccgcgccgtcgccgtcgtcgtgggcgcaggcgcagccgttctcgaggagtaacagcatgggcaatggcggcgccgcggatgagatggtcggcgctggggaggagctaatgagccccttgaacggcgggggaggcgccgcggcgaacgccccgcccttctttcctcggggtggggacgcgctcctggacgacttcgagctgcaggagcagctcgcgttcctgcacgacggagccgggggcgtgaaccccgggcatgctctccaggcgttcgacggagcggagtgccggagccccggccccggcgagagcggcgggatgctcccctacggcctcgcctgggccaacggcggccctgggcaccgccgcagcgcgtcggtgaacgagctctgcctcggcggcgacggcttcgggtggaaaccttgcctgtactacgcgcgcgggttctgcaagaacggcagcacctgcaggttcgtccatggcggcctctccgacgacgccgccatggacgcaaccaccgccgaacagcagcagtgccaggatttcctcctccgctccaagagccagcgcctcggccccgccgccttcccgttcacccccacaggctctctccctgcctcgccatccgccaccagcaagtgcctcagcctcctcctgcagcagcagcagcagcacaacgacaaccaaagagccgccgcggccgcgctgatgctcgccggcggcgacgaggcgcacaagttcatggggcggccgcgcctggaccgcgtcgatttcgccagcatgatgaaccccgggtcgcgccagatttacctcaccttcccggccgacagcacgttccgcgaggaggacgtctccaactacttcaggacgcgatctgattggcatttttgcattgctgttcttggcaacgcgccgcgctgcagcatctacgggccggtgcacgacgtgcgcatcccgtaccagcagaagcgcatgttcgggttcgtcaccttcgtttacccggagacggtgaagctgatcttggccaagggcaacccgcacttcatctgcgacgcccgcgtgctcgtcaagccctacaaggagaagggcaaggtccccgacaagtacaggaagcagcagcaaggcgatttctgctgcatgtcgcccacggggttagacgccagggacccctttgattttcaccagctcggtgcaaggatgctgcagcactccaacagcgcgaacgagctaatgctgcggcggaagctcgaggagcagcaacaggcggcggagctgcagcaggctattgatctccatagccgccgcctcattggcctccagctgctcgacctcaagtcttctgccgctgtccatgcggcggagacgacaacaatgtctctgcccactccgatcaccaatgccttcacctccggccaacccggtgccaccacaatcgtcgagtcaccgcctagctctactgggcaactgatggcgagctgcggctctccatcggaggggaaagttgtcaatggtggtaataaggcggattctgccggtgaggttacccgcaatgccgatagtgaccaaagactaatgtcattaactcatgaacaacaagcctacaaatctgcaattattccgtggctgaaagtttgcttcaccattgtttgtgcatgtattttgagcagtggtgagcacaacttgccagacagcccgtttgcttcctctaccaagtcgaccgcattctttaccgcaaccgctgccactgccattggtagcgagggagatttcaccaccggtagtagctgcaatattggtggcagtgcggtcggcagcgccaaccctctccggcctcccacattggacataccttcgccaaggacctgcttcttccccatgcccaggaatacatga

SEQ ID NO: 75737 - DNA, 259 bp, Oryza sativa
  Clone ID: PAT_MRT4530_75798C.1
cttcagtgccatttcttcctgccgagatcttgaccacttgggtcagcatccctatcttgagtcctatgacattactgttgtgttctctcttcacctggatgaaacttgaaggatttacagttcatgcaacaccccactcctgtaaccatctattgtaaaacactttggcgcccattcactgccctatctcacttccttaaacctgcgctctctgcccaatttgaaagtgagacacctcacggggctagggattaaatgg

SEQ ID NO: 75738 - DNA, 566 bp, Oryza sativa
  Clone ID: PAT_MRT4530_75799C.1
gccaataatggtaaaaatctacctttggtcactatcggcattgcgggtaacctcaccggcagaatccgccttattaccaccattgacaactttcccctccgatggagagccgcagctcgccatcagttgcccaggtgacaatgtacagtggatattggcaagttaagagaacttgattgattgacgtctaaagaacgagttcgatcaatgctatctatgcttactagagctaggcggtgactcgacgattgtggtggcaccgggttggccggaggtgaaggcattggtgatcggagtgggcagagacattgttgtcgtctccgccgcatggacagcggcagaagacttgaggtcgagcagctggaggccaatgaggcggcggctatggagatcaatagcctgctgcagctccgccgcctgttgctgctcctcgagcttccgccgcagcattagctcgttcgcgctgttggagtgctgcagcatccttgcaccgagctggtgaaaatcaaaggggtccctggcgtctaaccccgtgggcgacatgcagcagaaatcgccttgctgct

SEQ ID NO: 75739 - DNA, 828 bp, Oryza sativa
  Clone ID: PAT_MRT4530_7579C.1
atggtgaagctagccaccgccagggaggcgcgcatgtacggtccggcgctgaccgtgcggcggtgggagtacatcaacgccggggcgtacgtgttcgcggcgctgctcttggccgtggcgctcacggcactgtccgcggacggcgggggcgggggcggggccagcaggacggcgctcaccgtggccgccgtggcgctggcgctcgtcgccgccgtcaacgcgcacgacctcgcggcgcacctcgccggcgtggactgccgcgtggggctggtcaggtacaacgcccagctcggcctcgtggagctcctcgtgccggcgctgcacgtggctgggtgcgtcctcgccgtcgtcgccatggcctttctgctctcccagggcgagagggagacgcacgcggcgaacacgctgctcgccgcggcgctggtgtggctgctggggtcgatactcaactcgtgccaggtgtacgagcgcgccgacgggcgggcgcagctgctgcagtcgagcgtgcaggtgccgatgcttctcgggagcctgctcttcctggtcggcgccgtcgtcaaccgccgacgacgccccgagccgccggtgctagtggggcggagctgggcgtggacgatgtgcgtgttggggagcgtgctgtggctggtggcggcggtgttcaacatggggaaggtgttcgtgatgcaccagagcgacgcgccgcggctggagaagctgcgcggcggcgcgcaggagcggctgagccgtgaccgggagggacgcttgccgctcaactgggaggaggccgctaggagccggagggttgcgctgcccgccgagctgcgctga

SEQ ID NO: 75740 - DNA, 391 bp, Oryza sativa
  unsure (1)..(391): unsure at all n locations
  Clone ID: PAT_MRT4530_757C.1
atggcggcgacccctctcagcgtgggaaaggcggcggttagggagcgacggcgacggcagatcccggcgaggagacggcggatccggcatcaccttcgccggatctggccatcccctggccggatccggccggagtgggcgctggtggcggaggaggccgcggcacggcgacgcgtcaagggcggcgacgcgacgacgacgactcgcacggcagccggcggcggccgttgcgacggcgagatgcgcgcgggcggcggngctcgcgccccccggggggccaacgacggttgcaacgctgccgaccctggtgttnntggtccgagctatggcggatggacggnngcnnngnnnaataaagatatgtgntnggggggnancngaggcgctggag

SEQ ID NO: 75741 - DNA, 592 bp, Oryza sativa
  Clone ID: PAT_MRT4530_75800C.1
gacccgacttttttccccctgcgcgtacgcgtgatggcgcgtgaggacggagaagatgagacgggagcaggaggaggaagagaaggggcccatccattccatcgcccgacgcggcccgctgcggagaagaggaggtatcgaagccatagctctctcccgtctcctctcctctcctctcctcccctcctccgccgatggggaggattccttccattccatccgcgcatccgctgcctccgcggaatccgagttccgcgtactgcgctgatctccggcatcggatttcggagagggtggggtgttctctccgctcggggttgttccactcggttctgaactgggagtgtgagtgtgcagggcaaggttgttgggatttcacgtcgggtagagactaccgcgactgtcctagttatgtcagtgccgttgtatttttatacaaagcggtagatctggtggaaggatatgaactgttgcagataattgttgattctgatttgtactggtgtgacatgtgcccccatgtgttcaacttgggtagaacatgttttctgatgcttggattgtttattcagtctgcaattctacttatggt

SEQ ID NO: 75742 - DNA, 351 bp, Oryza sativa
  Clone ID: PAT_MRT4530_75801C.1
atggcagtggctccgggcgctggtccatggtggatcgggtccatggaccggggagtgggtggcgcaccacgaggtgcacacgtggcgccgacgtggcgcacacgtggcggccacgtggcagtcatgcgggcggcgggatatgatggctccgatccactcggggtggatcggacggcggagggggcggcacgcggccggcgtgcacgggcccggctcaagccggcctggcgcccatggcgcgcggcggcgcggctcgacgcagcggcggcgcaaggcggcgaccgggggcgaccggccggcggcggagggcagcggcgaagaggcggcgcgggcggcgctagcggcggctga

SEQ ID NO: 75743 - DNA, 782 bp, Oryza sativa
  Clone ID: PAT_MRT4530_75802C.1
cccacgcgtccgcactgtcaggttcataccaatccttgccctaaagtgcaattgcatttgtctcccgtcggtccctatgattaataaatatatttggtccttgtgattcaaggcttcctaatttgatttttcaaggaaatcattaacattaggtggttagtactctccaacttaactctctaatgtgtcatggacagtctggatatagaaaattacactttggatgtcctttgttcaatctatgtttttactttgccttgcatttttagaaaatgttgtgcaagaaatttttagttcagaaggattaaacgaacatggctacttctaatgttgctgagaaaattcagaggcagtatatctttattgtttattcttttgacaaggtcgggagagatgatgggtggggaatatccggaaatatgccaatgtatagtatatcttaattgttcagtgtcactgtttttcttatatttagctagctggatagtgattctgttggtagctaaatttacggttatttgataaagtaataccatatcatatttacattcttgtgtgtaaatctggtcatatttacattgttgtgtgtaactcttcctggtttgcttttcagtctaggatcgagatttacatatcaaatagtcaagtgcacttttggaagtgcaatccgatgcaagtaaaagcaattttggacaacacgatcaaaaggattcatttcatttgctgtcagaatagtaatatttgttatttaatgaggtttgttataaattttaattttattc

SEQ ID NO: 75744 - DNA, 1416 bp, Oryza sativa
  Clone ID: PAT_MRT4530_75803C.1
ctagctctcttcctccaggatttgttgaagtacgaatgtgtttttaagtttttttttattaaactgtatattctaacatcactttatttccttccttttttttaccgcacattgtaaacctgagacaaactatgtgatcctccatcacaactcattctaaaggcttctctatcttcctccaaagcaaaactccaaacaaagccaaaaaataaaacctcactcatcacatctcttagctaatgaggaactaaaaggccaaaaagggtgctcataaaaaaggctagcaagtatcactgtctgtcactctgtctagctctcttcctccaggacttgttgaagaagagatgggctcctaacaaaccttcccttcatccgaggccggcagtctgcgttcaccttccggacctggtaccggatcttcttcgagaacagtcgggtgcgccgcttctccttgtacctcatgacgctggcttccctgatgccaccagcaccatttccattctcagggaacagatcaatatctgcaagtttagcccgcacttcggcggccgacttgggcgactccggcgcgccgccgtcggcgaacatcgaccccttgccggaccacgccttgagcacgtcgtcggcgtcgagcttcagccccaagccggtcttgggcgccatcgtcccgtggcgcgagccgaggccgagctcgaaccggccggcgaggccgaccaccatgaggctcctgaggtaagggtgtatgccggagctggagaggatggagtcgtcggaggttgtggcggcggctgtgttggtctccacggtgaggctgcccatgatgccgtcgatgcccccggccgcgccgtcggccgcggcctcgtcgacgtcgaggaagcagtcgtcgtcgaagtcgagctcgccgggctcgtcggtggtgtgggggctcgccggtgacagcggcgccgggtcgcggaactcccggaaagcgctgctcaccggcgccggcgacgagcagttctgccgcggcgtcggcggcgtgtcgcggaggaggaatgcggcgtcggcgaggacggggagcggcgggaggaggtcggaggaggggtcgaacaccgccgacaagccggagagctgcctcgtcggcggccgcgacgccgtcttggggctcttcttgacggggaagacggaggggtggatggacgcgagcagcgccgccgcctcgttgtacgcctggttcggccgcttccgcggcgccctggcgcgcttcagcgacaccgacgtcgccgacgacgacgacgtgttcgacgcctccgacagcgtcgacgacggcgacgagtgcgccggccgcagcggcgacgagtgcgcgcccggcgacgtcgccgccttcacgatgtccaggtccagcctcaggccggtcggtatgcaagaagacgacat

SEQ ID NO: 75745 - DNA, 2634 bp, Oryza sativa
  Clone ID: PAT_MRT4530_75804C.1
atggacgacgacgacagcgggatccaggaggagcctgcaccgcccccgccacccccgcctcccccgccgccgccgccgccgctgcggaggctcctgacggcgacgcggtcgggtggctcgaggtgggtggacggcagcgaggtcggctcgtccgagtccgcgccgtggtcgctcgacggtgaccgctccctccgcctctccgtcgactccgccgcctccgccggtggcgccagcggaggcggaggcggaggcgggccgctctcgcgtgcgtcctccggcgcgttccggcggcgcttcgggaagcagccgaggcgggtcgactccctcgacgtcgaggccatgtccgtccgcggcgcgcacggccacagcagcaaggagatatcaatgctgagcaccgtggcgatggcgttccagaccctcggagtcgtctacggcgacatgggcacgagccctctctatgtcttcagcgatgtgttcagcaaggtgcccataaagtccgaggtcgagattcttggagcgctttctctggtcatgtacaccatcgcgttgatccctttcgcaaagtatgtctttatagttctgaaagctaatgacaacggagaaggaggcactttcgcgctgtactcactgatctgcaggtatgcaaaagttagtctgcttccgaatcagcaacgtgtggatgaggatatttctagctttaggcttaagttgcctacccctgagcttgagcgagctctatctgtcaaagaatcccttgaaaagaatccagtcttcaaaaacattcttttgttcttggttctgatgggaacttctatggtaatcggggatggcattctcactccatcgatgtcagttatgtctgctgtcagtggtctgcaaggtcgagttcctggatttgggacagatgctgttgtaatcgtttcgatcctgtttcttgtactattgttcagcgtacagaggtttggaactgggaaagttggtttcatgtttgctcctattttggcactgtggtttattaatttgggaaccattggaatttacaacttggctaaatatgatatatctgttgtgagagcattcaatccagtgtatatctatttatttttccagacgaatggtataaaggcatggtcagctcttggtggttgtgtcttgtgcatcacaggagctgaagcaatgtttgcagatctggggcatttctctgtgaaatcaatacaggtagcattcacagctgtggtattcccttgtttgcttatcgcttacatgggccaagctgcatatttgatgaaatatccatttgctgtagaaagaatattttatgattctgtaccagaaattcttttctggccagtatttgtgattgctacacttgctgctatgattgccagccaagctatgatatcagcaactttctcttgcataaagcaggccatggctcttggttgctttcctagaattaaaataattcatacatccaagaaagtcatgggccagatttacattcctgttatgaattggtttctcatggtcatgtgcatcatcattgttgccactttcaggagtaccaacgacattgccaatgcttatggtattgctgaagttggagttatgatggttagcactgcactggttacgttggtgatgcttcttatatggcaaaccaatttgttcctcgttatgtgcttccctgttatttttggttctgtggagtttgtttacttaacagccgttctgtcaaagatacaagaaggaggatggttacctctggctttctcatcattgttcctctgcataatgtacacatggaactacggaagtgtgttgaagtaccagagcgagatgcgtgggaagatttccctggactttatccttgacctgggatccacgcttggcacagtaagagttccagggattggtcttgtgtacaatgagctggtccagggaattccgtcgatctttggccatcttttggtcacactcccagcaatgcactctacgattgtcttcgtttgcataaagtatgttcctgtcccatatgtcccatttgaagaaaggttcttgttccgaaggattggccaaaaggactaccatatgttccgttgtgttgcacggtatggttacaaggatgtcaggaaagaggaacatggcttctttgagcagcttttggttgaaaccctggagaaatttttgaggaaggaatcccaggaaatggcacttgaagcaagcgcaatggcagtagagcgtgacgatgtttctgttgtatctgatatcccttcatctcctgttgaggctggggatctacatgttccactgctttctgatcagaggctgggtgatggcacccaaacattcatcaccgaaggcaatacacctgtgcttcccacgagttccatctcagaagaagaccccagcttggagtatgagctggagtcactgagagaagccatagcttctggattcacatacctcttggcacacggtgacgtgagggcgaggaaggaatcgttcttcacgaagaagttcatcatcaattacttctacgcgttcctcaggaggaattgcagggctggaaccgcaaccttgaaggtccctcactcgaacattatgcgtgtcgggatgacatacatggtgtga

SEQ ID NO: 75746 - DNA, 664 bp, Oryza sativa
  unsure (1)..(664): unsure at all n locations
  Clone ID: PAT_MRT4530_75805C.1
anttaatgcaacattattgcattaatgcaatgagaccatcgaataatggaatcgatacaccgatttatcagtacacccattctcacacaataatttagagacaattccggagttctggaaacatggtaatttcgcttccaccagacaaaacgcaggacacgataagagctatacacaacgggctctcagattataggcctccaaagaggctataagggtcatccgtgctgtgcaccgcagcaaggactgcagcaaagcacatcttgatgcaaaatatgttgacggcatccgcttctgccacctccaccagaccaccagccggatgacatcctcatcagcttattagctgtccatccaccttcctccctgcttcctctcgcgcccctaactctggccatgatgtaaggtttacctagccaatgttacctacacatacagagtaacagagagcagcaactagattgctggttttcccgacatcaactcagttgcgaatatgctaagcccgagttggtgtgcagggtatgcctcaagatactgtccggccatagcatatcgaagcaatgtgacgatcttggcacgttctccttcacatggttgcttggaaaacagatgttccacagtcctgtgtctcgccacaaatttccggagcaaggcgaccggg

SEQ ID NO: 75747 - DNA, 263 bp, Oryza sativa
  Clone ID: PAT_MRT4530_75806C.1
gcacgaggggggatggaagcttcatggcattgtaaagccataaatcgttgtaactaaagatagatgccattttgtagctgttttcttaatcctcatttagtcatttttcctcttgtataagttgtaacaatcgttagatctcaccgaaggaataacatgaatagatagatgagataaatgaaaacctctagatgcattaaataccagtactgtatctgataaaaaaaaaaaaaaaaaaaaaaaaaaaaactcgagggggggcc

SEQ ID NO: 75748 - DNA, 618 bp, Oryza sativa
  Clone ID: PAT_MRT4530_75807C.1
atgactgcccccggccgatctccctcattggagcttcgcaagccaaacccttgcgccaccaactccgcctcgccgagctcttcctctactcatgcttttcctctccatcgccgagccaccaccacgccaatcacccgcacctccaccacgctcccttctggccccgccggaaagcccaagtcgcagccgtcgttgtcgtggtgcatgagtgggcggctcgccgccgaggaagatgagcggcagcggcagctcggcgacgaggaggggcgactcatcgacgaggaggagcggtggcggcggctcggctcctcggacctacggtggatgggcacacgacaacgacgacgaggagtggtgcggcagctcggctcctcggacctgcggtggacgggcgcaccacgacgacgaggaggagcgatggtggcggctcggctcctcgcccccccgacaggaataggcttcagcctcctccgcctaactgcagtgcctgatgatcctccaggccgagagcaggacctgactgccatgatctcgaataacaacacccaggctggcttccccgccgagctggaagaaccaagattagaatcaagcctagcatgcagcaccaacttgtaa

SEQ ID NO: 75749 - DNA, 419 bp, Oryza sativa
  Clone ID: PAT_MRT4530_75808C.1
cacgaatggcctaattggttgggccttcctttcccaccttgatccttgatccaatttcctccctatccacttttccaagtgaccgtggcttccacgttttggtccctgtaaatgtccaattttttggttagtgggctattgtttttctgccaactggcacgctatttcctggtcccgccacccttgatctggtaatcctacgcagttgcacctgaaatagcaggactacacggagcccaagtacacttcatagcccaacacggggccaatggaatggtggctgtgtagattaacaatgtaactagccccttatatcattttcccttttttgtacttctgagaagccagaacgggaacggcatattacgaataacttgcaatcacaagctactttactccaaaaaaaaaaaaaaaaaaaa

SEQ ID NO: 75750 - DNA, 435 bp, Oryza sativa
  Clone ID: PAT_MRT4530_75809C.1
atggcgcgcgaggtgcgacatccaggggcggacgccgaggcggagctcaccgtcgaggaagcggcggcccatgcctactccaagagcccacggcgagcctcccacctacctccccaccacgtggcctacctacctccccacctcgggaagaagctctccttggccatgctcgccttctgcgtcatgcacacccacggcctgctcccttgcgtcgagtcctgcaacgtcttcatcttcaccgcgctcggcctcaggctccccaagatcgccgagcctcgcaccaacgcacagcacccatccaaccatcgcctcccaggcagacaccccaccgtagcttcatcgccactgctgccaacgcccatctcgtctccccgccgagagagagaggaagagagatggaaggagaaggggggcaaagtgacatttcacaggtga

SEQ ID NO: 75751 - DNA, 678 bp, Oryza sativa
  Clone ID: PAT_MRT4530_7580C.1
atgagggcctccactctccgcgccgcggctgctggtactgaggctttgagggagaagggagaaggcgacggtggcggtgggggaagggagaaggcagcggcggccggcggggattgggcatgcggcggcggagttagaggctggactggaccgaaccttcgttggattgggccagaaatgggtctcaatgaagcgctgcagctgctggcggaggagtggcgcacgacggctatcctgcctcctccctcatcgcgtgcgctcggtggcgtcgccggaactcctcccccgcctcgcctccggcttctcctccgccgtcggttcgagtccatgggacactatcacactagagagaggagcacgagccccatagccccgccgtggatggtgctcgcggaggcggcgctgcggctgtggctggcggcggaaccacgggagctaagggtggagctgggactgctctactcccgcgccatcgcgcgcagagtggagttcgacgccacggtgctcgatgatgccgtgccggggatcttcctggccagggtcgactgtatggccgtcgccgaggtcgagcttgtcgcctcgccctggtccgcccccgggctcgacgccgtcgtgcgtggcgtgacccatcggccggcctgcccaagtcccagagaggagcagagaggagaagagtga

SEQ ID NO: 75752 - DNA, 563 bp, Oryza sativa
  Clone ID: PAT_MRT4530_75810C.1
attctttgagcatgagttttaacagatcatttgtagtaggagccatttcatggaaaagctcaaaacagactatcactgcagggtctactatgtatgccgagtttatagcatgctatgaagcaacggggcaggtgaactggctaaagaagttcatacccggtttaaaggaaaaagctaaaagaaatagtgagatcaagggggagaatgttagatggatctccctctccttgagcccaacggctcaagggggccttgacccgcgccctgatcgggggcgcccagcccaatggctggtgggcctccgtcaccctgcgccatataaagaggggtggaggacgggtcgacacaagacacgaggttcaacccgccaccgccaccgtgccacctcctctccatgcttagcctgtccacctgagcctgcagcgcgctgcactggacctgcacgtcgcgacgaagacaatgacgaacacctcaaagctttgaattgatgaacggtggcggcggagatggccgtgatgaaaccgtacctggaggcgggcgaagtcctcgcggaggcggcggag

SEQ ID NO: 75753 - DNA, 588 bp, Oryza sativa
  Clone ID: PAT_MRT4530_75811C.1
atggttggatgggtgctgtgcgttggtgcgaggctcggcgatcttggggagcctgaggccgagcgcggtgaagatgaagacgttgcaggactcgacgcaagggagcaggccgtggacgaagaacttctaccgctgctgcacgccaccactggcgccattggagcgaacaacggcaaggcgggcggtgaggaggacgtgctggaggaggtctggaaggcgtggtgcaggagggagtcaaggaggtggccatcgtcgtggcggggcgagggcgtgaggtggaggatgaggcgggagaggcggagtggggtgagctgggggaggaagcgggagagggaggcgggaggcgggcgacagcatggtggagaggtggccatggagggcggttacgaagaggaggtgaggtcctcgccggcgagcggtgggagggtgaagtgcgccagcagtagcgtgggcgtcggcgccggcatcgccaatggggacggactggaagcatgggccgccgcttcctcgacggtgagctccgcctcggcgtccgcccctggatgtcgcacctcgcgcgccatcgtgtgcgtcgtgccggtcgccaag

SEQ ID NO: 75754 - DNA, 1503 bp, Oryza sativa
  Clone ID: PAT_MRT4530_75812C.1
gcacgagggtacttgcagtgcagttggagcgcgagcgaagcgagcggccatggcgttccggctcagcaacaacgtgatcggggcgctcaacctggtgacgctgctgctctccgctcccatcctcagcggcgggatctggatggccacccgcggcgacggcggcgagtgcgaccgccacctctcctcgccggccatcgcgctgggggcggtcctcatggccgtctccctcgcgggcctcgtcggcgcgtgctgccgcgtcacctggctactctgggtctacctcctcgccatgttcgccctcatcgtcgccctcctcggcttcaccgccttcgcctttgccgtcaccaaccgtggcgccggcgaggccgtctccggccgcgggtacagggagtaccgcctcggggactactccacgtggctgcggcgccacgtggggagcagcaagaactgggacaagatcaggagctgcctcgccggcgccgacgtttgcaggagcctgcaggacaggaacgagacgtgggcgcagttcgtcgccgacgacctctccccggtccagtccggctgctgcaagccgcccacgagctgcaacttcacgtacggcggcggcacgcggtggggcaagacggcgaggctgagctccgccgacccggactgcgacgagtggagcaacgacgccgacgaggtctgctacggctgccggtcgtgcaaggccggcgtggtggccgcgctcaagagggactggaagcgcgtggccatcgtcaacgtcgtcttcctcgccttcatcgtcgtcgtctactccgtcgggtgctgcgcgttcaagaacagccggcgcgacacgtcgaggaagcggcggcccatgcctactccaaggagcccacggcgagcctcccacctacctccccaccacgtggcctacctacctccccacctcgtacgttggtgatggcaaccggcctcgcggctcacttccagtccgtccccattggcgatgccggcgccgacgcccacgctactgctgccgcacttcaccctcccaccgctcgccggcgaggacctcacctcctcttcgtaaccgccctccatggccacctctccaccatgctgtcgcccgcctcccgcctccctctcccgcttcctcccccagctcaccccactccgcctctcccgcctcatcctccacctcacgccctcgccccgccacgacgatggccacctccttgactccctcctgcaccacgccttccagacctcctccagcacgtcctcctcaccgcccgccttgccgttgttcgctccaatggcgccagtggtggcgtgcagcagcggtagaagttcttcgtctgcgtgcaggggaagaagctctccttggccatgctcgccttctgcgtcatgcacacccacggcctgctcccttgcgtcgagtcctgcaacgtcttcatcttcaccgcgctcggcctcaggctccccaagatcgccttatccgctcacaattccacacaacat

SEQ ID NO: 75755 - DNA, 279 bp, Oryza sativa
  Clone ID: PAT_MRT4530_75813C.1
atgggcggcgtctccacccgccccgccccgccgcagatggatgcggcgtggggaggagccgcgcgcgggcggcaggcggcgggcggcggaggctgggcggcggtgcacgagctcctcgccggacgaacgctagaccggctccgccacgtcggccgcgaggaggtggcgcgcctcgtcggctcgctcagtcggagtgccgccaacggcgagcacgtcgacgccgacgccgcgctgatgggcctcaccagcgacatcgtctctcgcatggtgaattggtga

SEQ ID NO: 75756 - DNA, 660 bp, Oryza sativa
  unsure (1)..(660): unsure at all n locations
  Clone ID: PAT_MRT4530_75814C.1
cccacgcgtacgcccacgcgtccgctttgccacgtggtagcagcactttgtactactccactccaaaaaagctagaacttttggtagaaaaattggtttcatgtgtttagaattgtgatgccaaactgaaaatattatctctctatataagtggttgatactatactgttttagctgtactaacattactattaaaattttctactacctttgtcccaaaatgtaaaaacttctagccctatatcttgaaaggtatgtttaggtacacagctcaaaattgcgatatattttgggatggaggtagtatattttttttcaggtgtactgatgtcactaactgcacataacggaggattgttgttgagtagtgcacttgcatgttgcacttaaaaaacatcattttccatctgttcattttagctttgcatatatttaatatggaccaccagtaggcatttaggtcttctgtttttagcatccaatagtccaatgtgattctagcgtacagaggaaaaaggggtagcattgaaacctctgtaaactcattgaaattggcatgtaatttgccctttttttctatttattcaaacttccgatacctttcggttttctcctttaaaaaaaaacntnnnnnnnnnnnnnnnnnnnnnnnnnnnnnnn

SEQ ID NO: 75757 - DNA, 386 bp, Oryza sativa
  Clone ID: PAT_MRT4530_75815C.1
aaagcaatggcgtccctgagcaagcgcggcggcggcggcggcgaaggggagggcatcctggcgtcatggatggcggcgcatgggcgcgaggcggcgagcagggcgaagaaggtggtgcggagcacggggaaggcggcgtggatcgcggggaccaccttcctggtcctcgtcgtcccgctcatcatcgagatggatcgcgagcagcagctcaacgaccttgagctccagcagcaggcgctcctcgggcccgcgcccctcaaatgatccatccatccatccttaacttctactaatagtgttctttgcctgtctagtcagacaaaatcaaacttcttgttttcattaatttcaccattatgctgctctgatgagaaaaaaaaaaaaaa

SEQ ID NO: 75758 - DNA, 138 bp, Oryza sativa
  Clone ID: PAT_MRT4530_75816C.1
agcgtacgccaactaccaccacctgtgtgttttcctgcactctgcttgcttgtggtgtgactgtgaaagtggcggaccctccctagaaaggctgacacatcgatcagatagtggcgttccaagaagcagttcttgctc

SEQ ID NO: 75759 - DNA, 339 bp, Oryza sativa
  Clone ID: PAT_MRT4530_75817C.1
gggaaaggaaaaaaactggaaaattttaaaaaagccaaaaaaaaggggaatggaaaaaggaaaaaaaaaaaccccgaaacattagggaaaagttttttaaaaaaaaagggggaaaattaaaaggggggggttaatttgacaaagggcctgttttaacaaaatggcccaaaaaaaggttaacccaaaaaaactttccctatgaggaaaaaaatttttagggtttcccaccaccgggggaaaataaagggcctttaacccccctttgggaggaaccccccctgaaggggggttttagaaaatttgcccccccggggcttttgggcttttttaaaaaccggg

SEQ ID NO: 75760 - DNA, 3015 bp, Oryza sativa
  Clone ID: PAT_MRT4530_75818C.1
atggcgtggaggccgcgagccgccgcgccagctcagccgcctgcgcacctcgccgcctcgccggtcgcggcgtcgccctcgtccacagccccctcgcggcttgcgccggcgcgcctgcggcctgcgcgcgtcgccctgcgcggctgctccccgcccggccgcccgtcggccgtcggccgtcgcccgtggcggtgcggcccgctgttcaacgcgcgcactcccgcgtcgcgccgtgccgccgcccgccgacgccgcctcggcacctcctgccctcctcccgtcgtgtgtgacaatgcgctcgcgatcgcctactcggctactcggctactcctcctcctcctctccccatctcgtgccgtgcgttggtacgcttcatgggcgcagatgcctccctcgagatcgctcgcgtgccttctgctgccgccgctgctgctgctgctcgagtccgtgcgggacgcggacgcggggcccctggccgtggagatcgtgcggcccagcttcacggcgactagctacgactacgtcgacaccggcggcgcgttcttggtgtccaggaacggctcgttcagggcggcggtgttcaaccccgggaagcagcaggccagcttctacctcgccgtgctgcacgcgccgtcggggacgcccgtctggtcggccaaccgcgacgcgccgacgagctcgaccggtaaggtccagctctctgtgggagggatcaccgtgtcggacgccaatgggacggtgctgtggtcaacgccgccgctgcggtcccccgtcgcggcgctccgcctgcaggacaccggggacctgcagctgctggacgccgggaacgccacgctgtggcggtcgttcgataacgccaccgacacgctgctgcccgggcagcagctgctcgccggagcatacctgtcgtcggcgaagggcgctaccgatttctcccagggggactaccggttcggcgtgatcaccgccgacgtgctgttgacgtggcaggggtccacctactggcggctgtcgaacgacgcccgggggttcaaggataccaacgccgccgtggcgtccatgtcggtgaacgcgtcggggctgttcgcggtcgccgccgacggcgctatggtgttccgggtgggcctcgcgccggcggagttccgcatgctgaagctggggagcgacggccggctgcgcatcatcagctacgcgctcgtgaactcctcggcgccggtcggcggcgacttcatcgccccagccggcgactgcgacctcccgctgcagtgcccgtccctcggttactgttcaccggcgggcaacggctcaacctgcacgtgcccgccgctcttcgccgcatccgtgacagttgccggctccggcggcgcctccgtttcatacatcgccctcaagccgctgacctcctacttcgccacgaagttcgacgccccgacgaacaccggcgtcaacaagacggcgtgtcgcgcgctctgcaccgccagctgcgcttgcctcggcttcttccacgacagcgtctccctgagctgccgcttgatcggaggaaagcagctcggctcgctgtacaagggcgcatcagatacaaacctgggatacatcaagacgttcaactccgcaaccaaggccgggagcaaccaaatcggctcgtcgtcggcgaaccacaccgtgccgatcgtcctgccgtccgtcgcggcgttccttctcctcgccgtgctcggatggtatatatggtggaggaacaagatgagcaagaacggcaggaaaaagaagggcaagagctccaccatgaaagtgtacttgggccgtcagaagtcgccgtccagggacaccggctataacgcggacgctgacgacgacggcggcggcgacgatgacgacatcgtcataccgggcatgccggcgaggtttagctaccaggagattacaacgatgacctccaatttcgcgacgaaggtgggatccggcgggttcggcaccgtgtacaaaggggagcttccaggcggcgaggggctcatcgccgtgaaaaagctcgaggccgccggcgtgcaggccaagcgggagttctgcacggagatcaccatcatcggcaacatccgccacgtcaacctcgtccgcctccgcggcttctgcgccgagggttcccgccggctgctcgtctacgagtacatgaaccggggctcgctcgaccggtcactgttcggccgcacggggccggtgctggagtggggggagcgcatggaggtggcgatcggcgcggcgcgcgggctggcgtacctgcacaccgggtgcgagcagaagatcgtgcactgcgacgtcaagccggagaacatcctgctcgccaacggcggccaggtgaagatctcggacttcggcctcgccaagctgatgtcgcgggagcagtcggcgctgttcaccaccatgcgcggcacgcgcgggtacctcgcgcccgagtggatcagcaacgcggccatctccgaccgcgccgacgtctacagcttcggcatggtgctgctcgagctgatacacgggaggaagaaccgcggcgagcaggaggcggcggcgccggccaacaacgtcgccgtcgctgccggcagcggcgagcactcggacttgccgtccggatggagcagcgcgatgacgtcgacggcgagtggcacgagcggcggcggcgacgagtacttcccgatgctggcactggagctccatgagcagcggagatacctggacctcgtcgacgcgaggctggaggggcgcgtcgacgaggccgaagcggcacgcaccgtccgcgtcgcgctctgctgccttcacgaggaccctgcgctgcggccgagcatggccaccgtggtgcggatcctggaaggcagcgtgccgccgccggagccgcgggtcgaggcgctcggcttcctccggctctacggcaggagctatcccttgccggtgccgggttcgttgaccgccatggccggtggtggctcgcatttggacgagtcactgaaggacacgtcagcaccaagatag

SEQ ID NO: 75761 - DNA, 1935 bp, Oryza sativa
  Clone ID: PAT_MRT4530_75819C.1
atgctgaagctggggagcgacggccggctgcgcatcatcagctacgcgctcgtgaactcctcggcgccggtcggcggcgacttcatcgccccagccggcgactgcgacctcccgctgcagtgcccgtccctcggttactgttcaccggcgggcaacggctcaacctgcacgtgcccgccgctcttcgccgcatccgtgacagttgccggctcgtgcacgccgggggacggctcgacgctcgcgtcgccggccgcgtgtcagaacaacgacagtagcagcggcggcgcctccgtttcatacatcgccctcaagccgctgacctcctacttcgccacgaagttcgacgccccgacgaacaccggcgtcaacaagacggcgtgtcgcgcgctctgcaccgccagctgcgcttgcctcggcttcttccacgacagcgtctccctgagctgccgcttgatcggaggaaagcagctcggctcgctgtacaagggcgcatcagatacaaacctgggatacatcaagacgttcaactccgcaaccaaggccgggagcaaccaaatcggctcgtcgtcggcgaaccacaccgtgccgatcgtcctgccgtccgtcgcggcgttccttctcctcgccgtgctcggatggtatatatggtggaggaacaagatgagcaagaacggcaggaaaaagaagggcaagagctccaccatgaaagtgtacttgggccgtcagaagtcgccgtccagggacaccggctataacgcggacgctgacgacgacggcggcggcgacgatgacgacatcgtcataccgggcatgccggcgaggtttagctaccaggagattacaacgatgacctccaatttcgcgacgaaggtgggatccggcgggttcggcaccgtgtacaaaggggagcttccaggcggcgaggggctcatcgccgtgaaaaagctcgaggccgccggcgtgcaggccaagcgggagttctgcacggagatcaccatcatcggcaacatccgccacgtcaacctcgtccgcctccgcggcttctgcgccgagggttcccgccggctgctcgtctacgagtacatgaaccggggctcgctcgaccggtcactgttcggccgcacggggccggtgctggagtggggggagcgcatggaggtggcgatcggcgcggcgcgcgggctggcgtacctgcacaccgggtgcgagcagaagatcgtgcactgcgacgtcaagccggagaacatcctgctcgccaacggcggccaggtgaagatctcggacttcggcctcgccaagctgatgtcgcgggagcagtcggcgctgttcaccaccatgcgcggcacgcgcgggtacctcgcgcccgagtggatcagcaacgcggccatctccgaccgcgccgacgtctacagcttcggcatggtgctgctcgagctgatacacgggaggaagaaccgcggcgagcaggaggcggcggcgccggccaacaacgtcgccgtcgctgccggcagcggcgagcactcggacttgccgtccggatggagcagcgcgatgacgtcgacggcgagtggcacgagcggcggcggcgacgagtacttcccgatgctggcactggagctccatgagcagcggagatacctggacctcgtcgacgcgaggctggaggggcgcgtcgacgaggccgaagcggcacgcaccgtccgcgtcgcgctctgctgccttcacgaggaccctgcgctgcggccgagcatggccaccgtggtgcggatcctggaaggcagcgtgccgccgccggagccgcgggtcgaggcgctcggcttcctccggctctacggcaggagctatcccttgccggtgccgggttcgttgaccgccatggccggtggtggctcgcatttggacgagtcactgaaggacacgtcagcaccaagatag

SEQ ID NO: 75762 - DNA, 1032 bp, Oryza sativa
  Clone ID: PAT_MRT4530_7581C.1
atggccggccggtcggctttgtgccagggcgagccgtgcctggccgccgccgcgccgtccgatcggctcccggccgatccggaccgttggtcccgtggactggcggtggaccacccgcgtggtcccgatccacgctttcaactacttcttttaaatgcctgctttattgcaaatgaacctctagcctcctttggttatatcttgcatcataccttctcttccgaacaaccagacaagatcccagagtggaccaccaaacccgccctgactccctccctccagtctttcatcgacatcatcgatgacctccgaatacgggggttgtcggggtacaaagtcgctgccgacttcgtaggtttggacagcgacaccgtggcacgccgcgtcggccaggtgatgatcagcgccccagcgacagcgagcgacgtccccgtccccctttgggagaagggtccggctgaacgcgaggctgcgatcaacgctctccctctgacggacgtcatcgggccacttgtggaccaccagacggcgacgtcgttgaaggagggcgtcaccaaagaggcgtccgacgctgctgctgctgctaccacgagtggaaactacgtttcgaagaaggggaggaaattctcctccgtactcaggaccagtcggaaggcaccaagcccggcgctttatgagaaagagaaaactcttcgcagggcggcgcgggcgaaggcgacgcaaggtgggaccggtgcaactaccagcgcgtcccctgcgacggcctcgacagacgtcgtggtcgctactagggaccgggaggtgacgccgagtagccccgccgtcggccttgtgcctgctcggggcccgcctgccgatgccctcacctcgggggagctccaagcggagctggagcgcatcctccaggatggtgctcacggcgtaggccatgagattgaggagaccagggcggcggcggcatcagcaaaccagcgcgccgagcagctgccacgcgtcagcaaaccagatgagggagctggtggccggcaatga

SEQ ID NO: 75763 - DNA, 327 bp, Oryza sativa
  Clone ID: PAT_MRT4530_75820C.1
atgacgtccacatcggctccaaccaccctcgacgcactctggcagggttcccctaacgagaagcacgacgacaactccgacatggcaagttcgcctcagcaaattgagggcgtccggcctcttgacgacgttgcaacgtcaggtagatgcatcaccagtgactcgaacggggcgctcgtcctcctgccggacgcggtgcttcggccgaggtcgttcgccgtcgctgatgtgctacggccgcgtttgtgctgctgctccgccgcgggagctggcccgcttagctccattcccctgttcaagactcaagagcagccatactcaatatga

SEQ ID NO: 75764 - DNA, 186 bp, Oryza sativa
  Clone ID: PAT_MRT4530_75821C.1
atggcggagtactacgaaactggcaggcacggccacggcggcaacgacggcgaggaccatggcagcagcagcaagaagacctcgcagcagggcggcgccggcgatcaggagtactcccacaagcagcaggagcgcatggccgcaattattcagaaagggctctccctagtggttggtagccagtaa

SEQ ID NO: 75765 - DNA, 354 bp, Oryza sativa
  Clone ID: PAT_MRT4530_75822C.1
atgtgtactacgttggcctcccctcctgtgcgtgaagaggagctggtcgtcagtggcccaaaccagttggacgaggataagaacggtctggagcagagatctaggaggcactcctcctactgcggcactctcatatctttggcggcgggcctcaagggagggctccatatcatcaccaacatcgctgacggcatggcgttcatgcacgacactctgtgggaggacggaggcaccaacacgacaaagctcgacgccaagacacccacggaggctaagagcatgtgcatgaggcgggaggacggaggcaccaacacgccgagttgggtgacggccgacgagtctcctcaagcttga

SEQ ID NO: 75766 - DNA, 324 bp, Oryza sativa
  Clone ID: PAT_MRT4530_75823C.1
atgaggagaggggaggacgaccaagttctcaccgagcggcagctgctcagcggcaagggtttggcacagcgcagcttggcgatttttggcagcgtcgaggcacggcgggaggggcggaaggtggcggctggttcgccggagagggcggcagcggaggcttcggtggctcaggtgcggcacaaggacgacggaggccgagctctgtcgagcgcggagattgagccaggcggcggcggcggcgccttggctcgacttggctggctcccgcggtttgaggccgctgggccgacagaggaagaaggggggaccgaaaagtggaggtag

SEQ ID NO: 75767 - DNA, 247 bp, Oryza sativa
  Clone ID: PAT_MRT4530_75824C.1
ggagcgcacaaggatctaaaggcatttccacggcttaccgccagtttgacggcataactgggcattcccaaaccaaattggtggggagcaaactaattgtacagttcatcaaagcgagtgacatgaactggtatttttaaacggaggttcaaaatgctacctgaatgactacggcagagagttttcccaaatccaagaaaaaccctcaaaatgacctttagcttatcccgttaacttttcacttgat

SEQ ID NO: 75768 - DNA, 575 bp, Oryza sativa
  unsure (1)..(575): unsure at all n locations
  Clone ID: PAT_MRT4530_75825C.1
gcgtacgccgcgattattctggcgcagaattgtgtactacaatccatctggcacatgatcgtctcttcatgggaaaccattgtgtataacccagttcttgatattgcagatgggtgatcccaattgttgttgtgctatcatttttagctgtttactggcgttgcctcggtgtcaggaaacgaataggaagatcattgcttcctttgtacagaggttcnacggaagctccagtcgcccaagaacagattaatccaggtctagaaatggtgatgaatgatgcaaatcgctgggaaaatccatgaaaatatccttttgccgtgtgatggatagtggacggcaaaaggatgttggctctatgcacacgctgcaagaagcttctcttgcaatccaagaagggaatatttaggctcagctcacggctcttagtcttactgacccaccaagcaaagcaaacgctaacgtatgaatgataatcaatctttgttctatatcgaaatgcttatagtaacaaagaaatataaccatactttatttcaatgtaaagatcattctttgtatattatggcacactagat

SEQ ID NO: 75769 - DNA, 1764 bp, Oryza sativa
  Clone ID: PAT_MRT4530_75826C.1
ctagacctggattaatctgttcttgggcgactggagcttccgtaagaacctctgtacaaaggaagcaatgatcttcctattcgtttcctgacaccgaggcaacgccagtaaacagctaaaaatgatagcacaacaacaattgggatcacccatattcatgttgtgcacttcacagagagaagaaacttgcctgtcaatatcaagaactgggttatacacaatggtttcccatgaagagacgatcatgtgccagatgggattgtagtacaacaattctgacgaccagaataatctcgtgtatgtctctaagaagatgaatatcacccatgcagcaacttcgagtaaaaagaacttgatcacaaagcgcgcaatcacaatcatgaccaaggagaacgtcaccagccaattgaatagtttgttgttgtactccttgatgaaaagagcacgagaccttgcgagcatctttgacatcctacgttcatagctttccttggcaggccccacacactccatttcaaaactctggttacagcgaagaaatccagcattaaattttgccatcgaaggaagcttcaaggattgaaggtgttccattttatcttcacactctgaaaactttgctttgcacagcttcgatgactggtactcattggcaaaaccaaagtttccgaagacctttctcatctcttcatcaagcttgaggatggatcgggtagtatgatgtttaccaaaatgctgcttgtcaaagagctttctagcttcatcttctgccaaattgtgaatcagctgaagtttatccactgatactggtagacccactctttccattctttcattatacaactttaagcagcgctcaagaattgccttattgaatacttctacaagtgatcctgttgatggaatttcacctttattcaacgcctcaagtatctgccttaggaaagatacaaactcctttccatttagagttctaccctggggtaagctaaaagcagtgctgttatcgcccataaatgccaaagagtctctgattcggttgaccattgttgttaggcacccgttggagagcttcatcaaccatttgctggacagattttccttctgcctcatgaaagttaacaatgttaaaagaagtttaatatcggaggaaatccctctggataagccacagtagttttgctggctcaaaagcaacatcttgccccttccatagaattcttcagcaatttcaacagcaaatgagagtctagatatatcagcttcacgaatcgtctctggaagattgtagataaggatagaacttaaaacagtggccagagcaaatatcctatcatcatatacatttgattttccgatgctctcaaatccctcagtgtccaggtaaaggacagaaactttggagccattcacatctaactcaatgggagtaccccagacccatataccttttgttttggtatctcgcatatgtccaactccaaaacctttattgcatgttagggagagaagctgattgagaagaaaagattttccagatcgatatggcccaataacagcgacagcagctattggtgtttcgattcttttaattgcctccaaaccttcttttgcaagacggagtttagtgtgaccatgatctggttcgacgattggaaacgcgcgttcgagctcgtcctgatcaggatccagcgcagccgccgccaccacagcggcgagcatccacagcaccgccaccgccgaagcgcgactccgccaccccat

SEQ ID NO: 75770 - DNA, 375 bp, Oryza sativa
  Clone ID: PAT_MRT4530_75827C.1
atgacgcttctggccgctggcgccacgacggcggagctgatagccagccgctcgcagtacgatgtaaccggcaaggcacccgcctccggcgagcacggagaagaggagcagcgccagcgctgtcaccatccagcatcggtggcgaagaggacacaaggcagcaacgaggcggcgtgcatgacaatagcgccaaccccctccctccggcctcatggacttagtagctctgtgcctccccaaggtggttctggagcatccaaaaggcacgcggacattcatcatgaagtgacaaaccttccaggcaagggcgggctgagggagaacgcccgattccttcgtagctccttatccaggctcgactcgtgcagcgcgtag

SEQ ID NO: 75771 - DNA, 309 bp, Oryza sativa
  Clone ID: PAT_MRT4530_75828C.1
atgagggcggcggggccggcggtggtggggaagggagcagcggcagcgctccacggccgttgcgcggagtttggtggtgggggcggtgggatccaaagacggcgacgcacgggggcggcagatccgacgacggtgatgcgcaggggcggtggatccggcgacggtgaggtgagggcacaccctccctgcactgcttgtggttgtctttctcatcatcatcgtggagaaagccggtttccagatcggctcctcaacggcaaccgcagcatcctccctgcgacaatgaccatcactatggcatccaactga

SEQ ID NO: 75772 - DNA, 450 bp, Oryza sativa
  Clone ID: PAT_MRT4530_75829C.1
atggcaaatgccccatggcctgagatccggttttgtgagctctacaatgttggttatcttttagctttagtacagttttatgatgctatggatttgcccatttcacttgatttgagggagataccatcaaaatggcagcctctttttattgaagaggatccctgggagcatgtggtgggaatgggcctgggtgcggtgttcgtcaaccagctggtgaagtgggatgagaagctcaaggaggatctcgacaagatgcttgagcgtgcaaagcaagccaacgagcggcgttactttgatagcaacggaggtatggaagaactggaacctcctcctggccaagcagaaatacccggatttattgataaccagcagatagtctccatctccgcagacagttataattcttgggtaaccatttatcacatttggaaatatgactatcaaaagtag

SEQ ID NO: 75773 - DNA, 432 bp, Oryza sativa
  Clone ID: PAT_MRT4530_7582C.1
atggagaggatcctcggcttctcggaggcggagaagcaggggatccggcccaacggctccaccgtgattagcatggcggccgtcgtctacctcgccgacgcgagggtcgaggaccccatccttggcgcctacggccggattctcaagctccagcagcagctcgaccgcctcaaggccgagcgcgctcgccaacaccatccggcaacgtcaagcccagccccagccgacgacgtcgccctccagcccgagcccttccaccagccgccggcgcagccgtcgacgccgccggcgttagcgataccggacgaggaggaggaggaggacaacgacgacgacgaggacgaggacgaggaggagggtcaagaggacggggagggtcacgcgcctgcagatgatgatgtgccttgtgccaaaaggagaaagcataattaa

SEQ ID NO: 75774 - DNA, 354 bp, Oryza sativa
  Clone ID: PAT_MRT4530_75830C.1
accaagtaggcactctaataatctggtagttcagagattacacatatggcgctcccaatcacgaaatacaccaaataaagcggcaggggagatatactagggtagagatatacatgaacattctgatacactcatacttgatacttgagcatatgacaacatataaccgtacgctcatagtggtacagaaatcattagactagctggattcaggtggttgaatagctcatatgagcagtgcaacattcttgcttcactttggcgcagatcctttcgccaacatggaccatcggggcttaacggcccttgggctgcctcttccttctagaggggtgcggccatgcctgaactatg

SEQ ID NO: 75775 - DNA, 466 bp, Oryza sativa
  Clone ID: PAT_MRT4530_75831C.1
tcagttggagagattggccggatcaaccttgccgttgtggctggcggcgacgagcatctcaacgacggtgcctacgtgcacaccctcatcgtggatggatctgcctagtaccagcgcaccgaactcgatcacctccagccttggtagtgcgtcgacgacgatctcctcgacgtcgaacgagtagatggtcattgacatgggaggcacttgtagatcccactcatcatataagtcaaaacgcaaccacaggaccccgagctccccgtcgctcactgtggaggtttgagggggcagcatggaagaagcagggccaagcccggtggcgtccgacctccttctccagctccccgcacaaattgagatggtatatatccccggcgagttccacgacctcgccgtggtatatatccccggcgagttccacgacctcgccgagcagttgcaggtcatgctcgccccccccttg

SEQ ID NO: 75776 - DNA, 504 bp, Oryza sativa
  Clone ID: PAT_MRT4530_75832C.1
atgaatgacacccttaaaacggttcttaggaaattcgtgctggtctttttcgatgatattcttatatatagccctgattggtcatcgcacttggatcatattgctcaagtactgtcactgcttaacaaacaccactggaaggaagtggtggattggaaggttcccatttcggtgaagaagttaagagggttcctaggtcttgcgggatactacagaaagtttgtcaagggatttggggtgatcagcaaacctcttactaacttgcttaggaaaggagttcccttccattggaactctgaaacagaatcagccttccaacatcttaagcaagcactggtttctgcccctgtacttgcacttcctgatttccaaaaggttttcactgttgaaactgatgcatctgaaactgggattggagcagttctatctcaagatggtcatcctattgccttcattagcaaggctcttggtgtcacgccccgaactagtcccgaccgggactag

SEQ ID NO: 75777 - DNA, 219 bp, Oryza sativa
  Clone ID: PAT_MRT4530_75833C.1
atgtaggcgcctaggaatggagagcttaagctcgagctcactatcatgatcttatggaggatcgagaaggctcttgaggagacagagttggaggttaagcttgccagtactcaacgcgccgagaaggggggtggagctcaagctcattggtgccaatctcatttgctcggggaggagacaagaaagaaagagagggagaagagagatgaggtgttatag

SEQ ID NO: 75778 - DNA, 274 bp, Oryza sativa
  Clone ID: PAT_MRT4530_75834C.1
ggttcaagcacagagtttacccactggctgggtgaagaacctggatgccatggttgaacaccaccagaatacagaagtacgaaatgcggttcgacattatgggctctgctactacctaaaggattaaggtactgtttcattttggtgatggggggcatgtacagtgactgaaagtagtcagctgaacgtgcaataggaaaactattactacctccgtcctaaaatgtagctatttctagcgcagtactctgttccaaaatgaagttatttttct

SEQ ID NO: 75779 - DNA, 197 bp, Oryza sativa
  unsure (1)..(197): unsure at all n locations
  Clone ID: PAT_MRT4530_75835C.1
gcttttngtggatggctcanttnaccaatgantttnttcccgctcacaatttatcagcgttcttcgcccaatnnngctacaggtatagcnaccctcttaganacctaagnnccaggtgtgggtaagatgtcaccttcctattacatgatcatgtggctgccgtgattctgtatctggctgatcgataccgtcggcct

SEQ ID NO: 75780 - DNA, 1676 bp, Oryza sativa
  Clone ID: PAT_MRT4530_75836C.1
tcctcctccaccaagaatcacccacccgcgagatccaatccaatcctctcgcttgcattttctgctgctgcgtgcgcgtgctgagatttcattcggatttgttgggggttcgctgagatcggagatgacgtcgccggcgacgacgtacgcctcgccgttcgtgctgtcggtgctcctcctcgtctccatcccggtcatcttcctcctcgcgccgcgcctcctcccgcccaagacgcttccggccatcccggacgccgacgagtccgacgacctcgcgctcttccgccgcgccatactctcctcctcctccccctcctccgccacgcccacgccctcctccgccgcgtcctacttcttccgccgccgccccgcccccaaggtcgccttcctcttcctcaccaactccgacctcgtcttctccccgctctgggagaagttcttccgcggccaccaccacctcttcaacctctacgtccacgccgaccctttctccgccctcacgatgccgccgacgccctcgttccgcggccgattcgtcccggccaaggccacgcagcgcgcctcccccaccctcatctccgccgcccgccgcctcatcgccaccgccctgctcgacgacccatccaaccagttcttcgctctcctctcgcaatcctgcatcccgctccacccgttccccacgctgtacaacacgctcctctccgacaatgccgggcctcatggccgccaccgcagcttcatcgagataatggacgatgcctacatgattcatgataggtactatgcccgaggcgacgatgtgatgctcccggaggtgccgtacgaccagttccggttcgggtcgcagttctttgtgttgacgaggaagcatgccatcatggtcgtcagggacatgaagctatggaggaagtttaagcttccttgcctgatcaagcgcagagactcgtgctatccagaggagcactacttcccgacattgctggatatgcaagaccccgaaggctgcaccgggtatactctgacaagggtgaactggacggatcaagtcgagggccaccctcacacataccggcctggggaggtgtctgcaagcctgatcaaggagctgaggaaatcaaatgggacatactcgtacatgttcgcccgcaagtttgctcccgagtgccttgagccactgatggagattgcagactctgtcatcctacgtgactaatccagcaacaacaccacatttcagggtgtcggaatttgtacactgaggtgaatgagggttgtgatgtgatgaacaagcacagagtgtccatctatgcccttgaactactacgtgaggaacaacatatcccctctgttttgttattcagagattttccagcaattgaatgcgctgctgggaggtgaggatggtatgactacaaattgtccctacgtgagtatcctgtatgaatgtgacaatctgttggaaagtaatagtagggtgttagttagcatgatcgtcctatgtattacatggtggcactgtaaatacatgcagtgatggtttattatttttgttccatacatgccgcggctattgttattacacttcttatgttctgcttgccatgataatgacagtttgtttcttagtcggtcttgcactttgaagtgataataataataataataataatagcaat

SEQ ID NO: 75781 - DNA, 293 bp, Oryza sativa
  Clone ID: PAT_MRT4530_75837C.1
agaagagggcccaaaaaccgtggagaagggcactacccaatgccggaacggggagtatgaaaaccccaaatgtcaacgggggagcaaagggctgatgaagcagaccggagacccagagggggatggcacaggggggcaaacaaaccggggaagggagcccgaagatgaaccccacaaaagcccgagacaagacaggcccaggactcgggcaagggccaagggtggaccaaaaaccaaaggggcccaagggcggaacacaaccggggcaactccaaggccagacaacaacacac

SEQ ID NO: 75782 - DNA, 1502 bp, Oryza sativa
  Clone ID: PAT_MRT4530_75838C.1
ctcaccacggcggcgccgcttccgcaactctcctcctctcgccgccgccgccgccgccgcccgccgcccgccggagcccgaagccgggcatgacgacgcgcatcgcgcccggcgtgggcgccaacctgctcgggcagcactcggcggagcggaaccaggacgccaccacctacgtcggcaacctcgacccccaggtttcggaggagttactatgggaattatttgtgcaagcaggccctgttgttaatgtctatgtccccaaagacagagtaacaaatctacaccagggctatggatttgtagaattcagaagtgaagaagatgcagattatgctattaagattttgaatatgatcaagctatatggaaaaccaataagagtaaacaaggcttcacaagacaagaagagccttgatgtaggggcaaatctttttattggcaatctcgatccggatgttgacgaaaagctcctgtacgataccttcagtgcgtttggagtgattgtgactaatcccaagataatgcgagatcctgaaactggaaattcacgaggctttggctttgtgagctatgactcctttgaatcatctgatcaagctatagaggcaatgaacaaccaacatctatgtaaccggccaattactgtctcttatgcctacaagaaagacacaaaaggagaacgccatggcacacctgcagagaggttgctagcagcaaataaccctggttctcagaagaataggccacacactatgtttgcaagtggcccgcctacgcaagggcttgcaaatggtgcacctgtgcctcgacctttttccaatggggcagtgccacctcagattcaacatgttcgaccgccgccacctcctatgcaacaattccctccaatgcagatgaatggtcagcctgtttggcctccgcagaatacacagctaccaccccacatgccacctcaaatgcattacaggcctgcagtgagaccacctccaccaaacatgatgccaccccctcctcttggcatgctgctgtttattaagcttagtgatatgattcgttacccttcgacagagattacagagagaataaggaattggatgccgaggaacatgggtcttctcctgcagagtgatggacagaacgacaaaaagtgcacgccattttctaatggatcgttgcaaatggaccctcaacgttctcttcttgcttggctccatccgaaaaggattcggcgacaaaacgaaggggtcagtggcgagcaagtggagaagaagaaggcaatgcatgaggaaagaacgggagaacgaaaatgcaacggcggcagtgcatttgcctgcccgtgctgcccactccccaagtctcgcgtttcgcccatcccacacgagcagagtctagttcgctgtctaaaaagaatactagcactagcagtgtaccagaatacaagtactgggcctactggtagtacaagacaaagttgctttataaacttttatcccggtgtttaa

SEQ ID NO: 75783 - DNA, 283 bp, Oryza sativa
  Clone ID: PAT_MRT4530_75839C.1
ctcgatcaccgtaccacagccaggggcgtgggggcgccatgcatgccgacttccattattcatgctccacgtcactacaactgcggacttcttcatccatctccgaacgcttgcacctgacggcagtcacgccgcatatcgcatcagagaggggggagggagggcagcagaccatctatggaggagaacgactggagcaacagacacctggaggagagccttgactcctgcgtggacgtgagggagatctccgacgcggaggtgggcgggggatatggagcgg

SEQ ID NO: 75784 - DNA, 363 bp, Oryza sativa
  Clone ID: PAT_MRT4530_7583C.1
atggtgatgagtggcgtggtggcgaggcatcccaagcggcgacggcaacgacgccaggcggagcagcggcggggtggcgaaagcggagtatcaggcgacggcggcggggtggccagatctagcctgctgctcgctagcgcaccacccctcctctcctcccctgatcggcaacccttcgtccttggcgagcacgccgacaatctcgacaccacctcctccgtaccaaccactatcgtcgagatcctgtcctcgccgctggatgggacggcgagcttggggcggatctggtggcgtcggcgcccctactcctctcccctctttggcaagcttctacggtgtggatcgaagctggcaggagcttga

SEQ ID NO: 75785 - DNA, 333 bp, Oryza sativa
  Clone ID: PAT_MRT4530_75840C.1
atggagggtgatcttgccacgctagtggcgtctagggcgatcgtcgaaggccaagcttttgtgtctggtgatgctctcgttccgcatccagttcgctcgctgcgggaggcggagaccgaggcaaaaaagatgaacatggacttgaccactcgcgaatatgacttgctgctttcatggcagattgaggggcgggcgaaccgggtgcatgacggcgaactgcctccctgggcaaaccccaccaaagtggtcatcatggacgatggcgttgggccgtcgaaaaaatggaagagagctacccaaaaaggcacttcgtgcaggtgggccaagtcttaa

SEQ ID NO: 75786 - DNA, 3417 bp, Oryza sativa
  Clone ID: PAT_MRT4530_75841C.1
atgaagacggtcgagacgacatcttccggattgttctcactgcccatcgacctcgtcgaggagatcctcatgtggctcccgtccaggtcgcttgccaggctccggtgcacctgccggtcttggaacgagctcatctcctcgggtggcttcgtcgatcgctacctgcaaaatgcggcggctcggcacagcgcccccgctaagttggtgctcacgcccctgtcaaaacgacatgccaggagcttccacgcccccatgtgctgcagagactgccctaggatcattggcgcgaggccgtgccgcggactcgtcctcttctgccgcccgtgcgccttgacctactccgtgtgcaacccttccaccggcggcgtgctacaccttcccccgtgtcactcagagtggtacatgagcagcgcggggatcggcttcgactcggcgaccgggaagtacaaggtggtgcagctcgtagatccaagttccccgaaagtagtggggacacaatgccgtgtgctcaccgttggcgacgaccctttgggctggcgggagcccttgggcgaggcctgcacaatcctccaggaggaccacgctaaagaaggaggctgcatcgccgatgtcgacccggttttcgcgaacgggcgcctccactggacgctcaccccaaagttcctggtgtgtgacacacctcagggcatcctcgcattctcgatcggtgacgaatccttcgtgacggtccccttgccaccattcgcatcggctgacttagacgtgtgtagcagcagcgtctgcgttgcgacaaatgtgtaccttgagcatgttcggccgagcaagttgcttccaaagaacaaggaaatctttgcgccggccggcacggtcctggccgagctcgacggctgcctgtgcatggtgcgggacctccgccaccgccgcaacatggacttgaacgagaccaccatgttcgagatatggaagctcgggacctacgagaccggggagtggtcgctggactaccggatagacctaccccgagggtacagggccgcagagcgacttgtcacgccatggcttgtcatgccgctagcttacgtcggtggtgatcccgcctcaactggggggcagcgtaggaaggccgtcctgctggcgacgacggctcatgaggcgcatgtttacgacccggaagcggccgtgctccacagggtggcctccatgtcagacgacgagagccgcagctgcgacgcggcgttttacctggataaccgtttgcgtctcacgctgtaccaggaaagccctgttcagatggacggcatggaacacgatggtggtgatgccaagcttatcgggtttctttctgagttatctaaagagcaaaagctagactttattgctctcctagaaacaggtaaagataagtttgctgattcatggttaaataacatctgtggagggaaatattttctttggcattggactagaccaaaagggagaagtggaggtatcttacttgggataaatttagaactctttgatgtcgctagtatcgatgaaggagagttctatattaagtttcacttaagaaataaagaagatgcgttcctatggaacctggtggcagtttatggggctgcacaagatgaatttaagcaagatttccttttagagctggtcaattcttgtagtaaggaagctttaccaatggtaattggtggagattttaatattattagaaatccaatggaaaagaacaacgagcgatacaatgatagatggcccttcttatttaatgctgtcatagacagtcttaatttgagggagatcttgctctcaggacgcaaatttacttgggccaactctatgccgaacccaacttatgaaaagttggatagagttttggtgagtaccgagtgggaaacaaaaaatccgttagtgacagttcatgctctttgtagagacctttcggatcacacacccttggtgctagacacaggaaaagggacacatagaaattctcaacctttgtttaaatttgaattgggatggttattaagggatgactttcaaaatcttttggtagaaatttggtcaaaggatattcaaaaggatattcaaggggcaacaaatatagaaagatggcaaaataagatacgcaggcttcgtcaattcctgagagtatgggcgaagaatttaagtggtgtgtataaaaaagagaaagctcgacttatagcaaaggcagatgagttggacaaattagctgagaccaggatcttgactagtcaagaactgattctaaaaaattcctataaaaatgccttagcccagttgttaagagaagaagaagttaaatggtatcaaagagcaaaaacaaaaagaatagtagaaggagataggaacaccaagtactaccatatgatcgcgaatggaaaacacagaaagacaaagatttttcaattagaacaagaagaaggggtgattaagggagatgcacaactcaagaaatatgtcaccaattattataggggtctttttggagctccggatagaaattgtttctccatgtgtgaatcccaaaaggatgatatccctcaagtgtcaatggaggaaaatactttcttaacaaaagaatttacagaagaagaagtgaaacatgttgtttttcaaatggaacataacaaagctccggggcctgatggtttcccagcggagttctatcaagtgttctgggaagtcatggcaaacagaattgctctagtagcacagaaagtcataagaccttcgcaaactgcttttttaaaaggtagaaatattatggaaggggccataattctgcatgagacattgcatgagatgcataagaaaaagtcaaatggagttattctgaaactcgatttcgagaaagcttatgataaggtaaattggaattttcttcaacaagcgttgagaatgaaaggtttctcggacatttggtgcaagtggattgatcaagttgtgtcggggggtagtgtagctgtgaaggttaacgatgagataggccacattttccagacgaaaaagggtttgagacagggggatcccctctcaccaattttatttaatttggtagcggatatgcttgccattctcatcaatagggctcgagaccttgagactctaaatggagtaattcctcacttggtagacaatggtctctcaatcttgcaatatgcagatgataccatcttgtttatggaccatgatttggttaaagccaagaacctaaaattggtactagctgcctttgaaaagttattgggcttgaaaattaattttcataaaagtgagatgttttgttttgggaaagctaaggaggtggaaaaggattacaccactttgtttggttgtcattttcatgggaacacattgggcaaggacttggtctttgcttcttaa

SEQ ID NO: 75787 - DNA, 2116 bp, Oryza sativa
  Clone ID: PAT_MRT4530_75842C.1
gcacgattttctttacgttttactcctccttttgttatcttcctcttccctcttccctctcttcgcttccactcctccccacccacgcctcctcctcctcgcttccccgaccatcgcatcgcggcgcagcgcagcggaggaaaccctagcgcagcagcaagccaccgccgccgcatggcgtccccggcgcggcccgccgcagcctccgtctccggcgccttcggcctctccgccgacccggcgcggtgctcctttgaccagacgctccgccgagaggatttccaggacaaccggctgctgaggtcacttgttaatatccatgaacaagaaacttattccagagaaataataacggaagctatagagagctgcatgaagaaacaagcagacaacttggtgaatacactggatgtcatcagtgggaggctatcacagttggagctgtattgctataagctggaaaggtcaattggagaattacgaagtgatgtgatggattaccatggtgaagcaaatattaacttccgttgcctcgaaaagcatgtgaaagaggttcaaaactctgtacaggtgctgcaggataagcaagagcttgctgaaacccagaaggaactaactaaacttcaaatattacatgaggaatctgcacagaaaagcgaaggtactgctccatcagttcttatgacaaaggaaattgacggcagcatgccagttgcaaaacatgagcttgcccttgtgcctctgcatcaagtaaatgctgcccaatctcctgctatgcaattccaaagttgcaatgggcttgttctgcagcaactggtcccagtctcattgagcactcaacaagaccagcagcacatgaaccaagccaccttgtactgtatgcaaacccaagctcatgttgagcacaggcaggcccaaccatttcaacctgcacctcaacctgtgcagcgacatacccagaatacgccacagactgtagttgaggcacaacaggtgacaagtcaggccccagacttctacattcaacctcagcagcaatgggcacatcaaactggccagcaagttcaccaggcaaggcagccacagccacaggttgtgcaacagcaacattacaacaatattcagcaagttccagcacagatagttcaaatgcaaacttcttctccacaggctcaaagtgcaccacatgtcacactgttgtaccctccttatggatctcaacaacctgcctgtgctaatagtgagccacgctcgcgaagcatggctatgcagccttcctactctacaatttcctcgtcccaaaggaatcatcatgaagtcgctcctgtttatgtgcaaagcaacacaatttcagtcccactggctgagcatagcatccagtctcagcagccaccgcaacttcaatcgtttggtaatggctcatttaaaccaagcaaggtcagcctacatggtgttgcctcatatacagtacaggggaatgcccaggcctataacactgcttatggaaatccgtccaacaatgctgctactgttgttgctgtccttcctcaacaagcccagtctagtgctcccatggtgcttcatcatttaggaccacagtctctgcagaatcatccaatagacatggttgaaaaggttgctcgtatgggttactttaaggatcaagctgagagcatggcacttcgaatggctactgctggacagaatgtagagttcaaacacctcgcttgacaagcagatctctggtggcgatgaggtggcgagtaggagaatgaacaagccagtttggaaccgctgcatgtggtttgttggcttgttcctgtgaaatattatgatatcttactatcatgggaagcttttcagctttgctaaggtatttcgtctggcatctttttaaacagccagcagattggtacatatcctgcagcttatttttttcagctggaggattgtgatgaaataatactgctagtttagttaagatgatgattgttggcatgtgtcctaccttttaatggacatatatgcttgtaaccttttgtggacttgcatacgcatgtttgcaatacgaagatatgagaaatttgttgttttccactaaaaaaaaaaaaaaaaa

SEQ ID NO: 75788 - DNA, 2275 bp, Oryza sativa
  Clone ID: PAT_MRT4530_75843C.1
ttgttaagagaagaagaagttaaatggtatcaaagagcaaaaacaaaaagaatagtaggagataggaacaccaagtactaccatatgatcacgaatggaaaacacagaaagacaaagatttttcaattagaacaagaagaaggggtgattaagggagatgcacaactcaagaaatatgtcaccaattattataggggtctttttggagctccggatggaaattgtttctccatgtgtgaatctcaaaaggatgatatccctcaagtgtcaatggaggaaaatactttcttaacaaaagaatttacagaagaagaagtgaaacatgctgttttccaaatggaacataacaaagctccggggcctgatggtttcccagcggagttttatcaagtgttctgggaagtaattaaagaagacttaatggctgtctttagagattttcacagtggcgagttacccctacatagactgaattttggtatcattaccttgcttccgaagaataaagaggcaaaacagatccaacaatacaggcgcatttgcttacttaatgtaagcttcaaggtattcacaaaggtcatggcaaacagaattgctctagtagcacagaaagtcataagaccttcgcaaattgcttttttaaaaggtagaaatattatagaaggggccataattctccatgagacattgcatgagatgcataagaaaaagtcaaatggagttattctgaaactcgatttcgagaaagcttatgataaggtaaattggaattttcttcaacaagcgttgagaatgaaaggtttctcggacatttggtgcaagtggattgatcaagttgtgtcggggggtagtgtagctgtgaaggttaacgatgagataggccactttttccagacgaaaaagggtttgagacagggggatcccctctcaccaattttatttaatttggtagcggatatgcttgccattctcatcaatagggctcgagaccttgagactctaaatggagtaattcctcaattggtagacaatggtctctcaatcttgcaatatgcagatgataccatcttgtttatggaccatgatttggttaaagctaataacctaaaattggtactagctgcctttgaaaggttatcgggcttgaaaattaattttcataaaagtgagatgttttgttttgggaaagctaaggaggtggaaaaggattacaccactttgtttggttgtaagatgggtacttttccattcagatacctaggccttcctatgcatttcaaaagactgtcaaacaaagattggaaggatctagaagataaattccagaagaaactcagttgttggagaggcaagtttttgtcgtcaggaggaaagctggtgctcattaattcagtgttgagtagtctggcaacattcatgctttctttctttaaaatccctaagctggatttttacagatccagatttttttggcaatgtgatgagcacaaaaagaagtataggttagttaaatggagtgtgttgtgcagacctaaggaatgtggggggttgggaatccaaaacctagaaatgcagaacaagtgtatgcttagtaaatggatttttaggttgatcaatgaagacggaatttggcaaagtctgcttaggaaaaaatatttgacaaagaaaaccattttacaagtccaaaaaagaccaggggactcacatttttggactagtctcatgttagccaaagagtcttttcaaaggtttggttccttcttattacaagatggctcacaagtaagattttgggagaattattggataggagttcaatcctttgagaaggagtatcctaacctctacaatctagttagaaataaaaatgaggtggtggccaaggtaatgagtggaataccgttaaatgtgtctttcagaatatcaatagtgggaagaaacttggaagcctggtatgagctagtgtcgaaagttgttaacattgtattgacagatcagaaagatcgcttcttttggaaaaacaataaagaaggcattttcatagtaaaatctatgtacaagttgctcatgtatgaagggctggttcctaggaagaatttcatttagaagctcaaaattccacttaaaattaaaattttcttgtggtactcaaggaaggggtaattctcactaaggataatctagcaaagagaaggtggaagggtagcctaagttgctatttttgtaactctaaggaaacaatacaacaccttttctttgattgctcaatggctaa

SEQ ID NO: 75789 - DNA, 2172 bp, Oryza sativa
  Clone ID: PAT_MRT4530_75844C.1
tttttttttttttttttgaacaaatttggttcgtttttttttttataatatgcatctttttgcgtcatgataaatgaaaaatgtcagtattacagttctccatgagcaaaaacagtaacatccagaaacaaactcaacatttttttcaaataaatcctcatttgaagatagcatcgatattaatattaacaatacatgaggaatgaaaatgaataacaagaggaacaaaagctgcagaaatacataaacgattggaagtcgactcaaattgcaaaaaacttgcccttgtcaaagttttttagcacgttggctgctgctgctgcttcggttgctcaccctgccaagcccagactatgtccttcaaagctggtctcatctcttggttcaagaccttacggtattcaagtgtatcaccatttgtcttctttagctccacaagatgaaagtttggggtaacctcgaatatctctgcatcaatgcccataacacctttccttccaggcttggagccttccatcttcaacagtccaccatctttctttgtgagcttcaaccgcaagcccttggcaatatcctcaatcttagatatgattgttgaagctgtactggtggatgtgaatttggactctttcttatcagactcctcaaacataccagagaggtcaagtccagttgacaaagaaattatatcaaaagcattcaagttggacggcttcttctccaatgttggagcgctattgaaggagtcaaaatctgtgctcatatcaacaggaattgcatcctttggttgtagattatatctgagcagctttgcatcgagacccttcctaaaccaaggattttccatgattttgtccattgagatccttgtacttgggttaggatcaagtatcctgagcaagagccttcgaacatcggtattaaaccaacttggacatttgaattctgctttcccaatcttcttatacatatccatcaagttcttatcatggaaaggtagatagccggccaatagcacaaagagtatcactccacaagaccatatgtcagccttagcaccgtcatagcctcttctgttgatcacttctggagcaacataagcaggtgtgccacaggttgtgtggagcagcccatcctgtcttttgcaatcagcaagagcacttaggccaaaatctgaaaccttcagattgctgttctcatcaagaagaagattttctggcttcaaatcacggtgataaacacccctgctgtggcaaaagtcaacagcgcaaatcagttgttggaagtacttccttgctgcatcttcctttagtcttcctctctgaactttgttgaacaactctccacctttgacgtgctccagcacaaaatatatcttagtcttggtagccatgacctcatataactgcacaatgtttggatgcctcaccaacttcatcacagaaatctcacgtttgatctgatccatgagcccgcctttcaaaaccttctctttatcaatcatcttgatagcaacactctcagaagtctcggtgttacgggcatggtaaaccttggcaaaggttccttgcccgagtaatttccccatctcatactttttcatcaacatatttcctctctgctccgccatcacgccaaagaaagcagtaatcccaaagctcaaagtgtggtaaccaggagcctagaaatgataggtgacttcaaccgtctccaccaagatggtgatctaagaagatggttgagttgccacgtcgaaccccatagtgcgagagcacatggagcaagcgctgtatatactcttgtgttccaatgtcatgaagagttgtggaaggagaaatatggcttgctaccctgccaattccctcacaaggtagctctctagcatgcaagcacatctttctgcattccctaaggtgtttccttcttattggaagtctagtaattcagatcccgacgtctgacgacgcgaagaacacccaacgccgccgccgccgccggtagaccgaaattctcacgacaggagactcaccctcgccgcagtcgcgagaaggagtgagaagaaggaagagcggtggtagtggaattggcttcgccttggtgcgtgcggagatcgagatcgagatcgagatctgttcgagcaccggacgcccgggcggacgcgtgggggccagc

SEQ ID NO: 75790 - DNA, 252 bp, Oryza sativa
  Clone ID: PAT_MRT4530_75845C.1
tattgcgaagtcgggttggtgcgtggctgattgattgttcttttactactgcaaaggcgtcgacagccccggctgcttgaacggttcttgacgtccccatagatgaaaccttcaccaacttttgcccccccaacccaagccagccaaagaccaaccgggtgggtgaaactcccactacgagcttcttacagtaaccagacagagttaaacgatacacgtgctggataaagaccaaattcgaacccatattct

SEQ ID NO: 75791 - DNA, 312 bp, Oryza sativa
  Clone ID: PAT_MRT4530_75846C.1
atgatccacggtatcaaagggaccccctgggaggggttcagggtatccaattcaatcgccagcacccccaccaaagtttacgaagccgaagtacacggagccaagtcgccgggagatctcgtcgaatccctcgactacgatctcatcgcacgaggtcgccggtgcggcagtggcaagccgagagcactgataggtaagcggattgaaattacgggaatgctatcaacatgggatcgtctccctccgtcacggcctcacgcaaggaggatgcaggagacaagctcagagggcatgcagctgaaagttcattaa

SEQ ID NO: 75792 - DNA, 424 bp, Oryza sativa
  Clone ID: PAT_MRT4530_75847C.1
tcttttttttttttcttttcttttttttcttttttcttttcttttttttcttttttcttttcttcttctttttcttttctttttttttcttgggaaccaaaaagggaaaagggccccgggaaaattttttcccccgggggcccccacaaagggaaaaaaaggaagggggggcccaacatttattacaaaaaaaaccggggaaccccgggacgggcccgaacggccaccaagggcggggagggagaaggaaacccttaaggaggggggggggggggcccaagaggcgatacccggcaaaacacccacttggaagggtccacccctcaaccaaaaccgggcagcgggggcggcctcgaggacaccctaaaccgccttcttgggggccagggaaggggcagcaaccttcttgccccggcctggggcc

SEQ ID NO: 75793 - DNA, 2140 bp, Oryza sativa
  Clone ID: PAT_MRT4530_75848C.1
cccccctttgattttgagaaaatttgtttaaaaattcttgtcataggagcataggtagaagagattgctgataaagaaaaatggcattttgcaacacatttaacttgttcagtgttcaagctaacgttgaacctggtacaagtacaacatgctggcacgcatgtccacatctcgcgggtcgagggttcaagccgaatacaacacacggcatgttgcatttcatcataatttaaagtacttagcatcactttgaacaaggttttggtggtcacatgtatattcgcaaccttcttaaggtgtccgcaaaagacgtgcgcagcataatactttgcagacctatggttatcaacagcaacatgccactaggcacctttttgctcatgtctttagcaccttcgtgagcatttactgaattacggaactgtggacgatgaagcattgacttctcatctgctgctccattggatacagacagctgggcccctaatactgatctccagtaggggaaaaaatttctctttatgaatgttggatcccatcctttaagtgccttttttctcgcagcctttttttctgcagcaggcagagaagtagacatttgtgcaacagccttggttacatctttgtgaactatgtcgctgtaagaaatcttgttatatggacagaggatcatggtgtcaatgtattcttcgttagggcaaaacccgaattccttaagaatatatgaaacacgcgcaaggacctccacattgggcactaaatcatatttcatggtggacaacatgatagtggttctcgctaacatgaacttcatcaggtcagtttcattgttgtggacctctgaatgtgcttgaatgtagttatccaaaacctcaccagcttgcgaaattatagtgacaatcagacatttacatttcaaaagtgctcttctttcctccagcagcttctgcccctctgcagtatcacctttatcacacactagggaatcatagtcctcatatatacgttgcgcgataatgtcgaacccatcaggtttgccctcacggatatgttttcgggctgccaggagtaaaactgcggattctacaagcttgtcattcttcatgtaattccagagctcatcagctagattatctgttttttcagcaagcagtctaactgtatccaaaaaaaccttcatctcaggtagacacagcagatgaatgagcttgtagatataatcctcatgatactgcacaggagatagattgtcctccagatatttatgcaagcaagtatttccaactgcaacatggagcgggagtagtccgggaatgccagcatcattgactgtgtgtaaattggctgaagcaccatggcagaacagcaacttgatcatgtcaacagagaaccgttcagcagcttcatggagtggaaaaattccatatgggttaatgcagtttggattggcatgcatacaactgagctgaggtgccttgccctccaatacagttttcgcacatcgcaaggcattatgcctgacaatgcaggataaggtttctgaggtgatgttacacttaaatgccatggccgcagtacattccgcgaacaaacggaagaagcaccggacactgtcctttctcaagacggagtccaagcggggagatatatcaaagaaggcatcccgcaccacctgaggggtagggtctgggatgattatatcatttgttaaggacttggccatccaagcatattttattttaacccactcatcagccttatccaaatcagacttcttgataactagaaaagggcgggacgggtccatgttatctacggttgctccatcttctttacctttaccaacactttctcctatgaaagcatctggcagaacatgatcgggaattttcaccactatatgtttgtcgagggccgattccgacatgacctccttgctatgataaagattggggctttcctggatgagtagaaccagatctccagatgagatgaagggctggcttataaaatagtggtgggatgtaggaaagggggcggtggagagttcgccggaggcgatggcggtggaatgagcacctagggtttctttatgggaagatatttgctcgtgcggccggccgcccggggatccactatt

SEQ ID NO: 75794 - DNA, 1122 bp, Oryza sativa
  unsure (1)..(1122): unsure at all n locations
  Clone ID: PAT_MRT4530_75849C.1
gcttcaataacaagtttaagaaataattaataaacaacaaacatttgcatagtcatcataagcttgacaagtatgtatggcaaaagacgtgcgcagcatgcagaccatggttatcacagcaacatgccactaggcacctttttgctcatgtctttagcaccttcgtgagcattctgaatgcagcagtactgtactactgaattacggaactgtggacgatgaagcattgacttctcatctgctgctccattggatacagacagctgggcccctaatactgatctccagtaggggaaaaaatttctctttatgaatgttggatcccatcctttaagtgccttttttctcgcagcctttttttctgcagcaggcagagaagtagacatttgtgcaacagccttggttacatctttgtgaactatgtcgctgtaagaaatcttgttatatggacagaggatcatggtgtcaatgtattcttcgttagggcaaaacccgaattccttaagaatatatgaaacacgcgcaaggacctccacattgggcacctctgaatgtgcttgaatgtagttatccaaaacctcaccagcttgcgaaattatagtgacaatcagacatttacatttcaaaagtgctcttctttcctccagcagcttctgcccctctgcagtatcacctttatcacacactagggaatcatagtcctcatatatacgttgcgcgataatgtcgaacccatcaggtttgccctcacggatatgttttcggtctgccaggagtaaaactgcggattctacaagcttgtcactgcagcgcctggccgggcataatcacctaggcccggagcgacaaagaacaccaatttactcagaaangcaacagctatgatatagccagcactaaaagatcnnanagntnggatgatgtnagnnnnggccccccgctcccagtaatatcagtggggaagagagaacctgtttccattgaaacanncgtcctcgggcccacgccgaaacccagacgagaaaagcacgcatacggctgagctgaggtgccttgccctccaacacagttttcgcacatcgcaaggcattatccccgccaatgcaggataaggtttataag

SEQ ID NO: 75795 - DNA, 396 bp, Oryza sativa
  Clone ID: PAT_MRT4530_7584C.1
tggtggtttattataatatgtgaggtattttattagtcttttgaattttttgttttttaatttgctttagtaccggaaaaccaacaaataatggttacagggacatattcctctgattctccaaataataactggccaggggtagggtgctacctggcggagaaaccagaatgaattggaggaattttctcctgggctatggctcacgggcggggcttttatcagagccagtaaggggtaattgggcactcggaaggagaaccttcattgcttggtggggtttaggttctctattttcgaggggggcttggaaaaaaaccaacccctttcgttaaggaaaaagctttccggggggcccgggtgaccgggtggctagggacagactacactttttct

SEQ ID NO: 75796 - DNA, 276 bp, Oryza sativa
  Clone ID: PAT_MRT4530_75850C.1
gtcacgcctcctactccccaccgtgctaccgccaactccgccccaacacgccgctgagggtgaaaggggaaactaccactgcgagagcgggaccacaagcgcaaggcttcgccacatcatcacccaacgcgaagccccaagctgtggcttgacgaaaagtagtcgaggagcacgtcccaaggagaggaggaggcgaaaagaagtcaaggagcacgtccctcacaaagacgtcgtggctctacgctggccgctggggaacacctccagctcgaaaag

SEQ ID NO: 75797 - DNA, 222 bp, Oryza sativa
  Clone ID: PAT_MRT4530_75851C.1
atggcagaacagcaacttgatcatgtcaacagagaaccgttcagcagcttcatggagtggaaaaattccatatgggataaggtttctgaggtgatgttacacttaaatgccatggccgcagtacattccgcgaacaaacggaagaagcaccggacactgtcctttctcaagacggagtccaagcggggagatatatcaaagaaggcatcccgcaccacctaa

SEQ ID NO: 75798 - DNA, 3207 bp, Oryza sativa
  Clone ID: PAT_MRT4530_75852C.1
atgggcggccctactccaacgggagagccgcctccctccctatcgtcatccccaatgcgacagccgtccccggtgccgccccgaccaccggccccagcgcctccacaaccgccggccacggcgcctccatcccttgtgccgctgctgctggtggtgccgtcgtcgtcagcgccgtcgtcatcgtcgaatgaggtgctgccgatgggagaaaatgcccatgtgctgccgatgggagaagatgcccctatgctgccgatgggagaagatgcccctatgctgccgccatcgtcgtcaaaggaagtcgtcccggtgccgattgccgttgttgctccctccattggcatccaagatgggatggatccatattccacttatgttctcacggtgagaattattcgcgcgggcagtagatttgagggtgcatgggtgtttgattggacaattgattccgacaccactaattttaaagactttgttgatgacatttgtgagaagtatccatggggcatagatgaaactgtaacagtgcagtaccttgatagtggtttgaatctgttttgcacaatatattctgataatgatttgatgacaatgtttaagtgttttgagcaaaataaaactggtgatgtgtttatcacaattaatggttcaagtgatgagtccatcattggcaagctgtgtacaccatcagttcctatcccctctcaggcatgtatttctcagatcagcaatgaaccattagaggatggtaatttggcagataacatggtggacatgtatctggccaatccctttgaacattttgagcatgtaggtgttgatgaggaggatcaatactcaattggtagtgatactccagagtctgataataatgaaagcaatacatctgattctgaatatgtgcctggggttgatgaggatgaggaggatgatggtgatgatagctctgatgatgatgatgactgggtcacagcaaatgccacacctgatgaaagtacccctatcataacttatgataaaaatgacccaccaatgagtaagggtactatttacccttctattgaagagtttcgattggcaatagctcaatattcaattaagcatgaatttgaatatgcaattgagaaaagtgaacctaatcgattcagagcgcattgtcctgtgaaagggtgtaattggagaatccatgcatcacgctcggctgataagaaatcaattgaggtcaaggttcatgtggctgaccatgagtgtgcaagcactagaagagatgagaagttgaagagggcatccaaggcatggatatgtgagagggtgattgaatggatgagggaagacccaagtgttggaaccgccgagttagtaaggaggataaaagaacaccacaagataaatgtcaactacaagagagtgtggactggtcaagaattagcacgtaaaaggttgtttggtgattgggacagcagctttgacaagctatataggtggaagggagaaattgagaagaggtgtccaggaagtttaatatctattgaccacatgacattcaaggagaagcgaaggttcacacgaatgtttgtagctttcaagccatgcactcatgggtttagagctggttgtaggccttacttggcaatcgacagcactcatttgacagggaaatatagaggccaattagcaacagcttgtgcaattgatggccacaattggctatacccagtggcttatggcatcattgattcagaaacaagtgagaattggatttggtttatggagaaattgcgattagccattggtaacatggatgatttagcaatatgcacagatgcaggcaaagggattgattttgctgttgaggaggtctttgagggcgtagagcatcgagaatgtatgcgtcaccttgttaccaacttcaagctaaagttccatggcaaagtttttgatgaacatttgtggccagctgcatatgcatggacagaacagtctcactcctatcacatgggaaaaattgaggctgctaagccagaagcaatattatacttgaaacaacaccacccaaggttatggtctagaagcaagttctcttctgcctcaaaggttgattatgttaccaataatcttgctgaaagctttaataactggatcaataagcacaaaggcctgatgttatttgagttgatggacaagatcagaagaaagactatgaagatgtttcaaaaaaggaaaaaggttgccaacaagctgcaaggacagattatactcccaagtgtgatgagagagttgaatgctaaatcaagagatctggacttagatgttgataggagtgatgatttggaagctgaagtcactgagaaatctccaggtgggaagaggcatgtggtgaacttggaagaaaaaacatgcacatgcagagaatggcaagtttccggaaagccttgtatccacgcattgtcgttcataacatcagtgaggggtttgcatatagactcttttgtagatgaatgctatagtgtagctaagtttgcagctgcatatgctccacgtattcctggtcttactgacatgtcacaatggccagagagtacacatggcttctttctttatccaccaattttaaagagaagtgcaggtagacctaggaatagaaggtgtaagggtggagctgaagggaaaggcactagtaagggtaggtcaggtagccaaaaatgccctatttgccacaactttggtcatagatggcagacatgcaaagaagctgatccagatgctaaggaagcatatgctcttttagcaaaaacaaggcaaaagagaaagaaaacaacaccatcaaattcaagtacatgtgctgccaatacagtacaaattgtcacttcaacttcaactccaactttggttggcccaccaagcaaaaagaagagggcagctgcacctgatagttctagttgtaatttaattacttgtgcaaatgcaaatgctacatcagtgagttcaagtggccctaatcaaacacaaaaccaatgtgctctccttcctgtaacagtaacagaagtgagcacaccaccaccaaaagcaaaggccaaggggaaaaataaggccataacagcactaccagatagcccatctatgtcaactagaagtaagaagaaattgaagaaattgacatcaactagcccatccatgtcaactagaagcaagaggaaattaatttga

SEQ ID NO: 75799 - DNA, 399 bp, Oryza sativa
  Clone ID: PAT_MRT4530_75853C.1
attacattgaaagctgatttcttttcatctcttctgattgtgaacggaccaatttaggtggtgcgggatgccttctttgatatatctccccgcttggactccgtcttgagaaaggacagtgtccggtgcttcttccgtttgttcgcggaatgtactgcggccatggcatttaagtgtaacatcacctcagaaaccttatcctgcattgtcaggcataatgccttgcgatgtgcgaaaactgtattggagggcaaggcacctcagctcagttgtatgcatgccaatccaaactgcattaacccatatggaatttttccactccatgaagctgctgaacggttctctgttgacatgatcaagttgctgttctgccatggtgcttcagccaatttacacaca

SEQ ID NO: 75800 - DNA, 2616 bp, Oryza sativa
  Clone ID: PAT_MRT4530_75854C.1
ttactaaatcatcattacaaaggatattgcatgcagcaacaaaaaggaaacagtagctcctacattaccaaatggcaagccagtgctattcaatggatctcccactgccaatgccaatgtgtctcccaacaatggcgtcattgagaataatcagaaggctgtagctgcagttctcacgagtgttcctgctaaaaatgtcagcagcccagcaccactttcagtgccagaggtggaccatgatgggatcgaacgcattcaaaacggcagttaagtcccagaaatacctgaaaatgggcagcagcaaggccaaccacccggcggcttcctcgtccaaggtctcctccgtctcctcctccaaacccaaacccaaacccaccccgattagaaaccctacgcctccgcctcctcctcctcgccgccgcacgcccccgcctccgccgccggggtcgggcccggggccgcagcgaccttcctacctctcggtagcgctccgccgccgcgggcctcccgcgggcagcgcggccgggaccccggcgccgccgcgcgccgccgccgcctttgatgtcgcccccccggtcgccgagcacacggaccccgttgtcttccccgcttcattagccgagatgagcggcggcggcggcagcagcagcagcgacgatcagatccttctgtttgggagcttcacagaggctgaaaccaagttgtggcagcctaatgcaaataaaacacgggaactctctgagatccagtttgggtcactgaatttctcagctctaaatttatcgaaagaatcaaattctattactcaaggtgctgtctatcctgcaaaattaagctcaattcgacgtgctcgatgattcaaatgttaagaaagacgagaagtttgctacaatagcttcaaaatcagttattccctccatgtttgacacagttctgagaaattttactccagatgtgccagctggaacagcttctaggccaaggcaggaagatgctcaagaattcttaagttttgcgatggatagaatgcatgatgaactagtgaagcttaatggcaatggctcaaattcaaaggagggtatgattgtttcatcaaatgatgatgatgcttgggagactgttggaaagaagaacaagtcagccataatgaggagtcagagttttgttccctccgagttaactgctatttttggaggccagctgcaaagctgtggtgaaagctactggtaacaaagcatcagtcaccgttcagccttttcgactgatccatcttgacatattccccgatgctgttcagaaacttgatgatgcccttcgtctgtttgctgctcctgaatcttctaaggctggttacccaacactgaatgcatttattgagttcatctctcaattcgacgtgctcgatgattcaaatgttaagaaagacgagaagtttgctacaatagcttcaaaatcagttattccctccatgtttgacacagttctgagaaattttactccagatgtgccagctggaacagcttctaggccaagatgtccagttttaagggttcacctcaatttgcagcaggaagatggtcaagaattcttaagttttgggaaagacagaacgcatgatgaactagtgaagcttaatggcaatggctcaaattcaaaggagggtatgattgtttcatcaaatgatgatgatgcttgggagactgttggaaagaagaacaagtcagccataatgaggagtcagagttttgttccctccgagttaactgctatttttggaggccagctgcaaagctgtgtgaaagctactggtaacaaagcatcagtcaccgttcagccttttcgactgttccatcttgacatattccccgatgctgttcagaaacttgatgatgcccttcgtctgtttgctgctcctgaatctttggaaggatacagaacagctgctggaaaggctgggttggtgacggctagaaaatcagtgaagatacactcactttcaaagataatgatactgcacctgaagaggtttagttatggaagtcatggctgcacgaaactcttcaagccaattcacttccctcttgagctggttcttagtcgtgatctgctgagttcgccatcatcagagagtagaagatatgagcttgttgcaaccatcacgcatcttggggcaaacccgtccaggggccattacactgccgatgcaaagtctgccagtgggcagtggcttcgcttcgacgatgataacgtcacacctgtcagtctgaacaaggtcttgcatgaccaagcatatgtcctgttctacaaacaattataagtttgggggtattgctacggagttgattagcggttctcttattgcttgaacagctagatatatactaactatatcgcccagttaatgtagctgccgtgtaactgagaatcttgtgtcaagtgcctggtttcctgcgtttatttatatatgcttgatcacatagtgggggatttttgttcaggccattgttgaggttttgtaaaatgcaaatgtcatcttggtaatgaccattaaagtaaccatgagatgatatcactcgttagccctaaaaaaaaaaaaaaaaaaaaaaaaaaaaaaaa

SEQ ID NO: 75801 - DNA, 858 bp, Oryza sativa
  Clone ID: PAT_MRT4530_75855C.1
atcacaagagcttatatctgattgacacgtggcaaaaattttggtgatgtttagctaatttttcaggctgccacgtggcccaataacattctagaatcatgaccctgatataggtagaagagattgctgataaagaaaaatggcattttgcaacacatttaacttgttcagtgttcaagctaacgttgaacctggtacaagtacaacatgctggcacgcatgtccacatctcgcgggtcgagggttcaagccgaatacaacacacggcatgttgcatttcatcataatttaaagtacttagcatcactttgaacaaggttttggtggtcacatgtatattcgcaaccttcttaaggtgtccgcaaaagacgtgcgcagcataatactttgcagacctatggttatcaacagcaacatgccactaggcacctttttgctcatgtctttagcaccttcgtgagcattctgaatgcagcagtactgtaccttctcgattcatgagtaccactcagttgctgaattcttcccaagaaactaatattatggttcagactcgaagactcgttactcactactgaattacggaactgtggacgatgaagcattgacttctcatctgctgctccattggatacagacagctgggcccctaatactgatctccagtaggggaaaaaatttctctttatgaatgttggatcccatcctttaagtgccttttttctcgcagcctttttttctgcagcaggcagagaagtagacatttgtgcaacagccttggttacatctttgtgaactatgtcgctgtaagaaatcttgttatatggacagaggatcatggtgtcaatgtattcttcg

SEQ ID NO: 75802 - DNA, 900 bp, Oryza sativa
  Clone ID: PAT_MRT4530_75856C.1
atggcggcggaggcggcgccggagtgggtggagaagggggacaacgcgtggccgctagcggcggcgacgctggtggggctgcagagcgtgccgaggctggtgatcctgtacggcgactgcggcgcggtcggtccgaggacggagaaggacagggaggcgttcccgccgaacaacgtcctgctcacgctcgccggagcggggctgctgctgtggatggggtggacggggttcaacggcggcgcgccgtacgccgccaacgtcgacgcgtcggtcaccgtcgtgaacacgcacctctgcacggcgacgagcctcctggtgtggctcctcctcgacagcttcgtcttcggccgcctctccgtcatcagcgccgtgcagggcatgatcaccggcctcgtctgcgtcaccccggcggccaggctggtgctgcacaagcggagccgcctcctggcgcgcgtcgacgacacgctcgccgtgctccacacccacggcgtcgccggcagcctcagcggcgtcctgacggggctcctgctcctcgccgagccgcgcttcgccaggctcttcttcggcgacgacccgcgctacgtcggcctcgcgtacgctgtcagggacggccgcgccggctcggggctccggcaggtcggcgtgcagctggccgggatcgcgttcgtggtggcgctcaacgtcgccgtgacgagcgccgtgtgcctggccgtcagggtggccgtgccgcagctcgccggcggcggcgacgccatacacggcgaggacgcgtacgcggtgtggggcgacggcgagacgtacgagcagtactccgtgcacggcggcggcagcaaccacggcggcttccccatgacggccaatcccgtggcgtccaaagccgacgagatgatatggatataa

SEQ ID NO: 75803 - DNA, 3279 bp, Oryza sativa
  Clone ID: PAT_MRT4530_75857C.1
ttttggttttttatttttttttgtttttttttttggctgcatctatatgcaaatatttttttctccaagcaaaaacaccaatccacaaaagacactttttgaaacaaattatacatacatgaagaaaaagaaactactacctatgtcaaagacagtatataatcttcccctgttataacaacatgtacactagacattgcatctgcagcggtctttcttttcttcttctcttttccctgtgaacttgttcagtatagttacaagaccaaaccaaatacaccaagcccatatgatgtagttctagtagttacagccaagaacatggcaagaaactatggagatgatgaagatgatatgctacaactcgacggagacgtaggtggcggagtagtccggcatccggtgcaggctccggagcacgctctcggcgacctgcttcgtcgcggcgtcgcccttgtggaacgcgctcaccagcgcgctcggcagcgcgcggtccgccgtcacgtcgcgcacgcaccgctcgccgccgtgcgccaggaacctctccacggcccagaagcagcgccgcgacaccgcgccggcggtgtcgccgccgacgtcacggtgctgccgcagcgcgcgcaggacgtgccgcgcggcgtcgtgctcggcgagcacggccacgccgcgttccacgtcgacggcgtcgtccatgagcgtgcagagcgcgcccagcacggcgtcgaccacgcggccgttctcgttgctctcgaggacgccgacgagggcctccaccgcgccggcctccgccaggcagaacgtggtggccggggagcacacgccgcggtgcaccgggcagaggcgtccctgcgccggcggcggtggcggcttccggttgttgtcgtgcacccgcccggtgtgcgcgtcgcgcaggcgccggaggatgttcttcttcttggggcgccgctgctcctctgatggcggctgcgagaggttcaccgactggtggctaaggttctcgaggccgaccgccgcgagccgctgcacctcgtcgctgcccgccgaccgcacgagcagatcggtgagcaccgccgtgaagttgtgatccatggccgccaggagcacgtcggggtcgtacagcgtcgtcgtcatccggacgagcgcgccgacgaggccctccatgtacgtcttggcatggcggctcactcgcatttcgccgcgctgcatctcctctatcttggccagcaacgtcggcactgctccctgctccagcagcgccaggttgagcgtgatgttctggtacggcagcctcgccagcagcgtcgccgccacggcgtgccgttcggtgacacgcccgggctggccgatgctcttcaccagccttcccggctgccctggcgccttgcagagcttctcggcaatggtgtgccccatctgaggagacaatgcaatgagcagcctcgtcgcgctgatgcctaacgcctccgtcttcgagcccatgaactcgatcacggtcaggctgctgtcctgctccttcatgacggacaccaccgtcatgagcggctttgggagcgcagtgagcgcgagcagcacacgtatgatgctcaggttgagatcatcaggcatggagcacttgagcatgtgggtgaagttgtacaccgaatactttgaagtgatgacatggccttccttgttgacgacgatggtgtcgggatcgagaccggactcgacgatgttggcgagcactgcagcagcctctgtcttggaccccataggctcgtcgtcgatcttgcggatgaagagctcctccaccatgaccggaacagcaccggcgtcgacgagagtcttgctgttggggccatctgaggagatctggacaaggacatcaagggccgccttgcggatcacagtgttgccgctatgcaccatcttgatgaggatctctgaagcactcccagcaatgttgatggtcatttcctgcttctggaccagctcgccgaggtagctcaccatctccatttgaacatcttcagacccttccactaaatgtctttggagaggatccaggtaaccactttcagccatgtacttaatgttctttgggcagttctccaggttcttgagaacctccccagccttctctgcagcaaccggatcatctgaatcattgaatttcattgtggtaagcatcaatatgcttccagaagttgatccgatgttttccaacaatagctccgatttcgaaagctctagcaagaaagagatggctgcatgtctttcatcaggactattactagaaagcagctttattgttcttgtaatggctctggtatttgctatgacttcctttcctgtttcatcctcagccaataagcaaaggagatccagcgaatcacagcgtatcagaccatccttgtgctccaacaaacgagggaggaacttagttatcccgattttgtgcatctgttccctgttctttctccttatcttggccagcagcttcagctcttgtatggcctcaagcaacattgcctctgtggaagccatggagagcgcggttcgtgcaatcctgacccttgtggcttcatttctcataatccattctgcaattgtgctcttcagtggaacattgctcctcagtgccttgctttgcatcgacatctttgtcacagggcataccacaggttcagaaccatcagcaaatttctcaaagtactcctcaatggctttcctatcatatgtcacaccactttctgttgtcactggatcaaccatgaccttgtttgtcaatggacagaagaacgaatcatataatggctcgacatattctgcaacttcagggagcgaattgaatgaatgtgcaccgatatcatgtgattcatggtacattccctgcaggaagtccaccagccttggcatgtcactattgtgcaatgttcttctccggggcctgctgtttgccgggattatcgacatatcggcctcagagtaaccatcgcaggaattctggtcacaataacgcggccgatgtcctgcaatctgaaggtttgcatctgctctgccatctggaaacctgctgctaccaaatgttgaagcaggtatcctgctgagctcatgcccaatgttctttatgacactgtcaaggtcctcggtcatgcccaggaggtcatcgttcttgagctcccgcgcaacggcgctgcacctcatgacgaggtccttggcgaggtcgacattggcagccagatactccatgacgtgcatcacattaaccgtcgaattctgcactctctgcagctccat

SEQ ID NO: 75804 - DNA, 2404 bp, Oryza sativa
  Clone ID: PAT_MRT4530_75858C.1
cccctcctaaaaccctcgcggccaggcggtgcgccgccgccgccgccgcacgcccatggcgcggccgccgtctccctcaccggtcgtccccgtcaagcgagagcccgacggagccaccgccgcggtctcggatgcctacacgccccgcccaccgctgcggaagaggcgccgcctcccgtccaccccgacccagcccctcctcctcacgccgcaggccatgagctcgacgcgcgactccttcgcgggggagcggagcggcctggctccggcgtccgtgcccacctccgtgaagcgcgaactcggcgccgacggtgacggcgatggcgacggcgaccgggacgcccgcgggaaggcggtcagcgtggcggagggcaacctccagccccggaaaaccgctctggcggagctccccaccctcttggccaaccgccgccgcctcgaccgcctcctccacgagctcgtccgctcgcaccgctggggcgacgcggccggcgtcatctccgcgctcgtctccggcacacggcaccccgaatccttcgatgagatgcgcagcgtgttcgcggtcgggatggagatccataggcggctcgctgagaacagcggcatccaacagaacaccaggagtcgctactacctcaggacgcaaaagttgtacgatgtttggatgcggaggctaatgtggttacccacttgtgaaagaaaatacatggttaaactcgagctagctcttttttatctttcacaaggttgtatcgacagcgcatacaacacaacaaaaactcttattgctaaggatggactaaagacaccaattgtaaatcttatacatggtctgatatcatatgataattggtattctggcctccctgaagatatgcaacttgaggagtttgatgtttactgtgaatcacacacagtttcaatggcaacacatcactgtgatgaaaatggtcagcaggatacttcagatgataattgcagcattgatgctgattccagttctcctggttgctcttcaaaaagttcaatcaataattggaacatagacaagcaaagaaagtttcccgagaaacctggttttgttcattctgcacgggaagatgattcagttggatcacaggtggacgagaaaatggttgatacagattttcgaagcgtgtttttcaataccgccaacagtcctacttgtggattggaaaaaagcttgttgccattacggctaaagcattctgatgggactccaaatgcttgctttgattcatattggaagtacaagtcaacacctaatgctttctatgaagacgcagagaaatgtctaagggtggctctttattcaacaccaccaataatggcagccttactgccattaatacagattctcttgcttggtgataaattgaaagatgcacttgctgagcttgagaagatctgccacagttcaactacagcgcttcctttcagattgagaggtagattgctggagtattttgaccaaaaccaagtatcaattatttcttcttgctatgctgaagctttgagaagagatcctacatgtacctactcaatggagaggctaaccagactgcatagaaaaggctattataatacaatcgaactacttgaggcaatagctttacatctagattctgtcaatgggaaaccttgcatctgggaggagcttgtatcatgcttccttcggctcttttctgagtggactactgattacggggattgcatgtcatgtaacgtgcaaggagatgcaaccttcactgcttctagtaaattttcctgcgtcttttttgagcaaaatacaagagaaacatggaaggtccggtgcacatggtggatgaaccgccatttcagccaaagtatttgtacatcggaaaccctaacaggtgattgcaaactcctcgcttccaaggctgcttgtgcctgtcacttgtttggacccgagttcgagtacgtcgaagccgttgagggttatctttccgggcaaaaagctgatgacgagattgcattcttatctagaaatatgcagaactctacgccgcggtcgcgcttggcccatcgcctggacaggcatgccatcgccgccactggtgaactctgcagcctcctgagactctgagccgtagttcatggatgttgttgtaagtatagttctggcacagttttgtaccggtgcctctcaaaatgaggctaatttttgtaggacgagaaggggtgtatcaagtatagtgtagtgtaggggattagtactggcggtggtcagccatttgttgtggatgtggtgacgaacaaggaaaagaatactgaccttaaatatattttatttttattgcttctctattggagagtagtaagggggggagccctgctgcccggggacccactagttaaaaaa

SEQ ID NO: 75805 - DNA, 522 bp, Oryza sativa
  Clone ID: PAT_MRT4530_75859C.1
ttaaagcatggagattatgttggttctacctctggctcgagtgagggtaaaagtagggaccatgttgactcatcctcccgttcaactgaacagttgtggcaagccttctttgctaatccttttgactggtgggataacaggacaaataaggtaactttcttcttattgttcatttagacattcaaatgcattatcttgtaatatatattacatgataaacggactaatggcttctgttcttgggtaaaccatctacctccttttaggagggtcatatcctactaagtactgctgcaaagatttgagagcacttctaatagtccaaaacttctcagataattaaaatactactatatgaagtattaatggttcatggagtttggctgaacattgtaaaacagaaacattgaaggtgtcaaatactcaaatgtaatcatgaaggaaaaaaaaaaaaggaagttgcaacatagtcagcatagcgatgtggctattttgtatttgagtcatgcaatatgtttttgg

SEQ ID NO: 75806 - DNA, 1047 bp, Oryza sativa
  Clone ID: PAT_MRT4530_7585C.1
tcagtatggcagaatcccgagggctctaccgtactccaagaaggcatcatcgtacatctcgtccagcgtcctgttcttgaactcgaacccttctccggcgagcttctccgacgagaggcggatcctcggcttctccgggaggtcgccgagggcggcgacgtcgacattgtactccgggtatttggccgccaggaagcgggcgagctgcagcatggtggcgctgaggccgcagcagatgtacctctccgccgccgccgccgccgccgccggcggcggcttctcggcgaggaatatctcggcgcggcagaggtcgtcgacgtggaccagcattagcccgccggtggccttctccatgagcttcacggtgctgatcatctcctggtcgccggagagcaaggagaggacggcggcgacgcacggtttggcctccgctgccggcgccgggccaacggtgaccaccgggcaaacggtcaccaggctgatgccgttctcctccgcgaccctgctcgcttccttctctgaaagaaccttcgaaagcgagtacgcctttccgggagatgtcttgttggctggtgagctgaggtagtcgacgtcggaccatgacgactcgtcgaggacatggccgtcgccttgcagcggcctgccggagacggcggccgccgacgatgtgaggaccacgcgcctcaccgtgccggctctcacgcacgacctcatcacgttcagagtgcctcgtacaccggcttccaccagttctttcatctgagggttctctgacttgaggttcaccggagcagcgacgaggaaggcgtaatcacagccggcgaccgcctcgtcgaagctgccttcctcctccaagtcggcgcggaagaccgccaggggaccaagtgcgtgcaagtccttgaagtgggagttcttctccatgttttcggggtttctgactgtcgtgttgacagcacatcccttctgcagcagcatcttgatgagcgccgaagcgatgtacccgttgccgccggtgacgcacgccgtcttcctctcaaccgccgacat

SEQ ID NO: 75807 - DNA, 658 bp, Oryza sativa
  Clone ID: PAT_MRT4530_75860C.1
tcaggacgagttaggttgttggagcttggtcggcgcaaagcacgttgcgagattgttgccatgaggtgcaaggtggactgatgtgcaaacatgtttgcagtcagcaatgtacagtttttcatttttcttcagtttttgctgtgtacttaatctccttctattaatataacgccaagcaacctgatactctctccattccaaaatatcgcagcgccgcaccccgaatcgcgccggtcggaacctcgccctgaacgtgtccgccaggctgggccccgccgccgccgccgccgcggagaccgacacggccacggccgcgtcctcccccccttcctcgccgccgagcagcagcagcagcgacggcggcgtggggagccccaggaacaccagcgccgcccgcaccacgccggccagcgccgccaccgacaccaccgcgttgtacagcacgtacagcacgaggctatccttcggcgccggcatgctggagatccccatctctctctctctcgctcgccgccgacgaacacaacaaattgcagcaaaccccctcgaatatctcagcccgctcgatccgaggacctatctgtaatttacgattcttccggggagatcgacgcgaaggagtggagggtgggaagcgtttgcgtacagtcccggccgg

SEQ ID NO: 75808 - DNA, 737 bp, Oryza sativa
  Clone ID: PAT_MRT4530_75861C.1
cggcacgagggatcactttgcttactgctatagctctagctcttcagttgtcacctttgttttctccttgtctttctctgcgatgtcgtggttgctccactctcttctcctcttctccttgcctgtctgatcgatcgcctcgccaccgccgccgccaccgccgccgtcgtcgtcgtcgtcgtcgtatcggcatggaggtgtcccacatggccaactgcagcaacgtctcctcaccggagcagcagccgatgccgccgtcttcggcagcggcgtcgtcgccgtcgccgccgcagcttgactacgacgtggtggtgatcctggcggcgatgctgtgcgcgctggtgtgcgcgctggggctcaactcgatgctccagtgcgtggtgcggtgcacccggcgcgccgtggcggaccccgtcggctgggtggagcaccgccgcgccggcgcggggctcaagcgcgaggacgtcgtggcgctgcccgtcgccacgtacgtcgcctcgccggcgccctccgtcgccggctgcgccatctgcctgtcggacttcgccgacggggagagggtccggctgctcccggcgtgcggccaccggttccacgtcgtgtgcatcgacaggtggctcctggcgcactgctcctgcccgacgtgccgccgccgcccctcgccagaggccgacggccacggcgccgtcgtcggagaagaccaccaccatcgcctgcaagttttgactgctgcttaa

SEQ ID NO: 75809 - DNA, 510 bp, Oryza sativa
  Clone ID: PAT_MRT4530_75862C.1
gggtgagggatggtttactattgattggttatagccttccttccaagcatccaagaaagataaagagccaagccattccaacataaactgacactttaggatcctctaagcctttctatagaacccctaagtagggaaggtactaaaaagaaactcaaaactagcactactaacaccaaggctgaagaggatgacctcgaaaaagaataccattaaagatgtgcgccttccctccaagcacatatatgggatatggagcactcgtttgtccacccgtagtccgtgtatagtagttgtcagtgtcccgcccttgacagcaacgtcacgtcttgttcgaactgcacgtttgaaagcccaagcccagaaagaccagtatcaacgtactctcccaagttgccaggataaggtcccagaattcaaatggaagacagaaagagaaggccattcaaacctaatggcccaaccttacgaatcccagacagatagtcttaaaaaaaaaaaaaaaaaaaa

SEQ ID NO: 75810 - DNA, 588 bp, Oryza sativa
  Clone ID: PAT_MRT4530_75863C.1
gggagtgttgaagagaagcccttgtcgggtcgagaagctgaggccaccggtggcggaggtgccgaggtgcgctgcagtggagaagcccaggtgcccatctgtcaccgggccaatcgctgctggcagctcccacccgtcgagggggcgcctcaactagatccaaccatcgcagcgccgccacagctggatccaattgtcacgaggccactattgctagatctagccgccaccgttagatccggctgttgcaaagcttccgaccgtggaggaattgaggcgctcgcgatagtggaggaggaagagctgaggcacgcagtcaccgcagtagtcgtcgtcgctcccgaggccgacgacggtggatgcgcccctcccgggacaggggatggtagattagccactttaccaccctcgcgcgagtcgcgatatgccattgtcatcatttccctacccaccactgtcgtcgtcgttgtcgccctgtctactggcgtcagatctgaccatcacagggccattcccgtcgccgctgtcgtcacgaccgttgtcatcgctcccatggataggcggtgggggaagggggacgggtgctag

SEQ ID NO: 75811 - DNA, 416 bp, Oryza sativa
  unsure (1)..(416): unsure at all n locations
  Clone ID: PAT_MRT4530_75864C.1
gtagcaatggtgcaagaagcaaccttatacacaatagaaagctaaatgaggcagccataccacataataacattaaatcatgcgaacccagcaaatcacacggctacttgttgttgccatagcacaaccaaatccaaaatcaggaaaagaccactgaacatggggcgctaggtacaaccacggtaaacaacacacccatgcgcagtcccacacacacccacatctagcttangtcaaatgacgcatagctatactgcctccaccctgagaacatacggattgctccactatgactgggagacccccttgaaccacgccttgtatctctacagggacagaaagagagccatctgcaaagtacttagtgatagactgaaccttgccaccaatgagctctgggaacaagagagacatct

SEQ ID NO: 75812 - DNA, 252 bp, Oryza sativa
  Clone ID: PAT_MRT4530_75865C.1
atgacacatcactggacctggcagggtgttgtgcgcttcgtcccctcctttggtcactcgatctccgccacacactaccgagctgctgcaggaggatgccccatcgagggagataggggatgctgccaccactatctgacagggtcaccaggcttgtgtcgccgttgtcctttgagagctcaccctgctgccactggctttgaggtggagggaagggtagcggcgttaccgccgattagggacgaggattga

SEQ ID NO: 75813 - DNA, 2509 bp, Oryza sativa
  unsure (1)..(2509): unsure at all n locations
  Clone ID: PAT_MRT4530_75866C.1
tccggtattcccgggttttttttttgcctattctcaattatttttcattcatccaacacaacaatattaaacaaaaatggtaactttggtagctatcgccgattgctctataagttgacaactgatatgttcaagtttcaacagggtgcacaaagggcaaaaacaacgatgttaagtgtctatggttggacaactcaaggtactatatcaatcatcactgccagaatctatatcggagtttgccttttggtgggctactccgttcgcgaccttaccctttcctttgctcttctcatcctcctcgtcatcgctgtactcgctctcgtagtcgtcgtactcctcttcttcctcctcttcttcttcctcaataccatcctctgccactgggccttcttcagccacatgacctcttgttcctgcccggctgcgcttcaggaccttcaacttcaagctggtcttggtgtcacatcctatccatgcgtcgcacaaacagaaggaagtcaggttgtgagtgccctcggccggggcttggaacttgcccattaccaacctactgcctttcttcaccctgtcgactgcctctctaatcgcaatccctatttcctttgcacttgcacctagtgcttcttgggtctcttgtatagcttttgatgctgcagttatagcggtagtctcatccatgaagctgaccttctgggataaccaaacttcattcgatgcagcatctgctagaagcaaccagaagttctcttccttgtggaacgggaaggaaggagcatggggaagagcagcagttaggccattgcgacggtgaagtgagacccaagcatacatggtcacaacatcaccctcttgaatcccctcttcgccttcagtctcacatttaatatccacttcaatagaaggaatcatctccagcacaagctctacatcttgagcaccttcatcagaaagcccagcaacctgtgtcagcaacgtggcgcgttcctccacaggcatgtcacagaattcttggaatgaacggattttcttgcgagcaatttttttgacaaccgtttcagtaaaatgcggtagctgcaagaaaggtgctattccttcagagttgcctccgctagcttttcgtgcactgagagggacagcctggatgatattttgggaaagctcaattacaccgattgcaggcctgagccatccaaaaccatggggactccttggtagtagtgcaatcttgacaagttcatccagaagacgaggtgcaagttcaagcatgtgcctgtaatccttcagtaacgctggtgtcaaagcaaatgactctccagtgaggtgagcctgaatcaaaagctccatcttcactagagatggatgctgcttccagaatttagcttgttctgttctaatattcttcaagtctagatttaattcactcctaacagctacaaataatttctgcaagggttcatcgtcactgcgccggactggcatctccatatactctgcagccttaatgaagacatccatgactttgcttggagccagtgaaggcttcatgaagtagtaataagtggacagagtttgatgcatgacataatttccggtgtactttgatgaccttgacaaataaataactgctatcatcaagggcaagagtatgcatagccctactattccaagaagcattattccaccagatgcaccatccatattcaacaagaacttgggcaaagcaatgcccatttgcatcccctggcgtccatctgggtgaccatacttctcatagttttcacgagatacaggatcagttaaagcctgatatgccttggatataaattcaacaaagtacttgtgggcctcaggatcaggatttttatcaggatggtattggatagaaagtctacggtatgatttcttgatatcagactctgatgcacctggttccagtccaagaatgctatacggctcaaacacttgtacctcgcggctaacatgcttgatgtagtatacaaggaagatcataactatccagagaagcaggatggtgaggttactgcatgtcgagaagttggatatcctcttgtagatcgacttgcggtacttgccggagcggtggcagccggagcagcggcagtggatggtcttggccttgacgttggcggcgcggcagaggcgcatgatggtgtagggcacgagggggagcgcgatcatggtgaggatgaatatgaggaacagcgagctgttctcctccgccgccgccatggccgcttaaaccactaccaccacctcactactcctcctcctaccggataaaccaacccccccttgggcgagagcggagagagggggcttcccccaccggatctggcggcggggatggccggaggcggggcggatctggggcggcgcggcggcgcggcgaggcgaggcgaggcgagatcggggagggagggagggagggaggcggtggtggggaggggataggntgggtgggtcggacccacgacacgggggggag

SEQ ID NO: 75814 - DNA, 1868 bp, Oryza sativa
  Clone ID: PAT_MRT4530_75867C.1
cgggctgcaggaattcggcacgaggattcggtgctgaatcttgcggggatggagcatgtgatcggggggaagtttaagctggggaggaagattgggagcggatcttttggggagctataccttggtgtgaatatacagagcagcgaggaggtagccatcaagttggaatctgtaaaatcaaggcatcctcagcttcattatgagtcaaaactatacatgcttctgcaggggggaactggaattcctcatctgaagtggtttggagtggagggggagtacaatgtcatggttatcgatcttcttggtccaagtttagaggacttattcaactactgcaacagaaagttttctcttaaaacagtacttatgcttgctgatcagatgatcaacagggtagagtacatgcacactagggggtttctacatcgtgatatcaagccagacaacttccttatgggtttaggccgcaaagcaagccaggtttatgtcatcgactatggtcttgcaaagaaataccgggacctccaaactcataagcatataccttacagggagaacaaaaatctcacaggaacagcacgctatgctagtgtaaacacccatcttggagttgaacaaagcaggagagatgatttagagtctctgggctatgtgcttatgtatttcttaagaggaagccttccttggcaaggtctaaaagctggcacaaaaaaacagaaatatgacaaaattagtgaaaagaaaatgcttactccagttgaggttctctgtaaatcttatcccacagagttcatttcatacttccattactgtcgatctttgcgatttgaagataaaccagactacagctatttgaagagacttttccgagatctattcatccgtgaagggtaccagcttgattatatatttgattggacgaagcaaggttcagaaagtaacagattgcgatcaagtggaaggacaagtgggttggtgggaccatctgcagaacggactgaacgagctgcaggggttttttggggtgttgtctcaacagcaagacaggatgttcctgacagattctctggtacagtcgatccatttgctagaagaactggctctggttctggccattacggagagcacacaaagcacagaaatatattggattcattacttgcacccaagacggctgttgatttagataaaagaaggcccacatcatcatctcgtaatgggagcacatcaaggaaggctctcttgtcaagcagcagaccaagttctggagatcccattgatccgaaccgcagtaacctaattccaaccagcagtggcagcagtcgcccatcaactatgcagaggcttcaccagtcaacaggacttgagaccaggtcctcgcttaccaaaactgcaagaaatgtccatgatgatcccactttgaggacctttgaacgcctttcaatcagtgctgacagaaggaaataatgcttcgaagagcaaaagatgtgagttgctgctccagtgaggacactggggattccttcacacgatgattactgatcaacaagtaaaaaccattctgtgctacagatgatgctgagatatgcttaagaagtgaagtttgcttactgaatcttggcgcaaaagaaatggttaaagaaatcattttacacgccattcagaagaacccggaccagcaactgtgctggtccaattaatgctgatgttgatcaaatatttgtagaaatgttattgaaataaagcagttcattactagcaaaatatgtactatcacgtagtatttcctttgtgcactgcaactagaaaaaaaaacaaaaaaaaaaaaaaaaaaaaaaaaaaaaaaaaaaaactcgagggggggcccg

SEQ ID NO: 75815 - DNA, 1807 bp, Oryza sativa
  Clone ID: PAT_MRT4530_75868C.1
cggaacggtccgacccaaaccaaacccaattttaccctaaacccgagcgggagagagagagagagagagagagagagatcatggcggcggcggcggcgagtctggtgtccctgcccctcctctcggccatcttcggcgccgccatcgccctcctcttcctctccggatacctccgccgcaagcgcgccgccatcgcccatctccccccttccgccaccgccgccgccccggaccagcccaagcaagttcgaccatccaaccagaaccagcctaagaagggacaccagcgatctcaccacgccgtcgataaggacgccgcaaaaaagcaccatcatcttgatgtcaacactttgagggggcatactgattcagtcacagcacttcatttctccgatgatgcctgcaacctggccaccgtatgtgcggatggagctgtcagagtattcagggttgatgatgtctcaagcaagagctttaaaattctgaggatcaacttgcccgctggggcacatcctacagctattgctttctcacaaggggcatcatcagttgttgtggcagcgcaagcacttttaggctcatctctctacatgtatgcggatgttggtgctcctccagctggcggaaacaaacagcagggcaagctttctccccctgagataaagtgggaacaccgtaagattcacggcaaggagtcagtgctgaatcttgcggcagctcgtgcaacctatgggactggtgatggcagcacaatattgatttcttgctctgaagcaactgatatcaaaatttggcatgggaaaagtggaaaggagttgggaacagtcgacaccaatcaattgaaaaataatatggctgatatatccccaaatggccgtttcatagctgctgcagcttttacagctgatgtcaaggtgtgggagattgtttattcaaaggatagctctgtgaaggaggtcaataaagttatgcaacttaagggtcacaaaagcgctgttacttgcctgtgtttcgctctgaattctgagcagattattacagcttccaaagatggtacaattcgagtatggaacattaatgtaaggtaccatcttgatgaagaccctaaaaccttgagagttttgccaattcctctccatgattcaaaaggttctgtttgccagtatgatcacatgagtgtatctcctgatgagaaagttctggccacgacaagtggatcaacgctgcaatggttatgtgtggaaactggtgcagttcttgatacagctgagaaagcacatgaaggtgatataactggcattgcctgggctccacgaacaattccaaatggtggaactcctgcttttgttttagcgactgctggagtggacaaaaaggtgaagctgtggttagctcctaaggctatttcaacctgaatgagtgtggttggatcctggtcaccctctacagcgcagattcggtgtgggcactgaaggaagagaaaaaaacgatgaaagataatgcagatatgttgcttgagttgagtccttactgacgggagtcgtcaaacataacatgcagagagagtttgtgaaggggagacactgcacttttctctaaatacatatctgtcaacattttggaaataggttgcctgctgctcacaattttcccttttcttgttagaacaaaagaaactagagtggaacttggaagtaacttatcgagttctcttgcattcagtatgcatatgttagttaaaaaaaaaaaaaaaaaaaaaaaaaaaaaaaaaaaaaaaaaaaaaaaaaaaaaaaaactcgaggggggg

SEQ ID NO: 75816 - DNA, 396 bp, Oryza sativa
  Clone ID: PAT_MRT4530_75869C.1
atggagttgctagacattgccttatctctggatgttataaactccggtgtaagcttaaaaggaggcaactgcccaagatcacctcctcacttttcgatcactcttttttacttctacaaatattgtgggcaaaggcctgggtttatagtcaaggctggcatgaagctcactttattacttctacagatactgttctttagccttgatctagtgagctgtgcatatggtgaatacgtattcatctactctggcttcgcccacaataacattacccttgatggtgcagccatggtgactgccaacggcctcctcgacataaccaatggctctaccaggctcaatgggcatgctttctatccaactccgctgcccttctgcaacttctccagtggcctg

SEQ ID NO: 75817 - DNA, 300 bp, Oryza sativa
  Clone ID: PAT_MRT4530_7586C.1
atggaggaggtggtggtgcgccgccgggcatgggattgcgggagcccactgtacgactcgttcgagctcgcgtcggtgtacggcctcctcgacagcaatctcatggcgctgccgttcgccgagcggtccgcggagctggacgcggcggcggatcgcgctccggcgaggaggacggcggcgaaggagcagaggcggaggaagaaggcggcggcggcggcgaggaggacgggcaaggcggtgctccgttccatcttcagtgcagatctcgctgtttttgtttcatttcggcagattttatga

SEQ ID NO: 75818 - DNA, 1342 bp, Oryza sativa
  Clone ID: PAT_MRT4530_75870C.1
ctacgcccaacgcatggccagcaagccgtggcttggcgaaaagcggccaagaacacaggcgcagacggcacgggcgcggcaggcggcaccgcgcggctcggaggcgggctcaaggcatgcgcacggggtgggcgactgggagcagtaggctcgcagcggcggacgactaccccccgctcggatccagcggagacggcggtatcccgttgggatactgtcccaacgggatcgccccctgtccaccttcctcagacgcgagaacgaaggccaccatgggagcagcgcagatgaggctgacgtcggcagcacggacgcagccgccaccgtcaccgagctccggcatggaggacgcggctgccggcgagttccggcgtggggcatggtcgcatggacggcggaggatcctgcgtgtggtgacagagacggcgccggcgacgagctccggcgtggggcgtggacggcggaggatcctgcgtagtgatagcggcggcaccggtgacgagctccggcgtggaggacgcagccaccggctgaggcgtggacgatggacgtggccgccggtgacgaggtcccggcggaggacgcggtcgccggcgacgagctctgatgtggaccgtggacgggggaggatgcggctgccggtgatgaggttcgggttcagtgtggagcatggacgggggaggacacggccgtcggcgacgatacctcgacgcctcgacgcccagctcctgtatctagtaggtatcatatgatacctcgcaagtatcaccccgatacgtcgtagaaatcgcgcgatacctaatacctcgcaagtatcacgctctacgtggtaagaatcgcatgatacatgataggtatcatcatatatctcgtaagcaatcacctgatgcatgttatgatacttgtgaggtatcaggtatctataaggtattaggcgattcctatcacgtatcatgtgatacttgtaaagtatcatgtgatacgaggtatcaagtgatacctgggaggtatcatgatcctcatctgtatcatgtctgctatcatcaggtttcacatatgataccctagaaggatctgcatgacccgccgtcaccgtgtccaagaagcccagctccgacgctgctttcaggacagcatcgcttgcttgtattgctggtttaagcaggaaggaggatggcaaccttgccggattcggccatggcgacgacgcgctgcgcgcggcggcgagagcacccgaggcggagctgctgcggatgcgtcggggcagcggcgatggcgacgcgccgcctgcgcggtggaggtcagcgaggtgggagaacgcgagggacgacggcgccgccat

SEQ ID NO: 75819 - DNA, 1422 bp, Oryza sativa
  Clone ID: PAT_MRT4530_75871C.1
atggccgcggcggcgcggtcggcattggcgtcggccggccgtgcggcgaacgaggcggtgagcttcgtggtgttcatggtgctcgacgtggtggaggtgctattgtgcgtggtgtacaaggtggcggactacatgctggagggggcgtggcggccgtgctactgctcgtcgtcgtcgacggcggcgggggcggcggcgtcggggaagatcgtcgtgtcggagcgcggcgggtccaaggtggtcagcatgctgtcgtcgaccaagctgcacctggaggacatctccgacacgctctacacgcgcccgtccgtgctcgccggcgccgcgtcggcgacgacacggtcgccctcctcccggcgcggcggcggcggcgtcagggcgccgccagccaccacggtcacggtgcactccgccatcgtgcagatgctgcgtggcaagatcggcgccgacggcgacggcaagcagcacaagccgtacccgtcgccgaggtggtccgactgccactgcaccaactgcaacccggccgacgccggccgcctcttcgtccacgtcgaggcgccgcccggcggcgcggcgacggaggaggacgtgctgttcatccacgggttcatctcgtcgtcggggttctggacggagacggtgctcccgaacgtgagccccgaggcccgcgcgcggcggcggctgttcgccgtcgacctcctcggcttcggccggagccccaagccggccgactcgctgtacacgctccgggagcacgtggagatgatcgagcgctccgtcatcgagcggcacggcgtcaagtcgttccacattgtcgcccactccctcggctccatcctcgcgctcgccctcgccgtcaagtaccccgccgccgtccgctccctcacgctcgtcgcgccgccatatttcccggtgccgagaggggaggtcgggacgcagtacgtgctacggacggtggcgccgcggcgggtgtggccgccgatcgcgttcggcgcgtcggtggcgtgctggtacgagcacctcagccgcaccgtcagcatcgtgctctgcaagcaccaccgcctctgggagctcgccttccgcgtcttcaccttgtacagggtcagaacatacctgatggatggtttcttctgccacactcacatcgcttcatggcatacccttcacaacatcatctgtggcagcgccggcaagatcgacaaatgccttgagatcgtcagggatcagctcacctgcgatgtcaccatctaccatggtagggatgatgagctccttcctgtgcaatgcagttatgcagtgaaggcgaaaatacctcgtgcccgtgttaaggttgtcgacggcaaggatcatgtcaccattgttgtcagaaggcagaaagaactagccatggagctggaggagatctggaacagaaaacggtga

SEQ ID NO: 75820 - DNA, 718 bp, Oryza sativa
  unsure (1)..(718): unsure at all n locations
  Clone ID: PAT_MRT4530_75872C.1
ctttcgtccgagaacccttgctggtcctctatctgtccctgaactctcagtgcatgtcacgttcatttttgagctattcgatgaaaggtctatttttggaagcctttttgtttgttttttttttgtctgttttctggaaagaatactgcatatggccactgcagagagtgcaggctttggcagttttctttaggatgggacctgccatagcaatagccttgatctcctctcttcaaatggatggtggatgaggtctgtttaatttgcttgtcttagattgcgggcttacttatgttccttttgtcatacagtaagcatgtaagttctggtgaaattttttatctctagctgcatcatacatttcgatctttccaaatctatagattctgattttatcaaaaggtgcttgtgctccagtgaaaccactggccattttgctggtatagtgatattagggccatacatgaattagggttttgtttttttgataaactttggtgatgaacttcagatatcttcctgttactatattgaagctgcaatcatttctaaatttttggatctcaattctttctctgacggtagcagtttggactgtatacatgtcattntgctggtttcttttgctttaagggaatcagggcaggacggaagaacactatgaccatgtcccccatgtacgcatcaagctcccaagtgataatctgaatgcctgctc

SEQ ID NO: 75821 - DNA, 783 bp, Oryza sativa
  Clone ID: PAT_MRT4530_75873C.1
atgatagcgctacaaacactgtcagggattgggatctgcaagagctcagctggagcacttgcagacatgcacaatctcaccaagctgaagaagctcagcatctataacgtcaaagacttcgacagcaagaacctgagtcatgaattgctgtctgccatcgagtacctaactggctgttcgctcaagtctcttgcaattgatgatggtttcaccggatttcttaatctgatggattctctatccactccaaaatacatccacacactcgagctttcaggcgaactacccagagtgcctaaatggatcagtgagctacaaaacctggagaaattgactttatcattgacatcactgagcacagatgctttgtttatcattgcccaacttcccgtgctcttctcccttgcgttttcggtcagtgcagcaagccaggaccacggtgtcatggagatcctgacgaagaacacgatgaattcaggggggaaaatcctcatcccttctgacggatttcacagcctccagctgctccgtttctcggcaccgttactgccactgctaagcttccttgatggcgcgatgccgaagctacagaggctggagctgcggtttaggatcttggaaggtgctcatggtgtggaaaacctagctagcctccagcaggtgcttcttagagttagccagcaagctcctgaaactaccaaggtgcaggtgtctgatatcagaagttcagtcagcttgcatcccaacagacctacggtggtagttgatgaatactacgggtga

SEQ ID NO: 75822 - DNA, 258 bp, Oryza sativa
  Clone ID: PAT_MRT4530_75874C.1
ggcaaaaggatatattccaggggataatatccagggaaagccaaagcctacacaaaccaaccccagaaccccattttcaccagggcacctaaacttttaaacaagtttttgggggagaaatccaggggggatatatattgggaatcctcacccagggtttaccatgtaaaaaattgggatgtcctgcccacaggaatgggcatcagtcccatataacgggcgatgggtgattaccattaccgggggcaaaggaacact

SEQ ID NO: 75823 - DNA, 467 bp, Oryza sativa
  unsure (1)..(467): unsure at all n locations
  Clone ID: PAT_MRT4530_75875C.1
cgtgggcaacagacagggtgtgtgcgccngatctgggaatagcagggcaatgtgtgaggcagcaaacggcaaattaaatggtggagtttagctgcaagctcgcggtcgcgggcgccccccggcgtgacgctctgggctccctcgcgtcgcgggtggggcggaagggggtgcggatggcgatggccgcccacggcacagcgtggtccgtgcctccggcccggcgtcggtgccgtctcgcgttgcggggacctggtccgcctcccccttcccggccccgcgggccccggcgcagactccacgcctcccgtgaaggtttaaagctaactcttcaagctttgtgtgtgtgttggtgtgtttgtgtgttttcctctgcatgaggattggagtctaagaacttgtatgttatggttgtgtgatatagaggctagattaataaaaaaaattcattatctaaaaaaaaaaaaaaa

SEQ ID NO: 75824 - DNA, 255 bp, Oryza sativa
  Clone ID: PAT_MRT4530_75876C.1
atgcatgcaggagcaaacacggaccccaaggaagcttaccgagctccgagacaggtccggcgaggtcagggtagctcgagcgccggtggactagtctcgcagcaacagggcaatggcgaacggcaccatcggttagatgtatggacatccatcatatgcacgacgtcaagggtggtccaggttgctccaggtggaaggaaacatatcgaaactcactgggtcgacaggatcgtgcggggcggagctcagtcatag

SEQ ID NO: 75825 - DNA, 867 bp, Oryza sativa
  Clone ID: PAT_MRT4530_75877C.1
atggcggtgcggggatggtggcgaacggtgcagtcggtgtgcatgacagtgcagccaacggtgggcgggggcggtcggcgcggtcaggcgggcggtagcggagatgcgggcaaggtggagaggcaggcggcggaggagagggacgcggaggtggtggcgcacgcgggacgcagaggtggtggcggcgaactccgggagggagcagcggcgacgtggaacgcaggcagcggtgaactcctccgggagggagcagtggtggcacgggacgcagaggcggttgcatctcgcctctcctccggccgactctccgccgcgacccacctctccgcctcgccgccatccgcgccgaccgccccgcccaccatcggccgcaccgccttgcgcgccgaccacgccgtccgccgccgtcatgctgagagagagagaaagagcgagagagagaagagaggggaagaggggaagaggagtatgacagccggcccccccgtcctgtcgacagagcgtatggctagagggcacgaaccgagagttactaccattaccatgaagcatctacctttcctcgtacacctgttcttcctcctctgccttggcctgagcctcaccacgaggtgcgccggcgatgtccagttcatctactctggcttcaccggcgccaacctcaccctcgacggcgtggcagcggtgacggcaggaggcatgctcgagctgaccaacggcacgctgcagcgcaaaggccacgccttctacccggcgccggtgcccctccgtggagccgccggccccaacgcgacgacgacgacggcggaggagtccttctctccacttccttcgtgttcggcgtcatgtccgaccatgtcggcctga

SEQ ID NO: 75826 - DNA, 262 bp, Oryza sativa
  Clone ID: PAT_MRT4530_75878C.1
aattcggcacgagctcgtscccttcaccccatctcctcctcccctctmctvccctccagcggggcggcgggatggaggccggccacgsggccccggacagggcgacgggatggaggcctccgmggcggcccgacgsgaggcgacgagatggaggcgccggcgggctgcatcgagggcggcggcgaccgcgcgccggtcgagaggrgcggtggccgctgcatcgggcgcrgggcggcgagattgggvmmctagcgcccgtcga

SEQ ID NO: 75827 - DNA, 802 bp, Oryza sativa
  Clone ID: PAT_MRT4530_75879C.1
agcttgtagattggttctaccaattaagctaagtttaacctgaatttgtatacatataggtcattgttcagataaggaaattgttcttctcgagcaaggaaaagatggcgccgtcgtcgccaccggcgatgaacatggcttgtgcgagacagggacgcctccggcagcgttatgaaggatgctatcgccttgtctctggatgcatcccttacatgatcaaggaggatggagaaaacagcagcagctcccttcaagatgatgatcatgtgctggaaaggctgcaagtgctcatgatctcgacgccgaagcgaagcgatctcatcttcccaaagggtggatgggaggacgacgagagcatcggcgaagctgcctgcagagaggccttcgaggaagcaggcgtcaagggcgttctaagtgggacaccactgggagaatggatcttcaagagcaagagcaagcagaacagctgtggcctgcaaggggcctgcaagggctacatgtttgctctccaggtgacagagttgctggagtcatggcctgagcagaccacccatggcaggagatgggtgccggttgaggaggcgtacggcctctgcaggtacgactggatgcgagaagcgctggacaagctcaaggagcagctcctgttcgccgccggcgatgacctccgcgcctcgccgtcgccggagctggactcgtcggccggcctgtacatggtgatgccaccggtggctgaaggagctgtggcattgtgctgaggagcagctcctgttcgccgccggcgatgacctcgtgcctcgcc

SEQ ID NO: 75828 - DNA, 552 bp, Oryza sativa
  Clone ID: PAT_MRT4530_7587C.1
atggaccccatgtgtcaagggcgaagcgattgctgcgaaggccggtggaacgaggcggcagaggaagaggcccggggaccgacgtgctctcccaagaccacctcccagaagcgggaagaggggcttcgagaggccaccgctccacgggaagtcaatagaccggggacggagggcgcaacaacacgtgagcgctatgagggggtgggggagtcgaggaagagggtggtggaggaggggagcgtgtgtacctcgtcggccgttacctaccccgtcatcggggtccgtaggggcgggaaggttgccgtcgccgctcttcctcaagatcgctgggagagaggggaaggggtcgaggacgtcgaggaagagggatctagaagaaggaagagaggagtggagctcgtcgggtgcctcctactgtccatgccgtcgtcggggtccatggggtcgggaagggtgtgccgccgctcaatcaagatcgtcaggagagagagggaggggtcggggatgccgaggaaggagttggaggaggggagtgaggatggacctcgttag

SEQ ID NO: 75829 - DNA, 538 bp, Oryza sativa
  Clone ID: PAT_MRT4530_75880C.1
agatggtggggaccctgaaaagttggcttcaaatttctctagtggttctgaaggtgaaattttctattcagcagtatacactggactttactatgaatctcagaaggatgcagagttggcaaagtcccacattgttgctgcatgcaggtcaccatatggatcaaggtccggtgattacatggcttcacttgcactagttcattgtcaatgccgcaactggactctggagtgacagaagtattatacaaacaagtggacctaaacattcttgttgaagccaacagataggaagcatcttgggtatgttcttcccatggctcactgtatttaactggacttcttggtctcaaatttttgtagatttggtaaatagcacattgccactcacagtcaatgacgtaacggctcttatgtgtctatgacatgtagatccagtaacaaatcctaaattgtcatttgtaagagtggcaattagttaaatatctcgcgtgatctggactcttcctcttctttttttcccttttaacgagactgaaat

SEQ ID NO: 75830 - DNA, 422 bp, Oryza sativa
  Clone ID: PAT_MRT4530_75881C.1
ggaatcgtctcccgcctgggcggctcggggcgaaaaccctagccgccgccgcccccatctcccctgccccccacctcgccaccgccggagcaagtcgccgaacaaccgtgcggcgagccatgatggtggcggcgaggccttctcctggcgacgagccgtctcccgtgcggggagagacagtgcagtggcggccgcgcgccgtgagacgaagtaagacggcggcgcacagcgaggttgtggcagcgcggtgggggtggcgtggaggcggcgaggcggctgctcccctctccctgcttctcctaggcgagctcggcggcgttgggactttgctcggaggcggcggtggggcggccagatctagcgcctccagcccggctccggagtttggtcgcctgcgtgggcttgtcgacggcggaagcgga

SEQ ID NO: 75831 - DNA, 774 bp, Oryza sativa
  unsure (1)..(774): unsure at all n locations
  Clone ID: PAT_MRT4530_75882C.1
actcctatgggcgattgggaccctcgaggccggccggtaaaaatatccgtagagcatataactcatattcgtggagtttatcattggggtaagtttcaataggttagtgtgctttgcgaattcacaggccctatcttgtggtatgaactaagtacgcgatgatttctggtacgtattgggggcttaccataagataatgccgtgaattcgtaaagcgttcaaacccaccgaagtgttgtgtaaaggtaaatatttgtaagtgtttgtgcttgcgcgccagtcccatgcctccaatctgagcttgcgcgtcactcccgcatcgccgcggcgcagaggcggcgatgggagggcggccactagcaatagccgatagaggatgaagtgcgtagagcaggggactctccggtgatagatgacccatactcagattatgaatcacctattgaggagcaaagggattacgagcggatggcctggaccaagctttgactagagatggaagaacaagagagggagcacaagaagaggtaggagaagggggagaagaggagcggcaacacgtacaagggtggggacaacgcatgagcatgtagtgttagtctanactcgtgcgttgatcgtctccactcatgcagaattaactcctgtcttcaaattctctaaatgctttaagcacaattgtgtatacacgtgatgtngtgtgtctctaaatttctaagtgcttcgtgcacaaattgtatgtactcgtgatggtcttttacctctaaatcacta

SEQ ID NO: 75832 - DNA, 435 bp, Oryza sativa
  Clone ID: PAT_MRT4530_75883C.1
atgggggaggtggagttttcgccggcggtggggagtggcggcggcgagggatcccagctagacgccgtcgccggatctagacggtgcgtcggtggcggtgtcgtggggcggcgtgaagcggaggtggcccggctggcggcggctgctgcggcgtctggcgacttgcgaggcggccggatcgtcgcgcaagtctgctcacgaggtggcggtcatgctcggccgtgcgggcgccggagcgtgggcggcggattgccagtgcccgcgtggcagcgcggcatcagtcggctccgggttggcgagtttggcgtccggccaccccccctgtcgctggcaactgcggaagccgtccctgcaaccacccgtttcttcttccttgctttcttcctcctttctcttttcctctctgttcctccggccatcgccggcagctgctga

SEQ ID NO: 75833 - DNA, 373 bp, Oryza sativa
  Clone ID: PAT_MRT4530_75884C.1
ggaacaaaaaaggggcgggcccttttttttcccagctgaacaaaggcgccgccgaaattatccgggatcgggacaaacaaacggggatcgggaaaaaacattattttttcgtttccgctcaacaactcaggggagcgtgggaaaagggaagactaaaaccaacgggccatcactaactccccctttggaatctttaagcctttgacataaactaatcgaaaaaaaagctgcgaccgggggggatccaactttgggtttctcccttctcgaggggttttcaggcggggaagcactggccaacctttccttgggctttggtgggagaattttatttttgcctcgggcaccccacaagagacgggccggattagga

SEQ ID NO: 75834 - DNA, 440 bp, Oryza sativa
  Clone ID: PAT_MRT4530_75885C.1
ttagtacataattttttttatgttatgttagcgttgaatattgacctggcctcaagttgctatgatagctctgaattttgatagataaacactgctaaggcacaagtgcggtattacagacatttcacagactgatatttataggattagatgttcaattaagtttcaggattttgctttgtttttaatgaagcatgatctgattttttttaccaattcatataattagatggctgagatttgttgtttcatgtaatgcatgcaaaatgtttgacttagaatttttcttgtagacaactcagggacagatggagtagtagctggagggccaatattatagcctaggacacgaacaaatgcagaaaatggaggtgttgattgctaatgatcctcggaatatgcccttagctggtgaagaaaatgttccaggtgttaataat

SEQ ID NO: 75835 - DNA, 288 bp, Oryza sativa
  Clone ID: PAT_MRT4530_75886C.1
atgcctcgtgctgctcctctcccatgcgtggcgctcatctccgccgccgagctcgtacgctccatggccgaccgtcggagaggcggctacgggcgccgccaacatgtgctcgagggcatcgactgcatcctgaagcgcaaggacttccttgcaccgtggaccgcattgagccggagcaacagccgcgtgagcgcctcgccccacccatcgatcgcctgctccgactgcctagaattgccatataagcgtcacatcaataccacatgggacgaagacctagtgaaatga

SEQ ID NO: 75836 - DNA, 710 bp, Oryza sativa
  Clone ID: PAT_MRT4530_75887C.1
ctacacaaaagaaatactagcacaaacaacaatagacttatagcggcgcaaacaagcaaagctagaggagggagaaagggatatcattgacgttgatgcaatatgagatgttcccgaaattcgaatccttgaggggattctactctctattgaggagccgggtcttcgctaaccctttccttaagagattgcacaaagcactcctccttccactagtggtttctcttccctttcggaggtgtccttaacctccaagagtaataaatgatgcaaagaactcccgggaatgatgcaagtgctcaaaaatcttcacgaagacaacaccaagcactcacacaagctcgaaaccacaactctcacacacaccaaatccgaatcaaacacgggtggagaggggaatcaagcaagcaaggctcaaaagtaaatctcaagagtagtccgaaaatctccagaacagcaaacacagtgaagtccaactaagtttttcggaaattccgaaaacatttcgaacaaatccgaaaatatccagaaccaaaattgcctgctagatattttcagaaattccaaaaattactttcggacatgtccgaaaatatacataagcggttttggctgcgtagacattttcggaaattccgaaaatctctttcggacaactctgaacttcactgccattttcggaaattctgaaagtcagttttggacaagtc

SEQ ID NO: 75837 - DNA, 360 bp, Oryza sativa
  Clone ID: PAT_MRT4530_75888C.1
atgggccttcgccgccacctctttgctcctataaaaggacccccaagcccgccgctacccgccgccaccctcgccttcgcctcttgtctcttcgtccgcccctccgccgtcgccgtaggtcgccggagcaccgctatcatcgtcaagccgaaggttgccgccacttcttcctcgacgctgtcgccgtccgttgatcttccgccgccgttttggtcaccgattccgacgtttccggagagtccgttttcgcaggagaagaatttgaagagttccaagtggtacacctctggccagagtaaaactattcgaatagccgtgcccgcggttatgggcgggtctaacaatgtctttcgtgattag

SEQ ID NO: 75838 - DNA, 815 bp, Oryza sativa
  Clone ID: PAT_MRT4530_75889C.1
atggactccccagcgacccccatgggcttatctccgccacttctcagtctggtgctccgcaatgaaccatgctatacaaaagcggctcacggaaacgaacggccgagatctttccattcaaaacggacggccgagatcgaccggtccacggccggaccacgagagacgacgacgacgataacgtcagcggtgacgtcaccacaggcggcggctcgggcgcgcaagctcaccggcgaacgacggtgcgacgacgtgaacgaagggcaccagcacgtagagaaagacgcagcgaactcaccggtgaccaaaacggcggcggaagatcaacggacggcgacagcgtcgaggaagaagtggcggcaaccttcggcttgacgatgatagcggtgctccggcgacctacggcgacggcggaggggcggacgaagactgcgacgcgacggcgatcatgacagagacttccccgagcagcgacgacgaccggagcgacggcggcgcacggctggagctgcggcggcgacggcggcgctaggctacacgatgctagggcgctactgacgacaagaggcgaaggcgagggtggcggcgggtagcggcgggcttgggggtccttttataggagcaaagaggtggcggcgaaggcccatggcgaccggcgacacaaaggaaaaactagggttcgagagagagaaacgaatccgattcaagatcgaatccgcgaatttccaaagcgatttagacgatgtttccaaaagggaaaaggtagaggagatggttcgatctagggcatgtttcaaccatgtccggaccagggc

SEQ ID NO: 75839 - DNA, 189 bp, Oryza sativa
  Clone ID: PAT_MRT4530_7588C.1
atggcgcgggagctcgccagcaggtgtttggctgctgctttgtttttgctgttgctgctgctctccgtttctctctggcctctctttgttcttgcctggctggagataaaaatacacgaaattagacaagcaaaaactttgaaaaagttgagtcaaatgagtgagggcataaaagccatttttctctaa

SEQ ID NO: 75840 - DNA, 162 bp, Oryza sativa
  Clone ID: PAT_MRT4530_75890C.1
gacctggccttcttgggcttcttgcgggaagttcaaatttttgcaccacattggcgcgggcgccactatacatgaaagctacgtgaattgggacgtccacgcacgatccgacggccatcattacatggcgtcttcagccgatggcaagctatgctcaggcag

SEQ ID NO: 75841 - DNA, 494 bp, Oryza sativa
  Clone ID: PAT_MRT4530_75891C.1
gccgacggggtcgatcccgaccttaacctgtggaaagggagaggtggtcccctcttccgggagaagatggttgagccgcatccgaccagttcatccttgttggttgcgagaccaagctagttaccggcttaggagggagtggtctaacccagcctgtggaggtttgtgccaattctgctggaagtaccacccagtgagattgccggatctgttttacgatgtaaggatgtcgaggcgaagctgagattggatgaaggcggccaaccctacggtaccgaccactccaactacatcgttgatttatacttccagacggacgatccaggatgcgctggccaccgggaaggagatctcagctttggaaggcgctcgcttgagcctgggctgtttctggacactggcgacttcggtgatcatcgctggaaccgatggcgtccgtgtccaaaccaagtgagttttggggttttgttgttgccggtgttgaatttacgatt

SEQ ID NO: 75842 - DNA, 306 bp, Oryza sativa
  Clone ID: PAT_MRT4530_75892C.1
ctagaggatgaatacgtgattgtatggtggcttcttccgaaccgcgttggttggcaagaaggatgaagtagcaagcgacttttggcccgataccagatccaggatgagcaacgatagagctaaggaggtggctacgagctcaaggaaggaggagcagtgagtgtcgccgatagtgtgggctctgaagaggacgacagtctcctcggtgaagaagccattggcgacgaagtggcggagcatgtcatcgagggaggagaagcgtgcgaaaaggtcaacctcccatgcgttggacatgagcgacagcat

SEQ ID NO: 75843 - DNA, 286 bp, Oryza sativa
  Clone ID: PAT_MRT4530_75893C.1
accgccggaggactttcattacataaaaaaaagggcctggaaaaaaatttacatattttgggggacacatgccccgggggagggaaaaccaaccccataaagcttaataggaggtgcaagggcgtacaaaaatccccaaaggttagttggatacagcaatcattgggaaattgggtaccccctccgtttcaaaaaaaaaggcaatctaggattggccggattcatttgggggttaaaaaacctagatttataaatatgcccaatgcttaaaagatttacattttgg

SEQ ID NO: 75844 - DNA, 546 bp, Oryza sativa
  unsure (1)..(546): unsure at all n locations
  Clone ID: PAT_MRT4530_75894C.1
ataaaagggcgaccaattggggagggcccgagaaaaaagtttaaaaggggggggcaaaattaagggggggggtgggggtaaaacggccccgccaaaaataaagcggacccaggggacccaattattatcccctaattaaccaaaaagggaaaaaaaaccaggcccaaattggggggacaaaaaaaaaaccggcccccctaccccggggacaagggccggggcaccccccccaaaaccttaagggggaccagggcccccgaccccaaagacggggggccccccgttagggggcggacgggggggttcgtccccagggacggggggcccactggcagggggaaccccccgggggggagggcaagcccaacggccccctcgggcccggtcgtnncacccgttttgggcgttttccactcgggaaaaaatttggcaacgagggccccaacgggcaggttcttgaaacggtggcccgccgggcacaaaagggggaacccctgggggggccacccccccccctttataatccggttccccggaggggggggg

SEQ ID NO: 75845 - DNA, 918 bp, Oryza sativa
  Clone ID: PAT_MRT4530_75895C.1
atggctgtccttgccgactcagcagccaggaagctcctccatggcgcctctgctcagggcgtcgccgccggcatgagccttggcctcgatggcctgttgcagctcgtcgccgacctcttcgcgagcctcgtccacctgttcgtcctcccgttccgggccatggggcatgccatccagtggttcttcgccggcgtcgtcgctggtctcgggggcgccgcgcgcgtgctcgtcctgccgctcgagacgctgtcgcgctggctgcaggcggccgtcgccggaatcgcgagcgccgcgcacctgctcgtcctgccgttcgaggcgttctggcggtggctgcgcgacgcggccgccgcggcgctcccgtacgtgctcgccatcgtcgccgtcgtgtgcgtcgtagcgcttctctggctctcctgcacgttcctgtgctccgccgccgcgctaatcgggccgccgctcgccggcgccgccatctcctgcggggcgttcctgctccccgccgccgtgaggaccgggcaggcgctcgtctacgccgtctgctacgccgccaggggtgccggcgtggtgctcgcctgggtgctcccccgctgcgggcggtgctgcgtcgtcctcgtcaccatgaaggcccccggcgccgccggcatggtgatctcgcggggagcgttcgaatcgctcccgcggctctacttccttcctgatactgcgctccgctggcgccgtcgtggccgccgccgtgttctgcgcgcggcccgtcgcgtgggtgttcgctgcgccggtcgccgccctcttccgcgcgttgtgatcaacaaacttctctctgtgcttgttgccgcccccgagttcatgacggccagatctagcggtggtggagaaggagaattgaaagaggaagaggaggaggcgcagcagtggtag

SEQ ID NO: 75846 - DNA, 1419 bp, Oryza sativa
  Clone ID: PAT_MRT4530_75896C.1
atggacgacgcccattcctcgcagtcgccgctgcacgtcgtcatcttcccgtggctcgccttcggccacctgctcccctgccttgacctcgccgagcgcctcgccgcgcgcggccaccgcgtgtccttcgtctccaccccgcgcaacctcgcccgcctcccgccggttcgccccgagctggcagagctcgtcgacctcgtggcgctcccactgccgcgcgtcgacgggctccccgacggcgccgaggccaccagcgacgtcccgttcgacaagttcgagcttcacaggaaggcgttcgacgggctcgccgcgccgttctccgcgttcctcgacaccgcgtgcgccggcggcaagaggccggattgggttctcgccgatctcatgcatcactgggtcgctctggcatctcaggagcgcggggtgccgtgcgccatgatcctcccctgctccgcagccgtcgtggcctcgtctgctccgccaaccgagtcgagcgcggaccagcgcgaggcgatagtccggtccatgggcacggcggcgccgagcttcgaggcgaagcgcgccacggaggagttcgcgacggaaggcgcctcgggggtgtccatcatgacccgctacagcctgacgctgcagaggtccaagctcgtcgcaatgcggagctgccccgagctggagcccggcgcgttcacgatcctgacgaggttctacggcaagccggtcgtcccgttcggcctgctcccgccacggccggacggcgcccgcggcgtcagcaagaacggcaagcacgacgcaatcatgcagtggctcgacgctcagccggccaagtcggtcgtctacgtcgcgctgggaagcgaggcgccgatgagcgcggacctgctgcgcgagctggctcacgggctggacctcgccgggacgcgcttcctctgggccatgaggaagcccgccggcgtcgacgcggacagcgtcctaccagcggggttcctgggccgcaccggcgagcgcgggctggtcacgacgcggtgggctcctcaggtgagcatactggcgcacgccgccgtgtgcgcgttcctgacgcactgcgggtggggctccgtcgtcgaggggctccagttcgggcacccgctgatcatgctgccgatcttaggcgaccaaggcccgaacgcgcggattctcgaggggaggaagctcggagtggcggtgccgaggaacgacgaggacgggtcgttcgaccgaggcggcgtcgccggagccgtccgcgccgtcgtggtggaggaagaggggaagacgttcttcgccaatgcccggaagctgcaggagatcgtggcggacagggagcgcgaagagaggtgcatcgatgaatttgtccagcatttgacgtcttggaatgagctgaagaacaattcagacggccaatatccgtag

SEQ ID NO: 75847 - DNA, 212 bp, Oryza sativa
  Clone ID: PAT_MRT4530_75897C.1
tttttttttttttttttttttttgaacaaaacgaggtggtgttttttattagtgctccataaactttataacaagaaccgccacaatagtttcacatacttgtgggaaaaacattttgattcacctttactacacccaaagttcaacactctaaagccgaggtctttcgactcattatggagaaaaaaagaactcttttgttgttatccccc

SEQ ID NO: 75848 - DNA, 1788 bp, Oryza sativa
  Clone ID: PAT_MRT4530_75898C.1
atggacgatccgaattacccaatatttgacatgagcgagtacgacccaaatttcggcatggagcaaggtggcagcatccctgcaccgatgccggaagaacctgcaaccacacaggtggcttcagaaggatcaggaactgtggccgcgagtgggtcaacggcctcgtcctctaaaagatcgagaacttccaccgtatggcaaaattttgatgagatcaaggagaccggccctgatggtaaagaggtaacgttggctagatgtaaaatatgcagaactaaattatctggaaaatcttcaagtggaacaggacatttaagtcggcatgcggcgtcgtgtgctaagaagcaaggcatccaactgcgacaacaacaactgatattgaatcctgatggtacggtacgttcgtgggagtacgatcctcaggttgcacgagaatctcttactcgattaattgctagacaagatttacccctaaattttggtgagtcaactgcatttgaaaaatatattcaaactgctcataaccctaggtttaaatctgttagttctcaaaccacgacccgtgatttaagaaagttctataaacaaggtcgtgatacactgaaagaattatttaacacttgcacattttctgttagtatcacatctgatatttggagtggtaaggccaaggaagactacataagtgtagttgctcactttgttgatgataattgggaaattcagaaaagaatcattgctttaaaattaatagatgttgcacatactgctgataatatcgcggaaagaatttccatggttgttcaagagtttgaccttacaaataaaattttcgctataacactagataatgcagctgctaactctagggccatggaaattctacaacctgtattctctgtctatggtcaatcatttcttttacatcaacgttgtgcatgtcatatcattaatctgatagttaaaactggttttaagagggtatctacacatattgattctgtgcgtgaggcaatctcatggttatttgcctcaaacccacgggttgcaaaatggaaaagattttgcgatgcatcgggtatgaagcccctctttcatatgaaacaaaaatatcttaaatattggaaggaaatccctgtactgtatgcttttgcatttattcttgatcctaggggtaaattacggggattggttaatatgttgaatattattggagagataatgaacatagattatactaactattattctgatgttaagactaaattatatgagacatttgccaagtatgagaataagtttcagggacttcgcctacaaagacccccaactgtctctgtcgctggtaagaagaaaatacaatggggacggatttggggtggtagttcctcttccactcctgctgggagttccgcttcaggaacaactggtacttttcaaggcacccaagaattgtcctcctacttagacagtgactgtaccagcactgaagatctcaacgtccttggatggtggaatgatcacaagacccaatatcccgtgctctcaaaactagcacgggatgtgttcacggtgcccgtttctaccgtatcctctgaatcggccttcagtacatgcggaagaattattgaggaccgacgaagaaatctaagcagcgatatggtggaaatgctgctcatcgtcaaagactgggagctagctgctgaacgtgctcaacactccgcagagaacttggaattggttgctcagttcgaagatctctacatcgatacagatgcacaagattag

SEQ ID NO: 75849 - DNA, 318 bp, Oryza sativa
  Clone ID: PAT_MRT4530_75899C.1
atggccttacaaagtctaaggggtagtatgagatctgtagtaggtaaaagaatttgtcccttgattgagtatgctattttccctcctttaccgcgcattattgtatatgcttctagaagagcacgtatgcagagaggaaattacagtttaataaaaaagcctaaaaaagtttcaactttacggcaatatcaatcaactaaaagtcctatgtatcaatccttacagcggatttgtggggtccgagagtggttgaataagtattgcatgtggaaggaagtagacgaaaaagattttggattcgaaataggtgcattcgac

SEQ ID NO: 75850 - DNA, 674 bp, Oryza sativa
  Clone ID: PAT_MRT4530_7589C.1
ttcaccgattaagcagtcatcgaagctcggacgaggtacgggtaggcctggacagcgacgacgatgcagaggatgtcccgtcagcggtgcgcaactccgcgaaaacggcgacggctcgatccactcatcgaagtgacatgcatatgtgtccacgaggtacggtgaggtcacagggatggtgtacgagcaaagaattgatgcgaggctcaccggagaggaagaaatcgaagatgaagctcggcggccggagttggggaagatgaagtcgatctccatccacggtgcataaatcttggggattcttgaggggttttggtcgtggtgatgagacgatgacgatggcgcgatgtctcagttatatttgctccacagcaaccggaatcggcgacgagatctcgtggcggcggtgcactgtgtgcgctccggagctcccgcgggcgaggtcgcgttcccaccaaaccaagtgatgatgacgacggttgtcgtctccacggccggcggcaaggatgagggcggcggaggcgaggcgatccctctctctcgatttggtctacacggaagtggtaatggagaggaggcgatgcagctgggaagagttgaaagcgagctcggcgttttaaggacggcgacacgtcgtgtacacgcgtcgcctgcagcccggggatccactagtt

SEQ ID NO: 75851 - DNA, 564 bp, Oryza sativa
  Clone ID: PAT_MRT4530_758C.1
atggcgcccagggacggcgagggcggcggacgacggcaccacttcgtgctggtgcacgggctgtgccacggcgcgtggtgctggtacagggtcgccacggcgctgcgccgcgcgggccaccgcgtcacggcgctcgacatggacgccgccggcgcgagcccggcgcgcgtcgacgaggtgcgcacgttcgaggactactcccgcccgctgctcgccgcgctcgccgcgctgccgccatccggggacggggagcgcgtcgtgctcgtcggccacagccacggcgggttcagcgtcgcgctcgccgccgagtggttccctgagaggctcgccgccgtcgtgttcctcaccgcgtccatgccgcccgtcggccgcgccatggccaacaccaccgacgagaagcagttttttggaaaagctgcagctgggacaagctccgccaaacagggcctacaaggaaagggaggcggcgaggccgagggggacaaggttctgagcatcgacatggaggtggaggcagccggtctcaacgtaaatggcaaccttggagttgatgaagtggattag

SEQ ID NO: 75852 - DNA, 1161 bp, Oryza sativa
  unsure (1)..(1161): unsure at all n locations
  Clone ID: PAT_MRT4530_75900C.1
atgtgcggctccagcacatccagcacctcgcggctagtcagctccacgcccnccaccgctcggaacgcgtccaggtaagggaaccacctccgctccgctccgccgggggggaagtccccgtccgcgcgacgctgcagcttcatgagccggtcgatccggccccttcccgcggaggaggaggaggaggaggcggggggcttcgtaacgaggagctgctccacggtgtcgaccccgtcggcggcgtcgccgtcactggcggcggcggcggcggtggagagaggggaggcgcggatgcgagatggaggcggaggagggggcctggggcgggggatggaggcgaaggcggaggcgagggaggagacggagagcgtcctggaagccatagctgcggcggaggcggctcgccggcgttcgtctcctgtaagaactggactgtggggaggaggagagcaagtcgccgccgccgccgccgccgcgctcaccgctgctgctgctgtccaaattccaactgctagcccatactgcgacgagatgcagcggggtgtgcacggagcccttggagtggttggtgaactgggaagagtggatgacttctggttcaacatcaacacagtggcctacttcgaggcggtgaggattgtttgcatgaagaaatccttttataagcccaaggagctcggcgtccctctcaccagcgtcgggcattgctccgggactccgcttgctcccctcactccggcggcggttcttggcagatcggacatgcggatatccggccgcgtccaggcaagggggcaatcaatggtgcacgagaccactcccgacggtagcggtgagctcgtcacaacagcagcaaggtctcggagacggcggcaacaagctcgtcgtgaaggtatggatccatacgggaccaacagcggcaacaacagtagaaacgacatgggaggaggaggaagaagagtgaacaacgccttggactggctcagccccagtggcgacggctgcgcacgccctgaccctgccgccgtcgcttctcttttggtgcctatcagtgaaccctgccgtggaatcgctatgagctggaccaccgtggaaccatggacgagcagcaacacaagagaagaggcgagacgacctcaagctctacctgctgcatattga

SEQ ID NO: 75853 - DNA, 510 bp, Oryza sativa
  Clone ID: PAT_MRT4530_75901C.1
ccacgcgtccgcccgcctgctccatcgccgccaagcgccatgtcgaccagagcaccaccatcctcgacgtctccggcgttgggtacaagaacttcaacaaggccgccagggatctcatcggccgcctccagaaggtcgatggtgacaactacccagagactctgtgccggatgttcatcatcaacgccggtcaaggattcaggcttctctggaacaccgtcaagtccttcctcgatcccaagaccacagccaagatccatgtcctaggcaacaagtaccagagcaagctgctggaagtgattgatcccagcgaattgcctgagttccttggtggcacttgcacctgcgaaggcggctgcatgcgctccgacaaagggccatggaaagatcctgaaatcataaagatggtccaatgtggcatgggaagatgcggatttaatagctcgggtcatactgaggctgatgagaagatgatcactgaggatgacatagtggcacttcccaagaagc

SEQ ID NO: 75854 - DNA, 2271 bp, Oryza sativa
  Clone ID: PAT_MRT4530_75902C.1
atgtcgtcagccgccgtgatgccgacgccgagcatgaactcctcatccgccggcgcagcggccgcggcggcggcggcagagggaggtggcggcgaggacgagcggcgggcgcgggcgctgtcgtcgtcgtcgtcgtcgctgcggcagcgcgcgatgagcgcgtcgtcgaagctgctccggacgtcgctgagcaggagcagcaagggggcggcggcgcggcagcggagcagcaaggtgatgtcggtgtcgatcgaggacgtgcgcgacgcggaggagatgaagtcggtggacgcgttccggcagacgctggtgctggaggagctcctcccggcgcgccacgacgactaccacatgatgctccgcttcctccgcgcccgcaagttcgacatcgacaagagcaagcagatgtggagcgacatgctgcaatggcgcaaggagttcggatctgacaccatcctcgacgacttccagttcgaggagatggaccaggtgctcgagcactacccgcagggccaccatggcgtcgaccgcgacggccgccccgtctacatcgagaagctcggcgcgatcgacaccgccaagctcctccaggtcaccagcatggaccgctacgtcaagtaccatgtccgcgagttcgagcgcgccttcgccgtcaagttccccgcctgctccatcgccgccaagcgccatgtcgaccagagcaccaccatcctcgacgtctccggcgttaagttgaattttgacttgcatgtttgtgagggacgcgtccaattcaacaaggccgccagggatctcatcggccgcctccagaaggtcgatggtgacaactacccagagactctgtgccggatgttcatcatcaacgccggtcaaggattcaggcttctctggaacaccgtcaagtccttcctcgatcccaagaccacagccaagatccatgtcctaggcaacaagtaccagagcaagctgctggaagtgattgatcccagcgaattgcctgagttccttggtggcacttgcacctgcgaaggcggctgcatgcgctccgacaaagggccatggaaagatcctgaaatcataaagatggtccaatgtggcatgggaagatgtggatttaatagctcgggtcatactgaggctgatgagaagatgatcactgaggatgacatagtggcaattcccaagaagcaagaatcaattcgccgtgattccgttgattcacccaagatcccacgcgaaaagattgaacatccgcagatgtcaccactccatgagatgtcaacttcagaaagcaaggctcctcctggccaagagggaagctcttcccgatacgacgatctgttccccatgccggacaagaacatggacttcaactggaacggcgaagtcagcgccgagaagctcgcactcgcacgagacatgtacgcgtcgctgccggacgcgtacaagcacggcgacgccggggaccggcaggtggtgacggggttcatggcgttcgtgatgggggtggtggcgatgttccgggtggggaagatcgcgccgaagcgcgccatggacgcggcgatgggcatcgcgacgatggaggcgatggccaagaaccggaagctgatgcagcagcagcagcggcagctggagcagctccctggcccggacacggtgacggtgtcgacggcgcagtacgaagcgctgatcaagcggctcggcgacctcgaggagaaggtggcggcgctcacctcccgccctcccgagatgcccgccgacaaggaggacttgctcaaagccgccgtcacccgcgtcgaggccctcgagaccgagctcgaatccaccaagaagcttttggagacttcgtcggggcagcaggaggaggtgctggcctacatcgagaagaagaagaagaagagggggatgcagaatccattccgctggtgatggacgggtttaaagcaagaagcggtgatggagctcggtcgtgcgtctcgtgtgttgttttgtgtgcgtcgtcgtcgctgtatctgaccccgtttgaaatgcggaaaaaattttgctatttctgcgggagttgagttgagttgtttcctccgggatttctgtgaaattcatgttacatacttcttgtgtttcaaaaggggccttatatgtgtatagcaaaaggaaaaaaaacaaactttttcttgcttactggactgaactgtgtaccccactgttgtgctgcacgtgctttatcaaacatattacatgtacaggctgtatatatctattttcttcagaatt

SEQ ID NO: 75855 - DNA, 661 bp, Oryza sativa
  Clone ID: PAT_MRT4530_75903C.1
atggcggcggccgctgctcgcgccgggttccggcggatgttctccgtctcgggcttcacgccgccgcctccccccgccgcccgccccttggcggacccctgcaacaacctcttcgtctcagggttgaataaacgcacgacatctgacggacttagggaagccttctcgaaattcggtcaggttattgaagctagagtaatcactgatagaatatctggatactctcgaggatttggctttgtcaaatatgcaactgttgaagaagccggtgagggcataaaaggcatggatggaaagttcctcgatggttgggtgatatttgccgagtacgccaagcagagagaagcacagcagccggcccaaccagcagcatcaactagttaccaatactccaaccaatgatagttgtctctacgatcaggattaccttctattggacaatattgttcgctattttaccatgtgaaaactgaaaatcactctccttgatatttcgtcagggagaaattttagtgtgcacggcatgaacatctccttagtaacttacggtgccgttttgtctgctactgtctgctgggtgactgtactctgtgagcttatgtaactatacaactgccttcatttttgagactacagtattttatgagctgcaactttaacg

SEQ ID NO: 75856 - DNA, 315 bp, Oryza sativa
  Clone ID: PAT_MRT4530_75904C.1
atggcggttcctacaattaagcccccacccgaagcatcttcaaagtcacgtgaagaggcggcatgttcagaggctagtgcaacgggtttgagtcgtagggttcctaacactaatggctggcctcgtgttaagggcaagcaccctcatcgtcgctgcctttcagcttgtttgtgccctattctggctaatcttagaggcattgatgtgccaattgatggccctaagggaggtcatggggcccacaactgcattgggtccgcaagcagcagtttcctagcggcgatggggaggaggaagttcgtgtccccctcctag

SEQ ID NO: 75857 - DNA, 166 bp, Oryza sativa
  Clone ID: PAT_MRT4530_75905C.1
taaatggccaaaagttccccattcttaatcttgtacagatgagtgccgttaaagtaaatttatatcagaacagcactccttcacctttttggaacatcaacgctcatagtgtcgtgtatattatccagtcggcagtgcagcgcacacatagagcggcagcgcgcgc

SEQ ID NO: 75858 - DNA, 532 bp, Oryza sativa
  Clone ID: PAT_MRT4530_75906C.1
agagtaaaaagaataatcatggataaacacaatacacaacacaggacccaggcacccggtgcgcggagttgccgaggtcatggtggtcatggagcgtggaggagacatcctcctctatgcttctccccagcaacattctgcatctaaaccagtaagaagctagcgatgacctcctcaatcctcgtctctgaccactggatccatgccgaattgctccttccctgcatcgagcaagatctgcttccctaccatcttgacatgcaaagaggatgcagagagggcagcagaagggcctgcgaggtactcgagacaaattcagccgcagccccaattccatattcccatcctggccgccagtagttggtggcatagaaacacccaagcaggatcaaggctcctggtggggggtagcgtcggcgacgatggattgatcccggtcggaggggttcaccgacgacagtgctcctgcatgttggccccggacaaagcaaggctcctctctggccgtgagcttggagcgccgccaccctag

SEQ ID NO: 75859 - DNA, 2067 bp, Oryza sativa
  Clone ID: PAT_MRT4530_75907C.1
atggcacagcactcgttgtccgagttaaaacttgtgaaacaagttgagaagcttagccatgaacttgaagatttaaagattgagagccacattaaagatttattggagctgtcgacattaagagaagtttttgataattatgagaatcatattgatgatgctaatcaggaggagaccttcctcagagagttgcttatagaaaaagaagagcagttgagtattatgtatgaagacagacagaagctaaagtatgaaaacaatcaacttgtagcaattgcaggatcaacattaatgcagcaccatgagcaagtcaacttggttaatgaccttaccaattttagggagaaggttgatatacttggggagcagttgatgctgcttcttagtattctctgggaagatctgatagcacttgatcattattctcctgtattgaagcattacttcctgggtatgttctgcctttatctcgtacgacgaccgtgcgaactctggcgacgccgatgtattcttgattgccctgtgaggctgcataaaggctccatcataatccaagaacttgttggaggctcctaaagaataaccaagttggtcttgctcaggtggttagctggtccggtagggctggcttgaaaagagcaaccacggctccaaagaaaggatcccgtgttgcactaagaaggggaacacaatgtgcccatcgctttcctaagtttcttcttgcgtccccttctttccacggtggtcgcggtgccctcccatctgcaggggggcatccttctgatttgacctaccttgccggtggtggtgctgttcaagtctgaattaggctttagcattgtagatatttttttagtagtagtacagatattaagcattgtaagtatggtatcaaccacggagttcaaaggtgaatattcgttgccaagcaagaaatctcctcttgatcaatttgaaggtgtgaagacacatctttaccgtctcggtgcagaacatgaaaatggtaccctcaaaagctttgcatatactgatcagggcagcccaagtttgcttgatacaatcattctttctcagtgggaggattatgcttggaagggccattttggatatgacgtaactgcttgcaatctcaaggttgttgaaggtggatggagttttgttgttcagctgaatgataagtggaattcatgtgtcctcaaggaacatgacaagttccttgaacctgttggatgcctgaagccaaactgtatgaatagttatgatgaattgcttctgtgcattgctcaaggtgacaaggatatacctgaagttgttccttcaacaaaaccaccaaaggatggactactgctgattgcaaatgcatatcctgttgaatatggtcatatcttcttggtcccaagcgcaaccaatcagctatccttcttctgggacaaaaggatgtttagtctgattgcaaggattgcctctgaagttttctgcatcaactgttgcaatttacccggcaaagcacatcagccgttcacctgtatgaaataattgattatcctatgaaggctcttgtgttaactggcaaggacgtaaacacgcttgccaattttgtcagtgaagtatctttaactctgcatgacaataatactgcgtacagcctgctgatctccaacaatggcacaaaggttttcttgtttccacaggtgaagaatctggctactggatgttgtctttctgcctgggagtgcagtggctacttcatttatcgcgccaagtacgattttgacagagcttctgagaatgaaatttccaacagaatggcgtcagtcacactccaagatggcgcattcgagaacctgaagaatctttgctgcgctgttgctgatgatcttgttatgtaaaagcttgtgaaagaatcaaaaccacaataataaaaccgtgtgagggtggtccacttgttatgtctatagcattttaatgcatggatgatggtaattgaacctatgtctgaacatttggattgatcaatggagcatgctgttcttatggtgaaaaaaaaaaaaaaaaaaaaaaaaaaaa

SEQ ID NO: 75860 - DNA, 725 bp, Oryza sativa
  Clone ID: PAT_MRT4530_75908C.1
gacataacaagtggaccaccctcacacggttttattattgtggttttgattctttacaagcttttacataacaagatcatcagcaacagcgcagcaaagattcttcaggttctcgaatgcgccatcttggagtgtgactgacgccattctgttggaaatttcattctcagaagctctgtcaaaatcgtacttggcgcgataaatgaagtagccactgcactcccaggcagaaagacaacatccagtagccagattcttcacctgtggaaacaagaaaacctttgtgccattgttggagatcagcaggctgtacgcagtattattgtcatgcagagttaaagatacttcactgacaaaattggcaagcgtgtttacgtccttgccagttaacacaagagccttcataggataatcaattatttcatacaggtgaacggctgatgtggctttgccgtggtaaattgcaacagttgatgcagactccactggcaacgggtttgcgaagtaacaagcctgaaaaaacatgtggtctggcatcgtggatgtgcaactatcaaagaaaacccggaatgctgcactatttacttcagaggcaatccttgcaatcagactaaacatccttttgtcccagaagaaggatagctgattggttgcgcttgggaccaagaagatatgaccatattcaacaggatatgcatttgcaatcagcagtagtccatcctttg

SEQ ID NO: 75861 - DNA, 465 bp, Oryza sativa
  unsure (1)..(465): unsure at all n locations
  Clone ID: PAT_MRT4530_75909C.1
ttggtccttgaccctcttgtttttaacttttttttttttttttttttttttttttttttttttttttttttttaaccactataacggggggacaaaaaggatttaaaaaaaagggcccttcaactgctgaaaaaaccggcccaaagctaaaaatccagggttaaaaaattcccttcccagctaatccaaagtgggatcttagcaaaccattccgnccttatttctcacccctatcagaggcccccctcaaaaaaaaccttggaaagtcaagttcccnnaatccctatccccaaagccctgnntaaaacccatcactccccaaaaactaccccactttgcccgcccccaacccccctatgttttcttagcccattggccaaaattctcaaaaaccaaaaactgacccggggcaaaccacagccccaaattggggaaaaaatcggaaaccaccccccccaagttcct

SEQ ID NO: 75862 - DNA, 472 bp, Oryza sativa
  Clone ID: PAT_MRT4530_7590C.1
cccacgcgtccgcccacgcgtccgtttttttgcaaactgaagccttcacgtgattacttgcagaataaaaagaacaacaaatatctttgtatcctcatcactaccacatatacacacattcataaagccaacaggaagccgcactgcaaccatcaaacgtaaatccaacactaatgaccaattacagcaagaaaagaatagatcagtggaagggaataacgacatgagatgatatacaagcgcaaaagaattgtcacgacgtgcatagtatcttctcccaaacatctcggttgcctcccactcgcaatgctcagaggcttccgaaagattctatggacaagagcttcctgttctgcgcaggtggtgccagtcctgggatgtctctgatgttcttgttgtgagggttgacaatcttaacaacaatgattgcaatcacaccacagactatcagaaataggaatgccatgatgca

SEQ ID NO: 75863 - DNA, 480 bp, Oryza sativa
  Clone ID: PAT_MRT4530_75910C.1
atggcggtgcacggctacggcggcgggggaggcggaggagacgacaccgccgcacgcgtctgcaccgtgtgcctgctcgagtttgccgacggcgacgagctccgcacgctaccgctctgcgcgcactcgttccacatggactgcgtagatgtttggctccgtgcgcacgcctcatgctcgctctaccgcaacgccatcgcactcccatccccggtgtgcgccgcctgcgcgtgtgctagagcctcgatgacctcctcttcttccaccccgtcccgcaaccactccacctccatgcccaccgccgcggcgcctgcctgctcccgacccgccgtcgccgccgcgttgccccttctctaccggcccagttattgcccgcaacataattccttctctcttttcgcgtgctcaccgttcctcggtgggatagcccctgaagtcatgaacacgtcggcgcagcccagcagcagaaagttcatctaa

SEQ ID NO: 75864 - DNA, 466 bp, Oryza sativa
  Clone ID: PAT_MRT4530_75911C.1
gcggaatcagggggatcccgcagccgaatcgggccggatctcgccggcgatgatgccgtcggcgtcggacgccgcggcggcggcggcggcgctggagctgcagtagttcgggtggtaggagctgcggccccaggcacggaagctgtagggtgacctctacgtcaagctattgtcctacgcgcgcctcggcgggcgctcctttttcttctccgacgccgtctgcggctgctgcccgaagaaggcgatggttctgcgggtacttgcggcgtcgatggtggcggctgtgcatggagtgtggaggcaggacaggtcgtcgtctggcggtggaggggctccgcaggtggacacgggtacgtacgtgcgctactccccggagcacgtggaggcgctggagcgtttctacggcgagtgccccaagcccagctcgctccggcgccagctgctcatgcgcgagtgccccatactc

SEQ ID NO: 75865 - DNA, 1383 bp, Oryza sativa
  Clone ID: PAT_MRT4530_75912C.1
agagatcataagcaccaaaattcttgatatcacttccagcagtgagctaattggtgcaatcaaaatgaaagaaaattcttatcaaatgctcacatttgctcaaggatgctcaaggatcctccagaatcatgtaaatcaaatgcacatgtctaaaatgagcatcggcaacataaccaatagcatggacatgtgaaactgaatgtagcagcacccaaaaaagccatgccttttaatggttaaacagtttatggcttcttgtaagctcttctatggtttgtgctaaaaggcatcaatagtttcaaaaagcttctgaaccaagttacaatggctagggcaggaaaagtatgttgtcataaaggcatagaattcccttgagggacgatgccccagctctgggactcgggcgagatggccggccgggcaaccggcttaaccggctggcctcggctacggccgggaatatccccgccggcccaccaatctggccaacaactcagtccctaacgccgccgccaatctcgccgcctccgccctgagccccggcagctttgttttggcctctccgtcgccggcggccatcctcgcttcttggcagctcgcgcgacgcgccggaccagccgactcgtcctccctccaggttccacgccttgaggttattttctgccaatgccagcatcaactatgtgctcattgccacaaactgtcgttgcctctgctgcaaccgcgcaattcacagaaagatgcaatgacttgcctatgccatgttcacaaattctgagggctaaagtcaattccctatcattttcaaggaaggtgcccactaaaccaacattgcataatttaagatgccatgcgactcaaacccaaagcacacaacggaaatctgcgactgcaaccatccaacgctctgatcccaaagggaaacttaaaggtcctaaacttgatgatggaagtggaggcttcccaccattccgctttggtaaaggcggtggaggtggcggaggtggcggtgggggcagtaactacttcggcgggttcctcctgttcacctgcgttttgcttatggattacttgaaggaattcgagaagaacttgcttttgcaaaggcatcgtataggagatgaagcaacccttggccttgcacaataattttcgtcatcattagttgctggtgtttgatgtaaattacttgatcaattgctgatggttgccatcaagcatgttcgtgattcaccatgtgttgttacatcagagatcagactagcttccattaactctacaagaaattgccgttatctgcaccagaaattacatattcaggctattatttattggctgataataacactcaatttccctctgggggggggcggggcggcccgg

SEQ ID NO: 75866 - DNA, 1156 bp, Oryza sativa
  Clone ID: PAT_MRT4530_75913C.1
ccgctcaaggatgctcaaggatcctccagaatcatgtaaatcaaatgcacatgtctaaaatgagcatcggcaacataaccaatagcatggacatgtgaaactgaatgtagcagcacccaaaaaagccatgccttttaatggttaaacagtttatggcttcttgtaagctcttctatggtttgtgctaaaaggcatcaatagtttcaaaaagcttctgaaccaagttacaatggctagggcaggaaaagtatgttgtcataaaggcatagaattcccttgagggacgatgccccagctctgggactcgggcgagatggccgaccggagcctggccgacgcgacggcgctgtggagcggcatcacggacaacaagcccccgcacaccgagggtaacctgtccaccccacaaccggagcaatgcggtggtcgacgggagatgatttgggcatccccatcgatcttcttggcaactgacgaaggggagaagggttggcacgcgcagcgggagaggagcgcggcggtggctcccggtcgctcctaccccctcttcctcgcgagcttgccggtggcgtcgagctcccgattcacccgcgccttgaggttattttctgccaatgccagcatcaactatgtgctcattgccacaaactgtcgttgcctctgctgcaaccgcgcaattcacagcatgctacagcataccaacatattgtgtgtcggtattgctatgtccaacaagtctgccgaaagatgcaatgacttgcctatgccatgttcacaaattctgagggctaaagtcaattccctatcattttcaaggaaggtgcccactaaaccaacattgcataatttaagatgccatgcgactcaaacccaaagcacacaacggaaatctgcgactgcaaccatccaacgctctgatcccaaagggaaacttaaaggtcctaaacttgatgatggaagtggaggcttcccaccattccgctttggtaaaggcggtggaggtggcggaggtggcggtgggggcagtaactacttcggcgggttcctcctgttcacctgcgttttgcttatggattacttgaaggaattcgagaagaacttgcttttgcaaaggcatcgtataggagatgaagcaacccttggccttgcacaataa

SEQ ID NO: 75867 - DNA, 435 bp, Oryza sativa
  unsure (1)..(435): unsure at all n locations
  Clone ID: PAT_MRT4530_75914C.1
acgtttggactccacctcggcacctcgcgttccccttcccccctcacctcgcctagggtttcgtctcggctcgcgcgccgcggcgccattgctacagctctgctacatctctgggtcgtgcgtcgctgatgatgcccccgaggttttgtgattaagctcttggtctcgtctccgcgagctcagctcagagtgggaggcttttttttgggggggcgttgcttggggtattatgggtggaggcgggcggctgagctgttcctgggcaatgccggggaggcccggtgccgattgctagggttttgctcgtggattcgcgtggggaggcggggatcgcttggaatgcgtgggtttcgtgcaatctactgcttgtnttgaaccccccccccacccccccttcattttccacacctcccagaacgcgcgtttccctcgtgc

SEQ ID NO: 75868 - DNA, 369 bp, Oryza sativa
  Clone ID: PAT_MRT4530_75915C.1
gtcgtgacaccgtgggtgaggagttctggaaaagaagaaagattcgactttgatatcaccaaggttgacaaaattttcaatttattgcttcgggagaaacaaattcaacttcctgctggtcatataattccatcggctaaggaacttggcaaaaggaggtactgcaaatggcataattctgaatctcattctactaatgactgcaaagttttcagacagcagatccaggtggccattgaagggggaaatatcaaattcgatgattcaaagaagccgatgaaggtagatggtaatcatttccctattaatatggtgcatgcatctggaaggacagccgatggagggacgaatcggaactttgtcacgtcc

SEQ ID NO: 75869 - DNA, 611 bp, Oryza sativa
  unsure (1)..(611): unsure at all n locations
  Clone ID: PAT_MRT4530_75916C.1
tggcngnggattcggcacgagcngtgccgnattnggcacgngcgncctcttttncctggttcacatgnancngnccngatttacaaantctgtancattnttggtnctccgnatcngcgtacctgggctgnaggnctgcnncttgcggcatctnttcntttanngtttccnnngtctggnngcntncntnttnnggnngtggttncntnnccnagttnngntgngntnngcnttnnttngtggctntgctcatgggnccnncnnagnngccnacnncggtggnngttttgcagcatcccttntntnngccnngcttntncatccccnntnnacttcnnntcacntnaaccnacngntatgcagcaacaccaccntcanttggggctaaaggnnctgtggatctcaannatgctnngngntatncngtggggccttntcttatgggngnncnccgttnattnctnatacttgngcgctaacccccngccagacactngtgtnnaaggaactggngttgggtccccgttnntatnaatntngtccgctccaaggtacntnactgncaagcgaagcataanncttgtcccacncncccncannncgtnngncan

SEQ ID NO: 75870 - DNA, 790 bp, Oryza sativa
  Clone ID: PAT_MRT4530_75917C.1
cattagcttagctctgtgacctgtgattctactccacttcgaagtccaaagcctctgaggcagaacgccgccatggcggtggtgaggcagctgctggtccacaggctctcctgcagtggcctgcctgcttcccgctgcaagaccagttgctggagcagcggcgagaggctccctggcttgaagtcaagggtaaggttgttggccgtggccatcaagccaccgcgcgccgccgcggggaaggacgagattgtgcgggcggacgacgacgacgacggcgtcagcctcggcacggtgaagctgcccgccaacatcgacatagctcggttcgagacgctgctcttccagtgggggaacagcctctgccaaggcgccaccctgccgctcccggtgcccctgagggtggacaaggtggagggcggtgtccggctaggattcatggcggtggacgacggcgtgacgcaggtgctggtctacatcgactgcctggtgtcgccggcgacggccgcctctgggccggtattccgagcgatcaggaacggtcctatgaaggaccaggagccacctggggagcccaggatcatgagaagcctactcgaggcgctccaaaaatgtatccagtatgcacaagtttgagagaaatacatgatacagtaccaaattaaactgaagaaacccggaactccatcaaaaaaaaaaaaaaaaaaaaaaaaaaaaaaaaaaaaaaaaaaaaaaaaaaaaaaaaaacaaaaaaaaaaaaaaaaaaaaaaaaaaaaaaaaaacccaagggggg

SEQ ID NO: 75871 - DNA, 1785 bp, Oryza sativa
  Clone ID: PAT_MRT4530_75918C.1
acactccatctcttcctcctcttcttcttcttcctcgcctcgcttatatacgcggcgtgtcgagctcctcctcctcctcttccttgctccaccacaacaccgtcgactcgaggcgcacgcaaacgccggtagcgaggagaaggattgcttcttctttttttttttgtgtgtgtgctgtgttcttgggtttcttggcaatggtgattggggccgagatcaaggacgagatggaggaggcgccgccgctgctgctcgacgaggccgcgcgccctcgccgcgtcgcgctcttcgtcgagccgtctccgttcgcttacatctctgggtacaagaaccggtttcagaacttcatcaagcacttgcgcgaaatgggggatgaggtgattgttgtgaccaaccatgagggggttccccaagaattccatggtgccaaggttattggttcatggagctttccctgtccaatgtatggaaaagttcctctctcgctggcactcagtcctaggattatttcggaggttgcaaagttcaagcctgacatcattcatgcatcctcacctggaattatggtttttggggcacttgctattgctaaactgctcggtgtccctctagtgatgtcctatcacacccatgtcccagtatacattccaagatatacatttagctggcttgtagagccaatgtggcaagtcataaggttccttcatagagctgctgatctaacattagtgccatctgttgctatcagcaaagattttgaaactgcccatgttatatcagctaatagaatacgcctttggaacaaaggtgttgattcagccagtttccatcccaagttccgcagtcacgaaatgcgagttagactaagtgacggtgagcctgaaaaaccattgataatccatgtaggacgctttgggcgtgaaaagaacttggattttctgaaaacggtaatggataggctgcctggagtaagaattgcatttattggagatggaccatacaggagtgagctggagaagatgtttgaggggatgcctgccgtgttcactggaatgatgcaaggcgaagagctatcacaggcatatgccagcggtgatgttttcgtgatgccctcggagtccgaaacacttggtcaagtagtcctggagtccatgtcatctggagtcccggtcgttgcagctcgtgctggtggtgttcctgatataattccagaagatcaggaagggaagaccagcttcctgttcaccccaggagacctcgaagactgtcttggcaagattcagctattgctgacggacaaggaattcagagacaacatggggatgacggctagagccgagatggagaagtgcgactggagagcagcttccaagaagatccgcaacgagttctacaatgctgcgatctggtactggaggaagaagcgcgcagaattgatcaaaccgttgcagtggctggcgcagatgttcctaccagcacctgaggtcaacagaatcacacaacactgaagcctcaaggggatgcttctgcagccatgatccggtccttgtaaatttctgatctatagtgcagtgtcaataggtgagatagttcctcttttttttgtatggaattggaattgtgaatggtatggcaaagccatttgttgcctgtattgttgtagtggacaatgtgttgccttgttgggacatgatgtgatgaactgtatttgattataatccacggcatcaacacatcaagatgctattgtgcacgcaaaaaaaaaaaaaaaaaaaaaaaaaaaaa

SEQ ID NO: 75872 - DNA, 416 bp, Oryza sativa
  Clone ID: PAT_MRT4530_75919C.1
atggcaatttcccccgcggggccaggtcccctgcggggacccacccctacgggggcgggggcggggccgattttcgacccgcgggcggcggcgcgcgctcgtgggcggctcgccggctcgcctctggatctcgccctctcggcgtcgccggcgcctgccagccgccaggccaccatctcctctcccctcctctccagtctcccctccggcgtccggcggctcgagctcgtcctctccctccggagtcagcggcggcggcacacggggcggcgccacggcgggccggcggcggcgcacaggcgcggcggggaggcgacaccggcagcaagggcgcggccggcggcgcacagggcggcggcggcggcgcacagggcgcggccggcggcgaggttgcagcacatcacaaagagtgagag

SEQ ID NO: 75873 - DNA, 1347 bp, Oryza sativa
  Clone ID: PAT_MRT4530_7591C.1
gctacccgcacccgcacccgcaccaacccatctccttctcctcctaactcaactcgactccaaccgccgctcaccggaatgcggcggtgacgagacgaccaaccacctcctgcgactgctcggatctcgcgacgcggcggcggcggcgagatacggagatccggcagcttgaggcaagagagagagaaagccatggcgagcgacgtgcccatgagccccgagctggagcaggtggacggcgagatccaggacatcttccgcgcgctccagaatgggttccagaagatggacaagatcaaggactccaacaggcagtccaagcagctggaagatctcaccgggaagatgagggagtgcaagcgcttaatcaaagaatttgatcgtattctcaaagaggatgagaaaaagaactcggctgatgtcaacaagcagctaaatgataagaagcagctgatgatcaaagaattgaattcctatgtcacattgaggaaaacgtaccaaagcagcctgggtaataagaggattgaactatttgatactggtaatgatcaggtggccgaggacaacactgttcaaatggcatcagaaatgtcaaatcaacaactcatggatgccggaaggaaacagatggaccaaacagatcaagttattgagcgttcgaaaaaggttgttgcacaaaccgttgaagttggatctcaaactgctgcagctctatcacaacaaaatattccttggacgtttcttgttagaaagacagaacaaatgaagagaattggcaatgagctagactcggttcacttttcactgaagaaggctagccaaatggtgaaagagattggtcgccaggttgcaactgacaaatgcatcatggcattcctatttctgatagtctgtggtgtgattgcaatcattgttgttaaggtgacatcacttgttgagataaaaactgatcctatatcctccattgtcaaccctcacaacaagaacatcagagacatcccaggactggcaccacctgcgcagaacaggaagctcttgtccatagaatctttcggaagcctctgagcattgcgagtgggaggcaaccgagatgtttgggagaagatactatgcacgtcgtgacaattcttttgcgcttgtatatcatctcatgtcgttattcccttcccctgatctattcttttcttgctgtaattggtcattagtgttggacccccctttgatggttgcagtgcggcttcctgttggctttatgaatgtgtgtatatgtggtagtgatgaggatacaaagatatttgttgttctttttattctgcaagtaatcacgtgaaggcttcagtttgcagt

SEQ ID NO: 75874 - DNA, 630 bp, Oryza sativa
  Clone ID: PAT_MRT4530_75920C.1
atggcgggcggcccgacgctgccgcggccggggctagtagcccagcggcgaggaggaggaagcggcgacggcgccgccactgcaagggatctcaccgtgagttcgtgtgggaggagaaggggcgcagcgaagaggcggaggaagagctccttcatggacagcggcagggagagctcaccgtcggcgaggcacgggaggtcgcggggaaggaagcgggacctgacggcgtcggagtcggcggcggcgcggaagtcacggcagaccacggcgagcagtttcaccggccggtcgagggccgcagcggtggctctcctatatgacgctgacgccgaatcccgagcagtttcacaaggtgctcttgatatgccagcatggcccatggctgcaacctcaaccttgtcagtcgcctccggcaagtcgatcggcaaccaggtctacaacgtcgagtggaccaatagcacctcgtactacttcaactcgacctcctgccccgccacccatcagcatcctgccactcgagcacatgactgcctggccgatggtcgactgtcacgtctcgactcaaatcccacgagtcttgcatcattgcatcattatgtcaagtctgatattcttctcaagggaaattga

SEQ ID NO: 75875 - DNA, 331 bp, Oryza sativa
  Clone ID: PAT_MRT4530_75921C.1
gccgccctttaaacttttttttttttttttatctatttttcttttttttttttgtacgggtcgattcacatagttagcaagcagtctagtaggggaccaatccggccttcggcacgcatacagtttcttacacgctactacgctttctttacatggagaacatatacataaattgcgacatagaagtgcatatgacatataattagtgtgcacatgtgtgcatgctgctgctgcatgcagcgctagattatttgttcccagcagggagcgaagttgtgagaccaagtttggtaggcgtggtcctcctcaccaggaagggccggggagaaca

SEQ ID NO: 75876 - DNA, 1331 bp, Oryza sativa
  Clone ID: PAT_MRT4530_75922C.1
gcacgaggagagagaactagtctcgcataaaaaaattttttttttcggcctttgcttgagatgtcaacgatcaacgaacccatgaacaatgccttaccaatatatacagaacatgacaacgaaagcctaggtttattacattaccccacttcattctgtttttttttccattttttttgttcaccacgaaatatccacaaaacaaaagaaacgagacaccacgtcactccactccctaatcccagccgtccgtacaccgagcccaagccattttggtccatcgatcgatcgcatcagagggtttgtactagtactactacacgagagtagagcactgcgaggtcttggggtcccacatcgccggcaggaggaaccgccggccggcgaccccgacggcgttgtagctggcgccggtggcggcgtccaccggcagctggccggggtaccccgggtaggcgccggcgccgaacatccccgtgcaggccgtcaccgcctccagcggcgcctcggtggggccctggaagtacccgccgccgtacgggttcgtcaccgccccggcgagcagcgtggcgaggttgatgatgatgccgtccatccccacgtcggcgttcggcgacaccagcggcggcgcctgagggccgtacgccggctggtggaacggccacgcgcactcccccgggcactgctccgccgcgttccccacccacgcgtacgcgaacctgccgcgcccgcgcgtcgcggctggcgaggcggtggcggcggcggcggcggccgaggtggccgacgcgtggaggccgcagtgggagaggcagaagccgtcgacgaggacgtcgggggcagttatcaccacggcgatggagccccggtgcggggagaggcgcgcggccagcgcggcgagggaggtctccgacagccgccggccgagggagagcgacgcgtcgagcacctggcggccgagcgtgagccgcgcggcgcccgggtggtaccgcgccgtggtggcccaccacgacgcgaccgacggcgccgccggaccaccagacaccgccgcagcctccgccgccgccgacggcgacgacatcgacagcaagaagtcagcgacggtggcgcgctgcgccggggtgaagcggccgtaccagagcaggttgacggagtagttccccgtgagcagctggccgtggtggttcgtgagcgtgaccggcgcctgggtcaccaggaacagctgcctcggcgtggccgcggcggcgccggcgatagccacggcgaggaggaggagaagcacccaaccaacaagacggccgcgcttgtgggccatggctgtcagtccaccttcg

SEQ ID NO: 75877 - DNA, 453 bp, Oryza sativa
  Clone ID: PAT_MRT4530_75923C.1
gtggcaggtctccagtccgagctgaactacctgcaaggtcacctctcgacgatggagctgccgtcgccgccgccctacgtcgccgggccgaccctggcgccgccacagccacagccactgatgccgatgaccgccgccgccaacttcaacttctccgacctgccatcgtcgtcggcggccaacattccggtcaccgccgacctgtccaccctctttgacccactgccggcggcgcagccgcagtggggactataccagcagcagcaacaccaccaccagcagctgcatcatcacccctatgaccggatgggcgacggctcgtcgagcagcagaggcggcgacgacgatggcagcgacggcggcgacttgcaagcgctggcgagggagcttcttgaccgccatggacggtcgtcgtcgagctccaagctggagccgccacctcacacacagtga

SEQ ID NO: 75878 - DNA, 1484 bp, Oryza sativa
  Clone ID: PAT_MRT4530_75924C.1
cgcgagcgccgccctttttttttttttttttcgggagaacaagcagcagaaacatttgttcattactccaagtagacattagacacaattcacacaacagccttattacaacagtgagccacagctagcaggctcaaggaaggtataatccatggatgaaaaccaagtatagtcttcttctagagctccaggaccttgtctgtgtgagccagactaagctgagatacatgacgattttctcacacgatgacacaaactatttaacccaatactagttaattaattagccgaccgattcgatattcgatcgattcgcagtttatttcggtacaataataataataatgttattgtccatggtgtcgggcctagcggttttacaggacgaacggcttgcggtagatgtcgaacatctcagagcaagacaggttaggctcctggatgccgctgaagttggcgaccttgcggatgggggcgccgatggggccctgcaggttgcaggtgacgccgccgtcgcgcatgatgctcctcatggtggtgagcaggctgccgtaggtggcgcgcggctcgcactccaccgccttgatgaagctgtgcgtcatggcccccaccgtcgacgcctccggcagcaggctatgcttgttgttgccgtcgctgcagccgctgaagagcatggcctggccgccgctggagcccttgtaggcgccggtgggcgggcggtggtcctcccactgccagccgccggacctggacgagaggcagcagaggaaggggaggtcgaggacggtggagctgtgctcggcgtcgacgacggcgtggagcttggcgccgtggacgagcgggcggacgatggcctcgttgatctcgtcgtccaggatggggccctggctgaacgagtccatggggcagatcgcctcgtcgtacccgtccacctcgtcgccgtcgtcgtccggcacctgcaccccgatcccggagaagtggaacaccagcgagtcaccggagctgcacccctgcaccagccagttcatcgccatcctgatgttctccttcgtcgccaacctgcacgggtccttctcctcgtcggtgaggatgaggacgcagtcgttggggaagccgaagcgctcgcagaggaggtaccgcatgcacttgacgtcgttgacggggcccctcatcagctggctgccgcgccgccgcatgccggcgtacgtgatgccgatcaggacggcgcgcttcttgccgcgggagcccgggaagaagccgccgccggccacgggcatcggcacggccgggcgccacggctcgaccgggttggggtggcggcgccggccgcggccgccgacgcgcgtcacgccgtagcactgcgcgcactggatgacgcgggcgccaggcatagccgggagggacgcgctgcagtgcctgcaccgcaccgcgccgcagccgccgccaccgccgaagccgagagcacgtccgccgaagtgatccat

SEQ ID NO: 75879 - DNA, 545 bp, Oryza sativa
  Clone ID: PAT_MRT4530_75925C.1
tttttttttttttttttttttttttttgcagctctgaaaaatctcaaggttcatccgagttattcagcacacaggagtacacgagtatacgacacgattacaccaatacatgcaaaccaaattgcatgttgttccaaaaatccaaacggaaaccaacaagattacaagaagcacactctcacatcatcatatcgatctctccacacaacgaggttaactatacctgagtgaaaatctcgcattcatcgtcgcatgcccgccgcagcgttgccgcttgctagaatggacggttaaaaaggttcgtcttggctaatagcttcgacaaagttcagctgctgctcctactcggagtagtcttgtaactgtaagctggagccgggctcccggcgaggttgctgctgcacttgcgccactgccacgagtcggccggcgtgctgggcagcggcggcagcggcaggacggcggggccggggaggcggcacagcccgaacggccacccctcgcagtcacggagcccctcccacttcgccggcgacagcagggga

SEQ ID NO: 75880 - DNA, 650 bp, Oryza sativa
  unsure (1)..(650): unsure at all n locations
  Clone ID: PAT_MRT4530_75926C.1
aggggacggactgcagtgcaaagataagttcctagtccagancgtcattgcnccttccggtgtaactgtnaaaagatatcacggganaaaatgtttaccaaaagaatccgggaantaaggttgaaanaagtaaaattgcgantgacctatattgctcctccncagccaccatctcctgttcccgaagaatcagaagaagttccccatcaagggtttctgaatcagaaaatggaaacagtcttggtgggggtttcactanancactgaaaaaaacncatgagcctccagaaaaattcnttaaaangctggagctttgattaacaaattgaatgaaananaaaaactctgccaattccaccagaaccataaaattanaannggaactggatatgatgaaaacgggaanataanccaanaaaccccggaagggttcccttccataatcntcataattgttccccttgaatcgggatcttcntggggctatttaatnaaattcntaaatcctttgaattcaacntccaaagggaactggaacccccctttccttgcccaattttttctttgggaagncaaagaaaaaccgnccngaaattccnccnnncctggttttggtcaataattangaaatntttggcttncntttggna

SEQ ID NO: 75881 - DNA, 834 bp, Oryza sativa
  Clone ID: PAT_MRT4530_75927C.1
atgatgcatgctcccatcgacggtggtgatgttgttgttccggttggaggggcgcggttccggatggagggggagggcgcgattgtgcaggaaggagaagggaggtggggtgagtctgacggtggtgatgttgctgttctggtaagaggggtgcggtccgcgatggccgtgaacagagacgtgatccgtgggattggaagcgacgatgggggaggcgagggcagaccgatggtgggcgaggtggcagcggagactggtcgaggacagggcgagaacagctttaactggggatcggcatcgcctgcactgacgcttgcaacaacgacaattcacgacgctttgaggcgaggctgcggggttagggttagggagggccagatgaggcgcgtggatgtggggagggtgagggtgcaactgtgcaggatggagaagggagcgaccccggctctcctctcccactcccatagtagcggtggcatccttggggccgagcggcgctggcatcctcgaggcctcgcgaagaagtgccggcgagaggacgtgggcggcggcgctgatcaggagccgctcgtggtcgtcgtcctcctcgcttcgtctccaattcccgccggcgacgaggttttggagggcggcggcacgaagcggagcgcgtggatgacgacgaggtcggcgacgcagagcggaagggtgcgagggaaccgcgagtcggaggcacaccctccacagcgcaggctccagccgttctctccgcctcgcatggtctcgcgcgggcgagcggctcttgaaggacgtggaaggacgcggtcgtgctcgccacgtccgcaattttcctag

SEQ ID NO: 75882 - DNA, 179 bp, Oryza sativa
  Clone ID: PAT_MRT4530_75928C.1
tttaccaaactgcattccaccgcggtggcggccgctctagaatagtggatcccccgggctgcaggaattcggcacgagcaaacttcctacaggtggtctcttttacgtgccaccgactggcgagcaattacctgctaaatacattgagatggatgtttcctgccactaatttgtcatga

SEQ ID NO: 75883 - DNA, 350 bp, Oryza sativa
  unsure (1)..(350): unsure at all n locations
  Clone ID: PAT_MRT4530_75929C.1
attagcccagtgatcgattgtcttaatataggcagaagaaaacgagcgagagagaaaaaaaaaacgcttaaaagaaatcctaaatttgattccatttccgttgcctgttcatttcgtcgatccaattgggggaggattattataaccggtgggagttcttgtcttctccgacgtaatcatcccctccggcgtgtagaccagggtcccacggatcacatggaggcggcaacgaggtgcagagctcatgccgctagccattgttgctgcatcatcgtgacacggctccagttctgatggacgcaaagaaccaacaatccggcgacgggcagcagcgaccggcgcanaggctt

SEQ ID NO: 75884 - DNA, 429 bp, Oryza sativa
  Clone ID: PAT_MRT4530_7592C.1
aggtggcagcgcggagctgcgaaatcgacggctacggcagctgcgtagagctgcgagggcggcggctgcggcgtcggcgtggagccgcgagggtggtggcggcggggagctgtgccgccaccgcttggtcgaggacgaggtcgagctcaagctctgcatccgccgccgcctcgtcaagctcgagttccaccggcgagctcgattcatggagaagatggagtcatggagctcctggaggcggcaggagaggtggacctttgagcttgtgctcgtcggtggtcggcgcgaaagggaaggctggggatgtgcttgagctccgtcgccgcaacgagttccctgctccacggccctctctgtctgggaggaagaaggatggagagagaaagggaagaggagatgggggaagaagaagtggctactgacgtgtgg

SEQ ID NO: 75885 - DNA, 210 bp, Oryza sativa
  Clone ID: PAT_MRT4530_75930C.1
atggggatggaggacggtggtttggtgtcggaggcggggctaggcaacctcaaggtagcacggcagggggagatggtgaagcgaacaatgacttcatcgaggcatggcaaggtcctagcagccaacaagaagcaaagcagcggtggtggcgcatggaacgaacgcgacgtgacgatgatagaagagcaaggcattaagtgcaggcgttaa

SEQ ID NO: 75886 - DNA, 3042 bp, Oryza sativa
  Clone ID: PAT_MRT4530_75931C.1
ctaattcttgccgtcatcgccatcaagctcaacgatgccgatcccattgcacagctcctggaatcgaacatggccgagcggctttgtcagtacgtccgccagctgctcctccgtgcgaacgtagttgacgacaatcttcctgttctccacgcacttggcaagcgacggctgtggcggcaatgtactctgcttcgcacaacgacagcgcgaccaccttctgcttcgtcgattgccacgagacggtctggagccgaggaagaagaggacgctgctcgtgctccgacgcgtgtccagatcaccggccatgtcgctgtcgctgaaaccatgcagcgccggcttcccgtcttgcttcctggcatagtgaacaccatggtgccacgttccggcgatgtaccggagcacatgcttgaccgccgcttgatgatcctcgtgcagctcctccataaatcggctcagatagccgacgacgtgagcgatgtccggccgcgtgttcaccaggtagcatagcccgccgatgatgctgcggtagttcatcgcgttcaccagcggactcatgcttgttttgctcagcttcaagcgtgtctccatcggagtggcgcacgcgttgcaatcgcccatgccgctcttatcgagcagcttgccggcatacgccaactgacagagcgagattcctatctccctctgcttcacctcgagcccaaggtagtaggacaagagcccgaggtcgctcatcttgaagatgttgcacatctccctcttgaacgcgccaatgctggcttgatctggaccggtgatgatcaaatcatccacgtacacgccgatgatcagctttgcatcgcccttgacgcgcgtgtacacggcatgctcgttggcgctctcctcggcgagctccccgtttaggaaagcactcttgacgaccatgtgatggacgccccagccggcatgcgccgcgacggcgagcaagagccgcacggactccatgcgcgccaccaacgggaacacctcctcgaagtcgatgccagcctgctggacgtacccttttacgacaaggcgcgccttgtacttgacaatggcgcctcgctcatcgcgtttcaccttgtacacccacttgagcccgatcggtcggtgcgacggtggtgggtcgacgaggacccacgtcttgttgtcggtgatggagtccatgaggcccggtgtcgttgcgtgtctgaggatgttctcgacggtgcggaaccgaagagggacgtcatcgtcatggtccgcggcccgggtgtcggtgaggttgcttgggggcgacacaaactcgggcgatgccgcacccgtctcggcttccggcgttgccagcgtcggtggcgtgggtgcgttccccatggtagtcgatggtgagccagagctcggtgtcggcgtgccggcttgctcctgctctggagcgttgatgtcaatcggcgccacggtgtactcgatggtgaaatcggtggtgccgtccgtgtcgccggcgccgccatgagcggcctgcacacggttagacaccgggtagaacacttggtacgccttggacccagcttcagagcccaagaagatcatcggcgagctgcggtcgtcgagcttcttcagattgggcttcgtgttcttcacgtgcgccacgcagccgagcgtgcgaaggaagtggacggccggcttgacaccgtgccaggcctcgtacggcatcttgccggaaagggctcgcgtgggagcgcggttgaggaggaacactgccgtcgaaaccgtctccccccaaaaccgagcagggagccctttgtccttcatcatggagggcgccatggtgaccacggtttggttccgccgctccaccaccccattctgttgcggggagtagggcgcggtgagttggcgctggacgccgcggtccgcgcagtaggcaccgaactcgacggaggtgaacttgccgccgcgatctgtcctgagcacccatagcttgcagtcggattccagctctgccgccgcctggaagcgcttgatcgccaccggtgcttgatcgtcgactagcagcaagaagtagcggttgccactccgggtcaccggcgagatcggcccgcatagatcgccgtgcaccaggtcgagcaagtgttcggcgaaatgtttcgcgcatgccgagaacagcgcccggcgttgcttcccagcgaggcagctgtcgcagacttgatcgacgtggtcaatcatcagcaggccgcgcaccatgtcaccctgcaccaatttcctcagcgattgaaagctaaggtgatcgtacctcgcgtgccagcgccaagcctcgtcggagctgcgggcggtatggcagatcggacgcgcggcgctaatgcggatggggtagagctggttccttgaacgcggtatcctcgccagcagccgccgatcctggtcgcggatgcgcatgaagccattgcgcaccagggactcgcagccattctcgtcgagctggccgacgctgatcaggttggcggtgaggctcgggatgtagtacaccccggtcagcccgcgatgttcgccagccgatgacctcctcaacggacaggtcatgaacatgcgctgagtgccgacgcgaactgtcttgatcgcctcccacgcggactgcgccgtgcgcttggtggaaagggagcggaccatctccggcggcaccgctcgcaagatcgcggccaacgccagccgatcgtcgcggtacttgatctcctcgtcttcgtacggctccacggcgtgccagagcccctgagcctgcaggttcacggtcatgaggagcacccattcctcgttgttggtcctcgtcaggaccgggtagtgaacggcggcgctcgactccctgacgatgacgcgcggctgagcaaccaagggttgtcgctcaccacgcccgcgcgcacggcgcggtggcggggactcagcaggatgacgacgtgagggtctacacgacgggcgagaaagaggagagcgcgagtgtggtggcgttggagcatgtggtggtgtgcgagagggacgcggcggcgtgtgctccgccat

SEQ ID NO: 75887 - DNA, 314 bp, Oryza sativa
  Clone ID: PAT_MRT4530_75932C.1
gtactgcaaaagaagccatgtatgattttccttttttatgtatctccaaagcacagaaagacaatgaacaactaccaagtgccaacactatggctgatcttcacacaaggcaaaaggtagtgacagttcaacctgcatacaatgtatattcgccagactattcaaacattccttttatcagttatatctccataaactctcaatactttaacgtagcactcatctgtgattttgccaacttctattcggaagctcatgatgaatcggtttgaaactctattaaggcactttcctcaaaggaactctggtactgc

SEQ ID NO: 75888 - DNA, 402 bp, Oryza sativa
  Clone ID: PAT_MRT4530_75933C.1
atgcaggtgagtgctgaggatgtcggcaacgagctccggaggcacacaattgagcttggagaggtccatgacaatgggcgggccccattgctggtgacagtggaatgcgtcgaggaggaaatgaccgagtggggagaagcggtcgcgtggctcgtggggatgcgtctccatggcgggatgcgacgccgggccgatgaggatcaaaccgactggcacgtccacatctcaccaagatttggacttgcactggagctaagcagatcttccaggctagtctgtgtttttttcgcgtcaacacgggccaagaggcagcacgactacggaagatgtggcgccaaagcggagatgcttgaatcagcattggaaaccggtcatgattttcgtgaaatctggacgtcctga

SEQ ID NO: 75889 - DNA, 210 bp, Oryza sativa
  Clone ID: PAT_MRT4530_75934C.1
atgacggctgtccactgccaggcttcggctgaagtgcagttgccaccatatcatgcgccgccacgaggaagaaaaattgacactagggaatcatgggggagctacagacttattccagccagccacgggaagacaatgctgacctcgtccctagaagtggagagcaaacaatccagaatcgggatttccaactattgggagcttcgctag

SEQ ID NO: 75890 - DNA, 860 bp, Oryza sativa
  Clone ID: PAT_MRT4530_75935C.1
atatttcttttttttttttttttttttttgttttttttttttttttttttggtttttggcacttccaattcggaataaattcaaaattgtgatgtctttcatatctccagctaaagggtaaaaatgttctcaaaacagagctgtgtgtggctacagtattcacacagaccacaaacagctcatttcaacttgtattgaaattgttgtgtatcagaggcatgctacccacaccaccttctgtctttacaagcagcaaaattatggagtagaaagaattcgagatctttacatacaagggtcgcattcttcctgtactcagaccgactagctggtaacttcacaaaccagtatattccaggccgattttagatggcgagcattctgtcaagtatagtttgctatgtccacatggaaaagaatcacccagtgagaagatatgttacagtttagggtttctttgtctgtacttttttcaggtatttcttatgaagcttcaaagcaccagcacaagcttttttggcatctaaatttccatttacatcattcagaatcctaataagatcatccagtcctctagcttcctgtaatagcttttctcttttttccttgagaacacttgcaaccatgaaaactgaaattggaactggaccatcagtatcctcagatccatttttcgaattctctttatctttgtctttgtcccacttgccaaaatggcgtacccctctcaattttgatttagatactttacttttgtgagcacttgcatcttcacaagcggcaaagaagatgtcgggatcatattccagagcccacatcatctcccagagatacagggagtccccaaatgacacttcgaa

SEQ ID NO: 75891 - DNA, 561 bp, Oryza sativa
  Clone ID: PAT_MRT4530_75936C.1
gcacgaggagaatctctttgaattaaggcccagaagtggcggttcttatttcgacatataaatctttgttgactttcgaacatgtcaacaatcaatcaaaatccgattattcaatatcgtcaaacaatcatcattggttcgggaacagctggtctttcggctgcttaccaattacaaaaatctggcattaaatctgtttttattctcgaaggatcgaatcgtatcggtggtcgcatcctcaccgattatctcgatgccgattcttcgaaaccactcgaaatgggtgcatgttggatgcacggtcttcaaggcaatcctgtttatgaattagctcaacgagaacaatttccaactcatacaggaacaatacttaatttcaatattggtacatgtgtcgatgaaaatggtttacaaatatcagctgaattacataatgaagtcgatcaattttttgaaagtttattacaagatacacgtgatctatttgaatatcaacaaaatcatcaaacacaaatatcatcgattagtatacaaaaagttttcttggaaaaattcgagaat

SEQ ID NO: 75892 - DNA, 297 bp, Oryza sativa
  Clone ID: PAT_MRT4530_75937C.1
aagttattttagttggttgagcaaaacgctgtgcatttttggtcagaaaaactggtgctttcttgctaagaaatgcatctagtagtagtttctgaagcactaatttccatctgctaaagattctctgggattagctggacgcacgatttcatcagcctggtgaaattaatgtcggtgggtaggattaaactttgctttttctttttctggcgcagctgatctgtttcttgctgtgaggcaaaatctgtagtacttgcaaatccactgtagtgtagtttcatttcaaggtgtactaga

SEQ ID NO: 75893 - DNA, 258 bp, Oryza sativa
  Clone ID: PAT_MRT4530_75938C.1
gggttcgccgagtttcctgtcaacgagtgtgatggaatcaatttcatgattcgtcggcttcgtcttcgattcgtgagttttcacttcctcgctgccgacgacttcaacaatctctccttctccgacttgggttttacccagtcgagagaacggcgatcaaagatctatgtcatcaagttggaagcttcaaccgtcatcgccaccgatatctcctgtatctccgcaaaaaatctccgcttcgggagctacactttgtag

SEQ ID NO: 75894 - DNA, 301 bp, Oryza sativa
  Clone ID: PAT_MRT4530_75939C.1
aacaaaacaaaagatggataaaaggcccaataaagcaatcatccttttaaaaaacaaaacctaccccgcccaataatcccaaaaaaagaaagggaaaaaaattcgcacaaatccattactaaaaaagaaatttaattttcctttaaagaccccaacgggaccccaaaggaggaacaaaagacccccctggaccccaggggttttgtttccgttcccgttcgccgccgcggggccgtggctttccttcaacaacgggcgggggccccggggggccggggctttccttttaccacgggcgggg

SEQ ID NO: 75895 - DNA, 135 bp, Oryza sativa
  Clone ID: PAT_MRT4530_7593C.1
aagaaaaaaaactcagcatagtacttgtccctcgacagaagcaaaaactgatgaacaagagacatggatttttaccaacaacaatgcttaagttaacaatatagagagtgcactttagaacatagcaagaaacca

SEQ ID NO: 75896 - DNA, 183 bp, Oryza sativa
  Clone ID: PAT_MRT4530_75940C.1
atgcacagtgctcctacatatgtgtggtctcaactcgccacaaatgaaaaccccgacgctcctcggaaggacgttgtctttcacgcccaaaagatcacgaacgagaaatctcaggcagaatcgtggcaactccactccataggcattcttgacggcagcgacgaagcctactccttcgagtaa

SEQ ID NO: 75897 - DNA, 288 bp, Oryza sativa
  Clone ID: PAT_MRT4530_75941C.1
atgggggcagatctcgcctccaagtccacgacccgtacactcgtgtccctaggagtccaccacggcggaggcgctgccctccgtggcggcgccgtcggagtggtgggggcgaggccgagccatcagcgagccgagcacacgggcggcggcggcgagcgcgggcaccgcgggtgctgtggtggtagcgcgcccaacccctcgagcttcgccgcgcggcgtcttcgtcgaaggctcccgcatcctcttccgcagcacaggggagccgtgcggctgcgattccgttattag

SEQ ID NO: 75898 - DNA, 516 bp, Oryza sativa
  Clone ID: PAT_MRT4530_75942C.1
atggaggagaaggagaagcagcagctggccggcgacggcgatggcatcgcctacggcgaccggagcaaggaggaggcggaagagaggaagaagcagaggacgcacgcgaacgcgcacgccttcgtgtgctcgctgtcgctgctcctggcggcgacgatggcgctcatgctgctgagctacggcggctcgccgctgtggctcgcgtcggagctggccgccgtgctctgcctcctgctctacctctgggcgtaccacgtcacgcagaacctcgcggccggcgccggcgccgccgtgcccgtggaggcgctcgtgttcgcgttcccgctcgtcttcggcgccggcttcctggccgcgctgctcgccgtcgccgtcgcccccgtcgccggggtgctggtcatgggcgccgacgtcgcgggagtttctgcgttattcgggttctgcctcgccgagtacttgcggcacaacgaggcgcatgcagccgtcgacggtgcagctccagcaagcgtagaaacatag

SEQ ID NO: 75899 - DNA, 318 bp, Oryza sativa
  Clone ID: PAT_MRT4530_75943C.1
ctgcaagaagtcatcaccaaaatccaagaacttagtatagttaacaagccaagcagcacctacatgttgcgttcgccttctcctgcatcacaatcgcaagaccctacctctgccgccgtactgctagtgcctcatccgagccatctcaatccgccggggctggcgccgcccccgccgacctgtcgtatccatgacatcacgggaggtcgcagggagggagagatggcgcagtacaggcggcgacggcgatcgatcgatctggatatcaacttgcgcagtggcaggaaggcggccgggctgcggcacgcgtgttgcagg

SEQ ID NO: 75900 - DNA, 2191 bp, Oryza sativa
  Clone ID: PAT_MRT4530_75944C.1
tcaataacttgattttatcttgtatcttgtccagcagcgtatcttatccagcagctgcatcagagttttttcttgatttcgaaacacacgtctattccactcacaccgtatttcccatgctacccgcatgtggactgatttgttttctttggctttgtctttcccaccttgagatgttctcttaatccaccagtccaacagcggctcattttcatcatgtgtcatgtcaatttcattgcagttcagcctacttaggaccctctcccaaatcttccttttcttttggcatgcttgtatagagttgtagccaattccttgagtagttgtccaccaattcagtttgattcctaaaagctcattttgcgtccatctcctattgacatcttgattgatcatgccatgagatgaagctgttggaaatgatatagtatactcacctaactggagtaaatcgggagctgtctgaattttgcccctgaatatctgggcctggaggaccgggaggaggccctggcggttggggccctcctggaggtggccctgggggatggggccctcctggaggtggccctggaggatgggccccactacctcctgctggacctggctttctgggtggcccaggccctggccctggttactgggggccattacacatgggaccaaaatcgttacacatcctctgatgaagaacaagtacctgatagaagaaaactgcaccgattctaagaaagtaaccgaatccaacacactaataaaaaccccagtgaggggagagaaaagaaatcccgggttagtctactgagccagcagcatctcttggacggttctgtacagatgtaaaagctgttctattcacgcaggcaattggtaccttgtgttatatgcaacacacgataagtggctagtgaaatacgatgctaaggaatgcttcccctttcaagattctgatgagtagctgccctccaattcttggtgacaaactgaagtgtccagcttatgtctattccggaagaacttgacctcagaagctcgcaggcggtagtcaaaagaagtacctgagaactgccaaatatgacagccccttgctcacttaacacgacagctgcttttggaagagtttcttctagaggagattccttcaaacttgctaggttttgttcgaaaggatggagagattcgacagtaatggaagaggtatctgttggagggggtggagattctgtcaatataacaggtgtctccttcaatggtgtaggaacttctctcaggattggagtctccttgactggggatacgggtgcaggaacttctctcaggaatgaagtctccctgacaggggaaatatgcacaggaacttctctgagaattggagcctccttgacagggtaagggggtgcaggaataacaactgggtcttcttccagaggggaatgaacctctttctctgcaactggaatttcattcttaatgttcaacgtgtcctttaatgaaggaacctcaacagctgcctcagtgtttggaattccattaattggctgctctccaaaaggatgagatgcactaacaagaacaaccctcaatttactttcctcgatatatctgccactttctttagaaaaataagaaggaacaaggtcctcatctgatgttccataagggacaactgttgtctgaaccaaaaacttgtcttttaattgcatgtctggtggagcagtacgttgtgcttgcatggtaacttcattcagacgagtaaagaaaagaatcaataagagaaaagagcaatttaactgtgaaatcacatgttgaccttggaaggatgacaatgcgacatattcattggatttgttgacaagatggacagtacatgaactttgcttcttcacctcaaaggtgaactggagctcgcgagggtggatctcggcgaggtcctggcccatctcctccgcaccacgaacgagacgccgcccggccttcagcaccgcctccaccgacgttgggtcgccgcgcgcggaagcctagctagctaccaatcaatcgaatcccccgcggactctgaccgggcgagctggagaggagagacaggcggcgatggcttcgagagaggggtggtggaggtggaggtggagttggagtgaagtcgaagacgacgacgggaccgccccccgggggatccactagtttagacgcc

SEQ ID NO: 75901 - DNA, 1092 bp, Oryza sativa
  Clone ID: PAT_MRT4530_75945C.1
agccccttgctcacttaacacgacagctgcttttggaagagtttcttctagaggagattccttcaaacttgctaggttttgttcgaaaggatggagagattcgacagtaatggaagaggtatctgttggagagggtggagattctgtcaatataacaggtgtctccttcaatggtgtaggaacttctctcaggattggagtctccttgactggggatacgggtgcaggaacttctctcaggaatgaagtctccctgacaggggaaatatgcacaggaacttctctgagaattggagcctccttgacagggtaagggggtgcaggaataacaactgggtcttcttccagaggggaatgaacctctttctctgcaactggaatttcattcttaatgttcaacgtgtcctttaatgaaggaacctcaacagctgcctcagtgtttggaattccattaattggctgctctccaaaaggatgagatgcactaacaagaacaaccctcaatttactttcctcgatatatctgccactttctttagaaaaataagaaggaacaaggtcctcatctgatgttccataagggacaactgttgtctgaaccaaaaacttgtcttttaattgcatgtctggtggagcagtacgttgtgcttgcatggtaactgtgaaatcacatgttgaccttggaaggatgactccagtgtttggtcgaacacaataccttttaggtgatgttgttttaaccttgaatgcgacatattcattggatttgttgacaagatggacagtacatgaactttgcttcttcacctcaaaggtgaactggagctcgcgagggtggatctcggcgaggtcctggcccatctccaccgcaccacgaacgagacgccgcccggccttcagcaccgcctccaccgacgttgggtcgccgcgcgcggaagcctagctagctaccaatcaatcgaatcccccgcggactctgaccgggcgagctggagaggagagacaggcggcgatggcttcgagagaggggtggtggaggtggaggtggagttggagtgaagtcgaagacgacgacgggaaggccaccaccac

SEQ ID NO: 75902 - DNA, 1091 bp, Oryza sativa
  Clone ID: PAT_MRT4530_75946C.1
gcaatttgcaaggatatgttgccttcgctcctgaaaattctgttcttggattgagttctttgtgaagctgtagctagcattttctctcggtgaaatggatccacctgggcctggaggaccgggaggaggccctggcggttggggccctcctggaggtggccctgggggatggggccctcctggaggtggccctggaggatgggccccactacctcctgctggacctggctttctgggtggcccaggccctggccctggttactgggggcctggatttggaggtttcatggggtcctgtttttatgtcctctgctgctgctgcttgctccaggattgttgtgggccattgctggggcgtccaggcccgggtggcccatcgtcacccttctgataccaccctgaccttacccacctagtgaaataatgcgatgtgtttaccattacacatgggaccaaaatcgttacacatcctctgatgaagaacaagtacctgatagcagcttgcagagtcttatatatgctctttactttgtcacttatctctaggggtgttatgcataatcctacttgtttgcatttgttagcaactcgacgatataatgatggttctgctttggtacctcgttgatgccttacaaatgtcaaatcaaatacaacctgacagttttcaaactgacaccagcccaggtgaaaaggaaaacaacgaagaaaactgcaccgattctaagaaagaaccgaatccaacacactataaaaaccccagtgaggggagagaaaagaaatcccgggttagtctactgagccagcagcatctcttggacggttctgtacagatgtaaaagctgttctatgcacgcaggcaattggtacctttgttatatgcaaaaccataatggctagtgaaatacgatgctaaggaatgctcccctttcaagattgatgcgtagctgccctccaattcttgtgacaaactgaagtgtccagctgatgggtttttggaagaacttgacctcataagcgcaggaggtaacccagagaagtaccaagaagtgccacataaaccacaaacagcaaggggaaaccaacttgat

SEQ ID NO: 75903 - DNA, 3032 bp, Oryza sativa
  Clone ID: PAT_MRT4530_75947C.1
gaagctcaagcgatcggacggaacttgtggccgcaagctaggaaccttaatggttgctatattaaggctgttcatcgtgcaggcacaagttcatctccatgcattccagtaaagaccatttttaggacaaacacatcggtttcaaaaaaaaaaattaggacgaacagagcaatctcttcgcatgcaacagcggccgccattttccctagattcaccttccattggtagcttggttgttcaccaatggcgcacttaggggcggtcctctgcatccgtgttgctctcgtcgtcgtcctcctcccgtcgcttctggcgaccgtcgccgtcgcgcacaacgacaccggcgagcacaagaactacctcatcatcgtgcgcaagccgtacgagtacgaccacaatgtgtacaagaccgtgtcgagctggcacgcgtcgctgctggcgtccgtgtgcgacacggccaaggaggagctcgccaccgaccccggcgccgagacgcggctcatctactcctaccgcaacgtcgtcaatggcttctgcgcccgcgtcaccagggaggaggtgtacgagatggccaagaaggactggttcgtgaaggccatcccggagaagacgtacaagctgatgaccacgtacacgccgaaaatggtcgggctcaccggcgccccggcggcctaccatggcggcttgtggaacaggagcaacatgggcgaagggatgatcatcggggtgcttgacgacggcatcgccgccgggcacccgtcgttcgacgcggccgggatggggccgccgccggccaggtggaagggccggtgcgacttcaacagctcagtgtgcaacaacaagctcatcggcgcgcggtccttcttcgagtcggcgaagtggaagtggagaggggtcgacgacccggtgctccccgtctatgagctggcgcacggcacgcacacctcgagcacggcgggcggcaacttcgtgcccggggcgaacgtgatgggcaacgggttcggcacggcggccggcatggcgccacgcgcgcacctcgcgctctaccaggtgtgctccgaggacagaggctgtgatcgggatgacatattggcggcgatggatgacgccgtggacgagggcgtcgacgtgctctccatctcgctcggcgatgacgaggccggagatttcgccggggatcccgtcgcgctcggggcgtacacagccatcatgaggggcgtctttgtcagctcgtcggccgggaacaacggcccgaacccattgacggtctccaacgaggcgccgtggctgctcaccgtggcggcgtccacgaccggccggaagttcgtggccaccgtgaagcttggcaccggggtcgagttcgacggcgaggcgctctaccagccacccaacttcccgagcacgcagtggccgctgatagcggacacccgcggtgacggcacgtgttccgacgagcacctaatgaaggagcacgtcgccgggaagctagtcgtgtgcaaccagggtggcaacttgaccggactccggaaagggagctatctacacgatgccggcgccgccgggatggttctcatcggccctgagttcatgggctcaatggtccaacccaagtcgcacatcctccccgtggcgcaaatcgtctacttgtcgggggaggagctcaaggcctacatgaaatccacgaagagtccgacggcggcgctgatctacaaaggaacagtgttcggcgaccgcaagacgccggaggtggcgcccttctcgtcccgggggccgagcaggcagaaccaggggatcctcaagcccgacatcaccggccccggggtgaacatcatcgccggcgtgcccgtgacctcgggcctcgccacgccgcccaatccactggcggcgaagttcgacatcatgtcaggcacgtccatggcggcgccgcacctcagcgggatcgccgcgctgatcaagaaagcgcacccgaagtggtcaccggcggcgatcaagtcggccatgatgacaacggccgacacgttggaccgccggcggaggccgataaccgaccagaaaggcaacaatgccaatatgttcggcctcggcgccggcttcatcaacccgacgaaggccatgaacccgggcctcgtgtacgacctgacagcgcaggactacgtccctttcctttgcgggctcgggtacagcgaccacgaggtgagctccatcatccacccggcgccatcggtgtcctgcaagcagctgccggccgtcgagcagaaggacctcaactacccgtccatcaccgtcttcctcgaccgggagccctacgtggtgagcgtcagccgcgccgtgacgaacgtcgggccccgcggcaaggcggtgtacgcggcgaaggtggatatgccggcgacggtgttggtgacggtgacgccggacacgctcaggttcaagaaggtgaaccaggtgaggaagttcacggtcaccttcaggggcgcgaatggcggcccgatgaagggcggcgtcgccgaggggcagctcaggtgggtctcgccggaccacgtggtgcgcagcccgatcgtcgtctccgcccaaaagttcttgaacggtaacacgagctcctccgatcacgcgggccattgattgttgattacgtagctttgccagtaaatggggtacttgattagacccccaaggattataaactgccccctgatgattgtcctcgaaaaaagatgaagagaaagacaaaataactctattagaagatggaccaagatgcgaagggattgcgtggccggaaaaaaaaaaaagcaacatgggattctttttccatgatggccatggcctggatatgtgcccctgaaccaaactgcttcgatattgggcttgatgggtttgttacggatttagacctttatacaattagcatagctaaaatttcgatcttattgttgtgggttggatattggatgatagcactacggcactacctttgtggataagggatatatctcacacacaattcattcaaatttaaaaaaaaaaaaaaaaaa

SEQ ID NO: 75904 - DNA, 147 bp, Oryza sativa
  Clone ID: PAT_MRT4530_75948C.1
atgcctttactttcggagtaccgacacggctttccagccttcgccatcttctcttatggctttcgccatagggcttcgcctgaatggtccggccaaagggcttcatggcatgcctccaacaagcccctcatgggcaagggtgagtaa

SEQ ID NO: 75905 - DNA, 445 bp, Oryza sativa
  Clone ID: PAT_MRT4530_75949C.1
cccacgcgtccgccgcttccccccgcaccgagcctccccctagcccgtcttcgccccccatcgcatcgcctcccgcaccatcaagattccggggccggagtcatgcccccagcgcagcaggtggaccctccgccccatggccgcatcgcctccccccagcgctgcagtcgcccctccggggggggcctgcgacgtcgcaccctagcgccgcaggtgcctcacacccccagcagccgcctcccagcctcttcgcctccttggcttgtatggagaaagggaaccatcgttgggcgcacgctgaaacggaaaccgttcgatccccgagtcccatctattcatcttcagttttttgaaacactggatcaatctgctcggccagctagtagcttctccttcatacaagcacatgcttggattgatctggtctaggattaaatacttcgat

SEQ ID NO: 75906 - DNA, 230 bp, Oryza sativa
  Clone ID: PAT_MRT4530_7594C.1
acaaaaaaacacacaaacaaagaactcaccgcttctatcttctatgctccccctgcaactacgggcgcgcgctttagagtaccaccccacgtcgcgagcgtgccatactaggtttatatagggcacctaatcaattaatgccgggtttccaacgcattctggaaaaccaagcttcccaactaattgttagcggacatcactgtagttgtggatatattaaaaggccctgc

SEQ ID NO: 75907 - DNA, 571 bp, Oryza sativa
  Clone ID: PAT_MRT4530_75950C.1
gcgacctccaccatttactatcgaacaggccattcgaccatggccgccgccgccgcccgttccggcgcgcatacgacatagatcgccttctcgaacggccggtgcagggctatttaactcgaggtggtgcgtcggccgggcgccgccgtgaggccgtcaccgctgctcgctccggcgaggtgcaccgccgccgtcgggacggcggcgcccaatgtggagggcggcggacggcggtcgacagagcaggggcagctggcggtggcgccggcgcggctggtggatgagctggtcgaggaggcgctggtgtggtcgtggcagcacggcctggtcgttggcgacaagaaccacccggtgaagtgactagctcaatgtgtgacctacgtactatatttttcacatgaattattcgtgcagattcttcctgtccttttaacatgaacatatttcagtgattttttttaagatttactttagtgttcgtcaaagacatatgtatcccatcaattgcaactaccggatactcctattaaatttaccgggtttttcctaggctccaaagacgcataaaaat

SEQ ID NO: 75908 - DNA, 647 bp, Oryza sativa
  Clone ID: PAT_MRT4530_75951C.1
gctcgcagctgccaccgccagatgcagtcgcttctcctcccttctccttcaccccggcccgcgctcgcttctccgccccgcacgcgctcgcggtcgcttctcctccgtcccctgcgagatgcgcggcgggcttcgccccccatcgcatcgcctcccgcaccatcaagattccggggccggagtcatgcccccagcgcagcaggtggaccctccgccccatggccgcatcgcctccccccagcgctgcagtcgcccctcccgctctgccctgcgacgtcgcaccctagcgccgcaggtgcctcacacccccagcagccgcctcccagcctcttcgcctccttggcttgtatggagaaagggaaccatcgttgggcgcacgctgaaacggaaaccgttcgatccccgagtcccatctattcatcttcagttttttgaaacagtacgtcgccgcttgctttatactggccttctttcccgtcctatttatgtatgatgatacacacaacagctgaagaaaagtggtacacagcagctggatcaatctgctcggccagctagtagcttctcctccatacaagcacatccttggattgatctgctctaggttggccactgcttgccgatctcacatgttccagcatagcttc

SEQ ID NO: 75909 - DNA, 3456 bp, Oryza sativa
  Clone ID: PAT_MRT4530_75952C.1
atgcgccaaactcaaagtcggtttgcgtcggttcccggtttcccagcactgacacgaaccgccatagcggagccacctccacgtcgaatacgtcaaacacaaacacggtcacgcacggataaagcggccttggccgcaccaccgaccggcgaccacaaagcccaagcccgtaacccccttcgataccgcctctcgcggcaccgccgcgccgccgccgcaaacgaggctacggaggccgaggccatggcggcgagcgatgatggccagctcaggacgtgggtctccgaccgcctcatggcgctcctcggatactcccagggcctcgtggcgcggcttgtcgtccgcctcgcgcgggagtgcgcctccgcgggtgacctcgcggcgcggctcgtcgacctcgccgggttcccgccttcccccgacaccgccgcgttcgccgaggacgtgtacgggagggtgccccgcagttgcggcggcggcggcgacgacgccggggtcagcgagtaccagaggcagatgcaggaggctgcggcgatggccaagaagcagagcaccatcaagctgctcgacgacgacggcgagatcggcgtttccgcgtcgccctccagcggcggcaggaagcgtttcaggaggaaggccgtgggcgaagacgatgacgatgccggacggaacgcgcgacggcggcgtagcccggacgacgaggaggaggacggcgacgccggcgaggaagaagagatggagcgggatcagatcgagagggcgcagctcgagcggaacatcagggagcgcgacgcggcgagcacgaggaggctgacggatcggaagacgaccaagcgggagcagggcgagctcgcgcgccggtcggacgccatggacaagaacgacacctcggggctcaggaggctctcccggcgcgcgtacctgcagaggcggaaggagaagaaggtcgaggagatgcgcgacgagatcgtcgaccacgagttcctcttccccggcgtccagctgacggccgccgaggagagggacatgaggcacaagaagcaagtctacggcctcgtgcacgatcgcgacgactactacagaatgccggacgcctacgacgccgccgcgaacgtcgatcaggagaagaggttctcggtggcgcggcggcggtacgaggagccagctgaggcggcgagggacggcaagacggcgaacgccttgtccgagcaggaggcctgggaggagcagcagatacggaagtcgaggctgcagttcggatccatggatcgcggccggcgcggcgacgagtacgagctcctgttcgacgacggcgtcgagttcgtcaggtcgacggtgatggcgggcaccgcgcctgcagacgacgacgacacggcggcggcggcggcggccgacgagtaccatgccgaggccatggatgccaaggccacgttgcaagacgagaggaagactctcccggtgtacaagctcaaggacgacctgctcaaggccatcgacgagcacaaggtcctgatcgtcgtcggcgagaccggctccggcaagacgacgcagataccgcagtacctccacgaggtcgggtacacggcgggggggaggaagaaggtggcgtgcacgcagccgcggcgcgtggcggcgatgagcgtggcggcgagggtggcggaggagatgggcgtcaagctcgggcacgaggtcggctactccatccggttcgaggactgcacgtcggagaagacggtgatcaagtacatgaccgacgggatgctcctccgcgagttcctcggcgagcccgacctgggcagctacagcgtcgtcgtcgtcgacgaggcccacgagcggacgctcgccaccgacatcctcttcggcctcgtcaaggacatcgcccgcctccgccctgacatgaagctgctcatctccagcgcgacgctcaacgccgacaagttcagcgacttcttcgacgcggcgcccgtcttccggatccccgggcggcggttcgaggtgggcatccactacaccgtggcgccggaggcggactacatcgacgccgccgtcgtgacggtgctgcagctgcacgtcacggagccccccggcggcggcgacatcctgctgttcctcacggggcaggaggagatcgagacggtggaggagatcctgaggcatcggctgcgggtgctcggcggcaaggtggcggagctggtgatctgccccatctacgccaacctccccgccgagctgcaggccaagatcttcgagccggcgccggcgggcgcgcgcaaggtggtgctcgccaccaacatcgccgagacgtcgctgaccatcgacgggatcaagtacgtggtcgacccggggttctgcaaggtgaagtcgtacaacccgcgcaccgggatggagtcgctgttggtggcgccggtgtcgagggcgtcggcggagcagcgcgccggccggtcggggcgcaccgggccgggcgagtgcttccggctctacacggagtacaacttcgtcagcgacctcgacgacgacgcggtgccggagatccagcggagcaacctcgccagcgtcgtgctggcgctcaaggcgctcgggatcaacgacctcgtcggcttcgacttcatggacccgccgccggcggagtcgctgctcagggcgctggaggagctcttcgccctcggcgcgctcaacagccgcggcgagctcaccaagaccgggaggaggatggcggagttccccctggaccccatgctctccaaggccatcgtcgcgtcggagaggtacgggtgctccgaggaggtgatcaccatcgcggccatgctgtccgccgggaacgccgtcttctaccgcccaagggacaagcgggtccacgccgacgccgcacggcgggcgttccacgccggcaacgccggcgaccacgtcgcgctgctcaacgtgtacaacgcgtgggcggagtccggctactcgccgcagtggtgccgcgagagcttcgtgcagcaccgcaccatgcggcgcgcgcgggacgtgcgggaccagctgggggcgctgcttgagcgggtggagatcgcgccgtgctcctccgccggcggcggcgacctcgacgcggtcaggaaggcggtcacggcgggctacttccgccacgctgcgcggctgcagagggacgggtcgtaccgcgccgtgaagagccggcagacggtgttcgtccacccgagctccggggtggcgcaggcgccgccgcggtgggcgttgtaccacgagctggtgctcacgaccaaggagtacatgaggcaggtgacggagctcaagccggagtggctggtggagatcgcgccgcactactacgagcgcaaggacgtcgacgagcctgagcccaagaagacggcggcggcgactacgccgcaagagcagacgacggccggctctacaccaacgaagcagactccgaatctgaatagtttcttcgacgtgtaa

SEQ ID NO: 75910 - DNA, 1868 bp, Oryza sativa
  Clone ID: PAT_MRT4530_75953C.1
atggagggcgccctgctctgcgccgccaaccacgcgccgctcacgcccatcaccttcctcgaccgcgccgccctcgtctaccccgaccgccccgccatcgtcgcctcctcctccgggctcacccgcacctggcgggagacgcgtgaccgctgcctccgcctcaccgccgccctcgccgccctcggcgtccaccgccaccacgtggttgcggtattcgcgcagaatattccggcgatgtgcgagctccacttcggcatcccgatggccggcgccgtcatctgcacgctcaactcccgcctcgacgccgccatggcctccgtcctgctccgccactcggaggccaagctcatcttcgtcgactgcgcgctgctcgacgtcgcccacgacgccatccgccgcatctcccaatcgggcgccacgcctcccgtcctcgtcctcatcagcgagctcctcgacgacccatccgatgccaagctcccgtccggtcgtgtcgactacgagtacgagcacctcgtcggcaatgccgggtcgtcgccggagttcgcggtgcggtggcccgccgacgagaacgagccgatcgcgctcaactacacgtcgggcacgacgtcgaggcccaagggcgtgatctacagccaccgcggcgcgtacctgaacagcctcgccgccgtgctcctcaacgacatggcgtccacgccggtgtacctgtggacggtgcccatgttccactgcaacgggtggtgcatggcgtggggcgtcgcggcgcagggcggcaccaacgtgtgcgtccgcagggtcaccgcggccaccatcttcgacgccgtggcgcgccacggcgtcacccacatgggcggcgcgcccacggtgctgagcatgatcgtgaacgccacggcggaggagcagcggccggtggcgaggagggtgacggtgatgaccggcggcgcgccgccgccgccgaaggtgctgcaccggatggaggagcaggggttcctggtgatccactcgtacgggctgacggagacgtacggcccggcgacggtgtgcacgtggaggccggagtgggacgcgctgccggcggaggagcgggcgcggatcaagtcgcggcagggggtgcaccaccacggcctggaggtggacgtcaaggaccccgccacgatgcggagcgtgccgcgcgacgggaagacgatgggggaggtgatgctgcgggggaacacggtgatgagcggctactacaaggacggcgcggcgacggcggaggcgctcgccggtgggtggttccggtccggcgacctggcggtgcggcacgaggacgggtacgtgaaggtgctcgaccggtccaaggacatcataatctcgggcggggagaacatcagcacaatcgaggtggaggcggcgctgttcagccacccggcggtggaggaggcggcggtggtggggcggccggacgactactggggcgagacgccgtgcgcgttcgtgaagctgaggcccggcgcggcggcggcggcgaaggcgggggtggtggaggaggagctgatggcgtactgcagggcgaggctgccgaggtacatggcgccgcggacggtggtggtggtggaggaggggctgccgaagacggcgacggggaaggtgcagaagttcgagctgcgggcgcgcgccaaggccatgggcaccgtcccggcggcggcggcggcgaagtcgaagaggagcaagctctgaatgaatttgtttgcgtcagctgctgacgactgcaatgcaacttcgatgcagcatgcgtgtgtgtgcctgtggaatctcgagacaacaaccaaagaaaaaaaataaaaaaatcatgatttgttgtgatgattcgtgcgaaaaaaaaaaaaaaa

SEQ ID NO: 75911 - DNA, 592 bp, Oryza sativa
  Clone ID: PAT_MRT4530_75954C.1
attcggctcgaggcaatggcacgtaccaagcaaaccgctcgccttcccacttaggaaaggctccgaggaagcaattggcaaccaaagccgctcgcaagtcagccccggcgaccggcggagtgaagaagccccaccgcttcaggccaggaacggtggctctgagggagattcgaaagtaccagaagagcaccgaacttctgatccgaaaactcccattccagaggctcgtcagagaaatcgctcaggatttcaaaaccgatctccgctttcagagcagcgccgtttcggctcttcaggaagccgcggaggcttatctcgttggactctttgaggacactaacctctgcgctattcacgctaagcgagttaccattatgcccaaggacattcaactcgctcgcagaatcagaggcgagagagcttaagtttagggtttcgtgtcatttgacattaaaattaggttactgcttattgtaattcgtgttttcttcaaatgcctctttattgtaagattcatcttatttcatcaggtatattcccatatggatctgcacaactgagtttatgttgaaaaacgagataattctctaat

SEQ ID NO: 75912 - DNA, 804 bp, Oryza sativa
  Clone ID: PAT_MRT4530_75955C.1
atggagttgaggaggaaaggagtgtaccagacaagaggagcttcgagaccaatctggggtgcattgccggagggcagcgtctgctgccacgcggaggtgcaccccatcgacaacgtgctacccccagaggtggtggaggtgaaggtggacgacaaggcaaaccatacagcttgtgtggatgtcgatatggccggtgacgacgatcacgccatgctcaggctggagaagatcattaagctatttcacttacatatgggtcccacgtgggccatctaccgcgcggaggtgcaccccatcgacaacgtgctgcctccagaggtggtggaggtgaagatggacaacaaggcaaaccatatgacttgtatgtttgtcgacatggccgggaagttattcaaactcgatgtcaagatgagggacctaaagtgtcgcggctccgttgaaaactcccctgatgggatcgagctcgaggactccctccatctccacggcggcgaagagcccgtagcgaggcatgtggcatgtggcggcaccgccagcgcgcgctgcggtgtctcgatgactggcgtcatccgtcaccaaggcggtggccggcatgcatgcagctgcagggccatatacaccctccttcctgcgcacacggccacgacaacggcggcgattgctgcagtgcagcgagacatgcgcatgcacccgaatttcgacacagctatgtacgctccaaggacacaacaatcactcggggcatgcgcgcgctgccccaacaccacggcgccgtggacaagggatgaccgggccaggcactag

SEQ ID NO: 75913 - DNA, 184 bp, Oryza sativa
  Clone ID: PAT_MRT4530_75956C.1
atggggaatcggagcgggaatgaggaaaatggcgagagtctcggcggggaagacgaagagacgttttatttcacttcggccgctacagctgccggtggcacggtcgccagtgacgttgatgcggcggcgcaggagggtggcgagcacgtcattgcggacgtcagtttcgctagccacagtgccg

SEQ ID NO: 75914 - DNA, 1392 bp, Oryza sativa
  Clone ID: PAT_MRT4530_75957C.1
ctgcataaagtactgcatgctttcctcaatttcattgaggaaatttattaatatatccaactaatataaaacttagtatcagtctccaacaaatacaaaaaagtatatctaaaggtgaagctaaatggaattataagtataccaagctaaatggagctcgccgataaatgaaaatgcttatcaactctataaatagttagaattagccagaataagaccggaagaacctcatggatggtaggcaagtcacttcttccaggactacatcacgaggcttcataaattgacagaacagaatcatctcatcatccagtagcagaaaactggatgtcagcatctcgggaggcctttctgagcttcaataccctgcgcctgaactttgcctgctcaaggccatccatcgaaggcacaatagtcatcatctctaacattggtgtgttcttgagcagaagcttaacaagatccaatccactcttgctctcatcgatgtacaccatcctaactgccctgagatgcctcagcacgacccctttacctcccataacccaatggtttgctccatcatcgctaccccatctccgcttgcattgcgatggctcaatgcaccaaggtgaaagcataaggctctgtacattcccaaccaaagaaagaagctctctgagattaggctcctggagcttgacctgcggcttcttgatggcaagaacgacctcttctaatgaatcgacattgtctataatgtgtctggttgccattgcacccaagtagtggagggtgcgcaacgctggcatgtcagagaaggcaacagaagactgcggagtccaagaacaatccgtgatggcaagcgagcaaagctgcgttgtgccggctaggcagagtgcaccaatgcggcattgttcaaggatcaggtagcggagctgtttgcagtgcgagaagaggtctgcaaagaagtcgtcgccggcaagcggaatggaggcgaggtggaggcgggacaagcgggtgagcgagcagagggacggaagagggtgggcgtagtggtcgaggcgaagggtcaaggatgtgaggttggtgcaggcgattagggaaggcgggaggagggcgaggcgggagcgggggaggtgcagctccaactgctcgaccccgcgcgcggcggcggcggcgagccaggaggcgaggtggtcggcggcggaggcggcgaaggcctggtcgaagaggccgtcgaggccgaggcggaggcggcggagcgggtggtgcggcctcgagagcgcggccgtggcggcggccgcgaatgccgccctgcggcgcggtgcggccggtatcctccctgcgaagtctggcgtcagcgccggcgcggccgccttgaccctttccctccgtgtggtgaggcttaca

SEQ ID NO: 75915 - DNA, 445 bp, Oryza sativa
  Clone ID: PAT_MRT4530_75958C.1
gcacgaggccattttctaattcacgaggctccaaccgcgagaaaggcgagacagaatgaatcctcgccggcgacgaggcgccgacacctccctccggcgactgggtctccgacctcgtcgccggtggccggacggggcagcctcgccgcacggggagccccatcgcctccgactccgtctcggagtcggattcccgccctccttatgggaaaaagaaaatatctcaccccgattcgatcgcgacgaaccctcgcactccgactccgattccaattccaactccaatgtcggtggattttatccctcgacgattaaaagggcgccacatcctccacccgagatcaccaaatctctcaattcccaaaatcaattcgcgcaccaaacctcccaaatccctctcccagcagttcttggattcgccgaggagctcttgtccttccatcca

SEQ ID NO: 75916 - DNA, 267 bp, Oryza sativa
  Clone ID: PAT_MRT4530_75959C.1
atgaagaaacccgacgacctctcatcgatccacttcatcaacaccaaggtcatcatcttcgtcgagactggacgcctccaccttcatgttggtgcccaggagctcgtccccctcggcctagccgcctctctttccttctgctcgcacatggcaacccccaacctcatagtcatagttggcttcgtccttggctataacccccatgccctcgacaacctccacactctcacatgctccagattcgagatgtactgcaacctgagatag

SEQ ID NO: 75917 - DNA, 161 bp, Oryza sativa
  Clone ID: PAT_MRT4530_7595C.1
gcacgaggctcctcttcacaagcaagcgcgagaggagacactcacgatccatgccgccaccgcgagcgccgttgcggcgcctctgtcctgtggcctggggtggctcgggaggccgctggctcgcgtctcgtcgccggcggcgccgatgaaagccgcctccc

SEQ ID NO: 75918 - DNA, 1236 bp, Oryza sativa
  unsure (1)..(1236): unsure at all n locations
  Clone ID: PAT_MRT4530_75960C.1
atggctaagggaaaaaattctccaccaaatctccatggcccaaattacattcgaaatgcaagcgatgtatttccctgcggaagaaaaacactaggaatgatgctgctctcagtgctacttgtgcttgttctctcagcatattctcctgagcagattttcctttaccctccaatgccagcacacaactctcatcagacggccatcaacagtcctcatgacaatgcaaaagcctgcaatctgttcaatggaacatgggttagggattttggaggcccgatttacactaacacaacatgcccaacgataccagaggcaaggaactgtgtttgccaaagggtnaaactgtgcaaagtacggaaagcaaatggattatgtaaactggatgtggaaaccgcatggttgtgccatggaaaaattcgaaccccatctattcttgactattgtcagagggaagacattggcttttgctggggattcgattgcacggaaccagatggaatcattgctctgtttactgtctcaggtctcataactttactcatggttctttggaccaaattcatagtagaagattctcaaagacaaatcaatggtacagtagttgaagagcatgacatacacttggataaacttgatccaagattagctacaaacttacaccagatcaatattttagtcatatccacctcgcgttggttcttcagaagaaactatctttacgaaggtgaggagctcattggatgcatatactgctcagaggataacatcacaagcttcagtgtccctatggctattcagagggtatttcgaacagcgctaaaaaatttgaaagagagccaggagtgcagattgcaattgacagtggtaagaacagcaacatcagcacattttgaaaatggtttgtggaatactggaggatcttgcaatagaactgaaccactgagagaggaagcaatgattgatcaaactgaatgggcaataagaaatgcacaggttgaagaggctgatagaacaaaaaagaacaacggcaagggaggggtgaaaatagagattatagatataaccaaagctatgtcaatgaggcctgatgcacacccaggtatccattggaataaccagtggatgaggggttacagtgattgttcgcattggtgtctgccaggaccaattgatatgtggaatgagctactgcttgctgtgcttaacaaatataagaacagcttggaagatcaatga

SEQ ID NO: 75919 - DNA, 188 bp, Oryza sativa
  Clone ID: PAT_MRT4530_75961C.1
tttgcggcatcactctggtccacgagatgcactcttatgatgctcggaaagcccttcaaaagaatggtgtccagctaagcagtggcgtcattattggggtgaagcctattgatccaatgcataggcagcagctcgatgagagtcctcttggaggacgtggtggtgagcaagatgtcagcgtgccaaag

SEQ ID NO: 75920 - DNA, 1041 bp, Oryza sativa
  Clone ID: PAT_MRT4530_75962C.1
cccacgcgttcgctctctcgcgctcggctctccaatgccgccaccaatggcgctctccatctcctccaccgccgcggcgaccgctctcctcccgactctcccgccctcgcgctcgcgcctgcgcgtcgcgccgcgcagggcggcggctcgggtggcgcgcgtggtgtcggccggatacgccgcggggttctacggcggggcggcggctgcggccggtggcgagaacgacgaggtgggggatgaggagggttcgtcctcggggttcggtgctgggctagggataggaggcggtgggcttgggatgtcggccgcggaggcggcgctggcgctggaggagcgggagatgccgccgtgcccgcccgggcttcgccagtacgagaccatggtcgtgctccgccccgacatgtccgaggaggagcgcctcgccctcatacagcgttacgaggagctccttgttgcgggtggcgccatgtatgtggaagtcttcaaccgaggagtcatcccactggcatacagcatcaggaagaggaacagcaggactggtttgccatccacctactacgacggaatctacctccttgtgacatacttcaccaagcctgaatccctggatgctctgcaaatgaggctcaatgctgacgacgatgtcatccgctcaaccagtttcaaggtccgcaagcggaaagccttttaagatcagtttcaccacctggactcaggtttccatgttttggggaatatgtttatatcatacaagaatcctactgccatgggaggagattggtttttcgctgcaatcgttgagaaaaaatgtcgccctttctgttgataatttagaagaaatttgtcttccttttttttcgttatagcactgctctgatcttacctggtactcctacacgttaagggatattgaacgaacacttttgtggagcatggcctgctggggcctctggaacaagttatgctgttaacaaaatcagggctcatttcctgtacgccatggcctttcatttataggctgccctcccgggcctttcc

SEQ ID NO: 75921 - DNA, 291 bp, Oryza sativa
  Clone ID: PAT_MRT4530_75963C.1
atggcaacgaagctgacggaggcggagacggcgacgacgatgctcttcccggccacggcgggcgcgagtgcgggcgtgagctcgctgcacggggccatcccggcgcttgtgtcggcggggctcggcgccgcggccgacgagtcagcgggcgacgaggccagggacatcggcggggccggcggcgaggccatcgtcatcggcggcggtgggggccttggcgagcaggcactggcgcatgtcccctccgcgcgcataccgccgccgccgccgccccctacatccacaagctga

SEQ ID NO: 75922 - DNA, 404 bp, Oryza sativa
  Clone ID: PAT_MRT4530_75964C.1
gccgccccttatttttttttttatgcacccaccccataataaagtaaacaaaggccccggagttcacatccacagggcgcacagccactacagcaagcccagataaggtcgaagcccaggaaccagccccagacacacagagcacggacacggaggcaacccaatccccccaaaaggaggcgaaaaaaaccccggggaaaaacacaggcaaaaagcccccccccggggaaaaagggtacccccaacaaaaaccccaaaacaacccaccccgaaaaaaaaagggacaaaccggggggcccaaaaggccggacaaaccccaaaaagcgggggggccccacccccccctacaaaaacggaaaacccgccgcccccgcccaaaaaaaaaaggcccccccccggggagg

SEQ ID NO: 75923 - DNA, 500 bp, Oryza sativa
  unsure (1)..(500): unsure at all n locations
  Clone ID: PAT_MRT4530_75965C.1
ccccttcttatctctctcttctccaagaaaccagagctgcttgcaagtccaagctcctaggtgatgcaagctccaaggggagagggaggtctggtcggcatgcgacggtagcgtggtcgacactggagtgggaggtctggccagcgtgcgatggcagcgtggtcgccgatgtcgcctaggcagcagcaagctcctaggtgatgcatgcagcgaccctacgcgtcaagctgaccaaccaggcgatggcaccacttcttntctcgcgttcaatgtgtcgccgtggaggccggcaccgtcatggacgtcgacgcctcaccaccgggagcatgtaggggagaagtacaagaacgggtgtgttgagatttttttcaatgtttcagatagtttagtttgatgtttctttgggttggatcgaatgttgcaattggattttagatggtgttccataactttgctccttgatgcaaaccaccaatggaaaaaaaaaaaaaaaaaaaaaa

SEQ ID NO: 75924 - DNA, 201 bp, Oryza sativa
  Clone ID: PAT_MRT4530_75966C.1
aaaaaaaaaacaaaaggtagaaagacagaccgatagaacgcgtgccaaaaggtgctaaaaacgacaggtgaggaggacgggagaggttatagttcgatgttccaacaaccgtgcgcgctcagactagtgctgccgcgttgccagatttttcttgacatagagccgagagtggcgctgctccatcatccgccttttggcgag

SEQ ID NO: 75925 - DNA, 739 bp, Oryza sativa
  Clone ID: PAT_MRT4530_75967C.1
caaacatataaaaaataagttttcactatggctttagctagaaaatacaaactctgttattaatcagaacaaacatataacataagattgcgtaaaatacttcttgaagctacattgcagaaacatatataacatctgcatctgaagcatatggattggtccttcatttataccatattagtcgacattgatcaactagcattattatatgtagctactagcatatctcgatcacattaattaggagatctttgagtagatctcttcaatcacgatgcgaactgcaatggggatccgaacccaatggttaccaccatcgtgccaagccaagcttccaaacctatagtctccctgaattggcctcctcgtcactttaaaggtcaccttgaagctctgcacctttctatccttagagaacaccaacattggcggctcaacagccatctcgatgccgacggggggttggaggaatgccttgtacacggcattggcctggccaacgttagtgacggtgcgtgtcgcgacttggattgtcttgaggttggggatggagatggacgggaggtttaggtcagcaagtgatcctttcactgtggtgcagttgtcccctgagcctagtcctcccatgcaattgaagaacttgagataatcggatgcagagatgtcgtatatgagccctggatcagctgccatattcggattaataaaccctgctccataatcaaaaggatccggaatc

SEQ ID NO: 75926 - DNA, 291 bp, Oryza sativa
  Clone ID: PAT_MRT4530_75968C.1
atgaacactcctgagtccccctcccgccgggccatcgccttccctcccgccatcgcccaccgctgccatccccgcctcccctcctgccaggtcatcgctcccagccagatctggcagaggggaggcgccgccgctacctctgctgtcgggccgccgtcttccctccaaccatcgcccgccaccgccatccccgcctcccctcttgccagaaccgacacctataataaggtgtcggtttttcctgttttgggccatggaggtggggaaatgtattataggtgccggttttag

SEQ ID NO: 75927 - DNA, 2618 bp, Oryza sativa
  Clone ID: PAT_MRT4530_75969C.1
agcgaacccagcggaattcgttgggcagcgggtgcgggagcagtagaggaggagaggtagatggattgagcaatcaagccctgctccggccgccgccgccgccgccgccgctgccgccgggcgatccccttaccctcgctctgtgcacccgcaccccgcacttaccccctccatggcgtgatccgatgatagcaacgagagcggtgcttcccctctccctgacggcgtcggcctccggcctgtacggcgcgcgcaccaagaagaggaggaagctgctgctgctgccgcggctgccatgtcgcccaatctggagagccacatcaagagccaggtgccggcgctgctgctgaggcgcttcttcggcggggcggggcggcggcgggtgttcgtgcagacggagactgggtgcgtgctgggcatggacctcgaccgcagcgacaacgcgcacacggtgaagcgccggctgcagctcgcgctcaacgtgcccaccggcgagacctcgctcaccttcggcgaccgcgtcctggagaatgacctctccttcatccgcccggactcgccgctgctgctcacccgcaacagcatcaaccggagctgctccacgccctgcctctgcccggtgtccaaggacttcgagcacaaggatcgcagcggcctggtcgagatgctcggctgctcgatcagctgcgcccgcgtgaagcgcctcgtcgacgacgtggtcaccgccatcaggagcggcgtggatccggtccccattggcagtgggcttggtggctcctactacttcaggaacatctccggcgacagggttgccatcgtgaagccgacggatgaggagccttttgcacccaacaacccgaaggggttcgtcgggagagcgcttgggcagccgggactgaagaaatctgtcagggtgggagagacagggttcagggaggtggcggcgtacctgttggatcatgataacttcgcaaatgttcctccgacggcgttggtgaagatcacacactcaattttccatatcaattgtccggtgaacggcggcagtccagctcatgatcagaagcagcaggtttccagcaagatcgcttcgtttcagcagttcatcgcgcatgacttcgatgccagtgatcatggcacgtcgagcttcccggttgctgctgttcataggatcggcatactggatatcagaattttcaacactgacaggcatgctggtaatgtgctggtgaggaagcttgatggtggcaccggtcgctttggttgtcagacggaattgtttccaattgatcatggcctgtgcttgccagagaatttggaggacccttatttcgagtggatccactgggctcagtcatcaatcccattctctgaagaggagctcgagtacattaagaatcttgatccaatgagggatgtggcaatgctgcgtagggagcttcctataatccgcgaggcctgccttcgtgtcctggtgctgtgcacaatcttccttaaggaggctgctgcttctggtctttgcttggcagagataggtgagatgatgaccagggagttcagagggttggaggaggaaccgagcaagctggaggttgtctgcatggaagctaggagaaaattagctgagtgggaaccatactcacctgtcatcgaacaaggggaggacatggatttccaattctcactggacatgttaggagagtacaatgatgtgattaggtcaccaagattcaatggcttaggagcaaaggggaatggtttcagaaaccctctttcaaagcttgtggagagcatcgatgaggacaatgatgatgatgatggccgaagtgaatcttccaagcgttcatcggagcgtgtccattctggagggttgaagttccccagtgctgataaatccagcggttctaacggcagtgtgcatgctctgaacaggagtgcagacgaacagcttccatcaagtgtatacttcgtcaggctgtcggacatgaatgcagaagagtggaatatattccttgagaagttccaggagctgctgaaagaagctctgcaggagcgtgcggcggctgcagggcagcggatgaagcagcggctgggcacttcctgcaagttttgagtaggaccatagagcagcagagaagaaaaataatgtaatgcttgctacttgtgttgcttattatggagtgagtacaggaagggatatatgctcatgtgagaaatgcctacagctttgtgcaatgttgccatgtaaacttgttatgttcaggtagacaagatcaggatggtgatgggtgtggagaagggctattatgcatgttgattaactatgttaaacaggtgcttcttaataaatgcttgtcagcttgtgtatattgtgttaaataccaaatatgtcaatggtgtttttcatagctgttggtgaacattctttgtgctgtgagatgtaaatatgctctcttttgatgtaaatgcttgcctagtgttcttttatgcaagtgctttacctccctgttcaacaaagaaaattctgtggtatgagctgtaaacctgcacttccgtagtgaatgcaaatgctttttacctgctgttgaaaaaaaaaacaaaaaaaaaaaaaaaaaaaa

SEQ ID NO: 75928 - DNA, 168 bp, Oryza sativa
  Clone ID: PAT_MRT4530_7596C.1
atggcggacggcgaggaggaggaggaggcgcacgattggaggcgatcgcgggcggcctcgccaagcgcccgcggcagccggagctgcggtatgggggtctgtgatgtccgtggggtgttcgtcgaaatgcgccgtaggaacttcgcgtcctcgtcgcgcctcctttag

SEQ ID NO: 75929 - DNA, 1129 bp, Oryza sativa
  Clone ID: PAT_MRT4530_75970C.1
tccgaattccgggctaaagccaagttgcatggagggaggccagattggcgcgataggcgcgtccggtggaggaggccggcttagcacgagaggcgcggctgacagtggagaaggctacctaggcaagaagacaacgacggagaagcggcacatgtacatctctgacgagtggctgagggccaacccgtcggtgacggcgtacatgtccacctcgctcaacgtacggcagcaggttgctgaggagggcatacctcggctcggcgcagaggcggcgtgcaacgccatcggtaactgggggaagccggcgtcgagcatcacgcacgtcgtgttcgccaccaccagcaccggttgcctgcccagcgctgacgtcacgctcatcaagctcctcggcctcccgctgtcgaccaagcgcgtcatgctctaccagtccggctgcttcggcggcaccacggcgctgcgcgtggccaaggacatcgccgagagcaaccgggacgccagggtgctcgtggtgacatccgaggtgatgtcgctgatcatccgtgggccctctgagtcccacgttggcaacctcgttgcccaggcagtgttcggcgacgccgctggcgccgccgtggtgggttgctgccgccacccgtcgtccaccggcgagcgccccgtgttccagctggtccgggcgtcgcaggacgtgatacccggcacggacgacgctgtggtggtgaaggtgcagcaggaaggggtggtgatcaccctgcaccgcgacctgccgctccacgtctccaacgccatcggcggcgtggtcgagagcgcgttccgcggggtaggcacgacggtcaccagctacgacgaggcgttctggttgttgcacgccggcggaagggcggtagtggacggcgtggaggagaggctgggcctcggagaggggaagctggcggtgacgagggaggtgatgaggcagtacggcaacacgcgtagcaccaccatcttcttggcgatggaggagatgcgaaggaggtcggaggagcgagggatggcgacggcgggggaaggccttgagtgggggatgctcatggccttcggccctggactcaccgtggaaaccatgctgctccgcgcgatgccacgcaattaa

SEQ ID NO: 75930 - DNA, 340 bp, Oryza sativa
  Clone ID: PAT_MRT4530_75971C.1
cggtccttttttccgggtcgccccgcgtccgccccgcgtccgaaaaaaaaaaaaaaaaaaaaaaaaagacaaacaaaaaaaaaagaaaaaaaaaaacgtacgcatgcatgcaaacaaaaaaaaatataaagggctgtcgctatctaggcttcagtgttccgtccttttgcatcctcccttctggctcttctctggcgccacctaacttctggggggtggcggtcattccccttctctgggcttgcgtaatcgctgccttgcccgatcttattgcccttgccccctttgcccttcctgcctggttcttgatacgcgccgtgcctctgccctttgccctcgc

SEQ ID NO: 75931 - DNA, 720 bp, Oryza sativa
  Clone ID: PAT_MRT4530_75972C.1
atgccgtcttttgatcgagcgcgcggtgcatgggcgcggcgccggggagcgcgtcttttctacggagtagctagaagccgccgtgtggcggtaccacggcggctagcccgtcacgtcacgggggtgcgcctcggaacttgcgtccatgcagggaggatttatccgcgctggccgctgtaccgtggtctaggcatctataatgtaatcggcgaacggagggtgatgaggaggaccgtcgcggccgccggagcttcgtcgctcgagatcccgccgctccctccaccgatggctaaggcgagctgggccgacggctgccgcgacgcgcggtggcctcatcacggatccatcgtcgtggcgcgcgccgatgcgctcatagagccgcgcccctcttatgggggacggcaaagcgacggaacggagacggccgtgagcagggacacgttcgggggatcatcgaactggtttagacacgaatcgacagcaaagttcacaaaaagcgacgatgccacaggcttcttcaaacttgtccgcaacaagctctgcagatggatgataatcataatccgttacaagtggcgcaatattggagttcttgcaacttgccattatccactaatcatcggcgacctgacgcttctgacgtaccaggtggaaaacaaaaggccggtggaaacgaaaattacccttataaatcgaaatgtgacgttaccaaaatttaat

SEQ ID NO: 75932 - DNA, 297 bp, Oryza sativa
  Clone ID: PAT_MRT4530_75973C.1
atgatcttcccacaggataaaattaatacgatacccttggaatactctcgggtgaaatgttacaatggtatatccgtgcgcttgcggatgaactctgtaaccataatataccagaagtatttctgtggcattgctgagaattatatttctgtaatgtcgttaagaaataccaacaattgtaaaatagcaacgctctgtatacaataaaaaaatgtagttaaaattaaaccatccagcacggtgaaaaaaaaaaaacagaattgctaaacttcagtcgacagaaaaaccacctccaag

SEQ ID NO: 75933 - DNA, 237 bp, Oryza sativa
  Clone ID: PAT_MRT4530_75974C.1
ttactttggtatgctgacctcgggaacttttgtcctcttgtagagatattgatgacgaggatgtccagcagcgcgggcagcccgagtcactggcagtaattccggtactcgagtttgaaccacacgtctcgcctgaccatgtggatcaaccccttgatatagagggaaggatggcgacgacttcctcaggttagtagtcccttcaccccttaatgcccatctgactaggtcagccat

SEQ ID NO: 75934 - DNA, 1023 bp, Oryza sativa
  Clone ID: PAT_MRT4530_75975C.1
atggcgaagctgcgcgagcgccggcagctgcggctgtccgtgccggcgtcgccgccgccattcccgcacctggaccaccccttcgccgccctgccgtccacgccgccgggctcgcccgtcctggcggagctcgagatgctgtccgtcgtcgggcgcggcgcgggcggcacggtctacagggcgcggcaccggcgcacgggcgccgcgctcgcggtcaaggagatgcgcgacgacggcgcggcgctccgcgaggccggcgcgcacctccgcgtggccgccgcggcgcccgaccacccgtcggtcgtccgcctccacggcgtctgcgtcggccaccccgtcgccgggaaccggttcgtgtacctcgtcctcgagtacctcccggagggctccctgagcgacgtgctcgtgcggggcgccctcccggagcccgccatcgccggcgtcacgcggtgcgtgctccgtggcctgagccacctgcaccgcctcggcgtcgcgcacggcgacgtgaagccgtccaacctcctcgtcggccaccgcggcgagatcaagatcgccgacttcggcgccagccgcgtcgtcacgggccgcgacgaagcccaccaccagtcacccggcacgtgggcgtacatgagccccgagaagctccacccggaagggttcggcggcggtggcggcgccgacttctccggcgacgtgtggtccctgggagtcgtgctgctcgaatgccacgccggcaggttcccgctcgtggccgccggggagaggccggactggccggcgctcgtcctggccgtgtgcttcgccgccgcgccggaggtgcccgtcgcggcgtcgccggagttcggcggcttcgtgcggcggtgcctggagaaggactggaggaggagggccaccgtggaggagcttcttggacaccccttcgtcgcgggaaagccgtctcgttgcgagcgccaaaacgagtggcgcaccaccttccaggacaaaactggccaagtgaacacgagcatctacggagaagaatag

SEQ ID NO: 75935 - DNA, 211 bp, Oryza sativa
  Clone ID: PAT_MRT4530_75976C.1
gacaaaattcatccaaatcttggaattatattatagatttatatatagttggttatacatattggggatctgaacacttgcttcctttcgatgcctcaatggcttaaaaggagaagagtggaacaagaagaagaagaggaggaggattgggagttgatggaggagaaaatttgcaataaagaacctggcttcggatttgttgccggccgaa

SEQ ID NO: 75936 - DNA, 1121 bp, Oryza sativa
  Clone ID: PAT_MRT4530_75977C.1
taggcggccccctgaagtttgatacctggggggggaaaacgggagaatggtttgcgccttcaataagaaacccacacaacagcccgacacaaaaagaaacccgaggcaaggggcaccttataaccggattcccgggtaacgagctaacaaacggactgtccaggccttttgcgcgcggggagaagagaaaagcgggattaataacggcaagtgggggcacggcctccgacacccccacgagggaagaccggagctcttcgagcggtcgggcccctccggtggtccaggtttttgctttccggactccggcaaattccgcggcctcggggttgtctccttcgagtcaaacaaggtggcaatgaagtctcttgagcttgacggattccaaattggcaacaggtttatgaaagttgaaagatgcaggttggctgctggctcgaagaggaaaaggactgtggagttccaaactgatcctaagaaggctgatgggtgtctgtcagcatatgttggcaatctcaaatgggatgttacagaaacagacttaagggacttcttcaagtcactgaagatttcatcgataaggtttgctatcaacaagagaacaggtgattctcgtggtttttgtcatgttgattttgaggacgacgagtcgcttgagaaggctgtaggaatgaatcaatctgaactgcgcggccgacctatcaagatatcatatgctgtcagtaacaggggctgaaggctactagatagtaaactttgagcatgagcgagcctcagtgttatgcttttgctccctcagttttgttacggttatatatccgtattaagtttctactgaaagtgttgtttcttgcatcaatctctatgtagaatgtaattcaccgtgtgacaaatacttggtgctacttaatatcgaccttataaacacttctcagaaatctctgtcaaatataactatctggtcgtggctggggcgcccgctctcgctccctcgtcccattgagtttgatgtcgagggcctaaagttagtaattgttgagctcagaactaaacctaatcttttagagtattatatcccatctgaatagacgttctttaactagaaaaaaaaaaaaaaaaaa

SEQ ID NO: 75937 - DNA, 360 bp, Oryza sativa
  unsure (1)..(360): unsure at all n locations
  Clone ID: PAT_MRT4530_75978C.1
tcgcccacgcgttcgcccacgcgtccggcttgcattcatttgtgctttgacgccactctgctggtatttagttaaaaaaaaagacatgtatactgtcttccttttcccctacctgttatggtttgtgcctgaaatggagcaatcgatctggtctcnaaaaaaaaaaaaaaaaaaaaaaaaaaaaaaaaaaaaaaaaaaaaaaaaaaaaaaaaaaaaaaaaaaaaaaaaaaaaaaaaaaaaaaaaaaaaaaanataaaaataaaaaaaaaaaannnnngggggggggggttttaaagaatcaaatttttggtccccgtttgtgcaagtttatattttttttaaagtggccctaaataaaaa

SEQ ID NO: 75938 - DNA, 255 bp, Oryza sativa
  Clone ID: PAT_MRT4530_75979C.1
atgccgagggagcgacccaagcacagggtggctgtcacccaatcggactgtgccgtgtttgggccaggccaaattgcgaactgggcggggagggaggctggcgagtggcgaaggaggcctcccacggtctcggctaccaaccacaaatccgcaccaaccatgcctctcctcgcccgcctccgactcctgcttctccatcaccgcggccgcctgctgctccacctcctccagggcccgccgccaccgcccgtgtga

SEQ ID NO: 75939 - DNA, 192 bp, Oryza sativa
  Clone ID: PAT_MRT4530_7597C.1
atgtgccactcatcgaggaatcgctcctcctcactgaggggatgctctggtgagccccaagcctcccgaagccactccacttcaattcgcgatgctgaagtcgacccaaagagcgcctgtgacctccactggtgctccacctcgttatttgctagcatgtttgccatcgttgaggacagccgcaccgcctag

SEQ ID NO: 75940 - DNA, 379 bp, Oryza sativa
  unsure (1)..(379): unsure at all n locations
  Clone ID: PAT_MRT4530_75980C.1
ctatccaatggattaaacactactgaaattctgacagagcctatgtgaaaatcaaagaacatatgctgtctcagctgtgaaggtatgatgcaacatatatgaggggattgtgtaccggggtgctcctaacttatccatttcagtgatgtctagctttagatgaatgaatttaagtttgttctacactgtgaccattctttgcatgttgtattatttggtgataaaatcgaaacttcgtacactgtacaaaaatcttcctaaatttactggagtaggaaggtaacaagctctgttttagtgtttactggtgatgaagacctggagaagcctcatgcgttctgataaatgcagtttgattgactgctgtgttcgntttgct

SEQ ID NO: 75941 - DNA, 1137 bp, Oryza sativa
  Clone ID: PAT_MRT4530_75981C.1
atggagcctgcaggctgcagcacagacgaggtgaccggagaccgtagcacgcttctccacatcgctgcgtggaaagggcacagcgacctgattgctcagctatgccgctggggaaacggcagcctcatcacctcggtgaactcatcggggtacacgccgctgcactgcgcggcgggcgcagggcatgccggcgcggtcgaggccatcatccgggcgctggctgcaggagccaacgtggaggagggcaggctgcaggagatcctgcgcggcaggaacgaggccggggacacgccgctgcacctcgccgcgaggcacggccatggcgaggcggcggaggcgctggtgcgggtggatcctgggctggcggccgagctgaacggcgcgggggtgtcgtcgctgtacctggcagtgatgagcgggtcagtgcgcgccgtcagagcaattctctggtgtcggaatgcatcagctgtcggccccaagtcgcagaatgcgctgcatgctgctgttctccaaagttcaggtgattactttgttgacaacttggcattttatatctgcacgggccagcgacaggaggagcacaccggcctaccggagaggaggggaagagagtatccccagccgcttgaggagcctcctgcgctcggcctcctcccaagccctacccttccgcttgtcgtcatcgtgggggaccacagccaacgatgccatggggcggccatccccatcgatctgctctctccgcacaggaacacggctacatccctatttgttcacatcgccaatcttggccagtgtcagcggcttgggatgaagaggatgccgttgcccacggcctcctcggtggccaccatgccccgcgcctcgaacgagtgccgctgccacttgagtacatctgaggtgggggccatcggatttgatgaagcgacggcgacggtggcctcctcaaccatcggcacggtctcgtcgacagcgatgggagagagaagggagatcacggttgccgtcgttagctctggcctcgagccgccactctgccgtcgggccaaccccgccgccggtgtggccagcgctgccatctctctcactgctgcttgcctgccatcgccattggtgcatccagcagtggaggagtag

SEQ ID NO: 75942 - DNA, 1038 bp, Oryza sativa
  Clone ID: PAT_MRT4530_75982C.1
atgccgccggcgatggtgctggtgccgccgcccttcacatttcccgccgccgccgcccgcaccagatatttggatgatccaaatacctttatggaccttcatttgtcaacaccaaaacccatggtgcagctgaggtcgtgtgcttactatcctaagtatcgaattggtgcatttggaacattccctttacttaaggcaaacagggactgttcagaaggagattatggtattatgggtttaagatatggttcagagaatctgtctattggggcatcctttctgccgtttgctttatctggtcaagtaccctacggtgcatggttagttggcaggaaagggaatataagcgcagggatacaatacaagccactctgtgaaagcatgcatcctgtgcctttgacagacttgaagaactggaattgtgcaattagttatggtatgggctcaactagcccactcagcccttcattcaatttttctctagagcttgtcagaaatacacagctagttgcatcgttctatcagcacttcgttgttcagagaagggtaatgaatccccgtgaagaagaacacattatcggaaccacgaactttgttgactttgggcttgagttagccacaagcttggataaagacaaggcgaaagaaaatgctagcaatccctcattccaggtagctgcaagttggcaggctagtaagaactttctagtaaagggaaagttaggtccctccaaatcttccatggctttggcaatgaaatcttggtggagaccattctttacatttagcttcacagctatgtatgatcatttgaaggggacaggatcatatggatttgggatttccattgaggatcttaaagagcccagttatcaaatggcttattcgaactatgtgattgtcacacaaaacaaagaggatgtggaaccccggtttttaaagaagctagggaagaagtacatatttcagccggacattgattcaggcaattatgacaatttgcctacagggttgaagccaatagacaagatattgtaa

SEQ ID NO: 75943 - DNA, 253 bp, Oryza sativa
  Clone ID: PAT_MRT4530_75983C.1
tttttgagcgccttcgtcatcctggcgcgagcgctctagcgaggagagcgcgagatctcgccagggccatctgcgatggcactgtgcatccggtggcgcacggcgctcctggcgcgcacactctagctggcgctgggggcgccctcacacaccgcgcacacggctcgtaccgccttgcggcgcccgccgcgccggactgctgatgggtactaagggccgcgctcgccgagatccacacgcgcctgggcaagat

SEQ ID NO: 75944 - DNA, 1350 bp, Oryza sativa
  unsure (1)..(1350): unsure at all n locations
  Clone ID: PAT_MRT4530_75984C.1
atgaagatcaccgtgcactcatccaatgccgtcaagccggcatacggccccggcgagttccccaccaccaccggcgacgtcgtcccgctcaaagtgttcgacaaggcgaactttgacacgtacatctcggtgatatacgcctaccgcccaccggctccggccaacgccgccctcgaggcggggctcgccaaggcgctgatcgagtaccgcgagtgggcagggcgcctcgggcgtggacggcgacggcaaccgcgccatcctgctcaacgacgggggcgcgcggttcgtcgaggcgacggccgacgtgacgctggacagcgtgatgccgctgaagccgacggcggaggtgctgagcctgcacccgagcggggcagactgaccgcgggtgggagcagtgatggcgtcagtcccagggtcaacagcaggtttcagcgtggcaggctcacctcagtgcgtggggcttgcaccaacagcaagcacaatcatggacaagacagnccgcgcacaaccaaacaacttcttgcctgcgcgtgggagccaggccaccacgcggcaccgcattccagcctgtgcaccgtgcacgaccgcgtctcattcttcgcgccgcgggacactcccaagccgtacgacgccgccgcggatgtccatgcgtccggcggcggcggcgacgacgacgaggtggtgataaacaaggtgcacttgagccgggaattcatctcgaagctcaagtcgcaggcgtcggctggcgcgcaccggccgtacagcacgctgcagtgcgtggtggcgcacctgtggcgatgcatgacgaaggcacgcgggctcgacgggcgcgagtccaccagcgtgtgcatcgccgtcgacgggcgcgcgcggatgagcccgccggtgccggacggctacacgggcaatgtcgtgctctgggcgcggccaaccgcgacggccggtgagctggtgaccaggccgctgaagcacgccgtggagctcatcaaccgggaggtgatccggatcaacgacggctacttcaagtcgttcatcgacttcgccaactccggtgcggtggaggaggagcggctggtggcgtcggccgacgcggcggagatggtgctgagcccgaacatcgaggtggacagctggctgcggatcccgttctacgacctcgacttcggcggcgggcggccattcttcttcatgcccagctacctgccggtggaaggtttgctcatcctgctgccgtctttcttcggcgacgggagcgttgacgcgtacgtgccactcttcagccgcgacatggacgtcttcaagaactgctgctactcattcgacaaagaccaaactactagccttgcatga

SEQ ID NO: 75945 - DNA, 165 bp, Oryza sativa
  Clone ID: PAT_MRT4530_75985C.1
ttttccggtttttcccggaaacggaattagagttttaacagtactaggctctgcctatacgacaaacaccttttgcacgggcctgaagtagaaataggacgccacgtttaggtcggacatgccggtgccagacccgaatatgcaaacgcttgaagaacctttagt

SEQ ID NO: 75946 - DNA, 1341 bp, Oryza sativa
  Clone ID: PAT_MRT4530_75986C.1
atgaagatcaccgtgcactcatccaaggccgtcaagccggcatacggccccggcgagttccccaccaccaccggcgacgtcgtcccgctcaaagtgttcgacaaggcgaactttgacacgtacatctcggtgatatacgcctaccgcccaccggctccggccaacgccgccctcgaggcggggctcgccaaggcgctgatcgagtaccgcgagtgggcagggcgcctcggcgtggacggcgacggcaaccgcgccatcctgctcaacgacgggggcgcgcggttcgtcgaggcgacggccgacgtgacgctggacagcgtgatgccgctgaagccgacggcggaggtgctgagcctgcacccgagcggcgacgacgcggtggagctgatgctcatccaggtcacgcggttcgcgtgcggctccctcgtcgtgggcttcaccacgcagcacatcgtggcagacggccgcgccaccaacaacttcttcctcgcgtggagccaggccacccgcggcgccgccttccaccctgtccccgtgcacgaccgcgtctccttcttcgcgccgcgcgacactcccaaggtcgagttcgagcaccgtggcgtggagttcaagccgtacgacgacgacgaggatgtccatgcgtccggcggcggcggcgacgacgacgaggtggtgataaacaaggtgcacttgagccgggaattcatctcgaagctcaagtcgcaggcgtcggctggcgcgcaccggccgtacagcacgctgcagtgcgtggtggcgcacctgtggcgatgcatgacgaaggcacgcgggctcgacgggcgcgagtccaccagcgtgtgcatcgccgtcgacgggcgcgcgcggatgagcccgccggtgccggacggctacacgggcaatgtcgtgctctgggcgcggccaaccgcgacggccggtgagctggtgaccaggccgctgaagcacgccgtggagctcatcaaccgggaggtgatccggatcaacgacggctacttcaagtcgttcatcgacttcgccaactccggtgcggtggaggaggagcggctggtggcgtcggccgacgcggcggagatggtgctgagcccgaacatcgaggtggacagctggctgcggatcccgttctacgacctcgacttcggcggcgggcggccattcttcttcatgcccagctacctgccggtggaaggtttgctcatcctgctgccgtctttcttcggcgacgggagcgttgacgcgtacgtgccactcttcagccgcgacatggacgtcttcaagaactgctgctactcattcgacaaagaccaaactactagccttgcatga

SEQ ID NO: 75947 - DNA, 430 bp, Oryza sativa
  Clone ID: PAT_MRT4530_75987C.1
attttagtattttaataaattcaatattaaaaaccctaacctttcctattaatgtgtatctatccgtaatattttagaatattgtggaattagagaaatttgcacactttctcatttgattcgcgaggagctggatgagaagaaactctcatgtccagttttgcagtagagatggaactaagagagaaccatcgactataaccccaaaagaaccagatttcgtaaacaacatagaggaagaaaagggaagagaacaaaatgacatgcgagtaagagtacctagctactagtggctctatcataaaaaacaaaatattacgaatttttgtcaactggagcggtcgacagatttttgtaatttttcattatttctttgatgtcgatactaatttcctcggtgctggttcttttctttttccctttctttttt

SEQ ID NO: 75948 - DNA, 117 bp, Oryza sativa
  Clone ID: PAT_MRT4530_75988C.1
atgtcaatatttaggctgttccgagagcccaagtcagaaggcatgaagaaaatggtgactgtgatcgcagtgaggtggaaccagatcggctcacctgggctatggcccagagcctag

SEQ ID NO: 75949 - DNA, 958 bp, Oryza sativa
  Clone ID: PAT_MRT4530_75989C.1
ctccactccctctcgccgccgccgccgccgccgccgatctgccgcgcaatccggagtcgccacccaccgtacctccccgcgcggcagcatccttcctcgcgccgcgcgcgcggccggcgagaaggtttcgaggcggggacggaacgacgcggcggccgtggagctcggttccacctgcatccatctcggtggggttggtgaagtgggggggcgaggcggccggggatggataagctggtgcagttcgggaggaaggcgtggttcgtggtgcgggtgctgtccgggtacgaggagaggaggatccgtgctcacaggctgcagatgcagcagcggatcgcgagggcccaagctaagaaggaagagcttcggaagcagccagaacaaattattctatcagaagttcgtcaaatggttcagcagatgcaagccctcaatcagcagcttgaagaagctgaaaccgccatagatgaatatttcaaaccaatcgataagaatgctaagatcataatggacatgcaactggagaaagaagagaagcaaataaaggagatgacgaaagtaatgcaagatcaaatagcaatgcaaagagaaatcgcaagtaagagagctcaggccaccgccatagagtctaaagacgcccaaacgcaaacaagtgacaagattgctgaaggccctccaaaagaagaaaccatgaaataagtactgttcattgttagtctttttttttttgtaaacaagtattatatgccagtggattctttacataggctttgctgggctaggcaataatagtatggatggatgcatgggaagacagttgccattttttgtcactaacaagaggctatcattttctctggcagagctgactagtgtgctttactattcaagattgtgaaatcatggaacatttgttcaatgtgatttttgggattcaattaaaaaaaaatgcagtgtg

SEQ ID NO: 75950 - DNA, 671 bp, Oryza sativa
  unsure (1)..(671): unsure at all n locations
  Clone ID: PAT_MRT4530_7598C.1
ccnttgttttcccccgcaagattggtgggcaggagcatgaccgcgagcgctgatcgagcgagatagagatcgagtccgcgactccgcaacggcgtctctgccctccgcgccatgaccgcgatggcgcgactgctctgtcctctcgactcactcattcgatttttgatgacctgatcgtcgaccgtcatcgccggacgccggctcgccgcttcggcgattcagccttcagcgcttctgttcagtggcatgccgcgtgtgtcatggccggttcgtcggcgccggccgccgggatcagcgatttctttttctgttcggcgtccagactccagaactccagcagcgtgcaggcggcaggcatgtggctgtgatgccgtgtgggtgtggcagattgcataaaaaagatgaagatattgcaggatgttttcattcattaagcgggatgtttttcttcaaagtgaatgaagaaaatataatggacactttcatggccactgttagaagtagaccttataaaaagtagtagtatggtaattttcttcaaacttttctagccatataaacttgtttaagtctgaattttactaattaattgctaatttatatatgttttaagatgtcttattaatatatataacatggtacacttttggtttaaaaaaaaaaaaaaaaaa

SEQ ID NO: 75951 - DNA, 609 bp, Oryza sativa
  Clone ID: PAT_MRT4530_75990C.1
atggccaccaaaacagagtcagggagtccaaaaatctgcgaactccggtgctacccaaccagtaaccccaccgcctcccatttccacgagtggtccagtccaaagggaatacatataactgagcaaaggacgggagaagaagaagttgcgttgccccgtacgcctcgcgtttcgatcggcggcggcttgtgggcttgtggccggcctggcctgctgctgtttgcggctgcgattgagcttgcgtcccgatgcggccacgccggagtagcacaacggctacatttcgtcgcggtgcggcgccgcatgacgtgggggactaggatgccggggataacgggctgctgccggttgaacactgcggattcacgagcaaaccaggtgactcaatgtcaccgagaatgtcacgggggaatgtcaccgaatcccaatccggtaatggacctttttcatggtgccaatatcattgacgccgtggtccaatattatggcaccaatgacattgatatcattcccctaatctccccatgtacactaagtcacttatatgaaagagacggtgataaattcgtggacaccgagggtctatttgtacaaagatttttaaaataa

SEQ ID NO: 75952 - DNA, 2911 bp, Oryza sativa
  Clone ID: PAT_MRT4530_75991C.1
atagcccctcgcaagccagacccggcctccgtaacaggccctaatcccggcaagattgatgatgacaccactgcttatctggggacttcgcttgtcgacgaagatgagcttgcgaagctggttgactccggcgtgctgacggaaaagcaggtctctgccctgggaaaggctgtggtgccaaagcccgccgacaaccggacgatggtcttcgctgtgttcttcgaggcaggccttcggtttccatgcaacgtcttgctaccggagatccttcgcctgttcgaaccgagtgctgagcttttcggtgccattttctatgccaccgtaaacttgaagacgaagaagacagcgttcgggagcgtgaacttcaatgttcgccccgagcgttccgatctctggccagttaatgcttctatgtccaagtgggatcgccactggatgtcgaagtggttctaccactccatccccttcgaggccaggtcagacgcaacgaaagctctccgatgacggcgcaaagcgatcgcgccgatcaggaaaccgaaggttgctggcatcatggaggcccgtttctccctgcttcgcaaagtctgcctccgccttagctgtcgtgacttggtagaggagttttgcgtgcttcagatcttcctcctctcccagtcattgcaaatcgaggtggaccgggacgaggaggccgatggcctgtcgaagcttgtcatgccaaaggggggggcgatgttaactcttgttcaggccgaagccgaagctcggaaggtgatcggcgatgtgtcgatcacagaatacagccagctgcttacgcggcaggcggctggtcgggcgaatcacatgtgcgatggcgatctcccctcccgggcggccccacggaagcgaaaggcccctgcctccaccgactctgatgctaacgatgaggacaccgtcgacgactaggacagtgaagaggagggggaggatgaggtggagacggatgttgcgatcgaaatggccgcgaacgagctcgccgacaaccgcatcgagatgcgcggctacaccccaaccccaagtccagaccatgtcgaaactggggtggagtcgaacagttcccccctcggccggaaggatttggaaggggcaaagccactggtttcgattgcggcggccaaggtggcgaagggagggaaggttaagaaaacctccaagaagaaggggctcgtcgatgtcgcttgtgttttcagcgatgacgagtcttcggatgagacccctacttcgcccgctaggcggagccatggtctttcgaccgctctcggtgctacggccgacgtgggcgaagcgcgagggagcgctgcggccggtacttcagcttctgctgaccgggttgtgaacgccgctgccaggctcttcggaagccctccgcgtgatccagttgcttcgctgcccgccatccagaaggggaagaaggcagccattgagacgtcggcttcggagtattcgcttgcggcgcctcgcttcgcccctggggatttagagacccaggcgggtcttatccccttcgtcgagggggtaagtcatctcgtttctccggctgggagccgagcctgttcaccgagttgaacgagttcgatgaaggctgtaccgccatcaagagcttagccatccgaattcttgtggctcattgttcgactgagcgaaccgtgagggctcgctttgacggcttcaagaaccatcttcgagctaaggacgacgaactgggccgcaagagcctacaaatggaaagcctcgccaacacccttaaggaggcgaaggctgagaacaggcggctccaagctgagctggagaaggggagcgaggcgaaggccgagatcgagcgtctcaaggccgagcttaaaaaggaacaagaccagtccgccgccttaactgaggaatacaaccttaccgagccgaagatggaggctcttcgtctggaggcccgcaaggcaaaagcaactgctgagaaagacgcacaaaggttcacgcgggagatggcgaaggcgactgagtccgtaaagaccacgtgccacacgctttgcctcgcccttactgaaatgggggagaaggtgcgagtaatccctggcgaaggtgcttctgccttcgacttctcggagtggacccaacaggccggcggtgcggtctccgattccgccaccgcgtacgccaattgttgcgcgtgtgtgtcagtggccttcaccatgggcctgctgcaacaaaatgagtgcgagcacatcgccgagttccccaagcttacgaagggggattgggaagtcagctctcaggacgtttcgcccgccttacgcgcctggcgcaagcagttctggcaaaaggagggccgatctaccgttaaggcgcgcctgctcgagcacttggcgaaggtagaggcagcagagcagggcaaggagccagcgaccgaagaaggtggagcggatacgggtgcaggggcggacgtcgaccaatatcatctagagggttttcgccgaagttgtgtgatcggcctcttttttgggatcggtggaacaaaaatgagaaattcgtcgcggttaaaggcctgccaaaaattaagtattcatgtcgcgagatgataataaatggtaatagttacaaggttttgaaagttgccggctggatgcgagcgcaccccgggcgaaccctagacgactatgaccgtatccatgtggaacatcgggaggacatggcccgcttttggcgaaatcatcggaggactgatcgtcaggaagcgatcgcccaacgccgttatggtctagtttgtgtttcgcctccttctcctcttagggtagtgtataatattagtagtgatgacgaaccaagttcgccaaatcacaccttagggagtggagggtgctttggaggcgaagatgtaatttttttt

SEQ ID NO: 75953 - DNA, 295 bp, Oryza sativa
  Clone ID: PAT_MRT4530_75992C.1
ggagagaagcaagcaagcaactttgttggatgaagattggaaacaggttacagacctggaggccccaccggcgcgatggttagtttctctgaacaaattgatctccgccatggccgccaggagggaccgaattatgttcagctgtccacgagtggaaacgggagggtgccggggatgggccggcacggtgccttgatcggggccttcaaggcaaaaaaatggatcgctccatttttggcaaaacctcacaatgaaagctgagaatcctacgtggccaaaacagacgcttaccctt

SEQ ID NO: 75954 - DNA, 246 bp, Oryza sativa
  unsure (1)..(246): unsure at all n locations
  Clone ID: PAT_MRT4530_75993C.1
aaatnccagggaacatccacaaactttttgtataagctcagggcacaaatgtgacatccagtgacaggaattcttaaacggagaggcagggtgtcctacttgccatgaaggcagttcaacagacgggcactggtgggcccggtggccagtgcattttcctgcctacggggagatctacatgtatgtgggaaacagaaaggcatccactggggccatagtggctgacaatgcggaatgcatatataa

SEQ ID NO: 75955 - DNA, 1070 bp, Oryza sativa
  Clone ID: PAT_MRT4530_75994C.1
tttttttttttctgctggtgttccgctcgtggcttttttttttttttttttattcacaatgtatacccatgagatgatgagaatgatcagggcatcaggcagagggtaagtattaatacatcatttgggaaggtataatatttatgtgttaaccctaaccaatcataaaatcttggctaatacaggctattaaatgttgattctgtcaagctgcaaacaatttacaacaaaactgcagtggtaatttccacatactccagagacccagatacacactaggacattagtaacctggactcaccaatgagcaccagagttgattgatatctgtttagctttcctccagtctccgcaacacagagtcagcaaagatgcgctgcttctcttcagtgtgtttgggactagggcggttgtgtttcagatacccgtcccacggaaccttcttaagaccagctctagcagctatcatgtctcttactctttcagcaaattcaattgctgtttctccatccctcagatactgaggctccaagtaccatacatcacacacaactgcccatgatgtcataagcctaaccaagtgcattgtaaacgattgcttcttactattccagaaggcatcaacaaatattttattgtatttgatagctattgggcatacagcacagccaagctcaaaagcacccttcttgaacatgacagtgtactggttgttaacacaagttccttcagggaaaatcaggagaggattgctgtctggatgttgaacatgatctcgtaacttttttgcaaccacttcacgatccttgagatcattgcgattaaaccagatgcaaccaacactttccaagatagtcttctgaataaatccaacccatccaggatgcttttgcataatgacagcaaatgctgtcatctgctccagaataatgaaatctatcatcgatgtatggtttgcaacaaatacctgatgaggccgtgtgcttgggcgaggcccatgatacttgatcactccagtccaagaagcaacaaaaacactgcacatcatttcaaccagctttctcactatt

SEQ ID NO: 75956 - DNA, 291 bp, Oryza sativa
  Clone ID: PAT_MRT4530_75995C.1
atgcagcggctgcggcgctgcgccgtgcggggtatgtggcaggcaagcgaacaactgaacagggcaagccccaccggcgctgttccggcgacccggccgccgggccctgtgggtggagggcacgtgacctggccccagcttaagtacgtccgcgtggagcatttaacacccacgcgactgctgctgccccccctgggccgggccgctcacaacgccccctggtgggcccgcacgctgaggctccggcccccaggccccgtcgccttgggcccaagcaggatgccagcatag

SEQ ID NO: 75957 - DNA, 112 bp, Oryza sativa
  Clone ID: PAT_MRT4530_75996C.1
gctcactggattaccttctgcaagcctgcacgcaaacaagaactttgagtgcctcatattgcctttgaagctcaggggacatagtagcaagcatgagacagcttatatcaag

SEQ ID NO: 75958 - DNA, 1599 bp, Oryza sativa
  Clone ID: PAT_MRT4530_75997C.1
atgttaaagataaaatcactgggcttagctgttctagagaggctaagattgagacaaagatcaagactcacttggttaaagcaggcagagcttgaagatttcagtgaatctgatctcaaggaagctatcaacgatctgccttcagagaaggccccaggaccggatggcttcattggggctttctacataagagcttgggacataatcaaattggatttgatggatgcagtaaattccttcacacagctccactcgctgagacttgaagacctgaattccgctcatatctgtctcatcccaacaaaggcagatgcctctaaggttgaagattatagaccgattagcctcatgcacagcattgcaaaaattgttgctaaaatgctcgcaaacagattggcgccgaaattgggtgaaatgatatctcaaaatcagagtgctttcattcgaaaaagaactttacatgataatttccttttcatccataacatgatcaagttctatcacagaaacaagaaagcaaccctcttcattaaggtggacatctctaaagcttttgacgcagttaattggtcctatcttctagaagttctggagggttttggtttcggaatcaaatggcgcaattggatctcaaacctcctgggtacctcctcttcaatggcacttctaaatgggattccagggctgccgatcaatcatgcaagaggtcttcgacagggatatccgctctccccaatgctcttcgtcattcttgctatggaaccgctacacaaactgatagaaaaggcagaagaggctgcccttctaacaaaattgcaaagacaaagaagatttcgctgttccctttatgctgatgatgtcgcgttgttcgtgacccctaaacaagaagaacggctgactttacggaaaattctttcagtttttgcagaaatcagtggattgcacaccaacatggataaaactgaaatcttcccaattagttgcaacaacctagaccttgatgcttgcctctctatcttccctggaaggatctcaaccttcccttgcaaatacttgggaattcctttgcacaccaaaagattgcgtaaagttgatcttcagcctctaatggacaaagttgggtctagaatcccgggatggaaaggacgtttcttcacgtcggcaggcagagagatccttgttaaaacaactctttcctcaatacccatccaccatctcacagttttgcaccagaacaagtggctatataagaggattgatcgtctcaggcgtgctttcctttggaagggagaaggtccagaaaacgttagttcaggcagcagccttgttaactggcaaaatgtttgcaaaccaaaaatcttaggtgggctgggaattctcaacttggacaagtttttccgtgcattgctcctgcgctggttgtggtttggttggaaggacgaaaaccggccttggcaggagatggaattgccgtgcaatgacttggatcggcagcttttcaaagcaggaacagagatcatactgggtgatggaagaaaatgctccttttggaatgataattggctttcgggacaatctcccaaagatattgccccataa

SEQ ID NO: 75959 - DNA, 300 bp, Oryza sativa
  Clone ID: PAT_MRT4530_75998C.1
atgaccacgaacactaccgaaaatctccagtcaccaccaccagtcgatcgaggaggcgagaggcaagatgcagatcttcgtgtgatcaccctggaggtcgagagcagcgacaccatagacaacgtcaaggccaagatccaagacaaggaagggatcccgccggatcagcagcggctcatcttcgcggggaagcagctggaagacggctgcacgctggccgactacaacatccagaaggagtcgacgcttcacctggtgctccgcctccgcggcggcggcagaggcggctaccccccatga

SEQ ID NO: 75960 - DNA, 351 bp, Oryza sativa
  Clone ID: PAT_MRT4530_75999C.1
aaaaaggggaactggccccaattttgggaaaacccaagggagcagctggaaaatcctccgctgaaatttttattacaaaaacattttttttaccagattcggccccccacccaggggagatctctcgcaactccaaaaatcccgcccaaaacccaaattttgacccccataaccccccgccgggattaacaaaaaagctggggggtgaccgaaaaaaccaaaacaaaccctttttttcccaaatttttttcggctgggcggaaaaaaaggggggaagaaaaaaacaatcccccgcgggggggggaaacagaccctccacccgtttcttaaaggggtgggggcttaccccac

SEQ ID NO: 75961 - DNA, 321 bp, Oryza sativa
  Clone ID: PAT_MRT4530_7599C.1
tcagtgatggctggaagaggggttagggttttctcctttcaagcctagtttagtccttgtggttgtcctgttagttgtcgggtttgtcggcctatggcggtgaccggtgtaggggtccttggtgacggaggtggttggagatggtggcaatgtgcttctaggacgatgaatcgcatctccggtggtggagacaccctcttgctgtggtcccgatgggtggtggaggtggcgggtcttcttccagatctgctgaggcatggtggtggaggtggcggcggtcccaatggcggtggctagagaggctcggaggttcaacagcat

SEQ ID NO: 75962 - DNA, 858 bp, Oryza sativa
  Clone ID: PAT_MRT4530_759C.1
atggagctcggcggcggcggccatgagagcgtggaacgtcgtcgacggcaccagcaccacttcgtgctggtgcacgggctgtgccacggcgcgtggtgctggtacaaggccgccgcggcgctgcgccgcgcggggcaccgcgccacggcgctcgacatggccgccagcggcgcgcacccggcgcgcgtcgacgaggtgcgcacgttcgaggactactcccgcccgctgctcgacgcgctcgccgcgctgccgccggccggcggggacggcgacgacgaggagcgcgtcgtgctcgtcggccacagccagggcgggttcagcgtcgcgctcgcggcggagcggttcccagagagggtcgccgccgtcgtgttcctcaccgcggccatgccgcccgtcggccgccccatgtccgccaccaccgtggagcacgtgaactatgttggggtggagttcttccttgactcgatggagctggagcagcagaacgctgacatcccggggaaccctgtaatcttcgggcccaattttatggcccaaatactttaccatctaagcccacaagaggatttgaccttaggactatcgctgatccggccgacgaacaagttcaccggcgacgcgctcatgagggaccctgggctcctgacgaaggagaggtacgggtcgacgaggcgcgtcttcgtcgtcgtggaggacgaccgcgggatccccgtggagttccagcgccgcatgatcgcggagaaccccggcgtcgaggtggtggacttcgccggcgccgaccacatggccatgatctccagcccggccaagctcgccgagttgcttgttaggatcgccgacaaagcacacgaaccatga

SEQ ID NO: 75963 - DNA, 616 bp, Oryza sativa
  Clone ID: PAT_MRT4530_75C.1
ctagaaatttttaaaattgaaaccataccattcccgccccttttctgtctcctctctcacatcccccttccgtgaggaggcggaggctgccccacgctcttgtccatcggcgacgacggtgccacggcggagcgccgcccagtagcgggggtggcggggggtcgtcggggtcatcgagttggagaacaagatggtggttggaggaggggggtcggtggcgccgagcggggcgaagctgacgtgcctcaccattgaccaccgttggagggctcgggagccgctccaaaccgtccttgacgccatctgcggcgggatgtctctggagctgtcgccgccgccgtcctcgatgccatccgcgcaggagggctcgagagccgctgccgctgtcctcgatctacgacgggagtgctcgggagccgccgccttcgttgccgttgtcctctttgcagtcgcgccagatggaagaaaagatggggagatggaactgacatgtgggatgggaatggagacggcgcgagagaggagacggaagaagggacaggagtggcatgattccaattttagaaatttccagtggcgtgtagccaatatgacgaatagtagtgatattttttaa

SEQ ID NO: 75964 - DNA, 444 bp, Oryza sativa
  Clone ID: PAT_MRT4530_76000C.1
aacaaaaaatattttttttgtactttatggaatttgttaatgtgtatttgatcatttataattatattgtacaggggagaaaaaaaggatttaaccaaggccgtttaaagaaaggatgaggggaaatggttaacgcaaaacgatatttgatacaaacaaatttgaaaagggggttgagtggatgcacgatatgcgatgagcaaaaaaccaaacctgaagattgaaaaatcaatgaggatgggcaatggccgaacaaattttattcaagaggctattaacaatggtagtctgtgggttaaaactggctctcgacaatgagcaaaacaagattttcaccggaatgttgctgatggacgataaattaaagcctttataagataagctaaacccattatgggaggtgttaagagggccttattattaatctaaaaaaaagagttttat

SEQ ID NO: 75965 - DNA, 491 bp, Oryza sativa
  Clone ID: PAT_MRT4530_76001C.1
gaaataaaaattaatgatatttcccttgtattagatctcttacatgttcactagaccaaagttttggattttctacttttccaccaagaacataaccatgaaaaccataacagtgttttggtcttgaagctggcttcaacttcaaattggccacactagcagcagacatatcagaagttaaaacatcagcaggtccataattgtcatacaatgttgcttcaatagacaaagttgagacatgctcccgatcctgcttttgtgagtcaatttccacctcaacctggcatatggaacggcacaaaccttttgaagtagtggaattgccaaccctatcttacttttgttttgggaatgctgattcagaagtacagtaactgaatacaaatacagaacaatgagattgagtgtttactggactcgtgcatcagtcagcactataccatctggactattgaaataggcagtttgctattaataattaataacattat

SEQ ID NO: 75966 - DNA, 1393 bp, Oryza sativa
  Clone ID: PAT_MRT4530_76002C.1
tcaaccgaatgtctcgtaaagcttacaccatatcttaggatcccatgtttccattttttggatgagcctttgccatgttttgcattccaccttaacactttctggcaatagccaccaatgcttgattatatttttgcacagctttaggtagtgatatggtttcttatcatcgtaaccagatgggtggcttcttgtttggtcataacttatcatctcctgaagaggggatggtaaattccccaagtaggtcacaggtggccactgtatgaggttgttaacctcctgctctaccttatgtgggttcatacacaagaccttcaacaagtatttccccttctcagtttcatcccaatccaacggatacctctgtagcgtcttcacattgccctctgcaatgtaatcaaggaatctcacgaggggcatgtctttgggggaatccacatgatcagcaaagattttcttcaccgcatctctcatttcatgccaaagatttgcctggatttgccttttcctagcatcactttttggcaaagcttcagcttcttcgataagaagttgcgccaaggcatttttcccaacttttttcacatagatgtccttggcagtgatttgaattggatagataccatgctcaaatagacattccagtccataccttacaagctgacggattgtggagtttcgacaggtacccgtccctgttctcttcagaagtactttggcaccttcggttttaacccatgcactcatgcttccatctacccagttaaatacaaatctgggttggccacttccatcaaaaaagttttttagaaacacgatgttatgatgccgaatgtttttcagcaaagaatatgcatttgcctttttacgatccactttatcaaaatattttacgagacatttcgaatgtagtggtccgatagcatattcagcttcactgagatccaagagacttccatcaaaatcctttaacttccgcttatgatccaaaactatgcattctccatatgatgtagccttacggaagaattctttgcgggttcccctcccccttgtcgtcgtcctcggaaccttcacaaactgttcttcggccctcggtaccttgaagccttcacgaaccgttcttcggctcttcattgattcagagatgttgttgatgatgaagacaatgaaccttcacaaactattcttcggtcctttgactgatgatgagatattgatgttgatgaaggcccttcacaaattgttcttcggaccttcactgattgatgatgatgatgatgatgacgagaagctccgacgtggagatgatgaagtgacaatgaaggctagctccgactgggagctggtgatgatgaaagccaactctgacagggaattggtgatgtag

SEQ ID NO: 75967 - DNA, 488 bp, Oryza sativa
  Clone ID: PAT_MRT4530_76003C.1
tcgctatgctgctctggttatctatctatctgtctgtctctgtcctggtgaaatatggatagcaattagccgcttgtttgcatgggtacttctgtagatatattgactctgcagcaaacacagtgtttcttggttctttacggtggtcttctgtagatatattgactctgtatgctttgttctctgttcaagatagatttaggaagttttcatggttttgtacttcaatatgcatgtgcgtttgtgcatttgctatggtttttcagttgattaattattcacttctttttaccgtgtttacacatttttctattccaaattagcttgaacaacacacatgtacatgtggcaactcagtcaatttgataaggtcaaaatggtcaaataggactataacattttttgtaattactattatgtactacctccgtcttgaaatgtaactacttttggctgtgaatgtggacaagtacttgtccagagtcata

SEQ ID NO: 75968 - DNA, 1956 bp, Oryza sativa
  Clone ID: PAT_MRT4530_76004C.1
gagcaaaagattatctaacctacactctctgctttctaactgcaatgagatcctgttgctactcgacaaattggtagagcaaagacctcttgccttgtaggaatggaacttcagactgattttaaaggagcacattctaagcctgttcaaatacaaaaatgaattctggaaaaaagtttgtacgattagatgggcaaatttggagatgagaacaccaaattttttcaggcctctactccagacagtcacagaaggaataaaatctcacatttaaaacttgaggataaaagacagaaagaggggtgtcctcccatgaggaaaaggctcatgctttatacacaacttataaaaatagaatggggattgatggtcactcagacatggttctcactctagcaaacctatttcaaccagtagatatcttacattttcaaagttcaatgccatcaaaagaggaaatggacaatatcataaaaaatatgcccacagatagaggccctgggccgcatggttttaatgggatgtttcttactaaatgttggcccatcatctgtaatgacttctatgagattgcttctcaattcttcaccaagatcatggccaatagaattcaatcaattatacatgagctcatccatgaaaatcgcttcatcagaaacagaactatacaagactgtcttgtttggagctttgaatatgttcatcagtgccacctaagcaaaaatgaattagccattctaaaagttgacttttaaaaagcttttgatctagtagaacatgaggcaatccttcagattcttcaggccaatggttttgatcaagcttggatcgcctagactaaaaatgtcctgtcatctgcaaccacttttgtgttgttaaatggagttctaggtaaagatttcaaatgcaagagaggcgttcggcaaggtgatcctttatcaccacttcttttgttctagcagcggatcttctccaatctattatcaacaggccttatgagatggggctattatcatttccaatccctcaagacagagggaagtttccaattattcaatatgtagatgacacccttcttatcatgaaggctgattagagagagttattttgccacagaactctgatgaacacctataccctgtgcactgggttgaaaattaattatcacaaatcttgcatgattcccattagtactaatgtagaaaatgatacaagttctggttggtacatttggttgcatggtgggaactatgccttttacctacttaggtttgccaatgggaaccactgaacctaaaatcattaatttttgcccctttgattgaatgagttgaaagaagattgctctccatcacaactttcctaaatcatggacaaaggttaacaatggtcaactttgtgttatcttctctacccacatattacatgtctgctcttaaactaccgaaaaaggtcacacaacacattaattgtgcaagaggggggggggggggggcttggagtcatcaatctgtaattgcctgggacctagtttgtaaaccaaacaaagggtggggggcttggagttatcaatttgtaattccaaaacattccttgcttctcaaacacttaagttttttttaacaagaaggaccttcctttggtacatttaatttggaacaaatattattagcactctgatctccctccacatgcacacagagaaaaaaaggttcattccggtggagagatattttcaagctaattcccttgttcagagcattcactaaagtgacaattggcataggggactctactatgttgtggaaagataattggaatgacaatctcttggaattagaatatccaatagttttctccaatacaaggttagaagatatttctgtccaagcctttttgtcccttactgaatttgaatagtacttccacacacccttatctgttcaagctatgcaa

SEQ ID NO: 75969 - DNA, 456 bp, Oryza sativa
  Clone ID: PAT_MRT4530_76005C.1
atgactacggggctcctcgcgcaagtgccggcagagactgagaaggagaagtgtgagtcctcgcgcatgcgccggaggaggctgagaaggagtggcacaggctacggggcatcttgcgcacgcgctggcagaggccaaggaggagcggaggtggctacaagcatcctcacacacgacagtgtcggtgtgcgtggtggtggagatgacgtggccaaagcagctctagtcatgaagctcggcgagacgtgctacggcatcactactggggaggatgcgacggagagggtcgcattggtgcaagttcgctgctcccatgtcgacaagcagtcgtccgtccccgtgccgcccgccacccttttccttgctgcctgcttccttggagataggggaaccagaggtgtggcgggagacctggggcgcaaggtagtccaccagggaatcccactagggctgtaa

SEQ ID NO: 75970 - DNA, 413 bp, Oryza sativa
  Clone ID: PAT_MRT4530_76006C.1
ttttgtgataggaaacttgtttaatactatctccgtttcaagttataaaatgttttgactttggtcaaagtcaaactgcttcaaatttaactaagtttgtagaaaaaataatagcattttcaacccaagaaaaacttattatgacaatatattcaattattgattttatcaaactaattcgatattataaatattactatatttatctataaacttagttaaatttgaagtagtttaactttgaccaaagtcaaaaacgtcctataacttgaaacgaagggagtatttagatttgattttttgcataccttagttattacctaaataatgagtgtgcagcaagatatagcaagtatatataagtaccttccgtttcaaattacttactgttttaaaaggtaactttttgttgt

SEQ ID NO: 75971 - DNA, 1088 bp, Oryza sativa
  Clone ID: PAT_MRT4530_76007C.1
atggcagcacagggtgttacctccgtgctagcggttgtattggtcatcggagccttcgtgtccatccctacagtgcaatccatcggcgtgtgctacggcgtgaaagggaacaacctcccgccgcggagcgaggtggtgcagctgtacaagtccaagggcatcaacgggatgcgcatctactaccccgacaaggaggcgctcaacgccctgcgcaactccggcatcgccctcatcctcgacgtcggcggcttcgacacggtgtcctatctcgccgccagctcctccaacgcggccgcgtgggtccgtgacaacgtcaggccctactacccggccgtcaacatccgttacatcgccggtggcaacaaggggcaaggcggcgccacgaatagcatcctcccggccatccgcaacgtcaactccgccctggcctcgtcgggcctcggcgccatcaaggcgtccaccgcggtgaagttcgacgtcatctccaactcctacccaccctccgccggcgtcttcagggacgcctacatgaaggacatcgcgcgctacctggcgagcaccggcgcgccgctgctcgctaacgtgtacccgtacttcgcctacagggggaacccgcgcgacatcagcctcaactacgccacgttccggccgggcaccacggtgagggaccccaacaacgggctcacctacaccaacctgttcgacgccatggtcgacgccgtgtacgccgcgctggagaaggccggcgcggggaacgtgaaggtggtggtgtcggagagcgggtggccgtcggcgggagggttcggggcgagcgtggacaacgcgagggcgtacaaccaggggctgatcgaccacgtcgggcgtggcacgcccaagaggccggggccactggaggcgtacatattcgccatgttcaacgagaaccagaagaacggggatcccaccgagaaaaactttgggctctcctaccctaacaagtcgcccgtgtatcccatccgcttctagtacgtttaattaagctaaaaaagctagctgcacacatagcagtgttctttttaattcccgaataagacacacagggcagtggt

SEQ ID NO: 75972 - DNA, 328 bp, Oryza sativa
  Clone ID: PAT_MRT4530_76008C.1
tcggtctactcgttttctacagagaaagggagggatcaggggaaggggggcgccggccccgcaccccgagctgtctccgacggtccactcctccgagcctgccaaagctaccaacgctaactcagcaagatgggtgcctgcggcaggatgacggagaaggagcgggaggagcagcagaagctgctcggccgcgccggcattggcgcggccgagcagcggccgacgacggacaagccggcgttcacgctggcgcacagcaagaaggtcatccccgctcagtgcttccagcgctcgatgatcaaggacttctcctacgtggaccatgacc

SEQ ID NO: 75973 - DNA, 634 bp, Oryza sativa
  Clone ID: PAT_MRT4530_76009C.1
cgggctgcaggaatcggcgaggagagagaggagaactagtctcgagtttttttttttttttttttttttcggacgcgtgggtgaaaatcgtgaaaaattttatagaagctcttatgcagtaacaacagatcgtcatacagtattctctgcttctaaaagaatggtactactacaacacagttcatggctttcgagatatccctctaaagaatgggggtatagagcactagttgtccggatcaccacggtcagctcgatcagctgctagggcggggcattgcgtttggtggtggtctcacgatggggcctccatatccagctggtaatctgttgccggctgcaccgggctggtttggcctagatggcaatgaacccatgcgggcagcgattatcgcatttcgctccatcagaagcttctttctagtcttttcagtgtattctcttgttctctggaccaggtgttcaacttcggtgagaaaagacaccttcgcctctactttccgatacagtttgtcaatcatcagcgcagccagctgacggacttgttcttcctcatggtcagcaaggagttttgccttcacagcagctgcagaaatagctgtagcggctgctcgttctagcctagttatggaat

SEQ ID NO: 75974 - DNA, 356 bp, Oryza sativa
  Clone ID: PAT_MRT4530_7600C.1
aatcacaaagggtataaattactcatcagctaggcatatgtcacatgatgttcttgagcatcctatttttttctttggcaaaacaacagatcaaatgaacgtggctataggaagaagaaggcgtgaaaagaatttcacagggaactataaggcaagcaagataaggcacagatcgatacaccacacctatctatctaccagcaccagccccaggacctcgggggctcgtgcttggattagttcatcaagctgtgatgctggcgggaacctgtccagcgcctcctgcaacagcttcttgaacctgcacatgttcatattgatgttctgcttagacaggtacgccgtcttgagcgcgt

SEQ ID NO: 75975 - DNA, 2115 bp, Oryza sativa
  Clone ID: PAT_MRT4530_76010C.1
atggccatccttatctctttcaaccctatcctctggctccacttgttgccacaccagatcagccattcctacttgtcgccactgtcggatttgccctcctcgtgcatccttgaagacgtacaacatcgcgcttgggctgggctccgcattagattgcaatacctccaagactgcaaccggtgcgtcgtgcacgggccctgcgtcgagtcggacgtgtacagcttcggcgtggtgctactggagatcgccccgcgtgctggtgatcggcctctggtgagcgtgccacgacgcgacacgtcggccctcacgtctcgcaagctgtggaagctctgcgtgcggtcgacggggagctgccgtggggagtctgccagtgcaatctttgtcaatccttatgccaccgtcaacgtaaagactcatattccaatcaccctggagttcaagcaccccaatttcaacaagtggaaggctttcttcaccgcaatgtgtggcaaatttggtcttcttcctcacatcgatggtactgctcctcctcgacccgacgagtcggcttgggctcaagccgattgctgcgttcggggttggctcttcggctctgtttccgatgcaatcctcgatgtcgccatggaacctgaccaaacagctcgcgatctctgggtcgccatcgacgaactctttcaagcaaacaaggaaccccgcgccatctatctgagtcatgaattccactcacacacacagggtaatttgtccattgctgactactgccagaaggtgaagactgccgccgatgctctccgcgacgtcggccatcctgtcactgaatcgcagcttgtcctcaacctcctcagcggcctcaatccgcatttctccagcactgccgacaacatcgccggcgcccctgtcctgccatcctttgcatcggcgcgcaacactctgttgctcaaggaactacgcatcgccaacgacaccaaagttcagaatgagacagccatggtagcggctgcctctcctgccaacaacagcacctccggcacatgtgctgcctcctcgtcgcaacctcgcggtggtagcggtggcggtggtggctccaacaatggtggacggcgcaaccaacgccgcaacagcggccggaacaacggtggtggcggcaatggaggtcgacagaactacggtggtggtggctatgggaactctggaggcggcggtggctatggaaattctggaggtggctatcctccgcaccaagctaggcctcggcctggcggcccgtgggtctgcttcaatccatggcccgtgcaacaacaggctccatggcggcctactggaaccggcgctggcttgcttgggccctatcctcaggctcacactgctttcaccggcccatatgtttctccaccaactctaggctggcctcctgtgcagtcagtgcagcccacttgggatcaacaaggtctggttgctgcccttaatcagctgtctgtaaacagtccgaatccctgggtgcttgacactggtgctacatcacatatgtcctccaccgacggaaccactaagtttgctctcaaaaacattcttgtcgccccttctttgggatcacccaccgcggtcgctccatcctctttggatgttgagcatccatgccctctcccggctcccattcttaagtcgccggccactgatgatttggccgaccctgatttatatcagctggtccgtcacagaagaccgatgccatcatcatgtgctttggatccggttgtctcggtggagcacgtttcctctggtgccgatgctgggctttccgagctcaacaagcacaagatcagcagcgacactctatgtgctttggctgatccaaactggcgagcagcaatggtcgacgagtacaaggctcttgttgataacaatacatggcgtttggtccctcgtcctcctgcttctcggtcgtggcctattcatcaacttgatgttaagaacgcttttctacatggcaatcttgaggagactatgtattgtcagcaaccatctggcttcgttgatccttctacgcccaatgcaacacttctctctttatttataaagatggagaaaatattgcatattgttgctatacgttga

SEQ ID NO: 75976 - DNA, 1319 bp, Oryza sativa
  Clone ID: PAT_MRT4530_76011C.1
gaaaaaaaaaaaaccaggataacattcaggttcaggagcagcagttgggagtagctagctgggacaacaatggccaggagacagggagttgcttctatgcttacaattgctctgatcattggagcatttgcttctgctccaacaactgtgcaatccatcggcgtgtgctatggcgttctcggcaacaacctcccgtcgcggagcgaggtggtgcagctgtacaagtccaagggcatcaacggcatgcgcatctactaccccgacaaggaggcgctcaacgccctgcgcaactccggcatcgccctcatcctcgacgtcggcgaccagttgtccaacctcgccgccagctcctccaacgcggccgcgtgggtccgcgacaacgtcaggccctactacccggccgtcaacatcaagtacatcgccgtcggcaacgaggtggaaggcggcgccacgagtagcatcctcccggccatccgcaacgtcaactccgccctggcctcgtcgggcctcggcgccatcaaggcgtccaccgcggtgaagttcgacgtcatctccaactcctacccaccctccgccggcgtcttcagggacgcctacatgaaggacatcgcgcgctacctggcgagcaccggcgcgccgctgctcgccaacgtgtacccgtacttcgcctacagggggaacccgcgcgacatcagcctcaactacgccacgttccggccgggcaccacggtgagggacccaaacaacgggctcacctacaccaacctgttcgacgccatgatggacgccgtgtacgccgcgctggagaaggccggcgccgggaacgtgagggtggtggtgtcggagagcgggtggccgtcggcgggagggttcggggcgagcgtggacaatgcgagggcgtacaaccaggggctgatcgaccatgtcgggcgtggcacgcccaagaggccgggggcactggaggcgtacatattcgccatgttcaatgagaaccagaagaacggggatcccaccgagagaaactttgggctcttctaccctaacaagtcgcccgtgtatcccatccggttctaagtcagatgctacatcggatcgacgtagcagctgctgaaagctctagcacgtatacatccttaaaattaactgtaagccaaaaataagctagctgcaactgcaagcagagcagtagaaataatcaatcagtaataaagtgtgcagcacgtatggtgtgcctgcgattctcaaattcctggattaatagtgtattatgccatgagtaaagtgaagaaaatgatttttctccctaaaaaaaaaaaaaa

SEQ ID NO: 75977 - DNA, 2883 bp, Oryza sativa
  Clone ID: PAT_MRT4530_76012C.1
atggtgggagcaacggtttcagcttcagcgggggtgatgaactctctgcttgggaagctctccaccttgctggacaaagagtatacaaagcacaaaaatgtggaaaaggatgtgatgttcctgcaaagggagctacccagcatggaggctgtgctgcagaaacatgcaatgcaggacgagcttgatgttcaattgaaggcctgggtgagtgagttgagagagctggcatatgacattgaggactccattgatgctttcatggtgcgcattgagcactatagtgatgagtctgctggaattaaggggtttatgaatgagcttgtaggaatcaagggtccaagggattgtataatcaagttgctaacttatgaagctgatagtggcccatcaagacagcaactcaaagtagtgtccattgtgggatgtggaggtctgggcaagacaacacttgccaatcaagtctataaggaaatcaatggccaatttgattgtaaggcttttgtgtctatgtcccagaaaccagacatgaggaagatcttaatggatctactatctcaaatactggggaatggtagccccatgtgctttgatgaacagcgactcattgacaagcttcgggagttcctaaaagataagaggtacctgatcgttattgatgatatttggagcacatcagcatgggagattgtgaagtctgcatttcctgataataatcttcgcagcagaataattacaacaacgcgcatcatggatgtagctaaatcatgttctgctaatctccaggaatatgtttacaccatcaaaccacttaatcatcaagactctagcaagctgtttgttaaaaaaattttcccttctgggtgtggtgttcctcaacatctgaaagaagtttcgaatgcaatactgaaaaaatgtggtggtttgccactggctatacttattatagctggtttgttggctagtaagtatgataggaaggatgagtgggaggcagtgcataattctattggctctgaacttggcaaaaatcatactttggaaggattcagaaggattttgatgcttagtttttatgacctgcctcatgatttgaaaacctgcttcttatatctaagtatattcccggaggatgacctgattgtaagaaaacaattggtgtggaaatgggttgcggaagggtttattagaaaagtgcgtggtaaaagaccagatcaagttgcagagagctacttttacgatcttatcaatagaaacatgatccaagcagtgggtgttcagtacaaaggtaacatatatggttgtcgagttcatgatttagtgcttgaccttatcagatctctatcagcacaaatcaactttgttatcgcgattgatgataaagggtatgaatcttctcctaggaagattcgtcggctgtccttgcaagctagtaatttggaagatcaagaaatgcagaaacttgtgagtaatcaatcccatatccgctcactcattatgttcagggcctttaagaaagcacctgatcttttcaagttccatgctctgcgtattttggatttatccgagtgcaattgtttggaggaccaccacattacatgtatagtgaatatgtttcagctgaggtatctgagcctcccttgcagaatcactgaactccccgagcaaaccgggaacttgcaacatctagaggtactgaacatcaggcgttgcatgatcaaaacattgccagaacccattgttaaacttgggaaactcatgtgcctacacgtgaagtctggggtgaaactgccggatgagattgggagaatgcaagctctccaggagctggagagtatctccatcccatgtaactctgtgaggttaattgaggagattggtaggctgacaagattgcgaagacttactgttgaaacaacaagcactactgagaaaatgggagaccaagaagtgaggttcagggaaatgttggtcagttccctcaccgagttgggcagaaatggccttgagtcactctgtatcagctaccctcatggacagaacttcatcctggattcattgtttggctctggctgctctcttccaaagtttcatgagcttgacataaagaattacctttgttgggttccaaggtggataactatgcttagtagccttgtgcacttatgcctatccatgtatgatattgacgaggaagatatgcgagttctgaatggcatctccaccctgctatttctccatttagaattaaggaatccacctgaagagaggctagtcattggttgcgatggactcagacatctgaacgagctacatgtgttctgccaacattccacaatgccattgacgttcgcgcctggagcaatgccagagctccaccgtttacgcctcgaattcggggcgagggagacgttgcgcatgtatggtgattttgatttcggcatcgagcatctttcgggactccgggatatcagagttgacattaactactactctggtggcactgacatggatgcagaagcagtggctgccaaggatgctatcaccactgcttccatcatccatccaaaccgccccttacatgatgtccgaatgcatgtcaccatgatgtttaccctgaaggaggctgctcagtcgaagaccttgataatccagaagttctgcgaaaactacagcagctattatcacctgagtcttcgacacggaaccagtagcttgggacttgaagaaacaacgtatgtatcttctggaaatctggccatcaagatcaggtgcgagtatggcaaattgattgaaattcgtataaaaatccaggagattcgcaatgttaatgtgaggaaatgtgatattctggtccaattaggatacggcatgtgtgacccataa

SEQ ID NO: 75978 - DNA, 371 bp, Oryza sativa
  Clone ID: PAT_MRT4530_76013C.1
gcgcgctcgcttcgcacaaggggggcactgttgaaagtattcctatcgaggcatatgaactcgctaagagggaggctgcctggggccttgcccgataaacagccattttttaagacaacgggatggtgctgaatgcatagcttgaaatactactacacggctagcatggcatgaacaggaccttcgaggtggcccaaaatgtgaggacctaaacgttcttgtacatgaccgaaaacatgggatcgttcgagggcatccttctaaagccaagcatggtgacacccaaccgcccaatgtaaagacagggccacccctgagcaagtatctgactacatcctcaagctccttcacagaaggatcccccgtgccat

SEQ ID NO: 75979 - DNA, 1656 bp, Oryza sativa
  unsure (1)..(1656): unsure at all n locations
  Clone ID: PAT_MRT4530_76014C.1
gaccccgcaattctcctcctctatagcttctccgacgacgcactccggcgatcgagcggccggcaaggaagaagaagaagagagagctggttggagaggtcgtccatggcgtggaaggacagctacttggacctcgtgctgatcccggcggggatcgtgttcccgatcgtctaccacgtctggctgtggcacgtcgtccgccgccgcccgctctcctccaccgtcggcattaacaccgccacccgccgcctctgggtcttgggcatgatgaaggacaacgagaagaaggcggtgctggtggtgcagtcgatgaggaacgtgataatggggtcgacgctgatggcgacgacggccatcctcttctgcaccggcgtcgccgccatcctcagcagcacgtacaccgtcaagaagccgctcagcgacgccgtgttcggcgcccacggcgagtacatgatggcgctcaagtacgtcaccctcctcctcgccttcctcctctccttcctctcccacaccaccgccatctgcaccctcaaccaggccaccttcctcctcaacaccctctcttcctcctcctccttcgccgccgacatcgccgggctgccggtgaccaaggactacgtcgccgacgtgctcgagagaggattcctcctcaacctcgtcggaaaccggctgttctacgccggcgtgccgcttctcctgtggatcttcggcccggtcttgggcttgcctctgctccgtcgtcatgatcccgatactgcacagcatcgacgtggtttacgtcgatgggagcagcaagggcgaggccaacgccagagtggagatggtgtacgagagcgatgagagcgtcatgcaagtttgaccaatttcggacacgagtcggactctataacctgcctaccctcacggagaatatgtggtggtgctctcgtctcgtccttcaaactcgatcttgaagaaaaatgcgggcaattcttgatccaacagtgactgcacctgtgttgtgtgtgtcatgtttgtggcttggattgttttgagtattcttattcaagacatgtttagcatggcacggccgggagagtacttggtgctgtaacagagactcactgatcggtcaactgttaacgcacagcaatgtactggttacaactgctgtaatctgtcagaataagatgttctcccccattgattcactaatagcaaaaaaaaaaaaaaacgtgctcgagggggcggcccgcgtccgcatctcccgctcgtacggcagtcgccgttcgccgggccttccgggccgggacttggaaacccgctctcggggtcgcccctggctggtcccatggaatcccccgcgcggcttgcccccttttgcaccttggctaattggtgagaggccgagctcacggctttcaaaatgtgtggaagctgtttgtgaatggacgcgcttgttttgacgtgtacagctcgtgcttgtagtacggtaagtgcgatacggtggcgtagccggggggagagttatgtttaatgtgttaagtgacgtagaaagagtcggaaaggaggatgtggaggggaggaagggagggcgcgggcgggagtagaaagtgtgggtgggatatagaataagcgcagggggggaagatagaggagttaggggtagaagggggn

SEQ ID NO: 75980 - DNA, 254 bp, Oryza sativa
  Clone ID: PAT_MRT4530_76015C.1
gtggtccgttgtgctgataatatattgcgggctggccgccacagtcagcataggcgaccagcggatacaacaggtgatgtacacccttggagagcgttatgaaacaggaatgcgctacccgatgtacttgctggcactctgcctgtcggtggtgaagcgcctgcgcgctggccacaggacactatgcgggacctgagacgaccaactgcggcaggacagttgtgagtagctggcggctgacgactacagatgga

SEQ ID NO: 75981 - DNA, 351 bp, Oryza sativa
  Clone ID: PAT_MRT4530_76016C.1
tgcacctcgtaagctggatttaacgccccttttttttttttaaaaagagagaacccatggatcgatggtatcaacatttgaaggtctgtgccagtttgttgcttctttggcgcgtgggtcgcccggaattcggccggtcctgcgctcacttctattgagttttaatgctatatggcatgtgttctgggaaagatcgtaattacacaaatcaccgagataaggtagctggggctagagactactacattaatgctgctactgcgttcatgaaactgctcactgatatatggcaacccggagaggttgcgttggcccggggtttttttaaggaacgcaaactatgcttacgct

SEQ ID NO: 75982 - DNA, 1039 bp, Oryza sativa
  Clone ID: PAT_MRT4530_76017C.1
ttattctgccagcgtggcaaccatcatttgcttcagcgcttctctttcaataaaaccttgattcttgatatcatacatctggaaagaaaaattaatcttgtcatgaatgggagcgtcaggatggaagatggataaagctactgcaagctcttcaaatccgagagcttgttcatgcttcatgtcaaacaaatcgaataccttgttgatcttgccatcttcgattatggcaccatcgatcctcttgaaaagctcatacaaggcttcgatctcattggcgacaaatatggtttggatggttagagcttccgggttttgggggccatcattgctgtagctaagtatagggttgcagcaactcatcacggtttgcagcagctcatcaccaacccggccatgtccgatagccaatgtgctagtatcgccgccgccatctcgcgattgatcaatctcagacttgacttggcgtctcgcctccaccgccggagcccccatcttcgctgcgccccgccgcgccgtcctcttcgccgccgcgcctcccacctcttcgccgcgcctccatcgccgtcgcccccatcgcctcttcgccgcgcaccgccgacgcgcctccaccgccgtcgcccccatcgcctcttcgccgcacaccgactcgcctccaccgccggcgcccccatcttcaccgcgccccgccgcgcctccaccgccggcgcccccatcaccgcgccgtcctcttcgccgccgcgcctcccacctcttcgccgcgccacgccgcgcctccaccgacggcgcccccatcttcaccgtgccccgccgtgcctacaccgccggagcccccatgcatcgcgccggcctgttcgccgcccccctcctcttcgacgacctcctcttcgccgtgcccccacgcgtcgggctacacataggtgtaagccggacgtgggtgatatcatagttggccgtgttattgagaaatggctaacattcttgggggctctacacaatcatgtacaaaaacaggccctcttgctgatataacaaatataag

SEQ ID NO: 75983 - DNA, 381 bp, Oryza sativa
  Clone ID: PAT_MRT4530_76018C.1
atggcggcgaagcagctggagcttgacgccggcggcggcggcggcgtgccgtcctgcgctaactgctgcggcggcgtcgtcgcgacgacgacggcgaggagcaagaacctgtgcgcgcggtgctaccgggaccacctcaatgccgtcgacggcaccgccgaggcggcgaggacgcgcgccctgctggcgtcgctcgcctgcgacttgaacgtcgggacattcggcgacgcgcacggcggcgccagcggcttcggcttcaagaatgccgaccgggatagcgcgaggggtggtcatcatcaggtcgtcgaggttggagacgacggcgagggcgccgccgtgacacggctccggcgacggcgaatggtccggacgtgcgagtga

SEQ ID NO: 75984 - DNA, 1281 bp, Oryza sativa
  Clone ID: PAT_MRT4530_76019C.1
atggctgctggttttggaattcttgtacttagcttatctgtggtactccttatccgtaaacaaagaagtgacattctgaagcaacaacggaaaaaatattttaggaaaaaccaaggccttctactacagcagcttatatcatctgatgaaagagctagtgataacacaaaaattttctccttagaagagctgaaacaggcaacaaacaactttgacccaacacgtgttcttggtagtggagggcacggcatggtttacaaaggcattttatctgatcaacgtgtggtggctataaaaaaacctaacatcattagggaagaagagattactcaattcatcaatgaagttgcaatactctcacagataaatcatcgtcatattgtaaaactctttggatgttgtcttgaaaccgaagtccctctattagtgtatgattttgtcccaaacggttcactaaatcaaattattcatggtgctacaaattttggtgcatcaagattgattcctaatgatcaaacccatgttttcaccaatatacaaggcactttcgggtatttagatccagagtactaccatactggacatctgaatgagaagagtgatgtgtatagctttggtgtagttcttttagaactgcttctcagaaggcaacccatttttgaatgtgagtctggcacaaagaaaaatctatctatttatttcctttatgagataaaaggaaggccaattactgagatagttgcccctgaagttcttgaggaagcgaccgaggatgagataaatacagttgcctctatcgcacaggcatgcttgaggctccgaggtgaagaaaggccaactatgaagcaagtggaaatgtcattacaatctgtaagaaataaaggtttcagttcagctggtaccagcccagaaagcaatcatgggatgcaaccagccctatccgaaacatatgtaaatctgcatcagcctcttggagttcatacaattggtataattaatttagcatcttcaaactgcaatagcttgcagcaagaatttatgttatccgctagtttcgcaagtccctatactttgtgtgccgggcctggcctgctggcccatcgtgccgggccagcccagcgcgccggtggggaggcccaggcatggcccggcggtcaggctgggctgacacaggcccgacccaagtcgggccgtgccgtgcttgcgccaggccaaaatgccgtgccgtgggccggaccttggggcctcgggccttatggccatctatactccatacattaa

SEQ ID NO: 75985 - DNA, 1499 bp, Oryza sativa
  Clone ID: PAT_MRT4530_7601C.1
gacattatagaagagctacgacgatggatcgccctccgtacgtatgggatgcctcttgttgggcggccgtccttttttttttttttttttttggagtaacttttagtgtatatttaaattagaagaaattacacttgaatttaattacaaactgattaattacaatatgatgcaatcacacatacatacattaactgagcacaaacatacgtatatatatatacgcatgccgtacacacatacttatgcacacagtgtcacatatatatctcacacagtacatgaatatatacagagtacagtacatgaaacaaaccgacactgcagtcggaaaaaaagaaagaaaaaataaataaaaataaagccaattaaccacaaacacatacatacacgttgcggccgtatgcagatgcaaagaagaaatacttattagaagcgagcaattaataattacgtatacgcacgtaaatacggtcgtacgtatactagagctcgcagacggtacgtacgtacgtatactgatagtctgatgtacgtatatatgcatgtgataatagtacaagtttcgtgttaattacgcgcgtcaccgattaattagtataattaattaatttagtcgctgctgtggaagccgaaccttctgtcgaagaaatggccgacggcctcgaacgccgggcggaagaacccgccgctgcgccgcctctcgccgctgccgccgccgccgccgtagccgtcgccgccgtcgtacggcccatgcggccccccgtacacgtggacctcgcgagtgttgatgtacagcggcgacctcgcgccgttctggggagtccagtacccggccggcacgccgccgccgccgccgtacggcacggatccaccaccggtgtaacctccgccgccgccaccgccgtagtacggagtaccgacgccggcgccgtagagggtgacgctgccggcgttgtagccgccgttgtaaccgtaaccaccaccaccaccgtagttagcgccggcgttggccttggtgctgccgccgtagccgccgccggatgctgcgtagccgacgacggcggcggtggcggcgtcgtcgttcctgccgctggtcttcttcaggcgcgacggcggcggcggctggcgcttcgccgacgtcttgtcgccggcggcggccgcttcatactgctgctgctgctgctgctgctgccgtcctcctgatccgtaggtgtcagtggaggaattggagtagctgctgccgctgaaggatctaccgctgctgttccacatacctaacaggttctgcatagcgagagctgtggacttctcagacacgcatgcattaaaccgtgtgcacgtacgcaatttcggcagcctctctctctctctctctctgtagagtaagctaaacagtgacactgaaagagccatcaaaattaaatccatgccacatcagtcgatggatcaactacctaatattgggatattcatggccactgtatattatattcaga

SEQ ID NO: 75986 - DNA, 660 bp, Oryza sativa
  Clone ID: PAT_MRT4530_76020C.1
atcccccgcctgcgggcaggttgagagggacgacaacatcagatcacgagccacgcaatcgcaatcgcagaggggagagagagaagagggatcgaatcgaatccagtcgaggaggaggagggcccctcgggccgatccgatcgagaggaggagggatccgagctgaacgattcaacccaaggctcgcgggatttggcgcgagttgagccataccgatccctctgccttccgacggacggatccctgatggaatcggcgcacggcggatcggatcgcccaggctcaatggattcgcaggagccaagagttgatgctgaacaaaaacctgttctttctgataaccctgaagagcagaccattcctagcaaagatgagaaggtccttgaacccaccatttcacacgattcaaatggtatcaatctaccaagtgaaggacaagcccaagctggcacttccaatataggtgggggacacaatgctgcatatcctcaaaccatgtattcttctcaggcacagccattctattaccaaggtccaggatatgataacccttcaaatgaatgggatggatatcctccttatgtgagtgttgaaggcttggaagcaggtccagcggttgtatacaatgatgatcctcaattgatgtaccatggtggctat

SEQ ID NO: 75987 - DNA, 270 bp, Oryza sativa
  Clone ID: PAT_MRT4530_76021C.1
gcacgaggcgcgtccacgccggcgccgcgctgagccgccgacgtcggagcgactgcgactcctgctgtcgccgcccgccttctccacgttctcccctctgacccgtctccgtttggccgccgcccgccttctcctgctcttggctgctccacgcctccaccgatccggcgctccacccttcagcccagaggattggtaaattgttactgattagtgatattgcgtcgttatttcagaaccatgcggccgcttgtggatgctgactaccca

SEQ ID NO: 75988 - DNA, 846 bp, Oryza sativa
  Clone ID: PAT_MRT4530_76022C.1
agctactatatagatcatattgggacactttgtacaagaaagctgggtacgcgtagcttgggccctcgagggatactctagagcggcgcgtcgccgtggcgtccacctccttcgacggcgcttcgtcaggcgccgccgccaccgacgacgacgacgcggtctgcggcttcccgtgcttccccgccgccgcgggcgcgtcggcggcgccgtagtccttcttggcgccggggccgaacatgtcgggcgggaggaggacggcgtcgagcgagtacacggcgagcgggtggccgtcgcggagcggcctcccgagctcggcctccaccaccccggacgagacgcgcaccctgtcctcgccggcggtggtgacgttgacggtgcagacgccgcgctggccggaggcctgggtgcgcaccgggttggtggtggtctcgaacgtgacgaagccgtagtacctggggaggacgtggtacagcaccagctccgcctgcgcctgcgcgtccatctggttgagcgtccccggccggagccgcccgaacgcggcgtccgtcggcgccagcaccgtcagcccgtcgccgttccggtcgttgttcagcaggctgctcacctgcgacgtcacctccgtgtccttgagcagccggacgaaggtgttgtagtgcccggccttcgtcaggatctccgtcaggttgaggggccccgtcggtgccgggcttggcgcttcgccggcgccggagacgacgacgacggagacggtggctagggttagggacagtacaagaaatactgtgcttggggaggaagccattttggatgcttaattcctcgtgccgaattcctgcagcccgggga

SEQ ID NO: 75989 - DNA, 216 bp, Oryza sativa
  Clone ID: PAT_MRT4530_76023C.1
atgctggatggtgagaaggtcatccttgagcagaagatcgccgccgccacggcgaggatgaatgagctgcgacgcaccaaccgtgagatggaggtaaagctcgtcatctatgacgccattgccggcagccgcaagaaccttgatgacttgtctccgaacttcatcgacgacctccagaaggaggttgcaaagcgccgcgaggaggttaatacttaa

SEQ ID NO: 75990 - DNA, 595 bp, Oryza sativa
  Clone ID: PAT_MRT4530_76024C.1
gagttgaagtcttatctaatagtttggttttagaaataaacatgaaggttctgcttcctttaaaagatgggtgactgctatcagtttaataataaacctggtaagacatgtgatcgtgaggctaggtcagtgctagccagttgggattatttcaatataaggaaatgaacagaaagagagtcactggcttttcatatacgtatttaaaaattaggtctctattagaagataaagataagaatttttttttaatttaaaaatcagaatctttaaaacataaagataagatttttaaaaaatgctagtaccgtaataagagcagtttgatgctcagtgctttcgcacaaggagatatgattggtgtgtggtgactgacaggcctgtatgcagtttcctgtaagatatgagggtccatttatcatcttaccaaacagcagcagcaaaggtaatggtaactgactatgactaaatgctcacatcagaatgaatcatatcaaatgaatcatatcaaatgttcaatgacgtcacttgctttcgtcagaacaaaaagatattgctcactgaaaaagactcaagtccactgactgttgggaag

SEQ ID NO: 75991 - DNA, 300 bp, Oryza sativa
  Clone ID: PAT_MRT4530_76025C.1
caggatagcctacttctacgatggcgatgtgggcaatgtctactttgggccaaatcacccgatgaaaccacatcgactttgtatgacacatcatcttgtgctttcatatgatcttcacaagaagatggagatatataggccccacaaagcatatccaacagagctcgcacagttccattctgctgattatgtggaattcttgcatcggataactcctgacacccaacacctgtatgaaaatgaattacgtagatacaatcttggagaagactgcccagtctttgataatctgtttgagtt

SEQ ID NO: 75992 - DNA, 326 bp, Oryza sativa
  unsure (1)..(326): unsure at all n locations
  Clone ID: PAT_MRT4530_76026C.1
gcctgcagtaccgtccgggatcccggtcggcccgcgcgtccgcccacgcgtccgaccggacaacgaggcgccccgcctccgccgccggcggcggcggctacgcggctcggccgtgccggcgggggtcttcncggtgctggtggggccggagaaggagcggttcgcggtgcgggcgcggtgcgccaaccacccgctggggggggctctgctggaccaggcggagacagagtacgggttcaccgggtgcgagggccccctcgagctcccctgcgacttctacgccttcatggacattatgtgggagatcgatcatgcctaccccgcct

SEQ ID NO: 75993 - DNA, 1587 bp, Oryza sativa
  Clone ID: PAT_MRT4530_76027C.1
agaccaaaataatacatgcaaaccatgacataccaaagacctcccaaaagctaacacgagtctttaccaatccaaattaaacagtctaaaattaaaaggaaattaattaaagagctactcagtactcatgcatccaagaaccctagctagctagcaacactagaaactttcatcactatcgatcggtcggtcggctaattagctagctcgagctagttagtactcatccaccacttcaatcagcctgctggccactgcacttgcaaacactggagatcccgaattagttggttgttgtgaccttggtgttgaacatgtagatgtggcagtcgccgatcttgccgccggagaggtggacgaggtcgaggcggaggtcgtccagcgcgcgcgacgcggcggcgagacagccgtcgcggcggcgcttggtgagcttgatgttcacgtcgtcctccacgatccgcacgtccacgaacgtctccttgctccgccgctggatgtacgtgctccggatcggcgcctgccgcggcggcggtgccaccgcgcccatcgccgccgccgccatcacctcgccctccgagctctccgccgcctgatccatccccgccaccaccgacgacgtcgccgcgtccaccacgtccccctgcatctccctccgccgccgcttcttctccaccagcagcgtcagctcctccaccgtcctccctagctcctggatgtactcgatcgcgtctgagatcaccgtcgctctatcctccttggtgcggttggggatgaggagcatgagggcgttgtacttctcggtgagccgcaggcggcgctgcttctccttcttctcgacgccgttggccggcccgccgccgtggaagccggcggtggcgcggctacgcttcctgccgccgccggaccgcggcgtcggggagctctcgaagggtccgaccatgaaggccgactcgtcgtcggccgggccgaacacgagcgacgacgacccggccgtccttggcccgccgcggaagtacgcctcggtggccgccgccgccgccgccgccggcgggtagtggccgccgtagtagtcgcgcagcatggccaccgtctggtggtggtgcggcgccgccagctggtcgtactgcatcgccgccggcggcggcggctgctggtcggcgccgccgaagaagtagtcgacggtgggctgggaggaggccgaggcggcggtggaggaggcagccgccgcggcggcgtcgagcgagtggaggaggtggaagttgagctcccccggcatggctgctgcgacggcggcggcgaggtgcgactggccgacgtccatctccaggctctcaagcggcatcaggagctcgcactgcgggtgatacatcttcctcgcactctaccacctttttcttcagagctcagatcgattacttgagctcgcagtgcagcagggatgaaccaactagagctaaattaactaggtttgttggttgggggtgtgagctgatgagaggagaggagagaggccgatcgagaaggtgatgagaggaagagtatataaaaggggcaagggtgatattgggtaggagaaagcagaggttt

SEQ ID NO: 75994 - DNA, 369 bp, Oryza sativa
  Clone ID: PAT_MRT4530_76028C.1
atgtcgcagcagatcgcgaagagaaacaacgacaatagggctaataacacattttggaccattggatccatgttaagattcgtgcatcggcctctctcctctaactccggcgggctccccttcttctccggcgccagcgacaccccaactccggcggagggatggccgtgggcggcggaggaccggcgatgggcggtggactccggcgggcggcgaggcggcggtggcgccgccgaagctgcggggatggaggagggcgccggcgaggcgggcggcggcccggtggggcggtggtggcggggaatcgcgggagaggataggaggaggagtggtggcggcgactcagtcacggggagaaggaggagttag

SEQ ID NO: 75995 - DNA, 579 bp, Oryza sativa
  Clone ID: PAT_MRT4530_76029C.1
atggaaattcagctcaataccataagtgccaaagacctggcaaggctggttgctccagcgcaggtgcctgctaagcattttcagatgcctgcgcgtgacgtggaggctgcggcggcaggggatgaggagctcggcgcggcttcccccctccctctcggcggtggcgatggccggggacacagagcggcggcggcgctgccgcctgacgcagaggcggcggcggcgggggatgaggagctcggcgtggctttcacccccccctccctctcggtggcgtgcacgcggggaggacgagggcaccagccgccggagagggaggccgaggccgacgccgacgccgacgagcggcgcttccgccggaagatctccaaccgggaatccgcgtgccggtcccgcgcgcgcaagcagtggcacctcgatgagctccgcgcgcgtgccgggtggctccggcactgcaactgcgagctcgcagcacgcgggcacgccgcccgcggccgcgcgggcctcgtccacctcaccaacgtgcagctccgcgccaaggccgccacccccgcgtcaccgtcccccgcctgccgctga

SEQ ID NO: 75996 - DNA, 414 bp, Oryza sativa
  Clone ID: PAT_MRT4530_7602C.1
atttactgggacggagcccggatgctcggtgtcctatgcatgtcttgagccatataagatgggtgccttacgtcgctcgtgacgttacatccgaaggtgaccgagacagagctctccgacgacgatgagtgcctgatcctgcccagcgactggctatgggacgtactgaccaacgagatggcttgagaggtcgtgagggcagtgcttccacagaaacggatctgtgacaccggacgcacggcctagcggtgtgcacttcttagacgaagcgtaggaaaccgagaacggaggaacggcatatgtgaaggggataagcaaggcagagtccttagacatggcgtgctccgacgcggccatgctggtgactaaattggagctggcgctgcagagaccagacattgtcagcgtcctagt

SEQ ID NO: 75997 - DNA, 786 bp, Oryza sativa
  unsure (1)..(786): unsure at all n locations
  Clone ID: PAT_MRT4530_76030C.1
actagtggatcccccgggctgcaggtgccaactgctctgggaacagcattggacatcaacctgagcaatgcgtctctagtgtttatctcggtgacatttgctaccatgngttggagagtcccagcctccagcttctcggacgaggtgtagttatctctactggggttctcttgacagtttcaaaggagactgagtttgacttctggggattcatttttgtgacacttngccgctgttatgtcaggatttcgctggtccatgactcagatactgttgccaaaagattcttatggtatgttacctacttagctgagcttaatgctttatctttgaaaacttattccaacaataagagaggaacccacaagggcaccttaatacttctaatgtcaaattatttggtagatttgttgtgcatataataattttttattcagtcaaattaaggccttctttggatatttacctatgttttttcccgataagtaagctatgttgaaaaggttggagccttgaaggctaagtagaatttttttttttatcaaaggctcacgcccagctttttgagctaagtagaaatctttgctctgttctccaaagccatatgacctttttatatgaggagccatcagttgcttgtgcagttgatgaaatttaaacacaaattttgtgtaccataaatgtgtatgacactaatgttgttgatctttaccttagaaatatcaggaacaatgttccaacatacagactagctgtagtttgtgctggatcctcattccatttgac

SEQ ID NO: 75998 - DNA, 339 bp, Oryza sativa
  Clone ID: PAT_MRT4530_76031C.1
atggtgggcggcatgtgggagcaccggtcccacacgtccggcatgcgggagagttgccgcgctcacccagccgcaggaccgtcgcggtaccgcggtaccgcgtccccggccagcgagaccggctggtttatccttgctcccgtgcaaccgttccgcggattgggcaacctccaccgctgctttactactcgccgaccaggcacctgccgcacctcctcctcctcctctgcgccatccccttcttcctcgccacccacctccccaaccacaccgctctccactttcatctcctcccctccattgtttgttgccatcggtggccagatccgtttgccgtga

SEQ ID NO: 75999 - DNA, 264 bp, Oryza sativa
  Clone ID: PAT_MRT4530_76032C.1
atgcctgggccaagcgacggcgcgggtgggcggcggagcaagcgagctccggcggtggcagcggcgacgggcgtggtcgagcgccgccacgtggctgcctcctccccttggaagccaatcgtcggaccgcatctcctccttccggcgcctcctcactccgactcctccgcgccgccgcctccaaagccagcggtgttcccataccctaggtctaacgccatttccatactcccgacctcccgcgcgctgctccttccctcctag

SEQ ID NO: 76000 - DNA, 503 bp, Oryza sativa
  Clone ID: PAT_MRT4530_76033C.1
gttctgagttggaagcgatcgatggcggctactacgacgggacgagttgttgcactcggcgcggtgaccatggaggtggcgctgacattcctcgccggcggcagcggacgccgactgatacgacttgtgcttgaaggactgcatggccagggagaacaacatggtccactactgcagctacacctgcgacaagacgtgccagccggacaagcccacgctgaacttgtcgtcaacgtggtcccggctcaccggcgacatggagtgccaactctcctgcgccttgagctcctggcaccgactacttacggacagaaagggcgtcctggaggcctgcttagggcagtgctacgactgctgcaagaccacggcagcggccagactgccgaggcctctccgtgccggccactacgtgctctctagtcctgctgatgacgaacaccacgagacagaccaccgctacgggtgctctagcccccatgatgacgcacaccatgatccggacc

SEQ ID NO: 76001 - DNA, 1128 bp, Oryza sativa
  Clone ID: PAT_MRT4530_76034C.1
atgacggcgatggatctcggggcgtccaacactgacaccgcggtgatgaagaagctgcaggtggaaggagcactccatggctgtgagcacctggagagggaggaaggaggtactgatccccaacccgtattaggtcggatggtagttgtagaggatttcgtgcaatgcggttttttgcctccgccatctgagtttcttctcttgatcttgaatttctacaacatttcccttctgcacctcaaccccaactccatggcttttctgagcatttttgctcatctttgtgaggcctatgttagagtagtgtcttttctcgacctcttccgcttctactacaagctcgaatggatggaatccaataggatctcaggatgttgtggattccgtcttcgcgatgggatgaaggcaatctacattcccttccaatgcccatcgtcttggagccaatggaggtcgaagtggttttatcttgagataaaagacctcgaccatgtcttgatcgtcccagaggacaagcctgaacgacttagcagcaagatggtgacccagtgcgtgggtcaagtgctagtgagcgcagcgtccgaagccgatcagccgccgactcccgtttgcgagtttgcagacgccgaaaagtctgccgtcatcaatcagaagaagacgctgagaagtcgaaggaactctcgtgaagtagcgcgcgtcgatgtagaggaagtagtcgatcgcaccggttcgaccttctcctcctcgtgcgttctcctcgccgtactcccacgccgatcagcaccgcagaccagcggcgcctctaccggtatccacacggcatatcaacagttagctctccaattagctttggaaatttccaagtttcttgatattgcaggcaccacgttcctgacggataactctaccattgctgatacggcaaaaaggaggaatttcttagaggagccatgtcactggagcttaaggccattgtggactcaaatcatttccgctacctcaattgatctcatacagttcgtcaaaaaaaacttccaaagcacctacaagagacacacgaccctgacgaccgagaacgactgcacgctttgcgtcagaagcgtggtatatcgaaattgtttcactaat

SEQ ID NO: 76002 - DNA, 1210 bp, Oryza sativa
  unsure (1)..(1210): unsure at all n locations
  Clone ID: PAT_MRT4530_76035C.1
ccttttggngggggcncnnnccccttttttttccggagnaaaaaaacnggnaangggggccttngggttnttnaancgngggggcccccccccctcgggggggttnttnccnaaaaaaaaaaaattcntntttncctggttttttngggtttttnnaaccctttccccccccccccnttnnttngggnaaggnccctttnannaangggcccnttntnngggnaaattnttnggggttnccccccccctnccctccntccccttnntngggncccggntttntaattncccgggggggnaangnnaaacaagggtttnttnaaattncccaancccnnangggngggncctannggttttgggngggnnaacccnangcctttnttncccccncccnttnnttnttngggnaaaccnttttttccccaanggnaaactttgggncccnantttttnncccnaananggggnaaaaaangggggggtttttnnaatttccccnnanccctttggggngggcccccccnaaagggngggnccccccctttnccccaaannannaanggggggggaaaatttggggttttggggaaaatttggggccccttttccccaantgggncccnaaanttttttnggggttttgggnccccaaattttgggccccgggnaaaatttggggcccccttccccggggggggggggttttggggggggccccttttggggaaaantttccccngggcccccttttggggccccnaancccccccgggggtttttntttccccggggccccnaanccccttttttttgggggccccntttnggggnccccgggnccccctttgggggnnttttnaaaccccnaaanttttgggggggggttttttttttttnnttnccccnaaacccccccccccccccccttttttttngggggnttttttttnnnttcccccaaaaaaaangggggcccccntttntttnnaanaatttnggggggggggggtttcccccnggggnaaaaancccccaaanggggggggggggntttttttnnctnnggggggggggggcccccgggggggggggcccccgggggtttttttttncccccccccccgggggtttttncccccgnggaaaaaaagggggttttttnccccccccccaaaaaaaaaagggggggggggggnaaaaccccccc

SEQ ID NO: 76003 - DNA, 1071 bp, Oryza sativa
  Clone ID: PAT_MRT4530_76036C.1
atgtcggcccttgtcaggtccgtggcgtcgctctactgccaggggctccggcgaaccgtccgcctcggcggcggcgccaccgcggggacaccggcggcgcgagcaccggcgctggatcaacggaggccgttcttgtccagggtggatcgcatagaggccaccaccggcggcggcggcggcggcgcggcggacacgggaggatcaccgcgccggcatggcaaagaaggaacagcccctctcttcacctgggcaagattggtcgtcgtcctcgccgccatggcgccgttcttgcagtccaagtgggcgacgcttctccgaatccaaagcgaggtggagatggtgaaggacgcggcggagacggcggcggaggtggtggaggaggtggccgcggcggtggagaaggcgtcggcggaggtggcggaggcggagcagctgccggagcacggggcgctgcggcgggcggcggcgctggtggagcgcgcgtccagggaggtcgccgaggaggctcatctcgcccacgacatcatccacaagaacacgacggcggcggcggccaacgcaccggcgacagcgacgaggcggaaggaggcggagacggcgccggcggcgctcttcccggccgcggcgggcgcgagtgcgggcgcggacacgccgctggacggggccgtcgcggcgccggcgtcggcggggcccggcgccgcagccgccgcgtcggagggcgacgaggccggggacatcggcggggccggcggcgaggccgccgtcaccggcgacggcgccgaggcggtgggggccttggccgccgggggaggcggcaggggcgccatcttcggcggcggcgaccgcggggccatcttcggggcagcgctcgggctctgcgctgtcaccgccacggcggagaggatggcgacgagcgcggcggcggcggcggcgacggcgaggcgggccattgatgcggtggtcgtggtggtctcttcgccggacaagacgaggcagaaattcccttccaccaacgtggggcacaccacctggggacacgccaccacgacgctgacacgcgggcccggctag

SEQ ID NO: 76004 - DNA, 306 bp, Oryza sativa
  Clone ID: PAT_MRT4530_76037C.1
cctccaaagcgaaaactgatcgaatcttcaagaacattgtaccagatctaactaagagggcagaataatcgtaagtagctagctacctagctgagtgatcgatctgaccagatcaaaatacatagggacttgagtataattagttctcgtggactttgatctgattctattcgtagttgaacctgttcacgaattttatttcgtttatttcttctcatattgtgatggaccaaatttgttggcatatatattaggatcgaaaaatcgttgacgatctcgatctctgccacttacaattccccgtct

SEQ ID NO: 76005 - DNA, 1666 bp, Oryza sativa
  Clone ID: PAT_MRT4530_76038C.1
ccagagtttgcgtacacgcgcacgtccgcaatggagcgcgaggcgtggctgctatgtgcagcgctcgccgcggcgatggtctactactactactactacctcgcctgcacgacgcgccgcgcacagcggcgtctgcctcctgggccgacgccgctgccggtgatcggcaacgtgctcagcctgagcggcgacatgcaccacgagcttgcgcgcctcgcacgggagcagtacgggcccgtgatgacgctgaagctgggcctcttcaccgccgtggtcgtctcctcgcccgacgcggcgagggaggcgttcaccaagcacgaccggcgcctcgcggcgcgcacggtgccggacatcagccgcgcgcgcgggttaaccggccggtccatgatatggctgccgagctccgacccgcgctggaagacgctgcgcagcgcggtggccacgcacttcttctcgccacggagcctcgccgctgcccgcggcgtccgcgagcgcaaggtgcgggacatcgtcaactacttcgccgggcacgccgcggaggtgatcgacgtcggcgaggccgtgtacggcggcgttatcaacatcgtgtcgaacgccttcttctccgccgatgtggttgacgtcggcaaggagtcggcgcacgggttacgggaaacattggaggacatcatcttggcgatcgcgaagccgaacgtctccgaccttttccccttcctccgccggctcgacctgcagggatggcgtcgctgggcggagaagcgctacgacaaggtgttcggcatcttagatgacaaaatcaacagccgcttggccgacgccgacgctgacgcctcgacgaagaagcacggcgacttcctggactccctcctcgagctcatgtccgccggcaagatcgcctgcgacgacgtgaccaccgtaatgtttgacgccttcggcgccgggaccgacacgatctccaacacggtggtctgggcaatggcggagctactccgcaacccgagcataatggcgaaggtgcgcgcggagatggaggacgtcctcgccggcaagaaaaccatcgaggagaacgacaccgagaagctgccgtacctccgggccgtgataaaggaggcaatgcggcttcacccggtggcgccgatcctcctgcctcaccgggcggcggaggacggcgtggagatcggcggctacgccgtgccgaagggctcgactgtgatattcaatgtgtggactatcatgcgagaccctgcagcgtgggagaggccggaggagttcatgccggagaggttcctgcaaagagcagaggtggatttccgaggtaaagacttcgagttcatcccgttcggggccggaaggaggctgtgcccggggttgccgatgacagagcgcgtcgtgccattcattttggcgtcgctgcttcatgcgttcgagtggaggctccctgtcggtgtggcagcggagactttggatcttagtgagaagtttactactgtcaatgttcttgttactccactcaaggccatccccatacttgcctctcatcaaatttaagtgtagtagtggtacgtactaggatactagcatactgtctgcatgttcacgagaataggtttacttcacagtttaaatgtcaaataaaactattagaagataaaaaaaaaaaaaaaaa

SEQ ID NO: 76006 - DNA, 300 bp, Oryza sativa
  unsure (1)..(300): unsure at all n locations
  Clone ID: PAT_MRT4530_76039C.1
agtcgccaatcgccatcgtcgctgacgggcctggtaagtcgacgacngatgcccgactcgaattgacgccggccggccctgaccctgaccctgacaccgatgatgttcttgtgtacgtacgtgtgcaatatctttcatgctctgctccggtgatatatatttgtgaccagatgaattaattgtgtgatgaattatatatttgtgaccagatgaattatatatttgtacacagatgaattatatatttgtgaccagatgaattaatcaggacatcagtttgaattcaaaaaaaaaaaaaaa

SEQ ID NO: 76007 - DNA, 469 bp, Oryza sativa
  Clone ID: PAT_MRT4530_7603C.1
gaggatcacgtcaacaagatatatctttaaatgaagaaactcctctcggaacgattgtcttcgatttaaatactctctcatcatcgacaataacttatcaactattagaaagttcgtctctacttgcatttaattcatcaacaaatcaaatcacaattgctaaacgtatcgatcgagatacactctgtccaaatgatgacaattgttcgaattgttatcttcatatgaaattctacgatatgttttattatgatattcttcaactaaattttcgaatcattgatatcaatgacaatcttccattgtttagttcgaatagttattcaatatctttaaccgaaaataatatacccggaataaaaattcgtctatccaaagctgaagatattgattgttcaatcaatggtgtacaattatatgaattaacttacgttcgtcatggtcatgtcatgatttcatcaatcaatct

SEQ ID NO: 76008 - DNA, 526 bp, Oryza sativa
  Clone ID: PAT_MRT4530_76040C.1
tctcaccacccgatcgaacaccgccgtcacagcgcgtcgcggcgggggcgatgggcctcttcggcggcaagagcgcctcttcgaagcagaccgccaagctcaagtccctgatcaagctcgctgccgcgcgcgtcgccgtcgcccgccggccccgcctcgggcgccgctccattgcccgcggcgatgtcgcgcagctcctctccatcggccacctcgaccgcgctctcctccgtgcagagcaagtcatcgacgaggacaacatgctggaggtgctggacatcgtagagctctactgcaaaatcctcatcgagcaggccacgcagctagataagcccaaagagtgcggcgaggagatcaaggaggcggcggcggggctcatgttcgcgtcggcgcggtgcggcgacctgccggagctgctcgacgcgcgggccatcctggcggacaagttcggccgggacttcgccgcggcggccaaggacggcgccacggcgtcgtcgatcccacgttggtgcggaagttgtcccgc

SEQ ID NO: 76009 - DNA, 300 bp, Oryza sativa
  Clone ID: PAT_MRT4530_76041C.1
atgaccacgtccaccccattcctggcacaaatctcggcgcagatccaacggcaacaaaaacgggaaatagcaacaaaaaaatcacccgacagattcctagcaaaatcgtatacatggtatacaatgaatgttttggaagttgggccaaatcatgagcacgtgggctacaccgttgacttctgggccttgttgctgtccgtctcatgggctgcctcttctccagttgggccgtactggctgaggcctggagcctggagggcaatgcaaagcggtttcctgaacggtccggagccgccctga

SEQ ID NO: 76010 - DNA, 1707 bp, Oryza sativa
  Clone ID: PAT_MRT4530_76042C.1
atgggcctcttcggcggcaagagcgcctcttcgaagcagaccgccaagctcaagtccctgatcaagctcgctgccgcgcgcgtcgccgtcgcccgccggccccgcctcgggcgccgctccattgcccgcggcgatgtcgcgcagctcctctccatcggccacctcgaccgcgctctcctccgtgtatgtccatgccatgcttttgccttgcctgacacgcgcagagactcctccgctaacagtagccgccgtgttctgtttctgcaggcagagcaagtcatcgacgaggacaacatgctggaggtgctggacatcgtagagctctactgcaaaatcctcatcgagcaggccacgcagctagataagcccaaagagtgcggcgaggagatcaaggaggcggcggcggggctcatgttcgcgtcggcgcggtgcggcgacctgccggagctgctcgacgcgcgggccatcctggcggacaagttcggccgggacttcgccgcggcggccaaggacggcgcccacggcgtcgtcgatcccacgttggtgcggaagttgtccggcgcgccggcgagcacggagcagaagcagaggctgactaaggtgatcgccgccgagaacgatatcttactggaatttcccgagaacaccggagataccgatcagggcaagcagaatgaacaagccaggaacgtccgagctgaacaatttgtcgaacagaatgaggtcaagagggagcatcacgaggttcaggggaggcagaggtttgttgacgaagaagtgaacccgatacttgctcggctgagcgtgcaagaacagtacgccgacgccaggatggcggcggaggcggccttcaagtcggcatcgttcgccgcgatggccgcgagggcggccgtcgagctctcgcggtcggagtcgcaggggaagggatcgagaggcggcggcggcggcggctacgagaaggtgcatccggtgcagaattcggttgcgggcgagaaggaggcgccgccctcctggaagccgcacaagcctccgtcgccatcgacgtcgccgtcgtggagcgacaggagcacggcgacgtcggtatggtcggaggggacgcagaaggggaagggcgtcgtgttcgacgggagcgacgaggaagtggacgacgtcgcctggactccgcagctgcgccggcctccctacaggagggcctccactatgggcatcggcggcggcgcgtggaacggggaggccggcagggtcggcgccgacccgcagccgttccaggacggcgtgtacaacaactcgcaacacccgcgcccgccgcacaggaggcacgcctccgagctcggcgccggcgccggcgcgccccgcgagcccctggtgtccctggcgccccaacgcggccagtacagggacccgccctacaggagggaccccgcggcctacagagacatcaacgccggcgcggcgcaacggcggcagccggacggcgccggcgcgagaccgtacgagagctcggaccacgtccacccgccgtacgctcggatcgtgtcggcgctggaacgcagcaacgagcacatcgcgcggcacgaggaggtgcgcaggatcggcaccggcgagcgggtgctccaggagagggtgtacggcgccggcggcgcgccggggcgcgcgccgctgaaccaggagcaggggaggctcaactcggtgcgcacccgaagatga

SEQ ID NO: 76011 - DNA, 558 bp, Oryza sativa
  unsure (1)..(558): unsure at all n locations
  Clone ID: PAT_MRT4530_76043C.1
cccctcaagaaatctcattagttgttgtcagtatattgcaatatcaagctttgatcaggtggagacaaactccgaccgaaactaatccccaaacactagctttagtacaataatgtgtctcgttgtgctgttgctaacctattttatgtcaacacgttgcgacaaactgacagcaagcttgcttgttctctcaataatttggttttttgttccattcccaaatgagttggcaacttaattaactcgcaggaggatagatacttcctgtaatgataaacttgatttgatgctcttcatcaattgaatattcagctccaacagaaaatgaatattcactattcagcatgttgccaccaatctgaacaagtgatgctcgatgtgaaagcgaaggcacaattgcaaccccaaaataccgnggaacaacacaagatttaatcctggagatcataaaatacattggccagctaacttggtggatagtcttcctccgagcaaaatcaaaatcttaaggcttcccggagtaacccattgacaaagtacatttctatcatcttagca

SEQ ID NO: 76012 - DNA, 295 bp, Oryza sativa
  Clone ID: PAT_MRT4530_76044C.1
ccgacacatttggacgcctttgtttttcttcgcttgtatgggagtgaatgcgccgtactcatcaaaggtgttatgtttttttctgtgagcctctttttttgacacgcgatatgtattttctagaacatcagctggggtgtgtgcgggggatggaactctctcctgcaatgaggctcaccatcgcgtttgggggtgtcttgaatgcaaagaaagcgcgtggttctctttgtgccttctttacaacttcatagtgttgggggacaataactatctgtggggggggaccctctccggg

SEQ ID NO: 76013 - DNA, 356 bp, Oryza sativa
  unsure (1)..(356): unsure at all n locations
  Clone ID: PAT_MRT4530_76045C.1
gacctagctaattaaggcgcaacacataaaccctaaccgacgcccgcatacatggcggaggagcacgagtcgnggccttattacacttgaaggcctctnntntncttccgcggcagggccgacgacgctgaccagagggaggagggggagatcgccnaccacgactccggtcacgcgccgtcgcaagccaaccccggcgcgccgcacccgttcgagcacgcctggaccttatgggtcgacaactccacacgggacgtcacagcgcaggcagcgctgtggaagctccatccgacccatccacnccttntgcacctgacaggacttgtggagcccttataacaatatgcatcacccaa

SEQ ID NO: 76014 - DNA, 385 bp, Oryza sativa
  Clone ID: PAT_MRT4530_76046C.1
ccccgcgtccgccccgcgtccgtcgtgaattcttcctgtttagtttttttgttcctgcaggaggcatatgcttcgcccggtagaaaaaaatatagtatgatcgtagtagacaactggttgtttgtaataaacataagccctttggcccctttcgtacatcatgtagtagtgagcgtggggtgtgtgcctattgggcattcacctgacatgccgatggcaatgcgatcgttgcctcgtgtttggctatttttgcatcttggctttgtacagcaatgcaccggttgtcgccgtacattactgtgcgcgatctccaccgccactggagtggtgcacttaatttcgatggtgcttttcgtttgcacggcagctgaccgtgaccgggact

SEQ ID NO: 76015 - DNA, 176 bp, Oryza sativa
  Clone ID: PAT_MRT4530_76047C.1
tcgattgcgggcggcggggggctcaaccggtcgtcgtggagggggcagctgccgccgcaggagcttctcgacgatctctgcagccgcttcgtgctcaacgtgcccaaggaggatttggagtctatttagcggatcacttttttgctttaatactaccctttatcacatccaattac

SEQ ID NO: 76016 - DNA, 462 bp, Oryza sativa
  Clone ID: PAT_MRT4530_76048C.1
gtcattcgctgaagtagcctccatcacgccggcatgcccgccgccgccggcgagcaatggagtcaagtaaaccgccgccgtccgccttcgtcgacaaccacatgatgaccaacccgaccatcaagctcggcgccgacctgcgacggattaagcatttcgtggcggcaagtaggatctatgtgaggattttaggggttggggggggggggggtcaatcagagggtttcatgggtgctcgtcagagcctgttggattttgacgccatccaggagtcctcataggcaacactagttcactcataactcgtttatgccaagtttttctgcttgagagagtttgtccgcttcagaggaatgcagggatttacggatagtgactaatgagaatgtgaatcgatcaaatacgctcagtgtgactaattcagtgcatacggcaagctgctttatgttatgccccccattt

SEQ ID NO: 76017 - DNA, 1491 bp, Oryza sativa
  Clone ID: PAT_MRT4530_76049C.1
ggagaaggggttcgagtgagatagaatccggaggaggaggaggaggagattgcggcggccggacggcggcggatcggttgattgattgattggttggttggttggttggtttgttcgcttcccttctttccagaggtttccacctttcccgcatcttccgccgtggggaagggagcaatcggcaagccaatccaatccggttgcttctcctccaatccaacctcgtcggcggcggcggcgacccgcgccgcgcaggctgttgagttatcacgtatttgattatggatctgccattgatggctgctaaagcctataagtacaaagcagaactacttgttaaggactacctgctagcagattcgtatgttccatacgcttctgtgcttggcggaattctgatgtgcaagttgtcatatgatttcacacgctttatcagttcattctacttcaaaggctatggttctctcacaaagatgcaaaaggttgaatggaataacaggggcatgtccaccgtccatgcaatattcattacacttatgtcagcatacttagtcttcttctcgggtttattctctgaccagcaggatggaccagtaacatttagaagttcgagcctctccaatttcacgctaggggtctcagttgggtatttcattgcggaccttgccatgatactatggttttacccttcactcggtggaatggagtatcttgtccaccatgtattgtcacttactgctgtaacgtatactatgctttctggggaaggacagttatacacatacatgagtctcatctcagagactactacacctggaatcaacctaagatggttccttgatgttgctggaatgaaaagatccaaaagatacgttgttaatggagttgcaatgtttcttacttggctggttgcaaggataattttgttcatgtacttgttttatcagatctttttacattatgatcagattaagcagatggagacctttggttatcttctggtttgtgttgtgcctgccatactgttcgtgatgaatatgatatggttttccaagatcttaaggggcctcaagaagacactggccaagaggcattgagtggggcaaggggtatgcatgtacagccacgacaaaccacctatctgtaaattcactcagcaggccagcagcctatagcttctcattagtcacgatggctaatcctggtaatatcagcttggccattaagatccagatttatgattgaatgcccagctttttatgcatggatgatatattaatttgtatatatgttccgctatggctgtatgttcttaatacccatcttctttttctcggtataaatgattatatcttagttttaacttaaacaactatttgccccaatttcagtcacattgtcaacaaaaaaaaaaaaaaaaaaaaaagcttaggccatcattcccaagaatagtttgatcatcaaaaaaaaaaaaaaaaaaaaaaaaaaaaa

SEQ ID NO: 76018 - DNA, 1575 bp, Oryza sativa
  Clone ID: PAT_MRT4530_76050C.1
atgccgtactataataactcagtgccttcagggggaaatggtaggttctatataacacaaaatcatcaggatgctcactacgcttcttctgatgatgggtcacagaagattggttcgagccctcaagcatttgaagcgccgtactgcactctagaatcatcctcagcaaatggtgctcatcctgcccatagctctgcatcttctcacagcatctctcctattagcgggagccccctgtctcatcatgatagccactcagaccacacgtacaattcccctccaagtgcatcctgtgtcacagagattacagatctccagattaaactgagggagctggagaatgcaattcttgggcctgagctagacatagcttatgacagccctgagagcgccttgcaaccaaacataatggcaacaccagaaaattggagacagcttctgggaattaatacaggagatttgaagcaagtaatcatagcatgtggcaaggctgttgccgagaatgatgttcggctgacagaactactgatatctgagttaggtcagatggtgtctgtctctggtgatccattgcaacgattgggggcttatatgttggaaggccttgttgccagactttcttcctctggcagtaagatatataaatccttgaagtgtaaggagcctacaagctctgagctcatgtcatacatgcatcttctttacgagatatgcccattcttcaaatttggttatatgtcagctaatggcgccatcgctgaagctattaagggagagaactttgttcacataattgacttccaaattgcacaagggagtcaatggatgacattaatacaggcccttgcagcgaggcctggaggaccaccatttctacgaatcactggtatagatgactcgaattctgcttacgccagaggtggtggactggatatagttggtatgagattgtataaagttgctcagtcttttggtctgccctttgagttcaatgctgttccagctgctagccatgaggtttatcttgagcatcttgatataagagttggtgaagttattgttgtgaattttgcctatcagctgcatcacactccagatgaaagtgtaagcacagaaaaccatcgggataggattttaagaatggtcaagagcctctcccctaggttggtgactcttgttgagcaggagtcaaatacaaacacacggccattcttcccaagatacttggagactcttgactactacacagccatgtttgagtcgatagatgtcgctctcccaagggatgataagagacggatgagcgcagagcaacactgtgtggcgcgggacattgtcaatttaatcgcatgtgagggtgctgagagggtagagaggcatgaggtctttggaaaatggaaggcaagattaacgatggcagggtttcggccatacccgctgagttcagtggtgaacagtaccatcaaaacgctgttgcatacttacaatagcttctacaggcttgaggagcgagatggtgttctttaccttggatggaagaacagagtattggttgtatcttctgcatggtgttga

SEQ ID NO: 76019 - DNA, 739 bp, Oryza sativa
  Clone ID: PAT_MRT4530_76051C.1
ccacgcgtccgatccggttgcttctcctccaatccaacctcgtcggcggcggcggcgacccgcgccgcgcaggctgttgagttatcacgtatttgattatggatctgccattgatggctgctaaagcctataagtacaaagcagaactacttgttaaggactacctgctagcagattcgtatgttccatacgcttctgtgcttggcggaattctgatgtgcaagttggtaatgtcacttctgactctcacttttctgttaattatcatcattctactgtgtacctgtgcaataacatgttcatagttgtgcgtatgtgtatactcaaagagaatgccaacatctatgccattgctcttttgcattggaatgtaagacctttttttttcattcactggttttatttgttccattaaaatcatggtcaatgatgatggcacataattaatatagcatattatttccaacatccatttcatagtccttgtaatggttttgttatcttgactattgtgttcttttgctagctcagtcatatgatttcacacgctttatcagttcattctacttcaaaggctatggttctctcacaaagatgcaaaaggttgaatggaataacaggggcatgtccaccgtccatgcaatattcattacacttatgtcagcatacttagtctttttctcgggtttattctctgacccagcggatggcccagtaccattttagaagttcgagcctt

SEQ ID NO: 76020 - DNA, 422 bp, Oryza sativa
  Clone ID: PAT_MRT4530_76052C.1
gatgatcaaactattcttgggaatgatggccaaagctgatggcaaattacagcaatgtgttgacaatgtgactgaaattggggcaaatagttgtttaagttaaaactaagatataatcatttataccgagaaaaagaagatgggtattaagaacatacagccatagcggaacatatatacaaattaatatatcatccatgcataaaaagctgggcattcaatcataaatctggatcttaatggccaagctgatattaccaggattagccatcgtgactaatgagaagctataggctgctggcctgctgagtgaatttacagataggtggtttgtcgtggctgtacatgcataccccttgccccactcaatgcctcttggccagtgtcttcttgaggccccttaagatcttggaaaaccatat

SEQ ID NO: 76021 - DNA, 168 bp, Oryza sativa
  Clone ID: PAT_MRT4530_76053C.1
acgtccgcggacgcgtgggcgccgactggggaaccatggctcccaacgcctccacggacgtttgtaaaaaggggtactggtggatccacagctcgttgtttccatacttgatggtgaatctgtagatgcttaatgccatctagaactatgtattcgagaaccctttct

SEQ ID NO: 76022 - DNA, 277 bp, Oryza sativa
  Clone ID: PAT_MRT4530_76054C.1
atttgacgcgatggtgcggagcgaccgcaggggcgtgaggattggcactggcggtgtccacggatcactattaatcaagacgctttacaaccacacgtgcgatatgctcatcgatgtgagcgcgtcctcatagatgccccgatcgaacctgatcgctatgagggacactgcggctagggtgcgcacggtgaatcagcactcttggttcgtgcaacatgatacagtggagccctcaagttgtatggggctgttaactactattagatgctcaccttct

SEQ ID NO: 76023 - DNA, 315 bp, Oryza sativa
  Clone ID: PAT_MRT4530_76055C.1
atggagatccaatatgagcttaattcggatagggatccgaataggagtcccacgggccttggagaaccgagtcatagatcctatatattcgtgaggggtgtgaccggcggaggcattgcatcaccgtgggagtacggcgaggagaacgcatgaggaggagaaggtcgagccggtgcgatcgactacttcttcaacatcgacgcgcgctacatcgcgagggttccttcgcctttttagcattttcttccgctgcgcagcgcgtcaagtggtaactgcacattaaaacaaaatacgacctctgctgcacctgtaaga

SEQ ID NO: 76024 - DNA, 323 bp, Oryza sativa
  Clone ID: PAT_MRT4530_76056C.1
aaatactacaaaacatttcttatcacacatacatattttaattcaaatggggtggccacttaatataatgtgtggtttcatactccatacacattcctccccactcataaaataaaattatactacacataacaaaaaccaaaaaaacacctttcctaggggtgtttacaaacaaaaacatacaccatttaaaccccatgctaaaaattctttttttttatttcaagctctccaaataaaacacaaccccttatttttttttattaaattttcagagacaccaacaaacaggccacaacactataaataactaaacaatcact

SEQ ID NO: 76025 - DNA, 5348 bp, Oryza sativa
  unsure (1)..(5348): unsure at all n locations
  Clone ID: PAT_MRT4530_76057C.1
atgaagttggtccaagctcagctcaaggcgataaaggcatcgctggtgaaccaggcgacaaaggtggtagttttcaggagggcatggttgaagatcttggtccagatggcagtggattacaacaacagttttacaacttccaagatcggattgactatgttgtgcaacatgctttgatcaatcagttaggagtcttagtcaatactttaaccaacatggtgaaaacagtggttgatggcacaatagctgagcatcaagctacacgaccagtgtgtttgccaggtggcgtttttccaaattataggcctttggttacaggcaatcaacagggttcttccaacccaccatcaactcagccgatggcacaggctatagcttctgctccaactgcaccggctgtaacatcatcgggacaaaggcaaatgataaatcctcgactgctaacctgggagcagccgcagcatagtgggcaaaatatcaatcggttgattcaggaacagagtttgctaaatacatcgtctaggttgaggacacctgataatcagcaaaggcatcatgttgcaactcaagttgtccccgagcatttggttcataatgtgcaaccagatcagtcggttataccccaaattattcctgaacatttggtgcgcaacatccagccgaatactcagaattatcatgggggccacttgaattatcattactagcctccttcacctcatgtccaccaaggggggtctcctcaacctcaatttgctccttagttcaatcactttgagctgatacagcagcagacgcatggggcacctcagcagagacagtgggccgacatgatcacagatgtgatgagggagcaatttgggctgaagccaaaggatactgggaacttatatcggcatccataccctgagtggtttgagagggttccattgcctgcccggtacaaagttccagacttctcaaaattttcaggtggaattcatgagatgaaactttctgacttgacagcaattcggcaaaggcatgatgaatctgtgcaagattacattcagagatttagagagacaaggaataggtgctacagcttggctctaacagattctcagctagccgatttggcttttcaaagtttgatagctccgattaaagagaaattctcatcccaagagtttgaaagcttatctcaccttgcacagaaggtgactctgcatgagcaaaggtttgcagaagctaagaagaatttcaagaagatcaatcatgtgtatccttacatgtatggttctgacaaagaggatgacaccgaagtagcagcagccgagtgggttagaagcaaaaaggttgtgccatgcccatgggtgaggagttctggaaaagatgaaagatttgactttgatatcaccaaggctgataagattttctacttgttacttcgggagaaacagattcaacttcctgccagtggccattgaagggggaaagattaaatttgatgattcgaagaagccgatgaagaggaaatacgacaagcagcagcaggaaaggtattgtgaagaagatgatggtggttttaatcctcattgggactgcgagtttttcagattctgttggaatgaaggtatgaggctgccatctatcgcagattgtcctggatgcaatgatgttgcagaaagttcaagccgatcttacaatagaagcaatcggccgaggcaaacaagaattcctgttcatcagaggttgggcctagtgaacnaagatcgtgatcaagaagacgatgaggacagaaaaactcaatggtgtccttatggtatttttacaaagaatcagaagagaagggttcaaaggttgaggaatagagaatgttttcgtgaggtagagcaagagatcaaccatcggctgaagaaagcaaagcccaggcaagaatggcgtgttaaaaggcaggatccaacagccgatgaggctaaagccaatgaagcaaagaggctggccaaaggaaagagtgtcgtgactgcatcggttaacatggtttttacactgcctgcggaatttggagctaaacaagccgatgttgatgaagttgaggaagcttcggctaaattggttttgtcaccagagcaagcagtttttgaaaagccagaagggacagagaatcggcatctcaaaccattgtacattaacggttatgtcaatgggaagccgatgtctaaaatgatggttgatggtggggccgctgtgaatttgatgccatatactacgttcaggaagttgggcagaagtgctgaagatctcatcaagacaaatatggttctcaaagactttggtggcaatccatcggaaacaaaaggagttttgaatgtggaactaacaatcggcagcaaaaccgtccctacaacattctttgtcatcgatgggaagggttcctatagcttgttgcttggaagggattggattcatgccaattgttgtattccttcgaccatgcatcaatgcttgattcaatggcaaggcgacaagattgaaatcgtgccagccgacaggtcagttaacaatgctaatgtcgatttagctctttgggagatggacggtattgattgcttgtctggaaagggcgtcgtggagggttcaagcgtctacaccaaggatacagtagatgatctcgatgacaagcaaggacaaggtttcatgtcggctgacgatctgaaagaaattgatataggtcctggtgatcgacctaggccgacatttatcagtaagaatttatctcctagattcagaaccaagttgatagagcttttaaaagaatatagagattgcttcgcttgggagtattatgagatgccaggactaagccgatcgattgttgaacatcggcttcctataaaaccgggggctagaccttaccagcagccaccgaggagaagcaaagccaatatgctcgaaccagtcaaagctgaggttaaacatttatatgatgctggtgttattcgtccatgccgatatgctgagtgggtttcaaacatagttccagttatcaagaaaaatggcaaagctagggtgtgcattgattttcgagatctaaacaaagctaccccaaaggacgagtacccaatgccgattgctggtcaattggttgatgccacctcagggcataagatattgagttttatggatggtaatgctggttacaatcagatctttatggcagaagaagacatttataagacagcttttagatgtcctggtgcaatcggcttgtttgagtgggttgtaatgactttcggcttgaagagtgctggggctacatattaaagagccatgaattatatattccatgatctgatcggctggttggttgaagtttacattgatgatgtggtggtcaagtcaaaagaaatagaaaaccatatagccgatttgaggaaggttttcgagagaaccaggaaatatggcctgaagatgaatccgacaaagtgtgctttcagcgtatcggctggtcagtttttgggatttcttgttcatgaaagggggattgagataactcagaggagtgttaatgcaattaagaagattcaacctccggaggacaagacagagttgcaggagttgatcggcaagataaattttgttagaaggtatatatctaatttgtctggaagattagaacctgttacacctctgttgatattgaaagccgatcaagaatttacttggggggcagagcagcagaagactttggataatattaagaaatatcttagctctcctccagttttgatccctccacaaaaggggataccttttagattatatctgtcagctgagacaaggtattctcctatggaaaagttgtgtttgtgcttatatttctcttgcacaaggttaaggcattatctattgtccaatgaatgcactgtgatatgtaaagccgatgtggttaagtatatgttaccggccccaattctaaaaggaagggttggaaagtggatatttgctttgatagaatttgatcttcggtattaatcaccgaaggcgattaaggggcaagctatagccgattttattgttgatcatcgtgatgactcaatcggctcggttgaaattgtgccatggactttgttctttgatggatcagtatgcactcatggctgtggtatcggcttggttataatttctcctcggggggcaagtttcgagtttgcctatactattaatccctatgcaaccaataatcaggttgagtacgaagcggttctcaaagggttgcaattacttaaggaagttgaagccgatgctatcaagattatgggcgattccttgtaggtgattagccaattggcaggggaatatgagtgcaagaatgatacattgatcgtctacaatgagaagtgccgagagttaatgaaaggatttcagctggtgactttgaagcatgtatttcaagaacaaaatatcaaagctaatgacttggctcaaggggcattgggttacaacccgatgatgaaggatgtcaaaatagaagttgccacgataacagccgatgattggaggtatgatgtgtatcattatttgcagaatccatctcaatcggcttctcagaaattgcgctgtaaggctttgaagtacaccttgttggatgatgagttgcattatcggacgattgatggagtgttgcttaaatgtttgagtgccgatcaagccaaggttgcaataggcgaggtacatgaaggaatttgtggaactcatcaatcggctcataagatgaagtggttgcttcgacgtgcagggtatttttggctgacaatgttggaggattgcttcaaatattacaagggatgtcaagattgtcagaagttcggagcaattcaaagccgtggccattcagaggttggggaatcgatatgatcgttggtattcctcaaacaattacaaccgatgaaggctcgatctttgtgtccgatgagtttgttcagtttgccgatagcatgggtatcacatttttgaattcttcatcatattatacacaagctaacgggcaggccgaggcgtctaacaagagtttgatcaaattgattaagagaaagattttcgattatcctcggcaatggcatactagattggccaaagcattgtggtcctatcggatggcttgtcacggttcgatccaagttcctccttttaaacttgtttatgaacatgaggcagttttaccatgggaagtgcgaatcggttcaaggaggatagacttacaaaatgagttgacagccgatgaatattacaatctcatggccgatgagagggaggacttggttcaatcaagattgagagcccttgcagaagttactaaggataag

SEQ ID NO: 76026 - DNA, 1425 bp, Oryza sativa
  Clone ID: PAT_MRT4530_76058C.1
atggacatgttgaaggagataaatatcatggttgaagataacaaaaatgaagatggtgtaagaagctacaagattgaggacccctttgaatggcggaaccggatgagagaaatagactcaaaagaaaaattccaacaggttagagctcttgctaagttcctccaagatctatatgcaatgagccattccataggaatttcatgtggccatgagacttcgagtactcaagaaggcttccctgaggctttgggccgggacttggagactccgggcctatgcaagccaggcttccaagaggctctggaaataacatccatgcacccgagaagggactcgtcggcgtacaccacccgacccccgccgccgccgccgacggcagatggcggtggtaatggagggaggattagccccgcggtgttgttcatcatagtgattcttgcggtcatcttcttcatctccggccttctccacctcctggtgaggctgctgatgaagaagcagcaccgccgtggtggagccgagaatgccgccccgtcgccgcacagccggcatgtcgggcgggacgccgcgatggaccggcagctccagcagctgttccacttgcacgattctgggctcgaccaggcgttcatcgacgcgctgccggtgtttgcctaccgcgacattgttggtggtgacaaggagccgtttgattgtgcagtgtgcttgtgtgagttcgacggtgaggacaggctcaggttgttgccggtgtgtggtcatgccttccatctgcattgtatagatacatggctgctgtccaattcgacgtgcccgctttgccgtggtacgctctatgtccccggattgaccatagagagcctgatgtttgattttgatgagaggttggaggagggccggctgtcggaagaatgcgaggatggattccaatcttccagacagaagaagcccatggatgaggaacaaacagtaactgagaagagagtttttcctgtaaggcttgggaagttcaagaatgtcgggaacactggtgtgggtggtgttgacaatggcaatgcagctggtatagtgagtagggaaccaggggagagtagcagtagcagcttggatacgaggaggtgcttctccatgggcacttaccaatatgttcttggggcttctgaacttcgagtggctctccagccaggtcgtaacaaaaatggcgtgggcagcaggttgaagggaagagctactggcataagctctgtcaatgctgaaattatggagggcaagaggatttgtgcaaagagtaaaggtgagagcttctccatgtcgaagatttggcagtggtctaatgtgaagggcaagctgccagctgtgctggttgttgaatttcttaactatagctattcttttggtctaatttcacatgtgtatgtttttcactag

SEQ ID NO: 76027 - DNA, 354 bp, Oryza sativa
  Clone ID: PAT_MRT4530_76059C.1
atgaaggggggagggcagtgcggacggctgtcagctcccctccttggacgttgccaccgctgcctccttgcacgcgccgagccgctgacggccactggctcctccttcttgcatgcactgacagtcatcggctccacctactttgacgccgccgcggcctccttacgcgccgagccgccgacggcagctggttcctcctcgtccttgtgcacacggacggccgtcagctcctccatctcctccgccgctgccgcctccttgcgcgtgctgagccgccagctcctgcttgcgcatacgtgctttgaggagatggagagggacaggccggttggacgagtgaataaggataagtag

SEQ ID NO: 76028 - DNA, 550 bp, Oryza sativa
  Clone ID: PAT_MRT4530_7605C.1
ggaacatcaaatcaaatgcacagccaaaaattataaagtctactcccagtagtatcctgtaccatcgccctaataagaaatttataagtctgtattatcctgtaccatcaatttactacttctagtatcatacaataggcaaggtactcctactatgtaggagtagtagtagagtattattattgtttctgtggtaaacaatggatctatcaatcaatcgggcagtcaaatctactcctattcgcagtcaaatcggcaagcagcatcattacggtgcagaaacggaaggcggagacggaagacggcggggtgcagatccggtgacccggcggcatacgggtccctggagcacctctctgcatccctacctccttatctctcttttgcagagaggttttccacatatagttcaccttccctctgcaaatttcccgctccatcagattccttctcctcaaaccacacacacgccctgccgcaaagagagagagacgcataggagtatttgactcctcagatcagatctgatcccttcggatgtgaaatccca

SEQ ID NO: 76029 - DNA, 553 bp, Oryza sativa
  unsure (1)..(553): unsure at all n locations
  Clone ID: PAT_MRT4530_76060C.1
ccacgcaacatttagtatgatacactctacagaattagagaatctgccatcatcataagaaacatcacagtggacgtgagtactgggattacancgattgagtctgttcaggggttcagaataggaaaaacactcttggggacctagagatcagagggaatncgaccagatgcgcagcaagctagcgcgcgggaaacatggacactcacgattgcgttgccatgtccgtcggcctgcgcaaacggacggcgccgggggcttaaagacactgcttcttgaaatgggatccgcccctgatgaatcaaccctggtggtaagaatggcagccacagggcaagtcgccaaacgaaggggaccaaacccaagaagaatccaaatggtcatttccaggcactggctccttggttgtaggatgaaagggacgccgcccaaaggctctctgggctggggttggatgcccaagtacccggtgaatgggggaatgggtggcccagggtgggacccagggaaaccaccgcaaaaaaccaaattggtcaggtgggggcaagggata

SEQ ID NO: 76030 - DNA, 1431 bp, Oryza sativa
  Clone ID: PAT_MRT4530_76061C.1
atggctgagaagaagggggtgggttcacttcttcccgggctcgccgtcgtcctcgttggcttcgtggtcggcggcgccgggagcgacgaccggttcgtctacgccggcttcaccggcgcgccgctcgcgttggacgggacggcggccatcacggcgagcgggctgctcgagctgaccaacggcacggcgcagctcaaggcgcacgcggtgcacccggcggcgctgcgcttccacggcggcggcggcggcggcggcgcggtgcgctccttctcgacgtcgttcgtgttcgggatcatcccgccttactccgacctgagcggccatggcatcgtcttcttcgtcgggaagaacaacttcaccgccgcgctgccgagccagtacctgggcctcctcaacagcaccaacaacggcaacaccaccaaccacatcttcggcgtcgagctcgacaccatcgtcagctccgagttccaggatcctaacgacaaccacgtcggcatcgacatcaacagcctcaagtccgtcgccgtgaacaccgccggctactacgacgacaagaccggcgccttccacgacctgtccctgatcagcggcaaggccatgcaggtctgggtggactacgacggcgccaccacgcagatcagcgtgttcatggctcctctcaagatgtccaagcctacgaggccactggtgtctgccgtgtacaacctctcacaggtgctcgtcgatccggtgtacgtcggcttctcgtcggcgacgggcacggtgaggtcacgccactacgttcttggctggagcttcgccatggacgggcctgctcctgccattgacatcgccatgctgcccaagctgccgttctatggcaccaaggcacggtccaaggtattggatatcgttctgcccatagcaaccgcggtgttcgtcctcggtgtggttgtagtggtggttttgcttgtcaggaggagattgaagtatgctgagctgcgagaagactgggaggttgaatttgggccgcaccgattcacatacaaggacttgttccgagcgacggaagggttcaaggccaagatgttgctgggtataggaggatttgggagggtgtacaagggagttctaccgaaatccaatatggaggttgcgataaagaaagtgtcccatgaatcgaggcaaggcataaaggagttcattgcagaggtggtgagtattgggcgtcttcggcatcggaacctcgtgcaattattaggttattgccggcgaaaaggtgaacttattttggtttatgactacatgccaaacggtagtcttgataaatacctatatgatgataagaacaagcctactctggattggactcaaaggttccgcatcataaaaggggtagcatctggcctactgtatattcatgaggattgggagcaagttgtcattcattga

SEQ ID NO: 76031 - DNA, 330 bp, Oryza sativa
  Clone ID: PAT_MRT4530_76062C.1
atgggtccagaccggacagagaaggctggccggaagttccggtccctggacctggaacttccggaccctgcattggatgaaatttgcctaagtgttggccggaagttccgagggtcaggaacttccggacttcctccagttcaaaaatgtgtcgcccgcgagcttccgaaatcttgtggatgtcccgggaaagtttgtgaaggttttcctcacccctgcaaggaaacgaggtttttctgttgcccggaagttccggtgctaagaacaccggaagttccagactgtctgagcagaccggaagttctggtgttctacaccaggaggttctag

SEQ ID NO: 76032 - DNA, 294 bp, Oryza sativa
  Clone ID: PAT_MRT4530_76063C.1
atggcgtcccatgacgacggcggcggcgatgatgcatgggtcagcagctatgcggactcactcttcgaggggatggtccttttcaccccatccctctccgttgatcctgatcccaagccgcctgtcgtcaaagcccctgaccccgagctgcctacccctcaccacgatgccgatgccgtcgccgttgccggagctaacgtggcggcctcccacctcgcctcaacccgcggctccttccccttcaccagccgccgcccccgctttgctccgtcggccgccggaggaggagcgtag

SEQ ID NO: 76033 - DNA, 285 bp, Oryza sativa
  Clone ID: PAT_MRT4530_76064C.1
atgccgttcctggcgtgggctgacggcgttggccttcccgagcagcttcgtgaccgcacggccatagagcggcgactcggcgccatgcagctggatgtcgaggtgaagctgttggggcgcgacggcggctcggcgcccaggccgacgtggatatcctgcaggctgaggatggatgaagcgcagccacccgacacggcaccgtgcactgtgctggctttgcagaactggttttcccagttacttcctgctgttctgaacaagagcgaggttgaatgtcaacactag

SEQ ID NO: 76034 - DNA, 1818 bp, Oryza sativa
  Clone ID: PAT_MRT4530_76065C.1
ctaaaccgcgaaactcccaacgcgcggcccatcaaaatcaacgctcccagccgtacaactcccaaccgggccagcccagccgcaggttgatctcaagctgcgcgcctgcgccacgccaagccttcgctccgccgacatgagccgaagcagatcgtcgggcacgccggccccctcgcccatcgcgttcaccgccaccgtcaaagccttcctcgccccaagccggaagctgggagtgctcccgtacgccagggggatgccggcataggagagtctccaccatacggcacataactgatcccgtaagacgtgggcaccagcgtagagagatttacgcagatacgagaccaacgagcaatggctgtgcgcggtctcgccacgccggccgccgccgctggtggcgcgtccaccatctcccctgtcttcaacgtcacactgcacgccaacaaccggcacggcacggagagatgctaccgcagcgggcttcaccgtcgcgtccggccgcgcgccgggcttctgagtgccggggaaaggggtccgaaagatgccgttcctggcgtgggctgacggcgttggccttcccgagcagcttcgtgaccgcacggccatagagcggcgactcggcgccatgcagctggatgtcgaggtgaagctgttggggcgcgacggcggctcggcgcccaggccgacgtggatatcctgcaggctgaggatggatgaagcgcagccacccgacacggcaccgtgcactgtgctggctttgcagaactggttttcccagttactgtaagagtaagacattgcgtgcgcgaagtcctcgcggaacacctcctcgccgcgctccccggccgcgtacacgcgcacccaccgcacggtactccccgccgtgagctgctggtccgaccgcaggatgccccgtccaccgagaagcttcgcgtagtagtgcgcgccgaaacccacctccctcccctgccggtagtaccccatctccatcggcgcggcgccgtcgccgtcgcacaccgcgcgcatctcttcgaccatgtcggcgtcgatggtgtcgtcaggctcgcctgtcccggcgaagttgtcgatcctgtccttgaagaatctgcaatgcaccttcccgatgctatgtgctcctaagagcgcgacggtctcgcgctcggtgaagccgcggcgggcgaacgcatcgagcgtcacggtgtaggtggcgttcggcgacgggatgcgcgcgcccacctcgtcgtagaaggccctggcgctgtcgctgcgtccggtgagcacgggatagctcggcccgcccgctaggacgaggctgtcccgcgcggcgaggaccaggatgtcggcgcaggagacggtccgcgggcacgccgcctccagcctcgccttgatcttgtcgacggcgccgaagcctctcagcgactggttcggggccgcttccctctccgacttgtcgccgttgatgcggtccaggagcaccgaggcgtcgcagccgtggatgaagcagtcgtggaagaagaggcggacgagcgcggcggcgacgttggggttggcgaggtagagctcccgcacggtggacgacacgatcccctcggcgtcggggcaactctcgtcgtagaacccgtacaccagcccgcgcggctgcgtctgcgggaagaaggagaaggacgccgagccgtcaccgcctccgccgccgtcctcctcgtcgtcgagcaggagcgcgtacgacgaccgtctggccaccgcacagatgttggccgtgcacaggatcagcgagacggccgcaaagcgcaagccagtcgccggatcaggccgtcgcat

SEQ ID NO: 76035 - DNA, 1317 bp, Oryza sativa
  Clone ID: PAT_MRT4530_76066C.1
aattgcgataccgaagtacgtactaggacaaaacctggcgatggcggtaattagtttcttattaaaggaattgtctagagttcgaaaattttgatttgaaggatgaaaacctatggtctggcttttgcttctatcgatagaaaatccatcttcaaatcttacagattttggaccactgaatgagctttgtgattcatgctccaggccttctcctccaactccggcgacctcctcttcttctccggcattggcgacaccctcgctaccggagacggggaagacggcggcacagggatagctcatcgccattggcgtggactcctttcggctagccagcgaggcaggtggtgtcacagcggggccgtggcggcggaatgcacgaggtgacgagggcgagggaaacaggaggaggagaggagttagggttatgggatccgcacgaatcttaaagtatatccaatggtcttggcattgtcgagctcccaaggtgtcgactgacaagtattgatttcttatagcacgcaaccagccaaaaagccattgttgttcgtcaacatctacttcaccttcaccaatatgtcgaacactggagacaacggcaacactggatacaagaagaaggaggctcccgtcaacaccaacggaggcaatactacctcaaactccagcggaggaccattcttggggctgaggtggatgaactacctgaggcctgacctgaagaaggagcccatctccgatcgagaggcggagaccatcctctccctgcagaaactcctcggcaacaggtggtcggtgatcgcggcgaagatgccgggcaggacggacaacgagatcaagaactactggaattcccgcatcaggaagcgtcagtccgccgccgccggagctaaaggcgagccggcgccggccacggtcatggagaaagaaccgacggccaatgcggccaccgtggcggcggcgccggaggcggcatctcctcctcctcctcctatcccggcgcggctcccgatgttctcctgccaactgctcgacggaggcggcagcggcggcgccaccgccaccacacagtcgccgccgaacgccggttcatcggatatcagcgaggtgagcgcctgcggcggcaacggcggcggcgaggactcctcccgtgactactgcttctccggcggcgacgtcgacggcgacggcgacatggtccacctcctcgcgctcgatgacctcgacttgctcgtcgatgtccccggattgctcgacgttgatgcgtgggattgcgagctgtaccgtgcagattattcgacgagtagagctcgatga

SEQ ID NO: 76036 - DNA, 928 bp, Oryza sativa
  Clone ID: PAT_MRT4530_76067C.1
cgtcaacaccaggctcgccggcctccactttcccctctcccaccggcgcggccggccgccactccctctcaggttcacggcaatgtcgacccgggtctcggtctggatcaacgtcagcagcggcctcgacagcggacgccagcgggggcgacgtcgggaaggggcactggtggcctggggaggagcacagcgaacaagcccggtggaggcggcggctcggatggagagcggaggatggcaccggcggacgtcgatgatagtcagagaggagctggaggtggccggcgacgggcgccgtgccagtggagttgaggcccctggcggcagcggcccgggtggagagcggacgatggcgccggcgaacatcgatgatagtcggagaggtgctggaggtggcctgcattgtgcgccagcccgtctgccggcgcggcatgatccgacgggcgatggcggaggccaaggatggcaagctggcgccggcctccacggcacgccgggcagcgcggcggtgttcgagctcaccgccaagttctgctacggcgtcagcgtcgacggtggggtcagaacaaaaggcttccgcatacagaaacagagttacagattgtcattgaaatttaggcacccgtatcaagctaaatttgattcaaaccagagtaaaacaagcaagtggctccgcccctgcttaagagaagccatccccatcacgccgttgcccatcgggggaactcagctcccttgcggagtcgcggtccgaagcttgcaatgcagagccatccaccggggggcagacttcatggtggagctgtgctggagctacggcgtcgtcgccgattacgctgcttctgcctctcctttctccttgcttgaagcaatgcttgaccgcgtgacacatggcgcggggctgtgttacctgggatgggttgcgtga

SEQ ID NO: 76037 - DNA, 353 bp, Oryza sativa
  Clone ID: PAT_MRT4530_76068C.1
agaatagttaaatactaaaagcaggaaggtttcatgaaaggtttcaacgagaggggaaccatgaatgagctttggttgcttatatcagattgctccttctgacgaggaatagaggcaaatggcaaagggcgaaaaattggccatcagtacgtcaaatatcattaatttgattcttttcataaggaaagttgttgcttcagttgaaagtttatgattggccgttatggcctccacactagactgcttgttggatcttttctataggtttttcatattctggtttactgcacatgctacgagaaaacccaataagtatagctatccatatgtttcttgacgaattcagccaatag

SEQ ID NO: 76038 - DNA, 851 bp, Oryza sativa
  Clone ID: PAT_MRT4530_76069C.1
atggaggtcgcggccgcggaggacgcgctggaggagagcggcgtggcggtgtacctccccaggcttctcgccggcgtcatctccggcgctctcaccggcctcttcgctctcgctggggccttgaccggagcggtgaccggcgcgctggccggaagggcttcagacagcggcgtgctccggggagctggattgggggcgttcgccggagctgtgctctccattgaggtcctcgaggcttctcgtgcttattggtgctcggaccggctgggctctcatggcacatcctccatggtcagcatttcagattttggtcatgatgatctgtatgatatttttggagattgttcatccaaagggctttcacgggagtcactgaataaattaccacactatgtggtcactgaccaaacacggaactcgtttggtgaagacctctcttgcactatctgcctgcaggatattgtaaccggtgaaacggcgaggagattgccgaattgctcccacactttccaccagccttgcgtggacaaatggctcgttggccatgggtcttgccctgtatgtaggcaatgtgtgtaacaacaggagggtaaaaaaagcccggcattctgcaggctctccaacttataagagaagactagttgtgcaaatgtttgctcttttgatcgcccaccacagagtgatttatacacagtagctctgtaatatactctactcttatataggcgtatcttttacccgcgcgaaaacaggcggtaaatcagaggagttgacactgttttttacgctcagtgtcactgtaaaatggaataaaggtttctctgtaaaaaaaaaaaaaaaaaaaaaaaaaa

SEQ ID NO: 76039 - DNA, 331 bp, Oryza sativa
  Clone ID: PAT_MRT4530_7606C.1
gaggttccatgaggaacaacaaaatgttctagaggttattgatctctgtgctttcaaggagtttccaagctctggactgcggttggtattccaggaggagctatgcccgttttccttcttatgtgcacgtgagggcggcagacgtggcacacctgtatatctgctatatgtgcttactgtttctggagttgctctcttatgccacttgcgaagcccattttcctatatctctggttcaatatttcctcaagacgatatagttgaatttaatctccaaacccaagtacagagtgctaaggttacagctgtaacagcgatggggatcctctag

SEQ ID NO: 76040 - DNA, 516 bp, Oryza sativa
  Clone ID: PAT_MRT4530_76070C.1
atggacgccgtcggcggcggcggctacagcccgcgcttccagcgccaggcctcctgctcctgcgccccctccatctccatgtcccgccgctacgtccgcggcggcttcgacctcgcgggcgactacgacgacgacgacgaggaggagtacggctacctcggcgccggggtgttcgacggtgtccaccacgccgacgggaagcccggcgcggcgtcccgcggcgcgggggctcctgcgtcggcgtcggcgtcgtcggggcgcgggtgcgggacgaggctgaagggcctgtggcggcggatcctgcgggagaacaagaagcggatcctgctctgcgccaccggctgcgttccggcgtcgtcgtcggcggcggcggcggcgagggtgccctacgacgcctacagctacgcgcagaacttcgacgacggcgcggcgtgggtggagccggagaacctctcgcgctccttctccgcgcgcttcgccgtcccgtcgagggtgctgcagcgggtcgccgtgtag

SEQ ID NO: 76041 - DNA, 2450 bp, Oryza sativa
  unsure (1)..(2450): unsure at all n locations
  Clone ID: PAT_MRT4530_76071C.1
ccggccgggatcctccctgcttaggttagcacttcgcacatcctccgccgccgccgccgacggtccccatcaatcccgcgagcgagcggggccccgtcgttcgtcctcctgccgcttccgccgcatccatcctgtaggatcgatggaggcgaagttatcgttttctcaggacagcccgccaatttccataatttctgctgctaaggttgccggtgtctccctgtccatagatcctagtcttgctgcgggctcagcacccgttctatgcttcagttctggagaatcactccgtggtatcaaccctattctcgagtacattgcccaatcctctccaagcctccatggccgagatgctattgagtctggacatgttgttgaatggcttgaatacgcccccaccttccttttaggatcagaatttgaggttgcctgctcatttgttgatggatacttgatgtctcggacctttctggttggtcatgttttaacgattgctgatatcactgtatggtcaaatctggctgggattggtcaacgatgggagagtctacggaaatcaaagaaataccaaaatcttgtccgttggttcaatggcatagattcagactacaaagacacattgaatgaggttatagctgcttatgttgggaaacgaggaattgggaaatcccctgcaccaaaccttaaggaaaaggttaatgactcaaaggatccttcagctccagaagttgatctccctggtgcaaaatttggagaggtgtgtgttcgctttgccccagagcccagtggttacctccatataggtcatgcaaaggctgcactcttgaacaagtactttgcagaaagatatcaaggtcgattaattgttcgatttgatgacactaacccttcaaaagaaagcaatgagtttgttgaaaacctcctaaaagatattgagaccctgggaatcaaatatgatgctgtcacatacacatctgattattttccaaagctaatggaaatggctgaaaaactgattaagcagggaaaagcatatgttgatgacacaccaaaggagcaaatgagaagtgagagaatggatggtgtggagtcaaagtgcagaaataatactgtggaggaaaatctgtctctatggaaagagatgataaatggttctgaaaggggtatgcaatgctgtgtgaggggtaaacttgacatgcaggatcctaacaagtcccttcgggatccagtttactaccgttgcaacactgatcctcaccatcgtattggttcaaagtacaaggtctatccaacttatgactttgcttgtccattcgttgatgcgctggagggagtgacccatgctcttcgttccagtgaatatcatgacaggaatgcacaatactatcgaattcttcaagatatggggatgaggagagtagaaatatatgagttcagcagattgaatatggtttatactcttcttagcaagcggaagctgctttggtttgtgcagaacaagaaggttgaagattggacagaccctcgtttccccactgttcaaggcatagtacgccgtggcttgaaagttgaggctttgatacaatttatactccaacagggtgcttcgaaaaatttgaatcttatggagtgggataaactctggacaatcaacaagaaaataattgacccagtttgtgcaaggcatactgctgtgttgaaagatcagcgtgtgatcttcaggcttactaatggtccagagaaatcatttgttcaaattttgccaaggcacaagaaatttgatggtgcaggaaagaaggcaacaaccttcacaaacagaatttggctagattatgctgatgcatctgcaattagcaagggtgaggaagttactctgatggactggggaaatgccatcattaaagaaatcaagatggagaatggagtaattactgaactgattggagaactacatcttgagggatctgtgaagacaacaaaattgaaggttacatggcttccggacatagatgatctggttcctctctcattggtggaatttgattacctgattagcaagaagaagcttgaggaggatgagaacttccttgacaacctgaacccatgcactcggaaagaaaccctggccctaggagacgcaaatatgaggaacctcctgcgtggggaggtcatacagcttgagaggaaaggctattacaggtgcgatgccccttttgtcagatcctcgaagccggtggttttgttcgctatccctgatggtcgacagcaggccagtttgaactaggcggcatgattctgatgagcttctcaagtcgttggagttgtcagagattcctgaatgctctactgaaacactcccatctcatactgtaatgtcgctttatgtgtcatggggttgatttgcgcttagntttttggtgcacagtttttaatggtttctcatgctccat

SEQ ID NO: 76042 - DNA, 549 bp, Oryza sativa
  Clone ID: PAT_MRT4530_76072C.1
atgaacaagcacgagaaatttgaagagcttcatagtccaggcgtcagcttcagcccggggcttaagcgaactgcgggatttgctatcccgggcgcgagatcaaattcacgaagagaaagcaacgacagcaatttcagctgcatcataaccatgagtctagcttgtctagtatgccatggcatgagcagcccctcgcactcgtttaggagctattcggtctcaagttcggaggaggagaacaggtgtggagctgttgttgcctgcctaacacggcgagtaatgcctgctggaaccgctaacactgtagggacgtcgaaggcactgaaggcgctcctcgacttcaacgaagccgtgctgtttcaagggatcttgtcagggactggaactttgaagagattgctatcaggaactagaagatcaggagtgatccctgttggtgccgtattaagtcagctggagtatttttcacaggtcttggatgttgtttacgagttagctttgccaatcttatatatcgtcgcagttcctggttggctcctggctgaaatt

SEQ ID NO: 76043 - DNA, 826 bp, Oryza sativa
  Clone ID: PAT_MRT4530_76073C.1
ccggccgggactctctctctctctctcccccttcctaccaagatccctctctctctctctctctcagcttcatagtccaggcgtcagcttcagcccggggcttaagcgaactgcgggatttgctatcccgggcgcgagatcaaattcacgaagagaaagcaacgacagcaatttcagctgcatcataaccatgagtctagcttgtctagtatgccatggcatgagcagcccctcgcactcgtttaggagctattcggtctcaagttcggaggaggagaacaggtgtggagctgttgttgcctgcctaacacggcgagtaatgcctgctggaaccgctaacactgtagggacgtcgaaggtgacaccttttcctctaatggctgctggccaaggcactgaaggcgctcctcgacttcaacgaagccgtgctgtttcaagggatcttgtcagggactggaactttgaagagattgctatcaggaactagagtgagtagggtgtgctagcagttctttccaggttgagcatatggcactatcctttggcagcagatttcgagtgacttgatgtacattttctagtatacatctggatatctaggtactatatcagtacgcattcaatcgagagcaaattattaagagtactggtgtatgtactggtactcctttgcagatgaaagagtactggtacttagagagacagcatttgtcatgttatatactagttaccaacctgtgtagttacatcaatttttcagggccttttcttttccctgccacccaaaattgattataaattaagggcgttttttttgtccccttta

SEQ ID NO: 76044 - DNA, 3537 bp, Oryza sativa
  Clone ID: PAT_MRT4530_76074C.1
gacaaacagaggtttatatttaatgctggcgagggtcttcaacgtttctgtactgaacacaagataaagttatcaaagattgaccacatatttttgactcgtgtatgctcagaaactgcagggggccttccaggactggttctgactctggcaggcataggagaagagggcatgtcggtgaatatatggggcccttctgacctagattttttagctagtgcaatgagatcctttatcccaaatagagcaatgcttcacacacatagctttggtgtggaacaaaatgtatcttcttcccaatctaaagatgctactgtcattgttgatgacgaagtagttcgaatatccgcaatgtttgtcaaaccaagatacaataaagaagccagttgcttgaatgactccaacttgaagcctggcaatactgctatcatttatgcatgtgaactgccagaacttaaaggaaagtttgaccctgctaaggctgctgcccttggtctcaagcctggaccaaaatatcgtgaacttcagctcgggaactctgtgcagtctgatgcattcgataaaatggttcatccaagtgatgttcttggcccgtcgattcctggacctactggagtcccaagaaagtttggtgtaagtggtgctgatgatgctgtgaaaagtttgaagtgtatttggatttcccatattcatgctgatcaccacacaggtgtagctagagttcttgctttgaggcagactttaaagcctagtatagaggcttttctcagtgacaatgctactgaatctgccacatctcaacttggaagcactatatttgctcctggaagtaaaatggagaactacagccggaagcctgcaagtccaagagatactacagctctaactaatttgaaagatgtcctacatgaatcaggtttggaagttctttacagtgtcccagttctgcactgtccacaggcgtttggagttgttctgagagccaaggagaaggtgagcagtgctggaaaagctattccaggatggaaggttgtttattcaggtgacacgaggccctgcccagctcttgtagatgcgtccagagatgccactgtactaatacatgaggcaacatttgaggacagtatgaaggatgaggcgatcgctaggaaccatagtacaacaaaggaggccatagcagtaggcacatcagccggagcataccgtataatcttgacccactttagccaaagataccctaaaatcccagtttttgatgaggttgatatgcaaaagacttgcattgcgttcgacctgatgagtgtgaatctggcggacttgccagtactgccaaaggttcttcctcacctgaagctcttgttcaaagatgagatggtggttgacgaatctgatgagatccaggaggctgttatgcgggcggtggagtcgtactggaggtcgcggatggtggacggcgtcacggcggacgacgacaaggtggcccccgtctacaagctcgaggagatctgcgagctcctccgcgcctccgacgccagcgtcgtcaaggaggtcgctgacttcgtcctcaagcgactcgacaacaagagccccgtcgtcaagcagaaggctttgcggttgattaaatatgctgttgggaagtctggtactgatttcaagcgggaaatgcaacggcactcagcagctatgcgccagcttgttcactacaagggacaccctgaccccttgaaaggggattctcttaataaggctgtccgtgaaactgcaaatgatgccattgctgctattttctccacagaggaacctaaacctgctgttgcaacagaaggtcttggcaagcgcatacagggttttggaaatactaattttgagccatcaagagatgacaaaaaatctttccttagtgagctaagtgaagtagtgggcattggcagtgcttccattaaacagggtttgagcaactttgctgcttctcattcatcaatgataacaaatgataatggtggtccgtacaagagcccaaaccttcgtaggtctctgaccacagaaatggataaatatggcaggtatgatccaagtgaaattcaaggcgagagccgttcttcatctggtgcttcaaagaatgttagttctggttcatggggtcctagtccatccagttctgcaccaactgatgatactggttcaagtcaaacaggggttaagactcgtgaagagagacttttagatacaattgcaacttcaagtggtgtgcggttgcaaccaactcgagatgctctgcaaatatttctaacagaagctgccaaattggacgcagttgctttgagccgtgcccttgagaacaaattgaattctcctttatggcaggttcgcatgaaggcaatttgtgtattggaagcaattgtaaggaaacaggatactgatccttattcaatcattacttcatatttctgtgagaacagtgcatctgttgttagatgctgggatcaagatgacccaggagctcaaaattcagctcaggaaggtagcgagaggataatggggaatagcatgtttacttcttcggttgatgatttgctgggtggtgaacctattgctgatataagtaccaccaccagtaatggtaatggaggtgatccgtttgcagacgtttcattccatgagacagcagatactaaggatactaacgacctattctcggggatgacggtagaagaaaaggcaacagcagccttgcatgatagctcagcaattaaactatggtgactatgagtgttcttcttgctcagcagcagcagctgctgccaaatctaggaaatttcaatgctaggtttgggacattcgtctttgaatgcaatgaacagcggaaatgccatctgtgcttcctgatatcttcaattcaagtaaccaacctcaacatgttgctgtgatgagcaactcaaagaaggatgaaactaaagcttttgattttgtttcggatcatcttgcagcagctcgtggttcaaaaaagtaacccgagagcgatgggtatgttcagaatgtagcaacaatgcatttgtttggcttcacgcaaacttcactcgtactccatcgattagctggatcaatctcaggacaggttttgcatgttgtgctgcaacagatgacccaagaaagaaagaaaagaattcacgacgggggattgtgttgtatcatgtatctagacaaatgtcgatttttatgttgaaataagctgtacttatcttctcagtttcttttgatgccttgccttttttttttttcttttaaagagtcggacattgtagattgttctcgggcgggattttgtttttgctgctgtacaacaacatatttggttcttttgacgggaattgtaaagcttgctacgttaataacaggtgccatacgggaataatgatgcctcttgaaccaaaaaaaaaaaaaaaagaaaaaacaacagcatatgcacaaccttgattttccctgcaatctcttatacgcttttattgagattcttctgagcaagcagggagtcccaag

SEQ ID NO: 76045 - DNA, 166 bp, Oryza sativa
  Clone ID: PAT_MRT4530_76075C.1
caacgagcacctgtggacacgaaacatctacactggctagagatcgtcaggttgatcataactgaatagcacggcactctgctcagagcatattctcatggtgggcatgggagacacttacggagcgcatatgcacgagcgcaatatcaggatcaaggacacgcag

SEQ ID NO: 76046 - DNA, 663 bp, Oryza sativa
  Clone ID: PAT_MRT4530_76076C.1
atggcggccggcgagctagcgcgcggcgcaagggcggcgagcggcggctcgggggtcttccacggggatcaaggaggacgacaacgagaggaattaggcggaaagctcaccgatggcgacggacggcgtcggtggcgaggaaacaggaagccggcggcggagcgcgaccgaggagaagaaggaggcagcgaggaggctttcgcggcggcggggtggcacggcaccgagagggcgtggccagggaaggagggagggagaggtggcgcccggagctccttgtcgcgcgttcacgctcgcaccgactcctccggtgctcgacgacggacggcgacgacgagagcgagacgagtggcaacaaggcggcgacggtggttcggcggcaatggcgtggtgggtgtgaggcgagcgaaaatgagagaggaaggggtttggggcggcttgggttttatagtggaggcgatgtcggtttgggaggagggggcgagctggtgcttggctggcggccgcgagcgggatcggcgttttcgtgggcggcacgaaacatggcgacggtgtggatgtgttgggcggcgaaggcggtggatcggacggccgaattttcgagtcgtgagcgcgggctggctcggtcaaggagcgagagctggcagccgtgctcggagctag

SEQ ID NO: 76047 - DNA, 1515 bp, Oryza sativa
  Clone ID: PAT_MRT4530_76077C.1
atggacagtagccgagattctgaagaagaaaggcctcaaaggaaggacaatggcgaagaaactgaaaatggggaagatggtggaaatgctttgagcctcaaggatgttgccaatgagcttcttggttgtgttgtccataggcaaaagatggaggcggagtggcatatcccgtcttctccaccgaatccaaaatccgcctcccgtctcctcccctccctatccatcaccacccctcgcccaactccaaaccaaacaccttgtgggcgcgacctcgccgcgctcgccatgccgcctcccctctccttcctccacctcgccgccaaccccacccccctccacgcctcgccgcttcgccgcgcccgcctccgccaccgcctctccctccgcacggaccacccgtcccggcgcgccgtggcgtcggcgtcggcgtcggcgggcgagaacccgtccaccccggggggtcctatagccgacgtcgagatggtccgtggcaaggacggcgtgtggacggcgcggccgccgacggtggtggtgctgtgggacctcgacaacaagcccccgcgcgggccgccgttcccggccgccaccgcgctccgcgacgcggcgtccctcctcggccgcgtcgtgtccgtctcggccttcgccaaccgccacgccttctcccacgtccccgcctgggtcgccgacgagcgccgggagcgccgcgccatggaccgcgccgagcgcgccggcgccgcgtccccgcccgtcccttactcctgcgccgtgtgcggccgccgcttccccacccgccccgacctcacccgccacttccgccagctccaccagcgcgagcgcaacaagaagctctcgcgcctccgctccctcaagggcaagaagcggcagaagttccgcgagcgcttcatctccgggaacaccaagtacgacgacgccgcgcgggagctcctcacccccaaggtcgggtacggcctcgccgccgagctccgccgcgccggcgtccacgtccgcaccgtctccgacaagccgcaggcggccgatcacgcgctcaagcgccaggtgaagcattccgtggcctgcggcgttgactggctcgtgctcgtctccgatgactccgatttcaccgacactgtgcggaaagcgcgcgccgccgacttgagaacggtcgtggttggcgatggttgccgtgctcttggaagtgtggctgacatttggttgccatgggaccgcgtcgagaatggggaggttgatgaggacatgctgcggaatgggacacatatgggattcagagatgaagaggaagatgagcaagatgatgatgagttcatagtggattgggatacgagtgatttggatggtgttgtcgatgacattgtcgcgacgaggaccaagttgttcggtgctacaacgatgtctgcatttgctgatgaggaaattatggatggcatattgggtgttgggataaatggcggtgacatgttatggagtagcgacgacgaggatgaggatggttatttt

SEQ ID NO: 76048 - DNA, 1662 bp, Oryza sativa
  Clone ID: PAT_MRT4530_76078C.1
gcccgtccttttttttttagattattatctatagcgtattataaaattaaatttggggaggaaccgacaaataactaaaggacagctaagtaactatcgcagacagtactattaacgacatgcaaaggacagagtacacgctagagtcaagacatgaaccaaaaatcataccgagctttagttggatccggcgtactggatatctaaatctaaacaagccttctgtgcctctgcttggggaacctgttcagtagcagcatcaggccaacattgctcccacacaaaccgattgggtacttgacgcgatatgatttcctccgccagcatagagttccgatatgatatttgggcacctatcacaattattatcagaatgaaaataaaatatgcaatgatcttaatcaccgcgacgacaaagaatttcgcaaagaaactctgcctcttcaccaccttcctctgtgccataaccactggttgtggtggcgaccgcaccttaaatggaattacttgcaatggtgctgcctccttgcagagcttctgcgcgatttccttgagcagtacaacctgctgcttctcagatcccatcgacatgatggcatgccgcatcgactcccggtctgcctccagagcctgcagtcttgcactgagcttctgtatttcctcctcctcagcccgagtaccaatcgtacccctgtggctcatttcgccaccaattggtgttccaaagtagcaaggattttcaggctcagccacaggcacaacgtgcacggcatccacagtgtacacccggtgacagtcatcttcctggtctgacgcctcccggtccacgacgagagggaattcatcatccatggcaatgccactgtcatctggaaacaagtttgtgctggatgaagagatgactcccttatcggcggccgaggctcggccaggcattctgttgagcaggtggtgggtgcgcggggtgcccacatcggaggaggcaggttgctcgtcgcagtttatgggagggtagtcctcgtcgaaggggtggtgttcgtcgtcgtcgtcgtcgttgtactggtgagcctcggcggcggaggaggtgagcgatggcaacggggagttgaagccgaggtggaggaggcggaagcggcaggccctgagctgcgcggagagggaccggacggtggcgtcccgctgctcgacggcgtcgcggagcgcggcgacctcggcggcgtcgtgcgagaaccgctcctcggcgtagcgcctgaactggcgcgcctccatcatggcctccgacttctcctgctgcaggcggaggatcatcgacatggcctcgcaggcggcccccgccgcggcgccccgctcggcctccagctccgcctgcagctccgcgatcccgtgctgctgcctcgccaccgcctcccgcagcgccgccgcctcgtccccggccccaaccctcgccacggaaagcgcaccctccgccggcagcctccgcttgtgcatcgcgacgcgcgctggcggcccgccgcctccgcacagcgggcacgcctcgtccccggacaactcagccatcgacccggcggcgggggcggcggcgccacggccgcgcgcatccgcggccacaatccggcgaagaatcgaacacccaccacacaacgggggggggggggggcggtc

SEQ ID NO: 76049 - DNA, 1436 bp, Oryza sativa
  Clone ID: PAT_MRT4530_76079C.1
atggtcaccggcgacgcacgcgcggcggcgagaggaatcgacgcgagaggagccgacgacggtggattacggcggcggcaatcaccggagagcaaaaggggaaaacacgacgagacgacgagggttcgattcaaaggggtgggagcatctccggggttcaaggaatccgtttccggcgtcggattggatggagcggcaccgagattggctggcgacgagaggcggtcttcgggagcgggcggcaatggcggcgaggccgtgccgggcggcgacggcgctagggaatggtttggggaggtcctagggagctcaaggacggtggtggcgcgagggattggcgagggggcccatggcggcgcacagtcgggcacggcggcggcgaagcagagcaacggcggggcggcacgtttagggggacgagcgagcaaccgaacggctcggggcttatccaagatgatgcaatggcaagaatttgggcgaggagctcaccggcgagagaggagcaacgttggcgacgcagagggagtcgtggcgaggtggtcgcgacggcggggcgggggcgagcagctggcggccggcaacaaaggcgcgggtgtttcgagcgaggcggagatgaaacgagagaggagggcgcgggctttataggcgaggaggagaggtcggtttggaggagggaaaccgacattggcggtcaagggagctcggctggtgttcacgggcggcagcggcggtatcgtgggcagtgcgaaagcggcgacggcgtggatgcgttgggcggcgaaggcggtggatcgagcggcggaaatcgaaccgcgggagcgcgggctggcgcggtcaaggagagcgagttggcgcggtcggtcaagcggcgcagaggcagtgacacctgcagtggtcgggaaagggaaaaagaaggggaaaaaggggcttggtcccttgccataatgaggagagggagagtgaggaggaggaggagagggagggcagctgcttctcccactcttggacgggtgcggcgtggagtggcggggggggccatggatgacgtcgacgatgacggcggcggtcggtttggcatggagcgggggcaaggcggcagcgcatggcgtcagcggcgaccggccggttggccacctcgcgaggcgcacgcgggaatgggcgaaggcggtggagggatgtatcaagggaaactcaaggaggagtcatggaaaagattcaaaaggaatacttgggtatttgttctcgggaacatagggtggagtcaaggaaaggattcgaggcgggatttgaataattctggattcgtagaagtatttggcgaggattcaaaggaaggatttgaatttcagaattttgatttcagagactcgaatcggaagaggaatttggatgagggggaggattttgatttcgatgagagggaacaacgggattaa

SEQ ID NO: 76050 - DNA, 567 bp, Oryza sativa
  Clone ID: PAT_MRT4530_7607C.1
atgtgcttagggcatcgagaagacggagctcgaccatgccagcacattgaggaggaggaggcgcttgggagggcaacgcaggaaggagtcaaagctctagtttgcaacgcttggggggggagttcacgagctcacctgcacctagaggaggaggcactccaagatgtggcgaggagcaggagctcaatttcgtcggcacatggagaaggaaagtgctcgaggaaacggggatgttgcgggaagccaaaggtctacctcgccggcagatggaagaggcacttggggagaaggagtttaacctcgccggttggaagatgccatataagtagaaaaaccactacgtatggtaggctggctggcatacatggtgacatatacgcctctcccagggaccatatatgtgcttctctgcgtaactgggctctgccaatagctgacccactattcaagacaagtttgcagtttgcagaggatgcatatgctttggttttgcaatggcgatgcatgcacaaatggacatgcaggttagagattggagttggtctttctcttttcaagtggctctga

SEQ ID NO: 76051 - DNA, 1050 bp, Oryza sativa
  Clone ID: PAT_MRT4530_76080C.1
agaagaaattttattgcatatcttaaaattaaattttcttaaaaacccacaactaagtaaattacagagaatagactatcgcagacagttctattttcaaactgcagatgcaagagttcacagaaaattcaagacatgacccagaaatactcgagagcattagttggatccggcgtactggatatctaaatctaaacaagcctatgatcaaaacagaaaatctaaacaagcctaaataagtctgttctgaccactgcatttcaagcacatgtcttgactctgaaatctgaattcttccaccgaacagagcctcacctgtgtaattcgttggatctcatcagatcacacataatattctaatagagctacacatgtttactggttattgaccatgtacagtgcgtccttgaacacgtgagtggtaggtacaaaaagaatcaactactacggagaaaatcaggcagcaaaaatgggcgaaaaaacgaggcttcaattctgagctagattatcataccaaaccaaccaaagaatgcatagacaaaggggtcaaaacatatgcaacaaccagaatggattcacatgcaaatgagccttttatgtccagaaaatagctcatttggaggagagaatcgtaggagcgccgcaaaatctttcccttgtttgtgtgtctacgaccagtgaaggcagcagctagcttcttttgaggtaccttctgtgcctctgcttggggaacctgttcagtagcagcatcaggccaacattgctcccacacaaaccgattgggtacttgacgcgatatgatttcctccgccagctaaacacagaggcaatccacttaatcaccgcgacgacaaagaatttcgcaaagaaactctgcctcttcaccaccttcctctgtgccataaccacttggttgtgggtggcgaccgcaccttaaatggaattacttgcaatggtgctgcctccttgcagagcttctgcgcgatttccttgagcagtacaacctgctgcttctcagatcccatcgacatgatggcatgccgcatcgac

SEQ ID NO: 76052 - DNA, 1954 bp, Oryza sativa
  Clone ID: PAT_MRT4530_76081C.1
atgagggtatttggaagaggagaccttatcacggatccaaaggaaattgcgtggcaatatttgagatctgacttcgtagtcgatgcagtggctgcattgcctttaccacaggctcttcctgcagatcttcgtcgtgacattaaacgtcacctttgcttgggtcttgttcgccgggttcctttcttctcccagatggacaatcaacttttggacgccatctgtgagcgtcttgtatcatcgttgtgcacacagggcacatacattgtccgtgagggtgatccagtgaccgagatgctcttcatcattcgtgggaaactcgaaagctctacaacaaatggtggccgcactggcttcttcaattcaactaccctgaaatccggtgatttctgcggcgaggaactgcttgggtgggctcttgtccccaaacctactgttaatttgccgtcatccactcggacagtgaaggcactcatagaagttgaggcattcgcactccaagctgaggatctcaagtttgttgcaaaccaattcaggcgtctgcacagcaaaagattgcaacacactttccggtactactcgcaccactggagaacttgggcctcatgcttcatccaagctgcttggcggcgatacaagaggaggaagatggcaagggacctgagcatgagggagtcattctgctccatgagatcagatgactcaaatggtgaagatgactcgccacctaagcagaatctcgctatgaagatcatgagtgggagtaggaaaggacctcagaacatgaaagagttgcctaagctaagaaagccggatgagccagatttttcagctgaaccctcaagcttctcgttcttgcattaccaggaacccggtttggctccaaccgaccccgtcccggcgttcccaactattggcatgcgaggggcaattgatcaaagggtagatgtggcgtcctcgtggacagccacgttggcacgggcgagggaggaggccgggcggctcattggacggcccacggcgcgcggcgggatccggcgaacggcggcgagccggaaggggcggctagcactggcggcaggaggaggagaaggggaactcattccacggctcggatcaggaagaggacgcgcgacgacggccggcggcggcggccaatctcgccggcacgccgacgtggccgcgcgcgagaagagcgaagggtgcgcgggctcgggcttagccgaaccggtatggtgttgcgacgcgcacgcggtgacgcgggacccgatggtcaccggcggcgcacgcacggcagcgttatgcggcggcggaagcggcgacacggcgcggagacaagggagaagaccgacggccttggggcagccagggggaggtcaaggggatccccgggagcgtggcggcgagaggaatcgacgcgagaggagccgacgacggtggattgcggcggcggcaatcaccggagagcaaaaaggggaaaacacgacgagacgacgagggttcgattcaaaggggtgggagcatctccggggttcaaggaatccgtttccggcgtcggattggacggagcggcaccgagattggctggcgacgagaggcggcctccgggacagagcaagagcgcgtggcgagctatggcgagcggcggcgggcgcggcgcatcgcgcggcaggaggaggattatggtggggagctcaccaacgaagaggaggcagcgttggcggcgcggtcggtgtcgcggcgaggtggtcgcgacgccgaggcggcacggcaccgagagggcgcggccggggaagaagggagggagaggtggtgcccggagctcctcgtcacgcgtccacgcacgcaccggctcctccggtgctcggcaacggacggcaacagcgagagcgggacgagcagcaacaaggcggcgacggtggttcggcggcaatggcgcggtgggtgtgaggactga

SEQ ID NO: 76053 - DNA, 263 bp, Oryza sativa
  unsure (1)..(263): unsure at all n locations
  Clone ID: PAT_MRT4530_76082C.1
aaaaagttgacctttattagacgggaaggaaagaataccccaagggtaactgggggggggaatttactctagccgaaacaagtgaacaggggggggggggggggctantttaggaaaaaangtggaaagggggggggaggggggaaaatggaagggaaatgcaggagaacaaaggtaagttaaagggaggggaaggaggagttggggtaaagaggggaataggtgggaggtgggggaaatggtggggtggtngtaattgggga

SEQ ID NO: 76054 - DNA, 432 bp, Oryza sativa
  Clone ID: PAT_MRT4530_76083C.1
atggcgatgacgggccgcctcggcccgtccaacagtgacggcggtgcaccaatgccacatctaactcggggggcccgtcagatctatggttccccgtcgctcagcgtagaacatggtgagcagtggcctccttcccttagcccacctccccgtgagcaacgacgacggtggactagcaacaacgtctcggcctcagatccagcagagaccctaaacccagcccccgaggccctaagatccacccccaagcccctagtcctgggggctccgagcacagcccccatcaacatttttctggcgctaaacgacaattcactttcgcgctctcatcacattcctgcgcggcaccgtgacgctggatctcatctaggctccggcgccggcggccatcgatttccctgcacctccggcaagattggcacaaaaaggtga

SEQ ID NO: 76055 - DNA, 1038 bp, Oryza sativa
  Clone ID: PAT_MRT4530_76084C.1
atggaagccaccgccgccgcgacccgcctcctcctcccgcctctccgcgcgccgccgccgtcgctcgccggcggcgcggcggcggcggccggtggtgggggccggtggcgcggtgccgtgccgagacgggcgagggcccgccgcgccgtcgtcccgccccgcgcgtcgctcgtcgacagcagcggcggcgcggccgccgccgccgtgctcctggacgcggcggtggccggggcgacggggtactcgcaggcgagctactacacgtcgctggggctcttcgtgctctccgtccctggcctctggtcgctcatcaagcgctccgtcaagtccaaggttgtgcagaagacattcgtcaaggaggaagggcagacgatggcgccgaaccaggtggctggggagatcctctcgttcttcacccgtaacaacttcaccatctctgaccgtggcgaggttatcacttttgagggcactatggtgccgagcagggggcaagcagcacttcttaccttctgcacctgcattagccttggcagcgtcggtcttgttctatcaattgcagtcccggagggtggcaacaactggttctggcttatgaccttaagcccattggcgggtgtatactactggacaaaggcatcaagaaaagaagagatcaaggtcaaaatgattttatcggatgacgggaatgtatccgaaattcttgtgcggggtgatgatgtccaagtggagcagatgaggaaggagctcaagttcagtgagaaggggatgatatatgttaaggggatctttgaaacatgattgaatagcttgttatctacagaacagagctaacaaaagagttcaaaagagcagttcccttggttcaaacttcaggtgagggagattttgaatacctacgggcaaatctgtatcttggcttgagaggaaaagaggtgtatccatgtgagactccattaagatcgtgacacaaattttctacctaggatatatatagtgactcaacaagcaactcttttcatgaagatagacagtgcaaaa

SEQ ID NO: 76056 - DNA, 543 bp, Oryza sativa
  Clone ID: PAT_MRT4530_76085C.1
atggaggagttcaccttcttcccagcagcgacgtcgcctcgccgcgatcatcggctcggcctcgtcggctcgcctccaccgctgctgttcgccgccgtcatcgaggtcgacgacggagatgatggagaggaggaggagaagatggacttgctgtgggaggacttcaacgaggagctggctcgcgcgccgccggtgtgccctctgagcccgctcaacatcaagggcggagggctgacggcgacgacggcgatggccaaggacgacggcggcggcggcgagaagcaggcgaggcgcatgtactccggcagcgtgtactacatgtttgatgtttctgtcacaggacagagtaacccaaggagctgcatttggtttgttgtcaccaaccttgtagatgcagatgccttgccatcaaaacctaccgaaatgagggagctattaaatgtcaaggagcaggccaagttttctggtgaattcaccagaaatctctatgtgaggcagtgccagatgattccaagtcttcagcttcataaatgttgcaactaa

SEQ ID NO: 76057 - DNA, 1164 bp, Oryza sativa
  Clone ID: PAT_MRT4530_76086C.1
atgaagatcgagcgtgatttccacatgacgaatgatggggatgatgagttcagctatgccaagaactctatgatgcagagaaaagctattctagctgccaagccaacagtcaaggaagccataagcaaagtgtgcacagatcttcatcctcaatcgatggtcattgctgacctaggttgctccttcggtgcaaacacactcctttttgtctccgatgcaatcaccacaataggcgaaaaccctaacaatactatcggggagagaccgaaggagatccaattctttctcaatgacctacctggcaatgatttcaataatatctttcaatcactggagcagtttgagcagtcgacaacaaaaaattgcacttctagagggttgcaatctcctccacactatgtcgtaggtctgccaggctccttctacaccagactctttccttgtaacagcgtccatctcttccattcctccatgagcctcatgtggctctctcaggtccccgagaaccttgatggcatcatgaatgaagcgaacattcacatagggttgactacaccgccattggtgataaagctctaccaaaatcaattcaagaaggacttctcacggttcctacaaatgcggtgcaaagagattgtgcctggaggtcggatggtgctgacgatgctagggaggaatagcacagatgtattcagtgcaggagggacgaccatggcattcgagttgctttcacaagggctgcaaactctagttgcagaggactgtgttgagaaggagaagctggactccttcaacttgccattgtactgcccttcggttgatgagctaaaggagctagtgtggcagaatgagctgcttgacatcaccgacatccggctcttcgagattaacgggaaccccaatggcggctcagatcagtcagcagaggatgctgctgctgcacctgtcatcatccatggtgccgctgccgctgaggccgccggcaagaccatctctacgagcctgagggcggtgaaggagcccctgatcgcgagtcatttcggagagtccatacttgacaagctcttcgcggtgtttgctcgctattttaccaactgtattgagagtgaggttgagaagagccctgtgccagtcatcacattgtccttgcagccaaaacactaa

SEQ ID NO: 76058 - DNA, 375 bp, Oryza sativa
  Clone ID: PAT_MRT4530_76087C.1
tctctgaggtgtaccaagtggtggaggcgatggcgcctgtgtacacggtagggtgagctacggtaccggtcggtgcagtggctgaaggcgttctcacaacgagcagcgtgccgggatcaaccactttgtggggctctacgccgtgccggagctcatcttggacatggggtccaccaccaacttgtgcaagaggaactgacggctcatcgacgcagacacgctggagaaggccgggctgctgctgggcctcatggcatgagcgctctgggagcggtcgcgcgcgcgcagtgccggctccaaggccaaggatgcggtgtcttaagcgctgcacagggctatgacctgctttttcgtcgcgtcggtgccacacaccat

SEQ ID NO: 76059 - DNA, 217 bp, Oryza sativa
  Clone ID: PAT_MRT4530_76088C.1
atttattttttttctcagaactgagggatgctttaaaatggagccacttgaaaaacttcatatgcgacatgcacgtgagcatatcattgactgcattcaatcatggcgagcttgatacgatatatttactatatgcatattcaccattgattgacatggatcaacaaaatacggttcccatacttactgtgaaaatctatgaaaacgaaacaagcgc

SEQ ID NO: 76060 - DNA, 781 bp, Oryza sativa
  Clone ID: PAT_MRT4530_76089C.1
tcaccgagggtggccggcgcggaggaagacgatggcgaacagcgacggcaagccacgggaggacgacgtcggcgggcggacgagcttcggggtgcccggaagccatggccgaaggcggcggtagaggtggtgctcacccgagtgcgagggaacgagggctccggtgacgaacctcgacggaggaggggtggacggggtggatctcggccacgcgaacccgacggcggcgacggcgcggcctggcggcgaccctaacggcggctagcggcggccggagtagcggaaaaggcggcggcaaggggttgcacggcgcgggagcgatgggaggctcgagagagtgtggcgaaatggggaaaaagtgagaggggacgacggcgatgcttaaaaagggggagagggaaccggactggccgagagaggcgggaatcgccggccgacgtggggagtgggggaggagagagaggcgggattcgaaaatcgaatcccggcgatctcgggcgcaggcgcgagcgggagagggagaggagtgggcgcgggagacgcggcgcacgcgcgggcgtggtcgacgtggcccggaggaggcggagacgagggcgcggcggcggttgcgggcgcgacggcgcgagcgagatcggcgggaggtgggggaaggaccgacaggtgggccccacctgtcggcgaccccgagagaggaggcggcagggcggcctggctgggcctcggcctgcggccggcccagcaaggaggaggggaggaaggagggaatgggccggcggcccat

SEQ ID NO: 76061 - DNA, 615 bp, Oryza sativa
  Clone ID: PAT_MRT4530_7608C.1
ggccgcgggtttttttttttttctttggagtttaaatgtaaatgacattggagctaagacgtagggctaccggtttggaccgacgcgccacgaatatagcgcattttagacttagaagctagcgttccatcctgagtagtcgggagattggagaagcctttcgtactgtctcctccttacgcccacgttgcctccatcgaatagagacaagacagtagcgtcattgaggaggcgtccgaatcctgtgccttccagatacgatctcattcccactgcctgcatgacctcccatacagcctgtactgctgcctccccgctataaatctttgcttgcagacacgcctccagtctgctaatggcatcgcctcttcctttgtcgaatgcgtccaaggcgttgcgtacaagcagccgcgacgtatcggctttgatcttgcagttgatgagaagatctgctacactctgcctttgaatgataggaacactgccgcctctgttatcctctttggcaaacttgagggctgcctcgaaggcagtgcgcatgataccgcaagccatggctccgacgagtgctgcagtgaagctaaatgccatttcgatgatagaaactgtcgcatc

SEQ ID NO: 76062 - DNA, 183 bp, Oryza sativa
  Clone ID: PAT_MRT4530_76090C.1
gtgtgtaacaacaatcccaccatctacatcaccgagaacggcactgacgaggcgaataacagcacgatccccatatccgaggcgctcaaggacgagacgcggatcggcttccactacaagcacctccagttcgtgcacaaggccatccaggagggtgtgaaggtgaagggttactttacatgg

SEQ ID NO: 76063 - DNA, 628 bp, Oryza sativa
  Clone ID: PAT_MRT4530_76091C.1
gccgcccgccgccctcctctccgggtcgccgacaggtggggcccacctgtcgggcccgtctcccacctcccgccgatctcgctcgcgccgccgcgccgcaaccgccgccgcgccctcgcctccgcctcccccgggccacgtcgaccacgcccgcgcgtgcgccgcgtctcccgcgcccactcccctctctctcccgctcgcgcccgcgcccgagatggccgggattcgaaaatcgaatcccgcctctctctcttccccactccctcacgtcggccggcgattcccgcctctcccggccacgtccggccgcgccgtcgccgccgtcggattcgcgtggccgagatccaccccgtccacctctcctccgtcgaggttcgtcgccggagccctcaccccctcgcgcacggggcaccccgaagctcgtccgctcgccgacgtcgtcctcccgtggcttgccgtcgccgttcgccatcgtcttcctccgcgccggccaccctcggtgaggcacccctcccttctttttccccttcctctcctcttagtgtcgcgcgccgtcaccttcgactgccgccgccgcctcccgtgccgccggttgccgccgtcgtcggccgcgtgccgtcgccgctag

SEQ ID NO: 76064 - DNA, 564 bp, Oryza sativa
  Clone ID: PAT_MRT4530_76092C.1
atgcaggccgaggcccagcccggcagccaggccgccccgctgcctcctctctcggggtcgccgacaggtggggcccacctgtcgggcccgtctccctcctcccgccgatcccggcgcgccgccgcgcccgcaaccgtcgccgcgcccacgtctccgcctcccccgggccacgtcgaccacgcccgcgcatctacctcgtccacccctcctccgtcgaggttcgtcgccggagccctcatccccacgcgcacggggcaccccgaagctcgtccgcccgccgacgtcgtcctctcgtggttgccgtcgccgttcgccatcgtcttcctccgcgccggccaccctcgtgtgaggcatcccctcccttcttttccccttcctctcctcctagtgccacgccgccgcttcgagtcgcgcgccgtcgccttcgactgccgccgccgcctcccgtgccgccgccgcctccgcatcgccttttgcgccgtcgccccgccgccggttgccgtcgccggcaacgcgttcgcacgcgcgccgtcgccatcgccgcggccggtcggccggccttga

SEQ ID NO: 76065 - DNA, 253 bp, Oryza sativa
  Clone ID: PAT_MRT4530_76093C.1
ggtcggcaaccaaacaagaattgctttgataaaatgaagagattcacagcgtgccaaacccctttaatacaagttcacttttttaaaccacctttttaaaaacataactgcaaacgtccatcccccattttaagatttaactgcggccgatggtaacaaacctattgatccaaaaggcccaaagtttttgacccaattgcctttatctttccaggttttacagggcctgcttgttcccttgcccctattcatt

SEQ ID NO: 76066 - DNA, 201 bp, Oryza sativa
  Clone ID: PAT_MRT4530_76094C.1
ccacgcgtccggcactccgtcgcgcaccactccccacctcccgacgagatgggcgggctgcgccttacctgcgtcagcctccgccccgccgcctccaccttgtccgccgacgtgccgcggtccgtcaacttcgcccgcgccggggcgcgcgggttcccctcgcttcgacttgggccggcgctccttcgcggggtccgcagc

SEQ ID NO: 76067 - DNA, 618 bp, Oryza sativa
  Clone ID: PAT_MRT4530_76095C.1
ggcagacgtcatccaagggggggcggctgcgccgacaggtgggccccgcttgtcagcgcacaaggggagggagagggggctcgggcaagtgggccccactggcagcagcacaaggtggccagtctaccgtggaccgggaccacgcgggtggtccaccgccggtccacgggaccgacggcccagatcgccctcggggtcgatcggacgggcggtggcgacccggctcggctcaagaccggccaagcggccacggcgacggcgacggcgcgcgcacacgcgttgccggcgacggcaaccggcgacggagacggcggcgcaaaggcggcgccgacgggcggtggtgctaaagcgacggcgagggtggccggcgcggaggaagacgatggcgaacggcgacggcgagccacgggaggacgacggccaccggcggacgggattcggggtgcccggagcgcgaggggatgcgaattccggcgacgaaactcgacggggaaggggcggccggggtggagcttagcctcgcgaacccgacggcggcgacggcgcggtgcggcggcgaccctagcggcggctagcggcggccggagtagcgaaaacggcggcggcgagtggttgcac

SEQ ID NO: 76068 - DNA, 306 bp, Oryza sativa
  Clone ID: PAT_MRT4530_76096C.1
atgcggggcccaccggtcagcggctcgggagaggggggaaaagggcgccggcacgcgaggcccaccggtcagcgactcaagggggagggcggttcaccgcggaccgggaccacgcgggtggtccaccgccggtccacgggaccgacggcccagatcgccctcggggggttgaactcaccggagcgcgaggggatgcgaattccggcgacgaaactcgacggggaaggggcggccggggtggagcttagccttgcgaacccgacagcggcgacggcgtggcgcggcggtgaccctagcggcggctag

SEQ ID NO: 76069 - DNA, 675 bp, Oryza sativa
  Clone ID: PAT_MRT4530_76097C.1
atgagggctccggcgacgaacctcgacggaggaggggtggacgaggtggacctcggccgcgcgaagctaacggcggcgacggcgtgggccccacctgtcggcgaccccgagaggagggaggcgggcggccggctgtcgggctgggcctcggcctgcggccggcccaagaatcccaaggaggcgacgggcacgccgaggctcggacccagcttcgtcggcaggacaaaacgggactcgacgaaggcggtggagctctcctccttctcctcctcctccaacaccacctcgtgtagctcccctctcagcgcgccggcaggctacgtcagcgtcgctgacgacctctccgccgaagtcgtcgcctccgactcctctcccatcgaccgaagtggggcggagcgacgagcgaggaggatgccgccccctgctctaggctctccttcctcctcccaactcactagccacgaagcttgccgtcggcagcctcatcagcgccgctccctgtcgtcatcccactggtgccgcagcaggatggtgcggctccgcctcaactgccccctcaccgtgagtgccagcgttgagtctgcagctgccttcaccgcccacggctgcgacggcgcgtccctcccgaggagagagggggagagagggaggaagaaggggtcaaagagagactaa

SEQ ID NO: 76070 - DNA, 579 bp, Oryza sativa
  Clone ID: PAT_MRT4530_76098C.1
atgtcccaaacgcccgatgctgaccccggccgtgacaccttcacatgcggcactctgttcatgtgcctcaatctacggggcctcttcaagaagaagccagaagaggttggcaagagccggcggcaaagccaagaacaagatcaagaccaagccgccgcagtcgatgccgagacagagcaagagccccagtacgtgccggcgccggcgccaatccgggccgcgtccttcgagaagctcgagcgctccccgccctattcgggcagcaacatcgccttcgacctcctcgtggagccggagctaggggaggaccgcggcgcccggcaggtccttgcgtactgcccgtcgccgtgcttcgacctgccggcggggctcatgatgagggccggcgaacggtgcgacgcgcctggcacggcggggttcgtgctcgatggatgcccgacgaagggcgccctgaagaaggtggcgtcgtgcctgccgcccgacgtcgcgggcggcgacggcgaggcgcggccgccgcatctcgtcaggttcttgtcgacgtcgggttctaccgcaccagcgaacggcgggctcccgtga

SEQ ID NO: 76071 - DNA, 438 bp, Oryza sativa
  Clone ID: PAT_MRT4530_76099C.1
atgaggatgaaaagttcatggagcgggtactgccaatgcgagggattggtacggataaacacagaagatttccgatttccaaaatcgggggtctacacgccgctagggtcgccgccgcaccgcgccgtcgccgccgtcgggtttgcgaggctaagctccaccccggccgccccttccccgtcgagtttcgtcgccggaattcgcatctcctcgcgctccgccgccttcgcgtcgccttttgcgtcgtcgcctccgccaccggttgccgtcgccggcaacgcgttcgcgcacgtgcgccgtcgccgtcgccgtggccgcttggccggtcttgagccgagccgggtcaccaccgcccgtccgatcggccccgagggcgatctgggccgtcggtcccgtggaccggcggtggaccacccgcgtggtcccggtccacggtga

SEQ ID NO: 76072 - DNA, 153 bp, Oryza sativa
  Clone ID: PAT_MRT4530_7609C.1
gcaaaaggcaaagaagacatatactccattttctacaaagggcagaacgggactgcacaagctgggactgcaggaaggacattcttattccttggtgccattaaagacactgttgcgaaaatggaacataataataagcacaactatatataa

SEQ ID NO: 76073 - DNA, 387 bp, Oryza sativa
  Clone ID: PAT_MRT4530_760C.1
atgcgtcgcgtcggccagccgcgccacgcacgcgccttcacccctctgctatggtgtcattctctcaccactgtcgcgctttgcttcggccgtcgccgctctgactggtgccaatcctccgccacagtccccaatccaccacgataccaccagtctgcttcgggaccgctgttgcctccgccttcgccaccggtaggcggcaacggaagcccggacgtcgagggcgtggcgctggccgacttcttcttcggccccaagttggatgacttgatgcagtggctaggagatggtgacgccgggcagaagggcacgctgccagcctcctcgtcatcgtcatcctacgcgcagcggggcggggcggagcgggcgggcggacggcggccctag

SEQ ID NO: 76074 - DNA, 358 bp, Oryza sativa
  Clone ID: PAT_MRT4530_76100C.1
tcggacaaacgcaaaagccttggtaagtcaacttgcaggggagatctcacagatcggccttgcagtagactagtcgctaatgattatactatactgaagggactaagtctgaattactattaatcagcaggggagatgagcaacgcatcttaacttctagattagaacaacaagactaaatatgagtatggaatgagtgcgaaagcgagacctgatagtaatgaaattgagaactagtatcgtcgtaaagcaaaataaaacaccagacgtatgacactgggaggcgattgtatactgtatcagtacttaataaagggttcaaacttgttaaaaaaaaaaaaacaaaaacgtgggtcga

SEQ ID NO: 76075 - DNA, 1156 bp, Oryza sativa
  Clone ID: PAT_MRT4530_76101C.1
aagcggggcccgcatgtcagcggcgcacgggtggccggtctaccgtggacggggaccacgcgggtgatccaccgccggtccacgggatcgacggcccggatcggcccggggccgatcggacggtgcggcggcgaccaggctaggctcggctcggcacaaagccggccgaccggtcacggcgacggcgcgcgcacgcgcacgcgcgttgccgacgacggcaaccgccggcggagacggcggcgcaaggcggcgccgaagggcgcggcggctaggagggagagggaggggaaaagaaaagggaggggtgcctcaccgagggtggccggcgcggaagaagatgatggcaacggcgacggcaagccacgggaggacgacgtcggcgggcggacgagcttcggggtgccctaaggaaggagaagagagggattagagagagggagatggaccacggcgaccggaaaccatggccgaaggcggcggtggaggtggtgctcacccgagtgcgagggaacgaaggctccggcgacgaacttcgacggaggaggggtggacggggtggatctcggccacgcgaacccgacggcggcgacggcgcggcctggcggcgaccctaacggcggctagcggcagccggagcagcggaaaaggcggcggcaaggggttgcacggcgcgggagcgatgggaggctcgagagagggaagagggaaccggacgtggccgggagaggcgggaatcgccggccgacgtggggagtgggggaggagagagaggcgggattcgaaaatcgaatcccggccatctcgggcgcgggcgcgagcgggagagagagaggagtgggcgcgggagacgcggcgcacgcgcgggcgtggtcgacgtggcccggaggaggcggagacgagggcgcggcggcggttgcgagatcggcgggaggtgggggaaggacccgacaggtgggccccacctgtcggcgaccccggagaggagggcggcgggacggcctggctgggcgtcggcctgcggccggcccagcagggagggggaagaaggaaggagggaatgggccagcggcccatccgaaaaaaaagaggaaaaagagaggaaaagaaaaagaaaaaggaaaaaggattttccctgaaattgaaatattgcttgctc

SEQ ID NO: 76076 - DNA, 369 bp, Oryza sativa
  Clone ID: PAT_MRT4530_76102C.1
ggcccgggaaaggtttgccctttcaaggttttgaattggtttatgttttccaaagttgcccgtctaaaattttgcccccgggggccggatttccctttttaacatccccaattgggggtcgcaggtttttaaaggtcttgcatttggttgagggggggccccgaaaataatttttttccacttgtgccccaatataagggttaggagcaatcaaggtgttggggttttggaaccgttttagggcaattggggcgttccgggagtcttgtgcccgggggggtgatctcccgctggttttttttaggcttaccccctgggtttgcccccccttgatcctgggcttgaaaccccccgtttaattgtttttgg

SEQ ID NO: 76077 - DNA, 780 bp, Oryza sativa
  Clone ID: PAT_MRT4530_76103C.1
ggtgcttccatcgttcgtaaaaaaaaaccagaccaaaaaaccaaatctgtccgtaaaaaaaactggacgaaaaaaaggaaaaaaaacaaacttgtccgataaaaaagggcgaaaaaacgaaaaaccgggcgaaaaaaccaaatctatccaatccagaaaaaaccgggtgaaaaaaaaaacctaaacccgtctgataaaaaaaaaggcgaaaaaggaaaaaaaaaagggagataacaaagacagaaaggtgcataaaaagaaaaagaaaagccgcaaaaaaaataaaggaaaaaagaaaaacaacaacaacaacaaaagtctgtttcccctatgtggccaaaaaaacatagatccgaacaaaaaaaaaatcctattcctataaaaggcaaacaaaaggtggtgaaaaaaagctagatccaattcctttaaaaacgaaaaaaaaagtctgattccaataaaggcaaaaaaaatctgaaaaaaaacaaaaagagaaaatgcatgagaaaataaaaacggttcaaaaaaacgcatgagaaaaaagtcaaaaaaaagcgcaaaaaaaaaaaaaagcaaaaaagaacattcgaaaatacaagaaaaaaacgcgcgagaaaataattgtcagaaaaaataggcaaaaacacacgagaaaaaaaaaagcaaaaagggagaaaatatggttttcgtcgtcagtaaaaaaagcaaaaagaaaaacatgctaagaaaaaatattagaaagaaatgcgccatttctacatgatattagaaagaaagacgtga

SEQ ID NO: 76078 - DNA, 608 bp, Oryza sativa
  Clone ID: PAT_MRT4530_76104C.1
tcaaggccggccgaccgaccgcggcgacggcgacgacgcgcgcgcgaacgcattgccggcaacgcatgcgaccgacgacggcagcgaccggcggcacgcgaggcggcggcggtcgaaggcgacagcgcgcgacttgaagcggcggcgcggcactaagaggagaggaaggggaaaagaggggaagggatgcctcaccgagggtggccggcgcggaggaagacgatggcgaacggcgacggcaagccacgggaggacgacgtcggcgagcggacgagcttcggggtgcccttgacggaggagaggtggacggggtggatctcggccacgcgaatccgacggcggtgacggcgcggcctggcggcgaccctaacggcggctagcggcggccggagaagcggaaaatggcggctgcggaggttgcacgacgcgggggcgatgggaggctcgagagagtgcggcgaaatggggaaaaagtgagagggggcgacggcggtgcttaaaaaggggaagagagaaccggacgtggccgggagaggcggaaatcgccggccgacgtgggggaatggggaagagagagaggcgggattcgattttcgaatcccggccat

SEQ ID NO: 76079 - DNA, 308 bp, Oryza sativa
  Clone ID: PAT_MRT4530_76105C.1
ccgattatacttaagttcgagctcaggtactcttaagaccacccgcgaggctacaggtgaagagagatccaagtcatgtatatgtgtcggaacaagtcatcaacacacaagggttctcagcaccgccagctgcccatcgcctcgaccagtttcttctggaagaagccctccattacaccgcaggcacaacctgttttgctcccctttttgtttttcctaacatctctttaggtcaccaagcaccgaagaaaaaggagccaaatcacaataaaagaggagaaagagatgtaagggaaaagaaacctaat

SEQ ID NO: 76080 - DNA, 348 bp, Oryza sativa
  Clone ID: PAT_MRT4530_76106C.1
atgcccatgcttcctcatatttctaggtgtatatatgtcgtcgtctttgtcgtcatcactggaagcagaccgagaaagatgtcccacttgttgctgcaggctgcggagggcctgccagtgctatcggagcaccgtcgcccgccgcccacatttggctggccgacgacaacgttctggttctgcagctacggccgttggaaatggggcgtctcgtactgcacctacatcttgccaccgccgatgtcgtcggcggcagcggccattctgttgttgttgtatttgtggttcatggccaacagctatgtctgcctttgttttgatcccaaaattacaagatttgatatgtga

SEQ ID NO: 76081 - DNA, 411 bp, Oryza sativa
  Clone ID: PAT_MRT4530_76107C.1
atgccgctgctaggcagttggcagcgccacggcggattcctctgcgtgtggcctgtccccttcgtcgcgatggtgaagatggcgacgaaggacaaaggggcggcagatgcctgggagtccgggtggaagagattttcctcaacggcagctgcagaggtctccgacgacggcccttggggcggcgacgagctgggagtccaggaggtggaggaggatcccgaagacggtggcggccctaggggcggcagaggcctaggaattcagcgaagcggaaatggatcttgccggcccgcatttggttggcttgttttggctgggacgacggatgaaagtgggctaaaccaggcgacgtttggcatcaactcatatgaagcgaatgaagatggcatcaacggaggctcgcaacgatga

SEQ ID NO: 76082 - DNA, 545 bp, Oryza sativa
  Clone ID: PAT_MRT4530_76108C.1
atggggcgagcgtcggccatgtcggcgcagcgggtcccccgcccttccccaaccgacgacgcccaacccgacgccggcgcagctcccgtccttccctgatcgatgccgtccccgcccttcctcaacagacgccggtcaacgcgacgccagcgccgctcccgcccttccccgaccgacgcctcctcctcccgacgccgccgccccttcgctcgtcggccatggaggtgggagacgaaggtggtgaggtggccgacagcggtggcgtcaccactgcctcatcctcctggcgccaccgctcctcaccaccgtgcgtcctcttcgtcgctgaaccgccgctaccgctcctcctcgccgagacgccgctgccaccgctgaggccgacgacaccgccgttgccatatccatctctccctcttcttttatttcaacgtgtgtatgacatgtgggggtcgctgtcagcgggactagttatttcaaaagccacagctattgaaccaaatgagcttttccaaaagccaccgtacatattccccagctacttttaa

SEQ ID NO: 76083 - DNA, 1578 bp, Oryza sativa
  Clone ID: PAT_MRT4530_76109C.1
atggctcctgtctccctccacctgctctcgctcacccgcctttcgcttcccttccgcgacactgtaaccaacccgagcacaccaagaataccaccatggcgccggcagtggatcagccccaccgacgcgcggcggcggcggctgtcaatgccggtgtcggcagtggcggccgaggcgccgctcccacgagccgtggatgagaaggagacgccggcggcaggggaggagcggttcgactggctggaccagtggtacccggtggctccggtgcgcgacctcgacaagcgcaagccgcacgggaagatggtgatgggcatcagcgtcgtcgtgtggttcgacggcggcggcggcgagtggcgcgtggtggacgacgcgtgcccgcaccgcctcgcgccgctctccgagggacgcgtcgacggcaagggctgcctccagtgcgcctaccatggctggtgcttcgatggccacggctcctgccagttcatcccccaggcccccgccctaggccctcctgtgcacaagaatagcaaggcgtgcgtggcgtcgtacccgagcgtggtgcagaacaacatcctgtggttctacccgagatcggagccggagtacaaggagatcctgcagaggaagcggccgccgtacatccgggagctcgacgacccgtcgtccgtcatcaactccggcgtcagagacctcttatacgggtacagaaattatttacaagctattcacaagcagctcgatgcctcgatgtatgtgtgtgtatttgaatttgaccaggaaggtggcctcccgatcaagatgaatatagaggagctcaacatcgcagggttccattccaacccagaggagaactggggctacttcaagttcatcgcgccggttactctcataggctcgccatttcgtgctaagccagtggttgatcaggacaacaacaacaccaacaacaagaagcagcctgaggtcacgacagtgttcttctgcatcccggtgtctccgggaagatgcagggtcatctgggcgaacgggtataatcttgatggctggttcgacaagatgataccacgttggtggttgcatattaagacgaaccaagtcctggattcagactcgtctgtccttcatattgaggagcgtaattacgccgcgtttggccttgataactggcataaagcatgctacgtgcccacatcatctgacaacttgatcatcgccttcagaaactggttcaagaagtactgtaacaatcaggttggctggttaaccccaatggttaatcagctgccaccagcttctaccagagttgaggtctacgagaggtactggtcgcatgtcatgcagtgcacgagctgcagcgctgcactgaagtggatgagagctctggaggtcgccctgcaggtggcttcggtcgccgtcgtcgggttcctcgccgccggcaaggggacggtggtcacgtcgggtgttcagagagccgccgtcgtggctgcggcggtgctgtgcttcgccgcctcccgctggctcgccggcttcatcgagaagaccttctatttcgaggactatgtcctcgctgacaagtga

SEQ ID NO: 76084 - DNA, 1257 bp, Oryza sativa
  Clone ID: PAT_MRT4530_7610C.1
caccaatctctctctctctctaagatctctatctatctaaagatctgagctacaattaattaaaacctgataagaagaagaccctgagctcaatcccttcttattatactatatatatacttctgtatttgtgcacagtgttggtacaggtatctgcagacagccatatctatctttctagctaattggcaatatgcctgaagtccactgctcgtcctaagatttacttctccacccccccccctctcctttgcttcttcttcttcatcatcatcttcttcctcctcctgttaattaagttcttgatttctaagctagcaattgagcacacatcgatcgcgagagacgcagcggcgcccgtctaccgcggggctagaggaatgtcggcacagatcgtgccggcgccggagcatgtgtgctacgtgcactgcaacttctgcaacacaattttcgcggtcagtgttccaagcaatagcatgctaaacatcgtgaccgtccgttgtggccattgcactagcctgttgtcagtgaacttgcgaggattggtccaagcactcccagcagaagatcatttacaggacaatttgaagatgcacaatatgagcttccgcgaaaactactctgaatatggctcatcttccagatatggccgagtgccaatgatgttctcaaaaaatgacacagagcatatgctgcacgtgcgacctccagagaagaggcagcgggttccttcagcttataacagatttatcaaggaagagatccggaggataaaagcaaacaatcctgacataagccacagagaagccttcagtactgcagcaaagaattgggcgcatttcccgaacatccatttcgggttaggctcccatgagagcagcaagaagctcgatgaggccattggagctcctagtccccaaaaggttcaaaggctgtattgatcgagtacacatgatgatcgatggatcctacgtgcttgttgatctcatgttgtaagtaacttaaaaaaaaaaaaaaatctacgcttatttatttcttaagtatcatcagttaaatttgtgagcgagtatatagatgagttgtcatgatcagtgagtgatcgtatgcatgcagtgctgagaattaaaggtgtatatgcatgagtaacgttacatgcagctagtgtcgacgcacgtatgacagactgaataaactcttcaccatgttgtttttttatgtttgaaatgaattaattaattgtccaaaaaaaaaaaaaaa

SEQ ID NO: 76085 - DNA, 2115 bp, Oryza sativa
  Clone ID: PAT_MRT4530_76110C.1
tcgtgctgccacgggaggctcctatgcgagccatgcagatgcatgctacaaggttacaatggaactagtcctaatcaagaaaagtaccaatactgaagattcataggatcatatcatatactattgctgggaaactaaagccagaaatggcggacatgaggcgccattcggtagatgttccactgtcaagaacattggtgcagctgaagagagtgaggtcgctgcgggatccagcaacaaactctttgagcaagtatgcatctccttctgacaatatgatctgggagaccgcttctagcaatggggttgcaatggacctaggcaggtcagcacatcatcagttgatcgaagaagatggagatttggaagctgaagctacattgggttcagagcggagttttcgggcaccaaatgcaagaaccgcatcatatcggaaatcttctgttgtcaagatccgaggcttaaacccgcctagaaataagcaagctcatcgtgcacgccaagatggtcatcgcaagtcagtggactctagccactctaaccatagctctattcgacaattggcaaacactatggttaacaatgtagctgaggagaaggaagaagaggaggaagtgaattcttatgaacgttcagttcccacaccgccggcgaagactgatgaagaagtgaagatgccagggttttccaaattcaggaacaaatcttccgctgcaatgagccgtgtcggtagcccttgtatgtcagccagtgaggcacgctcagttaggtcgagaagaacagaggaaacacaagtgaggtcaaatgatgttgttggatcaaatttcagtgggtgtgggattagctactgctggtccggggcatcaaaataccgtgaactttattatgacagtgatggtccagagcaacctttgttatcgcctgaagggaccgatgcagcgtttcaggaaaatgtaccatacactgagacgccaaggtgtttaagtcagaaatttcgccctcggtccttcagtgagctgattggcctcaatgtggttgctcagtccctcttatattcctcttgcaaaggaaaagttgctccaatgtacttgttccatggtcctcgaggtacaggcaagacatccacggcacgaatttttgctgcagctctaaactgcctctctctcgaagagcaaaggccatgtggattctgtaaagagtgtgtcatcctcttctccgggaggagtagagatgttaaagaacttgatgcagcaaaaatggatcgtttaggtcgagtgaaggcgcttctcaagagtgcatctcttgtcccatactcatcacgcttcaaggtcttcatagttgatgaatgccatctgttgccagaggatgcttggtcagcaatactgaagagtcttgatgagccataccggcatgctgtgtacattatgattacttctgacatagatagcctccctcgcacttctatcacacactgccagaaattccatttcccaagaaaaggtggcagatatgtctaaaggttggagagaatctgcatagaggaaggattagaatttgaccatgatgggttgtacttcatttctgcaaagtctaatggttctcttagagatgcagaaataatgcttgatcaactcagtttgctcgggaaaaagatcacaatttctcttgtccatgaacttgtaggatcagtgtctgatgatgagttgattgaattgcttgatttagcgtggtccccccgcgccgccggcacagtaaggcgagcacgagagcttatggcatctgcaattgatcctctgcagctggtctctcaattggcaaaccttattatggacattctctcaggaagatgccagtctgcagtcactgaagtcagcaaaagtttcttaggaagatatgcattagccgaggttggtataaagaaacttagacatgcactgaaaatactttcggaaactgaaaaacaattgaggacatcaagaaatcaggctactgggtgacagtgcgctttgcagttggcccaatgaatctaaccttatcgcagagtcaaatgacatgcatgcacattcagcaattggatatacagatgattgggtttccaaggtgaactcaagctcc

SEQ ID NO: 76086 - DNA, 1719 bp, Oryza sativa
  Clone ID: PAT_MRT4530_76111C.1
atgcctcggcggcggctccggcgcggggacctcgcctgttcggtggcggtggcggtggcggtggcggcggtggcggtggcggccgtgggggcggtgggcggaggcgatggcggcgcggatttcgactaccggaagctctcggggataataatccccgggttcgcgtcgacgcagctgcgcgcgtggtctgtgctggattgcccctactcgcccttcgacttcaaccccctcgactccgtctggctcgacaccgccaagctcttatctgctgtcaattgctggctcaaatgcatgctgctcgacccttacaaccagacggatcatccagagtgcaagtcaaggcctgacagtggtctttctgcaattacagagttagaccctggttatataactggtcctctttcttcagtgtggaaagaatgggtcaaatggttaacttttgaaactgcattgaaacttcgaggagggccttctttagtgtttgctcattccatgggtaataatgtgtttcgctactttctggaatggttgaaactagaaatcgctcccaagcattacatccgatggcttgacgaacatatacatgcatactttgcagttggtgcacctcttcttggttctactgaagcagttaaagctgctctttctggagcaacatttggtcttccagtcagcgagggaacagcacgattgatgtttaatgcatttggttcatctttatggctcatgcccttctcagaatattgcaaagctgataatatatactggaagcatttctttgagggaaagggaggttgccaccacagacagcaatgtgatgaaatggaatataagtctgaatactcaggatggcccacaaaccttgtcagcatcgaggttcctacagttcgagatacggaagcatacccatccattatggatacaactgagaacataacatccagcatggagtgtggaaagccaactcttttgtcattttctgctagggaggtttcagatggtactctgtttaaaaccataaaggattgggaccctcagagcatagggcttatccatcagcttgagaagtactaccagggtgatccagttcttaatcccctcacaccctgggagagacccccaataaagaatgtgttctgcatatatgggcttgattcaaagactgaggtaggctattattttgcaccgagtggaaaaccatatccagataactggataataactgatattatttatgaatttgaagggtctctactatcaaggcagaataaaatagtaacacaatttattctttccagatcaggtaattctgttactggaaagcccaacaattccagcggagacggaacggtatcctacaattctctctcatggtgcaagaactggcttgggccaaaagtgaacataactagggctccgcaggcagaacatgatggatctgatttacaaacaaagatgaatgtcgaccaccatgtaggccagggcatactcccaaacatgacgaggactccacatgtgaagtacataacctactttgaagatgctgagagcattccgggatggagaacagccgtctgggagcttgataaagcaaatcacaggaacattgttaggatgccagtactgatgcgtgagttgtggcttgaaatgtggcatgacatgcaccctgatgcgaaatcaaaatttgtgacgaaagataagctgatggatactgattga

SEQ ID NO: 76087 - DNA, 299 bp, Oryza sativa
  unsure (1)..(299): unsure at all n locations
  Clone ID: PAT_MRT4530_76112C.1
gcattggaccttgcatcttgaagttgatgtgccatattaaaaaaagaagaagagaatgcataggttgcaagttggccatctactacatgtttttggatatcttggtgaagacttatgaaactcttcttcagcatgatagagacatgttgaagacagttccagatgtagttgcaccaatgcatctgtttttagtttacatgtaggtttgcaaagtggattgacaacaaaagggtactctntatctngattaatggttatacagatcctaaaagtacaacttataactttactgccgatca

SEQ ID NO: 76088 - DNA, 1370 bp, Oryza sativa
  Clone ID: PAT_MRT4530_76113C.1
gatgcctcctcgcaagaaaacttctcgcaagtccaagcgctctagggatcggtctcccactccttccccatcctatcatgaggactcggaccgtgattggtccgggggaggagaagaggagaccggccctcaggtggccaatgttccccggggctcctctctcccacctcggcgctcaactcatggggatcaagggtcctcgaggcagctttgtgctttctctggcgagggctctcctcgctaagctcacaccactgcacctcctccggcggggctcatcggccctctcatgcttcatgctccctcgcgcaatcctcgccgagctgtacgtgactggcgccaaaagtctgacattgtggctgtggagcggaatcaggatcctcgttccatgccgtgctccgcctctgatggcagtgcccatgcaatggattgattgggaggctttggcgaccctcgatgatcctgacctcaatgccgtcattggcgcttgtgaggagatggggggctcgtggtattctatctcttatgaccagcttgccaatctgtggggttttgatgagaactggatgcggtacatgacccacttgcatgacattgtgattcctcacaatcatgacttgcgccctctgtatcttcctggcggcaagttggggactactgaagggctcaagccttatcatatctatctcaaccgcatcctcaggcggaccttgactccaaaggacggcgatgctaaaaacatcaaccacttctccctctccatgctccttaggttcaatccccccagccgtccctttcatgtctttttatttgtttggcaggaaatccgcatggcttctcttcagtataagcgagggcttccctatgctcctcatataatgcggatgattgaacatgtcactcaccttcggtttgtgtgcgaggagccacataccgctctttccttgcgcttgcccaagcgcgggtctgtgcctcgggacatcccctccacatcctctcagccgccttctgctcctgagcgtccttcctctgtggctcgtcgtgagccgtctcccttattccgcattttgcggactctttttggcctttgctccgcggaggctaaaaagaaccgccgattgcggaatccggcgaagaaaacggctcatgacgtcaagtacctcaaggcgcggtatcatgaggaccaccatattgatatccctcctttccctccgggtttcgaggccgagcccgatgagcccgaggaggaagagctagaggatccatttgctggggtgcctcctgactttgatttctttggttatggccatggctatggctatcctcctccacctcctccagaggatcctcctcgggcgccccttgcttga

SEQ ID NO: 76089 - DNA, 1143 bp, Oryza sativa
  Clone ID: PAT_MRT4530_76114C.1
cctttggcttcctctggcgagggctcttctcgccaagctcacaccactgcgcctcctccggcggggctcatcggccccctcatgcttcatgctccctcgcgcaatcctcaccgacctgttcgtgactggcaccaaaagtctgacattgtggctgtggagcggaatcaggatcctcgttgcatgccgcgcattgcctctgatgacaggtactggacctcttttcagcaagacttttatgaaactgtcattttgcctccttccaatcctacactgcccatgcaatggatagattgggaggctttggcgaccctggatgatcctgacctcaatgccgtcattggcgcttgtgaggagatgggggttcgcaatttcacgacccttcagcaggcttggtgcaaggagatcattgctcaattctatgccatagtctattttaatggtgatcgtgacattcattggatgactcagggctcgtggtattctatctcttatgaccagcttgccaatctgtggggttttgatgagaactggatgcggtacatgacccacttgcatgacattgtgattcctcacaatcatgacttgcaccctctgtatcttcctggcggcaagttggggactactgaagggctcaagccttatcatatctatctcaaccacatcctcaggcggaccatgactccaaaggatggtgatgctagcaacatcaaccatttctcccgctctatgctcctcaggtctgtgcctcgggacatcccctccacatcctctcagccgccttctgcttctgagcgtccttcctctatggctcgtcatgagccgtctcccttattccgcattttgcggactatttttagtctttgctccgcggaggctaaaaagaaccgccgattacggaatttggtgaagaaaacggctagtgacgtcaagtacctcaaggcgcggtatcatgaggaccaccacattgatatccctccttcccctccgggtttcgaggccgagcccgatgagcccgaggaggaagagctagaggatccatttgctggggtgcttcctgactttgatttcttttgttatggccatggctatggctatcccccacaacctcctccagaggatcctcctcaggcgccccttgcttga

SEQ ID NO: 76090 - DNA, 302 bp, Oryza sativa
  Clone ID: PAT_MRT4530_76115C.1
cggcggagctcggggcgaggatacgatggcaccggcgctgggaggcgggaggcggcgacggcgacaatggtttgaggggcgcggcggcggagctcggggcggggatggcgatggcggcggcggctcgcgacgacgaccccgacgacgacgacggcgccccgacgacctcgcgaggagtacagttgctgcgggccggtttggcgaggcgttttggctggccaaatctagccagccagccagcgattttggccaggcttggccatccggttgaccagtctgttggacctcgtttttgtggttga

SEQ ID NO: 76091 - DNA, 978 bp, Oryza sativa
  Clone ID: PAT_MRT4530_76116C.1
atggcagtgccggatccacagcctcgtgccacgccatcattcccgcccacagcgtctaataccctagtgacggagcgtggggctcctcaccgggagaccgcgcaggcccccctttgccggttcggccgggggccctggcccatacctacctccacttccgccggaagcaggcgcgacgtgggaacatggctgtctgctgacgacatgaccagtgtcagaccggtcacaaatcggtcattcttgtccaccacgcgtcagtttatcaatctgcatgttcgcccttcttcatacaatatcttgcctgtaatggttaggatgaagcctggcatatatctgaccggaaccaacgtgccatctccaggaggtgccgtcgaactacatcacccagagggcggtatgaggcagctgcgatgggctcgagctggcctcgggggcggagacgagcttgggagctggggtccactccaccacaaagtcggcgagggcctagctcttgatcgcgtggcttggttcaaagtgcaaatcaaactcagaaagttcgattgcccatttcaccacccgtccagtaccctctcgattatgcaagatttggccgagggggtaagacgtaaccaccgtgacccgatgcgcctggaaataatggcgcagtttcctcgaagtcatcagaatagcgtaaagcatcttctgggcctgagggtatcgggtcttggcatcccggagggcctcaataacaaagtagatgggccgctgcacctttcggtggggccgatcctcttcgctaggggccgcatccctggggtgctcttcacccaagcggcctcgcggggcgcactcgtcttctgtgccgacgacctcggggtcggaggacgacaggggcggccttcccacagtggcctcggggccgtcctgggggtcgggggctcctggcgtcgtcggacaagcgggcaaagggccaactccggtcgtcaggggccttag

SEQ ID NO: 76092 - DNA, 378 bp, Oryza sativa
  Clone ID: PAT_MRT4530_76117C.1
ggccgccccttttttttttttttttttgcagaagagtctgaatattcaacattgaggctgtttgcatattgcacatcactcagaacattaacaggagagcacactactacattcttgttgcaattgttctttgtggaattgtcctagacgaggctctatacgaacattggacggacaaggctaacgccgaacaaaggttgagcttgagctcagactctgatcaaaggagacaacgccgacctgctgcagctgtggcacgctgaacaatcgcactgaacgctactaatgcgcctgcctagacgagattgttgcgctaccagcctgagctgttggcaacactgttgctgcatgacttggctgtttatcaatcctggccgg

SEQ ID NO: 76093 - DNA, 528 bp, Oryza sativa
  Clone ID: PAT_MRT4530_76118C.1
atgaagcctggtatatatctgaccggaaccaacgtgccatctccaggagctaacacgccggctccggctagggacgagtgcttggaggctctcgtcctgacgggatggggcgaggctaccctctcggttatacaagatttggccgaggggataagacgtaaccaccgtgacccgatgcgcctggaaataatggcgcaacttcctcgaagttatcaggatagcataaagcatcttctgggcctgaaggtatcgggtctcagcgtcccggagggcctcgctaacgaagtagacgggccgctgcacctttcggcggggccgatcttcttcgtcaggggccacatctccagggcgctctccatccgagaggccacgcggggcgcattcggcttctgtgccgacgacctcggggtcagagggcgacaggcgcggccttcccgcagtggcctcggggccatcctgggggtcgggggcgcctggcaccgtcggacaagcaggcggagggccagctccggtcgtcgggggccttag

SEQ ID NO: 76094 - DNA, 885 bp, Oryza sativa
  Clone ID: PAT_MRT4530_76119C.1
atgactcgcgacctgatgctccggatgaaagcttctagattttccttgaagtttcccggcaagttgaaaccagtcatgcacgaccctgttttcacaacaaaagtgaaaacaaccaaggttatacagagcaatagaaccgaaatcgaagtcgcaacaggtttggaatgggtcgaaatagaaccagatgtgtatgaggatccatctcctgcaaaagacaacgtggacgcaccctcggtcgatgactatgtcatcgacaagtccgaagtgcctaaactggtcaaaagccacaactccaagtccaaggataatcagaaggtgaagtggatgacacaatcgcacacgtggcctggcacccccgaggacgtcgggcccgagggtgatgtgttcgccctcctcttagtccccccgagggggtcgggccgcacccgcctcggccccgagggccgaggcgccccgacccctcgtgggtttttgctccgcgtgtatgggttagtcacagactggtcagatcgcgggtttggtggcgacaggcgatctgacgcacgcctcgccccatcccgtcaggacgagggcttctaggcgctcgtccccagctggagctagcgtgttacctcccagagatggcacgttagtcctagtcagatatatgccaggcttcatcacgtggtggacaagaatgaccgacgtgactggtctgacaccggtcatgtcgtcagcagacagccacgattccacgtcgcattttgtagctccttcatacacagatctcccaaaacacaggagtagggtattacgcttctcagcggcccgaaccctgagtccccggccgaactggcaaaggggggcctgtgcggtctcccagtgaggagccccacgctccgtcat

SEQ ID NO: 76095 - DNA, 212 bp, Oryza sativa
  Clone ID: PAT_MRT4530_7611C.1
gtcgtcgtcgtcgtcgattgcgaactcgatggatgggggccatgtctgatttcgttgtgggtggtgcaggggagctgaagaagatggtggcggcgcgaacggggctgcatccggacgaccagaaggtgatgtacatggacagggagagtgactccaacgcgttgctgtacatggccggcgacaaggacagttacacgctggtggtattctag

SEQ ID NO: 76096 - DNA, 528 bp, Oryza sativa
  Clone ID: PAT_MRT4530_76120C.1
ctgtcggtgacatgggatcgggagtatcatgactagaggcttgaggcagacacaatcgcccacgtggcctggcacccccgggggacgtcgggctcgagggtgatgtgttcgccctcctcttagtccccccgagggggtcgggctgcacccccctcggccccgagggtcgaggcgccccgaccccggtcagatcgcgggttaggtggcgacaggcggtctgacgcacgcctcgccccatcccgtcaggatgagagcctccaagcactcgtccctagccggagccggcgtgttaactcctggagatggcacgttggtcccggtcagatatataccaggcttcatccgatttgtgaccggtctgacactgatcatgtcatcagcagacagccatgttcccactcgcgcctgcttccggcggaagtggaggtaggtatggggcttctcagcggcccgaacccaggacccccggccgaaccggcaaaggggggcctgcgcggtctcccggtgaggagccccacgctccgtcat

SEQ ID NO: 76097 - DNA, 446 bp, Oryza sativa
  Clone ID: PAT_MRT4530_76121C.1
atgttgtgtgaagaagggcaaacatgcacgttgctaagctgacacgcggtggacaagaatgaccgatttgtgaccggtctgacactgctcaggtcgtcagctcacagccacgttcccgcgacgcgcctgcccccggcagaagtggagatccacaaaaacacaggagtagggtattacgcttcggagcggcccgaacctgtatacatcgctgtgtctcgtgtgtcttgcgggcgagtaatctttccacacacagcgagagcttgagatctcaccctaagcccccggccgaaccggcaaaggggggcctgcgcggtctcccggtgaggagccacgagctccgtcacacttaaagtactatgagtgataaaacaactcgtaacaaaataaattattattacgtaaatattttgaataagacaaatggtcaaacatgtgagaaaaagtca

SEQ ID NO: 76098 - DNA, 1509 bp, Oryza sativa
  Clone ID: PAT_MRT4530_76122C.1
gagcgattcaaacccatgagggtactttattatcaaactgaaattcaatgtcgtaacatgtatcaaggttaacatttttttctccacctgacagtaaacccctatttttttactacaaactgaatccatgtaaccatgagcaaagaattaaaacatccgcaccaggcaataggatacatgtatgcttaagggaaaacccacaaaattagttttaccgccaacggcctttcatgaatacattcctaatctttctgtcattttcccttatacctatatcccaaagataaaaatggagtttgacatccccttaggaagaaaaggttgaaaggacgttcttcttgatgatgaattcatcggcctttgatgggctgatggacttctccaacatgcgttcaagcctctctgtttccttcttggtatagtcgtgacctttgtccaggattttctttgcaatggcaatgtagacctttccatgctttgcagcagaaccactgagcttcacaacctcctcttccatattggagaggatttccttccgcttgtcattggcagcaccaaggaactcctttgcgagggcatccaaacttgctatgcgccccgcctctgaagtaagttggcccttagtatcacggctggtaccacacttctcattaatgaacttgacaaagtcatccaactccctgccgccatcgtaatcttcaccagctttgtttccctttgggaagaacttcaatgtaggatagccagaaactccatatttttcggccaagtctttgtgtttgtcagcatcaaggttagcaattacaactccatcgtccaacttataaacagaagccagcttctcatatatcggagcaagatgcttgcagtggccacaccatggcgcatagaactccacaagaatgtctttgttttcatcaagaacaattgagtcaaagttgtctgggccaagcactacaacacttgaaggaatggttgccagctttacattagtgcctccttcagtgttaacaaattcagcaagggcctctgcactgcgttgtccttcatactttttgggctccagggatcctttggggaaccattgaattgttgggtacccagaaactccatacttgctgcacacactcttgtgctcatcgcaatcaacctttgcaataaagacagatttggctttcttgaaacttgcaccaagcttttcatactcaggggcaagcttcttgcagtgaccacaccagggcgcgtagaactcgacgagggcgccgcggtcctggccgacctccttctcgaaggtggactccgtgagggcgacgacgtcgtcgccgtcggcgaacgccggggcggcgaaggcccaggccaaggccagggccagggcggcgaagaggggcagggttttgcgcggcgagatgcgggggatcgccatggctgcgacttgtctgggtctgggggcggcttggcgaaaccccaggccaagcagcgaggtgacgtaagcggatataccccggccgg

SEQ ID NO: 76099 - DNA, 785 bp, Oryza sativa
  Clone ID: PAT_MRT4530_76123C.1
atggcgaaaggaaggaaacagattccttcctcagtgcctttatactcttgccaacgctgtgcccggctcctcgcttctcgcgcccactatttcgccccctcgtttctcgcgcccacgcttccactaatcccattcgcccgcttgcggcgcatgagacacaatcgcacacgtggcctggcacccccgagggacgtcgggcctgagggtgatgtgttcgccctcctcttagtccccccgagggggtcgggccgcacccgcctcggccccgagggccgaggcgccccgacccctcaccggtcagatcgcgggttagatggcgacaggcgatctgacacacacctcgccccatcccgtcaggacgagggcttctaggcgctcgtccccagctggagctagcgtgttacctcccagagatggcacgttagtcctggtcagatatatgccaggcttcatcacgtggtggacaagaatgaccgacgtgactggtctgacaccggtcatgtcgtcagcagacagccacgattccacgtcgtgcctgcctccggtggaagtggaggtaggtatgggccgtcccgtcagaaggtcattcggacggcggcgatgcaaatctccgtgcttctcagcagcccgaaccctgagtccccggccgaaccggcaaaggggggcctgcgcggtctcccggtgaggagccccgcgctccgtcaaacttatatcctcatatgctctgaacgtattgttaacagcagcaagaggagttctggcgttcccgaggtatttaaggggaa

SEQ ID NO: 76100 - DNA, 165 bp, Oryza sativa
  Clone ID: PAT_MRT4530_76124C.1
gccatccatagggtatctatcctaatactacatggctcccaggagcattcccaccttgtggttctgggtactgaattgtaatagtataatggttcaaaatgttaaaaataaagtcagcatcatcatgcggacagtggaaactggatgtcagataatctaataagt

SEQ ID NO: 76101 - DNA, 1531 bp, Oryza sativa
  Clone ID: PAT_MRT4530_76125C.1
atggtaaccacccaccacctctgcctcctccggtcgaccgtcctctccgttcccgtccgcctccgtgcaccccgggctccccctcacccccgcctgcccaccgcctccgcctccgcctcctcctatcatgggccaacgcacctccgccgcctgcggccactgcgcgccgccgccgccgccgccggaggagcctcgccggatggcgctgatggggccaagcgccccgcgcccgcggcggcgtcttcctcgctgggagccgcgctggtcggcttcgcgcgtagcaacttcctcccgctagctctaattgctgggattgctctggccctcatggatcctacactcggatgccttgctcacaaatattcactgtcaaagtacagcaccttcgggatattccttatctcagccatccaggatagggttgcatatcacattcatgctactgattattcaatttactttctagcatttaattatttagctgaggcctcaatcttgctgtttacaccctttttggctcagtttattatgcaaattaagttcttccctcatgaatttatcactgggttggctatgttttgttgcatgccaacaacattatcaagtggagtcaccttaactcagcttgttggtggtaacactgctcttgctctcgcaatgacggctatatcaaacttactgggcattatgattgtacctctttctcttgcaaagtacattggtgttggagctggggtgtctttgcccacagagaaactatttaaaagtctggttacaacccttcttatccccattattttaggaaagttttctgatgaaataatacctggacttgttctgcaccatatctatgcaactaccttacattataagcaggttgctcgagaaacatcaaaaggtattgctggctttgttgatggaaataagcagggcttttcagttacaagtgctattcttctcagcttagtcccatggatacaagtaagcagatcaagatcactgctcttatctgttcaaccaaaagcctttgctgttgctgtcactgttggagtgcttttgcactttgctctgttggctttcaatgctgcagcattgcatatcttgtcacgtcttgaacaaagaggagtgtctgtctttgcaaggaatgagtatgctcgagctgtcattttagtggccagtcagaaaacattgccagtgctggttgccgtggttgagcagcttggaggtgctctcggagaatcagggttgctggtaatcccatgtgttgctgcacatattaaccagattattatcgactctatcatagtaaattggtggcgccaaagagatcaacaatttgctaatgcaaaataaattcaaaatgggtaaaacaaaaaaataagtagcaagtaacatagaatcgtttggcaacgatgccctttgagtttaccgcatattagttttttatgattccgtaggaaacaacaatgaaactatttttgtgtagaaagttcattgagttgcttccatggagcactttctgttatgcatc

SEQ ID NO: 76102 - DNA, 3597 bp, Oryza sativa
  Clone ID: PAT_MRT4530_76126C.1
tcagggggcgtcgggcccgagggtgatgtgttcgccctcctctttaccgggagtatcatgacttagagacttgaggcagacacgatcacccacgtggcctaactccctcgggggggggggggggtcgggcccgagggtgatacggctgcccttctctttgtctccccaaggggtcgggccgctcccgtctcggccccgagggccgaagcgccccgacccaggcggtctgacgcacgcctcgccccatcccgtcaggacgagagcctccaagcactcgtccctagctggagccggcgtgttagctcctggagatggcacgttggttccggtcagatatatgccaggcttcatccgatttgtgaccggtctgacaatggtcaagtcatcagcagacagccatcttcccacgtcgcgcctgcctccggcggaagtggaggtaggtatgggccgtcccatcagaaggtcattcggacggcggcgatgcaaatctccgttttgtagctccttcatacacagatcctccaaaacacaggagtagggtattacgcttctcagcggcccgaacctgtatacatcgccggcgtcttgtgtgtttcctgtctcgcgaacgctgacgtactttgcgccatcaagatcggacggtcctcgatcatgacaaagccccgtcagcatatgcatcacatcgcacggtcctgatcgcgccacggcagcacgttcgtcatcgccacggtccgtgccggggcccgggccttcgcgggccccgcagcgaatcaccgtaggtggggcccagcccaggaccagggagatgaccacacgccgcgcaggatcggacggccgcgatctcgcggggaccgccgcgtgtcccgtgggggagggactatatatgggccggaaacgagacggcttgcactgcctgtgcactcggcgccctctcgtcgtatatgggggaaggatccgacggcccagcgcgacgcccgcagtgttctctccctccccacctcgatctctctctctcgcttcgtggctcttctctcctgcgactgcgagaggaatctcccactcagtcccagattgtttctgtgcggcgacagcgtcgctgcgtagcttctgatatctttgccgccgctgtgtttggcgccattgacgcagccgcatccactcctcgaccagacaagggaggcctttctctctgtgctatctccaaaggcttctgagtcgattcagaggcagagctcgaaaccgaaagggcggcgaaggtgaagccgaccggcgggctgcaaattgcgctcgttcgctcaccggcgacgtggaggagaaggcgccggagagagaggaagaggaggcggagcaacccggtcagcgcgcgcgtaggtggtttgggtacgcacactgtttacacggcgagcaaactcggaggagagagagagctgtggctaacgtagctatctgggggccgtcagttacctttcgatacacaaggtgagattgtggggggagcgattgactactgattgatccgtctcgtcgtcgtcgatcgaggagagggaggcagatagggagagggggtcagagaagatgctggcatgcatcgcgtgctcctccaaggaaggcggggaggacgggtcccgtggcgcggccacgcctcacggcagagatgccgtcaagtccctcacctcacagctcaaggacatggtgctcaagttctccggctccaacaagcatcagcactacaaggcggcgacggccggtagcccttcgttcaggagcaggagctaccgccgtccgtacccgggcttcatcgatgactccgcgttcatgacgacgaccaggcctggaggtgaggcctacatgtacacgagagcggcgccgccgccgcccgtccgggccgcgtcgacgtcgatggcgacatgggacatgaccaggagcaagagcaaccgagggtggcagcaggatgccggcaggagccccggcggcacgacgtggatacagagcatcgaggaggaggccggcgccgacgacgtcaccgtcgtggaggatgccgtgccgagggagtggacggcgcaggtggagcccggcgtccagatcaccttcgtcacgctccccggcggtggcaacgacctcaagcgcatccggttcagccgagagatttttaacaagtgggaggcgcagcgttggtggggcgagaactacgaccgcatcgtcgagctgtacaacgtgcagacgttcagcggccggcagcaaggcgtgtccactcccacgtcctccgtcgacgactctattctgagagaatcatcgttctgctccaggggcggatcgacccgggagagtccggtcgtgacgccggcgacgtcgtcgtcgctggccaaagagccgatcgcaaggagcatgtcgtgcaaggcgatggcggcttcggcgtctaattacgccgcggcggcggcttccacaagagcggcgtgctacccatcggtggcagtgcccgacccgtccgaccacgtgtgggcgcaccacttcaacatgctcaactccgctgcggccggcccgtccgcggcgggcggcggcgtcccatcgttgtacgacccgtcgcgggggaccacctcgtcccgcgacgaggcctccgtgtccatcagcaacgcgagcgacatggaggcgaccgagtggatcgagcaggacgagccgggcgtctgcctcactatccgcgagctcggcgacggcacccgcgagctccgccgcatccggttcagccgcgagaggtttggtgaggacagggcgaagtgcaaggaagagcccgcgccacaggtcgccgcggccgaaggggcggagccgagacggcggcggccgggggccgcggtccgcggcgccctcggggtggccgcccccttcgcggcgtcattcctcttctccttcgtcgtcgggctcgcgggtctcgtccttggtggtctctcctccaccgcgtccgtctccatgccttccacctgccggatcctttccaccggtgttgatcttaggtcatcaaaagtttgtgagctcggactgttgaactatagagctaagcatgtattttacccctcgagtaatagaaaatttcgatgccatgatgactactattgggcttcagtctttgaggttgaatacacagaatatttttctggtcagacatcttatgcggtggcagaggccccaaaggaggctcttccgctgaattgccggcctgactttggtgttgcatggtcaacaacattgaagttcaaggtaaatgaatcgtatagttgcagatacacattgggaagtagcaaggctgatatttattcagataggctgttcaattgcaccagcgaagaaccttcaacaattgagatgctcaagaggatatttgtattgttatcgaagtcctatatgttggaggatttcaattccattggaatgcttggatacgtaatggcaggggttgtggctggtattttgagtgccttactcatcactatcttactcagaagtctccgaggactagtccttgcagttgttgggtccagttacagcaaaatgattggattgaaagaacttctgttagattatgaaatcatggagagattcttgtaa

SEQ ID NO: 76103 - DNA, 551 bp, Oryza sativa
  Clone ID: PAT_MRT4530_76127C.1
acacaatcgcccacgtggcctggcaccctcgggggacgtcgggcccaagatgtgttcgccctcctcttagtccccccgagggggtcgagccgcacccgcctcggccccgagggccgaggcgccccgacccctcgtgggttttcgctccgcgtgtatgggttagaccggtcagatcgcgggttaggtggcgacaggcgatctgacgcacgcctcgccccatcccgtcaggacaagggcttctaggcactcgtccccagctggatcagcgtgttacctcccagagatgacacgttagtcctggtcagatatatgccaggcttcatcctaaccattacaggcaaaatgttgtgtgaagaagggccaacgtgcagattgctaagatgacgcgtggtggacaagaatgaccgatttgtgaccagtctgacactggtcatgtcgtcagcagacagccatgattccgcgtcgcgcctgctcccggcgaaagtggaggtaggtgcgggccgtcccatcagaaggtgactcgaacggcaaccatgcaaatctccgtccat

SEQ ID NO: 76104 - DNA, 561 bp, Oryza sativa
  Clone ID: PAT_MRT4530_76128C.1
atggcgccggaggaagagaagattgagagcgagcgcgtgtggcgaagacacaatcgcacacgtggcctggcaccttcgggggacgtcgggcccgagggtgatgtgttcgccctcctcttagtccccccgagggggtcggaccgcacccgcctcggccccgagggccgaggcgccctgacccctcgtgggtttttgctccgcgtgtatgggttagaccggtcagatcgcgggttaggtggcgacaggcgatctgacgcacgtctcgccccatcccgtcaggacgagggcttctaggcgctcgtccccagctggagctagcgtgttacctcccagagatggcacgttagttccggtcagatgtatgccagttttcatcctaaccattacaggcaagatgttatatgaagaagggggaacatgcagattgttaaactgacacgtggtggacaagaatgaccgatttgtgaccggtctgacaatggtcatgtcgtcagcagacggccatgcccccacgtcgcgcctgtctccggcagaagtggaggtaggtatgggccgtcccat

SEQ ID NO: 76105 - DNA, 196 bp, Oryza sativa
  Clone ID: PAT_MRT4530_76129C.1
ataacagggggtaaaatgtaaccaggaaagagcttttttgtaccccgacatacaaatgtaaaaatgtgtttccagaatttgttaaaggggattttataaaagattgagcccttggtgccccccacgttctaaaaaacaccagctccctcttgaaatggaaacgggtcaaaaaaagaaccccccctggaaacggggg

SEQ ID NO: 76106 - DNA, 554 bp, Oryza sativa
  Clone ID: PAT_MRT4530_7612C.1
ggcaacaacaggcccttttttatgggttaagattaattggaaaaccatccttaacaacccaagcctaggatggacatttttgggttaggcccccacaaaaatgtctggggagcttttgggggcatgactaggagggaacccccctaactcatccccccgggggggctggagcccccaaacttttttttttgaaaaacaaaaggcatttgctacaacatcgccaggaagggcccggaaaaaggaattttttcctgccagggggctaaccaggggggcggggggggttttaaaggcaaaaaaagagcacccttccctttgggccttttaaaagacaacaggggggttgggggaaaaaaaaaagcggcccacgagggagctttccataaaacacgggttttccattgggggggacaacttgaacccgggccccaccttgggtaatatcccccaccctttggggggtggggggtccaaaaaggggaaagggagggcgttctgataaaaaattactttaacggccctcatttggacaaaattaaaaagggggaactttg

SEQ ID NO: 76107 - DNA, 714 bp, Oryza sativa
  Clone ID: PAT_MRT4530_76130C.1
atgaccctggttcatctcccttcctccaatgccggaggagcttgtcggcagccaccggaggaggccatagccgacgtcatcaacgttgatggggccgaactcatcggcgacggaagcggagcggacgaactcaccggcgatgagggtgacgcgttgagacacaaacgcccacgtggcctggcaccctcgggggacgtcgggcccgagggtgatgtgttcgccctcctcttagtccccccgagggggtcgggccgcacccgcctcggccccgagggccgaggcgccccgacccctcgtgggttttcgctccgcgtgtatgggttagaccggtcagatcgcgggttaggtggcgacaggcggtttgacgcacgcctcgccccatcccgtcaggacgagggcttctaggcgctcgtccccagctggagctagcgtgttacctcccagagatgacacgttagtcctgatcagatatatgccaggcttcatcctaaccattacaggcaaaatgtagtgtgaaggagggccaacgtgcagattgctaagctgacacgtggtggacaagaatgatcgatttgtgaccattctgacaccggtcatgtcgccagcagacagccatgattctacgtcgcacctgctcccggcgaaagtggaggtaggtgcgggccgtcccatcagaaggtgactcgaacggcaaccatgcagatctccgtccat

SEQ ID NO: 76108 - DNA, 321 bp, Oryza sativa
  unsure (1)..(321): unsure at all n locations
  Clone ID: PAT_MRT4530_76131C.1
tcgtccacgcgtccgacgacgctaccgctcacgcgntctcatgctcgagattaaggcacacagtgatagggacgagatctatcgcatgacgccgtaatgggaccaccgggataagacgcaacaggactcacagcgcaacagacctgtaagagcgccgctgacaagatggctgacactaagtctacacggagcgagtgatgcgcattgcgatatactacagcacagtggggtatgcgcgacgtggataaggcactgtgggatgtgatatgatggcgagcaaaggacaatcacgcggtgttcaccggtactcctgatgggacg

SEQ ID NO: 76109 - DNA, 2464 bp, Oryza sativa
  Clone ID: PAT_MRT4530_76132C.1
atgccgacctccgtcagcccatctgccgtgccatcaaccgagtacgctgagcgcatatcggctagtaagcaaacacactgggatgaaattggaatcggccaagcacttgccctcaccatagacaattcggccaaagatgaacccttgatggctgccgctacttatttctggtccaatgccatcaacgcttttctattcaatcaagggccgatgaccccaactctgatagatatcaccatgatcactggtctggatgtaacctcatcggctaaccccatgagagtgaacaccaaaaatcaatatgattttaggacaaaaagcataggtggctggtctggttatgtggcagcatatatgggccaaggatctgtcactcctcgggaacatgtagcttttctgctcatgtggctaaaaaaattcctcttctgcggatccagttgtggtcctacaaccaattggcagttcgtagccgatgccttggaatcaaaacgacaattccccttaggcaaaatcctcctcagctatctgtaccaaacattagataatgcatcggccaagatagctgtcggctcagtggttggagcaggtggaccagccatgaaagctgtcaatcggccatccgtgacagaagccgaatttccaaggttaaagccgattacggatgacgatggagaagaatgcacccatcgaagatgcatgtcttatggggaatatgcatccacaccagccaatgccggagcaaagttatcggctgagccgctcaaggactggttctgcatcttttatgaaggctttcagaaagatgcccatgtttggttcttttatgagaattcagccgacttggatctcccatcggatttcagattcgaagatatcaatcatgagagataccagaaatccagagaagtcttttcagcttcgataagcccatgcatccttcctatcggcattcatcaagggagaaacatacaagtctcttatgaattttatcacccaatgagctctgccagacagtttggaatgggacaactaccaatcggcttgttgtttgccgacaaaatccaatgccaaggagaaatttcatcaactctgatgatggatcggctactcaacatcccaggacccccttttggtagcattgagaacatagagctagcaaaattcaggagcagggcatttgacagatggtggggtgaatggaagctgcatctattccatcaatcggcttccatgtacatgacagacctctttcctgatgtcattcctcagagtaacagtggtagggacatagaatatgctccaggcctcattccaaatggaggtggaccatctccccctgtcatcggctatcatgcccccaagacctcaagtctacttcaagggctaatcagagaaccaaccgatgtcagcaagaatagaaagactagagcatcggctatagacccatcggctctggttcccaagaagaaaactaggaagaacaagcctaagccaatcgatgatctacctaccttggatccatctatcgagcaagccctggatgaagaggaaattgaagaggatgttgacaaggctgcaggcgaagtaagcgatactgaaagaacaccattggcttcacccaagaagactcctccaactccttctactccagctcatttctccaggcctcctcctcctccttcttcccctgtacagcaatcatcaagtgatcaaactccatcggctgcagggagtcaccgtgtcgaagaagaggaacaactagccgctcctgccatcccagccttagccaatatgttctttttcgacatcaaggactatttttatgagacagaagaggacaccaccaccaaagctttagctcccttatctgatgatgtgaagaaaactcttgaagacatccatcatcggctagaggcatcatctctagaaagtttggtggtagactgcggatcaattaggacttggctacatgaagttcaagctttggtcccagaagaactagccgacgtcctcactccaactgcttattttgaacaacatcaattcaagttggagaaggccaagctgagattagccgaacgtcgggagcgcaaagacatcgaagccacaatccaggccaattggcaacttgttcataaagagaagatccaagcttgatcagctatctgagggcccgatcaaagccaatattgatcagctcgaagctcgcaagattgaactcttggcacaacttcaagaatgcaacgccgagctggatatggaacacaaaaagctagccgatcttccacaagttgtcgaagaacaaaaggcaaggctgaaatcggctatcaagaatgtcgctgatctgaccaagtctttaaaagtcatccttggaaccgatgctcaggatgcccaagctatagaagaagtagaacaaattaggcaaagggccatatcagctctccaacgatatttgtctcagtga

SEQ ID NO: 76110 - DNA, 573 bp, Oryza sativa
  Clone ID: PAT_MRT4530_76133C.1
atggcggacagagcatggatgtatagagagagatatcgtgcgtcatacactgaaggagttgacatattcatgaaagctgctaagaagaatgctgcatctaagaagacgaaggaaattagatgtccatgcgtgcactgcaaaaatcagaaaatttggatcaatccatctgtaatcgagcagcacctggtgacgcatggatttggtgctcgctacacaacttggtcacatcatggagaaatcccaagcaaacaagttcccaaccaggcgacagtttgggatgaagtgttcaacttggacgaggatttcatggtagtagtagtagtagtagaagaagaagaagaagaagaagaagaagaagaagaagaagaagaagaagaagaagaagaagaagaagaacctgttgatgatgatgatgttggcgacaatggtcagcacagtacagttgatgatgtcgatgaaggtaatgtcagcgtaaatgatggtaattttgattcggaagagattttgcgccatgctgaacctgaggttgtagctgggtccgctcgtgggttggagaacttcgatgcattataa

SEQ ID NO: 76111 - DNA, 616 bp, Oryza sativa
  Clone ID: PAT_MRT4530_76134C.1
ttttttttttttttttttttattataaatattactatattttcatataaacttagtcaaacttaaaacagttggactttaacccaagtccaaagtgtcttgtaacctaaatcagaggaagtatattttaggaccatgaaagaggacggactaaacgacaactctcttcatgccaaagcccttccatcagctactgtattctgttgggcaataacaacataacagtacgtaagtgtcaaatctttacatacgggcggatacggctcgtcaaaatcttttctacatatatacacacatctaggaactattcaccatatctctctacatccgtaacacgcatgcttcctccagcaaactaggctacgtaaggtcaccggatctgatcgcttaatcaattttacattgggatgatgaaatcctagctctcgtacgtggagtacatccatgtaccaaaatgggacctgccgaatgggatggagacatatgcagccaggggtacatctgcacaccatcgatttataccttggttgatattgaaccaacaaggcctttattgatttgcaaagacctgtactaggatagcctttataattacagacctttggtaatcaattttt

SEQ ID NO: 76112 - DNA, 327 bp, Oryza sativa
  Clone ID: PAT_MRT4530_76135C.1
ccgaatttccggggcgacgccacgcgcccgaccaacacaatgaaaaagctgagaagagctcttatggatggcgactcttgaccgaagcctagatgcaatcatgcaacctgcgtcacctgaagatggagatcaaggaagcgctacagatgaacagagctgtgcctgttatagtgccgagggagagcataaaagtgtgacagcttgacggaaactcgtatccgtgccaaatgacgcgtaatcatcaacacgtgagctagaggacgcgaccccacgtactgggataagactgacgagagcatgcctgagcggttagaggatggaacccta

SEQ ID NO: 76113 - DNA, 310 bp, Oryza sativa
  Clone ID: PAT_MRT4530_76136C.1
cggacgcgtgggtacagattcagttacaggacacatagttcctggagatgaaacaagggaaaatagactgcaccaagcatcagttaacgtacattcagcataagagagttaagcccactacctagccggctctttgttgccaacttattgtgactactttcgattttggtgcagtagttttggttagtgactattatatcattttttcttaaaataaggtcccacattatggctaggtgttgccgcgagggttgtgaatgttctttacttctgataaaagtgaagtgatatttgtgtaggtgatgacaaa

SEQ ID NO: 76114 - DNA, 636 bp, Oryza sativa
  Clone ID: PAT_MRT4530_76137C.1
atgggacatacctacctccactccgccagatacagaggcgacgtgggggcacaggcgcccgtccaatcggacgtgaccggcaacaggccggtcacagactggtcacgtccgattgacgtggcctgggtcccctccctgctcgctccccccaccacatggcagttgggcgagggcctcggggcgaggcagcacgagggcccgaggggcacgacgtggcaccccgaggccccccggccgtttctgcgactcgtgaggtgcgggagtagggccaggctgtggagccacgcggctggatgggaaggtaagatcaaatctactctatcttattttgaagaaaattatgatcctcgtgctaacattgattgggagctagtggttgatagagaatttaaggagcatgacttgtctgagaaacatatggaagtgcataatcatgaaaatgaggagagtgacatgaaagagctgccgttcccattattcacactcaaatttgatggatctccatcatcagaagagagaatcacatgtaatctacatggtgctgcaattaatcaagtgaatgaacatgctattcctattggtaattcttactgcgctgattttaagcatgttattcacattgctaatgaggaataa

SEQ ID NO: 76115 - DNA, 552 bp, Oryza sativa
  Clone ID: PAT_MRT4530_76138C.1
tcacttcccttgcttgcatgtgttcgagtgagatcgggccgacccggggacgacgctgccgccgccgccccccgacttgccgcaatgctagctgcagctactagctgctaaggttgctctctgaaagttcagttctgccttcttcgatccggtgaaagatgggctgccatcatgatgtaaaaggcttcggacgacacgggagatgaccattaagttccatacacatcttggtaatctttgaagagatacttgtttcgacaattcgattccgattgattgcaagtgtattttatccgtagagttttaccttcttttctgtgttgatatttgatcgttcctggattctgcacttctgcacgttaacatgtaaataagaggggtcagaatcaagagtaaataacaacaatcacagaaaagcagaaattcatgtacgtgattgtgttcctaggcaaatcacgtacatgaatttgcctaggaacacaatcagtgaagaaatttttttagataatgaatccctgaagagcttgtgcctaaaaaaaaaaaaaaaaaaaa

SEQ ID NO: 76116 - DNA, 791 bp, Oryza sativa
  Clone ID: PAT_MRT4530_76139C.1
ctcccaaggtgaaaactgtagtaaaaaaagagaacataatatgatgcctgctatgatgcatataccctcatcaatttgttggcactctgccgcctggaacctgaagattatatagctgctattcatgtcatggtggcaatgtttactctccctatattatcccggtgtttgcaaacatacatctatatcataaaccgtctatactctttgcgcttgtctaattacattgccagcgcgagccataaacacacggcaccatgtacatataatgctattagaaacatgtgtctaccgtttaaagtaattcaatctggtcctgttatgtattataaatataaactgctacctactgcttgctatccgccactgtcagttgtagaggtgcaaataaaaatatgctcactatatgatctttgttttctcctttctttcagcttttcagccttctcttttgattccttcaaatggatagacaaattcttcaactcttccgccttcaccatttgttcaacaattctttgagtttttaaggtcatgtctgaagaaatcaagttacacattgatctcctcagtccatctcaaataacttagcttcagtttcagtgatgagtgtgtcctttagaacagttgctagctggtctctaatattggaaaggtgggactagagtcatatttttacagttgaggtacatctatatttgttcagtgtgaaaaaccatcttgcatcaaactgtttgtcatctatttccaaaactgggtctcttagacaatttaactatgtttttgtgctc

SEQ ID NO: 76117 - DNA, 316 bp, Oryza sativa
  Clone ID: PAT_MRT4530_7613C.1
acactattcaagaacctagaacgtcgaaggcccccgtcacgtagagctggaatcctttaagaccggcgcgccctttttttttttttacacggccatcacaaactcatacacacacagagtgtggtgcctcttaaagggggaaaaaaatagaggggagcatgggttaaagcttatgagaaacacacaccgcaaaaatattagatttttagagtatgatacaaacctcgaaagagctagaacacaatctctcacacatacacctctttgagacatcgcaccaccccagtgggctgggtaaaaagaccttcagctctat

SEQ ID NO: 76118 - DNA, 2928 bp, Oryza sativa
  Clone ID: PAT_MRT4530_76140C.1
atggaggcaacggcggtgagcttggcgcggtcggtgctggacggcgtgctgaacagggcgggctccgccgtcgccgacgaggcggcgctgctgcttggcgtgcggcgggaggtggagttcatccgcgacgagctggacatgatgagatcattcctcaaggtggccacggcgaaccccgacgccgacgacaccgtgcggacgtgggtgaagcaggtgcgcgacctcgcctacgacgtcgaggactccctcctcgacttcgcgctcttcgccgacacgttgtcgtcgtcctcctcgtcgtcgtggtggctcccgtggcgcatcgccgagcgccaccgcgtcgcggcgaggatccgggagctgaaggcgagcgtcgaggagctcaaccagcgcttccttcggtaccgcatcgtcgtcgaacacccgcgcgcgtcgcgcggcggcggcgcctccgacgaccagcagcagcttcacgaccacgatgggcagtactactcggcggagctggcgttccaggagtcggacatcatcgggcgggcgagggagaaggcggaggtgacggcgctcgtcctctccggctgcggcggcggcgacgtcgtcggcggcggcgcgctgggggtggtgtcggtgtgggggatgggcgggatggggaagtcgtcgctggtgcggatggtgtacaacgacccggagctcctcgacgccttcgactgcgacgcgtgggtgacggtgccgcacccgctcgacagcgccgacgagttcgtgcggcggctgcggcgccacctcgccgtcggcaaggaccaggacgtgcacgcctacctccgggagaagcggtacgtgatcatcgtcgacgacctgcacagccgggaggagtgggagcacatctggccggtgctgcacgtcgacggcggcaagggcagccgcgtggtggtgacgacgcggcgggaggacgtcgcgcgccactgcgcggggctcgtgcgcgaggggcacggccatgtctacgagctcaggccgcttgggcgggaagagtcaaaggatctcttttgtcagaaggtctacaaatcaaccgagtacatattggagaaggaaatggaggatctagctggtcctatcttaaagagatgccgggggcttccactggccatatccactataggaggtctgttagccaatagacccaaaacaggcatagagtggataaagttggatgaacaccttggtgcagagctggagtcgtctgaccttcgtaacatcactaaagtgattgtttcaagttatgatggcttgccatattatttgaaatcaatattcttatacctcagtattttccccgagaatcatgagatcagatgcacccgcttgttgaggcgttggatggcagaagggttcatagcaaagaaccgtgatatgccggtggaggaagtggggcagcgtttctacaatgagctcatcaacagaagtatgatccaaccctccaagaagaggattagccccagcgtgagtgtggatcgctgtcgggttcacagcatggtgctacagatcatcctgtccaagtccattgaggagaaccaactcttcatcatcaagaaacactgcaatgaggttccacaaagtaagatacgccatctggtagtatccaggtggaaaaggagggatgagaggctagaaaatataaatttttcgtatgttcgatcactaacagtgtttggggattgccctgcttctctcatatctcctaaaatgcgtcttctgcgagttctggacctggaagattcacttaacctgaagaatgaagacctcaggcacgtaggagagcttcaccatctaaggtatctttgtttgagaggtacagagatatcaaagcttccatcttttcagaaccttcggtacctcgagacgctagacatccaagacacaaaggtgacacagctccctgatggaattgcaaaacttgagaagctacgctatcttcttgctggcgtcaacttctcaaaagagttgctgcacaaggtggaacagccggagacagataatcgcaaggccaaccagttgggcaacatgttatcatgcttatattgcaacagcagtgattattgcgggatttctagcttggatcgagttagtgtaagagctcctgagggagttgagaagctaagggatttgcacatgttgggtgtgatcaatgttggccatggcaatggagtggtagggaagattaagaagctgacaaacttgcgaaggttaggagtctcaggtgtccttaaggaagaagggcaggacttatgcaagtcaatagagaagctaagtcgtttgcagcggcttgagctgcgctctgattccctaaagtttcttgctgaaagtgaattcgcagcaccaaaacatcttctttcacttaggctatatggcaatctagtcaggttgcctaaatggattggttcactcaatgatctggcgaagctgaagctgctggggacacaattgaagcagggagaaatcatgcacctcgggaagctgcgcaacctagcatttctcggcttgtgggacaactcttatgtagggtattcactgcattttggtcctggcacattcccaaaactcaagttccttgacattgatgggctgaagaacattgaaacggtggcgatcgagaatggcgcgatgcctgagcttgaacaactctgggtgaacgactgcaaaggactacttgatagcaaagatggtttatcaggagtaccacatctgacaaacctgaatgagcttcttgtgaagaagtgtggtgagaaggagaacctgatggagatactgcaaacacaggtcagcgaacacagtaaacgcccgaagttcctcattgaatattttgtctggttggtgacagaagaatccaagtatccaaccgttaaaaataacaacagacaagcaaaagcaaaaatatag

SEQ ID NO: 76119 - DNA, 1248 bp, Oryza sativa
  Clone ID: PAT_MRT4530_76141C.1
atgtgtgataagaagctcagtattctggactctctaccagatgccagtgaaggtggtcaggatagtctgaagcgtcatgaggaaatcagaaaaattgtatgtggtgctcttaacaaaaccatggatgttgcgttctgttttttctcttgggagtacgagtttccaaaagtgcctaggcaacagaacagttatgacggtgggttctttgtattcaattttatgcgattatgggatggccatcgactgattcgctggttttcaactgaaacgatggacatgcggaagagctttctagcatgcatactctccagcaaaaataatgatgccaccatgcctactaatgtttctgagttgatcaaaacgctcccaggggaggccatgatgactcctgaattggtacaggctacgagacagggcaatacaaatgcatttagggaacttagatgtcctgcacgaagggagggttcatatggaggccatacctcaataagtattaatagagccgcttgctgttcttgtgttttttttgagagcacatcatcccgccgttcttgtttccgtttagattgcaagtcctcatgccgttctgatgagcaagagaatcagattatgcggagtccattgcgcttagatgcaacatcaacagttactagtgatagaggtccacctgagccatactctatccggggtgtgacggttgacggggacggggtgctccacattgctgcaagcttttgccatttcgagcttgccaaatccatcttggaagggcaggaggacaaagccctcatagttatgctactacaacaagagaacaagagaggagataggcccctgcactgtgcagctgccacggagagtaaagaaatggttcaactcattgtggaaagagcgaaatgtatcacagagccgtccaattttactaccaatctgctgcgtgcgagaaatttggagggccaaacatgcttgcataaggccattctactcggtcacacggagatcgtcaagtatttggtttcgcaagatgaaggattggcgcaaatagtagacaacgaggatatttctcccctctatttggccatcgcattacgaagaggtgacattgtccaagaactgacaataaaagcatcgtgtgggcctgcaggtgccgtgtcgtattgtgggcccgcagggaaaacagttttacatgctgctgttctcttcagtgaaggtacagacgcaatctcaagttttgttgtcaagttttga

SEQ ID NO: 76120 - DNA, 636 bp, Oryza sativa
  Clone ID: PAT_MRT4530_76142C.1
atggatcaaatggctctcgccaccattgtccaagctgtgccggaggccatggtgatggtcatatccgagaaggaaatggcgagggaggcgtgggatgccctcaagcagatgaacatgggtgaagagcgtgtcaagaaggcccgagtacaaactctcaagagagtgcttgatgattcgttctctcggcacgaaagtggaggagaccaccgtcgtggagaggctcttgcattccgttcccgacaagttccaatccctcataagcaccatcgagcagtgggggatgtgtcggagatgacggtgacggagacaattggatgtttgcgggcgttcgaggtgtcctccaaggggcgacgtcgtgaaaacgcaggggaggagcagctgcttattgcaggggctgagcaacggctcacacgcgctgagtgggaggccattgttgctgaagagaagaagagctacgaggcctctggcagtgtcacgaagaagtttcgcagcaagttcgacaagtcgaagattgagtgctgcaggtgtggcaagtttggacacttcgctgatgagtgtgacgagcctcggaagatgactaaggcagtggcgcagcttgcaattgcagatgctgatgatgagccaacattactttga

SEQ ID NO: 76121 - DNA, 1695 bp, Oryza sativa
  Clone ID: PAT_MRT4530_76143C.1
atggcgaccaaagcggcgctccgatcgttgtggtcggccttcgacaagcaagcgtcatccatcattgacaagctcgtgtggccttggctgatgccagcggacgataccgaggagggcgcgaagaggcgcgcggaggagattactgaggagctcgcgcagctggagaagaccaggatgacgacgtgggcgcgatcggtggtggagagcttcgacacggcgcctcctccttcccctccgccgctgagcgctactacgcctcatcctcctcctccgtcgcctgcgaccagcagcagcaggacggcgacggcgacggcgacggcgacgccgacctcaccgacaccgacacctcccccgacctcggccactttgctgtggccccggcctcgcccgacgaaggaggaggagggggagggcctgcagcgacgcacggacgcggtgctcgtgaagaggctgaggagggcccgcttcgcggcgtggacgagtgcggcgctgcacaagttcgacttcgacgacgccgcccccacggtgcctcctccgccgccggccaccatgatacctcccccgacggtgacggctacgatcacgccgctgtggcctccgcctcccccgacgaagaaggaggagcatgagggcctccagcgacgcacggacgcggtggtcgtgctcgtgcggatgcagaggagggcccgcttcgcggcatggacgaatgcggcgctgcacaagttcgactttggggccgctccccccacggcgcctcctcctccgcagccgctgcctgttgggaatagtcccacattgaaatggtatcagagctcaggtgccatgtctggagatggtgtgtacacgccgccaccgccgccaccgatccgtcgcagcagcggtggcggtggcagcagcagcggcaatggagatggtgtgtacacgccgccaccgatccgtcgcggcagcggtggcggtggcagcagcagcggcaacggcggggatggcagcctaggcggccatgagctcgtcgtgcagcaagtgaaggaggcgggggtgacgttacgctaccccatgctcggggagaacaactacggcgtttgggcggtgaaaatgaaaatttttatgcgtgcacaaggtgtgtgggctgccgtggagggcaacgcagccgatgagaagatggatcaaatggctctcgccgccattgtccaagctgtgcctgaggccatggttaccacgatcgtgaacgagattcattctctcggcacgaaagtggaggagaccaccgtcgtggagaagctcttgcattccgttcccgacaagttccaatccctcataagcaccatcgagcagtggggggatgtgtcggagatgacggtgacggagacaattagacgtttgcgggcgttcgaggagtcctccaaggggcgacgtcgtgaaaacgcaggggaggagcagctgcttattgcaggggctgagcaacggctcacacgcactgagtgggaggccattgttgctaaagagaagaagagtgatgaggcctctggcaatggtgagaagaagttccgcggcaagttcaacaaatcgaagattgagtgccgcaggtgtggcaagttcggacacttcgctgacgagtgtgatgagccgcggaagatggccaaggcagtgacgcagcttgtcatcgcggacgcggatgatgagccaacgttgctgtga

SEQ ID NO: 76122 - DNA, 3588 bp, Oryza sativa
  Clone ID: PAT_MRT4530_76144C.1
atggccggccggagcggcgagaacggcggcgccggcggcggcgacctgtcggagcctctgctcggcaaggaggcgcctcgccggtactcggagctgtacggcgccggcgtgctcagccggctgtccttctcgtggctgaacccgctgctccgcctcggccgctccaaggcgctcgacctcgccgacgtcccgctcatcgcctccgaggacggcgcggcgcgcgcgtcggagaggttcgccgaggcatggagcctccacggccatggcaaggacggcggcggtggcggccgcctcgtcggcgtgctgctcagcagccacaaggcagaggaggaggagcgccgggacctcgccgccgccggcgcatcggcggcggtggcgctggtcggctcgctgctggcgatcaagctcgcccaatcgctggccgcacggcactggttcttcagctcgcggcggacggggatgcgcgtccggtcggcgctgatggcggccgtgttccggaagcagctccggctgtcggcgcgcgcgcggcggcgccactccgccggcgaggtcgtcggctacgtcgccgtcgacgcgtaccgcctcggcgacgccgtcagctggctccacacgtcgtggagctcgccgctgcagctcgccctcgccgtcgccaccctcctctgggcgctccgcctcggcgcgctcccgggcctcgtgcccctcgtcgccttcggcttcctcaacgtgccgttcgccagggccctccagggctaccagtccaggttcatggcggcgcaggacggccggctccggtcgacgtcggaggccctcgccggcatgagggccatcaagctccagtcatgggagggcgcgttccggcgagccgtcgagtcgcgcctcggcggcgagttcgcgtggctgagggaggcgcagctgaagaaggcctacggcgccgtgctctactgggcggcgcccaccgtggtgtccgccgtcatgttcgccgccacggccgccgccggcagcgcgccgctcgacgccggcacggtgttcaccgcgctcgccgcgctcagggccatgtcggagccggtgaggatgctgccggaggccatgacgatgatgatccagtacaaggtgtcgctggaacgcatcgggaggttcctcgccgaggaggagatcaaacaggacgacgtgacgagagcggcgacgacgacgacgacgacgaagaattcggatgcgggaatcatccatgtccaggatggaagcttcagctggagtgggagtgaagctgagctgacactgaagaatgctcacctcagcattcgcagaggggagaaggtggcagtttgtggcccggttggctcagggaaatcttcactcctctgtgcattgcttggggagatacctagaacatcaggaatgagtggcactgttcgcgacaacatcctcttcgggaagcccttcgagaacttcgaccatggagacctgacagagatcggccagagaggaatcaacatgagcggtggtcagaagcagaggattcagctggccagagccgtgtacagtgatgcagatgtgtacctcctagatgatcctttcagcgcggtcgatgcgcacaccgctgcggttctgttctatgtaagagcactttcagagaagactgtagttcttgtgactcaccaggttgaatttctcaccgagactgatcggattctggtaatggaagatggttatgtcaaacaacaaggtgtttacgcagagctaatggaatccgggacagcatttgagaagcttgtctcagctcacaagtcctcaatcacagcattggatgattccagccagcaaagccaagtccaggagcaaaatgtgactgatgaaaatacatcaggacaaccttctgcaaaatacatcagtgatattgattcaatctctgcaaaaggccaaccttctgcaacccagctcacagaagaggaagaaaaggagattggagaccttggatggaagccatataaggactacatcaatgtgtccaagggaatcacacatctctgtgtgatgggtgttactcaggtgctcttcacatccttccagatgatggccacattctggctggcagtggctgtccagatgaacgtcagtagtgctctcctggtaggggcatattcagggctgtccatcttgagctgctgctttgcctatatcagaaccctttatgcagctaagttggggctcaaggcctccaaagcattctttaccggcctaatggattctgtgttcaaggcccccatgtctttctttgattcaacaccggttggaagaatcttgacaagggcatcttcagatttaagcatcctggactttgacataccttactccgtggcttatgtcgtcgttggcgctacaagagatctagcaagaatcaatggaacaacaaaggcaccagtcatgaactatgcggcggaatcaattcttgctgtggtgaccatcaggtcttttggggaaacagacaggttcatccgcaataacctacttcttatcgataccgacgcgacattgttcttccacacagttgcggcgcaagagtgggttctcataagagtagaagcactgcagagcctgacactactaacagcagcactgctccttgttttggctcctccaggagcagtctcaccaggctttgcgggtctcagcctctcctttgctttgtcgctgacagcagttcaggttttcctgacaaagttctactcctacatggaaaactatattatttcagttgagagaataaagcagtatatgcaccttccaccagagcctccagccattataccagagaatagggctccaagttcatggccacaggagggacaaattgacctgcaagatctcaaggtcagataccgcccaaacatgcctcttgtcctcaaaggaatcacttgcacatttcctgctggaaacaaaattggggttgtagggagaacgggaagtgggaaatcgacactcatcagctcattgttccgcctcgttgatcctgcgggtgggaggatactcattgacaacttggatatcagctctattggtctcaaggatctaagaacaaaactgagcattatcccccaagaacctacacttttcagaggaactgtgcgcaacaacttggatcctcttggtctgcattccgatgaagagatatgggaggccttggagaagtgtcaactacagacagccattcgcagcacacctgctcttcttgatacagtagtgagtgatgatggcagtaactggagtgttgggcagcggcagctcttctgtcttggcagagttctcctccgtaggaacaagattcttgtgttagatgaagcaacggcatccatcgactccgcaactgatgcaatcattcagagggtcatcaggcagcaattctcaagttgcactgtggtaactatcgctcacagggttccaactgtaacagacagtgacaaggtcatggtactttcatatgggaagcttatagaatatgacacgcccgccaagttgttggaagataaacaaacagcctttgctaaacttgtggctgaatattgggctaattccaagcggaatgcaacatga

SEQ ID NO: 76123 - DNA, 626 bp, Oryza sativa
  Clone ID: PAT_MRT4530_76145C.1
tttctttttttcaaagaacgatgtctacatcaatgaaatcaatcaccgcaaatactaacagaatgctgagctcgctagaggtcgaggccactgctcgtcggggacgccgccactgccgccgggcccgaggccgaggccatcgccgctctcgctgctccttgctcgtcgaggacgaagactccaccgctcccgctgctccgacgccactggatggcatcactcctattgctagctgaggacgaggacgctaccgctcccgctactcgccggaggacgaggacgccgccgctcccgctgctcgtccatggtgagaccgtcgcacctgctactcgccgaggagttggagagtggagaaagcgcgccgccgtcgctggggccgatgccgccctccccctccggccagatctgggagggagggagggagggaggggagggagcgccgcctccgccactattgctccctcctccagccggatcttggagctagggagggaggagtgccacctccgtcgcctgcggtggcggcctccaccatcgctcccctcctacagcctgatccaggagcggggagaaaggaaggggaggggagcgccgcctccacgccgctgccctcccctcatccagtc

SEQ ID NO: 76124 - DNA, 1863 bp, Oryza sativa
  Clone ID: PAT_MRT4530_76146C.1
atggcgaccaaagcggcgctccgatcgttgtggtcggccttcgacaagcaagcgtcatccatcattgacaagctcgtgtggccttggctgatgccagcggacgataccgaggagggcgcgaagaggcgcgcggaggagattactgaggagctcgcgcagctggagaagaccaggatgacgacgtgggcgcgatcggtggtggagagcttcgacacggcgcctcctccttcccctccgccgctgagcgctactacgcctcatcctcctcctccgtcgcctgcgaccagcagcagcaggacggcgacggcgacggcgacggcgacgccgacctcaccgacaccgacacctcccccgacctcggccactttgctgtggccccggcctcgcccgacgaaggaggaggagggggagggcctgcagcgacgcacggacgcggtgctcgtgaagaggctgaggagggcccgcttcgcggcgtggacgagtgcggcgctgcacaagttcgacttcgacgacgccgcccccacggtgcctcctccgccgccggccaccatgatacctcccccgacggtgacggctacgatcacgccgctgtggcctccgcctcccccgacgaagaaggaggagcatgagggcctccagcgacgcacggacgcggtggtcgtgctcgtgcggatgcagaggagggcccgcttcgcggcatggacgaatgcggcgctgcacaagttcgactttggggccgctccccccacggcgcctcctcctcggcagccgctgcctgttgggaatagtcccacattgaaatggtatcagagctcaggtgccatgtctggagatggtgtgtacacgccgccaccgccgccaccgatccgtcgcagcagcggtggcggtggcagcagcagcggcaatggagatggtgtgtacacgccgccaccgatccgtcgcggcagcggtggcggtggcagcagcagcggcaacggcggggatggcagcctaggcggccatgagctcgtcgtgcagcaagtgaaggaggcgggggtgacgttacgctaccccatgctcggggagaacaactacggcgtttgggcggtgaaaatgaaaatttttatgcgtgcacaaggtgtgtgggctgccgtggagggcaacgcagccgatgagaagatggatcaaatggctctcgccgccattgtccaagctgtgcctgaggccatggtgatggccatatccgagaaggaaacggcgagggaggcgtgggacgccctcaagcagatgaacatgggtgaagagcgtgtcaagaaggcccgagtacaaactctcaagagagtgcttcatggtatgtacatgggtaatagtgagaaaattaatgattttgctttgaaggttaccacgatcgtgaacgagattcattctctcggcacgaaagtggaggagaccaccgtcgtggagaagctcttgcattccgttcccgacaagttccaatccctcataagcaccatcgagcagtggggggatgtgtcggagatgacggtgacggagacaattagacgtttgcgggcgttcgaggagtcctccaaggggcgacgtcgtgaaaacgcaggggaggagcagctgcttattgcaggggctgagcaacggctcacacgcactgagtgggaggccattgttgctaaagagaagaagagtgatgaggcctctggcaatggtgagaagaagttccgcggcaagttcaacaaatcgaagattgagtgccgcaggtgtggcaagttcggacacttcgctgacgagtgtgatgagccgcggaagatggccaaggcagtgacgcagcttgtcatcgcggacgcggatgatgagccaacgttgctgtga

SEQ ID NO: 76125 - DNA, 167 bp, Oryza sativa
  Clone ID: PAT_MRT4530_76147C.1
tgctctgggttcttcgcgaacacctcaaccaccaccccctgatctacccatcgaatttctcatcaattaatcccagtactaagcttcgttgatgtacatacgaggacaaaattgcgaccatgccctgaaccttttgcttcatcttaaatttaaaaaaaaaaaaaaaa

SEQ ID NO: 76126 - DNA, 273 bp, Oryza sativa
  Clone ID: PAT_MRT4530_76148C.1
atggcgcccaggaaggggaggccgccgcgagcaatgagaaaggtggcgccggtgggaaggaacaacggagaggagatcgaccagctggctccctactcggcgtggtggcctgctcccgcgtcatcgtcgccgctgccgccggaccttctcctctccctccttgcaccaccgaccttctcccgacccactggcctcctccccactcgccagccagcctgcgcagagagctgccatgtcggacaaaaccagggtaaaaaccacctaaggatctaa

SEQ ID NO: 76127 - DNA, 1629 bp, Oryza sativa
  Clone ID: PAT_MRT4530_76149C.1
atggcgaccaaagcggcgctccgatcgttgtggtcggccttcgacaagcaagcgtcatccatcattgacaagctcgtgtggccttggctgatgccagcggacgataccgaggagggcgcgaagaggcgcgcggaggagattactgaggagctcgcgcagctggagaagaccaggatgacgacgtgggcgcgatcggtggtggagagcttcgacacggcgcctcctcctttccctccgccgctgagcgctactacgcctcatcctcctcctccgtcgcctgcgaccagcagcagcaggacggcgacggcgacggcgacggcgacgccgacctcaccgacaccgacacctcccccgagctctgtcactatgctgtgggcccggtctcgcccgacgaaggaggatgagggggagggcctccagcgacgcacggacgcggtggtcgtgctcgtgcggatgcagagaagggcccgcttcgcggcatggacgaatgcggcgctgcacaacttttggggtgtagaaaggctttctcccggttgggccaacgtctaccggttttgggccaacaagtggtatcagagctcaggtgccatgtctggagatggtgtgtacacgccgccaccgccgccaccgatccgtcgcagcagcggtggcggtggcagcagcagcggcaatggagatggtgtgtacacgccgccaccgatccgtcgcggcagcggtggcggtggcagcagcagcggcaacggcggggatggcagcctaggcggccatgagctcgtcgtgcagcaagtgaaggaggcgggggtgacgttacgctaccccatgctcggggagaacaactacggcgtttgggcggtgaaaatgaaaatttttatgcgtgcacaaggtgtgtgggctgccgtggagggcaacgcagccgatgagaagatggatcaaatggctctcgccgccattgtccaagctgtgcctgaggccatggtgatggccatatccgagaaggaaacggcgagggaggcgtgggacgccctcaagcagatgaacatgggtgaagagcgtgtcaagaaggcccgagtacaaactctcaagagagtgcttcatggtatgtacatgggtaatagtgagaaaattaatgattttgctttgaaggttaccacgatcgtgaacgagattcattctctcggcacgaaagtggaggagaccaccgtcgtggagaagctcttgcattccgttcccgacaagttccaatccctcataagcaccatcgagcagtggggggatgtgtcggagatgacggtgacggagacaattagacgtttgcgggcgttcgaggagtcctccaaggggcgacgtcgtgaaaacgcaggggaggagcagctgcttattgcaggggctgagcaacggctcacacgcactgagtgggaggccattgttgctaaagagaagaagagtgatgaggcctctggcaatggtgagaagaagttccgcggcaagttcaacaaatcgaagattgagtgccgcaggtgtggcaagttcggacacttcgctgacgagtgtgatgagccgcggaagatggccaaggcagtgacgcagcttgtcatcgcggacgcggatgatgagccaacgttgctgtga

SEQ ID NO: 76128 - DNA, 887 bp, Oryza sativa
  Clone ID: PAT_MRT4530_7614C.1
tcctttctcctccccttcttcctcctccctctctctccctcctctctcttttctctcccccttttctctgatctgatctccttcccttattcggtctccgccggatctcctccgccctctgcgccgaggtccacggccggcgtcgtcgggccccctccgccgcgttgctcccacggcgtcctcggctccgagcgcatcgcctcgtctcaacgccgccatcgacccctccgctccctgctccgccatggcctgaccaggcgaccagctcccgtgacgtccatggccggatgacgacgtgctgcgctgctgccatatatacgatcgaggaaggttggagaggggaataacaacgcgtttgtcagattgctgtacgcgtaatatcggccgtgtgcccgtgtctatgtcgtcgagctgcaaatggcgtggaatctccccggtgatacaatgttgctttctagtttgactcgatccggccatcttgtgaaaagatggtgctgattgatctgagagaaagacgccattcgccggagaccagggggatgagcgcccgtcgccgaccggcgcccgccctggagggcctcgccgccagagccgggtgtttgcgcccgttgccgaccggccgccggccatcctccgcgagccaggacggttcgggctccgccccgcttccaccaccaccagagatccacgccgcgtcgccgccgactccatctgcgccgcccggcctgctctcatggatgccgccgcccgtcggtcaccacgcacgccggtctcgccgagttgctgtcgagggaggccgaagaggcgcccccgggagcctgctctcatggatgccgccgcccgtcggtcaccacgctcgccgatctcgccgagttgctgtcgagtga

SEQ ID NO: 76129 - DNA, 207 bp, Oryza sativa
  Clone ID: PAT_MRT4530_76150C.1
atggaggcggcacgtgtagagggcgtgcgtggggagggaagggaggagaggtgtgagggcggggtaagggaggagtgcttgcgaacagaggcgggcgaggtcggcggtgatgtctgtggtggtgatgttgtcatggtcgctggagtcggacaagaggagacaatggtgtgccatagggatggggagctcactgttaggacacactag

SEQ ID NO: 76130 - DNA, 213 bp, Oryza sativa
  Clone ID: PAT_MRT4530_76151C.1
atggcgagtgtcaccggatctgaaatcggcggaactcaccgtgatactaggacgagggaaactgaatgccgacaaccacttcgggaaccaaaagacaacaaacaacgacatgggaaccacgaccatacgcccatacgggaagacccgactagaattacaactaatagtagggtagatgggttggacctctctccatcccttccagggcggtga

SEQ ID NO: 76131 - DNA, 330 bp, Oryza sativa
  Clone ID: PAT_MRT4530_76152C.1
atgcggcagcggcgagcggccatcgacagcggcgatcggcggtgcgagagacggcggtggccggcgaggagacggtggcacacggctgaagcggcggcgcggacaggaggcggcgacgcgcccaaaggcggcggcgcacacggggaagggggagtaaaagagggggagggagtccttaccagggattcagtcggcgtggctgaagacaacggcggacggcgacgacaagcggcggacggcggggcgcgcgggatggacgagacgggcctcgatctcgcgaggccaatggcggcaaaggagcggcgcggcgacggcactagcgatggctag

SEQ ID NO: 76132 - DNA, 1689 bp, Oryza sativa
  unsure (1)..(1689): unsure at all n locations
  Clone ID: PAT_MRT4530_76153C.1
cccggggcggccgtctccggtgccgatttggtgggatccgggccggagaagcactggttggtgaggagggtgaggggggatgggtgcgagggaggaggtgagggaggaggagggggaggagggggagggggtgggcgggaaggaggaggagaaggcggcggccgcggccgcggcggtgtcgtgctcgatctgcctcgacgcggttgtcgccgccggcggggagaggtccacggcgaggctgcagtgtggccacgagttccacctcgattgcattggatcagcatttaatgccaaaggcgttatgcaatgccccaactgccgcaaaattgaaaaggggaactggctctatgcaaatggttcccgacccacacaagatgttaatatggatgagtgggctcatgatgaagacctttatgatgttagttactcggagatgccctttcggtttcactggtgcccatttggtcgtttggctcaacttccatccttctttgaggaaggagaatcatcacccccagttacttttcatgacttcatgggacaacatatgtttacggagcatgtagctgctgtatcttctgcacctggggcagctcatccatgcccatatgtggcatacttgcatcctcttccatcattggcgtcatcatcaagctctcatgttcctgagagaactatggatggtcctgcatatcatgatccctggcaccccttggctgggccttcagatggtaggcccttgcaatcagtgcaacctgctgattttcatcataaccattgggcgcatgttcccaattcctatcctcaacccaacaacaataatggggtggccgagcagcaaggagtcccttttggaacaacgagggctgcaagagttgatggtgatacccaacgtcgaggatcatctatttctccatcatacttcagtaatggatctggttctagatctagagctcctaatgttcctcctatggtacctcaattcatgagggcgcacggcagcattagtgaacagtaccagcagagttcatcatccagcttatttgctggggctcatagatcaggaggcatgcgaactgcaccgccgccccctctaccagagaacccggcattttgccttttcccaccaggttcatctggccataactcgatggagactgatgatgcaggaggaaaccgattctatgcctgggaacgggatcgcttcgcaccatacccactaatgccagtggactgtgagacaaactggtggagttcacaacaatctcatggtacatcagaacccgcgcctgctccaaggagactatttgggcaatggattggtgttggaagatcatctccggaaaatcgatcacccgagggctcatcgtatcggcaaatgcacaccccaaggatgtagaccctcatgaagggaatttaagttaatacttaacatttgaaatctgaagttgcttgtaagaagatggaaaacccattgtatgaaattaagcccgggtcgtgccgtaagcctcgaagcaaatctgagaagaagaaacagaaaataacccggggtggacattttgatttggtttattgagttccatcacgtacatatttgaaatcaagttgggatattcggagtttcacctgtgatacagtttcgtattatgcaatttgtttaattcaaaaaaaaaaaaaaaannnnnnnnn

SEQ ID NO: 76133 - DNA, 286 bp, Oryza sativa
  Clone ID: PAT_MRT4530_76154C.1
gcacgaggagaaagagagagagagagataggcgtacgccgtcgtcgtcgtcgtcgctgtgctcgaccttcgcctcgccgcgcgccgcctccctcggccgccgcctcgcctatctcctcgcccaggaaagcataccgagtgagggcatcatccagggatatgacaagtactcgaagaatgacatcatacgtagtacccctataccattctattctgcaaacttttccaagctatggcgagcaggtaaaaagctgtggaggtaggcaggatgtagactaggattcatg

SEQ ID NO: 76134 - DNA, 711 bp, Oryza sativa
  Clone ID: PAT_MRT4530_76155C.1
atggcgacaggaaggaaacagatcccttcctcagtgcctttatactcttgccaacgctgtgcccggctcctcgcttctcgcgcccactatttcgccccctcgtttctcgcgcccacgcttccactaatcccattcgcccgcttgcggcgcatgagacacaatcgcacacgtggcctggtacccccgagggacgtcgggcccgagggtgatgcgttcgccctcctcttagtccccccgagggggtcgggccgcacccccctcggccccgagggccgaggcgccccgacccctcgtgggtttttgctccgcgtgtatgggttagaccggtcagatcacgggttaggtggcgacaggcgatctgacacacgcctcgccccatcccgtcaggacgagggcttctaggcgctcgtccccagctggagctaacgtgttacctcccagagatggcacgttagtcctggtcagatatatgccaggcttcatcctaaccattacaggcaagatattgtatgaagaagggcgaacatgcagattgataaactgacgcgtggtggacaagaatgaccgatttgtgaccggtctgacactggccatgtcgtcagcaaacagccatgttcccacgtcgcgcctgcttccggcggaagtggaggtaggtatgggtcgtcccatcagaaggtcattcggacggcaaccatacaagtctccgtctgt

SEQ ID NO: 76135 - DNA, 618 bp, Oryza sativa
  Clone ID: PAT_MRT4530_76156C.1
ccaacacccttgatttttcactatctctctgtaaaatcaaaggtgtttttgattattattctgtgatgaacaattgggcattggagattattggttgtgttatttggaatttattcacgaagtggttttgaagatgattggatttacaggtgaattacaggtgctatcattttatgtgaccggtcagaccggggtgcgtatgccggctagagttgatgcacgtggttgatggagattccatatggcatacgatggagttattatgtgcgtatgggatgcggactcgaatttggaaggagtccaaatttggtatgattggttatgtaaagtttgtttcttgtactagagggtttcctaaggtgtttaggactcctagtatgagtttggttcgtggctttaggctgcctacctcatgtataaatagagggggagcgtcagaccggcgacacaccggcggtcagaccggcggcaatgcggtggcagaccggcggcgacagcaggcgaggcaggcgacttcggcggttcgaccgatcgatctacatcggtcagaccgatgttcatcaggcggtcagaccggcgcaacatcttcggtcagaccgcgatccatcgatttcgagg

SEQ ID NO: 76136 - DNA, 814 bp, Oryza sativa
  Clone ID: PAT_MRT4530_76157C.1
atggagacaaggatttttatacaggttcgggcccctgagttatcagtcgacaacggagtagcctttctcctcgaatccgtgcccggcgagatcagagatagcgctttcgtttctcctgacagtatccggagacaccgtagggttttagccgtgcttatccatgaagtcgatatccggcggtgtgtcttggcgtatgtaggcttctatgttgattgtgttgggtgttgatcctatcgtgtcggtgacatgggaccgggagtatcatgactagaggcttgaggcagacacaatcgcccacgtggcctggcaccctcgggggacgtcggacccgagggtgatgtgtgcgcccacctcttggtctccccgaggggggggggtcggtcggaccactcctgcctcgcccccgagggccgaggcgccccgaccccggtcaaatcgcgggttaggtggcgacaggcggtctgacgcacgcttcgccccatcccgtcaagacgagagcttctaggcactcgtccccagctggagctagcgtgttacctcccagagatggcacgttagccccggtcggatatatgccaggcttcatcctaaccattacaagcaatatgttgtgtgaagaagggcaaacatgcatgttgctaagctgacgcatggtggacaagaatgaccgacttgtgaccggtctgacactgatcatgtcgtcagcagacagccacgttcccacgacgcgcctgccttcggcagaagtggaggtaggtatgggccgtcccgtcagaaggtcattcggagggcaaccatgcaaatctccgtccat

SEQ ID NO: 76137 - DNA, 2175 bp, Oryza sativa
  Clone ID: PAT_MRT4530_76158C.1
ttaccaagaatattttgagagagtgtcattgccgaaccgatacaaggtcccatatttctcaaagattttaggccaagacaatgtgacaacctatgagcatgtcagccgattcatggcccagtgcggagaggcatcggctactgacgctttgtgagtcagattgtttcctttatctctgtcaggatcggctttcacttggttttcagcgttaccgcacaattctgtacacacatgggccgatctggagaaacagttccacaagtacatctacagcgggattcacgagatgaagttttccaatttaacgtcaatcagacagaagcatgatgaatcggttcaagactacatacaaagattcagagatatgaggaacaggtgctttagcttagctttgacagattctcagcttgccgatctcgccttccagggcctattggcaccgatcagggaaaaatttgcagctcaggaattcaagagccttgctcacctagctcagaaggtgacgacgcacgaacagagatttcttgaagctagaaagccgtataagaaggtgaataatgttaacacctacctctctgaaatcgaagaagaagaggaccctgaagtagcaacagccgactgggcaaggaacaaaagagtggtcacgtgtcaatgggtcaaggattctggcaaagaggagaaatatgattttgatatcaccaaagccgataagatcttcaacccattgcttcgggagaaacaaattcacctccccaccagtcatgtgatcccatcggctactgaacttggaaagaggaaatactacaagtggcataacacggaatcgtgcaaggttttcaggaaacagatccaatctgccatcgagcagggaagaatcaatttcgatgacccaaagaagtctatggagatcaacggcaatccttttcctgtcaacatggtctacacaagcaaaggggcagccgatagaaggggttatcggcccaatgctgctatgattatcagcaagtatcaaaggaaacttgaaaggcagaaagaggagagctatgaagacagcgatgaggggatgagattgccctcaaaacaaaattgcccaggatgaagtgaaatcgacgaagaccacaatggcagcccaagcggatttcatcctaggaagtaaaatcggctgatgcagaggaagttgcccgttcatcagagatttggaccgctccatcaagatcttgtccaaagggaaggcaaggaggatgaatccagaaaacagcagtgatgccctctgggtattttcactaaaaatcaaaaaagaagggttcaaaggaccaaacaggaatggcgcgggaagagtaaggttgctccagccgatgaggtcgaagctgacaaggcaaaacgggtagctaaaggaaagaccgttgaatcttcatcggtcaacatggtatttgtgcttctagcaaaatattgtgctgagccagcgggtgcggaaataatggaggaatccctggcaaaattagtcatgtcacctgagcaggctgtttttgagaaaccggaagaaaccgaacatcggcacttgaagccattatatgttaaaggctttgtgaacggcaagccaatgtccaaaatgttagtcaatggtggggccacagtgaacttgatgccgtatgccacattcagaaagctggcaaagaacgcaaaagatcttatcaaaactaacatggttcttaaggactttggtggcaatccatcggaagccaaggacgttttgaatgtcgagctaactgtcggcagcaagacgatcccgactaccttctttgtcatcgatgggaaaggttcgtacagtctgttactcggaagggattggatccacgcgaattgttgtatccattagactatgcaccagagtttaatccagtggatatctgaagatatccaatcgtacatacaaccaattggaagtgaagaacctcaattgttgctttgagggcaccacaaggggggttcgaaattttgcgccaagaatactatagataatctatgtggcgagttgggacaatgattcgggtcggctgacaaaatatacgttggatcagggaataggcccaagccgacatgctttagcaaaaactcgacccccacattcagagccgagacttggccaattgttaaaatcaacggtgatatgatact

SEQ ID NO: 76138 - DNA, 924 bp, Oryza sativa
  Clone ID: PAT_MRT4530_76159C.1
atgtcgttggcgggtcaagacggtcgcatcgacggtgaaactcaacttaaaaatagatttttcatggcgtctctccttcttcctctcttctccaccgccgccggctactgtcgcttccaccgcctctccacggcagtggggtgcgacatcctctccaccgctggccgccacgagctcgggcccagatccgaccgccgcgacgacgggggaggccagatccgccgccgtgactgccgcagggccacgggtggcggatcctgcttccagaggggcatgagcaccaaatcgggccacctccagcctcgagacggcgatggcgatggggggcaaatctgggagacggcgacggcagtctccaaggtcgttggcgaccgatgtgtatgtgttgatatttacatgttgaaaatgctacacaatcgcacacgtggcctggcacctccgagggacgtcgggcccgagggtgatgtgttcgccctcctcttagtccccccgagggggtcgggccgcacccgcctcggccccgagggccgaggcgccccgacccctcgtgggtctttgctctgcgtgtatgggttagaccggtcagatcgcgggttaggtggcgacaggcgatctgacacacgcctcgccccatcccgtcaggacgagggcttctaggcgctcgtccccagctggagctagcgtgttacctcccagagatggcacgttagtcctggtcagatatatgccaggcttcatcgcgtggtggacaagaatgaccgacgtgactggtctgataccggtcatgtcgtcagcagacagccacaattccacgtcgcgcctgcttccggcggaagtggaggtaggtatggggcttctcagcggcccgaacctgtatacatcgcccgtgtcttgtgtgtttccggtctcgcgagccttccacat

SEQ ID NO: 76139 - DNA, 780 bp, Oryza sativa
  Clone ID: PAT_MRT4530_7615C.1
atggcgatcggccttctagcctgggtgatcaaggccattgacaagaagcatcgtgccttcttgtggacgggcacggactcggctcacgggcatccctactgggatagcctgaaggccccagccgagcgagccgtctctgacatgtttgaggcgtccaccttcttcgtaccaggtgatgcaaacaacgcctggatttctgacatccgcggcgccctcattgtcccggtcatctcccaatttcttcttgtttgggatgcgcgctgttggacggctgatctcctccagaagcgcggcattgatagccactcggcctgccccttttgcgctcaagagcttgagacggcgaaccacatcctccttgactgcgtgttcgctcatcagaaagagagcacgcattatgggggcccttcttcggatctggacgaggacctgttgccccaccagtatgacgagggagatagacaatggctgcgtctcaagggagatgacggcaacaagctaagggagatcaacgacgtagcggaggcaagacaaactgaatcgccgaaggacgtggctgacagtggtgaggcggtgcgcaaaggaagtcctagagggtcgctaccatcttggatgctaaggaggccaccagaggtggcacacaacaagaacccattgatggtggcaaagctgttagaacccaccaaggagtgcgtccaggagtgcatcctgccgttcgctccttcggcaaagccatctggttgtcaacagatgaactggatggatgatgcggcggcgtag

SEQ ID NO: 76140 - DNA, 324 bp, Oryza sativa
  Clone ID: PAT_MRT4530_76160C.1
ttaggtggcgacaggcggtctgacgcacgcctcgccccatcccgtcaggatgagagcctccgagcactcgtccctagccgaagccggcgtgttagctcctggagatggcacgttggtcccggtcagatatatgccaggcttcatcccaaccattacaagcaagatattgtatgaagaagggcgaacatgcagattgctagactgacacgtggtggacaagaatgaccgatttgtgaccggtctgacactggtcatgtcgtcggcagacaaccatgttcccacgttgcacctgcttccggcggagtggaggtaggtatgggtcat

SEQ ID NO: 76141 - DNA, 150 bp, Oryza sativa
  Clone ID: PAT_MRT4530_76161C.1
atggtggaacggcttcgacggcggcggccaagcgtgttcccgagcgacgcgcacccgggcaatgcagctggttgcggtggtgcccccgtttgccgactcgccgccccggggatccccgtgtgcagcgggctgggcgaggcaagggactag

SEQ ID NO: 76142 - DNA, 2013 bp, Oryza sativa
  Clone ID: PAT_MRT4530_76162C.1
atggttcacgcaaaggatagtgatgaaatttttgttgattctacttgttctgattctaaaagttctgaaaatgatgatgttatttctgatagtgaagactctaaaactagttgtgatgagatatcaaaagaggagctattgcgatctttgaagctgaagttgaataaaaagaaagtatctgttgactgcaatttgaagagaaaaagatctgaaacagcagatgttgatttcaaaaatcagttggattcagcattacttgaaatttttagagacaatgttttgattgacttgctttatggattgcccaaaaagttgatgtcaattcttgtgacatcattgttcgagacaaaatactccaagaatcaaagtatggaaaggaacaatgataaaaaattttcaaagtttgataaaataagcaaagaagtctatggcaaaagaccgataaaagatttttctgagagctgttacaaaatgattgaaactggtactgccaaagcaacttttcttcaaaggcttgattctgcaattggtgttgacttacctcaagaaatcaaaaaagacataaatgagttgcttctgcaccatttgggtcctgatgaaaattgcatcgatgatagagtgaagaatcttctgattgatatatttgttcttttatctaatgctagcaagccaagtgttcctgataatactgattttaatccttctgaagatgacaagaataagttgaatgatggcagcataataaatgaagctaacatttgtgaaaccccaaagtccccaatgctgtgcaaagatactaaaactcctgaaagatcatgttctgaaaaggataaaaattttgatgttgatggtataatgagaaagctttgtaagcctggaatgatttctagtcctccaaagataactaaagcaagatttgttggtttcaatgaaagaaaacccatctattttgatcatgagaagccacagtttcaaatttgggattcagatgataatttgaggtctgaagtaacaccaagacatggactcaaatcaagcaaaattgttcctgattcttactccccagcatgccctactgaattgaacaaaaccaagattattccattggacctgtcacaaaatttatatgatttatctcaaaaccaagaaaacaattcagaaaacaaggaccagttgataatggtaactttggaagattcagaaacacaatctcaacacaatgaaaaggaaaatttgcctgttcaacaacagtacactaagtcaacagaaaacaaaaaggattcacttgaagtagtttttcttggggaaaggcaatctacagaaaattgtcttgatatcacatcaaagactaatgtattgtacaacaaaatcaacactttcatagtcaatccagataagaaattgaagatgtgcactgccagtccagaaagggttcttttatgcaatgttgacagaaatgttggacagtgtagttctagtcaaaaacctcagcatgatctcaggagaattctacaaccagcaagatattctactgatccatatagtctcgagaggcaatctttttgtgtcacagcttatgatagacaagtatataatgttgtttgcaagataagcaaaagttcatttcaagataaggttgctgttgacattgacggtgtgcactacaaattttttacttttggtgattctttcaagcctggtggtgatctctcaaattttgtaacgtcagttttctatcgttacatgtttcgattatcccatccctcaaaatccaaaaaacattacttcttctcatcaattggcgatgatcttcttaaggaacgctctgcaactaacttctctgttgtcaaaaagtgttttgatggagcatcccttgcaagacctgttcacagctgtgacttgcttttttttccaattgtcaagaatcggcactggtttgtgtttgcaattgatctgaaagctcagagatttgactatggtatttttactctcaagttcatggaggtgtgctga

SEQ ID NO: 76143 - DNA, 387 bp, Oryza sativa
  Clone ID: PAT_MRT4530_76163C.1
atggcgcagtttcctcgaagccatcagaatagcgtaaagcatcttctgggcctgagggtatcgggtcttggcgtcccggagggcctcactaacaaagtagacgggccgctgcacctttcggtggggccgatcctcttcgctaggggccacatccctggggcgctctttgtccaagcggcctcgcggggtgcactcgtcttctgtgccgacgacctcggggtcggaggacgacaggcgcggccttcccgcagtggcctcggggccatcctggggggctcgtgcccaggtcctagtcctcaaatggctcgggtcggggctagtgcctggggagatccacatgtcgagactggccaggccgggagcgtggtgaccgagggttatgggtga

SEQ ID NO: 76144 - DNA, 2997 bp, Oryza sativa
  Clone ID: PAT_MRT4530_76164C.1
atggatgacgtcaggaggttggacggcgtggatcaggacctgctcctgtgcgtcgaggatgatgtggtcgccaccaccacctccgacgacggggcctgggcggatgacctagaggaaagggcggaaaatctcgagagagagaacgcttttaggagaggagagcagagagcgacgacgatttcgtcgtcgtcaacagaaggccatttcgccgcggcagcgattctggcggagcgatgtgagggcgattcgttgatggttcacgcaaaggatagtgatgaaatttttgttgattctacttcttcttattctcaaagttctgaaaatgatgatgttatttctgatagtgaagactctaaaactagttgtgatgagatatcaaaagaggagctattgcgatctttgaagctgaagttgaataaaaagaaagtatctgttgactgcaatttgaagagaaaaagatctgaaacaacagaagttgatttcaaaaatcagttggattcagcattacttgaaatttttagagacaatgttttgattggtatgaaacgaaaactctactgccataaaagcaagaaaaaatctgtcatgactgatgcaacagaagaaactaaattgacaagattctctgtgaaacttgctttatggattgcccaaaaagttgatgtcaattcttgtgacatcattgttcgagacaaagtaattccactttcaaaagaatctgttcatatagttttaggtcttcctgttggaggtttacctatcagttccaattctgaaattggcaagcagaaaattcttgacacttttggtctctcttctttgcctactgtcaaattttttggagataagctgataaggaacgaatcaatgtctgatgatcaagtgttgatatccttcatgatggtttctttgaattgttttctttgcccaaactcatccattcaacctagcacaaaatatctcagtgcttttgcggatcttacttctattgataaattggattggagcaatcttgtttttgaatggttgatgaaacatcttagcaagcttgagaagtccaaaagttttggtggttgtctgtactaccttgtggtcaattacttggattttcttaactttggtatgcgaaaagtgttgcaagatactccaagaatcaaagtatggaaaggaacaatgatcaaaaaattttcaaagtttgataaaataagcaaaggagtctatggcaaaagaccgataaaagatttttctgagagctgttacaaaatgattgaaactggtactgccaaagcaacttttcttcaaaggcttgattctgcaattggtgttgacttacctcaagaaatcaaaaaagacataaatgagttgcttctgcaccatttgggtcctgatgaaaattgcatcgatgatagagtgaagaatcttctgattgatatatttgatcttttatctaatgctagcaagccaagtgttcctgataatactgattttaatccttctgaagatgacaagaataagttgaatgatggcagcataataaatgaagctaacatttgtgaaaccccaaagatccattccacttgtgatgacaatgcaattctaaatgaacagtccccaatgctgtgcaaagatactaaaactcccgaaagatcatgttctgaaaaggataaaaattctgatgttgatggtataatgagaaagctttgtaagcctggaatgatttctagtcctccaaagataactaaagcaagatttgttggtttcaatgaaagaaaacccatctattttgatcatgagaagccacagtttcaaatctgggattcagatgatgataacattaatcaagaagataatttgaggtctgaagtaacaccaagacatggactcaaatcaagcaaaattgttcctgattcttactccccagcatgccctactgaattgaacaaaaccaagattattccattggacctgtcacaaaatttatatgatttatctcaaaaccaagaaaacaattcagaaaacgaggaccagttgataatggtaactttggaagattcagaaacacaatctcaacacaatgaaaaggaaaatttgcctgttcaacaacagtacactaagacaacagaaaacaaaaaggattcacctgaagtagtttttcttggggaaaggcaatcgacagaaaattgtcttgatatcacatcaaagactaatgtattgtacaacaaaatcaacactttcatagtcaatccagataagaaattgaagatgtgcactgccagtccagaaagggttcttttatgcaatgttgacagaaatgttggacagtgtagttccagtcaaaaacctcagcatgatctcaggagaattctacaaccagcaagatattctactgatccatatagtcctgagaagcaatctttttgtgtcacagcttatgatagacaactatataatgctgtttgcaagataagcaaaagttcatttcaagataaggttgttgttgacattgacggtgtgcactgcaaattttttacttttggtgattctttcaagcctggtggtgaactctcaaattttgatgatcttcttaaggaacgctctgcaactaacttctctgttgttaaaaagtgttttgatggagcatcccttgcaagacctgttcacagctgtgacttgcttttttttccaattgtcaagaatcggcactggtttgtgtttgcaattgatctgaaagctcagaggtttgtttttttggattcaatgtatgatgaggacagtatatatcatcaacagattaggccaaaactgatatcaaactttagtcttgcctggaacctttatgtcaaagatcatccaatagatttcaacaactacacagtcatttatcctccagtgcccaagcaaacaaacagatttgactatggtatttttactctcaagttcacggagacctttacaaactactggatgatcacttctgaaggtgtgctgaagatctga

SEQ ID NO: 76145 - DNA, 369 bp, Oryza sativa
  Clone ID: PAT_MRT4530_76165C.1
atggcggggcggaggtcacggcggcggggaaagcgtgaccagcttggggctcctcaccgggagaccgcgcaggcccccctttgccggttcggccgggggccctgggttcgggccgctgagaagcgacggcccatacctacctccacttccgccggaagcaggcgcgacgttggaacatggctgtctgctgacgacatgaccattgtcagaccggtcacaaatcggatgaagcctggcatatatctgaccggaaccaacgtgccatccccaggagctaacacgccggctccggctagggacgagtgcttggaggctctcgtcctgacgggatggggcgaggcgtgcgtcagaccgcctgtcgccacctaa

SEQ ID NO: 76146 - DNA, 2880 bp, Oryza sativa
  Clone ID: PAT_MRT4530_76166C.1
atggttcacacaaaggatagtgatgaaatttttgttgattctacttcttctgattctaaaagttctgaaaatgatgatgttatttctgatagtgaagactctaaaactagttgtgatgagatatcaaaagaggagctattgcgatctttgaagctgaagttgaataaaaagaaagtatctgttgactgcaatttgaagagaaaaagatctgaaacagcagaagttgatttcaaaaatcagttggattcagcattacttgaaatttttagagacaatgttttaattggtatgaaacgaaaactccactgccataaaagcaagaaaaaatctgtcatgattgatgcaacagaagaaactaaattgacaagattctctgtgaagtacttttctgaagttctggaaaagttgtctaaacgtcatagagatatcattttcaaatcttgtttcaaaacccttttgctgtttgagaaatgttctgtgccatatagacttgctttatggattgcccaaaaagttgatgtcaattcttgtgacatcattgttcaagacaaagtaattccactttcaaaagaatctgttcatatagttttaggtcttcctgttggaggtttacctatcagttccaattatgaaattggcaagcagaaaattcttgacacttttggtctctcttctttgcctactgtcaatttttttggagataagctgataaagaatgaatcaatgtctgacgatcaagtgttgatatccttcatgatggtttcttcgaattgttttctttgcccaaactcatcccttcaacctagcacaaaatatctcagtgcttttgcggatcttacttctattgataaattggattggagcaatcttgtttttgaatggttgatgaaacatcttagcaagcttgagaagtccaaaagttttggtggttgtctgtactaccttgtggtcaattacttggattttcttaactttggtatgcgaaaagtgttgcaagatactccaagaatcaaagtatggaaaggaacaatgatcaaaaaattttcaaagtttgataaaataagcaaaggagtctatggcagaagaccgataaaagatttttctgagagctgttacaaaatgattgaaactggtactgccaaagcaacttttcttcaaaggcttgattctgcaattggtgttgacttacctcaagaaataaaaaaagacataaatgagttgcttctgcaccatttgggtcctgatgaaaattgcatcgatgatagagtgaagaatcttctgattgatatatttgttcttttatctaatgctagcaagccaagtgttcctgataatactgattttaatccttctgaagatgacaagaataagttgaatgatggcagcataataaatgaagctaacatttgtgaaaccccaaagatccattccacttgtgatgacaatgcaattctaaatgaacagtccccaatgctgtgcaaagatactaaaactaccgaaagatcatgttctgaaatggataaaaattctgatgttgatggtataatgagaaagctttgtaagcctggaatgatttctagtcctccaaagataactaaagcaagatttgttggtttcaatgaaagaaaacccatctattttgatcatgagaagccacaatttcaaatctgggattcagatgatgataacattaatcaagaagataatttgaggtttgaagtaacaccaagacatggactcaaatcaagcaaaattgttcctgattcttactccccagcatgccctactgaattgaataaaaccaagattattccattggacctgtcacaaaatttatatgatttatctcaaaaccaagaaaacaattcagaaaacgaggaccagttgataatggtaactttggaagattcaaaaacacaatctcaacacaatgaaaaggaaaatttgcctgttcaacaacagtacactaagtcaacagaaaacaaaaaggattcacctgaagtagtttttcttggggaaaggcaatctacagaaaattgtcttgatatcacatcaaagactaatgtattgtacaacaaaatcaacactttcatagtcaatccagataagaaattgaagatgtgcactgccagtccagaaagggttcttttatgcaatgttgacagaaatgttggacaatgttgttctagtcaaaaacctcagcatgatctcaggagaattctacaaccagcaagatattctactgatccatatagtcccgagaggcaatctttttgtgccacagcttatgatagacaagtatataatgctgtttgcaagataagcaaaatttcatttcaagataaggttgctgttgacattgacggtgtgcactgcaaattttttacttttggtgattctttcaagcctggtggtgaactctcaaattttgtaatgtcagttttctgtcgtaacatgtttcgattatcccatccctcaaaatccaaaaaacattacttcttctcatcaattggcgaacgctctgcaactaacttctctgttgtcaaaaagtgttttgatggagcatcccttgcaagacctgttcacagctgtgacttgcttttttttccaattgtcaagaatcggcactggtttgtgtttgcaattgatctgaaagctcagaggtttgtttttctggattcaatgtatgatgaggacagtatatgtcatcaacagattaggccaaaactgatatcaaactttagtcttgcctggaacctttatgtcaaagatcatccaatagatttcaacaactacacagtcatttatcctccagtgcccaagcaaacaaatagatttgactgtggtatttttactctcaagttcatggaggtgtgctga

SEQ ID NO: 76147 - DNA, 524 bp, Oryza sativa
  Clone ID: PAT_MRT4530_76167C.1
ttgtcggtgacatgggatcaggagtatcatgactagaggtttgaggcagacacaatcgcacacgtggcctggtacccccgagggacgtcgggcccgagggtgatgcgttcgccctcctcttagtccccccgagggggtcgggccgcacccccctcggccccgagggccgaggcgccccgacccctcgtgggtttcggtcagatcgcgggttaggtggcgacaggcgatctgacgcacgcctcgccccatcccgtcaggacgagggcttctaggcgctcgtccccagctggagctagcgtgttacctcccagagatggcacgttagtgctggttagatatatgccaggcttcatctttgtagctccttcagacacagatccaccaaaaacacaggagtagggtattacgcttctcagcggcccgaacctgtatacatcgcccgtgtcttgtgctctttcgattgtcgcaatccggcaaaggggggcctgcgcggtctcccggtgaggagccacaagctccgtcat

SEQ ID NO: 76148 - DNA, 588 bp, Oryza sativa
  Clone ID: PAT_MRT4530_76168C.1
gctgcaggctgttacatgcaatttgagtcattaagttgttaacagtataaagtcttttctctatatctgtactcatttagaagggagtagcggtggtggtgagtctgccaccacccccaccaccaactctatttttttgtgagaaggaaggacaatgtaaggctagaggacccacatgtcagtaacaaatatatccagaaatttagagatatatgcagaaaattatggtaataacaggttaatgataattttctttaatcaaaactagttgaatgcccgtgcattgcaatgggaattaaataagaaaaccacaccgtacactctaaagcctcaaaaattaaaataaaactaccctcattctaaaatcttagggtcatatatttgtcatcattttcacctcacttcaaaagaagtttttcctgtttgatggcttgaggttaggaagggacaaaagtccatccacctcactgtttggcggacccacatggtagtggtggtgggtggtggcagatttaccactcaccaacaccattgaggtctttgaaaagagtatatagatcctgttgtaacgcgagggcgatatgctag

SEQ ID NO: 76149 - DNA, 612 bp, Oryza sativa
  Clone ID: PAT_MRT4530_76169C.1
cctcgaaatcgacgaaagtcggtctgactgaaattgatctgccggtctgaccgagtggatgccgccggtctgaccggtgtagaatctccggtctgaccgccgagatcagctgccgctcgctgtcgccgccgccggtctgaccgccgtagtcccgccggtctgaccgccgcgatgccgccggtctgaccgccggtgtgtcgccggttagacgctccccctctatttatacccgaggtaggcagcctaaagccacgaaccaaactcatactaggagtcctaaacaccttaggaaaccctctagtacaagaaacaaactttacataaccaatcataccaaatttagactccttccaaattcgactccgcatcccatacgcacacaataactccatcgtatgccatatggaatctctatcaaccacgtgcatcaactctagctggctaccagagcccggtctgaccggtcacatgaaataacagaacatgcgattcacctgtaaaatccaatcatctccaaaaccacttcgtgaattaattccaaataacaaaaccataatctccaatgccaattgttcatcacagaataataataaaaacacctttgattttaca

SEQ ID NO: 76150 - DNA, 612 bp, Oryza sativa
  Clone ID: PAT_MRT4530_76170C.1
ttatccggtaggcggtctgacgcacgcctcgccccatcccgtcaggacgagagcctccaagcactcgtccctagctggagccggcgtgttagctcctggagatggcacgttggttccggtcagatgtatgccaggcttcatcacgtggtggacaagaatgaccgatttgtgaccggtgcttctcagcggcccgaacctgtatacatcgccggcgtcttgtgtgcttcctgtctcgcgaacctccgtcagatccaacgggccatgagcattggctgactggtcatcttctccccccacccacatcctcctcgcatgttctagggtcaggcagcggcggcaacaatggggtgttggtggtggcttgtggtaagcaggacagcgacgagcaagatggacaagatggtgcacaagattcctcatttccttgttgcagtcagtcttggccctcaaatcacgcttgccttgtggaggtggtgcacaacgtggctcaagctcactggtcatggagctgagggcgtcacactgcgatttgcgcatctggcgatggtggttctctgagcctgtgtcctcggggaggtcgagtgggattttgtagatcagactcgctcgcat

SEQ ID NO: 76151 - DNA, 1923 bp, Oryza sativa
  Clone ID: PAT_MRT4530_76171C.1
atgcacggcggcgcgtccttcgccgccgccggcgaagacgccggcgacgcggttctcctggagatcaccgacgcgtccttcatcgccggggaagctgacccctcgcctccacctcccgtctccgtcgacgacctcgccggcctagaccccctgccgtacccgaccatctgggttcgcgccgaccgcaccaggcaagccctcgccgcgccctcttctccggattcaccggccaatgagctgcttgctaatcgagagctcctcctacttccgcgccctcctcggcggcagcttcagggtggcttgtttctggctgctgagaatcttctaacagaatgtgaaaggtggttccgcaccatgagctctcaaagttcctcgctattggccccattagatttcttaattgacacctggtactttgctcaagagcatgggattaattatgttcaagatatatgcccaggatatttagctcagaattttgtgcaggttatctccaggaggtcgtttgttaaacttccctatgatttgttatattctacaatcgagtgcccctttctgaccgtggatagatttaagtctatctttctgtttaaacctgttctgcaggtgaggatatgcctcttacctttagaatttgcagcaggaacaaagagaaactgggctgagttcggaagcaaagtagagagtaggattcttaatctgctcaaggatagtttgcgaacagtattggatgcaattgctgatgacaacttggagagttaccgtgttcgaattacagaatattctaagatcatgcacttcgttgcacttctcactgatgaagattttgttttgcagaaaatagtgctttctggttgtccacaaataactactgaaatcttgtacatatcagtgctcccccctactaatgtgggtgcctcattgaataaaagttatggatttggttataagaaatcttgtaaccattcgattcaaactctatgcaattccaatcctctggacagcatggatgagtgtaggcatgtaatggcatttagaatgcaagaattgcacctggatgggtgcaaaggtattggttatgccgctatgtctcagctaatgagtaatgtgaatataacaaacttcctatgtttaagggagacaacacttaccgatggcgctctctgcaactttgttggctcttcacttgagtttcttgatatttccgagaccgtggtttccatggtatcattagcaccagttataagaagaaattctaacttgagatgtctgaaagcagctggatgccgtaacttgctatttgaacatggtgaagtagaagcgatgagtggtggtaatatatacggagattttctacaagaaataaccagtacttgctgcttagaggatgttgaaatgggatgggcattttgccctattcgagttacaacccttattccttcttttagtaaagtaagaaagatgactattggacttggcacaacattaccagagaatatattgtgtgctcttcctgatatttgtccattcctagagtctttggttcttaggtttcagatgatctctgacaaagttgtaagaaatctgttgaaatcctcaacgaagcttcgggtgctttgcctgtactcttgtcttggcaatttaacttcatttagcttccaaatcaaggcaccattgctaagaatcttaaggcttgagtggattactccatggatgacaaatgatgacttggcagttcttatacagaactataacttagttgaactttcactgtctggttgcaaactccttgactccaactctcaagagttaatctcgtctgggtggccaaacttgacttgtttacaccttgagtttttatttaagccaaaatttcaaggtttcagtgctgttatatctgtagccaccctcttaaataagtaa

SEQ ID NO: 76152 - DNA, 1559 bp, Oryza sativa
  Clone ID: PAT_MRT4530_76172C.1
ggacaagtaacgaaggcaaaatcacattccaaccgtatcgtgtcagcgattagctcgatcacaattcacaaacaacatcaacacatgagcagaattttaacgaatactttcgcttttgcatatttacagcaaaacgttgattaattcctccagagctcgccgctccggtcgccgccggtgccggcggacgacgagctggcccggtcggagatggacgagagcggcgtctcgtcgccggcggcggccaccaccatgtccctgtacgtcttcctgaccgcccacagcgccctgcagcactcgcccatgctcggcctctcctgcctcacgggggcgaggcaccggaacgccagctccatcaccatctccgcggcgcgcgccgtcgccggcgtccgcggcaggtgcgggtccagcacgtccgccgccgcgccctcggcgagcttgcgcatcgcccaccgcgccgtcagccgctcccgcatctcccgcctcgcctcgatgggtcgccgcccggaggcgatctccagcagcagcacgccgaaggagtagacgtcgctccggtcggtgagctggcacgtcttgaggtactccgggtcgaggtaccccgccgtgcccttcacctgcgtcgtcacgtgcgtcacgccgtcggcggcgccggcctcgccgacgcccagccgcgcgaacccgaagtcgcccaccttggcgcgcagcgacggggtgagcagcacgttcgacgacttgatgtcgcggtggatgatggggtgatcggcgtacatgtgcaggtacgtcaccgcgtgcgcgacgtcgatggcgatctccagccgcgcgcccatgtccaagaacctcccgttgcacctgtcgaggtgctcgcggagcgtgccgttggggacgaactcgacgacgatgaccctctcctggccgcactcgaggtagccgtagaagcggacgaggctctggtgctcgatgcgcgccatggccttcacctcgctccggaactccacgtccacgtgcgggttctggtcccggagcttggcgcgcttgacggcgacgagcgtgccgtcggggaggacgcccctgtagacggcgccgaagccgccctggccgaccttgagcgccggcgagaagttgttggtggcgcgcaggatctcctccatggagaacaccgagctctggaactgcgtcgcgatgcctcttcccctgctgctgttgtacagcccgcgcatcgacgccttcccctgatcactgccaggccccggcaatggcggcttcttgatcaagtcattgggctctcttctgctcctcctcttagcgttgctgccggaggcggaggtggccgccgccgacgacgaggaggaggaggaggtggagagcgagctgaaccacaacccgatcgtcctgaagagcgacttgagcgacgccgccctactgccgccgcccccgacggagagcggccgcgaccacgtgggggcggggctccacggcgcccatcgctccctctccagctccggcgtgcgcctcccggacgacgaggacgacatgctgcggcggcgctcgcgtccctccat

SEQ ID NO: 76153 - DNA, 284 bp, Oryza sativa
  Clone ID: PAT_MRT4530_76173C.1
agaaggaactaacaatttataatttttgacacaacaatgccacaaaatcctactaatatacattatcatacatgggacaaagtccattttctacaaaaaaatcccttccttgttttttttccctccatcggagccatgccatgccattaccacgttgtggccgagcttcgcccttagcttcttccacccgaacttcttgggacccccgttgccgttgccgttgttgccttccttcaaccttaatttgacgaggattatttacggggacaccttcgacattttca

SEQ ID NO: 76154 - DNA, 1506 bp, Oryza sativa
  Clone ID: PAT_MRT4530_76174C.1
ccaaagaaacaaaggggcgcttgtttttgcctaaggagagcccaagggcaatgccaaaaaagagccccctccttctaataaaatggaccctagctttagaccaactttttttttttttttttttaggaacagtagcaatagctctctttttatattaacaaaataatttcatgaagtagagtacaatggtggtggcagtgcagccgttgaggaaatcttcatgggcagaacctaaccaaataaggagctacaaaatattacaaagtctctgaaaaatgtgtagaaaactctacttgcttgctgttcttccctccaaaatcctcttacaatgttgtagactgcctccagacaaggggatggactagatccaacatctcaaacttatctggtgcattgcatgctcctaccaatcttgcagcattattatttcctcctattgtcaatgtggggtccttttttcttgctttctctgtcactcttcccctactggaaagagcacatgttgttgaacaccaattgattgagcatctcctgctgccttggctcccccactgcttgcatcaggtaactgccattgtcctgagagaaagagatggctccatgctggctttgcagtgagtaggatgtggttgaggttgtgtccatgatagcttgagatggagctgggcttgattggttcagtactggattaggcattgcaagggcttcttggaacatgcctccaatcttttggtcatggaggccatcgctgtccattccaaagccatacaacactgggctcattgaagcaatcctcatggataggaactcaacttggttctgcaacgactgtacatagttgatgatctcatccaaaatgagagcctttccagtaaccttgtcacaaccagggaccagtgcttgcagcatcctcatcctctcactgatcctctccctcctcaccctctctgcaaggctgtggctatcagttgcctgtcctctccttgccctcacatggatgtacccttttggaggctcatcttcagtggtgctcttctcctccacttctttgctggccttcttccctctcctgctcttgccatccttgcagctatccttggagtgtgcactgtcttctgctgccttcctcttcctgtccacagatggagaggtgtcaagaactgcagacactgagctctccaatgaggcatcctccacaatggctgctgctgctgcattggcaggttgtggagcttgggagccatggctgtggttgtagaggaagaagcttgagatgttggggtcattggtggtggcgatggctgctccagcagcagtagccttgaggaggagagagtggtgtggtgagaagtctgccatggctccccgcctgcggttctctctgtggctggggcgtcggggggttgttgagtccaagtctggtttcttcagtgaattgagggctacgtcggctccgcgcgccgcttccggcggccccggtgtccccctcgtgccgaattcctgcag

SEQ ID NO: 76155 - DNA, 420 bp, Oryza sativa
  unsure (1)..(420): unsure at all n locations
  Clone ID: PAT_MRT4530_76175C.1
ctatnactaccccacnggatctatagcctttgtccaatagaaggattgagcatttgctttcccgtgtcntctttgtgaacaaaccnatcnatggaggcncnagtgcttgtnttggtgaccatggcaatcgccnccncntgctgggccaccggcgggcntggccccggcggcaacggcggcaacaacaacaanaaantcccnccncaggggcgggcgcgtgcncctgancccnntgacnccccgggnactncncaaggnnccnnttctttncgggggggggggggccggngganannnccnccccnttttttagggnnggtcncnccgggccnccggnttgcccaanaaanttnanttttgttttnnggngggggggnacnccaggtgccnggtgccccccgggnaacgggnaattccccg

SEQ ID NO: 76156 - DNA, 456 bp, Oryza sativa
  Clone ID: PAT_MRT4530_76176C.1
atggcaatttcccccgtagggtcggggtcgggtgtagtttccaccctggcgggagtgagggccagggccgcaattgggccagaggagcgtgcgggcgcggcgagccggcgaccgggtggcgcacgcaagcctcctgccacgcgcccctctcccttctttctccacgcggcggtgagcagggcagcggagcgcaagcgcgggccgttccagcccaacccgccccagacccgccccattgccatccctacttgggtcagtttacgaatttcaaatgagggcaatgctgctgttgctgtcactgctgctgctgctgctgcagctgcaagatttgatacgtcgacggagaagaacaccgcggcgacgggttcttcttccccatcgacggtgtttgatcccgacaggatgagcaagcggcgtgtccggagaggatctgacccgattcacaacaaatgctag

SEQ ID NO: 76157 - DNA, 840 bp, Oryza sativa
  Clone ID: PAT_MRT4530_76177C.1
atggcaatggggcgggtctggggcgggttgggctggaacggccctgcccccaaccctcgacttctccacccagccccggccccgggtgtagttgcggggccaaatcaacccccacccctggccccttcggggccccgctgtcggaggcggcaaaggcagagtctcgcggcgccgctagctcgccggctcaccgcgcttgcgctccgctgccctgctcaccgccgcgtggagaaagaagggagaggggcgcgtggcaggaggcttgcgtgcgccacccggtcgccggctcgccgcgcccgcacgctgcccgtcgcgctgacggtccgccgctcgtgcgctgcttgccatgctgcccgtccgccaccgtgtgaagacaggagggattgggagagaggcgagagggagattggagggccggagggacggagggtagagcgcgagatggagaggcgcactggcgtgctggccacggtggctaaggaagttggcactatatttagaagtctaatatacctcctctggcccaattgcggccctggccctcactcccgccagggtggaaactacacccgaccccgaccctacgggggaaattgccatccctggacccaagagtccaagttatcagcaaagtcagcgctcggcaaccttgtgtggccgcccaagctcgacacgttagagataagagataagcataagcatacccaatctgaagccacagagatcaacaagatggatctatcgccatatctgatctcgccgcgttcatattcgaggaagaagactaccctgtcgttgactatgtggggtgttccatgcctccaagtcgatgataactag

SEQ ID NO: 76158 - DNA, 778 bp, Oryza sativa
  Clone ID: PAT_MRT4530_76178C.1
catgcacggcccaataagggtcgggtcgtgccaagccggcccgaaggcacaggcagcacatccggcgactggctgcggggagggcgacggcgaaggtaggggcgcgcggcgctgggcgacggtggctgaaggcggcggggacgaagtcggtcgagggcacgtgtggaggcggtggcgacgttggtggcggggaaggagtcgggtcgaggcaaggatggcgacgacgaggtggttgggcattcagcagcagcggctgcggtggtggggaggccggctcggcgtgagaggcgcgggcggcggagatgaaggccggcttggcgcgagaggcgcggcagatggagggaggctggattggcgcgagaggcgcgtctagtggaggaggccggcttggcgcagagaggcgcggccggcggtggaggaggcgacctaggtgtgaggaggagctaccaatgggggtggcgcggtcttcggcgcacgaaggttggccggcgggggacgccggtgcaggggtcccacatatcggcaaaacttgtgtggtggtggagcattaatgcgtcagccgtggattcacaggtggtgagcggcgggtgaaaacccagtccagccttggccggaccgacaacgatggttatccctcctcctaagggcgttgctgtgatgtctcacccctcaagggtgtttgccgggctgggcctgccaccgacgggctacggcctacgggtgatggggatcattgcacgtcgtgccgagaaagaggctcaggcacagcccaacggtc

SEQ ID NO: 76159 - DNA, 455 bp, Oryza sativa
  Clone ID: PAT_MRT4530_76179C.1
aggtccccgcgggggaagttaccattcctactagccatgtcgttgccaaatcccgcaagaaccggtgcggcctttccacaaatccgggaccgccatcttttaacagtgaaatttgcctgctttttgactgtcaataagggtttcatcggggtttcagccgatgagttatctggatgttgcatcggcttacaaggattacatccgattggtttctattggactatattattgttatatcatattatcatcagccgattgtctttatattggtatttacatcaagtgtcaggctccacattaaacacttagtcgatagctcgaaaccctattgctatcggctggatcaaactgactggcatgcccacacctcatcaatctttggacctgcactggagctaagcagatctcccaggccagtgtgtgttttttgcgtcaacacaatcccatcgcgatgc

SEQ ID NO: 76160 - DNA, 811 bp, Oryza sativa
  Clone ID: PAT_MRT4530_7617C.1
agaagtcaagcccccatttttgtgctttgtttctgcttgttatatggagtttagtagagtaaaagccttttcttttccgttggtcgtgtagacgctgcagcttcggaagatccgctcttcgtggaagttgaagccggcgtttgggaaagcgagcaaggcaagtcacatcatctccccctctattcaaaaaccccaaaatggttttaggctgggctcgaggtgcgtggttgggttttgctagtcgtacctcgggtactataaggattaagctcgggcctctgttgcaaagatgatcaggtaaacatgccctagaagatggccaccaatcctgcagccagctgccacggaggggagagagggcagcccagccaggagaagacaacacccgtaactagacctgacgagcaaacatgcagtcaaggaggatgtggttcgccgtctcaagctcttgagcgcaaaaggggcaggccgagtggctatcaatgccgcgcttctggaggagatcagctgtccaacagcgctgctgaaatgcaaaccagaggaagaatttgcacttagcagggcccttcgcgtgccagagaagatcggcacaagcaaaggagtgctggtcaaagaagaacgcttggtacgccgaacgcgccgagtagcgctggtcactcgtccaatgccagacaagacgatccccgacacccggtgtaagctgaatgtggagcacccaatcccaaacaaggagaaattgggagatgaccgggacagtgagggtgccgcggatgttagaaatccaggcgttgttttgccaggccagtgatga

SEQ ID NO: 76161 - DNA, 263 bp, Oryza sativa
  Clone ID: PAT_MRT4530_76180C.1
ccacgctgctgtcgcaccggcgtacattccacggaggagacaagacattaccacgaagggggtcaggcacggggggacgggcgtctactattcctataccgagacacagcaagggcacaggagacgagaagcggctcaggatccaaataggaagcagcagctgcggggctgcggccagtctaccgcgcatcagtccacccacggccgctcatcggccggagcgaagcgggcagacactgaagaaaccctctagtatgctccct

SEQ ID NO: 76162 - DNA, 249 bp, Oryza sativa
  Clone ID: PAT_MRT4530_76181C.1
atggctgaactggagctgggcatgcggcgatatataggagaggagacggagagcatgcgcatctaccggctgggtttcggagcaagagtactgcgcgtcaccgcgggcccggtcgcgcggcacggcctgccgctgaatgggcggttccgactgcgtgcagccgggttcctgctgctggtccctcgcacgcggcgagaccgcgagacgctgccgtacgcccgtgcatcgatcgcggcagccggctggtga

SEQ ID NO: 76163 - DNA, 2194 bp, Oryza sativa
  Clone ID: PAT_MRT4530_76182C.1
ttttttttttttaaaactaaatgcacatcatgttcatctgcgaaaatataatctgttcacaacaacaaagcactatatctaagaaaatcggatgagtttggtggctctatttcccaactgctatgaacgcttagctaccgtcaacaatatgataactcgaagattaacaacaccagtttctgatatgcatcggcagtaaaatagcatgtgatgctttagacactatagcagtagctcaaaattaaacctcctatacagaaaaaaataatataaaaaaaacaagtttgcatatttgacgtgatggaatgttggtttcatgatgagcaggacagcatgcacactcctggcctgtatgcccaggctggtggcaaccgggcatatttctccattcctggctgctcatcatatggatgttccataactttcaataaccgacgaacttcatcataatcaccttgctcagctgcgtcaattgcagtctggcagagatagttccgaagaacatactttggattaacagagttcatggcagctttcctttcttcgtcaggaacgccacttgaaaccaactcttcaatgtaagtttgtacccaactaatccatgcttcctttctttctggtccaatatctaggagtgcagctttaagtggaacaagtagctccttctctggaatgttatggtctgctttgacatttgaaagaagacggaaaaaatttgtataatcgaccttatcaacagccaggttgttaagcagcttgcctattagctgcttattatacttgggtagaccaagtttcctggtcattatggattgatactcatccataaactttgtcccgtacctctccatcacataatttgcctcatctttgctgataagttcggcagctgtcaatggtgaggtaaactgagcaatattccacaagccaacatcaggttgatttgcaaaacagtatctcttcccagggaggtctgttgtatttggagtatagctaggatcaaaagcatccaaaaagccaaagggtccatagtcaatagttagtcctaatacactcatattatccgtgttgagcacaccatgggtaaaaccaacaccttgccaccttgctatcaagaaagcagtgcgctctgcaacctcaactgcccaggctgcatatttgttcgaagtaagatctatcgctggagagtcccctatagctgcttcaaaagataaaccttcactctttttaatattttcgagatgtgggtagtgatgacgtattgtgtagtctgccaaatgacgaacaatttcaaggtcctctttgtcccttgtagcatgtatctgatatgaaccaaaacgcaaaaaggatggtgctacacggcatacaatggcacctggttcctcctttgaattgccatcatagaacatatctcgaacaacagatttgccagtttcaactagacaaagagcacgagttgtagggatgcctaggccatgcatagcttcactgcataggaattcacgaatgctgctgcggaggacagcaaggccatctgcaaatcggctgtatggagtctttccacagcccttgagctgcaactcccatctctcacctcgagagttgataacctctccaagagttattgctcgtccgtcgcccaactgaccagcccatgaaccaaactggtgtccaccatagcactgggcataaggtgaactcccaaccaaaggatttgctcctgagaacagctgaggaaaatcaggtctttcaaactctttgtgatccagatcgaggatgtcagccacggactgggaccacgccaccagcttagggttgtccacgggcgctgagggtgacacctttgtgtaacaagcgtgaagcacctcgcgggggatggcgtcggatcgggggtcgccgggggctcgcggacgaaggagtcgtcccaggagagctcctccagcacccgccgcggtcggctgttcgcggcggcggtgggcgagggcgacggggccggtgcctctgcggcggcggaggccatgatgccacgcgtcagcagcgggccgcggcggagagggaggcggcggcgggtggaggcggcggggagggggagggggagggggaggagggcgcgggcgcggcgggtgagggaggagaggagggcggtggggagaggggaggaggagaagagggaggaggagaggtgtgggggcat

SEQ ID NO: 76164 - DNA, 261 bp, Oryza sativa
  Clone ID: PAT_MRT4530_76183C.1
atgggcccatacaaggacacagtggattggctgcccaccttattgctttacggcaaaaccgctgggaggagatcccgagctaagcccgagcagcgagcgttgccgacgaagttcctaggtctagcccaagcgaaaagcactgccaggcttgccttccaaaatggacaaatcgtgctcccggggcacggtccacgcttggggcccacgggttctctcagggccccgcgcgctcccatgttgcttgatgggaagtcttcttaa

SEQ ID NO: 76165 - DNA, 446 bp, Oryza sativa
  unsure (1)..(446): unsure at all n locations
  Clone ID: PAT_MRT4530_76184C.1
taganggtaaagattnangccgnccngcaacaacgacaactntgtcaaccggaacaagtgggattgcgancggggaatactctcncnagntacttcccnccgacanatnatcngntcaatttcgtctcctctaaacngtggatcantctncnacccgtntttgncgctcactgngttgtganccnggnantnaggccngcttccgaaaacntgntcatncatnaacattgcntcntngccngcggtngtgtaatnnttcngaggtnctctcttcgcccccgtntnttttcntaaggcncgaccgacgnaaaaaactccccnatgtcnttnctagtgcgcaaatgtgtatccanccaccnttntttttttntcctnanccggagnatcttgccccccctgtgcnatgtncgttttccncccaaattcggnnacccccgggaggcacc

SEQ ID NO: 76166 - DNA, 249 bp, Oryza sativa
  Clone ID: PAT_MRT4530_76185C.1
atgccacctggatacaagaacttctccgaggaattacttgcatgtttcctcgtcgatcggctggatgactacttcgctagaaagaacaagatacatgacaagcgcgtgaaaccaatcctggagttgagaggatttgcaaggagtacaaggaggaaggctatgccgagtactggatcaccgacgacgaggacgaagcagccactcgagctccggcgccgggacggaggaggggtcgacgaggggtcatga

SEQ ID NO: 76167 - DNA, 191 bp, Oryza sativa
  Clone ID: PAT_MRT4530_76186C.1
gcccacgcgtccggccgaactattctagaggtatgggtggatttcccctctgtacaaatgccttttgattggttgtggcacctaacgcctcctttaaagaaaggagccttttccatttcatattctcctttggcaaaaccaattcaattccactggactgttaccttagggtcatggcgtcctcctttcaa

SEQ ID NO: 76168 - DNA, 291 bp, Oryza sativa
  unsure (1)..(291): unsure at all n locations
  Clone ID: PAT_MRT4530_76187C.1
ccttttccagaacccaccatccccaaggagtcgacccgtccagaangctacctctccctcaccgacagtcagggaaactcggcaagntcgaccctgacttcgtcaagctgccgatgccatggtcacntggntcgagcttgggatgactgaacccctcgactctcttcgaaacccaacccaataattatcctggacctttttcccagatgaagtaccctttaataaatcttgccctagccccctaatatacnctttttaataagggagagattacttaacaacttatattct

SEQ ID NO: 76169 - DNA, 530 bp, Oryza sativa
  unsure (1)..(530): unsure at all n locations
  Clone ID: PAT_MRT4530_76188C.1
ggggacaaaggttgcttctccttctgaggtaaattttaagaacgtttttcctgtagttatgtcttcctttgtgttctctctcgcagtgtgtattaaagctggattgaaatctgtaaaggaagtactctatagagtgtcgctgttaatttgtgaaagagacttttctagaatcttggtcatcattaaactgaagctatattttcatttttttccttaatatttcttttacatttgtatttctcattttttttcatgatgttttctttactgtggttgaattcatgtgcttttgcaaagattatgaaaattaatttgtatttgaaattacagattaataattgaccatttagttttaggacagagttattcttaaagtttttttagctccttaaacatactttgtttgagataatttacctccttaaacattttttngtgagactcaatgttnaactgtttcttcttttaatttatagatatctctccattccaaaagggttttcctatttgaatgaaaggggttatgtagc

SEQ ID NO: 76170 - DNA, 2656 bp, Oryza sativa
  Clone ID: PAT_MRT4530_76189C.1
atgcgggccagggagatgcacccgctgtgctgcctcgtctccgactgcgcgttgggtgaaggcgccggagggggaggtggtaagggggaaggaggagactgctcgccgacgaagccgccggtgggggaaaagaagaaggtggtgccggtggcgggggtgctgtacaagtggaccaacatcgggaaggggtggcggccgcggtggttcgcgatccggggcggcgtcctggcctactccaagatccgccgccgcgtcgccgccgagccgcctcccgaggccgccgccgccgccgcagccaacggcgtcaggctcatcggcgtgccccgcggcggcgtcggggaccagcccatcggattcgtccctctcaagatctcatcatttagcgaaagtaaatcggatgataaacggttctacatcattaccccaaccaagacgcttcagctgaggactggctctgctaaggaccgtgtggcttggattgaagcacttgtttctgcgaggagtgaatattctcttaacgggggtgtaccgtgtgaccagaatgagggatcattttccactgaaaagcttaggaatcgcttgcatgctgaaggtgttggagaggcaactattaaagactgtgaacagatcattcactcagaattttcacagtatcacactcagatgaagcaacggtgtgaagactatttaaacttcattggcagtcttccaagggaacttgaggtagttaattcgggagatgcatctgctattgagaagccacagtcggagttgttcaaacatgactgttccagctctggaaaatgtagtgagtacagcaacactgaatcttctgatgatgctggcaaacaagaggtagggcagttgtcagatgaggatgagtttcatttctatgatacaaggcaaagtttcagtgacactgctgcaagtcctgacttgaaaatgagatgttcaaatagtgggagtggagctcacaagtttggtgaattactagctatcgacaagacgaatgaatacttattgtcatcttcaaaacgccgttcagagttacccgtaccaatagaaaaggagaaaggtgttagcctttggtcaatgatcaaagataatgttggcaaggatcttacaagagtctgtcttcctgtttactttaatgaaccattgtcttctcttcaaaagtgctttgaagatttggagtattccaatttactggatcgtgcatatgaatatggttcaaggggaaacgggctgatgagaattctttatgttgctgcatttgctgtctctggatatgcttccacggattctcgcccctgcaaacctttcaatccattgttgggggaaacatacgaagctgattatcctgaaaaagggatccgtttcttctctgaaaaggttagtcatcatccgatggtcatggcatgccattgtgaagggaaaggttggaaattttggggtgacagcaatctaaagagcaaattttgggggcagtccattcaactcgatcctagcggtgtgctaactctacagtttgatgatggagaaactttccagtggagtaaggttacgacaacaattaataaccttatcattggccgagtctattgccatcaccatggcacgatgaacataagtggaaacaggcaatattcatgtaagctgactttcaaagagcaatccttcctcgatcgtaatcctcgccaggttcaaggacttgttacggatgctaatgggaccaaagttgcattcttgatgggaaagtgggacgagagcatgtcttgcatcattggtgatgatgcttctaaagtgaactcccgtaatgcaaatcagagtacgggtgccactttattgtgggagaaaaatgtgcctccagccaatcccactcgatataacctgtcatcatttgcaatcactttgaacgagttgacaccaggtcttaaggagaagcttccaccaacggattcaagactcaggccagatcagcggcatctagagaatggggagtacgaaaaggctaactctgaaaaattgcgcctggagacgaggcagaggatggcaaggaagatgcaggagagtggttggaagccaagatggttccaaagggacacagaggatggaacattccgttatgtcggaggttactgggaggcaagggagcagaggaaatgggttggttgcaatgacatattcggcaataatgtgtccactctttgcaccagcgcaagtatatagagaaacttctgtttagtagtcgttgacaccccattaattattgaagacggtacatagttgatcggctgctcccgttgctaccatgcaaacaagagctaacatgctctcctcttgtcatatagaaacactgggacatttatgtggatactgggatacttaactgtgaggcctgctagctaacaatgttgttattactctcagtgatatccattttttcaatctttgtactgttccacagagatactgagttatatacttggttcctaattgtaattgatcatgtaagcttctatgctcatggtcatggataatggacgttcatctttctttttaaaaaaaagaaccaaggcaggcgagtaatcttgtcctgtatagaaatgccaaattaatatattcaatttcctgttaaaaaaaaaaaaaaaaaaaa

SEQ ID NO: 76171 - DNA, 359 bp, Oryza sativa
  Clone ID: PAT_MRT4530_7618C.1
gcaccatcaacattgtatggttcaacctgttcttttgttctgctctgattccttctctgttactgtaaccatgttgtttagaatcgcatcagaacccaatcattcttgctacttcgaccatggatggaagaaatatggaattgtgccttcaaaaaaaaaaaaaaaaaaaaaaaaaaaaaaaaaaaaaaaaaaaaaaaaaaaaaaaaaaaaaaaaaaaaaaaaaaaaaaaaaaaaaaaaaaaaaaaaaaaaaaaaaaaaaaaaaaaaaaaaaaaaaaaaaaaaaaaagggggggcccttttaggggacccaattttccctccccggctttgcaaaaaaaaactttttttttggggccccc

SEQ ID NO: 76172 - DNA, 615 bp, Oryza sativa
  Clone ID: PAT_MRT4530_76190C.1
ttaagaaaatcggaagaaggaattgaaggacttgccagcatcgatcgtcgatgactcgatgttccagttctggacggctctcatcatcatcttatcgttgcacgggcctggatcgatgccgtcgccgcacggccacacgaaagcaccagtaatggaagacgtcggcgcctcagaatcgccgatgggtcgcaccgccgtattgcctccgaatcctgcctcgccccgtccagtcaggacgagagcctccaagcactcgtccctagccggagccggcgtgttacctcctggagatgacacgttggttccggtcagatatataccaggcttcatccgattggtgaccggtctgacaatggtcatgtcgtcagcagacagccatctcccacgtcgcgcctgcttccggtggaagtggaggtaggtatgggccgtcccgtcagaaggtgattcggatggcagcgatacaaattggcactttgtagcttcttcatacgcgaatccaccaaaacacaggagtagggtattacgcttctcagcggcccgaacccagggcccccggccgaactggcaaaggggggcctgcgcggtctcccggtgaggagccccacgctccgtcat

SEQ ID NO: 76173 - DNA, 476 bp, Oryza sativa
  Clone ID: PAT_MRT4530_76191C.1
aaaagaggtatattttcaattttttttcctctactctctatcccccctctctctcccttacagaacggtgagcggcggcgcagcggggggcggtgggcagagaggcacgcgacggccaggcgaggacgggtagcttgcggtggccaggagaggagggaggcggcgcgcggcggccgggcgagaggaggggccgctcgaggcggccgggcgagcagggaggcggcgcgcggcggccgggcaaggagggaggcagcgctcgtcgaccgggcgaggagggaggcggcactcgtcgaccgggcgaggagggaggcggcgctcatcgaccgggcgaggagggagggctccgacccggatgtgaccatcgaggacgtcggcggcggcggccgggcgaggagggaggcccggcgctcggcgaccgagcgaggaggggcggcgccgttctgctgggcatcgcgggtggagcggctgacggcgtg

SEQ ID NO: 76174 - DNA, 428 bp, Oryza sativa
  unsure (1)..(428): unsure at all n locations
  Clone ID: PAT_MRT4530_76192C.1
angcaanaccataactaggaggaggttaaccatagcaaggggttaatgctcaccacatagaggttcagattccatacaacaaatagggctaatcaattccaaaacattccgataagcatatacgctaataggattctgcatttcaagaaacacgcatcctagtaacacacccttgagatcattgaccacataatacggaatggaggtaacagtgtctagcgtaccaccgttaaaaatgaaatctatttcacgtccttaacactttgtctatggggtgcataccataccatgcgcctagctcctctgtcatgcctccaaccatgtggttgatcgtcaagcacctgtaccagctgtcgttgaccgtgtcgagctgccggaaacagacctgccggagttgctctgccacggcgccaccgggtgcgccgtgg

SEQ ID NO: 76175 - DNA, 868 bp, Oryza sativa
  Clone ID: PAT_MRT4530_76193C.1
ttttttttttttttttttttacttaatcatttgtatgagcgaatgtagctgaaccattctagtagctggttaacaagccaagcatgtcattggatacaaaaaaatgttggcaactgtatagaaatttacaagactctgaaatctgaatctagaaaagcatcaactcatttgggcatacaaaaagtgcagttcagaaaatgtgcaggactcccatgctaccatgatcactccgaacttccttccttgaacaccttgacccaattctcagcactgtcaattatttcaccagtcttgaccaggtaccgaaccttcgttccatcctcaaggaatttgtgtccaaccctactcgccacattcttttcctttgagtagagcatcacatttgagctgtgaatggggccttcaatcatgacgatttcacccggttcatcttctgttcctttcttgtgcttggacttcaagttcaagtccttcactattacagtgctgttgtgcttaaaaagccgcgtaacttctccaactttacctttctcacggcctgcaatgacttgtactgtatcgccaatcctaacatgcatcttgtgcaggacaggaagactgtttggtttacacttcttcctctcccatcgcttaagcctcatttgaattgggcatgtcttgatcataaatttaaccccagccggcgcggcggcgaaggtggagagcgggtggccccagaagctgctggtgctcgccgcccccggcgcagagatggagagggacgccatcgcgccctgcaacgccgccaccccggccatcttcgtctcctcccctcctcttcctccctcgctcgctcaaaccgcagagaagcagcagaggataacgaacg

SEQ ID NO: 76176 - DNA, 669 bp, Oryza sativa
  Clone ID: PAT_MRT4530_76194C.1
atggcgaaaggaaggaaacaaatcccttcctcagtgcctttatacccttgccaacgctgtgcccggctcctcgcttctcgcgcccactatttcgccccctcgtttctcgcgcccacgcttccactaatcccattcgcccgcttgcggcgcatgagacataatcgccaacgtggcctggcaccctcgggggacgttgggcccgagggtgatgtgttcgccctcctcttagtccccccgagggggtcgggctgcacccccctcggccccgagggccgaggcgccccgacccctcgtgggttttcgctccgcgtgtatggggtagaccggtcagatcgcgggttaggtggcgacaggcggtctgacgcacgcctcgccccatcccgtcaggacgagggcttctaggcgctcgtccccagctggagctagcgtgttacctcccagagatggcacgttagtcctggtcagatatatgccaggcttcaccctaaccattacaggcaagatgttgtgtgaagaagggccaacgtgcagattgctgagctgacgcgtggtggacaagaatgaccgatttgtgaccagtctgacaccggtcatgtcgtcagcagacagccatgattccgcgtcgcgcctgctcccggcgaaagtggaggtaggtgcgggccgtcccat

SEQ ID NO: 76177 - DNA, 553 bp, Oryza sativa
  Clone ID: PAT_MRT4530_76195C.1
ttatctcggcgggtacatcatttcttcattccgcattccttgtcgagatccagcaatcgttctcgagcgatcgagaaggcgtagagtctgcgacagagccttgtcaacattggtcgtactcgccttagtcgatcttggtgtagaaccatagagacatggagccttcgtcaatgtcgaatataattttccgctggtcgaggaccaggtagtagtcgtaactcgaccacttttctcgagtagtccagccatggccggtgctatgagataggtcgtcggtcttccttggcaggttgggctcgacgactctgcatttgtcgagatcattctcgataatgtggtgtactcgaccacaacctactcgggtgctcaattgttccttgttgcgtacttgttcgatatcatgcgatctgacatcttttggtacgccgcggagcttgaggcttggatgatctcgatagatcaagttgtcaatgacgatgatggttccgatctggttaggttggatctccccctcagctgaagtcgtcgagtagctcgttgtcggagaatccat

SEQ ID NO: 76178 - DNA, 584 bp, Oryza sativa
  Clone ID: PAT_MRT4530_76196C.1
atgtcggtgatatgggaccgggagtatcatgaccagaggcttgaggcagacgcaatcgcccacgtggcctggcaccttcggggacgtcgggcccgagggtgaggtgtccgccctcctcctgatttcccccgaggggggggtcgggttgcgtttgccccggccccgagggccgaggcaccccgaccccttaaagaagtcggtcagatcaagggttaggtggcgactggcggtctgacgcacgcctcgccccgtcccgtcaagacgagagcctctaggcacgcgtctccagccggagctagcgtgttacctcttagagatgacacgttagccctggttagatgaataccaggcttcatcctaaccattacaggcaagatgttgtgtgaagaagggcaaacatgcacgttgctaagctgacacgcggtggacaaggatgaccgatttgtgaccggtctgacactgctcatgtcgtcagctcacagccacgttcccacgacgcgcctgcccccggcagaagtggaggtaggtatgtgccgtcccatcagaaggacgttcggagggcaaccgtgcaaatctccgtccat

SEQ ID NO: 76179 - DNA, 2016 bp, Oryza sativa
  Clone ID: PAT_MRT4530_76197C.1
atggccaactatatctggagcttgagcgtggtgcggttggggttgagggtcaaggcgtacctgtcgacgaatcgctcccgtgggctcaccaaggagaaccaggtcgtgttggattacatagagcatgagccaccgagcagcaccggcgtccgatcttgtaagggcaactatgaccccgaaaccatgaaggagtacatctacctcgtcgatggcaaagaggtggagaaggtggagttcgggcagcaagtcaaacaggtagcctacggggttccggagacggtggatgtcgagaaggtctggcaatgcaaagggaaactgctgaagttgagcgacggtcgaagggatcaaggtgtggcgcggcggcgggacctatgcctgtccttcgccctcttcaagatgctcaggttaaggtttgccgtcgatcatgttggtcgttttgccctccctttccaagaaggcaagtcatgggacttcgtcgtcaaggggctcctcgccgatgaccaagacctcgatagggcgtaccgggtggtcgaggccgagcttgggttcctctttgatttcttctatgcccgttatccatctatcaagaacagcctggctcctgaccttgctgtgtatgtcgcgatcctcacgacaagcctattcaccctcttctccccggaccttctccgataccggccgcttcggcctggtcccggagacggtggagatgccagcaacatcatcatccatggcttcaaccttgacctccttgtcacccgtttggtaatcgtttggtacatcttcctcgagtcctatcagttctttaccttcatcttctctgattggcacaaggtgaagatgatgtgtcggtacgtgcgcaatgagtcatggcacagggcgctcatggaggtcccactcaaggtgttgtgccatttcagtaccatcacgaggtactggaagggaaccatcggccaatacttcctcctagacaacattcatcctcactggatcaagaccttcctatcatggttctccatcgaggccaaggccctggactcatggctgatgactcgctccatccgcttgacaccggaggtgagccacgccgtgctccgtgagctcaagaactgcaacggcaacatcaccgacgggaggatgtggttgtatcagaagggcatcatcgacatggacctcgatcgtgacgtcttgctcggcaacccatacgctaattacatcctgaagtggcacattgccactagcatctgtgactacgggctgagcatggagaacggcgctaccaccaccgacgacgagttcgcgaggaatcacgaggtcgcaatgaagttgtcagggtactgcgcgtacctgctagcgttccagccggagctagtgcaggacaacacgtacaggagcacgtcgacagttcaaggcacgctgcaaaatgcccgggacttcctcggcggctgcaagtcccacggggaaaagtacaagaagctgatcgagctggggcgctcgaaaatagtgatggaccacgagatggcgcagaaaagcaaggacatcatctacagctacgactccgacgaggagaaggtgaagaagatgatcgagctggacaactcgacgagcaacgacacggtgaacgtgcttaagatcctgtctcagggcgcgagtgtcgccgtgtacctcgtcgataggatcgaggacacgagagagcggtggaaggtgctcgccgctttctgggcgaacctgatgctgtacatctccccgtcggatagggcggtggcacacgccaccaggatggcgaccggcggcgagtttataacgatcctatgggctctgctgacacatgctcatgtggtagacccgctccagtcgcgcggcggtaactcgggattgcatatgcagcttgaggaggaagagaggaggcggccgctgatcgaagagcaagagatggagctggtgacgaggcgcaagctgcgcgaagagcaagagaggaacatgcagatgcagggccagccgccgatccagccctga

SEQ ID NO: 76180 - DNA, 301 bp, Oryza sativa
  Clone ID: PAT_MRT4530_76198C.1
gcaatgccggtgctccaagtccaccgaagcacagcagcagactagcatcagcagcagtagcgaggaacgttaactgaaacagccgcaacatggaaacatatcagatcgatggcagcagcagtagcaaggattggcggcagcactcaccaagaaggagctgagcaggagtggcgttggacggcgatggctgaacttgcggcgacggcagcagcgattgggttggttaaatagatatcctgatgaagatcgaacggcccacattgatttaatccccgggagtttgtccggactccgattacta

SEQ ID NO: 76181 - DNA, 712 bp, Oryza sativa
  Clone ID: PAT_MRT4530_76199C.1
atgagccctctcctcgacggctgaggcctgaggcagaggcgagaagccgcgcgaggtggctttcaatttggtggtagcgaaaaactagtgcagccgaagcccgcgaaccggggcggcagaaagatcacggacaaaagcccagccttggggtgtaagatcaaagtgtgttttgattcttattctgtgatgaataattggcatctatgattattggttttgatatttggagattatcgtcgaagtggttttggagataatcaattttcaggtgatgatcggattcactgttattttatgtgaccagtccgaccgggtggtgtataccgactagagttgatgcacgtggttggtgaagattccatatggcatacgatggaggtattgtgtgcgtatgggatgcggagtcgaatttggaaggagtccaaatttggtacaattggttatgtaaagtttgtgtcttgtactatagggtttcctaagatgtttaggactcttagtatgagtttggttcgtggctttaggctgcctaccttatgtataaatagagggggagcacgtggcaggcaatcttcaggcggttggaccggcggatcaacaccggtcagaccggcggcacgagctcggtcagactggcggatcaacctcagtcagaccgatctacatcgaatttgatggtaacttttatttatagattacaaagattatgacatcc

SEQ ID NO: 76182 - DNA, 1791 bp, Oryza sativa
  Clone ID: PAT_MRT4530_7619C.1
atggctatcaatgccacgcttctggaggagatcagtcgtccaatagcactactgaaatgcaaaccagaggaagaatttgcacttagcagggcccttcgcgtgccagagaagatcggcacaagcaaaggagtgctagccaaagaagaatgcctggtatgccgaacgtgccgagtagcgctactcactcgtccaacgccagacaagatgatccccgacacctggcgtaagctgaatgtggagcaccgcatcccaaacaaggagaaactggaagatgactaggacagtgagggcgccgcagatgtcagaaatccaggcgttgtttgccaggccagaagcaaccgtgcgcgaaccacgcagacgcgggggcacaatgaagaggagatccggagccaaggaagctaccgagtggccgcagatccattggtcagaccagaaaagaatcgactcaccatcacctggcacgaagaaagtgaactcctcaaacatgttagagacggctcgctcggctggggccttcaggccgtcccagtagggatgccctgagcggttcatccaagaaacccggcactgcccaccgtgagccgagtccgtgcccgtccacaagaaggcgcggcgcttcttatcaatggccttgatcaccttatccacaagcggctgcagggccgccttcggcaacttgcgaacggatagcggaatgccgagataggaacaaggaaaatcagagatcgagtagggaaagcaggactgaaccagctccaggtcctcgaccgaacagcggatcggagtaaccgaacactcggcaaagttagtgcgaaacctggacgctgcaccaaagacagagaggatgccttggatgaactcaagatcctgacgaaccgaggagaggaagagaaccaagtcatcaacgtagagggatcgaggcgcggtgtcgcaaggcacgatcgttgagcggaaggaacccgcctggtagaagaaaggtctaccgatagatgagtttgttgccatatcttcttgttcaattgttctacgcttgaaataacctacaagtgcctcagagtcctctggttcaagcagagtgtaactttggatgccaagctgactctgacattcagcaccatcatcattcatgtgcaaattttcatgcattgcttgtatttcagcatttaccattgcattcagcacaccgggcttaggaattgaaagagtcctcactgatctcagcaagtgtacctcttcaggtcgaaccaactcatggttatgttcaggaacaatctgaataactcgccaatggccttccgaatcaactctataacggaccattgctttacagttagttctggtgtctggcttattaaagtttgcctcagtaagctgctcatcgtcctttagaccttcctttgagcagtaatagtcttttgtacgaatagttttggtccctgtaaagtagtactgtttccccttcctcacactaaagcccatacgatgtccatagtcacagtacagcctgtaagcttcttcttcactattggcaattttgttccgcaattcttcagtcaactcctcacggcttggaattacaggaatattttcctggttctcctcttcattcctcatgggatgttcctcctttccctgttctccattgtcgaaagcaacttgtccctcattttcagcatcataaattatttgtatctcttggttctcctgagttccttgctcctcattatctcctacactgtccagacagatcgcctccccatcaatctcaatagcaatgctagtttcttccat

SEQ ID NO: 76183 - DNA, 599 bp, Oryza sativa
  Clone ID: PAT_MRT4530_761C.1
ggtttaagctatagctctaaagacatcaccatgcaacattacatgcgttattactataccgtatccaccacctacacattttgtcatctccctctctctttctctctgatctgtctcagatgtttatgcacatatacaagttaatagttctgtggatctagcaatcccggcttgtttgtttttgctgctttggtttgatgatagctagatatatcgagagggagatgaccagtaagcttggaagaggaagaaagagagctgctaggcttgttgcggtctttttgcttgggtaaaaagaggtattggcgtgcctcaatccgaaggcatggctgattacaggcacctcgaccgatctagcgcatgcagccatgtttcttggattgagccgcgtcaatatctctccttgcttccttacttcatgtactgtgtcatgctcaagcatatgtcccctctccgatcttcctacctcgtcgagttcgtcggatcagttcccaaattaaaggccagccgacggggcgatcgaggcgggagaggaggaggtccggcggcgcggcaatgcgggagaaggggcaacgcggtggtggcggcagcgacgcggg

SEQ ID NO: 76184 - DNA, 1856 bp, Oryza sativa
  Clone ID: PAT_MRT4530_76200C.1
atggcggtgccccgttcggctgggctgggtgcggtgggtgggtggttaatctgcaagaagatgagttcacatggattttctacaaaaggcggagatgcagggtcaaaattaccaagtacagttaccaccctaaatccaaatgcagcagaatttgtcccttcaacttttaggtcgccttttggaagtagaacagttgcggatgtaagtaaaccagattttagggggctctctggtaaaacgaaccttggtaggtcggaatcatcaaaatctaataactcggatgatgaaacacaccagttttggcatagacagcttcctgatgatattattccagacttcagtgatatggaaaaagttgaacagcaacatggagaattgtcattttctggattgtcattgaatgcaccccctttctttggcacagcagccagcaacttgtcgagagagcatcatgggttattgtctcaagcaggcaagaatcttgacctggggcacaatgatttgtattatgatgagaattcaggttcaaacagtgggaagcaaaatcatgcagataacctatgttatactaatgggaagcttgacctcctttatgatcatgacccacttgagtatttagcatcccagtttcctggtttttctgtggagagccttgctgagttgtactgtgctaatggttgcgacttcgaccttactgttgaaattctcactcagttagagatgcaagttgatgctagctcctgtcagaatctgaatctggccccaaatacaccaaacattggcacaggaaacttccctgtactacctggaacagaagaccttaattgtttgtttgaaggcaatgtaggtgcccatggaattacaaacagacacaactcttcaacaatgtctaggactggagattttgtttcagctattcaaagacttgcattgcaggatgctggccacatgaagtttaaaaatgaaagtcccaagtatgctaatggtcttttgagtattgttgcgcggaaacagtatggctgtgatacaaggtcttccttaggaaacaagttccttaaggccagtagtaatgttcactcagccccagtcagtctaaagactggtgatgccatggcaagcatgtgctcagaatcaaggggggaagctggtgattttgcccgcatacgcaatacatgttttgaacaagccacgcaagcttatatgatgggaaacaaagcgttagcaaaggaactgagcatgaagggacagttgtacaacctgcaaatgaaggcagctcatgagacagctagggaagctatttatcagcaaaggaacccattttcatctgaacaaggccaggaccgtctgatcgacttgcatgggcttcaggtgagcgaagccatccaggttgtgaaggctgagcttgccctcctgatgggtgctacaaggtcagctggagaaggcacagatcatgatctgcattggaacaggacaccacaccaagggctctcgcgaggcaaggttgccggacgcccttgaacatttcctcctggatgaaggcctccatcacacgcagccatagcctggtctgctccatgttaacctgtgctaacatcgtcttctaggtaaacaatctgggagaagaaaaggaggttagggggaaaaaagaaggtgagccctaacctgacaatgtaaaatatatctatctatacctgtatgcacaatgcacgtatactaattagctactccaagggccagagaagaacggcacgaaacatcatgtatgttgtattgtttctcgttgtacatgtcgtatgtacatatcaggtataacttgtttttagttaattaacgtggagacttacggtagtcctctc

SEQ ID NO: 76185 - DNA, 918 bp, Oryza sativa
  Clone ID: PAT_MRT4530_76201C.1
cggcggcaattgagtcggagataaagtgggatgattggggaggcgacgttggcggcctcgtcgttgtcgtgttcaccacggccggccatgtcttggaagggagaggggagaagaggatggggtcgcagctcgcaaatctcgacctcctccctgacgttgccacccccgacgcctagctcctctccagtggccgcccgccattgcgccgaccctcctctctgccgcgctccgccctcgttggccgctgacagtcgcccatcgcgtcggccctcctcttcgccgcgctcctcccctaccagccgccggccgctggccgcacccgcgatttgatgctgtccacttctcaagtcggtctttaaagttagtcgcccacgtggcctggcaccctcgggggacgtcgggcccgaaggtggtgtgttcgccctcctcttagtccccccgagggggtcgggctgcacccccctcggccccgagggccgaggcgccccgacccctcgtgggttttcgctccgcgtgtatgggtcacagaccggtcagatcgcgggattaggtggcgacaggcggtctgacgcacgcctcgccccatcccgtcaggacgagggcttctaggcgctcgtccccagctggagctagcgtgttacctcccagagatggcacgttagtcctgatcagatatatgccaggcttcatcctaaccattacaggcaaaatgtagtgtgaaggagggccaacgtgcagattgttaagctgacgcgtggtggacaagaatgaccgatttgtgaccattctgacaccggtcatgtcgccagcagacagccatgattctacgtcgcgcctgctcccggcgaaagtggaggtaggtgcgggccgtcccatcagaaggtgactcgaacggcaaccatgcagatctccgtccat

SEQ ID NO: 76186 - DNA, 2397 bp, Oryza sativa
  Clone ID: PAT_MRT4530_76202C.1
gcccgagcgccatctgcccgcctcagcgccggccgggcacctttccgacgagcgccccccatgtgggcacaccgggcggccccctccggcgcggcgccacctgctcagccgtaccaaataccgtcaaaaggcgatgccccgttcggctgggctgggtgcggtgggttggtggttaatctgcaagaagatgagttcacatggattttctacaaaagggcggagatgcagggtcaaaattaccaagtacagttaccaccctaaatccaaatgcagcagaatttgtcccttcaacttttaggtcgccttttggaagtagaacagttgcggatgtaagtaaaccagattttagggggctctctggtaaaacgaaccttggtaggtcggaatcatcaaaatctaataactcggatgatgaaacacaccagttttggcatagacagcttcctgatgatattattccagacttcagtgatatggaaaaagttgaacagcaacatggagaattgtcattttctggattgtcattgaatgcaccccctttctttggcacagcagccagcaacttgtcgagagagcatcatgggttattgtcctctggacgcagcagtcatcaatgggcgatggaagggtctcacgtactgatatattcaggttcaaggataatgagaaaggcatccttggtcctggacctgcagatatgaggctttaatgttcactgaacaactggatataggctcactgctggagttggagcaacgatgctcctgcaaagctgcaattggtggtttatggatgcatacatatgcatgatgtctcacgtagtttctaaatttactctgggtctacctgtaaaaatgatgctagctcctgtcagaatctgaatctggccccaaatacaccaaacattggcacaggaaacttccctgtactacctggaacagaagaccttaattgtttgtttgaaggcaatgtaggtgcccatggaattacaaacagacacaactcttcaacaatgtctaggactggagattttgtttcagctattcaaagacttgcattgcaggatgctggccacatgaagtttaaaaatgaaagtcccaagtatgctaatggtcttttgagtattgttgcgcggaaacagtatggctgtgatacaaggtcttccttaggaaacaagttccttaaggccagtagtaatgttcactcagccccagtcagtctaaagactggtgatgccatggcaagcatgtgctcagaatcaaggggggaagctggtgattttgcccgcatacgcaatacatgttttgaacaagccacgcaagcttatatgatgggaaacaaagcgttagcaaaggaactgagcatgaagggacagttgtacaacctgcaaatgaaggcagctcatgagacagctagggaagctatttatcagcaaaggaacccattttcatctgaacaaggccaggaccgtctgatcgacttgcatgggcttcaggtgagcgaagccatccaggttgtgaaggctgagcttgccctcctgatgggtgctacaagacttacggtagtcctctcaaccaatgtttatgttcttattggaattgccacatgtgttgcgcatgaatttggggtggaggtctgtgacctgtattgtgatggtggggttgatacagacaagtggggcgatgcacaaattggtcactacatagggattggtaggataattcacactagcctaagcctctccatgttcgataggtaccctgtcgaactacggttgtttgataggtactctatcgaaccacagatgttcgacaggacaaaatatcaaaagaatgtcgaggcttcacataataagggtctgaagactgttccaaatagcattcgctcagagaactatgtcatcacctttgaagttgaggaagaaaagtttcctttctttggaaaaaagtaccaactcaaatttgcaaatgaatcaatgttcgagaatcactgcctggtccactttcccagctttatgagaactcagtttgctccattgcttggtggttatggttccagtttggtggatccgcgtggaaagcttgtcgctcgttcgtttgatattttaggtgatgtagccttttcccttcaggattcactgaaggtcccagtttactcattgcctgatataatttctgcaggcttgtattcaacttttgttttccagaagcctgacccagatgcaatgccaccaattgtaacacccgaattgcatgatcctgagaatgatcaagaagaggaatggctctggacgcagcaggcatcaatggacgatggaagggtctcacgtactgatatacttcctcctgcggataatgagaaaggcatccttggtcctggacctgcagatatgaggct

SEQ ID NO: 76187 - DNA, 278 bp, Oryza sativa
  Clone ID: PAT_MRT4530_76203C.1
acagtactggtgacgtgcacagaccacgaccaaccagggcagtccagcaccgtgcacgcaggcagagcgtcaccgtgaagatcttcagacacactgcccctccaggctgcgcagggcaccatcgacactctcgcaggaggccttcccatcatcgccaaccccgacgccaggcaagttcttcatcgactaccaacaggtgtaataattctacggttgaggtgatgaagaccgcacgcgtgtcactatatataataaagtgcatctccaaaaaaaaaaaa

SEQ ID NO: 76188 - DNA, 493 bp, Oryza sativa
  Clone ID: PAT_MRT4530_76204C.1
aacacaactgtaaacagtcactgctctgtttttactaggtctgaatccacattgacgatgctatacaattagccattacactctcactgtagtagctaagagagagaacaaattaacagactataaattcgaaagttttggaagataaaaactgtcgaacgtttttttagagattccgtagcttaaaatgaaaagagtaataaggctattaacggtagcaaataacaagcttctagcaaagatcatggtaacagaaacagagtttgcctagatttcagtagaaagcaaatgcttatgcttgaaccagtatttcatcactgctgtctgtccaaagtctcttcactgcattttttgccgtccatgaagtatgaatctcctatgtgcaccctggcaatatgggagatattattccattcagggctttcatatactccaaccttctcctccagttctttgcagcagcaagtgatatcgagcttctgcagagaggatg

SEQ ID NO: 76189 - DNA, 765 bp, Oryza sativa
  Clone ID: PAT_MRT4530_76205C.1
gacgacaaggacgtattcgatgtgagcaaaataatgggtgccgaatccctggaaacagtcttgacgacagggacgtacccggaataaaagagaaaaatatgagcaaaaaggctcaagaaaagaaaaagttcaaaaaattctctgattgtaaaatcaatggtgttttttattattattctgtgatgaacaattgggcattggaaattattggttttgttatttggaatttatttattcacgaagtggttttggagatgattggatttcacaggtgaatatacagatactgctgtgattttatgtagaccggtcagaccgggctctggtagccggctagagttgatgcacgtggttgatggagattccatatggcatacgatggaggaattgtgtgcgtatgggatgcggagtcgaatttggaaagagtccaaatttggtacgattggttatgtaaagtttctttcttgtactagtgggtttcctaaggtgtttaggactcctaatatgagtttggttcatggctttaggctgcctacctcatgtataaatagagggggagcgtccgaccggcggcaaggcggcggtcagaccggcgggagcaaggcggttggaccggcggccgcagcaggcgcgacaggcgacttcggcggtcaaaccggtaaatctataccggtcagaccggcgacattcgagcggtcagaccggcagatcaatctcggtcagaccgacttccatcgatttcgaggtattcacattttgaggctt

SEQ ID NO: 76190 - DNA, 831 bp, Oryza sativa
  Clone ID: PAT_MRT4530_76206C.1
atggtgcgggccagctcagctgtgcacgtggcatgccacgtcggcgcgaccgcggtcaaacggcattttggaccggcgatggcgggggcagcggctgagggcggcggcctcggcgcggaggcggaggcggcgagcagcggccggcacggctggaggcgagcggcggcgggcgcggctggcggcgagcggcggtgcgcgggggcggaagggcggcgcgggtgcacgggggcggacgcggaggcggcggcgactagcggcggtgcgcgggggcggactggcggcgggggtgcgcgggggcagacggtcggtgggcggcggtggcggaggggcggcgacaatagaggtggattgggaggcgccatccgcccgcccccgcgcgccgtccggccatccgccgtcgccctccaccagccgcgcccgccgctgccgctcgtgccactgcccgtgagagagatagaggggaagagagaagcgggggcgccgccgtctacatcatccccacctccgccaccgccgcccaccgaccgtccgcccccgcgcacccgcgccgcccgtccgcccccgcgcaccgccgctcgccgccagccgcgcgggccgccgctcgccgccggcgcctccgcgtccgcccacgcgcactcgtgccgcccgtctgccctcgtgcaccgccgcttgccgccagctgcgcgggccgccgccgcctccgcgtccgcccccgcgcaccgccgctcaccgccagccgcgccggccgccgctcgccgtcgccgccgcctccgctatgaggccgccaccctcagccgctgcccctgcctgccgctgaccaatgctgactag

SEQ ID NO: 76191 - DNA, 459 bp, Oryza sativa
  Clone ID: PAT_MRT4530_76207C.1
atggatggtggggcggaggttttcgggagggaaggagaaggggagagacatagcgctgtctttgatcttgccggatgcggattcgaggaggaaggctaccatgttgtcgactacgagtcaacacttcagaccgccaagtcgacaacagttagattggctaccccaaatattgtactgactgaagatgccattgttacagcttctgttatggcactagtgtttgctggaaaggcagtggcaactgcagccatctccttctggatcaacaaggctttcacctacctgaaagagtacaaggttgaaggcatcgaagatattaagaacaggctactgcagtcgatgccgaagatccaggtcgttctcgatattgtcaatcccaggcacgcagttgaggaggctgaggacgtgatcgatgtgctcgagtactacaaactcaaagaaatggcaaaggaccacaag

SEQ ID NO: 76192 - DNA, 598 bp, Oryza sativa
  Clone ID: PAT_MRT4530_76208C.1
taaagattgtaaaatcaaatgtgtttttgattattattctgtgatgaacaattggcattggagattattggttttgttatttagaatttatttgcgaagtggttttggagatgattggatttcacaggtgatctacaggtaccgctgtttgttggaccggtcagatcgggcaggtgttgccggctagagttcaatacacgtggttggtgaatattccatatggcatacgatggaggtattgtgtgcatatgagatgcggagtcaaatttggaaggagtccaaatttggtatgattagttatataaagtttgtttcttgtactagagggtttcctagggtgattaggacttctagtatgagtttggttcgtggctttaggctacctatcttgggtataaatagagagggagcgtctaaccggcggcgcatcggcggtcagaccggcgggcacacggcggtcagaccgacggcggcaacagggagctgcaggcgatttcggcggttcgaccgatcgatctacatcggtcagaccgacgtgttccaggcggtcagaccggcgcatctacttcagtcagaccgcaatccgtcgaatttgagg

SEQ ID NO: 76193 - DNA, 4047 bp, Oryza sativa
  Clone ID: PAT_MRT4530_76209C.1
ccggccgggatatgagcctgtgatatagttacattgacatgtgcatggagaggatttttttcctttgtgtgcttctacagtagccatcttcatcttgaatctctctttgtgttgcttcttctcttgcaaatttttacgtgcatctccatatgctgtaatataataatcgccctatagagatctttctctatagcttctgttatggcactagtgtttgctggaaaggcagtggcaactgcagccatctccttctggatcaacaaggctttcacctacctgaaagagtacaaggttgaaggcatcgaagatattaagaacaggctactgcagtcgatgccgaagatccaggtcgttctcgatattgtcaatcccaggtatgtaaaggaacagagcagtgcactagatgcatggttatggcagctcaggcacgcagttgaggaggctgaggacgtgatcgatgtgctcgagtactacaaactcaaagaaatggcaaaggaccacaaggttagtgtctggggttcctctttctctaaggtgaagcacaaagttattaagtctgttaaacatgtcagtattttggacaagaatttgaaacaatttactcaccggggcactctcaagaggttgagggaagctgtggagggtttagacaaggttgcttcagatattatgagcattctcacagtcacagaacatctcaaagaggttgcttcgtgtagtcagcagcaggagtattcaacgaacgatgatcgtgcgacaggtttgacattaactccacctaaatttgttggacgagaaaaggagaaagaaaagatagttagatggctgacaaaggcatcaactgacgcttctggaaatttgatgagcactaaccatattcctattctgtcgttaattggtcacggtggcatggggaagactacgttggctcaacgtgtttgtgaagaaatggttaggaagaatttcaaggttatatgggtgtgtgtatctgatcgctttgatgtaacatctgtgacaagtaaaatactagaatctgctacgggggcaaaacctaatgctaattgtttggagacactacagcaaagcctaatacacaaactgaagtattctactgattttttgcttgttttagatgatgtgtgggaagataagaaaatagataaatgggaaaagttgtttgctcctctaaggacagggaagagtgggagcaaaattttgttaacaacacggatgcagtcagtagctgttttggccacagaagccatgggaattgaaacagagttcttgtcaatagaaggactagaagaaggtgaaaatcttgagctcttcagtcattctgtattttctggtcagaatccacaagattttccaaatttgaaatcagtcggcaaacaaattgtgaagaaactaggaggatgtcccctggtaacaaaggttgtcggtggccatttgcggagcaatatgagttttcaacactggaacaatttcttgcaagaaggtttgcaacattttaaaggaagtgaagatgatattatggaagtcctcagactaagctactactgtctaccaaccgaccttcagatttgctttcgatactgtagtatattcccgcaagattatgcatttaaaatgaaagacctagtgctgatgtggataggttcaggactgatctcagaagctggaaataaaccaccaaaaaggcttgaggacattggagaacagatcttggctcaattagctgggaaatcattctttgaaaccaatatcaaagtagatccgtatagtcaaaggaaagaaaattattacataatgcatgacttaatgcatgaattggcaaggtatgtatcttctggggaatgtgcaagaataatcagtcctggcatgttggaaaatgagaaggatacagttcgacacctatgtatttcaggaattgaccatttatctactgaggaggttaagaagatcttacattttaagaatgtgcgcactgttatcattgaaggctcaggtttgattgacagcaatttatttcatgcagttgaaaatgttatggaacaatcaaaatcgctgcgtctactgcaatcaaatttggagaatacatttcatcttccaaaaattgctcatctaaagcacctctgttatattgatctacctaggatatctcctgataccatatgtggacttgtgaaactttatcacttattgctagttaaatgtttcaatggttctcgcgaagagccaaaacaagtgaggtatttgggaaacattgatcatctgcgatatgtgaattacggcaaaattggtgagttcccaattggaaggctcacttcacttcaggagctgcacaactacaggatccaaggtggcaaaggtaacaaaataagcgcaatcagcaacttgagtactcttcgtgaactagaggtgcttggtcttgagaatgttgagagccatgaagaagctgacaatgtcgagctaaatgataagaaatatatcaccttgttatctttggcatggtcagcacgtgcggctgtggaaaacagaaaagatgagttgcttcttaatcaccttgagccatatgctaatattgaaacactgagaatttcaggttatggtggtgtaaggtctcctatttggattgaaaatctctgcatcaagaacttagtgtcactcgagttggcaagatgtctatattgggaaaaacttccttcacttggagagttagtatctcttaaacatctttggttggagtgccttcctagtttgcaacagattggtcaatcatctgaggcctcaagtagtaattgtgttgatttatcccttcctccaaatcttgacactatgatagtaagacgctgcaaagagctgagggcattgcctatcctgcctactaccttggttcattttgaaacaagtaatgttggtttgaccaaacttcctaggataggaaaggaatgcaacgagaacctcgagaccaagtcatccaggctgctggtcgtagttgtcgaagaatgtaaatgtctgaactcacttgaagagagccttctagtgcagggagactacatcaaaagcatccatgtcctacgcatctcagattgtgaagatctggaggctgctccattggtatttgaacagatgaatgaacttagagagcttgatatcagaaactgtccaaagctgaggacatcgagaggtgttggagatacattcctgccattagcacttcaaaaactgaatgtcaattactgtggtgaacttgaacttccactgattggagcactacaaggactcacgcatctttctgagctggtgttggagaagtgcaaatacctagaatcactcccctcacatgatgtgttcaagagcctcaagtctctgaagtctctcgagataataggatgcgagaatctgtcatccttaggtggtcttggttcgcttcaataccttcttgagctgaaaatcagtgcttgtagtaagctcatggcgatcgggtcatcccaaactcccgacgcatcgtctactagcaccctgcagatagactatattgaaattgatctgccagacatactgcatcttgagccactcaagggtctctgtcacaccaaggggttggtgatcagaggtggaacgcagctggagagcttacctgaggaatggcttcttcagaatcgtggaaagctccaatccctgaagatttacagtgccagttctttggaatctctgcccctccatatgcgagacctatgctctctcaacttattgctgttatctggtgctaggaagcttcagtcgcttcctgatttcccatcctctctgcagaagctcgatatcacttgctgctgcaaagaactggaggagaaggttggagtatatgaaagccctgaatggaataatatctcccatattgccagggtgcacataggtactgccttctctgacctccttgttcttattttgtcatgtaaggagattcatacttcatggacggcaaaaaatgcagtgaagagactttggacagacagcagtgatgaaatactggttcaagcataa

SEQ ID NO: 76194 - DNA, 2716 bp, Oryza sativa
  Clone ID: PAT_MRT4530_7620C.1
gtccgtacacactcctatctatccaacaagctaattaagcgaggagcttggtagacggcggcaatggcgggcgcggcggcggcggccttcgcggcgcaggtgctgcgggggcggtggttcatggcgtacggctccttcctcatcatgtcggcggcgggggcgacgtacatcttcgccatctactccaaggacatcaagtccaccctcggctacacccaggagcagctcaacaccgtcggcttcttcaaggacgtcggcgccaacatcggcatccacgccggcctcatcgccgaggtcacgccgccatggttcgtcctcgccatcggcgccgccatgaatctcgggggttacctcatgctctacctctccgtcaccggccgcgtcggcgccaggaccccgctctggctcgtctgcctctacatcgccgtcggcgccaactcgcaggccttcgccaacaccggcgcgctcgtcacctgcgtcaagaacttccccgagagccgcggcgtcatgctcggcttgctcaaggggttcgtcggcctcagcggcgccatcttcacgcagctctacctctccttctacggcggcggcggcagcaacaccaagccgctcatcctgctcgtcggctggctcccggccgccatctccgtcgccttcctcggcaccatccggatcatacgcgcaccgcgctcgccgaccgcggcgcgccgcgagtaccgcgcgttctgcggcttcctgtacgtgtcgctcgctctcgccgcctacctcctggtggtcatcgtcctccagaagcggttcaagttcacccgcgccgagtacgccgtcagcgccgccgtcgtgttcgcggctctcctcgcccccttcgccatcgtcctccgcgaggaggccgccctgttcaggaagacgccccccaaggaggaagccgacgacgtcccggcgctgtccgcggccacgaaaccatcgcccgcggccgccgagacgccaccagcgacggcgatggagagggtggtccgcgcgctgaggccgccgccgcgcggcgaggactacacgatcctgcaagccctggtgagcgtggacatggtgctgctgttcacggcgacggtgttcggcgtgggcgggacgctgacggcgatcgacaacatggggcagatcggggagtcgctggggtacccgcagcgcagcatcgccaccctggtgtcgctgatcagcatctggaactacctggggcgcgtgtcggcggggttcgcgtcggacgcgctgctgtcgcggtacggcatctcgcggccggtggtggtcaccggcgtgctgctgctcacggtggcggggcacctgctggtggcgttcggcgtgccggggtcgctatacgcggcgtcggtgctgatcgggttctgcttcggggcggcgtacccgatgatcctggccatcatctcggaggtgttcgggctcaagtactactcgacgctgtacaacgtggggaacgtggcgtgccccgtggggtcctacatcctcaacgtccgcgtcgccggcaggatgtacgaccgggaggcgaggcggcagggggcggtggccgtggcggcggggaagaaggagctgacgtgcattggggtgaagtgctacaaggattccttcttgatcgtcgccggggtgacggtggccgcggcggtggtgatggcggcgctcgcgtggcggaccaggaagttctacgccggggacatctacgcgcgcttcagggaggaggcggctgccggtggcggtggcgctggcaatggcaccggcgccggagaagatgagaaggtggaatccaaggaggagaaggcgtggaagattctattaaagccggagaaggcccatgacctggaaatgaagactcaagctatgcaaggagtactgccagctgccacggaggggagagaggacagcccagccaggagacgacaacacccgtcatcagacctaacgagcgaacacgcagtcaaggaggatgtggttcgtcgtctcaagctcttgagcgcaaaaggggcaggccgagtggctatcaatgccgcgcttctgaaggagatcagccgtctaacagcgctgctgaaatgcaaaccagaggaagaatttgcacttagcagggcccttcgcgtgccagagaaaatcggcacaagcaaaggagtgctggtcaaagaagaacgcctggtacgccgaatgcgtcgagtagcgctggtcactcgtccaacgccagacaagatgatccccgacacccggcataagctgaatgtggagtaccgcatcccaaacaaggagaaattgggagatgaccgggacagtgagggcgccgtggatgtcagaaatccaggcgttgtttgccaggccagaagcaaccgtgcgcgaaccacacagacgcgggggcacaacgaagaggagatccggagccaaggaagctaccgagcggccgcagatcaattggtcagaccagaaaagaattgtctcaccatcacatggtatgaagaaggtgaacgcctcaaacatgtaagagacggcttgctcggctggggccttcaggccgtcccagtagggatgcgctgagcgctggagccaaagccagcgaacacgcagggaaaaacctgccaacctaaggtcatgaattcccaacccaccgaaagctctgggacaacagacattcgtccaagaaaaccgggtgctgctacaggaggaagagaaaaaaaaaagctta

SEQ ID NO: 76195 - DNA, 2635 bp, Oryza sativa
  Clone ID: PAT_MRT4530_76210C.1
ggtggcgacaggcggtctgacgcacgcttcgccccatcccgtcaagacgagagcttctaggcactcgtccccagctggagctagcgtgttacatcccagagatggcacgttagccccggtcgatatatgccaggcttcatcctaaccattacaggcaagatgttgtgtgaagaagggcaaacatgcacgttgctaagctgacgcgtggtagacaagaatgactgatttgtgaccggtctgacactgcccatgtcgtcagcacacagccacattcccacgacgcgcctgcctccggcagaagtggaggtaggtgtgtgccgtcccgtcaggaggatgttcggaggacaaccgtgcaaatctccgtccatttatgaaaagaagaaaagtccagtttggaaagggaggggtgcatgtggtatccccttgaagtataaaaggaggaccttgcccatagagaaaggggttggttgattcttcccaaattcagagccttgaacgagggagaggtcggctcacactttgtagctccttcatacacagatccaccaaaacacaggagtagggtattacgcttctcagcggcccgaacctgtatacatcgcccgtgtctcgcgtttcttcctggcggacgatctttccacataccgagagagcttgagatttcaccctgagcccccggccgaaccggcaaaggggggcctgtgcggtctcccggtgaggagcgaggacttctgcttaggctgtttcctaagcagaaggtcgtaggtttcacgttgcaaacggtgggagaaaccaccatcgcaatttgccctccccgggcaacgcacggcgggcggtcggactggtcaaaagtgagggcaacttccgaccaccgcgcccggcgcgtcgcctcatgagtaggggcagcggccagaagctctcgcttcatggccttgaggctccggcgagaaacgtgcgcacacgctcctccatcgacagtggctatggtagccccaggctcttggaaacctaggtcattatcgccatcatcgatgtcctcggcgggggccttctgcttggcctcacttcgccgacggccggaaggaaccgccggggacttgccttcccggcgctcctgcctcctctcctcctcccacttccttgtccgctcagccaagcttttgactgcgcgacagtccgcaaggtcatggagggaggtgttgtggacggtgcaccacttgccggtagggcgctccctgctgggaacgctggcctccttctttttgtcgctcgcaggcctcccctttcgggtggcccgtgaagcgccctcgacggcgaggacatgaccctcgtagtcggaacggactgacctcttcttcctcctcctgtcacgccgccctgactgagcggcggatccgggggcggccgaagctgccactccggaaccggaggggttccaagtccaggcctcctccttgcgagccactcggtccgcgagctgaaaaagctctgcggtagtctggggctctttggaggcgatcttttcgagcatgcggttgtgccgcacaccccccctgaacgcgtagattactgcgtgtgcagggatgcatggtatggtattgcggacttgacaaaaccgctgaatgtacgattgaagcgactcatcgtcccttcgctgtacagcgtgcaagtccgcttcctcaccggggcgcggatacgtgccttggaagttcatggtgaactgctggcacaaatcctcccaggagtggacagacgcgggtggcaagttcattagccaaccccgtgcttgccccttcagggccatgggaaagaaattcgccatgaccctgtcgtcacccccggcggcctcaatcccggtcgtgtagacctggagaaactcggcggggttgacgctgccatcatatttttcggcgatggtgggccggaaccttgggggccaacggacattccgaagactcaccacgaaggctctacagccaacaccaccaaccgggggcacggagggctgattcccacgtccgtgtcgaggtgacactctagacgaggaagcgccttccattgcgtgggcagcacttcggtcattacgccggcgctcgaggctggcgcgggcgccctgctccctacgcagatcttctcgggtcgaaggagtcgatgagggagtggctactgaacggcgaacagcggctgctgctcgtcgtgcccttcgtcttgacgacgcggagccagtggtagcagcaccagaggtcttggtggcggaggaccgcccaccagcatctaggcgctgccgcgccgtcatgaccaatttggccacgtcgtccagccatcgttgggctggagattccgggtcagggacgacaggcgggtggcgtaagagcgcgcccgcagcttggagcgcgccctggggcgtgctgccgtcgccgtagacgaggaggcgacgctccccatctcgccgttctcctccatcgcccgcgatcggtgaagccgcggatctttcgaccctttcgagcgcctccccctgcttaggactttggcgaggagggggcggtggagtacgagctcgacggcgtggattcggctccccgtcgtcgccactcacactgggagagaggtcgggtgcctttgcttgctcagccat

SEQ ID NO: 76196 - DNA, 534 bp, Oryza sativa
  Clone ID: PAT_MRT4530_76211C.1
atcaggaggaggatgcgggggctcagatcaagaatcctccgcaccttgcaatccttccccaatgccgtcaatgtgcagcccgggttgctcctccccgcacccgacgtacagccctcgccgccgccgccgccgaaagcgccgtgccggtcccaggaggagcagcctgatggcggcggcggcggcggcggcgacgacaaggagaatgtctcgccggaggtggccccgcggaaggcgaagaagatgcgcgtgagcctgggcgccgcggaggatgaggccgcggcgtactaccgccggcccgacccggccacggccacgctgttcgacccggacctcctcgccgccttccgcggcgccgtcgacgcctacgcccgcgcgctccaggaggccaagcgacgcgacgacgacgacaacgacggcttcttcttgttggatgaggaggagggctgcggcgtggcggacggcgtcggctttggcgtcgacgaggacccgctggaagggttcgagacccggtgcccgacggtcggtgagcgcgcg

SEQ ID NO: 76197 - DNA, 1790 bp, Oryza sativa
  Clone ID: PAT_MRT4530_76212C.1
ttttttttttttttttttttatataaatacttcactgcattatcatgggccatactgtgcattacattagtgtttcttagtcaccttattagattgcaacctcagctcctgttaattcgagcaaatgcagttccttaactgatttactctgataggacctctctgaaaactcaaggtcacccaaatccgaaatcttactccattaccataacccatatgatctccatatgtatgtgtgtatgatatctgtatacccgcatccagtatggacatagactgatagacagtgctttcttgtgttacacaggaaagcctccggttagccgtatatggttcagtgattggcgaaggccatacttgttcacagctgcataggcagctctgaaaccatcgccgtatgctgatgatgtgtcattggcgatctgatgcaggaagaattctccaagcttcttctcggtgtgagagatcccacccttcttggacggtggtggtcgacaggaggacgacgaagatgaagcgtaagatgttgaagcctgtccatatcttgaagtggatggaaggatctctgactccagccacaggtaagacatgacctggcatataccttcctcaatctccgcctttaggttccggtaacctttgaggcgcaaccacccatgcatcaattcatgggcaagaatggagcccgttagcagcctggggaggccaaacaatacaagaattgcagtgacttcgcatctcctagttagcttttgcggttgggttttcatatctagtaaccgatttgcaccaattctgggcctcctaagtatactggtcacagtctgctcctctgacagacaaaggcctcgtgtttcaggcatatgatgcggtcctttgctttctccttccatagcttcattaagggcttgacgttcaaccaagagcatgggtatctgctggtctagtttcatgttcatcccttcgtagtagtctctgatggaatggtatagcggttgacattcaccggtgtccatgattgcagaatccaggcattccatgcacaagctgcgtccatcccctaatgacatatactttgtgttccttggctccattttctcacagctacagcaacgaggtgttctatcatgctcatgcaaaggacaatacttctgtccccagaatggatgggctctgtactctatcaaaccagtcctgttcgttgggataaattgaaggcagacgtcacactttgggtgatgaagctccttgtagcacagcttgtggtatggatctgtacctagcaaggtgaactgggaaacagaataaagtaaactgtcacttcctgagaacacctccatctcacggatagggtggcgacaggaagaacagcggaagcactgagggtgccagtacattcccaagcagctcaagtaatggccatgccctatctcatgcttgcaacccccacagaccctgtatcctctcgacctggcctgggtctgagagggtgcacaaggattgtaaggctggtaaggattcatgttcagactgtcctgtattgctctagcgagttcttcatcgttttctcccttgtcatggtttctctcttttgtatttttggcatcgtctgcaagagcaagggcaagtgcatggtccatttcttcattgttatgtctaggtggttcttccttctttggtctaactggttcttcccagagcgtggtctcttctcctgccgtcacccgagggcgccgtcggttggcctcgccgtccttcgtccccttcaggaaagcgcagagccacttcat

SEQ ID NO: 76198 - DNA, 1437 bp, Oryza sativa
  Clone ID: PAT_MRT4530_76213C.1
atggcagcgaaaggcatctcgaccatcggcgcggcctcgcggagcctgtcgtcgtcgctcatggcggcggcgaaggagcccgacgtcgagaatctccggctcatcgaggagctgacctccaacgtggacgccgtgcaggagcgtgtcctggcggagatcctcggccgcaacgccgatgcggagtacctcgacaagtgcggcctcgacgccagcgacaccgaccgcgccaccttccgggccaaggtgccggtggcgtcgtacgacgacctgaagccgtacgtcaagcgcattgccaacggggaccgttcgcccatcttgtcaacgcaccccatcatcgagttcttcacaagctccggcacttcggccggcgagcgcaagctgatgcccatcgtcacggatgagatggcccgccgcgaggtgctgagcagtctcgctacatctgtcttgaacgtgtacgtgcctgggcttcacacggggaaggggctctactttctgttcgccagatcggagacgaaaacaccaggcggcctcacggcgcagcccgccttgacgagcgtatacaaaagcgaacacttcaagagggcctacgcctacacgagcccaatggcggccatcctctgcgaggacgcgtcacagagcatgtacgcgcagatgttgtgcggcctgtgccagcgccacgacgtgctgcgcgtaggcgccgtgttcgccgctgcgctcgtccgggctatccgcttcctccagctcaactgggctcagctcgcggcggacatcgagaccggagagctcaacccccgcgtcaccgacccgtctgaccgagagtgctccaggggcgactggaccggcattgtcacgcgcctttggccaaaaaccaagtgtctgaatgtcgtcgtcaccggcgtgatggcacagtacatcccgaccctgcagtattacagcggcggcctgccgattgtgagcggcatgtatgcttcctccgagtgcttcttcggcctcaacctccgtcccttgtgcggcccgtccgaggtgtcctacaccatcatgcccaacacggcctacttcgagttcctccccgtcggcgaggccgtcgacgcgagcaacctcgtggaactcgcccgcgtggaggacgggagggagtacgaggtggtggtcaccacctacgctgggctgaaccgataccgcgtcggtgacgtcctctgcgtgacggggttccacaacgcggcgccgcagttccggttcgtgcgccgccaaagcgtgctgctatccatcgaggcagacaagaccgacgaggccgagctgcagcgcgcggtggagcgcgcctcctcggcgctcctccgcccgcgcggcgcgtccatcgtggagtacaccagccgcgcgtgcaccgaacgcgtcccgggacacttcagccccgccctgccacactggaccctggctccatga

SEQ ID NO: 76199 - DNA, 363 bp, Oryza sativa
  Clone ID: PAT_MRT4530_76214C.1
atggcagcggcggcgggaggagaggcggcagtggcgagcggcgccctcccctctgctagatctggcgggaggggaggcggtggcggcgggtcagcggcagaagtggatgcggcgtcggtgggtcggcagcgggaggggaggcgcacggcgttggtccgacagcccggcggcggtgccctccccttcgccagttctggcgggggaggtggcgacaatggcccggcggcgggaggtggcgacggcggcatcctcggcagcagcagcggtgctggcggcgccctcctctccatccggcagtggcggtggatttgggttttagattggatcggcttgacggctcaatgcatcggctcgatgaattga

SEQ ID NO: 76200 - DNA, 171 bp, Oryza sativa
  unsure (1)..(171): unsure at all n locations
  Clone ID: PAT_MRT4530_76215C.1
ccctcttatgaatttggggnaccacanaatagagtaaanctcggggtagcaaatttgtgcccctatagtgnagaggtgataaagngtgaacatatcattatatatttgaataatttgtgtttgcccgctcgctgcnaaaactctactntggaganaaaagtgtgtatttga

SEQ ID NO: 76201 - DNA, 343 bp, Oryza sativa
  Clone ID: PAT_MRT4530_76216C.1
aaacccctgtaatcgtcatcccccccttttttgaacccaactggtgatccccccccgaaaaccacccgcttttgaagctttttccttcaacgtttggaaaaattctcccaaccgtccccctgccaaaaaaactcttttgggatttcagggccctggaaaacaagggtaatgagccgccaccctttttttaaaaaagcttaaggggggggtttaaaacccttgttccctcccctcaaaaccttgaaaagttgaagggttccaaaaacctttgggggtttcaccaaaaaatttgatgaccaatcaacccctttgaaaaattcccccccccccttttatgaagggc

SEQ ID NO: 76202 - DNA, 412 bp, Oryza sativa
  unsure (1)..(412): unsure at all n locations
  Clone ID: PAT_MRT4530_76217C.1
gcgagagagagagaggagctcagctcagctcacctccactcgtggggttaaaaccccgagaactgcacagcagcagcagcacacggcgcagcagcggcaaaggcggcagcagcagcagcagcaagaaccgagcaaagtcgcaagaagcgagcacacacactcctctctctctctccctctctagctactgttgttcttggagttgtagaggaggaggaggtggtggtggaggtggtggagatagggggannnnncnnnnctnctnnnnctatnctnnntnnnnnnnnctncnnnggnggntctgcggtggggcggcggctggnttgtcgcgcggtgggggtgncncgcnntctccggggctcgccgctggcgggngggttctgnggcgcgtttcttnntttgccttctcttt

SEQ ID NO: 76203 - DNA, 1323 bp, Oryza sativa
  Clone ID: PAT_MRT4530_76218C.1
atgccgcctacctctgacaaatccgtggcatacacaacaaacaaaggccgctccctcgccgcgcgccgccccgcccgccgcgaggccaccagccgccgccgcgccggcccgctggccctccgcgccccgccgccacgcagccctccgtgccctgccgccctcgtgctggccgccgccgtaggccgccgcctcaccgcgcgccgcgccacagccacgccggccggccggcccaccgcgccccgccgtcgtcgcgccggcctggccttcggcctggcaattgaaaagtgccctggagcttttaaaccgggactaaagatgtttttagtcccggtttttaatacgaccggaactattgtgaaatctggtcgaccgaccaaagatagtttctccaccagtgtagcggtagccaaggtggacgaggtagacagggcgaggcgcacaacagcaacagccgaggcagatgcaagcgatggtgatgatggaagaagctacggcgaacaaggagtagccgagatagacaagggcaatgagtgtggtcgcaggcggataacggtcgtgggcaaggcagacacaagtgatcgcaccagccgcgtgaacgagcatgagggaaaagtgctgaccattatattggctccacgagaagacgacagcggcagtcggctccacagggaggtggcgcagaatagtggctccaagggaagggagcggcaccgctggctcgacgatgacgaagcggcaccgggtcgctggcaaacggcggcgccggtcggcagcgaggattcttggggcggaggtggtgaggattttgggatggggattggggatttgagagtagcatgggtggggaaatggggaatgggagagagaatctttcggagccacaacgtgctgatggatgcggcgaccgcgcctttccctccgctagatccggtgagagggctgacggcggcggctggaggggaagtggcagcggggagctggaggggagcccgcggcggcccgactgctggaggggagcccactgcggcccggctgctggaggggagcccgcggcggcccggccgccagagggaaggcggcggcgacgccctcccctccaatagatccagcgggaggggaggtagcgcctccgctccgctagatctggccaggagtggagtcggtgacggctcggcggcaggaggggcagcagtaggggcaggcagcggcaacgacgacatcgggctccccacgggctcccttgtctcttctgccacagtgatcaccgtcatctgccccggctgctgcccaggctcccagtttcaagccctccgtgtggggtga

SEQ ID NO: 76204 - DNA, 250 bp, Oryza sativa
  Clone ID: PAT_MRT4530_76219C.1
attcaccgcctgcctgctcgccgtcgccgccatcaccaccatcttcgccctcgccctcaccctccaccgccctgacctctccgccgcctcgccacggcccatccaggggctcaccaccgacgccgtcttctccgttgacgacgacctcatcgtgccgtgctccacgctgcggtttgccttcgccgtgtggcagagtgcgctctctgccatggtgggcttcgtgccccggatgcactggcttactgacccg

SEQ ID NO: 76205 - DNA, 113 bp, Oryza sativa
  Clone ID: PAT_MRT4530_7621C.1
acctcagctcgcctgcaggaaccacgggaggtcttcggatgcacggcggaggaccctccacgacgaccaccggcatctgcgaggtgcgggtagcacatgttgcatgagcagca

SEQ ID NO: 76206 - DNA, 371 bp, Oryza sativa
  unsure (1)..(371): unsure at all n locations
  Clone ID: PAT_MRT4530_76220C.1
ttcggncgagcagccgccgcagcagcagccgcctctcgccggcgttgacgccgccgccgcaagccatcatggacccgcgaattccgccgcccgggccgtccgggggagcgcccgccgaggggcaccaccggcgggcgcactcggaaacattcatccggctgcccgacgccaactgctgctcgacccggaacgggatttcggattctccgacctcacttcccttccctctccgaaaaantcccccgcggcgtctcgaacccgacacccgcctcctccccccgccgggcgctgtccgcaggcgggngcccggccgcctgggggttcacacctaagaactctccctcaaccgttcttccatgctccttccaggg

SEQ ID NO: 76207 - DNA, 276 bp, Oryza sativa
  Clone ID: PAT_MRT4530_76221C.1
ttggtttgtggcggttggaagtaggccataaaacatggtacacacattcttgttttttcttgggggacccgaatttgggggaatttctacaaaaatttagcttattttgaccaattgacaaaatcttggcaaaatttaacgacatttaagaaccttgccctttgggccttaacatccaaaccacctgtaggtgtgcgcctggccaacgcccaaatcctcttggccggggcccgttggcgcctagcccccttcttggcggcggctgtaacttttcct

SEQ ID NO: 76208 - DNA, 429 bp, Oryza sativa
  Clone ID: PAT_MRT4530_76222C.1
ctaagtacttttcaatattttttttttgaacaaggactagtatctacctatgggtataaatatgtacactagaggtaattgtaattgatctctcaatcaatactactctcggcacatcgctaccctcttttctgaggttttacttatcaacgggcggaatttggcacctgacgcggggctgcatcggttaagttcgatctccgacgaaggggtaagtcctacgttccgtcggccgtgctaaatctatcgactacattgatgttgttcaaggctgcatcgttttgatctcttggatcattctggttttgttgatatatttgcctacctgattttccaattctatctctaattgcattgtgtttagagacgcattggcttagttggtactatctcggttagtttagatcttctgtcttagctgatatatct

SEQ ID NO: 76209 - DNA, 428 bp, Oryza sativa
  Clone ID: PAT_MRT4530_76223C.1
tttaatagcaggctgaaaggatgttatctaaagtgctgattctcttgacgtacgaacttgtggaaggaggaggacagttagaaataaaggatatgttgaaagtgaagaaagtgatgatagtgcggaaaagttagctaatcagcaaagaggtgtggaaggatgacccataaaaagaagaaggggaaacaattgaaaagaattctctgggatcaacctaaaggtggttctgaagaggctctgatgaatggccaatcaaaataacctaatttgatctgcttcacattagatgtggatgaattatgggatgatgtaaaattttatataaaatgggagggccaatgaattcttacattgccagtggaaagaattattttagctttcaaaccgttgggggttttaaaaaggtttttaaattacatgaaaagagt

SEQ ID NO: 76210 - DNA, 399 bp, Oryza sativa
  Clone ID: PAT_MRT4530_76224C.1
atgcccagcagaacggcgccgaccctcctcgctcggtcgccgagcgccggctccctcctcgcaccggccaccgacgtcctggatggtcacatacgggttggagccctgcctcctttcccggtcgccgagtgcgccttcctcctcgcctggccgccaccgccgacgtcctcgatggtcacatccgggtcggagccctccctcctcgcccggtcgatgagcgccgcctccctcctcgcccgcaaacatgatgcaagccgactggcagcggcagttgagcacgatgtcatcgtcgcactctcccgacagtcatccatgagcccgaagccactcgccgtcgcgcccgctttggtcgggttcgagggatgcctcaccgagcggaggaagaagaatggggattag

SEQ ID NO: 76211 - DNA, 732 bp, Oryza sativa
  Clone ID: PAT_MRT4530_76225C.1
atgacgggagcgggaggcgacgcgcaacacgcgcagcggcagcacgacgcggaggcgattcgaggtggcgcaacggcgggggcggcgcgacgcggaggcgacggcgatggcgacggcacggcgctctcctccggccgccatcttctctccgttggagaagatgttgatgatggtgtaaattatggaactggaaggctacacaatcgcccacgtggcctggcaccctcgggggacgtcgggcccgagggtgatgtgttcgccctcctcttagtccccccgagggggtcgagccgcacccgcctcggccccgagggccgaggcgccccgacccctcgtgggttttcgctccgcgtgtatgggttaggcgatctgacgcacgcctcgccccatcccgtcaggacgagggcttctaggcactcgtccccagctggagctagcgtgttacctcccagagatggcacgttagtcctggtcatgtcgtcagcagacagccatgattccgcgtcgcgcctgctcccggcgaaagtggaggtaacggccggcctctccccagccagtggattcatcagcgacggcgagggtggtggcaccgatgacagatccaacgggcccaaccttgagggcctccggatctgctccccccccccgggggcgtcgttgccctacaccatatccgtggtggcgtcggccttatctcaatgtcgtcaagtgcataccgacgggttttgctga

SEQ ID NO: 76212 - DNA, 3772 bp, Oryza sativa
  Clone ID: PAT_MRT4530_76226C.1
gattggaacatcttcagatgtggagttttgtgcaagatattacaatcattgtgatgttgtcaaagtcgtccaaatacttgcctcttcagatgcatatacagatatatgtaggagaatgacagagtactggagtcatctacttgatatatttcagaatgagagatcaaaaataagtaaagaggttggtagaagccttatgtcacagtccaatattctatcgaccgctactccagtgaaagcaaataatggaagtgttcaggcaactttgaaagatggtcaggacagtaagatggcagtgctttcccagacaaatgcacatcaggttatggataatcaatttacgttgtgctcagctaacaataatgaagcttttaggcaaactccattagctaagacctatgtagataatgcatacagaaatggagcttttgggcccagtgggacatcctcaatttctcaccagagcatgtctatggtgacagttatgcctaacagaacacaagcacagccagcacatggattgattcgtccagacttgtcgtgtggttcagtaattggtaatggtatgtctagagaaaatatcaggagctctatttctgctagggcagacttgatcagcccaccttataaaagcaagccccctgttcagctaattactgaaaatatgagtggtggcaagccagctaaattctcatcttttagaccacaggcttacatgaatctatacaatcacgggaatgttgcagcatctgctgctgccaatctagctgttcttaaatctgatgaaggtaaggctccaacttcccatctgacaacaaaccaaaggaagaaactggctgctgactgtgctctacaagtgaaagcattttcctcagcagccttacaatttgtttggccaagtactgaaaagaaggttatggaagtcccaagagatagatgtggttggtgccttgcctgtcaaagttcagcaggtggaactaaaaaagcttgttttcttaacatggccactgcaaatgcttctaaaggatctgctcgaattcttagtggcatgcgtttaatcaagaattctgatagccatttccccagcattgttacttatttaagccacatggaggaaagtttgcgtggccttttagttggttcactacaagatgtgcagcggagacaacagtggtataatcaactaaaagatgcttccaactgtggaaatataatacccctcttgcttgaattggaaagtaatattcgtggtgtagcattttctactagctggctgaagctaatagatgactggcctgtggaatctcctagtgcatctgctggtgcatcccgtcctgcagcataccaaaaacgtggaactggtggaaggcggggcagaaaacgttcaatggcatctgaatctgctcctgttactgatgatgacaacagctggaaagaagtgaattggtggagtggaggaaatgtttcaaagcgtatcttacagaggggggctctaccaattttgaccattagaaaagctgctcgtcaaggtggaaaaaaaaggatgttcagtgtgtcttatcatgaaggctccaattttccaaggcggactcggcaacttgcttggagggcatgtgttggattaagccagagttcatctcaacttgctctccaggttagatatcttgattcccacataagatggaaggagttcatccctccagatcaaattccttcagaagggaaaagtgtagattctgactattctgttctcagaaacgcagttgtttgtgataaaaaaatagttgacaataagataagatatgcacttaagtttcccaaccagaagcatcttcctgtccgtgtaacaaagaatattttggaagcagaagataatcaggatggggatgggaaattttggttttctgaaaaccatatcccactatacttgctacgagaatttgagcagaaagctggggttagctccttgcctactccaggaatgttagattctaactgttttgccaatttctaccaaaggcgagtaaaatcatcaattggagatgttttcttctatctgcttcacaagggtgatgtatatccttgcacctcatgcaagaaggatgtttccttcagggatatcataaaatgcagctcttgtcaaggtaattgtcataaagagtgcacattaaggtctgttggtagcaaagagggcaatgctgcttccagtttaacatgcaagttgtgccttcagaagcgtagtcttatgcttacaaattacaatacaaacgcaagtttcatcctacctcaacagaagagtaatgtccatcacgcagtggcagctcccaaaataatctttaaggttggttcttcccattccgctgaaccagccacaaaggttgaagctccgccaatcgtgaaggtagaagcccagccagtggtcaagaaggaaacctggccagttgtgaagatggaaacccagccaactgcaaatgtagaagcacagccaactgcaaaagtggaagcctttccaatttcgaatttggcaactcagaataatgcaggggcgcaagtccagcctaagacaaaatctaaaaaacccaagccagaaaaaccgagaaaatccaagaagactgaagagatcaaatactttggtctcgtgtggaagaaaagcactaatgacaaaaataataatgaaaattctggagaagtgttcagggcgaatgatgttatcctaaaaggcaaggatggtgtaggttcatcaataaaacctacttgctgtctttgtaataagccttattgcccagatttcctgtatgtccgctgcgagaggtgcaaaaagtggtttcatggcgatgccttgcaacttgaggaagaaaagatatttgaattggtttcataccgatgttgcagatgccgaaggcgagccataccaaaatgtcctcattcagatgattataagaagcctgaaccagaatacagtgagcaaacagtcgctacgtcatcacagtcaactatgctttctagtgaggagaattttgctgtagcagatcaagatccactgcttgcttcatatggcagagttgaaccgtttggagcacaaacaatggatgctgatttatcgatgaacatgatgagctttaacccaggaaatcagaaactatcagtaagaaggggacaaaacaaaaattgtgaatatgttgaccaatccagtatacatgtggatgactattatatccagaatcaacctcaagggaatgcaaacatcaatttcagtcactcgaatgaattctctttgtcagaggctgatggtgtggatgcttcagagctgttgggatgggatttttctcaaggaaataccagtgctgccccttctgatttcgcagctaattgcccgtggaatgacatcagctgtggcagcgttgctggtgatgaatatgaaccacagacttatttctcattcaccgaactacttgaagctgatgatacacagttcgataatacatttgggatgtctaatagtgtgcaagatgatggtgaccaacaaggaattggttttgatgaaatggctttcatgatggaagatggggcctcaaacatgcctttcccagctattgactccgcctctgacgaggtagcatgtgacaggtgcaagaatcctcagccgccacctgatctcaaatgcgcagtatgtggactgcagatgcaccgtcattgctcgccttgggaggatggtgaacagccatcagatagtgccgattggagttgtggtgcctgccgggagtggcgatga

SEQ ID NO: 76213 - DNA, 355 bp, Oryza sativa
  Clone ID: PAT_MRT4530_76227C.1
tgttattttatatggaccggtcagaccgggcatgtgctgctggctagagttgatgcacgtgggtgatgtagattccatatggcatacgatggaggtattgtgtgtgtatgggatgcggagtcgaatttggaaggagtccaaatttgatatgattggttatgtaaagtttgtgtcttgtactagagggtttcctaaggtgtttaggacttctagtatgagtttgttccgtggctttaggctgcctaccttgggtataaataaagggggagcgtctaaccgacgactcaccggcggtcagaccggtggcaaggcggcggtcagaccggcagtggtgacaggcagaggcaggcatctc

SEQ ID NO: 76214 - DNA, 633 bp, Oryza sativa
  Clone ID: PAT_MRT4530_76228C.1
ggagcgagggagtagggccataggagatggaggacgacatacttgtaaaatcaaaaggtgtttttgattattattctgtgatgaacaattgggcattggagattattggttttgttatttggaacttattcacgaagtggttttggagatgattggattttataggtgatcgcaggattcgtcattttatgtgaccggtcagaccgggatctggtagccggctagagttgatacacgtggttgatggagattctatatggcatacgatggagttattgtgtgcatatgggatgcggagtcgaatttggaaggagtccaaatttggtacgattggttatgtaaagtttctttcttgtactatagagttttctaaagtgtttaggactcctagtatgagtttggtttgtggctttaggctgcctacctcatatataaatagagggggagcgtcagaccggcggcaagtggcggtcagaccggcgggagcacggcggtcagaccggcggcggcgacaggcgcggcaggcgactttggcggtcagaccggagattcaacaccggtcagaccggcggcattcactcggtcagaccggcagatcaatctcggtcagaccgatctccgtcgatttcgagg

SEQ ID NO: 76215 - DNA, 5865 bp, Oryza sativa
  Clone ID: PAT_MRT4530_76229C.1
atgccaaggaagaaggccagctcgccctcgccgacctccaccgccagggagactagaagctcctccgctcgtggtcatgcatcaccaaccccaaccccaaccctcaggaggtccacccgagaaaccacatccagattttcttcttcttcttcgtcttccgcaaacaagcacgaaggctcccccgccaagcaaagtgccaacaacaacaccgcaaaacggaagatgaataatgctgccgcagatacctccaccaggccaatcaagaagaacaaaaagctaaacgcaaagtcctatttagcactcttctccacaccccaacaaaccgccaaatcccctcctgcccctggaggaaattcccggctgtattctaactttggcaatgtagcccctcctctcctagtccaagtggatgacgacaatgcttccacggtgcctatgcaagacagtggcactcttctggagcatgaagaagctgacacacaagagcaaggttaccagtctggcttgcacaaagttcctgaggtggtactggaggagactgatgtctccaagaacaaagctgatgaacatgcttccacttctgaggccaagaagacaattgaagcaggtgatcccagagagatcaaaggggcttctacttcaaatcaggctttagtaacccattctgatggaacagattacaacgagtacctgtgtgctgtttgcagaagtagggaaaccccaggaattctcaagtttaaaatgaggcagctcaggagatgccaccatgaaaggctgtgggagaggtcttgtgatggaaaagattgcaaaaatcggtaccatgattcttgtctggatcctcccctgcaatatgtgtcgctaggtatctggttgtgcaccttatgtactaaaaagaggctccagtttggtttatttgcagtcagtgagggcattgaatctttgtgggatgttaaggaagtgaaatggaaagatctgggctatgagtatgcaacatgggagcttgagacttcatcatttttatgtacccctgaggctaaggatctgaaaaggaactatgagagccgccatgaagatgcaagaagaggttttgatcctgcaaaaataaataagggtaagcaatgtctgtttcagaaacttcagaagctaccggatgggttcccccctggtttagacaaagatcatttgagttcacttaaccggctccgcgagttctggcacaattctgatggtgctatttgtctcgatgatcaggagagagtaatcaaaaccattcttttttctatgtccatattgcctgatgtctgccaaccacttctcattgtctctacttctgcttctctctcattgtgggaagctaagttcaatcgcttggcaccatcgatcaatgttgttgtgtataatggggagaaagacgtacgcaaacagattcaagatttggagttttatgagaacggtttggtgacgtttcaagttctcttgtcccatcctgatgccatcctagaggacattcagaccatggaatcaattgtttgggaggcagttatggttgacgattgtcaaagcttgagagtttcaaaatgccttgaacaacttaagcatctttctaccaattttaggatggttcttttgagtttcccactcaaggagagtattcctgagtacatcaacctgctgtctttcctcaaccctgaaggaagtgtcatttcgagtagttcaaatggtgattttactgatacaggtgatatcttagcaacgctgaaagaaaaatttgctcgtcatgttgcatttgagcggaaagcagattcttcaaaatttttggagtactgggttcctgctcgtctttcacgagtgcagctagaaatgtactgttataccttactttcaaactccccagcactccgatcacactcaagaactgatagtgttggtgctcttcgtgacattcttgtatccctccggaagtgctgtgaccacccttacctggttgatcaatcactgcaaagctcacttactaagggccattctctgactgatattctagatattggatctggtggcggggctggcaaccctatgggtgacattttggatgattttgtccgtcagagatttggttttgagtcatatgagcgtgtagaacgcggattgctagtgccgaagaaacaaacagcactgaatatgttcaatgacaaaactaaggggcgttttattttcttgattgatagtcgtgcttgtgttccaagcattaaattatcatctgtcgatgccatcatcatatattgtagtgattggaatccaaccaatgacttgagagttctccagaggatcagtatagagtctcaatctgaatgtgtgcctatttttcgcttgtattcgtcttgtacggtggaggaaaagactcttatactgcgaagcatgatcatattcttgacagcaacgtccagaatacttgaggagttccaaaagcatgactactccagtaaagattctgaggatgatggtctcttcatgaataatgtatttttggagtttgcagcgaaactatccaccaacgttgaagccagcactaaaatggaaaatgcagtcatatctcgagctcagcagagtggatcgttttattctagagatattgctgttataagcgagagggagggaatatctgcagttgatggtgatttgccaaagttctggaccttctggtcaaatttactaggtgggaggtctcctcattggcaatatatatctgagccagtgcaaaggaaccgtaggaagatacaaaatatggaagaccaaatgagaatacctgcagaagaaactgatgaagcaataatgaaacgtagaaaaatcggagaaatcatggattcatctccgaagatcctacctgtcaaagacaatgatgctgtgctgcctgaaaatagtacagcatccagttctcatgaaacatcagttgatgacacttggcaagagctaggggcagaaagccttcagggcacacagaaaggtcttcacacccaactcaagccagagctgtcaaagttgtatgaattgttggaattgccggagactgtcaaatgtttatgtgaggaattacttgattacattttgaagaatcatcaatgttggcgtgctgcttctctcttaaagcataagatcaatcgaagagagtcacttgccctttctgtgagaaacttgaactatgagtgcgatgaagtgctcgctgaatatgtttatgagaagctaaggatcctcaagaaaaagttttcgcgtagagcaagtgaaacaagcaagcagagccaatctactccagtaaataacacatcatcttacaaacaacagacctcaccgaaattgagaagtgacggatcaatttgtcatcaggtaacgacaattgatggtgatttggaaaatgtttcacatgaagaggctccacatgatatcttgaccgaggagatgatattagaacagaaggaattgatatctgttctagaaactcatagagaagaacatgttttaagggatgaacttcttgaaagaatcacagagaaaagaattaatttaattaacatggttttctccttaagagaaaagaatattcaggataaacaaggaaacgagaccacactgttagacatgcacaagcaaaaggaagtggcaaagctgcaagaaacatgcaatttggtcgtggaacatcttcgtaaaggtcacattgattcagaggacagggatgccacggtgaagctaataattgaatggtttactttgcttctgtatgcatttttgaatcacatgagatgccagcataacaagttgaagatgcagcaatcaacttcatggaacaaggagttacaattgaaggaaattttccttcagcaagcaaaatctggccacttagatcgtagctttgatcaacaaattcctttaccagattcatgctttactttggaagaattcagccacttcaaggaaatagttggtaatttccctgtcggtgcagctacttcagcaaattgccagcattctttggcatcaaccatggaaattgcattggtccggagtgtcagtccatctgaagttgggaattcagaagcagcgataaatggggctgttgaagttcctgtccacaccgaaaaaagaccaacatcagaagttgggttgtcgcagaacaggatggacaatgattctgatggcattgactcacaaggagggccacctctggctgttcaacattcattaagttctaatcctgcaattgacaattccaataatttggaatcttcagttgccagccatagaagcgaacatcttggggatattgcagtggaagttaatgccgacaattgtggcactactcttgcagattcacctcacttagaggcaccaactgtggctgccctgcccagccagagtgccttgccaatggctatggaagttgacattcagacagatcatgtagttcagtctgcccagcagaacatagtgacaggacgagttccacaagaagaagagcgagaaggttcgaccactgtaacatcagctcagcctttgcaacctgaaatgcgaccatcaagtccagtatccggtattttgcgtgaaagaacaaatcctgatcagaggagggaaagtcgtcagccagaggctgcacctagttcggtggatccaacacaactctttcccgtggcatcactgatgtttaatcacccaccacttggcaatgaaccattgaaaaatgagctgcacagattacaagtacacatggattctcttaataaaatctacgaactgaagaaatcacaacttcaaacggagtgcagccaagaaatcgagaagataaaacagaagtatgatttgttaattaaagaacaagactccgctcatcatcagcacaggaagacactggatgacttgtatgggaaagttctcctaaaccaatcactagctgatgattttcgggtcaaatttgtatcaacatctgcagctcaagccagagccgtttctcctccactttgccagacaactcgccagacagctggggtatctcagcaggtaccaactaggccttcggtggctggatcgattgcattgccagtcggttcatcatcagctagtcgaccatcgctgcagaggcattgtgctcaaccatcgcatgtggatcggtcatcatcatcgggggggagtcattcatcatcgccatcttcacaagttgtacgacctcccccagcaatactaggcagcgttgtcagggcaacatcaactccttttagtcacacacctgcagcccgtggaaactatggagttgggagtgaagtagcacgggcaccagctccccatctccagttcaggctgccacgagcacatcccacggcccctgtaaatcagcagcagcggcagctcccagttaggctagagagcacatgttcaaggacacagttgactcctgtgagcaccccagtaaacgcaaggcagttgagttcacaatcagtttccccggtgagcaattcatcatcatcgtcaagctcacatccaggtccagcactctcaaatccagccttggcagcaaattcaagttcaaatccagttttgagtgcaggcacagtggcattgccgccaagtccacacccacccgagtcgatagcagcaccaaggggacagcaaaagggggcaccgtcaggcttgaatacagtgcctgttgtaggctcgggtttgccgccaagtaggtccatgtcagattcggtgtcgctggatgcatggcttacatccaatcttggtctgaaggacggtgaaaccagcacacctcgcactcgcatggatagtcatcgtacagtagatgtggtgtgcttgtccgatgacgaaccagaagagcactag

SEQ ID NO: 76216 - DNA, 304 bp, Oryza sativa
  Clone ID: PAT_MRT4530_7622C.1
gtctggaagctgtcttgctcctaccatggcggggacgatcgtgtgcggtaccgcgcgccagatcttggactgcaagtgcatcccgaccgacacggcccatgcgtgctgttcagatggaacctttgctagggctgcaggtcccaccggagcatcatctggagtctatgaagctctcgaattgacggacggcggatctgattacctgggataggggctatgcaaggctgtcgacaacttgtgctcggttattgtctcagctctgattagcaaagaccctgcatcacacgctgatcttgataacttc

SEQ ID NO: 76217 - DNA, 167 bp, Oryza sativa
  unsure (1)..(167): unsure at all n locations
  Clone ID: PAT_MRT4530_76230C.1
ctttcacagtaatgctttattgcaaaatgcaaatggttcgnccttggntaggagtcagtgacccatgtcattccnttacacaagatacaagtgggtngnaacgctatattaaacacagatntagttctaacaancgntccnccnnnattagtacatntntgnacacc

SEQ ID NO: 76218 - DNA, 288 bp, Oryza sativa
  Clone ID: PAT_MRT4530_76231C.1
atgggtggggagaaggctggtagccaacaagaagcttggcagtggcgagcggcggggagaatggcgcatgcattggggacgatgcgaccacaatatggtgtagatggagttgacctcgaagatgatgcgacggaaccacgcgtgcgcctctgcagacaagagtatccgtatcccttcacgtatccgatatggatacgacgctttctggacgtatccagatgtaatttggttactgaatctcatccaaacactcttagaatagttgcattagaacggaaaatgttataa

SEQ ID NO: 76219 - DNA, 759 bp, Oryza sativa
  Clone ID: PAT_MRT4530_76232C.1
gggggggggggggccctcaaaatacggcggaccggtgcaacacgcatcccaccactgggggggaaatcgggggggacacagggggcgcgagcccgcggaccacacaacacgcaaccccgccgtctcatatattgtaaaatcaaaggtgtttttgattattattctgtgatgaacaattgggcattggagattattggttttgttatttggaatttattcacaaagtggttttgaagatgattggatttacaggtgatcgcaggattttatcattttgtgtgaccggtcagaccgggctctggtagccggctagagttgatgcacgtggttgatggagattccatatggcaaacgatggagttattgtgtgcgtatgggatgcggagttgaatttggaaggaatccaaatttggtatgattggttatgtaaagtttctttcttgtactagtgggtttcctaaggtgtttgggactcctagtatgagtttggtttgtggctttaggctgcctacctcatgtataaatagagggggacggtcagaccggcggcatcgtggcgatccgaccggtgggcacacgcggtcagaccggcggcgacaggagtcggcggcaggcgttttcggcgattcgaccgatcgatctacatcggtcagaccgacgttcatcaagcggtcagaccgacacaactacttcaatcagaccacgatccatcgatttcgagggtaccggcagggggtgcatggttgttgtggaggttag

SEQ ID NO: 76220 - DNA, 417 bp, Oryza sativa
  Clone ID: PAT_MRT4530_76233C.1
tcagttgccagccatagaagcgaacatcttggggatattgcagtggaagttaatgccgacaattgtggcactgcagcccgtggaaactatggagttgggagtgaagtagcacgggcaccagctccccatctccagttcaggcccagtaaacgcaaggcagttgagttcacaatcagtttccccggtgagcaattcatcatcatcgtcaagctcacatccaggtccagcactctcaaatccagccttggcagcaaattcaagttcaaatccagttttgagtgcaggcacagtggcattgccgccaagtccacacccacccgagtcgatagcagcaccaaggggacagcaaaagggggcaccgtcaggcttgaatacagtgcctgttgtaggctcgggtttgccgccaagtaggtccat

SEQ ID NO: 76221 - DNA, 693 bp, Oryza sativa
  Clone ID: PAT_MRT4530_76234C.1
atggccggcgacgagtggcgctgccggaagcacccggcgccgccctgcggcggcgtgtgcccgtactgcctccgcgaccgcctgctccggctctgccccgagtgcgcgcacgcgcggccctgcccctgcgccgcgtcgtcctcgtccccgtcctcctcgtcctcctccgcggcctccggcagcgccgcggtggtcgggagggtgtacagcctcatcgagcgggagcggcggatgggactgcggtcccgatccgtcgccgcgggcggcggcggcggcggccgcggcatcgtcgtcagggacgagaggcccaagtcgagggcgtttgggtgggtgtcgttccggaaggcgacgtcggacagggtcgtggaggtggacgacggggcggcattggcgcggtcgagctcggtgtcggcgacggccgtggagacgagggcgcctcccaagtcgagagggtgggggcggttcatcccgggctcgatcaaggcgctgcgccaccgcaagtcccgcgccgccggcgattgccgcgagggtgtcagggccaggtccagggccaaggacgtcgtcccgcacagcattgcaggagcactgtgctacgcacagtgtgacgcgaacccaatttggcttggttgggttcaccggagaatcttagtaatgggcaatggcagcctttccaggacgtgtcccgttgtgtga

SEQ ID NO: 76222 - DNA, 1169 bp, Oryza sativa
  Clone ID: PAT_MRT4530_76235C.1
tctcggtgagtacaccatcttttcattttgtattccttgtcgagatccaccaaccgttctcgaatggtcaagaaggcgcagagtatggtcgtttgtctctgcatgatctgacaaggccttatccgctctgggtgtccctagccgaagttcccttaggttcctcggaggccttgccaggacagcgtaaagggacagtaggattggtttcaactctaggtgtcgtcgtggtaagggatctctggataaaacacttggtgatattgtgtacctgatatcaactttgttggagtagaggtaataggaggatcgctacaccgctggtcgaaaaccagttgtagccccaactcgaccacactggtcgaggaccaggtagtagtcgtaactcgactacttaaagtggaaatggtgggagaatcgctacaccgctggtcgaggaccaggtagtagtcgtaactcgaccactagaagtggaaatagtgggagaatcgctacaccgctggtcgaggaccaggtagtagtcgtaactcgaccactagaagtaaggcgagagagatcactacgttttactggtttgagaaccaggagtaggagtctcttaatcacctataggggcgctaaagttgatttattacatgtgcatctcatgtggccagcatgactcacatacccaacttatagcatatctggatgtccgttcgcaatcatatcgggtgatcaagccgacgacgttcacgaggaattatccgttaacagccttttctcgagtagtccagccatggccggtgctatgagatagatcgtcggtctccgttggcaggttgggcgcgatgactttgcatttgtcaagatcgttctcgataatggggtatactcgaccacaacctactcgagtgctcaattgttccttgttgcgtactcgttcgacatcatacgatctgacatcttttggtacgccgcgaagcttgaggcttggatgatctcgatagaccaagttgtcgatgacgatgatggttccgatctggttaggttggatctccccctcagctgaagtcgtcgagtagctcgttgtcggagaatccatctcttaaacccatctcgtctaaatcctgaagcaccaaaatccccctacctggcgcgccactgtcgacgtttgatgtcgcaattatcat

SEQ ID NO: 76223 - DNA, 6409 bp, Oryza sativa
  Clone ID: PAT_MRT4530_76236C.1
atgccaaggaagaaggccagctcgccctcgccgacctccaccgccagggagactagaagctcctccgctcgtggtcatgcatcaccaaccccaaccccaaccctcaggaggtccacccgagaaaccacatccagattttcttcttcttcttcgtcttccgcaaacaagcacgaaggctcccccgccaagcaaagtgccaacaacaacaccgcaaaacggaagatgaataatgctgccgcagatacctccaccaggccaatcaagaagaacaaaaagctaaacgcaaagtcctatttagcactcttctccacaccccaacaaaccgccaaatcccctcctgcccctggaggaaattcccggctgtattctaactttggcaatgtagcccctcctctcctagtccaagtggatgacgacaatgcttccacggtgcctatgcaagacagtggcactcttctggagcatgaagaagctgacacacaagagcaaggttaccagtctggcttgcacaaagttcctgaggtggtactggaggagactgatgtctccaagaacaaagctgatgaacatgcttccacttctgaggccaagaagacaattgaagcaggtgatcccagagagatcaaaggggcttctacttcaaatcaggctttagtaacccattctgatggaacagattacaacgagtacctgtgtgctgtttgcagaagtagggaaaccccaggaattctcaagtttaaaatgaggcagctcaggagatgccaccatgaaaggctgtgggagaggtcttgtgatggaaaagattgcaaaaatcggtaccatgattcttgtctggatcctcccctgcaatatgtgtcgctaggtatctggttgtgcaccttatgtactaaaaagaggctccagtttggtttatttgcagtcagtgagggcattgaatctttgtgggatgttaaggaagtgaaatggaaagatctgggctatgagtatgcaacatgggagcttgagacttcatcatttttatgtacccctgaggctaaggatctgaaaaggaactatgagagccgccatgaagatgcaagaagaggttttgatcctgcaaaaataaataagggtaagcaatgtctgtttcagaaacttcagaagctaccggatgggttcccccctggtttagacaaagatcatttgagttcacttaaccggctccgcgagttctggcacaattctgatggtgctatttgtctcgatgatcaggagagagtaatcaaaaccattcttttttctatgtccatattgcctgatgtctgccaaccacttctcattgtctctacttctgcttctctctcattgtgggaagctaagttcaatcgcttggcaccatcgatcaatgttgttgtgtataatggggagaaagacgtacgcaaacagattcaagatttggagttttatgagaacggtttggtgacgtttcaagttctcttgtcccatcctgatgccatcctagaggacattcagaccatggaatcaattgtttgggaggcagttatggttgacgattgtcaaagcttgagagtttcaaaatgccttgaacaacttaagcatctttctaccaattttaggatggttcttttgagtttcccactcaaggagagtattcctgagtacatcaacctgctgtctttcctcaaccctgaaggaagtgtcatttcgagtagttcaaatggtgattttactgatacaggtgatatcttagcaacgctgaaagaaaaatttgctcgtcatgttgcatttgagcggaaagcagattcttcaaaatttttggagtactgggttcctgctcgtctttcacgagtgcagctagaaatgtactgttataccttactttcaaactccccagcactccgatcacactcaagaactgatagtgttggtgctcttcgtgacattcttgtatccctccggaagtgctgtgaccacccttacctggttgatcaatcactgcaaagctcacttactaagggccattctctgactgatattctagatattggatctggtggcggggctggcaaccctatgggtgacattttggatgattttgtccgtcagagatttggttttgagtcatatgagcgtgtagaacgcggattgctagtgccgaagaaacaaacagcactgaatatgttcaatgacaaaactaaggggcgttttattttcttgattgatagtcgtgcttgtgttccaagcattaaattatcatctgtcgatgccatcatcatatattgtagtgattggaatccaaccaatgacttgagagttctccagaggatcagtatagagtctcaatctgaatgtgtgcctatttttcgcttgtattcgtcttgtacggtggaggaaaagactcttatactagcgaagcatgatcatattcttgacagcaacgtccagaatgtaatgcctatcgtgagccattccctgcttagttggggtgcatcgtttctcttcaatagacttgaggagttccaaaagcatgactactccagtaaagattctgaggatgatggtctcttcatgaataatgtatttttggagtttgcagcgaaactatccaccaacgttgaagccagcactaaaatggaaaatgcagtcatatctcgagctcagcagagtggatcgttttattctagagatattgctgttataagcgagagggagggaatatctgcagttgatggtgatttgccaaagttctggaccttctggtcaaatttactaggtgggaggtctcctcattggcaatatatatctgagccagtgcaaaggaaccgtaggaagatacaaaatatggaagaccaaatgagaatacctgcagaagaaactgatgaagcaataatgaaacgtagaaaaatcggagaaatcatggattcatctccgaagatcctacctgtcaaagacaatgatgctgtgctgcctgaaaatagtacagcatccagttctcatgaaacatcagttgatgacacttggcaagagctaggggcagaaagccttcagggcacacagaaaggtcttcacacccaactcaagccagagctgtcaaagttgtatgaattgttggaattgccggagactgtcaaatgtttatgtgaggaattacttgattacattttgaagaatcatcaagtcagtcaggagccaaagggcatattgcatgcattcaacattgccctgtgttggcgtgctgcttctctcttaaagcataagatcaatcgaagagagtcacttgccctttctgtgagaaacttgaactatgagtgcgatgaagtgctcgctgaatatgtttatgagaagctaaggatcctcaagaaaaagttttcgcgtagagcaagtgaaacaagcaagcagagccaatctactccagtaaataacacatcatcttacaaacaacagacctcaccgaaattgagaagtgacggatcaatttgtcatcaggtaacgacaattgatggtgatttggaaaatgtttcacatgaagaggctccacatgatatcttgaccgaggagatgatattagaacagaaggaattgatatctgttctagaaactcatagagaagaacatgttttaagggatgaacttcttgaaagaatcacagagaaaagaattaatttaattaacatggttttctccttaagagaaaagaatattcaggataaacaaggaaacgagaccacactgttagacatgcacaagcaaaaggaagtggcaaagctgcaagaaacatgcaatttggtcgtggaacatcttcgtaaaggtcacattgattcagaggacagggatgccacggtgaagctaataattgaatggtttactttgcttctgtatgcatttttgaatcacatgagatgccagcataacaagttgaagatgcagcaatcaacttcatggaacaaggagttacaattgaaggaaattttccttcagcaagcaaaatctggccacttagatcgtagctttgatcaacaaattcctttaccagattcatgctttactttggaagaattcagccacttcaaggaaatagttggtaatttccctgtcggtgcagctacttcagcaaattgccagcattctttggcatcaaccatggaaattgcattggtccggagtgtcagtccatctgaagttgggaattcagaagcagcgataaatggggctgttgaagttcctgtccacaccgaaaaaagaccaacatcagaagttgggttgtcgcagaacaggatggacaatgattctgatggcattgactcacaaggagggccacctctggctgttcaacattcattaagttctaatcctgcaattgacaattccaataatttggaatcttcagttgccagccatagaagcgaacatcttggggatattgcagtggaagttaatgccgacaattgtggcactactcttgcagattcacctcacttagaggcaccaactgtggctgccctgcccagccagagtgccttgccaatggctatggaagttgacattcagacagatcatgtagttcagtctgcccagcagaacatagtgacaggacgagttccacaagaagaagagcgagaaggttcgaccactgtaacatcagctcagcctttgcaacctgaaatgcgaccatcaagtccagtatccggtattttgcgtgaaagaacaaatcctgatcagaggagggaaagtcgtcagccagaggctgcacctagttcggtggatccaacacaactctttcccgtggcatcactgatgtttaatcacccaccacttggcaatgaaccattgaaaaatgagctgcacagattacaagtacacatggattctcttaataaaatctacgaactgaagaaatcacaacttcaaacggagtgcagccaagaaatcgagaagataaaacagaagtatgatttgttaattaaagaacaagactccgctcatcatcagcacaggaagacactggatgacttgtatgggaaagttctcctaaaccaatcactagctgatgattttcgggtcaaatttgtatcaacatctgcagctcaagccagagccgtttctcctccactttgccagacaactcgccagacagctggggtatctcagcaggtaccaactaggccttcggtggctggatcgattgcattgccagtcggttcatcatcagctagtcgaccatcgctgcagaggcattgtgctcaaccatcgcatgtggatcggtcatcatcatcgggggggagtcattcatcatcgccatcttcacaagttgtacgacctcccccagcaatactaggcagcgttgtcagggcaacatcaactccttttagtcacacacctgcagcccgtggaaactatggagttgggagtgaagtagcacgggcaccagctccccatctccagttcaggctgccacgagcacatcccacggcccctgtaaatcagcagcagcggcagctcccagttaggctagagagcacatgttcaaggacacagttgactcctgtgagcaccccagtaaacgcaaggcagttgagttcacaatcagtttccccggtgagcaattcatcatcatcgtcaagctcacatccaggtccagcactctcaaatccagccttggcagcaaattcaagttcaaatccagttttgagtgcaggcacagtggcattgccgccaagtccacacccacccgagtcgatagcagcaccaaggggacagcaaaagggggcaccgtcaggcttgaatacagtgcctgttgtaggctcgggtttgccgccaagtaggtccatgtcagattcggtgtcgctggatgcatggcttacatccaatcttggtctgaaggacggtgaaaccagcacacctcgcactcgcatggatagtcatcgtacagtagatgtggtgtgcttgtccgatgacgaaccagaagagcactagagctagagctagactgacctgacttttgtagtacagcagtattttcttggaatgccattttttgcctgcctggcacaaggagctgaatttggccggactggtggcttgcatgtatatgttgttactactagtttgttattagtagtaccattccattctagcttagcttgtaagctgggtgggttggggttcccttccctccaggccttgtgcagcatgcctagtaaggtctgctagggtaacttaggttgttgtaaatagtactaagtaattagtactgtacaagtaataacttgctaaccagccacccaggaagtgaattaagcatggtggtaaaaacctccttggttgcttgattggttgtagtcgacgaccttttggtttactaatatacttgtgtcaaaaaaaaaaaaaaaaaaaaaaaaaaaaaaaaaaa

SEQ ID NO: 76224 - DNA, 971 bp, Oryza sativa
  Clone ID: PAT_MRT4530_76237C.1
ccggacgctgagggaggccgtcatgagcatgcgcaaggaccaggacctcatcccgacggaagtcggtctgaccgcccgtatgtcgccggtctgaccgccgcttgccgccggtctaaccgctccccctctatttatacatgaggtaggcagcctaaagccacgaaccaaactcatactaagaggcctaaacaacttaggaaaccctctagtacaagaaagaaactttacataaccaatcgtaccaaatttgaactccttccaaattcgactccgtatcccatacgcacataataactccatcgtatgccatatgaaatctccatcaaccacgtgcatcaactctagccggcatacacagcccggtctgaccggtcacatgaaataataaaatcctgcgattacctgtgaatccaatcatctccaaaaccacttcgtgaataaattccaaataacaaaaccaataatctccaatgtctaattgttcatcacagaataataatcaaaaatacctttgattttatatggcgatgatgagggggtgcgccgatggggagaagcggcggccccatttcgagctggtgtcggcggcgaagaagaagaagacgacgacgacagaggatgatcatgaggaggtgttgctggcgtatcggccgcgcgagaaggaggacgggaagaagaggaagaaggtggtgaggaggctggggaaggaggaggtggagaggctgctgtcgttgaagctggccgtgccgaccctcagcgaggaggtggtgatgcctatgcctgacgacgacgaggatgatgtgtggcagaaggaggtgctgctccgagccaaccggttgctgagggagagcgccatcaggatgcgcaagaaccaggagcttatccgctccctcttcgaggccaagggctatgtcgacgtagaggatgaggtctccgacaacgagatggacatggacatgcagcttgtctaa

SEQ ID NO: 76225 - DNA, 350 bp, Oryza sativa
  Clone ID: PAT_MRT4530_76238C.1
atgttgtttgaagaagggcaaacatgcacgttgctgagccgacgtgtggtggacaagaatgaccgatttgtgaccggtctgacactgctcacgtcgtcagcacacagccaccttcccacgacgtgcccgcctcaggcagaagtggagatccaccaaaacacaggagtagggtattacgcttctcagcggcccgaacctgtatacatcgcttgtgtttcatattctcttgaaaggtcgcgatctttccgtcatctacagagagagcttgagatctcaccctgagcccccggccgaaccggcaaaggggggcctgtgcggtctcccgcaccgttggctaaacaaaaacaaaa

SEQ ID NO: 76226 - DNA, 605 bp, Oryza sativa
  Clone ID: PAT_MRT4530_76239C.1
caggttgctgttgtaaaatcaaaggtgtttttgattattattctgtgatgaacaattgggcattggagattattggttttgttatttggaatttattcacaaagtggttttggagatgattggattcacaggagatcgcaggattcattatttcatgtgaccggtcagaccaggctctggtagccggctagagttgatgtacgtggttgatggagattccatatggcatacgatggaggtattgtgtgtgtatgggatgcggagtcgaatttggaaggagtccaaatttggtacgattggttatgtaaagtttctttcttgtactagagggtttcctaaggtgttttggactcctagtatgagtttggttcgtggctttaggctatctacctcatgtataaatagaggaagagcgtcagaccggagacattgtggtggtcagactggcaggagcacggcggtcagaccggcggcggcgataggcgcggcaggcgacttcggcggtcagaccggagattcaacactggtcagaccgacggcatccactcggtcagaccggcatatcaatctcggtcagaccgacttccgtcgatttcgagggtaac

SEQ ID NO: 76227 - DNA, 304 bp, Oryza sativa
  unsure (1)..(304): unsure at all n locations
  Clone ID: PAT_MRT4530_7623C.1
tggatccccgggctgaggaattcggcacgagggggaagcattggtaagatgtacaggaatgatgattatagatatatggtacagcaaattggtctatcaccaataccatgcaatttaatgattttgtgcagtccttgattaatgacatcttgaagtacatgtacagttaggacaatgtcagattaaaatccaaatccatgcttacagttacttcacatctgaagtaagataaattatcctaggaattaaattcaagattttattggtatttnggttcttaggattaggatttaaaattcagaat

SEQ ID NO: 76228 - DNA, 285 bp, Oryza sativa
  unsure (1)..(285): unsure at all n locations
  Clone ID: PAT_MRT4530_76240C.1
cagcagcagtagctcctntnacttcgccaccacagtgttctcatctccctttcatatcccctgcttcctctccgtccatggaggaggtggcagtagcagctggcatcctcctcctctnatctcctcctcggtcacttcagtgcttacttgccggtnatgaggaggtcttctnaggggaagagctccagcgtcggcggcgttggcgncgtacgnaggtatgacgtgcacggtggtggtaactttctggnctgctacgcgaaggcggnggaggccgaggccttccaa

SEQ ID NO: 76229 - DNA, 2906 bp, Oryza sativa
  Clone ID: PAT_MRT4530_76241C.1
tgtgtttttttttttttttgtttttttgacagttcataacttcatattcatctggacgaccggagtttacaacaaagtgtctacaacatacagtcgcagttacatgcgatcggatattgcgaaaaatatgggaccttaagtgatctaacaaggcatgaatatcaaactcagatgatcattctgctgccgttacatggttacatgattcgacgctaatattgggaaagcagggtagttgcttgccttgatgatgctgtcggttagatgtcattcattatgttatctatccttgagctcttcttcgaatgcgcgcagtttctcccggataggtgaaaggaaggacttgaggtccttgcaaatctgcctcttgtcgtcggatgcgaggcccttgtcatcggtaaaccttacttctacctccaagtcctccagctcaccgaaagaaaactcaggaatgtccagatggcctttgaccttcatcttttcttctttaattaaccattcacccttaaatttcaagcttagttcataggtataccctactctcttcttattacgaacggtgactagaaaggcatcaccaatgcatttagacactccatcaagagatgccttccctgtagggaattctagcgaatctaaagaacccaacatttcctttatcctactgttagcccatgaattgaggttcttttcctcccaggttccagcctgattccacacggagccgagcggcggcgggttgccgttcccgttggcggcggcggcggcggtcgcgtcgagcttgcgggggacgggcagcggcgcggcgtccccggtggcctcccgcacccagtacctatacgacgacgccttctccgccgcggccgccgccgtcgcggtctcctccatcagcggggacaaatcagccgtttgctcacattctctttctccttctatcccctcacaggtcatgtcttcttcttctaacccctcacaggtcttgtcttcttctcctattcactcgattctctctctctcttcccctttctcctttgttgcaccgcagcatcgccaaaagtgcacttctataggcgtcttcgacggtacgtagatgggctttctcaatgggaagaagatcgggaaccagctaaacatgtttggtgtagccgtgtttggttcaattccaagatgaacatctttatacaatacggcatcaaaatatccagcaaatccgtgcacgaggcatgatcccgtctcttgtggtatctcaaatttcaacttggtatacctttggttactagcatttggtgagggatttggatgatcaaaagtaaaaaccgattgtgttggtgcaagtcttgctattcggtgtagtttgacaacatatgcagtttcaaaatgtgcaatatctttatgtgctttgatatcgttgtgtagttttgatgctgttataggttcaataaagctagtgtatgatgaaggaatagaaatcccatctggcttcaagaatctctgagcaccatctagacactcgggagaaagttcattatcaccaaaggaaccaagcaactcactgaccaaaatatctgctttctcaggggcttcccagcaccgcatgtcacttgaaattatagtaaccaagctttcccatccttccaatttgatcaaactgtgaagggtgataacagcattaggatttttctcgacggcgtatacttttagcttgcggccagtttcctcagcagctgtttttgttgttgagacatcatcatcggaaactctatcaaccaatgccttagcaattgctctttgatactgggtatatttcacggtatctttctcaaaagtctcgtatgtctgagcttccaaattgtccattagaggctggagaggagattgcagaaaatccctataattgatctcaaagcgttcctgttcaggaagtgggtccatcctctgatatatgtaagcaatgtagtcaaggtatgggctcaatgcatgccgaacagcagtatcttcagtgtggttttcatcacctgagagcactcctccttgggatacgttatgatttgatctcccagatattataacctgaaccgaatggttaaaaaatccagtaagcagcttctggtggcgctttgacaggcaaggataacctctggcatttgtcagaaaagcaggctccccaaaccaccgccctagtgaattcatagatggcagtgtgctcctgataagtgaatagccaaccatgtcgctattatcttttgctccatcatggtcttcatccataggttcagacttctccagaggtatcctaagccacaactgcaaattggtcaggccttgcaaaatatgattcacaactctagcatagttggcacaagaagatctcttgggaggaggaagaacgcacgcctgcaacgagagatgagacgcccacgcaatctcctgcttcagagtgatctcggagtccaaccggagttgctcgtcctccgcatccaaatcaatccactcactgatcttcccgacgatgtggctgctccactgggccgggccgaggacgaggtccgacgccgccacggggaggacggacccgggcgtcggccggtagtcgggatcaacgaggggggcgaggaggaagtcgaaggaggaggagagggagtgggagaggacggcggggagctcctcgccggcggggaagtcgagcacctccaccccgcagtagcgggactcgctcttgtcccccgcgcgttgccccagcggcatctccggttgccttcttctcctcctcctcgctggtactagtcgccgacctccgccgctgacgccgccgccgccgccggggatgggcaggaagacgcgttggctggggttagggtttagggcttttggtcggcggaggaggggaatttagggcttcagcctct

SEQ ID NO: 76230 - DNA, 736 bp, Oryza sativa
  Clone ID: PAT_MRT4530_76242C.1
ccctcaaattcgatggatcgtggtctgaccgaagtagtcctgccggtctgaccgtctggaagccgtcggtcttaccggagtagatcgtccggttggaccgtcaagatcagctgctattcgctgtcgtcgccgccggtctgaccgtaggtatgccgccggtctgaccgccgcgggaagcctcatgctccccctctatttatacatgaggtaggcagcctaaagccacgaaccaaactcatactaagagtcctaaacaccttaggaaaccctctagtacaagaaagaaactttacataaccaatcgtaccaaatttggactccttctaaatttgactccgcatcccatacgcacacaatacctccatcgtatgccatatggaatctccatcaaccacgtgcatcaactctagctggctaccagagcccggtctgaccgatcacataaaataatagaacctgcgattcacctgtaaatccaatcatctccaaaaccactttgtgaataaattccaaataacaaaaccaataatctccaatgccaattgttcatcatagaataataatcaaaaacacctttgattttacacttataactagggggtgcataaccacttataacacaaggtggtgcactatgctctgggctggccttgggtgctagctgctgtgcacagtattctatcggcggaggcatttgcatcacgtaagaaaccctacccgtcacttttggaccttg

SEQ ID NO: 76231 - DNA, 249 bp, Oryza sativa
  Clone ID: PAT_MRT4530_76243C.1
gcaacataacatataacctaaacacaatcaagaagtacatacaatattaatatcacaacccaaaacattaacagaacatcacatatttaaaataacctcacacacaaagaaactgcaaccactgcccaaagtttagacccttacatacttctaccaaacattgcatacaagacaatacttccggattatgaaaactaacatttttctcttataataaagcaaacagattccactcacattatatctaga

SEQ ID NO: 76232 - DNA, 369 bp, Oryza sativa
  Clone ID: PAT_MRT4530_76244C.1
caagttctcaacaagacaacaactcgagcccgacgagccgtgcccgtactagctagcttgaggacgtgtcagcgtcatccagccatgccggtatggtgttacggggggcatatcgcatctaccacactttggtactgttactaccgccatgtacgaaatgagatccaaccgttcagtcaacaagggcacgattggaaaagatgtgaaacaacactggagactggagaggtgcaatctcctcccatgtcgtcaaatcctcgatctgatgttgcctcgtccgacgtcaagcacatcgaaaccaaacgccgccgaatcctagcactagtagaaaaatcatttgttgccacgaaaaaatcgtggcatcaatac

SEQ ID NO: 76233 - DNA, 368 bp, Oryza sativa
  Clone ID: PAT_MRT4530_76245C.1
cgtgggctggccccccagacggttccagggggggggcagcgggcggccggcagggggaggctttgtggtgccacagcctcccctttggagccgggccgccgcgggcggctgatgaaagcggaatagaggggaggaggaggaagagggaggagaagagaaagggaggaagggaggaagagtggggaaagaaggagaaaaggaattggttcgaggaagaggaagagagggggatgttccaatctcatttaaatatctgtttgggatttatccgatcggatgtggtagagaaatatttactcccggtgataactccaaccgggactaaagatcgatctttagtcccggttgataataccaaccgggagtaa

SEQ ID NO: 76234 - DNA, 150 bp, Oryza sativa
  Clone ID: PAT_MRT4530_76246C.1
atggctaatcgggaggagcgtgaggtcttgtctcggtcggcggctgtggcccgccacgaccaccactaccgaccacacgggttttttggtcaggacttgaagacatcggaccctgcacgatacattgatgacccagtcctgtccgagtag

SEQ ID NO: 76235 - DNA, 451 bp, Oryza sativa
  Clone ID: PAT_MRT4530_76247C.1
tttgtgtttttttttttttttgattcacatactgcaaattcatttttatatgctctaatcagactgcaaattcatttttatatgctctaatatacaactgaatggcttttgcatgcactacccctgagaaggcacattttaggaagagggccttttaattgtagcgtacatcggagtaggatgtgaagaaaaaatgcaactgattcagcaagaactcatcttggaaggcagaactagtatcagcaaggccagaagctggagaattgttaggcagaggaagatttggtccaagctgtgatacatcttgttagttttttttccccttcacaaccgattgttgccaacttctcttactgcggtttgctaattgctcccaacttgcgaaacagatgtttcacctgcatcttaatgccatgaccaaggttcaatacatgcccactattaccagctt

SEQ ID NO: 76236 - DNA, 627 bp, Oryza sativa
  Clone ID: PAT_MRT4530_76248C.1
atgccgtacgccgccgtacgtccttcgccaccgccgcagctcagccggccgatcggctccggagccggcggcggtaaggcgtgcccggcggtgccgtgcgaggtggcgcggtaccacgagcacgcggtgggcgcggggcagtgcttctccaccgtggtgcaggcgatcgcggcgccggcggacgcggtgtggtcggtggtgcggaggttcgaccggccgcaggcgtacaagaagttcatcaagagctgccgcctcgtggacggcgacggcggcgaggtcgggtcggtgcgggaggtgcgcgtcgtgtccgggctgccggccacgagcagccgcgagcggctcgaggtcctggacgacgaccgccgcgtgctcagcttccggatcgtcggcggcgagcaccgcctcgccaactaccgctcggtgaccaccgtccacgaggcggcggcgccggcgatggccgtggtggtcgagtcgtacgtggtggacgtgccgccggggaacacctgggaggagacgcgcgtgttcgtggacacgatcgtgcgctgcaacctccagtcgcttgcgcgaacggtcgagcggctcgcgccggaagcgccgcgcgccaacggatcgatcgatcatgcatga

SEQ ID NO: 76237 - DNA, 621 bp, Oryza sativa
  Clone ID: PAT_MRT4530_76249C.1
atgcgcgcccgtccaaagccgccgtcgagtgcaatttcgcttctacccggggtgaatcacgccaattcttgccgcacggttggattgaagatatacggtggtatcccctctcacaattcaaaccattcactccctagtcggccgttttcaccctcgccgccgccgcgcgtcgcgcctggattggcgccaacacgtcgccagccgaattcgcacacggtcaagccaatccttcgacgcatactaagtcctaaccaaagccctacatcaagttttacctcaccacatcaagccgagcactgccgccctcgcgctgctctgttcttcgccgccgagaagtttttccggccgcaatttgtcatttcaaccgatctcgccgccaacccatccacacatcaaattaatctctccgccgccgctcgccgtagccagagaaccctagctccctcccctctttggccgcaaccacttttcccctccatcaccgcctttggggaacggctagaggtagaagaagagaagagagagagagagagagagagaggtcttgaggattcttctgacttaatagataatatcaatcaatctcaggacatcgagcaaggcaagttaccataaaccttt

SEQ ID NO: 76238 - DNA, 610 bp, Oryza sativa
  Clone ID: PAT_MRT4530_7624C.1
gttattgataatctcgtgtgacctaatttgcatggagaaggtaagcatgaggctggtcatggtggccttggtgttagtgggcatcgtgctggcggcgagccaggaggtcgtcgatgcatccacgtgcgtggcaacagattcccctgaacttgctgaagaaaggaaaaaacttgagaagctcacggcaatcttctctcggcctcgcggtgtttgccacgcaagcgagggttgccgcgatgaaccactactaattgatgactgatgccaccaaatgtaccagtccacacaaaatcggtgtgtgtgaggcatttcccatcttccccgacctgtgcaggaggccaaaattaggaaccggcaaatatatcccttgcaccgatttattttgctgagaaccgacgcttacagatgtttgtctatgtgtcagttctcaacagaaaccagcatatatgtactttcatatgtaccggtccttgaaaaatggcactaatgatgccactactcaattgtgctcttttgtacgtaacatttttttttatctcaagtcgtatgttgacaaactttgtgtttgtttttatatctttattggcatttcttaatcggcctcatatgc

SEQ ID NO: 76239 - DNA, 342 bp, Oryza sativa
  Clone ID: PAT_MRT4530_76250C.1
gtcgcggacgctggaaccatgagagacagcttagtgagccatacatatactcctgtccatgatgatagcttcggcatcgagcgtcggtacgcttacagacacgtaagtgcaccaccgatatgacctgcaaagaccgactcgacatcatcagctttggcaacagtagctatgcacaccagatcaggtacgtgcatgatgctccactcgaagacaagaacatgtactcgactcaatcatatatgacactggtaaccgctgaggaccagcgctagcaaatcgtgctacaacttgcgctcaagtggacgctctaattaccaagtaatcggatgaacatgaaacacc

SEQ ID NO: 76240 - DNA, 273 bp, Oryza sativa
  Clone ID: PAT_MRT4530_76251C.1
atggggagcggcggagagggagtggtgatgcctatggggataggggagttgagggggagaggcaccaccggtggggacagacctacgagggaggccaatggtggtagatccacccctcgtgaggctgtcgcccccagatccgtgagggagaaggccggcagcgccagatccgtgaggaagaaggccgctgccgccgaatccacaagggagaaggccggcaacgccggatccctgacggggcctactgctcccgaggtggcagagatgccctga

SEQ ID NO: 76241 - DNA, 766 bp, Oryza sativa
  Clone ID: PAT_MRT4530_76252C.1
ggatttgttgaatgtactcatctcagggcctctgattcctcaattgggaggactgaaaaatctccagtaccttcagttgtatgggagtcgcctaaatggatcaataccagcaacactggggaagctgaaacatcttgtgagccttgatctttcgaacaacctgctcactggcgcgataccaccttcgcttggcgccatcagcaatttgctaattctgaggttatctgggaacaacctgacaggggctatacccccatcattgggcaatctgaagagccttgagatcttggagcttggcaataatgcactgagtggctctattccagcttctctcggcgatattgaaacattgaattacttagatttgaatgacaatatgctgactggcaccgtgccattggaaatcctttctcgtcttgtcaccaccttggatgaactgaacgttgcacacaatgatttgtacggcacaaccaggaaatctgtaaccagagaaaagctgcagcaaaacagcagcaccgcgatcactcgtgttgttcattgtgctctggagttcgagctcgcgctctccagcggcggcgtcgacggcacgaacctggtgtcacctaccaccactacctctggtggcgacacatggtcggaatcgggatatctacgaagcccgctccttggcagatcagcctgccggtgcgagcgcggaaatcaagttggggcagagcaacatcacctcgccgtgcacgacggctacgggggagtgagactggactga

SEQ ID NO: 76242 - DNA, 1302 bp, Oryza sativa
  Clone ID: PAT_MRT4530_76253C.1
atgaggaaactaggtcctgatcttccgataggttttgaaaactcacgatttgatggaaagttgacacacacgatctggcttctgatcaatctgatccgaaccttgcaatcacagcaccacgtcccctctggttatcaaccgtgccgaaaccaggttgacctcactgagaaggctaatccatgcatgcgaatcgaattacacaagcaagaacaaggtttaccagatggaattgatcgaatcgatctcatcctgtcggcatcggcagcggcgacaccgtcgcgcctcctcatcgggtctagcttcggcgccggcgccagagcccgctactcccccacctgctccttccctccctcccaccccactctactcgcgccgccgcctccattcgcgtccgtcgcccgtcagtcagcgcctccgcatcaggtccggctctggtgccgatggcccccgctgctcgctcacctgctcctcccccagtccagtcgcgccgccgcctccattcgcgtctgccgccccgcggttagcgccgccccgcccgtcgaccaatggctctgccaccttcgtcgcatccaggtccacttccgcctcctgctcctcagtggtggtgatgcggcggcgacggcggcgcgaagaaggcggcagacgcacgaagaaggcggcggcagcgtgaagaaggccgcccgcagcgggggaggcgccgcgggaaacacgcggatcaccggcggcggcagttgtggctgggggaccatcttcaagcgcataatccggccatttttaaacttttatataaacataaggaggcctactaagaatgctagcgagcgacatcttgcaaagcattctccactattgtgggagggtctgattgccattaatctggcatgcaacttcatggtacaaaaaatatggcctctaaaagatcgtgcccatcctgcctgggaataccaattctgtggcaatgatcccactcaagagagcctaatacccattaataagtatagagctacaaatagaatctatgatttcttcaagccgggtactgtcatcatcaccaataattgccccaatactctccattacaaagtccagcgtcctcctgctgcctggttcaacgagagtcagactgaaatgaacaaactgaagggattcaacggtgcagctgacaaggctgactccgaagcttgctatgaggcttgcctttcccttcttcaaaagattcagaaaattatcgagcgatcgaaaatgaagagtgaagcgttaaagctggtttttggccgagtacgcaagatttgccaagtgtga

SEQ ID NO: 76243 - DNA, 1041 bp, Oryza sativa
  Clone ID: PAT_MRT4530_76254C.1
atggtggccagcaagcagctccactcgcagcgatgtggcggccactactgccagctgcaccaccaccggccggaggagatcgccggcgccggtgccgagagccaccggagggacgggtcgagcggctgcggcggcgctggtccgatggtcgtgctgaccctcgggtccggcgccgcggcggctgaagacgacggtggcggccgctcgcgctgctgctgcggtgccggtggcgccgcgccggcgacgatggtttccgcgttgcgtggttcgaggtacctgctgccggcgcaggagctgctccgcgaggcggtgtccgccgccgccgccagcgcgcgaggtggcgacgacgacgacgaggcggtggcgagcttcccgcacgacggcaagagcaccggcattggcggcggcggcggcggcgtccaagccaagctcctcagccttctcagcgagctggagagccggcacgagcactacttcggggagctgaggcgggtgtcggcgtcgttcgagccggcgctgggcgccggcgccacggccgggtacacggcgctcatggcgcaggccatgtcgcaccacttcggcagcctgcgccgcgccatactgcgcaagctcaggctccacgccgccgcggcggccaggacgaggtcggcgttgctgcggctggcccgggacgccatggaggaggacgacgagggcgacggcgaggaggaggaggaggtggtgaacagggtggtccggcggacgaagcaggcggcggcggcgagggcggagcaggcgtggaggccgctccggggattgccggaggacgccgtgggcgtgctccgggcatggctcttcgaccatttcctccacccgtatccgaatgacaacgagaagctcatgctggccgtggctacgggtctaagcagaacccaaatatcgaactggttcatcaacgcgcgagtgcggctgtggaagcccatggtggaggagatgtacaacgacgagttcgacgacgacgacgccggcagcggcggcggcggcgcttcgtcctcctcgtga

SEQ ID NO: 76244 - DNA, 180 bp, Oryza sativa
  Clone ID: PAT_MRT4530_76255C.1
atggcgacgggagctgccctgcgacaggtggatctagcactagctaatgagggtggcgacgacaatggcagcaagctgcgtgagggcagatctggcggcgctagactcgagactagcggatccccctctgcgggcctcagcgacgacgacaacgatgatgccaatggcaccaatggctag

SEQ ID NO: 76245 - DNA, 537 bp, Oryza sativa
  Clone ID: PAT_MRT4530_76256C.1
atggagaatttcctagcagacaatgtcatgccttctgatgttggacttgagactgaagcacaatctattggaatattttgtattccagcatcatccatcattccactccacaaccatccaggcatgactgtattcagtaaacttctatatggtaccgtgcatgttaaatcgtacgattgggttgaggatacaactcaactgcttaaattatcaaaagttagacctgccaagattgtaagggatggtgagatgtctgcaccatgcggcgcaatggttattcaaccaaaagatggggggaacatccatgctttcaaagccatcaccccctgtgctatcctggacatcttatcacctccttattcttcagaagatggaaggcattgctcctacttccgcagatgccgaaaagcagacccgtcgggcattttatcaaaccgatcgagggaacctgaatttgtttggctggaagaacaccagccccctaacagctttgttattagaagggacctgtacaaaggacctgctttaaatttatga

SEQ ID NO: 76246 - DNA, 174 bp, Oryza sativa
  Clone ID: PAT_MRT4530_76257C.1
atgatgcggcggacgggctgggagaggtcgacatcgccgtgggcggaaagttggccggagaggaaatcgccttgcgcaccgaggggattgccggagagagagaggacggaattggcttcggcggtgaaaatggaggaaactgtgatcagcaaagtccgagttggacagggttag

SEQ ID NO: 76247 - DNA, 260 bp, Oryza sativa
  Clone ID: PAT_MRT4530_76258C.1
gcccagcgcccggctcgtccagccgccgcctcgcccgctcgctgccgcggccggctcaccgcctggcctgttcgtcgtcgtcggcccgctcccggcctccgccttgccgtcgtcgtcgtcgtcgcgcacacgtacgccacttccggccgccgcctcgtcgtcgtcgtcagccgcgcgccgagagccgcctagaggagaggaggtgtcggcaccatgcacaggaggaggagacgaggcatcggcccggccgtctcgcccag

SEQ ID NO: 76248 - DNA, 316 bp, Oryza sativa
  unsure (1)..(316): unsure at all n locations
  Clone ID: PAT_MRT4530_76259C.1
ggggcgacctggttcctgattcccgccgcgaccgtcgcgacggcgctcggctacgcggcgctgaccatcggcggcacnccagtccacctggggcatgcgcgtcgccggactcagggtcgagaccgccacgggcggcggccggacggcatcgtcgcagccgtgcatncgctgttcttctacgtcgcggccggcaccgtcgcgctctggctgctcgacatcgcctgcggcttcgtgcgcgccgaccggcggctcggccatgacctcctgaccgggctcgtcgtcgtccgggcctgatcgcccggcggtcgtcccgcac

SEQ ID NO: 76249 - DNA, 120 bp, Oryza sativa
  Clone ID: PAT_MRT4530_7625C.1
aaaaaccaagttgaaagcaatgcttgctctagcgtaaaactctgatgctactgcaatgcaggcacaaaacctgagctgctaggtcaccatatcatgaaatagcatcgaatcctgaaattc

SEQ ID NO: 76250 - DNA, 639 bp, Oryza sativa
  Clone ID: PAT_MRT4530_76260C.1
atggaagtcgtcgtcgctcgccggggcgtcgtcgtcctgcggctgcgccacggcgagccgccgcccagcgccgccgcgcggtctggcgggcgctgctcgaggctgctcctcctgtggacgttcgccgtcggcttcgccgccgggctgttcatgttcgccagccacgtcttggccgccgtcgccgccgccgtgctcttcgccgccatgtgcctgtacacgtgcctgtgcctgaacaacgcggcgccggaggaggaagaggagcagcagcagcagccgcctgttctgctgcttcccggtcaggcgctgcgcgtcgccgtgatgccgccatcggtggggcggctgcagcagcaggaggtcaacggcggcggcggcggcggaggcctcaggcaggaggacgtcgaggccgccatcccggcgttcgagtacagtaagggttcgggcggcgcggcggaggcggagcagtgcgccgtgtgcatcggagtcgtgcggcgggggaagacggtgcggcggctgccggcgtgcgggcacgcgttccacgcggcgtgcatcgacgggtggctccgcgcgcacgccacgtgccccgtgtgccgcgccgacgtcaaggtcgccgccggcggcggcggcggagcgccggtgtag

SEQ ID NO: 76251 - DNA, 747 bp, Oryza sativa
  Clone ID: PAT_MRT4530_76261C.1
tcctcgaattcgatggatcgcggtctgaccgaagttgtcctgccggtctgaccgcctggttgtcgtcggtctgaccggtgtagatcgattggtccgaccgccaaagtcgcctgcctgtgcctgtcgccgctgccggtctgaccgccgtgtacccgccggtctgaccgtcgccttgtaaggtgtttagaacttttagtatgagtttggttcgtgacgggctttagcggtctaaccaacgactcaccgatggtaagaccggcggcaagctaggaaaccctctagtacaagaaacaaactttacataaccaatcatactaaatttggactccttgcaaattcgacttcgcatcccatacgcacacaatacctccatcgtatgccatatggaatctccatcaaccacgtgcatcaactctagccggcaacacctgctcggtctgaccagacccaattccagcagtacctgtagattcacctgtgaaatccaatcatctccaaaaccacttcgtgaataaattccaaatatcaaaaccaataatctccgatgccaattgttcatcacagaataataatcaaaaacacatttgattttacattattaaccatgtgttttttctcgttttgtgtatgtcaacacttaatcttcatccgttatgttattgtcgaacggggctatagctagcaggaggaggaagggagtggtctatattgccatcaatcgatgctactatgttgcttaaaggcgaa

SEQ ID NO: 76252 - DNA, 1149 bp, Oryza sativa
  Clone ID: PAT_MRT4530_76262C.1
atggggaactcgtacagcaatgtcggctcgccgacggcggcggggtatgtgcaggcgccggagctgccgctgcacctgtgcttcttcctggtggtgctgctcgtcttcctcggattctcgtggtacatgagctacgagtcggcagcagagcggttcgccaaccaggcgcggctcctgctgatggcgtcgccgctcgcactgttgctcaccccccggaccctgcgtcactcgagccgtcgctgctcttcccgtcgttgggcgcagcccggcaccgtgttcaccatcccggtgttcccggagcaaagggggtattttctgaagttaggcttcataacacagaggcaacatgcttgtacgcagtacttcaatgcagcgaccgctgccgcggcggcggctcccccgccgcctcgccgccacggttacgcgaacgtcgatccccggtgcgagtggacacgcacggaagacgccgacaccctcgtcgtcgatgtctcagggttcaggaaggaggagctgaaggtgctgtacaacaccagccggaagctgaaggtcgccggcgagcggcgggccgacggcggccaatgggcacgcttcctcaagatgtttccggtcccgaggagctgcgacgccggcgccatcagggccgtcatggacaacgaggaagccctgctctacgtcatcctgcccaagggatcatcgtcttcttcctcctcctccagggacaagaaggaagatgaacacaatgtgagctcccagcctcagggagaagcagccatggcgcccatggcggatgggccatcaagcagcagcggcggcggtggcaatctgtacatcgcccaggaagacgaagagatgggcaagattgatgagaaagaagaggtgattgccacgcaggatgtgccaagaacacacggcgatgtggatgatggtaacgggagatggtttcacctcggtgtatttgcgggtcttgagaccgcggtcagggttcacctagaggatgttggtgtcaagcacggcaagcatcttgttgatgcggtccgcgatctcctcggtggaggggatcctgggggagtggatgtcatacacaccctcgcggaagacggacaggagcttctcatcggttcgggagttctcgatggagctcctggataa

SEQ ID NO: 76253 - DNA, 547 bp, Oryza sativa
  Clone ID: PAT_MRT4530_76263C.1
gcccacgtggctggcaccttcggggacgtcaggccgaagggtggtgtgttcgccctctctttagtcccccgaggggggtcgggctgcaccccctccggccccgagggccgaggcgccccgacccctcgtgggatttcgctccgcgtgtatgggtcacagaccggtcagatcgcgggattaggtggcgacaggcggtctgacgcacgcctcgccccatcccgtcaggacgagggcttctaggcgctcgtccccagctggagctagcgtgttacctcccagagatggcacgttagtcctgatcagatatatgccaggctttatcctaaccattacaagcaagatattgtgtgaagaagggcgaacatgtagattgctaagctgacatgtggtggacaagaatgaccgacgtgactggtctgactccggtcatgtcgtcagcaggcggccacgattccacgtcgcatctgctcccggcgaaagtggaggtagttgtgggccgtcccatcagaaggtgactcggacgacaacgatacaaatctccgtccat

SEQ ID NO: 76254 - DNA, 160 bp, Oryza sativa
  Clone ID: PAT_MRT4530_76264C.1
gtccgcccacacgtccggccggatagctcactggtcatgtccgcagtgcaatctccggagatatcgcctgctctgacatatgcacttgctgaagccatcatgcaagagagcgtgttcaagacagggttcaaaacagatgatgcgatctatcatgcagact

SEQ ID NO: 76255 - DNA, 598 bp, Oryza sativa
  Clone ID: PAT_MRT4530_76265C.1
gggttaattgtaaaatcaaaggtgtttttgattattattctgtgatgaacaattggcattggagattattggttttgatatttggaattcattcacgaagtagttttggagatgattggatttcacaggtgaatctacaggtactactggaatgggtccggtcagaccgggtagtggttgccggtcagaccggctacacgtggttggtgaagattccatatggcatacaatggaggtattgtgtgcgtatgggatgtagagtcgactttgtaagttgtccaaatttggtatgattggttatgtaaagtttgtttcttgtaccagagggtttcctaaggtgtttaggacttctagtatgtatttgattcgtggctttaggctgcttaccttgagtataaatagaaggggagcgtcagaccggcggcatcgcggcggtcagactggcgggcacatggcggtcagaccggcgtcggtaacaggaggcggcgacaagtttcggcggttaggccgtaagatcaataccggtcagaccggcggctacgcttcaatcaaaccggctaatttattccggacagaccgatctccatcgaattcgagg

SEQ ID NO: 76256 - DNA, 542 bp, Oryza sativa
  Clone ID: PAT_MRT4530_76266C.1
tcgatcagttgctcctgcaggagtaggatatgcaggtactaaccaaggtacaggaggtccagcggctgtacctccacccgcttctaataataaagcaccagccacccaacctggtgcaaatgaagtctatctggtgtgggatgatgaagcaatgtcaatggaggaaagaagattgtcgctacccaagtatcaggtgcatgatgaaactagccaggtaagttctgatttttataattttatatctgtaatattaatgatatgtgaaaaaaaccaagttgaagttcatggggatgctctgaactggaatattgtgtaagtgttcattctagggtatagagtaaagtaaaaattttaggcacttatgaattgcatgatacgccttgtgttctaaaattgggtttccatccctttagtttgtgcgtcagaaatttcattttgtttctgttacaattggtcctgtattaccttagtattgcattcaataacatttgaagaccattcactgtgctttgattgcttgtgcataaagagtaaatacagca

SEQ ID NO: 76257 - DNA, 2879 bp, Oryza sativa
  Clone ID: PAT_MRT4530_76267C.1
atgtttccttcgcgtcgccggtcgccgtgggccttcgccgccgccctccaacccctatataagaacccccggtgtctcctctacccgccgccaccctcgccttcgtctctcgccgtcggaagagctctagcgccgtgtgacctagcgccgccgtcgtcgccgtcgctccagccgtgcttcgccgtcgttccggtcgtcgtcgtcgctcggggagatcgccatcatggtcgccgtcgcgtcgccgtcctcgtccgccacttcgccgtcgctgaagaccgccggagcaccgccgtcgtcgtcaagccgaagaccgtcgccaccgccgtccgttgcttctccgccgcttctttggtcaccggtgagttcgccgcgtcgcgctctacgtcctggtgccttccgttcgcctcctcgcgccgtcgttcgccggcgagcttgcgccgtccgagctgccgagccgccgagccgccgccggtggtgacgtcatcgccgacgaatggtgcgctgcggtggattgtgttaagcaaggggtattgtcacatctcctttccgaggtaccgtggtggtattgaggcacatgaggaagagttctacaatgatgctgatgggcgtgacacgcgcccgagccgccgagccgccgccggaggtgacgtcaccgctgacgtcatcgtggccgccggaggatatggattggggtcatccgccgtcctcaaagaggtggccaaacgactgagatggtcgtctgtaccggagaagctgaagctggggttggacaagatcatccacgttgattgctctctgtggcagagcaagagggccctgcagaaggccatcgcccaggagctgaagcttcctcggtgggtgatggccgtgtttgatcagcgtgacgaggaggatgatttcgatggcgtggagcacggtgccagaggggtgataccagatgtcactgaggcgattcttaatgagcttgccggtcacacatgcctagtgatcttccacaacgggagcggcggctacatagatgtgcaggagtgcggtgttcctgcaataatgggactctcgagcaaaagggtactgtggacatcccaggtcaggtttgggccctggatcgggtccgatttgcagaagattgccggattgagcgatgtcgctatgtttgctaatccttttaatgttcaacccctgctgcatgaagaggctgaggaggttgctaggtccactggtgtcccaaaacctggcatgagccctgagattgtcaaggagtgcatcatgtactacaaggtgaagctatgggtgcttgacctgagttacacagattggtattggctgctatcagtagaggcacaagatctgatggttgagcttagggagctaaatgtgaagggggtcaagcattggagcataaaccatctactccgtgatggtaacaattctagtgctggtgtcggaagcagcaccaagccccttgggctactcaaccttgtcaagctccaagtcacaaccgaaccaataactgaagatcaacatcagtcacaagtatggaaggaagatcaggtagcagcaacattattcccgaacctgtctagctgcaaaatcgtaaagacgatcattcttgatggttgttttgagttgacgcgaattgaccctcatgacctaccgccatcactcgagtcatttagcttctctagcagcagcaatgacaatgatgttgatgtcacagccaagatagagagcatctccttccgaggatgcacccagttgaagagtgtgcttttgagaggagtgtttgagaggctcaagcaactcgacgtctcaggcacttgtattaaaaccctcgacctacgttcaatgcgaggcaactggtctctcaaggagctcctactgcttggatgcaaggagcttcgtgcaatactatggccaacacaagatgtatcattggaggttctgcacatcgacactagtagcacagaacttgatcatgctacaggtgtagaagaatcatcatcattctcacctgttgaatttaaatgggctgaacaacgttggttgatgtcgaccaaaagccgacgaccagctgctgacaacaagaagttatatgcggatgtcgactccacgatccagcacttgcaactacaagcaaccatgaacggcaactggatgtggccatgtaaatcggagggcagcacctctcactacattagcttacaagatgataagaggatgcagacgaaaccattgtcgtcgccatctttgccaggcgttgtattcactccacctagtaccggtagtgacacaattttctgtcttctgaggacattctgggcatcccaactagcaagggcgcgccacatctgggactggggcacaaggggccagctgcattttgagcctgaagatgggtcattcgacctgcaggtgctacacctagattgctgccccaggttgatatatgtgcttcccttatattacaacagtctttcctatgcatactgtgtgttggaaacccttgagattgtgtgctgtggtgacctcaaggatgtcttccgagtggatgataataatcaagagcttctggtggcaactatagaattctcagagctgaagcacatccacctgcacgagctgccctctctacaacgcatctgcgggcataggattgtggcgcccaagctggagaccatcaaaatccgaggctgctggagcctcacccgcctaccggctgttggtctcgacagtacccacaagcccaaggtggattgtgagaaggaatggtgggatggactggagtgggacgggttggagaacggacaccatccttccctctttgagcccacccactcacgctactacaagaagaacctgcctagaggttccatgctcag

SEQ ID NO: 76258 - DNA, 761 bp, Oryza sativa
  Clone ID: PAT_MRT4530_76268C.1
agggtcggagcccttccccaaccctcgaaatcgatggaagtcagtctgaccgagattgatcttccggtctgaccgaagcgtagccgccggtctgaccggtgttgatcttccggttggaccgccctggaatccctgccgcgcctgttgtcgccgctggtctgaccgcaggttacccgccggtttgaccgccgtgatgccgccggtctgatgctccccctctatttatacatgaggtaggcagcctaaagccacgaaccaaactcatactaagagtcctaaacaccttaggaaaccatctagtacaagaaacaaactttacataaccaatcataccaaatttggactccttccaaattcgactctgcatcccatacgcacacaataccttcatcgtatgccatatgaaatctccatcaaccacgtgcatcaactctagcctagcgcataccgccggtctgaccggtcacataaaatgatagaatcctgcgatcacctgtgaatccaatcatctccaaaaccacttcgtgaataaattccaaataacaaaaccaataatctccaatgtccaattgttcatcacagaataataatcaaaaacacctttgattttacaatcaagagaactttttataacttttctttttcttgagcctttttgctcatatttttctcttttattccgggtacgtccctgtcgtcaagattgtttccagggattcggcacccattattttgctcacatcgaatacgtccttgtcgtc

SEQ ID NO: 76259 - DNA, 2820 bp, Oryza sativa
  Clone ID: PAT_MRT4530_76269C.1
atgccaccagcggagtggaccaggatcatagcagacagcatcgatgaagcagcaggcagggtaattgaattgctggaggatacaagcgaggggaatgtgatgtatttccatggctggtgtggactgggggcttcagccgtcctcagagcagtcgccaaaagactgacaatgaggccatcgccatcgccaggaagaagaaggtgggagaagatgatccacgttgattgctcggtgtggcagagcaagagggccctgcagaaggccatcgcccaggagctgcagcttccttggtcgctgatggccttgttcgaccagcacgacgaggaggatgatttcagtggggtggagcagagtgctagaggggtaatacaagacgtcagccaggctatattgagcattcttgccagccgcacattcctggtgatcttccacaatgggagcaatggctacattgatctgctagagtgtggtgtccctgtaataacaggaatcttgaacaaaacggtgttgtggacctcccgaagcagctttcggattaccgacttgtacattgataacgtaagcaaggaggatcgggataagcttgctgggctgagtgatgtcgctatatatgctgatccaaccgctgacaatgaagatgctgtaaaattcataggaatgctgctgcatgaagaggcagaggaggttgccaggtacaccggagtccctcaatctgctggcatgagcaccgagcttgtcaagatgtgcatcatgtatcagttgatgctaagacaacaacatgtggactacacccagcactgggatacccacgcagacaccactagtagtacatgttgtcatagctcatcgccatgggagatagcccaagctctttataataacttgatcttggagtttttgaccatggacaattacgacagcaacccaatttttgcggaagaaatactgagagacctacgactgccttctgattttgtggacgagtcgtccttcttctggacatgtgatgctgctggcaataacaatgtcgacgcaactacagcttgttatagacagaaatcactggaggccaaaatgtttcaacatccatctgcacgcagtttgcgtgtgatacatctcttcgattgtaccttcagttttgcatctccacccttcctctcttgcagcagcctaagattcctcctacttgaccattgcaaagacaaacacaacctcggctcagcaccaaatagtactagtgctggagatactgacaaggaaactggtattagtagtggagcatgtttccagaagctatgggtgcttgacctgagttacacagattggtattggctgctatcagtagaggcacaagatctgatggttgagcttagggagctaaatgtgaagggggtcaagcattggagcataaaccatctactccgtgatggtaacaattctagtgctggtgtcggaagcagcaccaagccccttgggctactcaaccttgtcaagctccaagtcacaaccgaaccaataactgaagatcaacatcagtcacaagtatggaaggaagatcaggtagcagcaacattattcccgaacctatctagctgcaaaatcgtaaagacgatcattcttgatggttgttttgagttgacgcgaattgaccctcatgacctaccgccatcactcgagtcatttagcttctctagcagcagcaatgacaatgatgttgatgtcacagccaacatagagagcatctccttccgaggatgcacccagttgaagagtgtgcttttgagaggagtgtttgagaggctcaagcaactcgacgtctcaggcacttgtattaaaaccctcgacctacgtgcaatgcgaggcaacgggtctctcaaggagctatttctgcttggatgcaaggagcttcgtgcaatactatggccaacacaagatgtatcattggaggttctgcacatcgatactagtagcacagaacttgatcatgctacaggtgtagttgaatcatcatcattctcacccgttgaatttaaatggtatatttcagtgagggacagaaggctccttcgctcgctaaatgatacaaaatatcccttggatgcaccatgcatcgagatctcatcccctcctgctagtgttgctactgctactactgatggttctgaattaggcggaacaataagcaagagaaggcccattgccattagcagggctgaacaacgttggttgatgtcgaccaaaagccgacgaccagctgctgacaacaagaagttatatgcggatgtcgactccacgatccagcacttgcaactacaagcaaccatgaacggcaactggatgtggccttataaacaggagggcagcacctctcactacattagcttacaagatgataagaggatgcagacgaaaccattgtcgtcgccatctttgccaggttccatctgtgaaagagcttcaggcctgcacgatgtcttccgagtgtatgataataatcaagagcttctggtggcaactaaagaattctcagagctgaagcacatccacctgcacgagctgccctctctgcaacgcatctgcgggcataggattgtggcgcccaagctcgagaccatcaaaatccgaggctgctggagcctcacccgcctaccggctgttggtcttgacagtacccgcaagcccaaggtggattgcgagaaggaatggtgggatggcctgcagtgggacgggttggagaagggacaccatccttccctctatgagctcacccactcacgctactacaagaagaaactgcccagaggctccatgctcaggtga

SEQ ID NO: 76260 - DNA, 181 bp, Oryza sativa
  Clone ID: PAT_MRT4530_7626C.1
actaatcccatctagtataatgtattttttttttaccgacattgtcttgttttacacttacaaaggatcctaaaaccgggccagacggggcccttaacctggtacttggggatttacccacagaaccaccccgcctctacggatccgagaaattgaggagaaacttcctagcagggtagtc

SEQ ID NO: 76261 - DNA, 574 bp, Oryza sativa
  Clone ID: PAT_MRT4530_76270C.1
cggtctgaccgaagtagattagccggtctgaccgaagcgtagcagccggtgtgaccggtgttgatctaccggtctaaccaccgagatggcttgccactcgttgtcgccgccgctggtctgaccgccgtgctcccgccaatctgaccgccgcaatgccgccggtctgacgctccccttctatttatacatgaggtaggcagtctaaagccacgaaccaaactcatactaggagtcctaaacaccttaggaaaccctctagtacaagaaagaagctttacataaccaatcgtaccaaatttggattccttccaaattcaactctgcatcccatacgcacacaatacctccatcatatgccatatggaatctccatcaaccacgtgcatcaactctagccggcaacacctgcccggtctgaccggtcacatgaaataatgaacctacgattcacctgtgaaatccagtcatctccaaaaccacttcgtaaataaattccaaataacaaaaccaataatctctaatgcccaattgttcatcacataataataaccaaaaacacctttgattttacaat

SEQ ID NO: 76262 - DNA, 3063 bp, Oryza sativa
  Clone ID: PAT_MRT4530_76271C.1
atgaggccatcgccatcgccaggaagaagaaggtgggagaagatgatccacgttgattgctcggtgtggcagagcaagagggccctgcagaaggccatcgcccaggagctgcagcttcctcggtcgctgatggccttgttcgaccagcacgacgaggaggatgatttcagtggggtggatcagggcatgagaggggtggttccacttgtcacacagacaatcttgagcgacctggtaaaccacacattcctggtgatcttccacaatgggagcggcagctacattgatctacaggagtgtggtgtccctgtaataacaggaatcttgaacaaaacggtgttgtggacctcccgaagcagctttcggattaccgacttggacatggataacgtaagcaaggaggatcgggataagcttgctgggctgagtgatgtcgctatatatgcttatccaaccgcaggcgatgaatatagttttgtaatcttatttggaatgcttttgcatcaagaggcagaggaggttgccaggtacaccggtgtccctcaatctgctggcatgagcaccgagcttgtcaagaagtgcatcatgtatcagttgatgctaagacaacaacatgtggactacacccaacactgggatacccacgcagctaactattgggtatgcagtggaatcatacaaacctcagacaccactagtagtacaagttgtcatagctcatcgccatgggagatagcccaagctctttataataacttgatcttggagtttttgaccatagacgattacaacagcaacccaacttgtgcgaaaagaatacagagagccctacgactgccttctgattttgtgggcgagtcgtccttcttctggacatgtgatgctgctggcaataacaatgtcgacgcaactacagcttgttgtagacagaaatcactggaggccaaaatgttccaacatccatctgcaagctggctacgtgtgatacatctctttgaatgtaccttcagttttgcatctccacccttcctctcttgcagcagcctaagattcctcctacttgaccattgcaaagaccaaaacagcagcaggacggactcaacgctgacgatgacaacggataccggagatactagagcttgttttcggaagctgtgggtgctggacttgagtttcacagactggtattggctcttatcggttgaggccctagatttaatggttgagctcagggagttgaatgtgaagggaatcaagcattggagcataagccatctactccatcgccttgatgatgatgacgctagtaatagtacccgaagcagcagccgcaagccttggctgctcagccttgtcaagctccaagtcacaaccgaaccaataactgaagatcaacatcagtcacaagtatggaaggaagatcaggtagcagcaacattattcccgaacctatctagctgcaaaatcgtaaagacgatcattcttgatggttgttttgagttgaagcgaattgaccctcacgtcctgccaccatcactcgagtcatttagcttctccagcagcagcaatgacaatgatgttcatgtctcagccaagatagagagcatctcctttcggggatgcacccagttgaagagtttgttattgagaggactatttcaaaggctcaagcagctggacgtgtcagaaacttgtattaaaaccctcgacctacatgcaatgcgaggcaacgggtctctcaaggagctatttctgcttggatgcaaggagcttcgtgcaatactatggccaaaacaagatgtatcattggaggttctgcacatcgacactagtagcacagaacttgatcatgctacaggtgtagaagaatcatcatcattctcacctgttgaatttaaatggtatatttcagtgagggacagaaggctccttcgctcgctaaatgatacaaaatatcccttggatgcaccatgcatcgagatctcatcccctcctgctagtgttgctactgctactactgatggttctgaattaggcggaacaataagcaagagaaggcccattgccgttagcagggctgaacaacgttggttgatgtcgaccaaaagccgacgaccagctgctgacaacaagaagttatatgcggatgtcaactccacgatccagcacttgcaactacaagcaaccatgaatggcaactggatgtggccttataaacaggagggcagcacctctcactacattagcttacaagatgataagaggatgcagacgaaaccattatcgtcgccatctttgccaggttccatctgtgaaagagcttcaggcctgcacgtgcatgacagcttgtctatcgcaagtatcacaagccattcaaatggggcacggagatggaataatctagagtggtgcagagtggagagatgccctaacattgaaggtgttgttttcactccacctagtcctgttggtggcataactttcttgtacctgaagacattctgggcaacccaactagcaagggcacgccacatctgggactggggcaaaaggggcctgctgcacaaggggccagttccattcaacctgcaagtgctacacctagattgctgccccaggttgatatatgtgttttccataaatgacaacagagcttcctatgcataccgttggttggaaacccttgagatcgtgtgttgtggtgacctcaagtatgtcctccgagtgtatgataataatcaagagcttctggtggcaactatagaattctcagagctgaagcacatccacctgcacgagctgccctctctgcaacgcatctgcgggcataggattgtggcgcccaagctcgagaccatcaaaatccgaggctgctggagcctcaccagcctaccggctgttgggcttgacagtacccgcaagcccaaggtggattgcgagaaggaatggtgggatggcctgcagtgggatgggttggagaacggacaccatccttccctctatgtgcccacccactcacgctactacaagaagaaactgcccagaggttccatgctcaggtga

SEQ ID NO: 76263 - DNA, 1024 bp, Oryza sativa
  Clone ID: PAT_MRT4530_76272C.1
tattgaggtttggaactaatcctctcgatcccatttaatctcttcattctaggacctcgaaatcgatggagatcggtctgaccgagattgatctgccggtctgaccgaagcgtagccgccggtctgaccggtattgatcttccggttggactgccctggaatccctgccacgcctgatgtcgccgccagtctgaccgcctcgccctagccggtctgaccgtcggtgcttcgccggtctgacgctccccctctatttatacatgaggtagacagtctaaagccacgaaccaaactcatactaagagtcctaaacacctcaggaaaccctctagtacaagacacaaacttaacataaccaatcgtatcaaatttggactccttccaaattcgactccgcatcccatatgcacacaatacctccatcatatgccatatggaatcttcactaaccacgtgcatcaactctagccggcatacacagcccggtcggaccggtcatataaaataacagtgaatccaatcatcacctaaaaattgattatctccaaaaccacttcgacgataatctccaaatatcaaaaccaataatcacagatgccaattgttcatcacagaataagaatcaaaacacactttgatcttacaaatgtgacagggtttgttagtgattctagtgttcccaacaacctagtatagatggccataaggcctgagggctgaaggcccagcccacggcacggtattttggcccggcccaagcacggcacggcccgacggaggtcgggcccgtgccggcccggcccaaccatcgggctgtgtctgggcccctccaccggcacgttgggctggcccggcatgaccgggccggcccgacacaatgggccggcagctaggcccgatacaaaaaaaatagagcatggaccggcacggcccggcacgaagtgcctattgggccgtgccggcccgatggctgctggggcgtgcctagccgtgcctgggccgggctatgccgggcgggcccttt

SEQ ID NO: 76264 - DNA, 3332 bp, Oryza sativa
  Clone ID: PAT_MRT4530_76273C.1
ctcgctgccgtcgatcctcagcctccttcgcggtccgctcacgctcctgctgctcacgccgtagccgttcttcgctcagtctcgtgacgcgcttcgttctcccgggcttggcgttgctcctccttattgcagtggaccaggatcatagcaggcagcatcgatgaagcagcaggcagggtaattgaattgctggaggatacaagcaaggggaatgtgatgtatttccatggctggggtggactgggggcttcagccgtccttagagcagtcgccaaaagactgacgatgaggccatcgccatcgccaggaagaagaaggtgggagaagatgatccacgttgattgctcggtgtggcagagcaagagggccctgcagaaggccatcgcccaggagctgcagcttcctcggtcgctgatggccttgttcgaccagcacgacgaggaggatgatttcagtggggtggatcagggcatgagaggggtggttccacacattgatctacaggagtgtggtgtccctgtaataacaggaatcttgaacaaaacggtgttgtggacctcccgaagcagctttcggattaccgacttggacatggataacgtaagcaaggaggatcgggataagcttgctgggctgagtgatgtcgctatatatgcttatccaaccgcaggcgaaatgcttttgcatcaagaggcagaggaggttgccaggtacaccggtgtccctcaatctgctggcatgagcaccgagcttgtcaagaagtgcatcatgtatcagttgatgctaagacaacaacatgtggactacacccaacactgggatacccacgcagctaactattgggtatgcagtggaatcatacaaacctcagacaccactagtagtacaagttgtcatagctcatcgccatgggagatagcccaagctctttataataacttgatcttggagtttttgaccatagacgattacaacagcaacccaacttgtgcgaaaagaatacagagagccctacgactgccttctgattttgtgggcgagtcgtccttcttctggacatgtgatgctgctggcaataacaatgtcgacgcaactacagcttgttgtagacagaaatcactggaggccaaaatgttccaacatccatctgcaagctggctacgtgtgatacatctctttgaatgtaccttcagttttgcatctccacccttcctctcttgcagcagcctaagattcctcctacttgaccattgcaaagaccaaaacagcagcaggacggactcaacgctgacgatgacaacggataccggagatactagagcttgttttcggaagctgtgggtgctggacttgagtttcacagactggtattggctcttatcggttgaggccctagatttaatggttgagctcagggagttgaatgtgaagggaatcaagcattggagcataagccatctactccatcgccttgatgatgatgacgctagtaatagtacccgaagcagcagccgcaagccttggctgctcagccttgtcaagctccaagtcacaaccgaaccaataactgaagatcaacatcagtcacaagtatggaaggaagatcaggtagcagcaacattattcccgaacctatctagctgcaaaatcgtaaagacgatcattcttgatggttgttttgagttgaagcgaattgaccctcacgtcctgccaccatcactcgagtcatttagcttctccagcagcagcaatgacaatgatgttcatgtctcagccaagatagagagcatctcctttcggggatgcacccagttgaagagtttgttattgagaggactatttcaaaggctcaagcagctggacgtgtcagaaacttgtattaaaaccctcgacctacatgcaatgcgaggcaacgggtctctcaaggagctatttctgcttggatgcaaggagcttcgtgcaatactatggccaaaacaagatgtatcattggaggttctgcacatcgacactagtagcacagaacttgatcatgctacaggtgtagaagaatcatcatcattctcacctgttgaatttaaatggtatatttcagtgagggacagaaggctccttcgctcgctaaatgatacaaaatatcccttggatgcaccatgcatcgagatctcatcccctcctgctagtgttgctactgctactactgatggttctgaattaggcggaacaataagcaagagaaggcccattgccattagcagggctgaacaacgttggttgatgtcaaccaaaagccgacgaccaactgctgaccacaagaagttatatgcggatgtcgactccacgatccagcacttgcaactacaagcaaccatgaacggcaactggatgtggccatgtaaatcggagggcagcacctctcactacattagcttacaagatgataagaggatgcagacgaaaccattgtcgtcgccatctttgccaggttccatctgtgaaagagcttcaggcctgcacgtgcatgacagcttgtctgtcgcaagtatcacaagccattcaaatgaggcacggagatggtataacctagagtggtgcagagtggagagatgccctaacattgaaggcgttgtattcactccacctagtactggtagtaacagcattttctggtacctaaagacattctgggcatcccaactagcaagggcgcgccacatctgggactggagcacaacgggccagatacattttgagcctgcagattcgtcattctggttgaaagtgctacacctaaattgctgccccaggttgatatatgtgcttcccttatatgacaacagtccttcctatgcatactgtgcgttggaaacccttgagatcgtgtgttgtggtgacctcaaggatgtcttccgagtggatgataataatcaagagcttctaaaaactataaaatttcaagagctgaagcacatccacctgcacgagctgccctctctgcaacgcatctgcgggcataggattgtggcccccaagctcgagaccatcaaaatccgaggctgctggagcctcacccgcctaccggctgttggtcttgacagtacccgcaagcccaaggtggattgcgagaaggaatggtgggatggcctgcagtgggatgggttggagaacggacaccatccttccctctatgtgcccacccactcacgctactacaagaagaaactgcccagaggttccatgcttgatataatactctgttttgtagtgaaaaccttctgccatgttgcagtataaggatatacagatgacatgcagtaagcattggggcatgc

SEQ ID NO: 76265 - DNA, 216 bp, Oryza sativa
  Clone ID: PAT_MRT4530_76274C.1
atggcgttcgcggcggcgtattggcttgatcatttttgggcgtctttctcctgggacgtaggcgacgtcggtggcgcaatggctcggccggagatgagaaggaacttcacgttcccatggttggagtgcggtgaagctcaccagagaatacatgcgatggatgaaactccttcaggtgaaaagagtaagtggaagttcttggagattccgaggtag

SEQ ID NO: 76266 - DNA, 1007 bp, Oryza sativa
  Clone ID: PAT_MRT4530_76275C.1
ctaggacagtaaaacaagagttaccaatgtagaagcttcagaaagaaccacacattcattatagatcgccccagctgctgtcgtcgagaaccctccattttgcatcattgtgatgacttcgatacaatctaacttagtgatgattcgatcaacttgttgacctctagctagtaaaattccattcctcaaggcatgaatctccgcagtaatactccatgcgatcatttgcaatgctatgtactctactttatcatcccaaagaacatctcctggcaatggcatcttctcaccatgaaccaattttctcccaccaaatataccagataccgcctgatgaacgtcggtctgaccgatgtagatcgatcggtcgaaccgccgagaagcctgccgcccctgtcgctgccaccggtctgaccgcccgtatgccgccggtctgaccgccgcttgccgccggtctgacgctccccctctatttatacccgaggtaggcagcctaaagccacgaaccaaactcatactaagagtcctaaacaccttaggaaaccctctagtacaagaaagaaactttacataacaatcgtaccaaatttggactccttccaaattcgactccgcatcccatacgcacacaatacctccatcatatgccatatggaatctccatcaaccacgtgcatcaactctagccggctaccagagccaggtatgaccggtcacataaaatgacaaatcctgcgatcacctgtgaaatccaatcatctccaaaaccacttcgtgaataaattccaaatatgaaaaccaataatctccattgtcaattgttcatcacagaataataataaagaaaacacctttgattttacaattgggatggccgatggatgtggaaaaggagcacggcgccttatttgtatgttgtttgaatgaacaaggcctatgacattgcctccatcgccgtcctccctccccagtaatcgtgcagttctcgcaggtcgcccttatctaat

SEQ ID NO: 76267 - DNA, 3624 bp, Oryza sativa
  Clone ID: PAT_MRT4530_76276C.1
atgagaattaactgttgccgtccggcgcggctgatcaggcgcgacgcgctgcgctccctgctgccgcgtcctgctgagccggcgtgcctctgcgacgatactgatcattgtccgacgcggagtgggtgttttctgtgcgaggagaaaaaggcaatgcagcagccgtcgtccacgcctacgcagccgcacgcgtcgaggaagcagcagtcggtgtcatctgatgtccataccgagccatctaccagcacgtccattcagcagccttgcctcggttctgttcacgtgaatttatttcacggttggaaattgctgcgtgcacacgcccttcgtaccagggaatcaattcagtggcaatgctccggttctgttcagtggacgaggatcgtagcaggcagcatcgatgaagcagcaaagaagataatcgatttcctggacgatacgagcaacaacagaagtacggtgatctattttgaggcctgcagaggattggggtcatcggccgtcctcaaagaggtggccaaacgactgagatcgtcgtcaccggagaagctgaagctgaagctgaggttggacaagatcatccacgtcgattgctctctgtggcagagcaagagggccctgcagaaggccatcgcccaggagctggagcttcctcggtcggtgatggccatgtttgatcagcgtgacaaggaggatgatctcgacggcgtggaccacggtgccagaggagtgataccgcacatagatgtgcaggagtgcggtgttcctataaatatgggactctcaggcaaaagggtactgtggacatcccaggtcaggtttgggccttggatgatcacaggcgatgtgcacatggttgccggaccgagcgatgtcgctatgtttgctgatcctatggatgatcaacccctgctgcatgaagaggctgaggaggttgctaggtccactggtgtcccaaaacctggcatgagccctgagattgtcaaggagtgcatcatgtactacaaggtggtgaggctgttagatggaaaccatggcattgactgggccacccacgcggctaactactgggtatgcagcgggatcatacgatccgttggtaatacgtcagcatgggagattgcccaagctttgcataccaacctgagattggattgggatgatagtctgaataataataaggaaaaactagatccactacaagtgccttgtgattctgtaaaggcatcattcttctgggctacatctcacagcaacaaggaagcaactacaagctgtaaagaatcactggaggccagaatgttccaacattcatctgtagacaggctgcgtgtgataaatctctcccagtgtacattcagttttacatctccacccttcctcggttgtagcagcctaagattcctcctacttgaccgttgcaaagacaaagacaagctctgctcaggctcatcaccaaatagtactagtgctggagacactgaaaaggagactagtattagcagtggagcatgtttccagaagctatgggtgcttgacctgagttacacagactggtattggctgctatcagtagaggcacaagatctaatggttgagcttagggagctaaatgtgaagggggtcaagcattggagcataagccatctactccgtgatgacaacaattctagtactggtgtcggaagcagcaccaagccccttgggctactcaaccttgtcaagctccaagtcgcgaccgaaccaataactgaagttcaacatcagtcacaagtattgcagcaagatcaagtagcagtaacattattcccgaacctgtctagctgcaaaatcatcaagacaatcattctggatggttgttttgagttgacgcgaattgaccctcatgacctaccgccatcactcgagtcatttagcttctctagcagcagcaatgacaatgatgttgatgtcacagccaagatagagagcatctccttccgaggatgcacccagttgaagagtgtgcttttgagaggagtgtttgagaggctcaagcaactcgacgtctcaggcacttgtattaaaaccctcgacctacgttcaatgcgaggcaactggtctctcaaggagctcctactgcttggatgcaaggagcttcgtgcaatactatggccaaaacaagatgtatcattggaggttctgcacatcgacactagtagcacagaacttgatcatgctacaggtgtagaagaatcatcatcattctcacctgttgaatttaaatggtatatttcagtgagggacagaaggctccttcgctcgctaaatgatacaaaatatcccttggatgcaccatgcatcgagatctcatcccctcctgctagtgttgctactgctactactgatggttctgaattaggcggaacaataagcaagagaaggcccattgccgttagcagggctgaacaacgttggttgatgtcgaccaaaagccgacgaccagctgctgacaacaagaagttatatgcggatgtcaactccacgatccagcacttgcaactacaagcaaccatgaatggcaactggatgtggccttataaacaggagggcagcacctctcactacattagcttacaagatgataagaggatgcagacgaaaccattatcgtcgccatctttgccaggttccatctgtgaaagagcttcaggcctgcacgtgcatgacagcttgtctatcgcaagtatcacaagccattcaaatggggcacggagatggaataatctagagtggtgcagagtggagagatgccctaacattgaaggtgttgttttcactccacctagtcctgttggtggcataactttcttgtacctgaagacattctgggcaacccaactagcaagggcacgccacatctgggactggggcaaaaggggcctgctgcacaaggggccagttccattcaacctgcaagtgctacacctagattgctgccccaggttgatatatgtgttttccataaatgacaacagagcttcctatgcataccgttggttggaaacccttgagatcgtgtgttgtggtgacctcaagtatgtcctccgagtgtatgataataatcaagagcttctggtggcaactatagaattctcagagctgaagcacatccacctgcacgagctgccctctctgcaacgcatctgcgggcataggattgtggcgcccaagctcgagaccatcaaaatccgaggctgctggagcctcaccagcctaccggctgttgggcttgacagtacccgcaagcccaaggtggattgcgagaaggaatggtgggatggcctgcagtgggatgggttggagaacggacaccatccttccctctatgtgcccacccactcacgctactacaagaagaaactgcccagaggttccatgctcagtgatatgatactctgttttgaagtgaaaccttctgcaatattgcagtggagagtggcatgcagtaagatttggggtgtatcccaggaaacattggatcttgctagagaagccattagttatacgagtagaagcagcaggtcgagaagcttggcaacatgtaggctgcaccctgcattttctttcataagtgatggttga

SEQ ID NO: 76268 - DNA, 371 bp, Oryza sativa
  Clone ID: PAT_MRT4530_76277C.1
ttaggtggcgacaggcggtctggcgcacgcttcgccccatcccgtcaagacgagagcttctaggcactcgtccccggctggagctagcgtgttacatcccagagatgacacgttagccccgatcgatatatgccaggcttcatcctaaccattacaagcaagatgttgtttgaagaagggcaaacatgcacgttgctaagccgacgcgtggtggacaagaatgaccgatttgtgaccggtctgacactgctcatgtcgtcagcacacagccactttcccacgatgtgcccacctcaggcagaagtggaggtaggtgtgtgccgtcccgtcaggagggtgttcggaggatgaccgtgcaaatctccgtccat

SEQ ID NO: 76269 - DNA, 350 bp, Oryza sativa
  Clone ID: PAT_MRT4530_76278C.1
ttatccggtaggcggtctgacgcacgcctcgccccatcccatcaggatgagagcctccaagcactcgtccctagccggagccggcgtgttagctcctggagatggcacgttggtcccggtcagatatataccaggcttcatctttgtagcttcttcatacacagatccaccaaaacacaggagtagggtattacgcttctcagcggcccgaacctgtatacatcgcccgtgtcttgtgtgtttccactctcgcgaactttccacaaaccaagagcttagaacctcacccagggcccccggccgaaccggcaaaggggggcctgcgcggtctcccggtgaggagccccacg

SEQ ID NO: 76270 - DNA, 393 bp, Oryza sativa
  Clone ID: PAT_MRT4530_76279C.1
cccacgtggcctgaccccctcgggggggtcgggcccgagggtggtatgaccgcccctctctaagtctccccaaggggtcggaccgctcccgtttcggccccgagggccggggcgccccgaccccgcctcgccccatcccgtcaggacgagggcttctaggcgctcgtccccggctggagctagcgtgttacctcccagagatggcacgttagtcctggtcagatatatgccaggcttcatccgatttgtgaccggtctgacactggtcatgtcgtcagcagacagccatgttcccacgtcgcgcctgcttccggcggaagtggaggtaggtatgggccgtcccatcagaaggtcatttggacggcaaccatacaagtctccgtctgtatacat

SEQ ID NO: 76271 - DNA, 521 bp, Oryza sativa
  unsure (1)..(521): unsure at all n locations
  Clone ID: PAT_MRT4530_7627C.1
cccacgcgtccgcccacgcgtccgcccacgcgtccgaactaactcatgcaaatggtaagcaaaagaaaaaccctttaaacaatgacgtgactgcctttggaagatgggcatccttactggtctgtagagccaaatatccatttttatgatgatgcactggtacttgaatactcattagatgacatgccatctcgaaggaacacaggtcagaatgggtgtctgctttcgttattacaatctcaatgctattccaaattacattatttcagttttgctccattattttgacattcataacatatatcagaaatcagcagaattaattgtgtagaaaatgtcaaattaatatctagaagcctagaacatggttcttacaattgcagcatatcatgctgtccacttttcggttttgcatttattgattttattgaaccaacaacttaatggtttgtaagtgtaagttagttttgcttattatcataacatggtaggggggcatcccttcccctccaaaggtgntg

SEQ ID NO: 76272 - DNA, 516 bp, Oryza sativa
  Clone ID: PAT_MRT4530_76280C.1
ttgtttcaaaccttgttcatcacagtccaagtgggacttctagaaaccaaacccaagttcaatttcaagctgaacacatgagtttgaacattatttattcgttcaaattaaattcacctgaaatttggaaacacatggaagaattcctctctttcaaatttcttctgaatctgaaccatccaaattaacaaacgcagggcatgctgctgctcacactggccgtctccgtgccagcactgaagccgccgccgtgcgacggcggcggcggcgccgcctgcccgcgcgcgtcggcgctgcagctgggcgtctacttcggcgggctgtacaccatcgcgctcggccacggcggcacgaagccgaacatctccaccatcggcgccgaccagttcgacgacttccacccgccggagaagctgcataagctctccttcttcaactggtggatgttcaccatcttcctcggcatcctcttttccaccaccgtcctcgtctacctccaggacaacgtcagctgga

SEQ ID NO: 76273 - DNA, 533 bp, Oryza sativa
  Clone ID: PAT_MRT4530_76281C.1
aaaaaaaaaaaaaaggcccaacgggaatggggacaaaccaggggaaaaaaatagggggtcaaaaaaaacacaaaaaaacggaaaacccccttaaaaggaaaaaagggggaaaaccctttttagggaccaccggtaggggggggccccacgggaaaaggaaaaaaaaagggggggatttaaacggggaatagggaaaaaaaaaaccccccgggctaaaaggaggggcccaggggcaaatgggccaaaaagaccttaaaaaacccccaaaaggttatgggaccaaaaccaaaaaaaaaagccccgggggaaatttaaaccaccccccgggaagaaaacttccccccaaaaatgggcaaaaaaggggggggcccaaaaggggaaaagaaacctttttgggcctgggaaaaaacccggaagggcccctggggttcttccccggaaaaaggggccttctttgtgggggccctcaaaggggaaaacccaaaaaaaaacggggggccatggccaaaagaaaaaaccccgggggaaagggc

SEQ ID NO: 76274 - DNA, 1397 bp, Oryza sativa
  unsure (1)..(1397): unsure at all n locations
  Clone ID: PAT_MRT4530_76282C.1
gtgagacgttttcacttgctctcacttagctccaagctgagctgagctgagcttagccatggggtgcgcgggctccaaggacgtcacggtggccgacgtctaccgcccgccgccgacgagcgtctcgctgttcgacatcagcgccatcgaggagccctggctcatcgccaccggcaagaagaacgacgaggaggaggaggaggaggatgaagaagaggaggaggaggaggaggaggaggaaggcaagaagccgaccaccaccgtgatgccgctcccgctgctcgacaagctcgacggctacgacctcgcgccggcgtcgtggtcggaggtcagcaaggccctggaggacatcaagcctgcgctcagctccaacaccacgacgacggagaacgccaagaagaagaccaagaagaagaagaagaagcagcctgcgccgccgccgcagccaccgacgacgacgacgacggtgctgcctgagccggtgaaggcgatcgaggcagctgccaagaaggcggcggcggcgccgtccgcgcgtggcgctaacgaggaggttgacaggaggcctccgccgccggagctcaccgggcggcgcgtcgttaaggacaaccctttcctgatgcgcgaccgcgagaacaaggggaacgacggcggtgccgccgccgcggcggcgaggtggcggcggagggacccgttcgaggggtaccccgagcggcggcccccgggggcatccggcggcggggtggtgctgtacaccacgacgctccgcggcgtgcggcgcacgttcgaggactgcgagcgcgcgcggaaggcggtggaggcgtgcgccgaggccgtgtcggcggcgggcggatcccccgtcgtcgtggacgagcgcgacgtgtcgctccacggcgagtacctgcgcgagctccgcgggctagccggcgccggcgacgcgccgccgcgcctcttcgtcatgggccgctacctcggcggcgccgacgcgtgcgccgagctcgccgagagcggcaagctgcgcgagatgatgcgctgggccagggcgcgcggcgaggcctgcgccgccaaggacggccgcggctgcgagggctgcggcggcgcgcggttcgtcccgtgctgggagtgcggcggcagctgcaaggtggtcgccgccggcgccaccgccgccgccgccgacgtcgagcggtgcgccaagtgcaacgagaacggcctcatgctgtgccccatctgccactgattgtgctccaccgccgcgaatccttctagcgtttaatccgcgcccatgtatatttatccataatatactcgtataattgtgagtttaaactacactctattagtggtttataaatgagaattgaaatggtatatagtgcttgtnaaaaaaaaaaaacagaaaa

SEQ ID NO: 76275 - DNA, 2322 bp, Oryza sativa
  Clone ID: PAT_MRT4530_76283C.1
atggcttcactgtcgcaggaggtggtggaatctgcactagcttcagcgccgccgacgccaaaatggttaccgaaagggatggatccgaactctgcatgcaaagttgtggttagggttgttgcttatgttgagtatatggataacggtagccaagattaccatgtttcaacttcgcataagtgggttgtagataaagacaccgtatgcttgatagatttgatgaaggacttggatgatgaaatcatccgtggtagtgcgcaggagcttactgtgactttctgggacaagagagtgggtagggatgtagaaatttattctgatgctatgttattagaggcatttaaccaatactgggatggtaggaagctttcattgcaagtgacaattacactcctgaggatgatgatgctgatgaagagaatgatgatcctaaggtgtatgagacaatatgttgtcctgaaagaggttgaacttgcagttccctactctgaggccacaagatacagaacttattgcaaggcaaagaagtgcaaatggaggatccatgcttctaggttgccagatggtagaacttggcagataaagaagatgccatatgagcatagttgtgctagcacaggcaaattggagaataattgcatggccagcaattcttgggttaaggacaggaagactttagagaagtatttaatcaagctgtcatactatgtagtatgggatggtaggcatatggctttagatgtgatacttggtggctgggagcaaagctttgaggcagtgtacaattttaaagcagagattgagaagagatctcctggtagtatagtggagatagagtatgatgtgattaatgagaagcataggttcagtaggatgtttgttgctttgaagccttgtatagatggatttttgtatgggtgcaggctatatttaggcattgattcaacagtgttgacaggcaagtggagaggacatttggcttcaactattggtatagatggccacaattggatgttccctgtggcatatgctgtgtttggatctgaaacaaaggaaaactgggaatggttcatggtttgtctgaataaggcaattggatctccagaaggcctagtactgtctactgatgcaggcaagggtatagatgctgcagtgacaagggtgctcaataatggagttgagcatagagagtgcatgaggcatttgtacaagaattttcagaaaaggttccatagagatgtatttgaaagaaacctatggcctgctagtagagcatataggaaagatgtttttgacaggtattttaatatcatgaaggaggcttccccaagatcaatgcaatggattgaagagaatcaccagcatttgtgggcaaggtctagcttctccacctcatctaagtgtgactatgtgacaaacaacattgcagagacatttagcagctggattaggctagagaagtcactacctgtggttgagctactagacaagattaggcagatgatcatggagaggatgtgtacaaggcacaaactatctctcaagcttcaaggcgggaaatgtgaagtcagtggtgcaaacagggatttgacaacatggagacacacagcggacttgaccaaacaagagtgtagctgcaagcaatggcagctaacaagcctcccatgtaggcatgccatttcttttattggatccctaagagaagtggagctggaagactatgtcagcccctactattcagtggccatgtttagggctgcctatgccacaattgtgcctccaatgccagacaagagcctatgggagaaagtagacgctggattcaagatatggccaccaatactgaagagatcagctggaagacctagaacaaggaggttcattggagttgaagaaggtggttcaagaaagaagagaaggaaatgcgagaggtggaatggctttggccacctatccaagacttgcaataaacatgtgtatgatccagatgcccctccccctgccccacccaagcctaaaagaattagaaagaagaaaaccaagcctgaacatgtgcctactggtggtaacagcactatgcctcctactgctgctgctaatgatcaagcccctactgctgtgatagatcaagcccctgctgctgctggtgatgaagcccctgctgcagctggtgatcaagcccctgcacaagttgcaatgcaggtggatggcagccctggaccagttacaaggagcaggagtgttgcatccctagcacatgcaagtccattgaaagcgaacaaaaggaaggctatagtcaccaggattgcaaggaagctgtaa

SEQ ID NO: 76276 - DNA, 2292 bp, Oryza sativa
  Clone ID: PAT_MRT4530_76284C.1
tttgcagtgataaaacaggaactttgaccttgaataagctcaccgtggacaagaacctcattgatgtctttgaaagaggaatcactcaggaccaagtgattctcatggctgctagagcatcacgaacagaaaaccaggatgctattgatactgcaatagttgggatgctagctgatccaaaagaggcccgtgctggtattcaagaagttcatttcctgccattcaatcctactgacaaaagaacagcattgacatacattgatggtgatggcaaaatgtatcgtgttagtaagggtgcacctgagcagattctccaccttgctcataacaaaccggagatagagcggagggtccatgctgtgattgacaaatttgcagaacgtggacttagatcgctttctgtagcataccaggaagtaccagaggggacgaaagaaacccctggtgccccatggcattttgttggtctcatgccactttttgatcctccaaggcacgacagtgctgaaacaattcggcgggcacttaatcttggtgtcaatgtcaagatgatcacaggtgatcagctggcaattggaaaagaaacagggcgtcgcctgggaactggtacaaacatgtacccttcactccctttgctgggacagaacaaggatgagtccattgccgctttaccagttgatgatctcattgagaaagctgatggctttgctggtgtattcccagagcacaagtatgagattgtgaaacgtctgcaagcaagaaagcacatatgtggaatgactggtgatggtgtcaatgatgctccagccctaaagaaagctgacattggtattgctgttgctgatgcaactgatgcagccaggagtgcttcagatattgtgctcacagaacctggtcttagtgtgatcatcagtgctgtgcttacaagtcgtgcaattttccagcgtatgaagaactacactatctatgctgtctcaatcaccattcgtatagtgcttggatttatgctacttgcgctcatctggaaattcgatttccccccttttatggtcctaatcatagcaattctaaatgatggtaccatcatgactatatcaaaggatcgggtaaaaccatctccactacctgacagctggaagctggctgagatttttacaactggagttgtcctcggtggatacttggcaatgatgacagtaatcttcttctgggctgcatataagacagactttttcccgagaatatttcatgttgaaagccttgagaagacagctcaagatgatttccaaaaacttgcctctgctgtttacctccaagttagcaccatcagccaagctctcatctttgtcacaaggtcccgcagctggtcatttgttgagcgccctggatttctgctggtctttgctttcttggttgcacagctgattgctacactgattgctgtgtatgctgactgggcgttcacctcaatcaaaggcattgggtggggttgggctggtattgtgtggctctacaatctagtcttctacttcccactcgacattatcaagttcctcatcagatatgctttgagtgggaaagcatgggatcttgtcattgagcaaaggatcgctttcacaaggaagaaggactttggtaaggaggagagggagctcaagtgggcacatgctcagaggaccctccatggactgcagccgcctgatgccaagatgttctcggagaaggctggctacaatgagctcaatcagatggctgaagaggcgaagaggagggcggagattgccaggcttagggagctccatacgctcaaggggcatgtagaatcggttgtgaagctcaaaggcctcgacattgagaccatccagcagtcttacaccgtgtgatccagcctgtccataaagaaagaaaaaagaggattattttttttccagattttcctgtttcgctttaacttgactgcaattctgcaatcacctacgtgtacttgaaccgaattgctgtaatctttgtccctcctgctccagctttctactacatggtagtgttatataatttttggtcacctgaaaatatataagtgtttgaggtgaagcacaatggcaatgccagagtttttttgctcggttactgagaagcatgttttcataatcaatcggtcaattgtatggacatattatagatgaatttggtaactgtttgtgtgggggcagctggcagtatgtaacatgtgggcttcaatgtatccaaccaagaggcaatgaatgaatgaatgaatagcggtgactctggtcc

SEQ ID NO: 76277 - DNA, 3246 bp, Oryza sativa
  Clone ID: PAT_MRT4530_76285C.1
atggagatatttctgtctgccattctgggtgatcttgccagtagatccatatcattcctgatcaacaagtgctcgaaaccgacagtgctaaccgtggaggagaaactgcaacggctgctgctccaggcatgtttcatcgtggaggagtcagatgaacggctcatcataaaccaagccatgctgcagcaactgaacatactaaggaaggagatgtacagaggttattataccctcgacagcttcagatgccatggtcatcaagaatataatcccaaagatcttgaggtgagtagctcttttgcaccatcgatgttcaatcctgccaagcgtgtccggttctgcagggtcactggccagagtgtacaagagcatctgctgcaacaagtttttggcagacttgaagtcaccattgaagatatgagtgaatttgttatgttcctgaatagttatccacgcttttgccgtcagccatatagcatgcacttgcttttagacgagtgcttgttcagtcgccaaatggagatggagcacatcatgaacttcctgctgaaagaggataccaccggtactgaaaatccaggtgtcctgccgatcataggtccaggaaaagttgggaagagcaccctgattgaacatgcctgtgacgacgaaagggtgcgtaaccacttctctcaaattgtgcttttcaatgacgacgatcttgaagatgcaaacatattgactcttagagattctggtgtaatcaagcatcaaaaccatgccactggtggaaaaaggatactaatcattattgaactaaccagagatatcaatgagggtgcatggagaagattgtactcagcttcaaaaagtcatgttgcaagtggtagcaaaattatagtcgcaagccgatctgaaaagattgcaagctttggaaccacacaagctcttagagtaaaattctttactcaagaagcttactggtactttttcaaggttcgcacatttgggagcataaacgcagtggagcacccaaagctggcatcagtagccatggatattgccagggaattgaatggttgcttcatgggtgcaagcatctacagtggacttctgaaagcaaatatcaactttcagttttggaggagggctctggccataatcagagaattcaagaagctcaatctcttactctacggtgcatatttttttgatgatccttggcaggcagttgaaccatcatatattaggaccgtaaacaaaattaactcggaatatcttcttgttcttgacgactatcaaatatgttctgctccgaacatgattcattgtcacaaaaactctgctcacagtgaagatgaagttcccatggtgaatgtgaaagattttctatttggaaatgttaaacctcaaggaaaattcaaggttctcgcctggagatctcaccttccacctcactacagttacgtgttcaactatacacaaagtatcctaatccttaatagaagacaatgcaaacactttgtagcagtatcagaagctataccagctatggataacacgttggtggcaacgtcagctagggttcttccaacaatgttggcaccggatggcgatgcctccttgctgtctgtgtctgctcttgatccagttcacactgaaaaatttccaggctacatagttttctctcagctcccagttcttgttgatccattgagtgatctacagaacttcagattacatacttcacttatggagacatttttgtctgtgattctgagtgatcttgccactaaatccatatctttcctgatcaacaagtgctcgaaaccgacagcatcaaacatggaggagagactgcaacggctgctgctccgtgcccagatcatcgtggaggaggcagaggaccggctcatcacaaaccaacgcatgctgctgcaactgaatatactgaggaaggagatgttcagagggtattacgctcttgacagattcagatgccgtggccatgaagaagatgatgcaaaagatcaccaggtgagtaactctttcgcgcaatccaagttcaatcctgctaagagtgtccggttcttcaggatcagtggccatagtttacaagagcagttgcagcaagttgttggcagcatagaagtcacccttgaagatatgagcgtttttgtcatgttcttgaacagttgtccccatttgtgccgtcagccatatagcatgcacttgcttctagacaaatgtttgtttggtcgccaaatggagatcgagcgcatcatgaacttcctgctcaaagtggattctccaggttctgaaaatccgggtgtcctgccgatcattggtcgacggaaagctgggaagagcaccttgatcgagcatgcctgtaacgatgaaagggtgcgtaaccacttctctcaaattgtgtgtttcagtgacgatgatcttaaagatgcagacatggtaactcttcgacattgtggttcaatcaagaatggaaaccaatgcactggtggagaaagaatattgatcgttatcgagctaatcagagacatcgatgaggttgtatggacaagattgtactcagcttccaagagttatgttccaaatggcagtaaaattatcgtcgcaagccaatctgataagattgcaagatttggaacaacacaagctcttagagtagaattatttactgaagaagcatactggtactttttcaaggtgcgcacattcggaagcatggatgcacaggagcacccaaagatggcatcaatggccatggaaatggccagggagttgcaagggtgcttcatgggtgcaagcatctacagtggacttttgaaagcaaatttcaatgctcggttttggaacatggctctggcaagcatcagagaatacaagcagacgaatctcctagtatacggtacatattttgagaatccatggcaggcgtctgaacctccatatgttaggacagtaaacaaaatttcctccgaataccttgtgattcatgatgagtatcacacatgttctgttcagaacatggttctttgtcgcacaaactttactcggagtgaagctgaagttcccatgttgagcatgcaagattttctctttggaagtgttagacctcaaggaaaattcaaggttcttgcgtggaagtctcaccttccgccttactacaaccacatgttcaactgtgaggtacagaggaaacatcatgtggtcgccaaaaagaagagatctctggaactttgcagctga

SEQ ID NO: 76278 - DNA, 1896 bp, Oryza sativa
  Clone ID: PAT_MRT4530_76286C.1
atgccctcgactaggaccccaaggccaccaacgccgccatcaacccagctgccgaccccaacaccatcaacaccgccatcaacctggccgccgcaagtgccaagtaagcgccacgtcgatgtcacatgggataaagaccaagtcaacttgccacgaggtggtggaatctgtggtggcggcaacgccggcgacgccaaaatggatgcccaaaggataaaggcatttaaccaatactgggatgttaagaagcttccattgcaagtgacagtgagtgaggatatcatgccttgtacccaaattgtgttttgtgtggatgatgaagctgacacaatggttccactgagtatggttttacccacgcaagcaagtcaggctgataatgtacctaccagagatgctaccataaaaaaggtgcccaccaaaaaaagtagcatgtccagggacaaagctacagatcaatcaatgccaaatccagatccatggggtgagtttgatgaggttgagtatgtgggagttagtgatgagatggagaattacaatgagctggtgtcagatgatgaggctaatgatccagattatactcctgatgatgatgatggtgatgaagagaatgctgatccagtagatgatttagaaatcaatgataataggggttgtgagcctctaattcatataactgatgtagacaatccaaggatagaaattggtgttacttttgaggatggactttgttttaagaggttgaacttgcagttccctactctgaggccacaagatacatggcttattgtaaggcaaagaggtgcaaatagaggatccatacttctaggttgccagatgataaagaagatgccatatgagcatatgtgtgctagcataggcaaattggagaataattgcatgaccagcaattcttgggttaaggacaaggttatcaacaagctgagagaagatccaaccataggggctgctgctttaaagaagactttagagaagaaatatttaatcaagctgtcatactatgtagtgtgggatggtaggcatatggctttagatgagatacttggtggctgggagcaaagctttgaggcagtgtacagttttaaagctgagattaagaagagatctcctggcaagggcatagatgctgcagtgacaagggtgttcaacaatggagtagagcatagagagtgcatgaggcatttgtacaataattttcagaaaaggttccatggagaagtatttgaaagaaatctatggccagcttcaagagcatataggaaagatgtttttgacaggcatttcaatatcatgaaggaggcttccccaagatcaatgcaatggattgaagagaatcaccagcatttgtgggcaaggtctaccttctccacatctaagtgtgactatgtcacaaacaacattgcagagacatttaacagttggattaggctagagaagtcactacctgtagttgagctacttgacaaaattaggcagatgatcatggagaggatgtgtacaaggcacaaactatctctcaagctgcaaggcaatatcctgggaaatgtaatgaagcaactccatgacaaaagtaggaatctcaactacaatcgccacaagagtctgccatttgtaggtgaagtcagtggtgcaaacatggacttgacaacatggagacacacagtggacttgaccaaacaggaatgtagctgcaaggaatggcagctaacaggcctcccatgtagacatgacatctctttcattagatccctgagagaagtggatctagaaaactatgtcagcccctactattcagtggccatgttcaggattgcctactccacaattgtgcctccaatgccagacaagagcttatgggagaaaaccacacaatag

SEQ ID NO: 76279 - DNA, 1428 bp, Oryza sativa
  Clone ID: PAT_MRT4530_76287C.1
atggcttcaccgtcgcaggaggcggtggaatctacgctggcggcatcgccgccgatgccgccgatgtcgaaatggattccgaaaggctggattaggctagagaagtcactacctgtagttgagctgcttgacaagattaggcagatgatcatggagaggatgtgtacatggcacaaattatctcttaagctgcaaggcaatatcctgggaaatgtaatgaaacaactccatgacaaaagtaggaatctcaactacaatcaccacaagagtctgccatttgtaggtgaagtcagtggtgcaaacaggaacttgacaacatggagacacacagtggacttgaccaaacaagaatgtagttacaatgaatggcagctaataggcctcccatgtaatagcaagtccagggacaaagctactgatcaatcaatgccaaatccagatccatggggtgagtttgatgaggttgagtgtgtaggagttagtgatgagagggagaattacaatgagctggtgtcagatgatgaggctaatgatccagattacactcctgaggaatctgatggtgatgtagagaatgatgatctagtagatgatttagaagtcaatgataataggggttgtgagcctctaatccatataactgatgtagacaatccaaggatagaagttggtgttacttttgaggatggaatttgttttaacaggtgtatgagacaatatgctgtcctgaaagaggttgaacttgcagttccctactctgaggccacaagatacagagcttattgcatggcaaagaagtgcaaatggaggatccatgcttctaggttgccagatggtagaacttggcagataaagaagatgccatatgagcataggtgtgctagcacaggcaaattggagaataattgcatggccatcaattcttgggttaaggacagggttatcaacaagcttagagaagatccaaccataggggctgctgctctaaagaagactttggaggagaagtatttaatcaccctggtcatactatgtagtatgggatggccatatttaggcattgattcaactgtgttaacaggcaagtggagaggacaattggcttcagctattggtatagatggccacaattggatgttccctgtggcctatgctgtctttggatctgaaacaaaggaaaactgggaatggttcatggtttgtttgaataaggcaattggatctccagaaggcctagtactgtctactgatgcaggcaagggcatagatgctacagtgacaagggtgttcaacaatggagtagagcatagagagtgcatgaggcatttgtacaagaattttcagaaaaggttccatggagaagtatttgaaagaaatctgtggcctgcctcaagagcatctgaactctgcatgcagagttgtggttag

SEQ ID NO: 76280 - DNA, 216 bp, Oryza sativa
  Clone ID: PAT_MRT4530_76288C.1
gtttattaagaagaagaagaagaagacgcgaagctgggtgcgtgttcatactaacgatacctaactcgccttccaagccgcagaattaccccgtcgttgatgcggatggaggcccggggcctcccggagcttgggtcgggggcgagggacccagccggtactcggcgatagttgatagtggcgtcagcagcggaagccggcgatgccgctggctgg

SEQ ID NO: 76281 - DNA, 279 bp, Oryza sativa
  Clone ID: PAT_MRT4530_76289C.1
atggccgcatcgatcgatctcacatgctcgtcgtcgtcgtctcggcttgggtcgcccgccatcgcatcccgccgtcgcgccacggccgccgtcgcatcgaggccgccgccttctcactgccgcatctgccgtcgcatcccgccgtcgcgccgcgcccgccgtcgcatatcgccgtcgcgccgcgcctgccgtcgcatacaccccgccgctcctaccgcctccaccgcgcagcgacgagaaacgcggtaccacgcggtaccgaggttttccagccattag

SEQ ID NO: 76282 - DNA, 1217 bp, Oryza sativa
  Clone ID: PAT_MRT4530_7628C.1
tttttgtgtaattttgctccatctgaataatgtgcttctattcagagtctgggtatcggtatgtacttgcatacaagtttagcttattgaacaaatgatcaaaattacaagcatctttcctatcaaattagaggtagatggtagatggctcacacatgtttagagaaacacaatttctttctccatcgactttgtcctcgagaccactaccagaattccgtcaatgacgaggcaggcgacagaattgtccacaggaggtgaggtgactctaccatgtactctaccaccagagcaaaaattagctccttcaaaccctcatccgtagcagttcatttagtcccacaataacccaagcaaaacatttgctacggaaccacatgtatcatgacaaatgaggcttgtacatgccctgaaggtatactagaggtttcacttgctcatagtggttgacaggtagaagttccaaaaaatggcacaagaggacatgaaggcaacacgagcagacaaaggaaccatcctggtagagaaatcaaataagtgtattcgggcagaacgcttaccaaaaagaagtgtaggaagggcatcattccgatatttagatggaagttctgacagtttccctgtccataagttattccaggcaaaaattacaccaataacacaaggaccaagcgcaatctggttcagtatgaccttagtggatagatttgcaaatgttggcttcggcatacactgatcaaggaactggtaccatgcgtgcgatcccggaccataaagaagaaatccatatgaagccatacgaagcgcgcgtagccaatcatggctcatcaacaagtccggtaccaaacccttgctgtctggttcggggccgcggaggcggcggtcgacgatgcgctggcggacctgcgcgatggtgtcacccgtaagcgtgagagaggcggcggtcacggcctgcgtgaacgggaagtcgatgggccagccgcggctttggccgatggactccgacgacgacgacgacagcggctccggtgggggaccgcggcgccggccgcgcgggtccgtgttccgccggccgcggcggcgccggtcgggcttgcggcggagggacgggaggttccaccaccactcgccgccgctaccgatggccttcattctcccacgccgcggcggcggcggcgtaggtaggggaagcgcgcggagttcgtgcctcgtgccgt

SEQ ID NO: 76283 - DNA, 461 bp, Oryza sativa
  Clone ID: PAT_MRT4530_76290C.1
cggacgtgtgggcggacgcgtgggaaaaaaaaaaaaaaaaaaaaaaaaaaaaaaaaaaaaaaaagggaaaagggatgtaagggataaaagattaagtttgcttgcatgtagcgtcatatgtattaaattgagtgacctaaattcaaaaaagatggagattggtaaaaaatttaaaagaatgggaagtggttgaattgtagcaaattaaaattttggcagctgatatcattttgaataggtggggattgatcgaataggcaaaaagcgataaaccttgaaaagagatagggatgctgaatggtgaatgggataaagatgtagggtgtaattaagaacagcaggtgtaggggttaaatgtaaagcgaactataaacttttcatttggctagctcccattcctttctcgttatgttcttcggctttcgccacgaaggtcggatttgggggttaagttttaagtt

SEQ ID NO: 76284 - DNA, 124 bp, Oryza sativa
  Clone ID: PAT_MRT4530_76291C.1
atggagctagggctaggtaccaatctccggtgcagcttgctctaccaaatcaacctcctagcaaccaactcatattcattcaccaggaagagaaccttgaagagtaacaagctgacagatgaag

SEQ ID NO: 76285 - DNA, 370 bp, Oryza sativa
  Clone ID: PAT_MRT4530_76292C.1
gggaaaaagcccaaacccctttgggtttatttaatcatcaattgaaatatttttacatttgtctcccggaattttgggaaaaacgacataccaaatcaatcactgggaagttttaaacttcaacaaagggaaacaacttaaaggggaaagggaataaacctgacaatgtaatgcagggctggccgttgggggaaaaccattaataatggccccgctcggccatgatgaaggaacaaatggggggggcctacaaaaaataaacatgcttgtttcgggggttgaatataagcgacgactttataaaggaataccttggccttcttagcattaggtttgcaactttttggacactttttggttggggggggat

SEQ ID NO: 76286 - DNA, 1629 bp, Oryza sativa
  Clone ID: PAT_MRT4530_76293C.1
ggggtagttttcctccttaaatacgcactcggcgagatcagagatagcgctagatccctcttgtcagcctctaatggcacctcaaattcgatggatcgtggactgactgaaggtgttgcgccggtctgaccgcttgatgaacatcggtctgaccgatataaatcgatcggtcaacccgccgagattgcctgctgccgtctgaaaccgccgccggtttgaccgctcttatgccgccggtctgacctccgccttgccgtcgatctgacgctccccctctatttatacatgaggtaggcagcctaaagccacgaaccaaactcatactaagagtcctaaacaccttaggaaaccctctagtacaaggaagaaactttacataatcaatcgtaccaaatttggactccttccaaattcgactccgcatcccatactcacacaatacctccatcgtatgccatatggaatcttcaccaaccacgtgcatcaactctagccggcaacctccgcccggtctgaccggtcccaacaaaacagtaaaccatgttcatcacctgaaaattgattatctccaaaaccacttcgacgataattaggtcggatatcggtacgacatttcgtttccttaaatgtgggcttgatagaggcgtaatgtgcgaacctagagaagagcacgtctagtatagattctccaaaatggctagcgatcaacggctcaagcacagctctaatgcacttggcgacgttcaagccactcttgataggattaatattagttgcttgtccttgatctgatgagtcgtcataaggatcccagttcgactcaaagacgtaaattttgttgatggtgaaaagcttgctgcttatcaccactgttttgacttcatggatagatggctcgtaatttggaatgttgaaggagtcaagcttttccttctccacgagtccctccataactagagattgcaatgcttgtgagattaatccgtaaagaacacttaggtttccatcatataggtcatctttcttccttgcaagaaaactaagcaccatctgaccaccagacacaagttcctggtagcgcaactcaagaaactttgagaaatcatcgtaaaatagctcttggtatagctttatcaccgatttaggggtagtcttggcgatgtaaatgttcccttcatttaggaattccccattgttgctctcctgaaacatttgagatctccaatgtagggaataagatgaatggaagaggtgaacactcttgtcagggaaaactcttgtatagtaggatcttggcaagcctacaacatagtacttaggcagtattgctgcttctctgttttgatctttggcgaccaagttatctagttgttctatcctttgacaatattcgctggtcgcttttatcacctcgaagataaagtttagtgtatttggtcccgaagaacagcccatgtcagcgacaagcatcgtcctaggaagaactgcagagtatagttcttgaatggccttctgaatcataggcttagtagcaaccaaagtcttctcgtagtgtgctgggcctgggcgcaggtggcgagcttcgcgaagaagaacggctcgggcggcggcggcgggtcgccaccccat

SEQ ID NO: 76287 - DNA, 372 bp, Oryza sativa
  Clone ID: PAT_MRT4530_76294C.1
ttaggaggcgataggtggtctgacgcacgcctcgccccatcccgtcaggacgagagcctccaagcactcgtccctagccggagccggcgtgttagctcttggagatggcacgttggttccggtcagatatatgccaggcttcatcctaaccattacaggcaagatattgtatgaagaagggcgaacatgcagattgataaactgacgcgtggtggacaagaatgaccgatttgtgaccggtctaacaatggtcatgtcgtcagcagacaaccatgttcccacgtcgcgcctgcttccggcggaagtggaggtaggtatgggccgtcccatcagaaggtcattcggacggcagccatacaaatctccgtccat

SEQ ID NO: 76288 - DNA, 388 bp, Oryza sativa
  Clone ID: PAT_MRT4530_76295C.1
ttgaatgccaactttattttacattcgagttatattaattatactgctagcttatctaggagatccataggtatgggtataatgtttgcttatgcaattactctatgtcatgatgatgatattagagtagtatctggtagtttaggcgtgatgtctagattattaagtatcattatttggggttatatgctgcggaagagaggtggaccgctgatggtgacatctcagtactggtattcctccgcgcgtttatatagtcataaattaatttcctagggagggtactcctccgtatttagccccggttatatggtcatgataggctgtcgtaaggaactcggcagtcagggatggcttctcgaagtacctggagagcatcgaaaagagg

SEQ ID NO: 76289 - DNA, 483 bp, Oryza sativa
  Clone ID: PAT_MRT4530_76296C.1
atggcgaagggaaggaaacaaatcccttcctcagtgcctttatacccttgccaacgctgtgcccggctcctcgcttctcgcgcccactatttcgccccctcgtttctcgcgcccacgcttgcactaatcccattcacccgcttgcggcgcatgagacacaatcgtccacgtggcctggcaccttcgggggacgtcgggcccgagggtgatgtgttcgccctcctcttagtccccccgagggggtcgggctgcacccccctcggccccgagggccggggcgccccgacccctcgtgggttttcgctccgcgtgtatgggttagaccggtcagatcgcgggttaggtgatggcaggcggtctgacgcacacctcgccccatcccgtaaggacgagggcttctaggcactcgaccctagctggagctagcgtgttacctcccagagatggcacgttagtcttgaccagatatatgccaggcttcat

SEQ ID NO: 76290 - DNA, 130 bp, Oryza sativa
  Clone ID: PAT_MRT4530_76297C.1
gcaaatcgagaggcttgacgtcggcacccactatctcctccgcctcaacgtcctaggcaactgcattgacatcctctaccttcgttattatgaccttttaattgttgtatactccctccgtactcgtaaa

SEQ ID NO: 76291 - DNA, 311 bp, Oryza sativa
  Clone ID: PAT_MRT4530_76298C.1
gagagtgttgaagagaagcccttgtcgggattgatacggataaacacagaaaatttccgattcccaaaattgggggtctacactacgttaacggcgcggttagtcaacgtgcttgacaccgacgtcttgtggaccctcagatcttcgacatttcaccgaaacaaccgctgcttcgtggcctatgaaatctccatcggcagtccacggtgtcgcgcccgccagcctaccttaacggcgcggttagtcgacgtgcttgacaccgacgttatcttcgacattccgccgaaacaaccgctgcttcgtggcatatg

SEQ ID NO: 76292 - DNA, 444 bp, Oryza sativa
  Clone ID: PAT_MRT4530_76299C.1
atggcaacctccgccggtgctccggtagcggccggcggcggcaggatcgctctgaatcgattctccgtccttgaccttatggcgtgccgctgcccgctgcccgacggcgatgccccaccggccaccgcaccacatctcaaaccggtgacggtgagggtcgtcatctcatctgcgcagcgcatcattcccatggccttgcgccaccgcgtgtcgcttcccgctgagcgcatccaccggtcgagttcacctcgcctcgaccccacgcttcgccgcaggggatctgtgtctactaaggcctccacctcctcgctcttgttggaccacgccgtccggcgatggaagcggcggcggatctctatcccctccctgacattgctggagctcctggctctttcaatggcatggattggaatatgcaagcaacaatcgactacttcttactaa

SEQ ID NO: 76293 - DNA, 2548 bp, Oryza sativa
  Clone ID: PAT_MRT4530_7629C.1
gggggggaaatctgcttcacttcgtattgatttttggggcaaattttaataaatccctttttgcatcttattattttgggcttctatacatggggcctggccttctttgcctgttgaactgctgatctcttttctgaggtcattttgcaacaccatcctcaacacctctgaaactgaaattctgcttgatgtatgaagctcctgggaaattccttctttcctttgcaattgatcggagctctggcaaccagtaggcaacatactctccatcaggatcatatgtcttggcttgcttaggtatactgaagtatcggtcttctcttggatcattgccaactccataatttgaagctgggtcataatccaataggcatgtttcaaaccattcagctcccattcgccaatcaatacccatatctcggaccagaaatgagcagacaatctgacggccacggttggacatgaaacctgtcgctaaaagctccttcatgttggcgtcaataagagggtaccagtatgtagaatcatttgctattctctgcttctcatatctctttacctcttcacaaatataacgaggcgaaagactgccagaagcaagccaaggggagaacttggtggagtagtctggacctagcatgccattcctggtctctttgtagactttcagctggtctttcttccagaagtactcatgaactcttcccagagctgcactctcccctcccacgaaatgcattcccttctctccaatttcatccaggccagaaccaggaggcggcccgagtgacggtggcaacttgctacaattccgaactgaggacttagattcaacagcgtcaggcaaattgttcacggagaatggaagatcatcgacatggtacaatgtcgctccccagatgagctgcaacttgggatttcgaggcttcttctggttagatgctcctccctgaggaatcacaacttgctccaagcctttgcgcacaaggtgttcaaccaggagttcctcgctgcaggtttccttatgagcatagaccgtatgtgcagtgacagcctttgcaattgaagggaggatgtcttcaggtttcccatggcggatgagcaggtcgagaccttgtttcgtcaggttgcgcttcaaatcctccaagcactctatcaggaattgcgccctcaatgctccagtcttggggaaaccgaagtagtgggtgctccccgcggagatccggggatcgacgcagtagacggggaggacggcatcggaggcggcccacgcgcgcaccaccgcctcgttgtcgagcacccggaggtcgttcctgaaccacacgatggcaaccccgccgccgccgctccgccgcatgctcggcgaggtgtacctcaagaacgcctcgtccgccgccgcgccggcctcgtcggcggagagggaaggcaccgccgccgccgccagcgcgccccgcgacgacgacgacgacgaggagctcatggcggagaccgggatggataggaggacgcgcagcctcgcggattgcctcgggaggaggaggaattggggattgagaggggaggaagaggagaggaagtggagcatttttgagatgggaggttggtttgcgagacgtggcgggagggagggaaaggtggagggaagagtggggaggggtgccacgtggagggatgtgagtggtgctacgtggctcgctcgtgggcctgtcccaagccagtacccttctctcattgacttgttgaggctgtttggtagccagtctttgcggcggcggtaaggtaaaccctgttgtgtagtggtgtgcgccgtccatgtaattttgtcatcacttgttacatggaaattttcatcaacagctgttatattctttaagagatcgtaggtgacatctgcagctctatatgacctcggatgccattttccctcagaccaatcaacatgtgtaactgaccaattagcaattccaccaggatctaccatctgggcacccttcctgaagtctttctcctcaatttcagggagcatctcaggagaatacctcccgtttccatgagggccaggatcacggaaactgtcagaaagcaacacaaagaactggttatcaacatctgccagtgcattggccaatagtctcttctctgcatcaaccattgaaatctttccccatactaccgcgtcactgtgaatatcacgaccaacaaacaaagaactagtatgtacaggcttttcacgtgatgcatgaacatagatggagtatcttccctcctgaccctgtaaaaacttttcccataatttctcaaagggcagtgtaccaggtgtcaggaacataagagcgatctttggatttttcgacactggcatgggcattgcaaggatatccctaagaactacagatgaaatgatctcctcatcagtccgctccctgcgggttacagatgggagccaatccagtgacacaagaatgattatccatttgggcttcttggcgacagcccggtggcgcagagatggcatgacagtcatgtccttgctgtcccagaacgccat

SEQ ID NO: 76294 - DNA, 206 bp, Oryza sativa
  Clone ID: PAT_MRT4530_762C.1
atggcgattcgtttcgtttggagatatggtaacgtcgctttggtcggcgagcgtaattaccgcgcgcacgatatgatctatctcgactgccacaaccgcatatccacctcatgcgccgcaagcgggcgaatgggattagtggaagcatgggcgcgagaaacgagggggcgaaacagtgggcgcgagaagcgaggagccgggacagc

SEQ ID NO: 76295 - DNA, 655 bp, Oryza sativa
  Clone ID: PAT_MRT4530_76300C.1
cgtaataattattagtactttattactcgtaccgttaatgatttgtctagcttcatgtatccctcgaaatcgatggagatcggtctgaccgagattgatctgccggtctgaccgctcgaatgccgctggcctgaccggtatagatcaacaggtccgaccgccgagatcagctgcttctcgctgtcgctgccgtcggtctgaccgcctcgctcctgccggtctgaccgccggttagaccatcgaaacccgctctccctctatttatacccgagatagacagcctaaagccacgaaccaaacttatactaaaaattttaaacaccttaggaaaccctctagtacaagaaacaaactttacataaccaatcataacaaatttggactccttccaaattcggctccgcatcccatacacacacaatacctccatcgtatgccatatgaaatctccatcaaccacgtgcatcaactctagccggcaaccactgcccggtctgaccggacacataaatgacagcagtacatgtagattcacctgtgaaatccaatcatctccaaaaccacttcgaaaataaattccaaataacaaaaccaataatctccgatgccaattgtttatcacagaataataatcaaaaacacatttgattttaca

SEQ ID NO: 76296 - DNA, 305 bp, Oryza sativa
  unsure (1)..(305): unsure at all n locations
  Clone ID: PAT_MRT4530_76301C.1
gttgtattgcagaatgttcacagacagctgtaggaggctgaggattatgaaggggtcagatgcagtgggccttggtaagtacagatcccatgtggtacaatattgaagtattgcatgtgtccatgcctttttatctggaagcatagaagagaatttactgtatgttgctctgcataagtgcataattacaccttatatatgctttacacataaaaatcanaagtgccagtttgcatggactaggtttggtccgagcccttaactatgggactaanatatctggntatcctattctttctatgtat

SEQ ID NO: 76297 - DNA, 1190 bp, Oryza sativa
  Clone ID: PAT_MRT4530_76303C.1
atggagtgccaaaaccttacccttgctgctggggagtggaaaactagtcgttacagagcaatcattgagtccactcaacctggccagtctgaccgcagtgtagtggccggtcagaccgtccacggctcagtcagaccgccgtcggctcggtctgaccggttgcggctctggcagctctgtatcgccaccaaaaaccagaccagtgcaacagaccagtggggccggtcagaccggccttaccacgccggtacaacgagacaataccttgctcaggatgtcgtccaagccgccgtcctcctcggctgcctccgacgacaccggcgcgctgccgctgtctccagagacccgccattagagaccgccgcgacctcctcgctcttctcctccgccggcggcggatcgggcttgtcctccgtgacgacgacggtggacgccgacgccgacgcgggctcctctgatggcaccggggaacccaaacgtacgccacccaccaccgccacgtctaaacctcactcccacgacggcgggcgcgcggcgagaggaacgtcgcccagcttaggtggcaccacggggggcccgtgccaggggaggcggacattggcgatcgacggcacgagtccgaccgccgagatcagctgctgctcgctgtcgccgctgttggctgaccgccgtgctcccgccggtctgaccgccgcttgtcgccggtctgacgctccccctctatttatacatgaggtaggcagcctaaagctacgaacaaaacttatactaagagtcctaaacactttaggaaaccctctagttcaagaaagaaactttacataaccaatcgtaccaaatttggactccttccaaattcgactccacatcccatacgcacacaatacctccatcatatgccatatggaatctccatcaaccacgtgcatcaactctagccagctaccagagctcggtctgaccggtcacatgaaataatgaatcctgcgatcacatatgaaatccaatcatctccaaaactacttcgtaaataaattccaaataacaaaaccaataatctccgatgtccaattattcatcacagaataatcatcaaaaacacctttgattttacagtcaatcccaatcttatctacataaagtgcgtgagcaagctagttagatggagcataattatattactgacggat

SEQ ID NO: 76298 - DNA, 1300 bp, Oryza sativa
  Clone ID: PAT_MRT4530_76304C.1
aaccacggaaactctctgaagaatatattttcaggagtgattttttttttttttttgtagtaaagatccttttattctcagccagccgtatacagtacagggctatttttctggacaaggatacaccccccatattcttacactcaaaagtatgtgatatatctatactttgctgcacacagagatccagatcacaattcttgttacaagcaaaaaaccacaactctgaacatcatttagagtttcaaaaagatcaggctgcagcaacatgagtttcttctttttcattgttcttgcactccctgctcccttccactgtctcagcgggcttctcctcaatgggcttgttgtgctcgatgcccttttccaatgtctgtgcaggcttctcttcaatggcattcttggacttgcctccttccagctcctctttcagctgctccttcagctgcctcaggatgtcttccttcttagcttgaaggtcttgtatcttggtgtcaatcttctccagtttcgccttaagcttcgcgggatcattcgtcttctccttgtcacccttgtctttcttcttcttctctttcttcttaccttcttcctcctcatcaccgtccttgtctttcttcttctctttcttgccttctttctcatcgccatccttgtctttcttcttttctttcttcttaccttcctcctcatcaccatcctttttcttcttgccttcttccttcttatcactcttgtctttcttcttttctttcatctccttttctttcttctttccctcttcatcctcatcgtcatgttcatcgtccttcttgtctgattttttattttccttgtctttctttgagtccttactttttaccgcggactttgcgccatcatctgaatcaagcttcacctcttccttgtccacaatcttggctttgacttctatctcaatctccttcttctcatcctcatcacctgaagacttgtccttgctcttaatcttgagatgtatctcctccttggacttcttctcttcctccattggcaccatcccgaccgcgtccacagtttcgcattgtttatctttccccatctggaatatgacctgggctgttcaagttccttgtcgggtgacggcggcggtcggcggagatcttggtggccgtcgcggccggcgaatcacgcggcggcgaggctcgagagggtggcggtgcgacgagcacgaggtgggtgtggaactgtggatgcgggtcggggagatcggggatttgagggcagcgggagcgaggcgaggcgaggcggctcaaaccga

SEQ ID NO: 76299 - DNA, 767 bp, Oryza sativa
  Clone ID: PAT_MRT4530_76305C.1
aaaatcaaaggtgtttttgattattattctgtgatgaacaattgggcattggagattattggttttgttatttggaatttattcacaaagtggttttggagatgattggatttacacgtgaatcgcaggatcgttatttcatgtgactggtcagaccgggcattgtgtaccggctagagttgatgcacgtggttgatggagatttcatatggcatacgatggaggtattgtgtgcgtatgacatgcggagtcgaatttggaaggagtccaaatttggtacgattggttatataaagtttctttcttgtattagagggtttcctaaggtgtttaggactcgtagtatgagtttggttcgtggctttaggctggctacctcatgtataaatagagggggagcggtcagactggcggcaagcggcggtcagaccggcgggagcacggcggtcagaccagcggcggcagcgacaggcgcggcaggctacttcggcggtcagaccggagattcaataccggtcagaccggcggcatctacccggttagaccaacaggacaacttcggtcagaccgcgatccgttgaattcgagggacggctgtggcctccggctatggccgtggcggcggcagcaaccgggtcgacagcggcagcggcagtggttatctggggtgttacaccatgtctgccataacatgaggagcttcgtagacaaggtgacattgctcgaccctgaggtgtctaattcaattgtttatacacacataggat

SEQ ID NO: 76300 - DNA, 349 bp, Oryza sativa
  Clone ID: PAT_MRT4530_76306C.1
atgttgtgtgaagaagggcaaacatgcacgttgctaagctgacacgcggtggacaagaatgaccgatttgtgaccggtctgacactgctcatgtcgtcagcgcacagccacgttcccacgacgcgcctgcccccggcagaagtggaggtagaaaaaaacacaggagtagggtattacgcttcccagcggcctgaacctgtatacatcgtccgtgtctcgcgtttcttcctggcacgcgatctttccacatacagagagagcttgagatctcaccctaagcccccggccgaaccggcaaaggggggcctgcgcggtctcccggtgaggagccacgagctccgtcagtatc

SEQ ID NO: 76301 - DNA, 1318 bp, Oryza sativa
  Clone ID: PAT_MRT4530_76307C.1
gccttaatttcgatgggtgtcaccttcaagggccgtgccgctccagtcgccgctgccgcccgtcgaggaaataatgtccttcattaggtcatatgttgtacctgaaggctttccggatagtgtcactccttcatatgtcccatacatgacatggagagcattgaagcagttctttggtggagcaatgggtgtattcacgacaagaaccttgctaaactctgttggagttgcccaaagtagggcaacatctggagctgtggctatcaactggatactcaaggatggagctggccgagttggaaaaatgctttttgcccgccaagggaagaaatttgactacgacctaaagcagcttcgcttttctggcgatctcttgatggagttaggagctgggatagagttagctacggcagctttccctcaacttttcctacctatggcttgcatcgcaaatgttgttaagaatgttgctgctgttacatcaacctcgacccgtacaccaatctacaaggcatatgcaaaaggagaaaatattggagatgtcactgccaaaggagaaagtgttgggaacattgctgatctgttgggaactggtttgagcatttttcaatttctaagaggaatccatcattggtgacttcatttgccttcttgtcttgtggctatctccttagttcataccatgaggtgagatctgttgtgctgaacactctaaacacggcaagatttactgtggcagttgattccttcattaagagcggacatgttccctcattgaaggaaggaaactcacaggagactatatttaatccaccatggcggcatcagccagttgcaataggatcaagatttggagaggcatttcaggaacctgcttcttttgttgccataaggcctttgtttgaggatgagaggtacattgttacatataacccaacaaaggacaaggtatatgctttgctcaaggaccaagcaaagccggatgatattctcaaagccgctttccatgcacatgtattactacattttattaatgcatcacatgctaacttgaatgcacggaagcggatgaactccaatcggtcataccaaaatgcaaacccactgaacatggactttataccacacattgctgaatcttgcaagattgtcacttcatcatatggagttttcaagaagaaagcgagggaacagggatggataatgtcagaatcattgcttaaccctggacgagctcggttgtgtggaatagtacctcaatgacccaataatattcgtttgttatagttgaatggatggtacaattttatttcataca

SEQ ID NO: 76302 - DNA, 1058 bp, Oryza sativa
  Clone ID: PAT_MRT4530_76308C.1
tctcggcgagtacaccatctcttcattccgtattccttgttgagatccaccaactgttctcgagtgatcgagaaggcacagagcatggtcttttgtctctacaggattcgacaaggccttatcggctctgggcgtccctagccgaagttcccttaggttcctcggaggccttgtcaagacagcgtaaagggacatgaggataggtttgaacgctaggtgtcatcgtggtaagggatctctgggtaaaacacttggcaacattgtgtacttgatatcaactttgttgaggtaaaggtagtggaagatctcgctacccttctggtcgaggaccaggtagtagtcgtactcgactacttgaagtggaaatagtgggagaatcgctacaccactggtcgaggaccagatagtagtcgtaactcgaccactagaagtaaatgtacgagagatcgcgacaattgactggttaagaactagtgagtaggtgtctctcgatcatttggagtcgtggtatgagggccgctacgctgccggtcgaagaccagtcgtagctgttcctcaaccatagttcgagaaccaacgagcgagtagagttatctctcggacaccaatggaagttgcggtgcgagagattgctacgtgctggttcgagaaccagcgagcaagtagagttatctctcgaacaccaatggaggttcgcgaggaattatccgttaacaaccttttctcgagtagtccagccatggccggtactatgagataggtcgtcggtcttcgttggtaggttgggcacgacgactcagcatttgtcgagatcgttttcgataatgcggtgtactcgaccacaacctactcaggtgctcaattgttccttgttgcgtactcgttcgatatcatgcgatctgacatcttttggtacgccgcggagcttgaggcttggatgatctcgatagaccaagttgttgatgacgatgatggttccgatctggttaggttggatctccccctcagctgaagtcgtcgagtagctcgttgtcggagaatccatctcttaaacacat

SEQ ID NO: 76303 - DNA, 605 bp, Oryza sativa
  Clone ID: PAT_MRT4530_76309C.1
attgtaagatcaacgtgtgttttgattcttattctgtgttgaacaattggcatctgtgattattggttttgtcatttggagattattgtcgaagtggttttggatgattggattcacaggtggtgttattttatgtggtccggtccgaccgggcggtggttgccggctagagttgatgcacgtggttgatggagattccatatggcatacgatgaaggtattgtgtgcgtatgggatgcggagtcgaatttggaaggagtccaaatttggtacgattggttatgtaaaatttctttcttgtactagagggtttcctaaggtgtttaggactcttagtatgagtatggttcgtggctttaggctgcctacctcatgtataaatagagggggagcgtctaaccggcgacatatcggcggtcagaccggcagaaggcggcggtcagaccggcaggcagttggcggtcataccggcggcggcatcagggagcagaggcgatctcggagcggtcggaccgggcaaccttcatcggtcagaccggcgacacaagctcggtcagaccgacactcgctgccacgccggatctgggactgggaggattgggggg

SEQ ID NO: 76304 - DNA, 366 bp, Oryza sativa
  Clone ID: PAT_MRT4530_7630C.1
atgtgcccatggatgaggaccaaggtgagacgaacatatgccttgacagagctcaacttgcagagtgctccagagaggcaagtctatgccatcctcaaggatcgggtatttggtcacattagagcatacgacgcggacttgcttaccaaaacaggatgggaaggttttgtgcttgtggatgagcatggtgcatgctttctcactatacaatatctctgtaccctgcgagatgtgggcgatggtattacgttccgattcttcgggacggaataccatctctcagtgaagaatctcagtcttcatctgggattcaacaaacggtgttctgtggacttggagacaatgactttgggtgtgtttggttag

SEQ ID NO: 76305 - DNA, 1215 bp, Oryza sativa
  Clone ID: PAT_MRT4530_76310C.1
atgaaggacattgtggtatccaagtccgggccaccggtgctcgtcaccccgtcgtcggagccgacaccggcggcggcgaccatccgcctcacctccgccgacaagtcccgcctcggactgtcattcacggcgttcctcgtcttcgagcggcggcggcggcggagtcgtgtccaccgcccggccgagaccgtacgacgggcactgtcacgtgctctcgttcactactaccccttagccggccacgtcgtcgccgccggcgacgacgacaacgtcgtgttgtcgtgcaccggcgagggcgggggcctgccgttcgtcgcggcgacggcgagctgcacgctggaggacgtcgacgacggcgacggcgacttgccgttggccgaccttgctatctggtatggtggggagtcatgctggatgtccgatccgctgttgatgatgcaggtgaccgagtttgagtgcggcgggttcgtcgtcggggtgacatggaaccatggcgtggctgacacctacgggttggcgcagtttctgcgagccgtcggcgagctcgcctgtgggctcccgtcgccgtccgtcattccggtcagcttcgtcaaccgtgtcaaggccgagttcgtgagccggaacggtggcggcggcggccggcggcgctgctccgtgttcgacgtggtcaccgccgcgatatggcagtgccgcacccgcgcgatccacggccgccgctgccgcagtgacgctcccgcggtgctcttgttcgcggtcaacgcacggccgcacatcggagccaaggacgggtactacggcaactgcatcacgcggcaggtggtggcgtccacggcggacgcggtggcgtacggcgacatcgtcgacgtggtgaagctcgtcaacgacgccaaggagcggataccggaggaactcctccggaacaagctgagagggaagcagggcgtcgacggcggcggcggcgaggggctcttcgtcggcccgatgcaccgcctgtacgtgtcgagctgggcgggcctcggcctcgacggtatcgacttcggcggcgggaagccagccagggtgataccccgcatggaggtgacggtgatgccgtcctgcttgccatgcctaccgtgctcgaggtcgaacggcagcgacggcgtgaacgcggtggcgtggtgcgtgacggacgaacacgtcgacgtgttccgggctgagttggcaaagctgcagtga

SEQ ID NO: 76306 - DNA, 543 bp, Oryza sativa
  Clone ID: PAT_MRT4530_76311C.1
atggggggcaggcagaggcaggcagcgggtgagccagtggcgccgcgacgcgtgtcggcaatcgcgtggggcggccggctggttccgacgtggcggtgcctcgggacgggtggacgcatcgggagaggtcggcgccatgtggagccagacggccgtgtcaccgagggagaggaggcgtgggcggcgcgtccgcctctccgctccctctgcttcgaggcctcgacgcctacgcgacgagacacttggcttcgggcgtcgctcactgttctgacgtggaacggttgcgaaatcaaggaggacgacgtgttccaaccgttgcatctggtgtaccacgacgagcctctggcctcgcctcgtcgtggggactcgggcgagcctgcggataaactagtcggcgacatcggatcctgcccgatgtgcccgcgtcccacgtacggggggagcctggatgggcggcaggggcttcggcttttgtaccagcaagaggacacgggcgccaggaatcgattcagccgggaggcacgcgaggggcgcatcacttga

SEQ ID NO: 76307 - DNA, 280 bp, Oryza sativa
  Clone ID: PAT_MRT4530_76312C.1
ctttgaactcggataatttttataaaaatcatcatgtcatcatcgttacccataccatattattatcaatgtattattcacaaactagtctctcttccaatattcaatttcagtattttagtattagttttatagttttctgggggaacaaatgttagtcccaagtactccagtatcatagattagttttataattttctgtgcgaacaaagtgatgaacaaatattatgaatttagttgaatagcgtactatgaactatataatttaaattagctttca

SEQ ID NO: 76308 - DNA, 1534 bp, Oryza sativa
  Clone ID: PAT_MRT4530_76313C.1
ctaaaaaccactgagggatctaatctgcactggttttgatagttgagggacccgttgcgtgtagctcgcagtgccatcccggtccatgtaagtatgggccgcccggatctcgcatctcctcttaaccatgggctgtgagcgacgggctgacggctggtgagaagccacgtcagcatttaattcctcatggcccacatgcttacacacgcgctcccccactgacatgtgggaccagggagcccccgccgcattccggcacgtggcgtcgcgatcatttttcacacgtcggacgctagtccacatcaggcccacggcattcttaccggtcccacctgtctgtcaccctggcgtatgtattatagttcatattgccgcagcattcattaatatgctaacattgatgatgaagaacaattgtaatgatgatgatattgggaatgtgtacctaaggactcagatagccgggcaggataataagagtggggaaggtgctgattttatggatgatggaacttttactttgcttaaggatttggtaactgaatcaagaacttcgtcaccatattatgagaaggatcatcagttaaattcactaaattatgtcaatcaagatggacatggcattcctacaacaacaaatcctacctgggacttgactcagagttgcaatccgttgaaccattccctgacagaggattctgttcctttcaatgttggtacttcagctggagtcctgactaatgccacctcaaatgattttattcccattgatgagctagcaatcacgagtgggagatatggagtactaccttccattgagaaaactgaagaaggcagtattgccatcgacgaagctaactcgtttggggcaactgcaaccatgtgctataatagcgttcatttctctcattggattgaccagaatttaactggtccattgcctgatttagctgatcttcctgacatatatccagacagtttcttaccaacacctagaaagaacatcactcttgttcttgatcttgatgaaactcttatccactcatcagcggttgaccgtgatggtgctgacttttcatttcctatgtaccatggcttaaaagagcacactgtgtacgtgaagaagaggccacatgtcgacaccttccttcagaaggtgtctgagatgtttaaggttgttatcttcacagctagcctaagctcctatgcaaatcggctgcttgatatgttggatcccaagaacatattttttaccaagcgttatttccgggattcatgcctgcctgtagatggtagctatcttaaggatctgactgttattgttgctgatctcgcaaaggttgtgataatcgacaattctccagaggttttccggctacaggaggaaaatggtatacctatagagagttggaccagcgacccggctgacaaatcattggttgagctgatacccttcctggaagccattgctgttgcagatgacgtccgaccaattatcgcccaaatgttaggccgtccaagatcaattgcttag

SEQ ID NO: 76309 - DNA, 1254 bp, Oryza sativa
  Clone ID: PAT_MRT4530_76314C.1
gggcgccgctcgccggcatcgtcgtcgccggagactcgtccgatgacgcgcgagggagtccagcaatactccatcatgcaaagccccagcaaggtttctgaagcctctggctcagcaccccctgccacgtctgtgatcgaaggttgggcagaactcccagagggcctgcttcactccattgttgctctattgggctctttccttgacctccttgccttcactggcacctgccattcttggcgtgctgccttctcatcctacccatcaaaatctaactttcgcaccatactcccacccctcctcgtccgacccaatgtccgcgtcaaagccccttatagcagcaatggtcatcgcaagctacgctcgtgtgaggtcattgatctagccaaccgaaacaccccactccgctgccagattcctcaagaaactctgcagaggatgcattttgcaggttcttcccatggtcagctcatctgctgccgccgtggttattgtcttgttgttgatgtgttcaccggtgctgaggtttcacctccacgccttccattcagtgagaactgtgatgagttctactactgtggcattctgacggctcctatcacgtcacctaactcacatctcattatcagcactcagtcctccctgtttgattggccagttggaagtgactcttggtctgagctcaagctgcccgttaatcgggtcgatcagattgtggaattcaatggtcagctcatcgctgtgattgaatacagtctgtacactttgcagttggcccccattcttcgcttggaaaagataaaaactctctggtgggataacatgaatgaatgtccgtatatgagaccatggtttgtggtttgtggtgacatgcttctcattgttgaccactacataagtttttcatttggagcaccggtcctctacaggccataccgtctggacatgtcgaccaagcctgcaaaatgggtggaggtaaagaagctggagaactgggcactcttcattgggggtgatgcaaggagccctccattttctttcaagaacccggagcgctggggagggaggagcaactgcttgtactatgctcactactctcagccattgagcctgcatgggttgggtgatgatgcagatgctgtgtgggatcctaacactgatgacaacctcgtgttcaaaagaaactggtaccgccagctgcaggccttgtgggtgtacccaagcatgttctattcagcgggagacggccagtga

SEQ ID NO: 76310 - DNA, 464 bp, Oryza sativa
  Clone ID: PAT_MRT4530_76316C.1
gcacgagggaggacgaagaggaatcattgaggggggaattcagcaaagatgaatataaggaagagaagtcatggggagaggaactgaaggacgagaaactgctacgagagtggttgcagccgagtgaaggagaaaagtttcctaagcatcagtgggaggtgcgctggtgggtgtggaggaagctggaggaagcgttggatagcaacaaagatgatccgtcgagtctgatgaaagagagagaagaatggctgaaggaagaggaacacaagttccgcagtgagacagtgggaaaggactggcccaacatttctcacgttccttacatccgtgtgaacgagcagatcgtgcaaaatctttatatctgaaggctgaagcttcttcaaacgccatgcagagttgcagttcacacacattcaagggtagcatgcacagattgacagatactggatggcttcacttcttca

SEQ ID NO: 76311 - DNA, 285 bp, Oryza sativa
  Clone ID: PAT_MRT4530_76317C.1
atgtcgcacgtctcatcattctgtgggtcagctgcgggagttaagccacagggcatatatgagtataaatacaagccccccaggaggagaggggtcacgccacaacgcctcaaagccacaagccaacacacgtcgccagatatcaacatcagatataagtctagacataccccatccgactcctacggaggctggcaagagggatctagcaccatctctgatctcgccgagtacggattcgaggaggaagactaccctgttgtcgactacgggttggttatctag

SEQ ID NO: 76312 - DNA, 285 bp, Oryza sativa
  Clone ID: PAT_MRT4530_76318C.1
atgctgtgctggccgctctactctgagcagaagatgaacaaggttctcatggtggaggacatgggcatcgctgtggagatggtcgggtggcagcagggccttgtcacggcagaggaggtcgaggccaaggtgaggctggtcatggaatccgaggcaggcaaccaactcagggcgcgggtcacgacgcacaaggaagccgcagccgttgcatggggcgacggcggatcgtcgcgcgcggcgtttgccgagttcctgttggatgcagacagccgacagtctcactag

SEQ ID NO: 76313 - DNA, 324 bp, Oryza sativa
  Clone ID: PAT_MRT4530_76319C.1
atgaaggacttctttgtaatatctagagtccaaggactaaaatggaagatggtgacagatatttatctatccatccccatccccgtccccatccccatcctcaatcccatcggcgccacctactcgccttcgctccactgccaccgacggcaagacctctccgcagccgtcgcgtccatcccctctggtcctccctcttcccctgccgccaccgctcctcatcatcaggtggtgctgggcatcgaggaaggtggatctggctttgccagtggtcggggacgacagcgacaaccacatagcggaggcagcgccttaccgccttag

SEQ ID NO: 76314 - DNA, 1664 bp, Oryza sativa
  Clone ID: PAT_MRT4530_7631C.1
gttgtaaatctgcttcacttcgtattgatatatggtgtaaattataataaatacatatatgcatcttattatttttgtcttctatacatgtggcctggccttctctgcctgttgaactgctgatctctcttctgatgtccaccatcaaatttcagtgggacaacctgcttgatgtatgaagctcctgggaaattccttctttcctttgcaattgatcggagctctggcaaccagtaggcaacatactctccatcaggatcatatgtcttggcttgcttaggtatactgaagtatcggtcttctcttggatcattgccaactcctgctccatatgtccaattaccataatttgaagctgggtcataatccaataggcatgtttcaaaccattcagctcccattcgccaatcaatacccatatctcggaccagaaatgagcagacaatctgacggccacggttggacatgaaacctgtcgctaaaagctccttcatgttggcgtcaataagagggtaccagtatgtagaatcatttgctattctctgcttctcatatctctttacctcttcacaaatataacgaggcgaaagactgccagaagcaagccaaggggagaacttggtggagtagtctggacctagcatgccattcctggtctctttgtagactttcagctggtctttcttccagaagtactcatgaactcttcccagagctgcactctcccctcccacgaaatgcattcccttctctgcctttgtcatgcttaggcctagtgactccagtgttggtactgttccccaacctccaatttcatccaggccagaaccaggaggcggcccgagtgacggtggcaacttgctacaattccgaactgaggacttagattcaacagcctttctgaactgtgtatatacgtcaggcaaattgttcacggagaatggaagatcatcgacatggtacaatgtcgctccccagatgagctgcaacttgggatttcgaggcttcttctggttagatgctcctccctgaggaatcacaacttgctccaagcctttgcgcacaaggtgttcaaccaggagttcctcgctgcaggtttccttatgagcatagaccgtatgtgcagtgacagcctttgcaattgaagggaggatgtcttcaggtttcccatggcggatgagcaggtcgagaccttgtttcgtcaggttgcgcttcaaatcctccaagcactctatcaggaattgcgccctcaatgctccagtcttggggaaaccgaagtagtgggtgctccccgcggagatccggggatcgacgcagtagacggggaggacggcatcggaggcggcccacgcgcgcaccaccgcctcgttgtcgagcacccggaggtcgttcctgaaccacacgatggcaaccccgccgccgccgctccgccgcatgctcggcgaggtgtacctcaagaacgcctcgtccgccgccgcgccggcctcgtcggcggagagggaaggcaccgccgccgccgccagcgcgccccgcgacgacgacgacgacgaggagctcatggcggagaccgggatggataggaggacgcgcagcctcgcggattgcctcgggaggaggaggaattggggattgagaggggaggaagaggagaggaagtggagcat

SEQ ID NO: 76315 - DNA, 476 bp, Oryza sativa
  Clone ID: PAT_MRT4530_76320C.1
tccccgggctgcaggtgcctccttatctgaggtaattttttgcaacccttccgtgtcttgaattttgtacctgattcccgtgaggctttttacacccaaatgcttgataattgtcttgttatgtggttatgcctgaacattaacttaatttgtgtttgaattgtgattgctgcatgctgtgtttgcatttatgtgaatgtgtatgtgactgaaatagtgatatgtaagaaactctcactggttacacactgacagtctgtagagatatggggcaagagagtagtgcagaatttataggatgctacttctgacaatataggtttagtatgttaatgtgctctagttgctgattacttcgttctgtatatttttatgctgagaaatctctttgggtgttccttgttttggtagcatcaaggttcagtataatacattcatagtaatattacacactcttgattggtaaaatgttgctc

SEQ ID NO: 76316 - DNA, 195 bp, Oryza sativa
  Clone ID: PAT_MRT4530_76321C.1
atggcaaacgcgggctctggtggcagcggcggcgagggcaacggctgtggccccctcgcagatccgatgcggcaacaacactcccccgccctctcctgcacagatctagcagcgggcagcgacgtcggcggtaggatggactatggcgagtaccacgacgttggtggtggctgcgacgaagacatcagcttgtga

SEQ ID NO: 76317 - DNA, 795 bp, Oryza sativa
  Clone ID: PAT_MRT4530_76322C.1
atgtgggcaaatcaatcatatcaccaagttcttgatacggactcccacaatgagatggaggttgtattaatgttggcacggatgattggtcccaaggagaagaaggatagcaacatcattccctcacacccacgagcaattaaaagtgataatggcgagtataaccatgtcgttattaggctaagagttattggattcatagacgatcccaactcaatcttagttcgaacagagctgagtgtattcatggttgacattgaatcgaatgggtaccaacaattgtcttggaggatcaactttgccactgtctatccctacgtgagcttctatagcacagatatgtttgggcaaaagtctgccgcaaagagtttgttagagataagagttgtatccgatatggacatattttgtaatctcgggatcaaatcaactagcacgctcatacacctaaaggcaagcttttggacctgcactggagttaagcagatctcccaggcctcgtgtttttacatcaacacattcgcaacttaccatgcttctacccggacaagtggaacttataccgcatcagcacgggagatctctggtttcggattttctcaccaccgccaggacgtaatccccatgcccggaagttacttcaccaatgatgacagttaccacaccgccatgatcggcagctgcaatagcccagaacatgccggaaccgatgattgtgactgccaatcaatgaagttccacatcactattgcgttaacgacttaccctacttctgtctggatgactgcaacgtag

SEQ ID NO: 76318 - DNA, 574 bp, Oryza sativa
  Clone ID: PAT_MRT4530_76323C.1
cacagatcggcagaaaggaaggagaagcagccaagcagaggccccggtcttgtcaccggaaagagagaaaaagagaagtgaaattgaggaagaggaggagaatgtgatggcgcagcagcagcggcggcggcggcgcgggggctctctcgccgtgctcctcctcctcctcctcctcgcggcgctgctgctctccctctccctcctcgctcgcgtcgacgccgccgccacggtttcgtcagcgaatctcgattggaatgagggagaggtggcggtggcgactccgctaggacaggaggcggtggcggcggcggaggaggagggtgaccggccgccggagagggtggagatggagtccatcaacgactacggccaagccagcgccaacaaccgccacaacccgcatccgtgacatgacctgccaaccggagctggatcttaattagctactactagttaattatctatgcaatgttctcctcattatctaaaaaaaatgtaatgtgttctcctcagtataatactctctccgtcctacaatataagagattttaattttttaaaaaaaaaaaaaaaa

SEQ ID NO: 76319 - DNA, 600 bp, Oryza sativa
  Clone ID: PAT_MRT4530_76324C.1
cttcagttgagtgtaaaattaaaggtgtttttgattattattctgtgatgaacaattgacattgaagattattggttttgatatttggaatttatttacgaagtggttttggagatgattggatttcataggtgatctacaggtactgctgggtgtggtccggtcagaccgggcaggtgttgccgatcagaccggctgcacgtggttggtgaagattccatatgacatacgatggaggtattgtgtgcgtatgggatgtggagtcgaatttggaaggagtccaaatttggtatgagtggttatgtaaagtttgtttcttgtacgagaaggtttcctatgaggattaggacttctagtatgagtttggttcgtggctttaggctgcctacctcatgtataaatagagagggagcgtctaattggtggcacaccggcggtcagaccggcggcgtaagggcggtcagaccagcgttgacgacaggtgacaggagctgatctcggtggtcagaccagagatacaatctcggtcagaccgacggtaactaggcggtcagaccggcacatctacttcggtcggaccgcgatctgtcgaatttgagg

SEQ ID NO: 76320 - DNA, 619 bp, Oryza sativa
  Clone ID: PAT_MRT4530_76325C.1
aactctcgaaaaatgccaagaatctagctccatcctaattagtggcgataaaatcacaaaaagtgcgagaacgctacagatgatagtggtctctccctcactggctagctgccggtggtgaccatggagcatggtgagtgtcaagctgctgctgcgtggtggtgttctgtgtctcgccatggcaggtcgccgcgacgacgacggcgaatggtgcgggcggcggcgggaggccgcgggtgccggccgtcctggtgttcggcgactccatcgtcgacaccggcaacaacaacgccgtgctgacgctcacccggtccaacttcaggccctacggcaaggacctcaacggaggcgaacccaccggccgcttctccaacggccgcatcccgccggacttcctaggtcagcctatccgtctccatggtcgccggagtttcatctcgtcatttgagtcgtcgtccatggctgcatattgatcttgcgcagcgtcacggcttggcttgaaagacctggttccggcctacctcggcaccgacctcaccgacggcgacctcctcaccggcgtcagcttcgcctccgccggcagcggctacgacccgctcacctccactctcgtggtaat

SEQ ID NO: 76321 - DNA, 450 bp, Oryza sativa
  Clone ID: PAT_MRT4530_76326C.1
atgttgtttgaagaagggcaaacatgcacgttgctaaaccgacgcgtggtggacaagaatgaccgatttgtgaccggtctgtcactgctcatgtcgtcagcacacagccaccttcccacgacgtgctcgcctcaggcagaagtggagatccaccaaaacacaggagtagggtgttacgcttctcagcggcccgaacctgtatacatcgttcgtgtttcgtgctctttcgatagctagcaatctttccacatacagagagagcttgggatcatcaccctgagcccccggccgaaccggcaaaggggggcccgtgcggtctcccggtgaggagccccgcgctccgtcagggtcccttttataccgcgggtcagttgatctccaagtagaactcggagatatcggaccccacacgatatagtaacgacccagttctgtccgagtaggactcct

SEQ ID NO: 76322 - DNA, 589 bp, Oryza sativa
  Clone ID: PAT_MRT4530_76327C.1
atcaatgtgtgttttgattcttattctgtgatgaacaattggcatctgtgattattgattttgatatttggaatttattcacgaagtggttttggagatgattggatttcacaggtgatctacaggaggatactgttgaattgtggtccggtcagaccaggctagtgtggccggctagagttgatgcacgtggttgatggagattccatatggcatacgatggaggtattgtgtgcgtatggcatgcggagttgaatttggaaggagtcaaaatttggtacgattggttatgtaaagtttgtgtcttgtactagagggtttcctaaggtgtttaggactcctagtatgagtttggttcgtggctttaggctacctacctcatgtataaatagagggggagcgtcagaccggcgacgcaccagcggtcagaccggctagagcgaggcggtcagaccggcggcgacttcacatgcggcagacgattttcaggcggttggaccgagtgatcaacaccggttagaccggcggcgcgagcgcggttagaccggcggatcaacttcggtcagaccgatctacatcgaatttgagg

SEQ ID NO: 76323 - DNA, 948 bp, Oryza sativa
  Clone ID: PAT_MRT4530_76328C.1
caggcgccattcgccattcaggctgcgcaactgttgggaagggcgatcggtgcgggcctcttcgctattacgccagctggcgaaagggggatgtgctgcaaggcgattaagttgggtaacgccagggttttcccagtcacgacgttgtaaaacgacggccagtgaattgtaatacgactcactatagggcgaattcgagctcggtacccgctgggatgctatatgagggggtaaatggcagcctcgaaatcgacggaagtcggtctgaccgagattgatctgccggtctgaccgagtggatgctgccggtctgaccggtgttgaatctccggtctgaccgccgaagtcgcctgccgcgcctgccgccgctgccggtctgaccgccgtgctcccgccagtctgaccgccgccttgccgccggtctgacgctccccctctatttatacatgacgtaggcagcctaaagccacgaaccaaactcatactaagagtcctaaacaccttaggaaaccctctggtacaagaaacaaactttacataaccaatcataccaaatttgaactccttccaaattcgactctgcatcccatacgcacacaatacctccattgtatgccatatggaatctccatcaaccacgtgcatcaactctagtcagcaacctccgcccggtcgtaccggacacataaaataacagtgaatccgatcatcacctgaaaattgattatctccaaaaccacttcgacgataatctccaaatatcaaaaccaataatcacagaataagaatcaaaacacactttgatcttacaaaaacattttttttcatcatctacccgccgctagctgaatccgcacgggggagctgtcgtcacctcgttcgacacgaggaggagcccgctacccgcagtcggccgcgccgctcgtcacccgcagtcggccgtgccac

SEQ ID NO: 76324 - DNA, 1026 bp, Oryza sativa
  Clone ID: PAT_MRT4530_76329C.1
gacgacaaggacgtattcgatgtgagcaaaataatgggtgccaaatccctggaaacagtctcgacgacagggacgtacccggaataaaagagaaaaatatgagcaaaaaggctcaagaaaagataaagttaaaaaattctcttggttgtaaaatcaaaggtgtttttgattattattctgtgatgaacaattgggcattggagattattggttttgttatttggaatttattcacgaagtggttttggagatggttggatttacaggtgaatcgcaggttcattatttcatgttgactggtcagaccgggccggtgcggtcggctagagttgatgcacatagttgatggagattccatatgacatacgatggaggtattgtgtgcgtatgggatgcggagtcgaatttggaaggtgtctaaatttggtacgattggttatgtaaagtttctttcttgtactagagggtttcctaagatgtttaggattcttagtatgagtttggttcgtggctttaggctacctacctcgggtataaatatagggggagcgtcagaccggcggcaaggcggcggtcagaccggcggcagatcagcggtcagaccgacggtggtgacaggcgcggcatgcatctcggcggttcgaccgatcgatctacatcggtcagaccgacattcatcaggtggtcagaccggcgcatacacatcggtcagaccgcgatccgtcgaattcgagggtggtccaggacacggggcgggaatagcgcgggcgccacaggactacaacagggaggcgaggcccccaccgaccgtgttgcatatcgggagtacgcgcgcggaactcatagcaatggcgaggtgaggcaaacgcgccaggtccgcgcgcgccgacgcgcaagcgcgggtataatcgcccacgctgcaaccagccgcaggtacacagacgccctagtggagaaccaccagacccccgcgccaagaaattggctttattacccgcccagtctccggtgatgtgacaaccgatt

SEQ ID NO: 76325 - DNA, 1080 bp, Oryza sativa
  Clone ID: PAT_MRT4530_7632C.1
atgactgtcatgccatctctgcgccaccgggctgtcgccaagaagcccaaatggataatcattcttgtgtcactggtttgttttgtattgattggggcatatgttttcccaccacggcggtattcgcaatgctacctcttcggttctggtgcatgcgcaactttcaaggattggctcccatctgtaacccgcagggagcggactgatgaggagatcatttcatctgtagttcttagggatatccttgcaatgcccatgccagtgtcgaaaaatccaaagatcgctcttatgttcctgacacctggtacactgccctttgagaaattatgggaaaagtttttacagggtcaggagggaagatactccatctatgttcatgcatcacgtgaaaagcctgtacatactagttctttgtttgttggtcgtgatattcacagtgacgcggtagtatggggaaagatttcaatggttgatgcagagaagagactattggccaatgcactggcagatgttgataaccagttctttgtgttgctttctgacagctgtgttccactgcatacatttgattatgtctataattatctgatgggaacaaatatcagcttcattgattgtttccgtgatcctggccctcatggaaacgggaggtattctcctgagatgctccctgaaattgaggagaaagacttcaggaagggtgcccagtggtttgcaattacacgaagacatgctctactgattctggcagacagcctttactacaaaaagttcaagttgtactgcaagatggtagatcctggtggaattgctaattggtcagttacacatgttgattggtctgagggaaaatggcatccgaggtcatatagagctgcagatgtcacctacgatctcttaaagaatataacagctgttgatgaaaatttccatgtaacaagtgatgacaaaaaacttatgacacagaagccatgcttatggaatggatcgaagagaccatgctatctttttgctaggaagttctaccctgaaactcttgacaacctactgaagctattcaccagctatacatctgtttga

SEQ ID NO: 76326 - DNA, 1708 bp, Oryza sativa
  Clone ID: PAT_MRT4530_76330C.1
atggaacttccagttcacaagttccagggcatgccaacatatatgaccaaaagaaccgaacttccagttcacaagttccagcgcatgccaacatggcaacatatatgaccaaaaggcaacaggcagccaacctaaggcaacagacacagcgaacatctactagagttccatggggcctaaagttcaggtaaacctacataattaacaaaagactacttagtgagacaaccacaaccaacagctatccaagttcatggccatgaccatccaggtcagtttagttacaaaatatatccatagttttaggaatgtacaactagtccgctgtcatgctaaaagttgacaattgcaccagatgcagcaccaaccccaacatggttggggcctgagtttccattcgaagccacaggtccagacgaagctaggtgagtcaacatgacaggtaagggaggtgtgcctgaagctgacaagtctatgttcagcttactttgtatcacccttaaagcagcttcaaagaatgctgatttctgttgagaggctatcttttccaactccctctccttgcgctcttcctccctctccttacgctcctgctccttctctcgcgccctctcttcacgctcacactccttctcctgctccttctcctgccgctccctctccttctcacgctccctctcttcacgctctcgctcccttgcctcgcgctcctcttgtagttgccgcagaaggtcttcaacctggtttgtgttgtcatgatctgtcctcaatcttctgcgagggcgttgatcatcacgcgaattatcaccaaacactgctgatgagtcaatgagtccatcaccaatcatgaaacggccatagagagagcagggaggagaggcccccgagccgaacggcggcccaaggcccccgacggccggagctggccctccgcctgcttgtccgacggtgccaggcgcccccgacccctaggatggccccgaggccactgcgggaaggccgcacctatcgccctctgaccccgaggctaaccctgtgccgattcgatccgggagagagcagggagaagaggcccccgagccgaacggtggcctaaggcccctgacgaccggagttggccctttgcccgcttgtccgacgacgccaggagcccccgacccccaggacggccccgaggccactgtgggaaggccgcccctgtcgtcctccgaccccgaggtcgtcggcacagaagacgagtgcgccccgcgaggccgcttgggtgaagagcaccccagggatgcggcccctagcgaagaggatcggccccaccgaaaggtgcagcggcccatctactttgttattgaggccctccgggatgccaagacccgataccctcaggcccagaagatgctttacgctattctgatgacttcgaggaaactgcgccattatttccaggcgcatcgggtcacggtggttacgtcttaccccctcggccaaatcttgcataatcgagagggtactggacgggtggtgaaatgggcaatcgaactttctgagtttgatttgcactttgaaccaagccacgcgatcaagagctaggccctcgccgactttgtggtggagtggaccccagctcccaagctcgtctccgcccccgaggccagctcgagcccatcgcagctgcctcataccgccctctgggtgatgtagttcgacggcacct

SEQ ID NO: 76327 - DNA, 670 bp, Oryza sativa
  Clone ID: PAT_MRT4530_76331C.1
cactgtaaaatcaaatgtgtttttgattattattctgtgatgaacaattgggtattggagattattagttttattatttggaatttattcacgaagtggttttggagatgattggatttacaggtgaatcacaggtttatcattttatgtgaccggtcagaccgggcaggtgttgccggctagagttgatgcacgtggttgatggagattccatatggcatacgatggagttattgtgtgcgtatgggatgtggagtcgaatttggaaggagtccaaatttggtacgattgattatgtaaagtttctttcttgtactaatgggttttctaaagtgtttaggactcctagtatgagtttggttcgtggctttaggctgcctacctcatgtataaatagagggggagcttctaaccggcaactcaccggcggtcaaaccggcggcattgcggcggtcaaaccggcaggagcacggcggtcagaccggcggtggcgacaggcgcggcaggcgacttcggcggtcagaccggagattcaacaccggtcagaccggcagatcaatctcggtcagaccgacttccgtcgatttcgaggcattgggaaagggagacaccagagtgcccaaacactacacaacagtattgcaacagcggagacagagacggacagcgc

SEQ ID NO: 76328 - DNA, 1218 bp, Oryza sativa
  Clone ID: PAT_MRT4530_76332C.1
atggagagctcaagaaatggtgacgtcacggtcacctatgagcaccagctgttcggccggcgccggaacgtcgccggcggcggcggcggcttcgccacctacctcgacctcgtccgggaggaaggcgacgccggaaagatgccgccgcggcggccattgccggcgccaccgccgcatggcgtggcgagctggcggcgcacgtacgccgacggcgagctcgacgtcttcgccgctgagaggtacttcaagggcgcaatggacggcgccgacggctacaacaaggtggacctcgcgtcgccggtgatggcggcggcggcggcgaggccggccgtggcggtgagccggccggcgccgtggacgacgcgcgcgtcggtggcgagcgccgggtcatcgggctccaccgccaacagccaggccgtgctgctccgggagcagcgccgccgcgacaagtgctgcgcccatgtcggcggcatcctgcgctcgtgctccgggaagcggtcggtgcacgtcggcggcgccgcggtggcggcgacggagccggccggcgatccgggggacgagctgccaccggcgacggcgagtaggatcgagtggtacagagacctgaggctggacaaggccggagatggcgtcagccatggcggcgtggtcgccgctggtctcccgccaaatttgaatagtattggcgcggcgagagtggcggccattgggagggaggagggcacggcggcgacgtcggagtattcgagctcgagtttccggagcaacttcactctcctcgctccggtgaaggtcaccataccggcgtccggcggcgacgacgacgacgacgacgtcgggagcgagtcgagctccgacctgttcgagatcaagagcctgatgatcgacgactgccggggctacgagcccagcgaggcgagcgtccaatggagcgtggtcacggcgagcgccgccgacgtgtccgtcgccgcgtcggggcgcggcggcggcggcggcggcaaggggaggccggcggcggcggtggccgtgaggcagcagcagcaccggcggcaggcagaccggccggtcgggctgctggcgggatgcgtcagccacagggccgtcgacgtgtcggcggtggccgcggtgtgccgcccaccgccgccgcctggtgcgccggcgacggcgacgcggcggcgcagcgatttgtcccggttcgcgcacagtggtcacctgtga

SEQ ID NO: 76329 - DNA, 730 bp, Oryza sativa
  Clone ID: PAT_MRT4530_76333C.1
tccggcgacggcgtcgtcggcgacaagcggcgggcgcgtgcgcgggcgctcaaggacacgtgcctctccttcgcgctgttcaagctgctgaagcggcgtcctccgttcgttcaaggagagcggcggccgtctcgccgtcggccggtcgcttgtaagatcaaagtgtgttttgatgcttatttagtgatgaacaattggcatctgtgattattggttttgatatttggtgattactgtcgaagtggttttggatgattggactcacaggtgctgttattttatgtggtccggtccgaccgggcggaggttgccggctagagttgatgcacatggttgatggagattccatatggcatacgatggaggtattgtgtgcgtatgggatgcggagtcgaatttggaaggagtccaaatttggtacgattggttatgtaaagtttctttcttgtactagaaggtttcctaagctgtttagcactcttaatatgagtttggttcgtggctttaggctacctacctcatgtataaatagagagggagcatctaaccggcatctcaccggcggtcagactggcgacctactggcggtcaaaccgactaaggcgaggcggtcagaccgacgatcttcaggcggttgaaccgagtgatcaacaccggtcagaccggcggcacgagcgcggtcagaccgacggatcaacttcggtcagaccgctatccatcgaattcgagg

SEQ ID NO: 76330 - DNA, 268 bp, Oryza sativa
  Clone ID: PAT_MRT4530_76334C.1
actcttgggtttttcggggacaccgggaccgacccgggaatgccggccacggtcccgaaggcggaccagttttacaccttgggagcaccatgaaaacccggggaaccgagggaaaagctgtcccctgacaaaaactgacaacagacgacaatgtaaaaaaacatacaaaccgaaaggaaaaaaaggaaagcccgagctcccaaaaaagggagctaactaacataaaatgcttcaggccgaaaacccgttttccaaacgggaaaactga

SEQ ID NO: 76331 - DNA, 589 bp, Oryza sativa
  Clone ID: PAT_MRT4530_76335C.1
taaaatcaaaagtgtttttgattattattttgtgatgaacaattggcatcggagattattggttttgatatttagattttattcacaaagtggttttggagatgattggatttcacaggtgaatctacaggtactgctggattggatccggtcagaccgggcatgtgctgccggctagagttcaatacacgtagttggtgaagattccatatggcatacgatggaggtattgtgtacgtatgggatgcggagtcgaatttgtaaggagtccaaatttggtatgattggttgtgtaaagtttgtttcttgtactagagggtttcctaaggtatttaggacttctagtatgagtttggttcgtggctttaggctgcctatctcgggtataaatagagggggagcgtcagaccggcggcatcgcggcggtcagactggcgggcacacggcggtcagaccagcgacggcgacagggagcggcaggcgatcttggcggtttgaccggagtttaagctcggtcagaccgacgtgttccaggtggttagaccggtgcaataccttcggtcagaccgcgatccgtcgaatttgaggg

SEQ ID NO: 76332 - DNA, 525 bp, Oryza sativa
  Clone ID: PAT_MRT4530_76336C.1
atggggtcgggctgcacccccctcggccccgagggccgaggcgccccgacccctcgtgggttttcgctccgcgtgtatgggttagaccggtcagatcgcgggttaggtggcggcaggcggtctgacgcacgcctcgccccatcccgtcaggtcgagggcttctaggcgctcgtccccagctggagctagcgtgttacctcccagagatggcacgttagccctgatcagatatatgccaggcttcatcctaaccattacaggcaaaatgtagtgtgaaggagagccaacgtgcagatagctaagctgacgcgtggtggacaagaatgaccgatttgtgaccattctgacaccggtcatgtcgccagcagacagccatgattctacgtcgcgcctgctcccggcgaaagtggaggtaggtgcgggccgttccatcagaaggtgactcgaacggcaaccatgcaaatctccgtctatttctgagaaggtgggggaaatccccacagaaaaaagagggaaatggtgcat

SEQ ID NO: 76333 - DNA, 520 bp, Oryza sativa
  Clone ID: PAT_MRT4530_76337C.1
gggggggcaaaacacaattatttcaaaatccaaacgggagcttcccacaaaaaaaaaaaaaccgaaagcccaagggggaaaatcaagaggggggaaaaaataggttctttgagcagagggcaaaacaaaaacaaaaaggcccggggcaaattgcaagaccaccgggaaacctaaaggcccaatggagtttggtgggccgcaaaaaaagaaaccaccgggaaaagggtaccctctcactcggaaaccctttcctcggcttcatcatcagccccagggggggaggggaaagcattcaatttttcaaaaaaacgggccttcctctgctcggagggcaacttcttggggggggatctcttggggggagccggtcccttcttgggcgatttggccctgggaggaacggcccgggtggcaacaaggaccctcttggccaggggttccctgccctcaggggaaattcccttcttgggggcccccccaaagggggctgggaatttctcagggtccccctcacccctag

SEQ ID NO: 76334 - DNA, 342 bp, Oryza sativa
  Clone ID: PAT_MRT4530_76338C.1
aagagtaattttactataatggacaaaccagggaaacatcggcatgcattcgcacagggtaccacgatgacacgcgtaatatctagaaaaggaaaacggatctcgttaaatgttgaagggcggattgaacacacactcacaccctggatggaagggtctacctccctcccaaacggtcgaactctttttttactctgcaaaaccaagcatctggcgcggggggagtccaggccatttcctactgtgaactctaagcgagccgggactctgtatgaagggcaacgaatgaggccgcaaacaaatcccataaatagtgcccgagcaaaatgcacgcatgtacaa

SEQ ID NO: 76335 - DNA, 589 bp, Oryza sativa
  unsure (1)..(589): unsure at all n locations
  Clone ID: PAT_MRT4530_76339C.1
ccggccgggctcctatctttctttctccgtctctctccctgtcgccggcgagatccatacggctctctcctgtctttctccgtctctctccctgctccaagctgtcgttgctgcttccgtttctctccctgctcctctgccgctccatctccctgcgctcgtccttcccagcgagggcacggtgacggcggcgacggctcgatcttccggactcatcctgccgtcgactactgcctcaacggttgacgacctggccgacggatccatcggcgtggaggtcgggggatgctagatttagccacctcctacctccattggtgacatgctgacggcgacaacaggttgcatgtagataaatgcccttcctctcctctctcctctactttcccctgggtggcttggcaggtggatccatcggtgtggagatcggagacgggcggatctgggatgtccgatggtgacgccgccccctctttgttcttactcccagactggaagcaggagcagtgacgggtgattgataatgaattactcttgcgatttggcgatgtcaattcatgctattntttttatcttagaggatctgcat

SEQ ID NO: 76336 - DNA, 471 bp, Oryza sativa
  Clone ID: PAT_MRT4530_7633C.1
attactagtgaatttccgggcgtgacaggggtggacgaggacggcgacgacttggcgatcccgacggtggccttccagagcgacgacgacgaccggagcggcggcggcgcacggctgaactcgcggcggcgacggcgatgcaagggctaacgcggaggcggcgctacaggcggcggcgagctgaggcgagggtggcggcggatagaagaggtcccgggggtccttttataggggctaggcggcggcgatggaggtccacggcggtcggcgacgagaaggaaaggttagggttagaggagagagacgaatacgaatcaaactcgaatccgacgatttccaaacaaaattagacgaagtttctataagagaaaagatagaggagatcaaggggatcatttcccctctaccaatttgaccggatcgggaaagacgcggccgaatttggaaggggctgcggcggcgcgaggagga

SEQ ID NO: 76337 - DNA, 211 bp, Oryza sativa
  Clone ID: PAT_MRT4530_76340C.1
acgtacgcgtacgcgtgggcggacgcgtgggcggacgcgtggccggctatctatccatctatttactcagctttgcgtcctcccgcgaattcaccgcagcaatggcgtccttcgtcgccgtccagcctgtcgccgggaagggcctcgccggcggttcaatttccggcaggagctggccgcgggcctggcccggcgctttgccgacacccga

SEQ ID NO: 76338 - DNA, 1013 bp, Oryza sativa
  Clone ID: PAT_MRT4530_76341C.1
tttttttttttttgacatacaaaatcagattcaaatgaattaacattccacaaatgattgcaatgtcatatgcatttcacactccacaagtctgaaaatgcaatatcagtacatccatccactaattcaatacatatccaaagtctcaaatttcatcttcctcctacatcgagagcaacagcagcacattgctgagcatctgatgatgcaaacttgctgccaaacaaggagcgaaggaagctttggatttcacttccttgatgcctcagcttctcagtttcttcttcattcttccttgctacctctttctggtcctctaattgcttatgtagatcagctatctgcaattgcattctggctgatcccatcttctcagcatgcaattcactctctagctcacgtacatgatcattcattgcagcagctttggcatttttcttcatctctgtggactgcatgccaacattgcgaagaaaagttgattttggcagaacatgagctacagcttcaacaggagtctttggatctttgccttcttctgttggttgagcaacataggcctccatttgagcaatggcatcctttgcgttctcattaaaacctgacttgctactgcagtgggtgtccttgaaaatatcaatcgcagttggtggcacatccttaaatttggtttgcttcatgacatagcattgtgcaacatagctccgagatcctgtcatctggtggtattgaactaactcacggctatctttgttttttatacatttttccttatgctttggggtagaccacatgtccacgagttgtttccactcattgtcagtcatagagcttagcggtgaagttgttctaacttcatttgctggtataccattgaaatatttcttctttagcctgtatctcatctgccgctgtccatttttgagcaaatcagaaaatgcagctatcactggatcagcatctgcgttgattgtgaattgactctcaggtgatcccctcaacggtgaaggcat

SEQ ID NO: 76339 - DNA, 172 bp, Oryza sativa
  Clone ID: PAT_MRT4530_76342C.1
ataaaaggcccagaacaggaacttacaagtaagctcaaccataatcagaacgttttcctaaaatacacgacaaagagggtggcaaatcacacacaaaattagttacatatacccttcctttataattaaagaagtctgctgattatgctttctatatagattctggacccta

SEQ ID NO: 76340 - DNA, 815 bp, Oryza sativa
  Clone ID: PAT_MRT4530_76343C.1
ttgtgttgtaaatattggtgtcaaactaaaggaaagatcatttgcctgcaaaaatcttgaagtggtgaatattagatgctctaaagatgatggaagagtccatatgttagcagaactctttggtgctaatgggttacctcttgagaagatttttgttcgccgaacaggcagcacctaccttcgtaacatgaaaaaaatgagaaaaattgccagggatgagctgcgaaaagctaggtggttccagctgttaaatctataaacactacattctaaggacctgatggccaacaaagttagacttcaagcacactgattactcgtccaaagttgtgatcgagcttacctcggcccaagaaatgttacaaaataactatgcgattatttaggtaaattttagtttctttcctcgatctgcacatttcttccacttgggcatcaacctttgatgggcatgtgttgtgctgtgtgctgatgcttgaacaaagtttgttttagtcagaagtttctcatgctcctctgggcatgatgaaaccgtgactgccaattgtaagcagctagcttcaggcagtgctacagaatggttggttttacttgtgtgtcatgcttgagcttgcattgtttgcgtaacatccctagattggtttcacctgaaatgagcttcatcatgtactgtatggcatctgctgatgagcaggtccgaaacacggatgttacagtgttagttggtaggctattattaaagttttctttgtttctagtttcactctgtcaacaagtatagattggaaaaaaaaaaaaaaaaaaacctcgtgccg

SEQ ID NO: 76341 - DNA, 701 bp, Oryza sativa
  Clone ID: PAT_MRT4530_76344C.1
ttttttttttttttttttttgtttttctgctctgcaaatactgagcaagctggacatctgacgaaacataatgaaatatttcgtggatggctcaattaaccaatgagtttgttcccgctcacaatttatcagcgattctccgcccaaaaaagctacaggtatagcaaccctcttagaaacctaagaaaccaggggtgggtaagatgtcaacttcctattacatgaacaaaaaaaggtagaaactagatgtagatcaaatctacatcttagcttccttagcagcatcctggtattcagcctcaggagtctggtcaccaccactgctgctgctgctgccgccgccactgccgccaccgccaccttgttgcatgtgctctccaatctttgaaactgccttgtttgcagcctcaagcttctgcttgatcttctccaaatcatcctcagccattgctgctcttagatcagatacagcagactgaatctcattggtgacttcagcaggaaccttgtccttgtactcactgacactcttctcaatgctgtagatcgtggtgtctgcagagttcttcagatcaatcaatgatttcctttcctgatccttctgaaaatgtagctcagctcctcaccatcttcttcatatcactttcagacaaaccgcctgaagactttatagtgatttcttgctctttgccaggggactt

SEQ ID NO: 76342 - DNA, 1039 bp, Oryza sativa
  Clone ID: PAT_MRT4530_76345C.1
gacgacgctgctctgcgaggccatcgcccgccgcctcttcccgcgcgactccagcccagactacgcccagctctcggacgagcactacgcctacagcgtcctccgccgcctccgccgggaagcgctggtgccgctgcgcgacgttctccagctccccgaggtgtacatgagcgcccggcgatggtccgagctgccctacacccgcgtcgcctccgtggccatgaggcgctacaaggccctgttcaagaagcacgacgaggaccgcttcgcccagtacctcgccgccgtcgaggagggcaaggccaagatcgcggcgggcgcgctcctgccgcacgagatcgcgtccgccgccatgcgcggcgaggaggacgacgtgtccgagctgcagtggcgccgcatggtggacgacctccgcgccaagggctccctgcgcaactgcatctccgtgtgcgacgtgtccgggagcatgtccggcacgccgatggacgtgtgcgtggcgctcggcgtgctcacgtcggagctcagcgaggagccgtgggcggggagggtgatcaccttcagcgcgaggccccagctccacatgatcaagggcaagaccctcgccgagaagctgcggttcgtgcagaggatggactggtgcatgaacaccaacttccaggcggtgttcgaccagatcctccgcacggccgtcgacggcaggctgccgccggagaagatgatcaggaccgtgttcgtgttcagcgacatggagttcgacgaggcgtcgaccaaccactgggagaccgactacgagaccatctgcaggaagttcgggagcgccggctacggcgacgcggtgccgcagatcgtgttctggaaccttcgcgactccacgtcgacgccggtgacgtcgacgcagcccggggtggccatggtgagcggcttctccaagaacctcctcaagatcttcttgcagaacgatggcgtggtgaacccggaggcggtcatggccgccgccatcgccggggaggagtaccagaagctcgtggtgtttgattag

SEQ ID NO: 76343 - DNA, 947 bp, Oryza sativa
  Clone ID: PAT_MRT4530_76346C.1
gaagaaaaattcaaaaagatcaaccacgtatacacttacatgtatggttccgatgaagaggatgaatccaaagtagcagcagccgagtgggtcaggagcaagaaggttgtgccatgtcaatgggtgagaagttctgggaaaagaggaaaatttgattttgatatcaccaaggttgataagattttcgatttgtgcttcgggaaaaacaaattcaacttcctgctggtcatgtaattccatcggctgaggaactaggcaagaggaggtattgcaagtggcataattttggttctcataataccaatgattgcaaagttttcagacagcagatctaggtgtccattgaaggggggaagattaagtttgatgattcaaagaagccgatgaaggttgatagtaatcctttccctgttaatatggtgcatacagctagaagatcagtcgatgaaaggaaaactcgaggttgtcagttgaattcaaccaggattatcaacaaatatcaaagaaggtatgccaaccagcaggagaggtattgcgaagaagatgatggtggatttgatcctcattgggactgtgggttctttagattttgctggaatgaggagatgaggttgccatccatcaatgattgcctgggtgcagtaataacgcagggagtttaagccgaccttacaatagaggcaatcggctgaatcaggaaaggatgtctgttcgttagagattgggcccggttaatcaagattgctaccaggatggatatgagggcaggaagactcaatgggtccttctggtatttttcacaaaaaatcagaagagaagggttcagagaataaggaatagagaacgctttcaagaagtagagcaggaaatcaaccatcggggttagaccataccagcagccgccaaggagatgcaaagtcgatatgctcgatgttgtcaaggctgag

SEQ ID NO: 76344 - DNA, 1717 bp, Oryza sativa
  Clone ID: PAT_MRT4530_76347C.1
atggagaacgcaccggccaccaccacctcctccacccaagacggcggcggcggcgccggcggccatgtcttcctcctcgctttccccgaggcgcaaggccacgtcaacccgatcctgcagttcggccgccacctcgcggcgcaccacggcttcctccccacgctcgtcaccacccgccacgttctctccaccgtcccgccccctctcgcccccttccgcgtcgccgccatctccgacggcttcgactccggcggcatggcggcctgcggggacgccagggagtacacccggcggctggcggatgtgggctcggagaccctgggtgtcctcctccgctccgaggccgccgcggggaggccgccccgcgtgctggtgtacgacccgcacctcccgtgggcggggcgcgtggcgcgcggcgctggggtgccagccgccgcgttcttctcgcagccgtgcgccgtggacgtcatctacggggaggtctgggcggggcgcgttgggttgcccgtcgtggacgggggcgcgctccgggggttgctgagcgtggagctcgggccggaggacgtgccgtcgttcgtgaaggcgccggagtcgtacccgccgttcctggaggcggtgctgggccagttcgacgggctggaggacgccgacgacgtgctcgtcaattctttccaagaattggagccgaagagagaattggagaaggtagaagatttgatagctgcaatgttgttacttaatcaggaggcagattacttggcatcagcatggcgttttaagacgattggtccgaccgtaccatccttctacttggatgacgatcgcttacaaccaaacaagaactatgggttcaacatttctgacagcacttcaccttgcttggcgtggctagataatcagcccccttgctctgttgtctatgcttcctatgggactgttgctgatcttgacccaactcagttagatgagctgggcaatggattttgcaattccggtaaaccgttcctttgggtcgtgaggtcctgtgatgaacacaagctatcagaagaactccgtgacaagtgcaaggagaggggcctaatcgtttcttggtgtccccagcttgaggtcttatctcacaaagccacaggctgtttcttaactcactgtggatggaactcaacaacagaagcaattgttactggcgttccactgttagcgatgcctcagtggacagaccaaccaactacagcgaagtacattgaaagtgcatggggaaatggtgtacgcgtacatcgggacaaggaaggcatggtgagaaaagaagaggtggagagatgcatcagagaggttctagagagtgagaggaaggcagagtacaggaaaaatgctaataggtggatgaagaaagctaaggaagccatgaagaaaggagggagctcgaataagaatattgctgagtttgcctcgaagtacgcttcatattgacatggaatagttttcatccagctaccaaggtattttatttagatctctggttatgattacaataatggagggagaaagtttagttctcctatggaatagttttcatccagctaccaaggtattttatttagatctctggttatgattacaataatggagggagaaagtttagttctcctatgttattacaataatggagggagaaagtttagttctcctattatagtttgctcaacgatatttggacaag

SEQ ID NO: 76345 - DNA, 314 bp, Oryza sativa
  Clone ID: PAT_MRT4530_76348C.1
gagggcaatatcacacgagtttgggaccaaggcaccggaaaagggggttccaaatccaacgggatttcataacccaaagacccacaaatttggcgggctaatggggggagggatgagctcgaagcctaaaactcgttgaagggaagggccccgatcttccaaacgaggtacggggggccgaacatgacgacggtgatgagcgtaaagggggcggcaatgcccatcacgtgggggccgaacgggggggcctggaacggccaccctttcttgggcaggcccagctggtggtcggcgaacatgttgatggccccctg

SEQ ID NO: 76346 - DNA, 520 bp, Oryza sativa
  Clone ID: PAT_MRT4530_76349C.1
gaaaggggaggggaaaccaaaggttttccggaaaaagggggaacccccaaaaaggggcccctctataaagtccagggcccccccaatttgaaaacccaaaattggaaggggggaataaaagcccaaatggaaaattttttaaggggaaaccaattccgtccaaaaaaaccccaagcccaagggggataacccaagtaaccccccgggcccgggctgaagggccccacccccccctctaaatccccaaaacaaggcaaaggacgggtttccccccccaaaccccggaaaacccgccccaagggcccccccttggtttccgggcttcttggcaagacaaaaaccaccaccggggtaaccccccgaggaaatcccacccaaaaacccccccttaaggcccaattttggacccatttaaacagaacccccccctttcacccaaaaaccctttcccattatacccaaatccaaaattcccggttaaaaccccacccccttcccagggaagaggggaggccctggt

SEQ ID NO: 76347 - DNA, 964 bp, Oryza sativa
  Clone ID: PAT_MRT4530_7634C.1
cttctccccctactccaaaaacttcacaaaatcaccccaaaaaagatccattctcggagcacaaaagaatcttttgcaaatttgtatcaaacaaaaatggcagttcttggtctatccactgccttctctcctcccagaggttcttgtatagctgtgaggatcaggcatggcgctaggtcagcaaggagcaacctgtccctgaggaggaggagcgccggcggcggcgccattggcgtccgtgccgaggtgagcttcgtcgacggcgacgaggcgaagcggctggtggcggaggaggggtacacggtgctggacatccgggaccggacgcagcgcgagagggcgcacatcaagaactcagcgcatgtgcccctcttcgtcgagaacgacgacggcgacattggaactattataaagcgcacggtacacagcaacttcgccggcctgttcttcgggctaccattcaccaaacggaacctagagttcaccaagatggtcaaggataagttctcgccggagagcaagctgctggtggtctgtcaagaagggctcaggtccacgggagctgctgatgtattggagagagaaggcttccaaaatctggcatgcatcaaatcagggcttcagacactgaagccaggaacatttgaatctgttggcaaaagtgagctgcaaaacgcagggaaagcaggacttgtgacggtgcaagggaagatttccgctgttcttggaactgtgttgataaaattgtatctcttttcatgcattttggttctcctcttggggattcatgttcccattgcaaggttaacttagcccaatgtatttcctcttgaatacattattttgctcgcatgcatcctctccttttccaattgtatgtttggtttatcgaatttttgttgttccgaccaaaaaaaaaaaaaaaaaaaaagtaatggttcaggatttaaaaaaaaaaaaaaaa

SEQ ID NO: 76348 - DNA, 756 bp, Oryza sativa
  Clone ID: PAT_MRT4530_76350C.1
atggcgcgcagctcccccacgtcgccatcttcccgttcatggccagggggcacaccgtcccgctcatccacttcgctcacctcctccgccgccgcggcctcgccgccgtcaccctcttcccggaccaccatctccccggcgttcgtcgaggcgatgtcggcgctccgcccgcggctggaggcgtcgctcgccgccgcgcggccccgcgtcggcctcctcgtcgccgacgcgctcctgtactgggcgcacgacgccgcggcggggctcggggtcccgacggtggcgttctacgccacgagcatgttcgcgcacgtcatacgggacgtgatcctgcgtgacaatccggccgccgcgctggtggctggcggcgccggcgccacgttcgccgtgccggagttcccgcacgtccggctcacgctcacggacatccctgtccccttcaacgacccgtcgccggcggggccgctcatcgagatggacgccaagatggcgaacgccatcgccggtagccgcggcctcatcgtcaagacggcctggcccgtcggcccgctttgcctggcacggcagccgtgccgcgccgccggcgacagcgctgccgccatcaagccgtcgtggatgcggtggctggacgagatggcggccgccgggcgcgccgtgctgtacgtcgcgctcggcacgctcaacgccgagccgcacgcgcagcttcgggagctcgccggcgggctggaggcgtccggcgtggacttcctctggtag

SEQ ID NO: 76349 - DNA, 1440 bp, Oryza sativa
  Clone ID: PAT_MRT4530_76351C.1
atggcggcggcggcggcggcggcggattcaccatgtagtcgagctgttcgtcatgacgcgcagctcccccacgtcgccatcttcccgttcatggccagggggcacaccgtcccgcccatccacctcgctcacctcctccgccaccgcggcctcgccgccgtcaccctcttcaccaccccggccaacgcgccgttcgtccggagagtgctcgacgacgacgccgtggccgtcgcggagctccccttcccggaccatctccccggcgtcccgccaggcgtggagtgcctcgacgggctgtcctccttcccggcgttcgtcgaggcggtgtcggcgctccggccgcggctggaggcgtgtctcgccgccgcgcggccccgcgtcggcctcctcgtcgccgacgcgctcctgtactgggcgcacgacgccgcggcggcgctcggggtcccgacggtggcgttctacgccacgagcatgttcgcgcacgtcatacgtgacgtgatcctgcgtgacaatccggccgccgcgctggtggctggcggcgccggctccacgttcgccgtgccggagttcccgcacgtccggctcacgctcgccgacatcccgatggacgccaagatggcgaacgccatcgccggcagccacggcctcatcgtcaacaccttcgacgccatggaaggccactacatcgagcactgggaccgacaccacgtcggccacagggcctggcccgtcggcccgctctgcctggcaaggcagccgtgccacgtcgccggcgacggcgccggcgccgtcaagccctcgtggctgcagtggctggacgagaaggcggccgccgggcgtgccgtgctgtacgtcgcgctcggcacgctcatagccgtccaggaagcgcagctcagggagctcgccggcgggctggaggcgtccggcgtggacttcctctgggtagtgcggcccagcgacgccgacgtcggcgccggcttcgaggagcgcgtggaggggagaggactggtggtgcgggagtgggtggaccaatggcggatcctgcggcacggctgcgtgaaggggttcctcagccactgcgggtggaacgccgtggtggagggcgtggccgccggcgtgccgctggcgacgtggccgatgggcgtcgagcagccgctccacgctacgctcgccgtcgacgagcttaggatcggggtcagggtgccggcggcggcgacgacgggtcacggtgtggtaagcggcgaggagatcgcgcgcgtggcgagggagctgatgggcatggacggcgaaggagagaacggcgcgggcggcgaggcggcgaggaacgcggcggcgctggcggcgaaggcgagggaggcggtggcggagggcgggtcgtcgtggaagacgctggaggagatgctcgccgttgtctgcctaccgaccgatccaagcgagtga

SEQ ID NO: 76350 - DNA, 169 bp, Oryza sativa
  Clone ID: PAT_MRT4530_76353C.1
ggatcaaaggaatgaagtttatatgtggatctatgtaacggtacgaagttacagagagaaagacgtggggcgtaaacagatccaatgatgcaatatgctggtgactaagccacaaggaggattctggtatcttgaaggagaaattcctatgaaagaacaccttttactg

SEQ ID NO: 76351 - DNA, 693 bp, Oryza sativa
  Clone ID: PAT_MRT4530_76354C.1
atggcgccgtctctgctcggggtcagctccctttcctcctcctctctctcgttgcgagtgtttgctgcgcaaacgaaggatgtgacggggttggggttcaccaagtcgctggccatgacggtgctctcggagatcggcgacaagaccttcttcgccgccgcggggaccaattcatactgtttgtttgctaagaacgggatcttctacttagccaagattattctggccatgcgctatccccggaagcttgttcttgctggttgtctcacctcattaacagtgatgacggctctatcagtttcacttggttgggttgcgccaaatctggatgctaattttaaaagcaacaaagcagaatcgaaaagtaaatctaaggcaaatgatgataaaaagaagcagcaaagaccatttgttttgcagttcttctcaccaatctttataaaggcattttccattacattctttggagagtggggtgataagagtcaaattgctactattggtttggctgctgatgaaaatccattcggtgttgtcctggggggagttctgtacgagctacatcttctgtttcccttacactttttaaatggtcggattgtcgagtggagtgctattcctgctgtttggtatcatgtcatacttgtcaggaccagaaggagaattataatgcccccagaaagtcatgcataa

SEQ ID NO: 76352 - DNA, 992 bp, Oryza sativa
  Clone ID: PAT_MRT4530_76355C.1
tggtccggattcccgggtcgacccacgcgtccgcgccatccctgacaccgatcgagagagagagatcgcaccgatcgacgtacggtacgagacgaccatggcgcgtcctcgcttcgccaccacggcgccattgttggcgctcgccgtcctcgccgccgtggtgtccgtcgccgtcgccaccgctcccgccggcaaggaccccggcggcttcgtcgtcaccgggcgcgtctactgcgacccctgccgcgccggcttcgagaccaacgtctccaaaagcatcccaggggcgacggtgtcggtggagtgcaggcactacggggcggggagggagagcctgaaggcggaggcgacgacggacgagaaggggtggtacaaggtggagatcgaccaggaccaccaggaggagatctgcgaggtggtgctggacaagagcagcgacccggcgtgctccgagacggagaagacccgcgaccggtcccgcgtcccgctcaccagcaacaacggcctcaagcagaacggcatccgctacgccaaccccatcgccttcttccgcaaggagcccctcgccgactgcggctccatcctccagaagtacgacctcaaggacgcccccgagaccccatgatcatcatcatatatatgtttctccttagcagtgcatcaaacgttccttcaaatttgagcctctccgaagctcaagatggagccgccgccgcccgtgtagaagtaaattaatctacgattgcagcatgcaataacggagtttacattgccgatcgatctgttttgtacgtacctaagtaatttggagacgctgatgtgattctttgttcattcatcaagagtctttgtgtgtgattgtaccctcctcctcttgttgctctgtaattacctactccactattactaagtacttgttgatctgcggggggcgcctatatacattgctgtaactgtgtgacacacattaattactccatccatttcatact

SEQ ID NO: 76353 - DNA, 327 bp, Oryza sativa
  Clone ID: PAT_MRT4530_76356C.1
gatacttgacgccaccgccaggggaagaaagggggggtttattaacataagagcgcgggatgaaaacacccattcaatgtactacagcatgccacgggagcatcggaagaccatcgcggtacctgtcactaatacgggacaactccacacgcaatgagatgacctgtcaactagcgatactagcacacgcggcaaaatgtagcccgaggattttactgatccaagaacaagaagccgctcccctggaccgaaaggccatactattgctgaacaaaaggcgaaaataagggaatacggtatgagtccaaggtcaccacccaaaacgat

SEQ ID NO: 76354 - DNA, 3796 bp, Oryza sativa
  Clone ID: PAT_MRT4530_76357C.1
ggttattcaagctgacaccccaaaggtgggaagtattgtatctggtgttgtggagcgacttactcctgcagcagttgttgtcagtgtaaatggcttctgcaagggatcaatacttaatgaacatctagcagaccatcgtggtcaagctgctcaactgaagaatttgttgaagcctggccatgagttcagcgagctcttagttctcgatgttgaagggcaaaatttagttctttcagccaagcaatcactcatcaactgtgcaagtgacattccatcagaaatatctcagatgcatgcaggatctgtatttcatggttatgtttgcaacatcatagaagctggttgttttgttcgctttcttggacatctaactggtttttctcccaaggataaagctgttgatcgttcagtagaaaagctgtccaatgccttctatgttggccaatccgttcggagtcatatcctaaatgtaaatgcagaatctgccagagtgaagctttctcttcagcagtctatgtgctcttcagcagactgttcatttgttcaaggatactttcttctagatcagaagatcacagaactgaagtattcagatccaagtagttctttccatgactggttgaacacttttgccattggtaacttggtggaaggggaggtgggagcgatcgaagaatatggcgttatcctgaacttccaaagccatccggatgttgtcggtttaattgaacatcatcaacttggtgacagtagtgtagaagtgggctcttctgtgaagggtcttgttattgatttatctgatggagttgttaatatatcccttaaatcagaacttgttcgcagtgtcagcaaagttggaaaaaagaagaaacgtcacagagctgcagttatggacttggagctacatgaggaagtgaatgcaatagtggagatagtcaaagagagtcatgtggttctttccatccctgagtataattatgcaataggttttgcaccactgatggattacaactcacaactacttccttgctgcaactatgaaaatggacagcgcattactgttgttgttggaagtatgccaagttctggtccgacaggaagacttctcctactaccaaaagcatcaggcaagaattctagtgttagcagttccaaaagagcaaagaagaaaagtgacttcaaagttggatcacttgttgaagcagagattattgatatcaagccacttgaacttcttctaaaatttggttccaatcttcatgggagaattcatattaccgaggtatttgatgatgattccaatgattgcccttttagtgaactccaaattgggcgaagtgtccaagcgagaatcgttgctgaggctgaacattcaggaaaaggtggcaaaaattccaaatgggaactatcaattagaccatctttgcttcaaggagggttagaagactttactcctcctaaagcagaattaaggcattcaattggtggcattgtgcatgcttatgttgtcaaggtggatagagaatggatctggttaactgtatcaagagatgttatggcccatttatttattcttgatagttcagctgagcctggtgaactagaaaagttccaacagcgctatagtgttggccaggcagtgaaaggacgcattattggtgtgaacagggagaaacggttgttgagactgaaagcacttgacagtcagagtttgccagagaatataggcgaaacacaaaaaccactctctgctactgttgaacatacaaaacaaggagatatcattggtggacgtattcaaaagattctacctggtgttggtgggcttgtcatccagattggacctcatcttcatggaagggttcattatactgaaattgttgattcatgggtgcaagaacccatatctggatttcatgaaggtcagtttgtgaagtgtaaggtcctggatgtaagccgttcatcagaagggtctgtcagagttgatctatcacttcgctcatcaatgtgcgcaaattctaaccagtcaagaagattgtttgatgattcgagaattcgtacctcccgatttgagaagatcaatgacctgtgcccgggaacagaggttaagggctatgtgaagagcgtgaattcgaaaggatgtttcattatggtttctcggactattgaggctaggattattctgtcaaatttatctgatgaatatgtggaaaatcctcaaaacgatttcccagttggactgcttgtacatggaagggtcttgtcctcagaaccacaatcagggaaagttgaggtatcacttaggaagaatactggtagcaaatctcaaaaatcagatgatattagttacagcgatctgcatgttggggacataattgctggtcaagttaagagggtagaatcctttggactatttgtgacaattcagggcagtgaattggtggcattgtgccatgtatcagaactttctgatgaaccagtccttgatattcattcttgccacaaagctggtgataagattgatgaggaacggcatcgagtatccattggaatgaagaaatcttacatcggacctgattctacgggtgatacaagtgatgatgaggatgacgaaatagttcctgaggaaatcagtcgtaatcctgtgatgggtagagatcggaaccatgcgttagttcttccgaaaccagaatccagggcttcagtgctgccactccaggtctccttggatgaatctgaaggttcagaccaagagaatgataataaaggtcaagaaattgctaatggaactgaagtagatgataaaaagagcaacaaaaggttgaaggagaaggcgagaaaacaaagagaattagaaatcagtgccttggaggaaagggctttacaaagagatataccccagactccagatgaattcgagaagttggttaggagctctccaaacagtagcttcgtctggataaactacatggcatttttgttagacctagcagatgttgataaggcccgtgcagtggcggaaagggctttgagaacaataaacatcagagaagaggaggagaaacttaatgtttgggtagcatattttaatctggaaaatgaatatggcagtccaagggaggatgctgtcaagaagatattccaaagagccttgcagtattgtgatcccaaaaaggtgcacttggctcttcttgcaatgtatgagaggacagaacaatacacactagcagatgaacttcttgatagaatgacgaagagattcaaaacttcctgcaagatttggttgcgctgtattcaattgtccctcaagcaaagcaaggatgttgagtgcatcaaattgatagtgaagcgtgcacttctaagtctacctcagagcaagcgtagaaagttcctatcgcagactgctatcctggagttcaagtgtggagtgcctgaggaagggagatccagatttgaactgatcttaagagagtaccctaaaagaacagatctttggagtgtttacctagaccaagaaattcgccttggtgatacggaaattatacgggcattatttgagagagtaacatgccttagtcttcctccaaaaaagatgaagatatatttgattcctagaaaaatacagtttgtttctgagaaatgtaatccagagctgagtgattcctcatactatgctcaacttccgcagtttttattcaagaagtacctggaatatgagaagtcgcaaggtgatgaggaaagaatcgagcatgtaaagcagaaggcactggagtacgttcagagttcactggcctga

SEQ ID NO: 76355 - DNA, 367 bp, Oryza sativa
  Clone ID: PAT_MRT4530_76358C.1
ggtaaatctcccgactaccgatttcttcgccgtgtatacgtgtcacgggttaacaggggagggccgccgcaacctacatgtggcaagcagagcaggagaggggaggccagtcttagttgagtcttttgtaaaaaaaaataatggaaccaatgaatgcaatcgcactggatgaacatgtgctggattctactatccgccagaggaagcttgtgggtgctactaaatgtgctgaggtcaatgacacccccaacctttttcagaatggtcccaaacagaaactcgcttttattccttgattcgactggacataataaagtcccacgatgattccgcttctgcctattgaccatttcttgtagaggtacaa

SEQ ID NO: 76356 - DNA, 618 bp, Oryza sativa
  Clone ID: PAT_MRT4530_76359C.1
ccggccggggtcatagaatacagagacgagacgacctccatccggagtctttcagagtctttcagattcagaaaacccactactgccaagaagccctgcttctcttctacttcctctcaaagaaagagaccgagagaagttcatcttgcaagccaagaactctcgtcctctccttctgaagcgggtggcatggggaagctgtgttgcagccagacggacgacgatccggagttcaacctgctggggctgctcgtcgccgtcgtcctcgcgttgctgctgctgatgctgtgcacgccgccgcggcgcaggcgctgcgtggtgtacccctgctactaatggcggcggcggcggcggtgctccgatcctctcagatgagcagaggggatcgaggagaagcgacgaggcatcgtcaagctttaaagccaggcataggttccgatcttttctgaccgatttgcatatgctcagtttccgaaataatttatgctgaatttcgaattgtgatagactcgtttctgttgcgagttgttagaatttttatgtgcatactgttgatttgcggcctgatggaatatatgaaatgatttggagaaaaaaaaaaaaaaaaaaggggcggcc

SEQ ID NO: 76357 - DNA, 621 bp, Oryza sativa
  Clone ID: PAT_MRT4530_7635C.1
gctgctgatgtattggagagagaaggcttccaaaatctggcatgcatcaaatcagggcttcagacactgaagccaggaacatttgaatctgttggcaaaagtgagctgcaaaacgcagggaaagcaggacttgtgacggtgcaagggaagatttccgctgttcttggaactgtgttgataagtgcctaccttttcatcacattgttccctgaccaggctgaaaagctttttgacttggctggaatcaaattgtgatcagaattgtatctcttttcatgcattttggttctcctcttggggattcatgttcccattgcaaggttaacttaggcggacttggggagatcttttcatgatgaaaagaaagttaggctcagtgtgtaatatgtagggaattgttggcatatcccaatgtatttcctcttgaatacattattttgctcgcatgcatccctctccttttccaattgtatgtatggtttatcgaatttttgttgttccgacaaaaaaattacgcccttgcagagtaatggttcatgatttcaagctgagcacacaatagaaagtttaacaaaaaaaaaaaagtgtagtctgtagattgtataccaataacatctgaaa

SEQ ID NO: 76358 - DNA, 450 bp, Oryza sativa
  Clone ID: PAT_MRT4530_76360C.1
atggtgaagatcaagtacgggccaaatccacataatatacaagaggttgaagtgaagccgctaacgacgaacaacctaacagctttcatgaagaacttcctcgagaaggaagcagaaatgagcaagcctcgtccaagaaatacaccagtaaagccaggggcgcaggctagaaagcctgtgaaatcagttgctaagaagccacaagtcacaccaaagatgaagaaggtgtggcgggtgaaacagatgacattcgatggagagttcaaagagaacttgccaatggaggaggtgtcagtcgaggagttggttgccgatgaggatattgctggcatcttcatcttcattagtaacattggtaggttcatcgcccatatcggcagcaacattttcgatatcttccatggcggcactgaaaccgatgatagtcggagctatttccctatatggtaa

SEQ ID NO: 76359 - DNA, 124 bp, Oryza sativa
  Clone ID: PAT_MRT4530_76361C.1
aaacatgagagcctacgagttcattatttatttaacacacaggcttacatgtcacatgtgacgcaatttgtgctgtttccaaactacacgacatgatctgccgataactacgtctatcatacag

SEQ ID NO: 76360 - DNA, 2080 bp, Oryza sativa
  unsure (1)..(2080): unsure at all n locations
  Clone ID: PAT_MRT4530_76362C.1
gcttcactccactcgccgtcaccccccaccttgacctccgcttcgaattcgaattcgaatccgatggattcgattcgccgtcgatctgccggaggcatcctcggcatcctctttctggtgctgctccggtgggcgggggcgggggatccctatgcctactacgagtgggaggtatcgtacgtgtggggtgcgccgctgggcggagtgaagaagcaggaggcgattggcatcaacgggcagctgccggggccggcgctgaacgtgacgaccaactggaacctggtggtgaacgtgaggaacggcctggacgagccgctgctgctgacgtggcacggggtgcagcagcgcaagagcccctggcaggacggcgtgggcggcacaaactgcggcatcccgccggggtggaactggacgtaccagttccaggtgaaggaccaggtcggcagcttcttctacgccccctccaccgccctccaccgcgccgccgacgggtacggcgccatcaccatcaacaaccgcgacgtcatccccttgcccttccccctccccgacggcggcgacatcaccctcttcctcgccgactagtacgccagggtgcactgggccctgcgcgacgccggcgacgtcggccaccccctcggcccccccgacgggggggtcaacaacgccctcggcccctaccgcgacaacgacacccccgtccgaccaggcgacaccctggagcgcatcgatctcgacccggagaggacctaccgcatgcgcgtccacaccgtcggcgcctccaagagcatcaatttcggaatccaggggcactacctcctgctcgtcgaggccgagggcgtctacacttcacagcagaactacaccaacatggacatccatgtcggccagtcctactccttccttctcaccatggaccagaacgcctccaccgactactacgtcgtcgccagcgcccgtttcgtccccgacgccgacaagctcaccggcgtcgccatcctccactactccaactcccagggcccgccctctggctctctccctgatgccccagatgaccagtacgacaccgctttctccatcaaccaagcaagatcaatcagatggaatgttacagccagtggtgcccgccccaatccgcagggctcattccattacggcgacattaccgtcaccgatgtgtacctgctgcagagcatgccaccggagctcatagacggccagatgcgtgctactctcaatggaatttcttatattgctccatcgactcctttgatgctcgctcagctctttaatgtcccgggagtctacaaactggattttcctaatcgtcctatgaacaggttaccaaagcttgacacctccattatcaatggcacctacaaaggctttatggagatcatattccaaaacaacgccacatccgtgcagagctaccacttggatggatatgcattctttgttgttgggatggactatggactgtggacagacaacagccgcggtacatacaacaaatgggatggcgttgcacgctccacaattcagacgactgcattttatcttgagaaaaccttcgaattcaggaaatactgtctgaaatataacctactcatgaactctatacaatattctggtacagcctttagcttgacatgtctttgtgcaagactgcaggtattccctggcgcttggacggctgtccttgtctttcttgacaatgcgggtatatggaatctgcgggtggagaacctggacgcctggtacctggggcaagaagtgtacatcagtgtggttaacccggaggatagcagcaacaagaccgtgcttcctcttcccgacaacgcgattttctgtggtgcgctgtcaagtttacaaaaggagcaatcgcatagattccaatactcagaagcttctcagataacgcagctgtggaagatggttttcttcatggcatggttggccctttggtagagcttaattagatctgtctgctggggtgatccggagacgagagagctcanagctggtcccaaacatggatgagctcttaactcaagttagtaggggggggaatttt

SEQ ID NO: 76361 - DNA, 650 bp, Oryza sativa
  Clone ID: PAT_MRT4530_76363C.1
tgacccattagatatgagatcattgcagatgacccatcggatgcctagttctatatgtaaaatccaaggtgtttttaattattattctgtgatgaacaattgggtattggagattattggttttgttatttggaatttattcacgaagtggttttggagatgattggaatttacaggtgaatctacaggatattgctattatttcatgtgaccggtcagaccgggcagtgtgtgccggctagagttgatgcacatggttaatggagattccatatggcatacgatggaggtattgtgtgcgtatgggatgcggagtcaaatttggaaggagtccaaatttggtacgattggttatgtaaagtttctttcttgtactagagggtttcctaaggtgtttaggactcttagtatgagtttggtttgtggctttaggcttcctacatcgggtataaatatagggggagcgttcagactggcggcaagcggcggtcagaacggcggcatacgggcggtccgaccggcggcggtgacaggcgcggcaagcatctcggtggttcgaccgatcgatctacatcactcagaccggcggcatccactcggtcagaccggcagattaatctcggtcagaccgcgatccgttgaattcgagg

SEQ ID NO: 76362 - DNA, 254 bp, Oryza sativa
  Clone ID: PAT_MRT4530_76364C.1
aggaagagttctacaatgaggctgatgaaattccgggcgtgacagagccagcggccggagagggtggaggagatgcccaagatcacccagaggtggtcttcgccgaaaattttgtgttcggccccccttgggaattggcgaattacaatgttttgaaagttaccggctggatgcgggcgcaccccgggcgaaccctggacgactacgacagtgtccatgtggaacgtctagaggacatggttcgcttttggtga

SEQ ID NO: 76363 - DNA, 377 bp, Oryza sativa
  Clone ID: PAT_MRT4530_76365C.1
tcgcgggtggaccaggggctccaacgaaactatatcccctctcttcttctctctgcagctggtcctcccgtgaggcctaagccaggcaccaatcagaaggttactggatcaaaagccctgatcaatcctaggggacagatcctattaggctagaacagaccaatgagcaagccaatgagtgaactgtgtatattcctctgcactggatggtgaccgtagccgaataaaccacttccgctttggacacggcactgtccatgtatgcagcttatctgcctgggtcaaactaaaacccgatgttgctaacgattacttgggtgaaagtggcggcccattaaaatggacaaagggattactgactggcaactgaatcccaa

SEQ ID NO: 76364 - DNA, 744 bp, Oryza sativa
  Clone ID: PAT_MRT4530_76366C.1
atagagtcggctttggtgggtgcatcacttgaaatccttgttcattatccatgcatagatctgaattttgaagtccgggtaatgaggtatttcttatttttagcaatggactgcataacaactacacagattgacaaatcccacagattcttgtgtaaaatcaaaggtgtttttaattattattctgtgatgaacaattgggcattggagattattggttttgttatttggaatttattcacgaagtggttttggagatgattggattcacatgtgatcgtaggattcaatatgttatgtgaccagtcagaccgggctctggtagccggctagagttgatgcacgtggttgatggagattccatatggcatacgatggagttattgtgtgcgtatggaatgcggagtaaaatttggaaggagtccaaatttggtacgattggttatgtaaagtttctttcttgtactagagggtttcctaaggtatctaggactcttagtatgagtttagttcgtggctttaggctgcctacctcatgtataaatagagggggagctttgtgtttaccgggtttcggcggtcagaccggcgggagcacggcggtcaaaccggcggccgcgacagcaagcagcagctgatctcggcggtcggaccggagatataatctctttcagaccgacggcaaccaggcggtcagaccggcaggacaactttggtcagaccgcgatccgtcgatttcgaggg

SEQ ID NO: 76365 - DNA, 1832 bp, Oryza sativa
  Clone ID: PAT_MRT4530_76367C.1
ccacgcgtccgagcgaagaacacacacacaaacacaaacagaaaaacacaacacattaagctagctagaagaagagagaaattaaagaagctaggagctaacgatcaggatggctgctggcatggtggcgacaatggtgctactgacgtgccttgctgcaggagggctggtcgtcggagctgaggaagacggtggcggcggcggtcttggccggctggggtcgccggactacggcgacgcgctggcgaaggccatcctgttcttcgagggacagcggtcggggcggctgccggcgaaccagcgagcgacgtggcgcggggactcggcgctcaccgatggccgtgaagaaaacgtgaacctgaccggcggctactacgacgccggcgacaacgtcaagttcgggtacccgatggcgttcacggtgaccctgctgggctggagcgccgtcgagtacggcgccgccgtcgcggcggcgggggagctcggcaacctccgggcggcgatccggtggggcgccgacttcctcctccgcgcccacgcctcgccgacgacgctctacacccaggtcggcgacggcaacgccgaccaccagtgctgggagcggccggaggacatggacacgcccaggacgctctacaagatcaccgccgactcgccggggtccgaggccgccgccgaggcctcggcggcgctcgccgccgcgtacgtcgcgctcaaggacgacggtgacaccgccttctcgtcgcggctcctggccgcgtcaagatcgctgttcgatttcgccaacaactacaggggatcattccagtcctcctgccccttctactgctcctactctggatttcaggatgagctcctctgggcctcagcgtggctcttcaaggcgacgcgagacgccaagtacctcgacttcctgacaaacaaccaaggatccagcaaccctgtcaatgagttcagctgggacaacaagtatgccggagcacagatgcttgcagcacaggagtacttgggagggagaacacagctagcaaggtacaaggataacttggattcctttgtatgtgccctcatgcctaacagtggcaatgtgcagataaggaccactcctggcggacttctgtttacgcgcgattcggtcaatttacagtacacaacaactgcgaccctcgttctgtccatctactccaaggtgctcaagtcttctggctccaggggagttcgctgtagcgctgcaacattctctccaaatcagatcagctcatttgccacgtctcaggtggattacatcctggggaagaaccctctgggcatgtcatacatggtagggttcagcacaaagtttccgaggcgcattcatcaccgtggctcgtccatcccgtcgatcaaagttctcagcaggaaggtcacctgcaaggaagggttctcatcatggttaccgacaagcgacccaaaccctaacatccatgtcggagcgattgtcggtggaccagatggaaatgatcagttcagtgacaacaggggggattcatcacactctgagccagccacatacatcaatgcagcctttgtgggtgcctgtgctgctgcaatggggcagaagcaggtggtgaagctggaggagcctgcggacaacttagaatcaatggtatcaacttactagaaaagagggatgcagaaaatatatgcaagaataagatcattattatgtattcatgtgcaacttctatgtgtgagattgccttgtaacatcagtgcttacttgtaatatatcccagctccttatcagtgtgtacaacatgataataaataaataccataagttcataccacct

SEQ ID NO: 76366 - DNA, 640 bp, Oryza sativa
  Clone ID: PAT_MRT4530_76368C.1
cctcgaaatcgatagatcgcggtctgaccgaagttgtcctgccggtctgaccgcctggttgccgtcggtctgaccgagattagatctccggtctgaccgccgagatcagctgccattcgctatcgccgccgccggtctgaccgccgccttgctgccggtctgaccgccggtgagttaccggttagatgctccccttctatttatacatgaggtaggcagcctaaagccacaaaccaaactcatactaagagtcctaaacaccttaggaaactctctagtacaagaaagaaactttacataaccaatcgtaccaaatttggactccttccaaattcaactccgcatcccatacgcacaaaatacctccatcgtatgccatatggaatctccatcaaccacgtgcatcaactctagccggctaccacagcccggtctgaccggtcacataaaatgacagaatcctgcgatcacctgtgaatccaatcatctccaaaaccacttcgtaaataaattccaaatatcaaaaccaataatctccaatgcccaattgttcatcacagaataataatcatatatccctagcaaagcgcagaatatcatctcctcagtatcattgctatgccgatacattgtcgtatca

SEQ ID NO: 76367 - DNA, 997 bp, Oryza sativa
  Clone ID: PAT_MRT4530_76369C.1
atggcggtcaaggacctgatgacaacggcgctcgctgcaacgacagctaagccaagagctatcataagcatccatgccaattttatatggtttgctgttttgtcggaccggtcagaccgggtggaggttgctggtcagaccgggtggaggttgccggtcagaccgacgctatgtgtgcggtcagaccgactggcccgcgagagaagcaataaagttgtcatctactttgagagttcttcgatttgtgtttcaccgggtttcgacggtctaaccggcggctcagcggcgctcagaccagcgacgcaccggcggtcagactggctagggcgaggcggtcagaccggcggcgacatcaggcgtggcagggattccagggcagtccaaccggaagatcaacaccggtcagaccggcggctacgcttcggtcagaccggcagatcaatctcggtcagaccaatctccatcgatttcgaggtcagtttcagggacacgctcaagggcagagaatcattgagagcttgtattcagttctgctggtctgaccgtctcgccaccaccggtctgaccgccgcttgccgccggtctgacgctccccctctatttatactcgagatagacagcctaaagccacgaaccaaactcatactagaagtcctaaacaccttagtaaaccctatagtacaagaaacaaactttacaaaaccaatcataccaaatttggactccttccaaattcgactccgcatcccatacgcacacaatacctccatcgtatgccatatggaatctccatcaaccacgtgcatcaactctagccggcacacactacccggtctgaccggtcacatgaaataacagcagtacctgtagattcacctgtaaatccaatcatctccaaaactacttcgtgaattaattccaaataacaaaaccaattatctccgatgccaattgttcatcacagaataataatcaaaaacacctttgattttacaat

SEQ ID NO: 76368 - DNA, 627 bp, Oryza sativa
  Clone ID: PAT_MRT4530_7636C.1
ttttttttttttttttttttccgacgatgtgcgagatttaatcggatcggacggacgtcgtagagagggacgagagaaaaaaagggaaggttcggaaacgggatcccgaggctgacatgtgggccacagttcccgtccgttctcgtccgcgtgagatgtaagcagagatgatcgagaaaaggtcggttgggtctcggtctctctccttcaaatcgattcggtgtcgtcgtctctctcgccgtcgcgtcgtctccttgaagcccccgagatgagcaccctccggtggaaagggcaagcgcaagcgccccgaatagccggcgccggaggcggaggcggaggaggcggagctcaacttgatcttactccgcaagatggggatggggtgcacaaatatgctgtcgcagtcgcagctctcgaagataaagatgttggcgtcgcggcccgatatctgcaagaggaacagccacctgaagctctgttacaacctccgcaatcgcaatgtcttcgtccccaacaccaacaagccacagctaggccccctcacaccaacaagccacagctaggctccctccagtacaagaaagggaaggaacatgtgtatgatgtgtcagggcagaccccaacatg

SEQ ID NO: 76369 - DNA, 333 bp, Oryza sativa
  Clone ID: PAT_MRT4530_76370C.1
cccacgcgtccggagcatttgtaactgtttggaattgacagttgttaatctgagccattcaagtacatttcctttgttttcaaccatgttttactcaaaacagtccttagtttcttacggttgtaaccacacaggcatttggaactggtggctgtgatgatttgactgccccttggagatcatttggcatctccttggttccttggtaatatgttcaatcggctgtcatactaggaggccttgctccccagcaagttaccggttgcagctatttcttgttagtacatgttaaatgattctactcatttgttcatgtactgagggacggaggta

SEQ ID NO: 76370 - DNA, 704 bp, Oryza sativa
  Clone ID: PAT_MRT4530_76371C.1
ttaattacgctcgccgaccgaagcgacgttaccatgtctccagatgaaacgaatctgcacgcccagattcgagcgctgctcaagtgatgtggcagtcttggagagaccgcccatgacgcttcccttgagaaggatgatcgccctgacataacgccgggggctactgtcggtgatatgggaccgggagtattgcgcccggaggcttgaggcagattgaatcgcccacgtggcctggcaccttcggggacgtcgggcccgagggtgaggtgtccgccctcctcctgatttccccgagggggggtcgggttgcacctgccccgaccccgagggccgaggtgccccgacccccagtcacagaccggtcagatcgcgggttaggtggcggcaggcggtctgacgcacgcctcgccccatcccgtcaggacgagggcttctaggcgctcgaccccagctggagctagcgtgttacctcccagagatggcacgttagtcccgaccagatatatgccaggcttcatcctaaccattacaggcaaaatgtggtgtgaaggagggccagcgtgcagattgctaagctgacgcgtggtggacaagaatgaccgatttgtgaccattctgacaccggtcatgtcgccagcagaccgccatgattccgcgtcgcgcctgctcccggcgaaagtggaggtagttgtgggccgtcccat

SEQ ID NO: 76371 - DNA, 564 bp, Oryza sativa
  Clone ID: PAT_MRT4530_76372C.1
atggagaccaatttatctaccaatgaagtagaagatgatattgccatatcagacaaagatgattttattattgaggaggtccaaaatgaatcagatgaccaagaaattgagaagtttgtttcaaatgagcaatcaacagaggaagctatgttacaagaaccaaagaagggaattctatttgatagtgcaaggggcggcgcggcgtcggcggcggcggcggcggaggacgacgccggcgaggagggcacggcggcgctgctgcggcggaggctgctggtgggggaggcggcggcgaacctggaggaggaggtgggcaccctggagcgcgcgctggccgtggccgtggcggagcgggcggcggtggaggcgcggaggcgggatgccgaggcccgggccgacgacgccgaggcgcggctgctcgcggcggaggaggagaaggacgcgcgcgccgaggagctcgtgctcgcggcggcggaggcggcggcgaagcgcaggcagatccgtgacctggagctgcagattcaggccgtcaacaatatgaccagcaagtttcgctggtactaa

SEQ ID NO: 76372 - DNA, 777 bp, Oryza sativa
  Clone ID: PAT_MRT4530_76373C.1
cgcggccgcggcttccggcgtgagcgtctgctgtatggtgctaagatccgccctcatcttgatcttccccaactcatcaatcgatcaaacaccacccctccacccaaaattcgcaacgagacgaagacgacgacgaggaggagtcgaggatgtaaaatcaaaggtgtttttgattattattctgtgatgaacaattgggcatcggagattattggttttgttatttggaatttattcacgaagtggttttggagatgattggatttacaggtgaaatacaggtgctatcattttatgtggccggttagaccgggctctggtagccggctagagttgatgcacgtggttgatggagattccatatggcatacgatggagttattgtgtgcgtatgggatgcggagtcgaatttggaaggagtccaaatttggtacgattgattatgtaaagtttctttcttgtattagagggtttcctaaggtgtttaggactcttagtatgagtttggttcgtggctttaggctgtctacctcgggtataaatagagggggagcgtctaaccgacgactcaccggcggtcggaccggcggcaaggcagcggtcagaccggcggcggcgacaggcgcggcaggcgacatcggcggtcagaccggttgatctataccggtcagaccggcggcatctactcggtcagaccggcagatcaatctcggtcagaccgatctctgtcgaatttgaggcctttcgtgcgggtcggaacttacccgacaaggaatt

SEQ ID NO: 76373 - DNA, 1408 bp, Oryza sativa
  Clone ID: PAT_MRT4530_76374C.1
aatactgaacaccaacatcaaagtatgtgaagagaaaacaaagaagcatatgattctgaagaaagatgatactagtacaattctatgctaaattgaaatgaagctgaaattatatatcacagatgttctttcatattttctccaagtcgaatttcccattggcaaaatgcttcttggagcaatgccactctgccacgtaaaaaatgcagcaggattccagcgaaagcaagaagaaagagagggcctacatgtccttactccacagtgcacgcggccaccggctcagcccatcgccgccaccgccgccgccggcggctgcttccgcggcgcctgcttgaacgccacggtggggccaatacgggagcccctgctgcgatgctcggcgacgagctcggcggcgaagcagtccagcctctccgcgttcgtctgctcgccgacacgcctcccttcgaacagcaccgactccacgttccggtgcttcagcatctcgtccgccgccgcgagcagcgcgtgcacgttcgccggggttgggtcgtactccccgtccggcccgcacggcggcatgctctcccgtttcgcctgaatgcgcaggtagttggacgagcggcactgcccgaaggcgcgcgccacggcgtggtcgacgaggtcggcggcgccgtcggcggcgatgcgcgcgatggggcgcgcccaatccttgggaccccagcggcgcaagcgtcggaggtcggcgtcggccgcggcccccgtgccaccggcggagcatcccccgatggagagcacgaggaggtcctcgacgccgcgcacgaacgggaactcgtgcttgttgtgaagcacgtgcgtgattgcaaatggatgacaaatgaatttagccttgccccatcccgtcaggacgagggcttctaggcgctcgtccccagctggagctagcgtgttacctcccagagatggcacgttagtcctagtcagatatatgccaggcttcatcacttggtggacaagaatgaccgacgtgactggtctgactccggtcatgtcgtcagctggcggccacgattccacgtcgcatctgctcccggcgaaagtggagctccttcatatacagatctcccaaaacacaggagtagggtattacgcttctcagcggcccgaacctgtatacatcgccggcgttttgtgtgcttcctgtctcgcgaaccttccacatacagagagcttagaatctcaccctgagtccccggccgaaccggcaaaggggggcctgcgcggtctcccggtgaggagccccacgctcctggactctagaatttttttcccaatattacttatttgttaatttcgaatttcagttatttataaattgtattcctatatggacgctaaactcttctcccaatcttgtttatttttt

SEQ ID NO: 76374 - DNA, 649 bp, Oryza sativa
  Clone ID: PAT_MRT4530_76375C.1
aatgcaagggttctaaagacgtgaaaccttcagcttgttgtaaaaccaaaggtgttttggattattattctgtgatgaacaattggcatataagattattggttttgatatttggaatttatttacgaagtggttttagagatgattggaatttgcaggtgaataggaactactgctgttgatttggtccagtcagaccgggcatgtgctgccggtcagaccggctgcacgtggttggtgaagattccatatggtatacgatggaggtattatgtgcgtatgggatgcggattcgaatttggaaggagtccaaatttggtatgatcggagtttgtaaagtttgtttcttgtacgggaaggtttcctaggtggattaggacttctagtatgagtttggttcgtggctttaggctgcctacctcatatataaatagagagggagcgtcagaccggcggctaggcggcggtcagaccagtggcagacctgcggtcagacctacgaggatgacaggaggcagaggcgatctttaggtggttggaccgagcgatcaattccggtcagaacgacggcttccagacggtcagaccgacgcgacactttcggtcagaccgcgatccatcgaatttgaggatctttatcgggtcgtag

SEQ ID NO: 76375 - DNA, 626 bp, Oryza sativa
  Clone ID: PAT_MRT4530_76376C.1
cctcgaattcgacggatcgcggtctgaccgaagttgtcctgccggtctgaccgcctggttgccgtcggtctgaaagagattatatctccggtccgaccgccgagatcagctgctgcttgctgtcgcggccgccggtttgaccgccgtgctcccgccggtctgaccgctgtgatgccgccagtctgacgctccccctctatttatacccgaggtaggcagtctaaaggcacgaaccaaactcatactagaagtcctaaacaccttaggaaaccctctcgtacaagaaataaactttacataaccactcatatcaaatttggactccttccaaattcgactccgcatcccatacgcacacaatacctccatcgtataccatatggaatcttcaccaaccacgtgcatcaactctagcctacagcacacgcccggtctgaccggtcacataaaataacaacacctgtaattcacctgtaaatccaatcatctccaaaaccacttcatgaataaattccaaataacaaaaccaataatctccaatgccaattgttcatcacagaataataatcaaaaacacctttgattttatattaatagcttgttttatcatttattttttcctagct

SEQ ID NO: 76376 - DNA, 340 bp, Oryza sativa
  Clone ID: PAT_MRT4530_76377C.1
ggtgtccgggacgcgggtgcgcacccacttcgcgcgcccgagctggcgcgacgtgttcaagcgcgtcgccgtgaaccaccaggggcagcgcgtcggcgtcttcttctgcggcgaccaggcgctcacgccggagctccgccgcctcgcccaggacttctcccacaagaccaccaccaaattcgtcttccacaaggagaatttctagatcatcggattcatcgtcgtcagctgcctctccggcggataattgagttctttcatcctctgagcgagctcagattaagtgtacaattatatacagattaatggtgagagataggactacatattttagtgagtg

SEQ ID NO: 76377 - DNA, 889 bp, Oryza sativa
  Clone ID: PAT_MRT4530_76378C.1
ttacaaatcaacatcccaattcacaaaatcctcaaaatagtcacaaatcaaaattgccgccacgctggagagaaccaccgtcggctccacgtcggggaggtgagtgggcagccagggaggggagggcagctgctgcccccacgccgaggaggggagcagccgctgccactgccacgccgaggaggggggaatagcagccgcctcgaaatcgacggaagtcggtctgactgagattgatctgccggtctgaccgagtggaagccgccggtttgaccgccgtgtgcccgccggtcggaccgccgcgatgccgccggtttgaccgacgatagattgccggttagacgctccccctctatttatacatgaggtaggcagcctaaagccacgaaccaaactcatactaggagtcataaacaccttaggaaacccactagtacaagaaagaaactttacataaccaatcataccaaatttggactccttccaaattcgactccgcatcccatatgcacacaatacctctatcgtatgccatatggaatctccatcaaccacgtgcatcaactctagccggctaccagagtccggtctgaccggtcacatgaaataatgaatcctgcgatcacctgtgaatccaatcatctccaaaaccacttcaggaataaattccaaataacaaaaccaataatctccaatgcccaattgttcatcgcagaataataatcaaaagcacctttgattttacacaacgcacgggcactgtactagtatggtaataaaccccaaagcactccacttttgaatggcattttttagctgctccttgaagaaagtctattatttgatagtgacctgttttagcttctcccttaattacagcaacaataac

SEQ ID NO: 76378 - DNA, 643 bp, Oryza sativa
  Clone ID: PAT_MRT4530_76379C.1
tagtggatccccgggctgcaggatcggcacgagggctagacatagagtgtcaaaattatcgatggattcccatgaagaattatgttccccgacttgtacagaaagttcgttgtttgaaagattcagtattgatagattgggcaatttgaagaatgagctgagttcgattgtgccaatgaaaccattggaatgaaggtttatgacttccaaattagttagattaaaaagatgtggaggtacctgaccagaaaaattgcatgcatacaattttaaggtacttaggttcttgagattgcctatgaaggaaggcagttgaccagataagccacagttggagaattgcagagtttccaaagaagtcaaattcgcaacccaagaaggcatttctcctactatgccagacccagaaagctgtaacgatgttaaggacctgagctcaccaattgaagagggaagctcttcttggtgactgtcaccagctgctgcaacacccaaattcttcaaggacttgagattgcttacagaactcgggatgggaccagacaggttagtgttgctacagagcagctcagtcagagcactacccgatgagaaatcgggcagcacaccggacagtctgaaattatagctgatatcaacgacc

SEQ ID NO: 76379 - DNA, 464 bp, Oryza sativa
  Clone ID: PAT_MRT4530_7637C.1
cccacgcgtccggtccacgggagctgctgatgtattggagagagaaggcttccaaaatctggcatgcatcaaatcagggcttcagacactgaagccaggaacatttgaatctgttggcaaaagtgagctgcaaaacgcagggaaagcaggacttgtgacggtgcaagggaagatttccgctgttcttggaactgtgttgataagtaagatgactggaactatttttatctgagataagtacgtcatgatcataaacttgtcttatgcgagtttcatctacaggtgcctaccttttcatcacattgttccctgaccaggctgaaaagctttttgacttggctggaatcaaattgtgatcagaattgtatctcttttcatgcattttggttctcctcttggggatgcatgttcccattgcaaggttaacttaagcggacttggggagatcttttcatgatgaaaag

SEQ ID NO: 76380 - DNA, 4800 bp, Oryza sativa
  Clone ID: PAT_MRT4530_76380C.1
atggtcgaacgggcagtggcgcacaacctctctccgagcgctagcggtgacgacggggagcagaacccgcgtcgtcgagctcgtactccaccgtccccctctcgccgatgtcttgggcgggaggaggtgctcgagggggtcgaaagatccgcgacttcgccgcccacgggcgatggagaaggacagcgagacggggagcgtcgtctcctcgtctatggcgatggcagcacgccccagggcgcgctccaggctgcgggcgcgctcctgcgtcacccgcctgtcatccccgatccagagactccagcccgaccagcgcctaggcgccggtgggcggtcctccgccaccaaggcctctggcgctgctaccgccggctcagtgtcgtcgaggcggagggcgcggcgagcggcggccgttacccaccgttcgtccgccatccttggtcaacggcctccgacccaagaagatgtgcgtggggggcggatgcccgccttagtatcgagcgccggcgcaatggtcgtcgtgctgcccacgcaacggagggcgcttcctcgtccggagcgccacttcggttcgggcacaggggccagccccccgtgtccccggttggcggtgccggctgtcgagcctttgtggcgagccttcggaacgtccgttggcccccaaggttccggcccaccatcaccgaaaaatacgacggaagcgtcaaccccgccgagtttctccagatctacatgactgggatcgaggccgccgggggtgacgacagggtcatggcgaatttctttcccatggccctgaagggacaggcgcggggttggctaatgaacttgccacccgcgtcggtccactcttgggaggatttgtgccagcagttcaccacgaactttcagggcacatatccgcgcccaggtgaagaagcggacttgcacgcggtacagcgaagggacgatgagtctcttcgctcatacattcagcggttctgtcaagtccgcaacaccataccgtgcatccccgctcacgcggtgatctacgcgttcagggggggcgtgcggcacaaccgcatgctcgagaagatcgcctccaaggagccccagaccaccgcggagctttttcagctcgcggaccgtgtggctcgcaaggaggaggcctggacctggaactcctccggttccggtgtggcagctccggccgcccacgggtccgccgctcggtcagggcggcgggacaggaggaggaagaagagggcgcttcgcgggccacccgaaaggggaggcctgcgagcgacaaaaagaaggaggccggcgctcccagcagggagcgcccgaccggcaagtggtgttctgtgcacaacacctccctccacgacctcgcggactgccgcgcggtcaaaagtttggctgagcggacgaggaagtgggaggaggagaggaggcaggagcgccgtgagggcaaggcccccggcggctcccgccggcaaccggcgaggtgaggccaagcagaaggccaccgccgaggacgtcgacgatggcgacgatgacctggggttccaggagcccggggccaccgtcgccaccgtcgatgggggagcgtgcgctcacgtttctcgccggagcctcaaggccatgaagcgagagcttctggccgcggcccctacccatgaggcgacgcggcgggcgcggtggtcggaggttgccctcactttcgaccagaccgaccacctgccgtgcgttgcccggggaggacagatcgcgatggtggtttccctcaccgtttgcaatgtgaagttggggcgtgtcctcatagacgggggtgcagccctcaacatcctttcccccgcggcctttgatgccatcaaggctccggggatggtgctccggccgtcccagccgatcatcggtgtgacgccggggcacacttggccgctaggtcatatcaacctcccggtcaccttcggtggatccgccaacttccgcacggagcgggtgaacttcgatgtggcggacctcagtctgccctacaacgcggtcctggggaggcccgcgttggtgaagttcatggcggcggtccactacacctatctccagatgaagatgccgggccccggtggccccatcactgtccatggcgaccacaaagtcgcgcttgcttgcatggagcagcgcgcggaccacctcgccgcggcatccaagcccgcgggtggcgacgagaggctcagcacctccgtcccagccgccccgaggcagcgaatgagcacgtacgacgaggtcctgatcaagcaggaagacgcgctcgtctccttcctgcgggcaaacgccgacgtcttcgcctggagaccggcggacatgcccggggtccccagggaggtgattgagcaccgtctcgccgtacggccgggcacaaagccggtccggcagaaagtgcggcgggaagccccggaacgtcaagccttcatccgcgaggagattcgcatggctagggaggatgaggaaaaaactgcattcataacccccataggaacttattgttatacgacaatgcctttcgggttaaagaatgcaggtcctacttttcaacgtactactcgaatttctttgggtagccaaataggacgtaatgttgaggcctatgttgatgacttggttgtgaagacgcgcaaccaagagaccttactctcggatctagcggaaactttcgaaagtctccgctccgcccgcataaagctgaaccccgacaagtgcgagttcggtgtacctgcgggcaagcttctcgggttcttggtctctgcccgaggcatcgaggccaaccccgagaagatacgagctatagagcggatgcgccccccagcaagcttagggatgagagagcagggaggagaggcccccgagccgaatggcggcccgaggcccccgacggccggagctggccctccgcctgcttgtccgacggtgccaggcacccccgacccccaggatggcctcggggccactgcgggaaggccgcgcctgtcgccctccgaccccgaggtcgtcggcacagaagccgagtgcgccccccgcggcctctcggacgaagagcgccctggagatgcggcccctagcgaagaggatcggccccaccgaaaggtgcagcggcccgtctacttcgttagcgaggccctccgggacgccaagacccgataccctcaggcccagaaaatgctttacgctattctgatggcttcgaggaagttgcgccattatttccaggcgcatcgggtcacggtggttacgtcttaccccctcggccaaatcttgcataaccgagagggtactggacgggtggtaaaatgggcaatcgaactctctgagttcgatttgcactttgaaccacgccacgcgatcaagagccaggccctcgccgactttgtggcagagtggaccccagctcccgagcccgtctccgtccccgaggccagctcgggcccctcgcagctgcctcacaccgcctactgggtgatgcagttcgacggctccctgtctcttcagggcgcctttgaagaaaggcatgcccagccgacggctcgacccgaccccctaggggagacggacgcacctgaacggcccccgaggcccgtcggagcgtacatcgcagataagactctacccgaggaccgcgaagggagtgaacgcgtccagcgcatctccaagcgctacgtgctggtggaagggaccctctatcggcgcgcggctaatggagtcctcctgaagtgcattcctcgggaacaaggcgtcgagcttcttgccgatatccatgaaggcgagtgcggagcccactccgcctcacgcaccttggttggcaaagcctttcgccagggtttctattggccgacggctctcaacgatgcggttgacctggtccggcggtgcagggcgtgccagttccacgccaagcaaacccatcagccggcccaggccctgcagaccatacctctttcatggccgtttgctgtctgggggctcgatatcctgggtccatttaggcgggccccgggagggttcgactatctgtatgtcgctgtcgacaagttcactaagtggcccgaggcttacccggtcatcaagatcgataagcactccgcgcttaaattcatcaggggcatcactgctcggtttgggttcactagtgaactcttcggcgactactgcgaagacatgggcatcaagctctgcttcgcctcccccgcccaccccagaagcaatggccaagtggagcgcgccaacgcagaaatcctcaagggcctcaaaaccaagaccttcaacatcctcaagaagcacggcgactcgtggatcgaggagctgccagcggtgctctgggcgaaccgaaccacgccaagccgagcaaccggggaaacgcctttcttcctcgtctacggcgcggaggcggttctcccatctgagctcaccctgaggtcccctcgggccaccatgtattgcgaggctgatcaagatcagcttcgcagagacgacctcgactacttggaagagcgaaggcggcgcgcggccctccgagccgcgcgctacctgcagagcctgcggcactaccatcagcgccacgtccgggcccgatcactctgcgtcgacgacctcgtcctacgccgcgtccaaacgcgtgctggactgagcaagctctcatcaatgtgggagggttcgtatcgagtgatcggcgtcccccggccgggctccgttcggctggccacgggcgacggcacagagctgcctaacccgtggaacatcgaacaccttcgtcgcttctacccctag

SEQ ID NO: 76381 - DNA, 2217 bp, Oryza sativa
  Clone ID: PAT_MRT4530_76381C.1
atgtcgtcagcagacagccacgattccacgtcgcacctgctcccggcgaaagtggaggtagttgtggcccgtctcatcagaagcccaatggccgaacaagcaaaggcgcacaacctctctccgagcgttagcggtgacgatgggaagtcaaacccacgccgtcgagctcgtactccatcgccccctccacgccaaagtcctaggagggaggaggtgctcgagagggtcgaaggatccgcgacttcgacatccacgggtgatggagaaggacggcgagacggggagcgtcgcctcctcgtctacggcgacggcagcacgccccagggtgcgctccaagctgcgggcgcgctcctacgtcacccgcccattgtccctgacccggagtctccagcccaacgttggctggacgacgtggccaacttggtcatgacggcacggcagcgcctaggtgctggtgggcggtcctccgccaccaagacctctggcgctgctaccaccggctccgtatcgtcaaggcggagggcgcggcgagcggcggctgttgctcgccattcggccgccactccttcgtcagcgcctccgacccaggaagatctgcgtggggggccggatgcccgcatcagtatcgagcgccggcgtaatggccgacgtgctgcccacgcaacggagggcgcctcctcgtccggagtgtcacatcaacacggacgcggggatcagccctccgtgcccccggttggtggtgtcggctgtagagcctttgtggcgagccttcggaacgtccgttggcccccaaggttccggcccaccatcgccgaaaaatatgacgggagcgtcaaccccgccgagtttctccaggtctacacgaccgggatcgaggccgccgggggtgacgatagggtcatggcgaatttctttcccatggccctgaagggacaggcacatatccgcgcccaggtgaagaagcggacttacatgcagtccagcgaagggatgatgagtcacttcgctcatacattcagcggttctgtcaagtccgcaacaccataccatgcatccctacacatgcgctcgtggaccgagtggctcgtaaggaggaggcatggacctggaacccctccggttccggtgtggcagcttcggccgcccccggatccgctgctcagacagggcggcgtgacaggaggaggaagaagaggtcagcccataccgacgacgagggtcatctcctcgccgtcgagggcgcttcgcgggccacccgaaaggggaggcctgcgagcgacaaaaagaaggaagccgacgctccctgacctcggctacttggaagagcgaaggtggcgcgcggcccttcgagccgcgcgcaaccagcagagcctgcggcgctaccatcagcgccacggaggagaggcccccgagccgaacggcggcccaaggcccccgacggccggaactggctctccgcctgcttgtccgacggtgccaggcgcccccgacccccaggatggccccgaggccactgcgggaaggccgcgcctgtcgccctctgaccccgaggtcgtcggcacagaagccgagtgcgccccgcgtggcctctcggatggagagcgccctggacatgtggcccctgacgaagaagatcggccccaccgaaaggtgcagcggcccgtctacttcgttagcgaggccctccgggacgccaagacccgataccctcaggcccagaagatgctttatgctatcctgatggcttcgaggaagttgcgccattatttccaggcgcatcgggtcacggtggttacgtcttatcccctcggccgaatcttgtataaccgagagggtactggacgggtggtgaaatgggcaatcgaactctctgaattcgatttgcgctttgaaccaagccacgcgatcaagagccaggccctcgccgactttgtggtggagtggaccccagctcccgagctcgtctccgtccccgaggccagctcgagcccatcgcagctgcctcacaccgccctctgggtgatgttgttcgacggcacctgtaggaaccggccccacctgtcaccaggccttagaagtggcgtcacgcccgaccgcttccctcggggagggcgatcgccctggcataacgccgggggctactacagccacgattccacgtcgcacctgctcccggcgaaagtggaggtagttgtggcccgtctcatcagaaggtga

SEQ ID NO: 76382 - DNA, 1395 bp, Oryza sativa
  Clone ID: PAT_MRT4530_76382C.1
atggtgccaggtgcccccgacccccaggatggcccgagggccactgcgggaaggccgcacctatcgccctctgaccccgaggctaaccctgtgccgactcgacccgggagagagcagggagaagaggcccccgagccgaacggtggcctaaggcccctgacgaccggagttggccctttgcccgcttgtccgacgacgccaagagcccccgaccccctggacggccccgaggccactgtgggaaggccgcccctgtcgtcctccgaccccgaggtcgtcggcacagaagacgagtgcaccccgcgaggccgcttggacaaagagcaccccagggatgtggcccctagcgaagaggatcggccccaccgaaaggtgcagcggcccgtctactttgttagtgaggccctccgggacgccaagacccgataccctcaggcccagaagatgctttacgctattctgatggcttcgaggaaactgcgccattatttccaggcgcatcgggtcacgataagactctacccgaggaccgcgaagggagtgaacgcgtccaacgcatctccaaacgctacgtgctggcgggccccgggcgggtttgagtatctgtatgtcgcgatcgacaagttcactaagtggcccgaggcttatccggtcgtcaagatcgataagcactccgcacttaaattcattaagggcatcacaacccggtttggagtgcctaaccgtattattacggataacggcacccaattcactagtgaacttttcggcgattactgcgaagacatgggcatcaagctctgcttcgcctcacctgcccaccccagaagcaacggccaagtagagcgcgccaatgcggaaatcctcagaggccttaaaaccaagaccttcaacatcctcaagaagcacggcgattcgtggatcgaggagttgccagcggtgctctgggcgaaccgaaccacgccaagccgagcaaccggggaaacgcctttcttcctcgtctacggcacggaagcggttctcccatccgagctcaccctgaggtcccctcgggccaccatgtactgcgaggctgatcaagatcagcttcgcagagatgacctcgactacttggaagagcgaaggcggcgcgcggccctccgagccgcgcgctaccagcagagcctgcggcgctaccatcagcgccacgtccgggcccgatcactctgcgtcgacaacctcgtcctacgccgcgtccaaacgcgtgctggattgagcaagctctcaccaatgtgggagggtccgtatcgagtgatcggcgtcccccggccgggctccgttcggctggccacgggcgacggcacagagttgcctaacccgtggaacatcgaacaccttcgtcgcttctacccctaa

SEQ ID NO: 76383 - DNA, 472 bp, Oryza sativa
  unsure (1)..(472): unsure at all n locations
  Clone ID: PAT_MRT4530_76383C.1
ggaaatcgcagattggcaaggctggtggtgacaagtggaagtccatgactgatgctgtgagtttctcacttccccttatttgaactgttccatgtgcatttgcgctaattggtcgcgaattgaggagttgctcggtttctctgatgccgtgtctcgttctagatccgtttactcttgtgatgccagtgttgtccatgtctctgtattgctcgtatggatctaattgttgctgaggattaattttagcctgcttacttgtatcactgttgctggttcaacttcaaatatgtgggggaaaatgcacttaaatttgtttgctcatgggtaaattcagattagggggttatgtcgtagttgctgtgcctngtaaggtcggtcatacatgtcaccaagttgaaattgctcctcgtccatccacaaatagntctgtaaatactgcccacctacttggtaatgtaagcagatgtcaccg

SEQ ID NO: 76384 - DNA, 623 bp, Oryza sativa
  Clone ID: PAT_MRT4530_76384C.1
cacgccccagggcgcgctccaagctgcgggcgcgctcctacgtcacccgcccatcgcccatgacccggagtctccagcccaacgttggctggacgatgtggccaaattggtcatgactgcacggcagcgcctagatgctggtgggcggtcctccgccaccaaggcctctgtatcgagcgccggcgtaatggccgacgtgctccccacgcaacggagggcgcctcctcgtccggagtgtcacctcaccacggacgcggggatcagccctccgtgcccccgagcctttgtggcgagccttcggaatgtccgttggcccccaaggtgccggcccaccatcgccgaaaaatatgacgggagcgtcaaccccaccgagtttctccaggtctacacgaccgggatcgaggccgccgggggtgacgacaggcggttctgtcaagtccgcaacaccataccatgcatccctgcgcacgcggtgatttacgcgttcagggggggtgtgcggcacaaccgcatgcttgaaaagatcgcctccaaggagccccagactaccgcggagctttttcagctcgcggaccgagtggctcgtaaggaggaggcatggacctggaaccccttcggttccg

SEQ ID NO: 76385 - DNA, 410 bp, Oryza sativa
  Clone ID: PAT_MRT4530_76385C.1
tttttgggtttttttttttttttgggaaagtgtttttccaagtctctttgtgttttggacaatgcattgtgttgaacctttttaactgtatgcaagggatttagcttgaccatgggggaaaaaaaaggggggaaggggaaaagggggaaaaaaagcggaggggaaagggcgaagaaaaaccccaaaaatggaaggcccggggaaacaccaaggggggaccgggaaaaaggggggcaacttgaaaaaggatcaaaaccggagcccccgttggttaaaacaaacgtggggaacagtcttgggcgggggggggcccccgggaaaaaaacgacggttccgctgagcaaaccccaatttaaaatagaggggcccaaaaaggggggggaaaacaaaggcataaggaaggtatgggg

SEQ ID NO: 76386 - DNA, 4746 bp, Oryza sativa
  Clone ID: PAT_MRT4530_76386C.1
atggccgaacaagcaaaggcgcacaacctctctccgagtgttagcggtgacgacggggagccgaacccacgccgtcgagctcgtactccaccgccccctccacgccaaagtcctaggcaggaggaggcgctcgagagggtcgaaggatccgcgacttcgacatccacgggtgatggggaagggcggcgagatggggagcgtcgcctcctcgtctacggcgacggcagcacgccccagggcgcgctccaagctgcgggcgcgctcctacgtcacccgcccgttgtccctgacctggagtctccagcccaacgttggctggacgacgtggccaacttggtcatgacggcacggcagcgccctagagcctttgtggcgagccttcggaacgtccgttggcccccaaggttccggcccaccatcgccgaaaaatatgacgggagcgtcaaccccgccgagtttctccaggtctacatgaccgggatcgaggccgccgggggtgacgacagggtcatggcgaatttctttcccatggccctgaagggacaggcacggggttggctaatgaacttgccacccgcgtccgtccactcttgggaggatttgtgccaacagttcaccatgaactttcaaggcacatatccgcgcccaggtgaagaagcggacttacatgcagtccaacgaagggatgatgagtcacttcgctcatacattcagcggttctgtcaagtccgcaacaccataccatgcatccctgcacacgcggtgatctacgcgttcagggggggtgtgcggcacaaccgcatgctcgaaaagatcgcctccaaagagccccagactaccgcggagctttttcagctcgcggaccgagtggctcggcggcgtgacaagaggaagaagaagaggtcagcccattccgacgacgagggtcatgtcctcgccgtcgagggcgcttcgcgggccacccgaaaggggaggcctgcgagcgacaaaaagaaggaggccggcgctcccagtagggagcgcccaaccggcaagtgtaaggccaagcagaaggcccccgccgaggacatcgatgacggcgatgatgacctaggtttccaagagcctggggccaccattgccactctcgatgggggagcgtgtgctcacgtttctcgccggagcctcaaggccatgaagcgagagcttctggccgcggcccctactcatgaggcgacgcgccgggcacggtggtcggaggttgtcctcaccttcgaccagaccgaccacccaccgtgcgttgcccggggaggacagatcgcaatggtggtttcccccactgtttgcaacgtgaagctggggcgtgtcctcattgatgggggagcagccctcaacatcctttcccccgcagcctttgacgctatcaaggccccggggatggtgctccggccgtcccagccgattatcggtgtgacgccgggtcacacttggccgctaggtcatatcgacctcccggtcaccttcggtggatccgccaacttccgcacggagcgggtgaactttgatgtggcggacctcagtctgccctacaacgcggtcctagggaggcccgcgttggtgaagttcatggcggcagtccactacgcctacctccagataaagatgccgggccccggtgggcccatctctgtccatggcgacctcaaagtcgcgcttgcttgtatggagcagcgcgcggaccacctcaccgccgcgtccaagcccgagggaggcgacgagaggcttggcacctccgcccccgccgccccgaggcagcggatagtcacatgcgacgaggtcccggaagacgcgcttgtctttttcctgcgggtaaacgctgacgtcttcgcatggagaccggcggatatgcccggggtccccagggaggtgattgagcaccgtctcgccgtgcggtcgggcgcaaggccggtccggcagaaagtacggcggcaggccccggaacgtcaagccttcatccgcgaggaggtggcgcgacttctggaggccggattcatccgcgaggtcatccatccggagtggctggcgaacccggtggtcgttcccaaggcgaacggcaagcttcggatgtgcatcgactacaccgaccttaacaaggcatgtcctaaggacccttaccctctgcctcgcatagatcagattgttgactccacagcggggtgcgaccttttgtgttttctagatgcatactctggttaccatcagattcgcatggctagggaggatgaggaaaaaactgcattcattacccccataggaacttattgttatacgacaatgcccttcgggttaaagaatgcaggtcctacttttcaacgtactactcgaaattctttgggtagccgaataggacgtaatgttgaggcttatgtcgatgacttggttgtaaagacgcgcaaccaagagaccttactctcggatctagcggaaacttttgagagtctccgctccgcccgcataaaactgaaccccgataagtgcgtgttcggtgtacctgcgggcaagcttctcgggtttttggtctctgcccgaggcatcgaggccaaccccgagaagatacgagctatagagcggatgcgcccccccagcaagcttagggatgtgcaatgcgtcaccggttgcatggccgccctaagtcggttcatatcgaggctgggagagaaggcgctacccttatttaagctcctcaaacgctccgggccgtttacttggacggaggaagctgaacgtgccctcactcagttgaaggcgtatctcagctctcccccagttctggtcgccccggagccaaatgaacccttgctactctacttagcggcgaccccgcaagtgacggtgccaggtgcccccgacccccaggatggcccgagggccactgcgggaaggccgcacctatcgccctctgaccccgaggctaaccctgtgccgactcgacccgggagagagcagggagaagaggcccccgagccgaacggtggcctaaggcccctgacgaccggagttggccctttgcctgcttgtccgacgacgccaggagcccccgacccccaggacggccccgaggccactgtgggaaggccgcccctgtcgtcctccgaccccgaggtcgtcggcacagaagacgagtgcaccccgcgaggccgcttggacaaagagcgccccagggatgtggcccctagcgaagaggatcggccccaccgaaaggtgcagcggcccgtctactttgttagtgaggccctccgggacgccaagacccgataccctcaggcccagaagatgctttacgctattctgatggcttcgaggaaactgcgccattatttccaggcgcatcgggtcacggtggttacgtcttaccccctcggccaaatcttgcataatcgagagggtactggacgggtggtgaaatgggcaatcgaactttctgagtttgatttgcactttgaaccacgccacgctatcaagagccaggccctcgccgattttgtggcagagtggaccccagcacccgagcccgtctcagtccccgaggccagctcgggcccctcgcagctgccccacaccgcccactgggtgatgcagttcgacggctccctgtctcttcagggcgccggtgcgggggtcacgttgacctcgccgagcggagacgtcctcagatatttggttcgccttgactttcgggtgaccaataatatggcagagtacgagggactccttgcgggactcagggtggcagctggactggggatccgccgcctcctggtgttaggcgactcccagctggtcgttaaccaggtctgtaaggagtaccggtgctctgacccgcagatggacgcttacgtgcgccaagtacggcgtatggagcgccattttgacgggatagagcttcggcacgtgcccagacgggataacacggttgccgacgaactctcacggctcgcttcctcgcgagcccagaccccactgggcgcctttgaagaaaggcttgcccagccgtcggcgcgacccgaccccttaggggagacggacgcgcctgacaggcccccgatgcccgtcggagtccaggcctcgggacccgaggggagcgctcccagctcccttagattgattgcttggatcgctgagatcaagcatacctcacagataagactctactcgaggaccgcgaagggagtgaacgcgtccagcgcatctccaaacgctacgtgctggcgggccccgggcgggtttgagtatctgtatgtcgcgatcgacaagttcactaagtggcccgaggcttatccggtcgtcaagatcgataagcactccgcacttaaattcattaagggcatcacagcccggtttggagtgcctaaccgtattattacggataacggcacccaattcactagtgaacttttcggcgattactgcgaagacatgggcatcaagctctgcttcgcctcacctgcccaccccagaagcaacggccaagtggagcgcgccaatgcggaaatcctcagaggccttaaaaccaagaccttcaacatcctcaagaagcacggcgattcgtggatcgaggagttgccagcggtgctctgggcgaaccgaaccacgccaagccgagcaaaccggggaaacgcctttcttcctcgtctacggcgcggaagcggttctcccatccgagctcaccctgaggtcccctcgggccaccatgtactgcgaggctga

SEQ ID NO: 76387 - DNA, 5463 bp, Oryza sativa
  Clone ID: PAT_MRT4530_76387C.1
atggccgaacaagcaaaggcgcacaacctctctccgagtgttagcggtgacgacggggagccgaacccacgccgtcgagctcgtactccaccgccccctccacgccaaagtcctaggcaggaggaggcgctcgagagggtcgaaggatccgcgacttcgacatccacgggtgatggggaagggcggcgagatggggagcgtcgcctccttgtctacggcgacggcagcacgccccagggcgcgctcctacgtcacccgcccattgtccctgacccggagtctccagcccaacgttggttggacgacgtggccaacttggtcatgacggcacggcagcgcctaggtgctggtgggcggtcctccgccaccaagacctctggcgctgctaccaccggctccgtgtcgtcaaggcggagggcgcggcgagcggcggctgttgctcgccattcagccgccactccttcgtcagcgcctccgacccaggaagatctgcgtggggggccggatgcccgcatcagtatcgagcgccggcgtaatggccgacgtgctgcccacgcaacggagggcgcctcctcgtccggagtgtcacatcaacacggacgcggggatcagccctccgtgcccccggttggtggtgtcggctgtagagcctttgtggcgagccttcggaacgtccgttggcccccaaggttccggcccacatcgccgaaaaatatgacgggagcgtcaaccccgccgagtttctccaggtctacacgaccgggatcgaggccgccaggggggggtgtgcggcacaaccgcatgctcgaaaagatcgcctccaaagagccccagactaccgcggagctttttcagctcgcggaccgagtggctcgtaaggaagaggcatggacctggaacccctccggttccggtgtggcagcttcggccgcccccggatccgctgctcggacagggcggcgtgacaggaggaggaagaagaggtcagcccattctgacgacgagggtcatgtcctcgccgtcgagggcgctccgtgggccacccgaaaggggaggcctgcgagcgaccaaaagaaggaggccggcgctctcagtagggagcgcccaaccggcatgtggtgcatcgtccacaacacctcccttcatgacctcgcggactgccgcgcagtcaaaagtttggctgagcggacgaggaagtgggaggaggagaggaggcaggagcgccgagagggcaagtccccggcggttccttccggcaatcggcgaagtgaggccaagcagaaggcccccgccgaggacatcgatgacggcgatgatgacctaggtttccaagagcctggggccaccattgccactgtcgatgggggagcgtgtgctcacgtttctcgccggagcctcaaggccatgaagcgagagcttctggccgcggcccctactcatgaggcgacgcgccgggggcggtggtcggaggttgccctcaccttcgaccagaccgaccacccaccgtgcgttgcccggggaggacagatcgcaatggtggtttcccccactgtttgcaacgtgaagctggggcgtgtcctcattgatgggggagcagccctcaacatcctttcccccgcagcctttgacgctatcaaggccccggggatggtgctccggccgtcccagccgattatcggtgtgacgccgggtcacacttggccgctaggtcatatcgacctcccggttaccttcggtggatccgccaacttccgcacggagcgggtgaactttgatgtggcggacctcagtctgccctacaacgcggtcctagggaggcccgcgttggtgaagttcatggcggcagtccactacgcctacctccagatgaagatgccgggccccggtggccccatctctgtccatggcgacctcaaagtcgcgcttgcttgtatggagcagcgcgcggaccacctcgccgccgcgtccaagcccaagggaggcgacgagaggcttggcacctccgcccccgccgtcccgaggcagcggatagtcacatgcgacgaggtcccggaagacgcgctcgtctctttcctgtgggcaaacgctgacgtcttcgcatggagaccggcggatatgcccggggtccccagggaggtgattgagcaccgtctcgcagtgcggtcgggcgcaaggccggtccggcagaaagtacggcggcaggccccggaacgtcaagccttcatccgcgaggaggtggcgcgacttctggaggccggattcatccgcgaggtcatccatccggagtggctggcgaacccggtggtcgttcccaaggcgaacggcaagcttcggatgtgcatcgactacaccgaccttaacaaggcatgtcctaaggacccttaccccctgcctcgcatagatcagattgtcgactccacagcggggtgcgaccttttgtgttttctagatgcatactctggttaccatcagattcgcatggctagggaggatgaggaaaaaactgcattcattacccccataggaacttattgttatacgacaatgcccttcgagttaaagaatgcaggtcctacttttcaacgtactactcgaatttctttaggtagccaaataggacgtaatgttgaggcttatgtcgatgacttggttgtaaagacgcgcaaccaagagaccttactctcggatctagcagaaacttttgagagtctccgctccgcccgcataaaactgaaccccgataagtgcgtgttcggtgtacctgcgggcaagcttctcgggtttttggtctctgcccgaggcatcgaggccaaccccgagaagatacgagctatagagcggatgcgcccccccagcaaacttagggatgtgcaatgcgtcaccggttgcatggccgccctaagtcggttcatatcgaggctgggagagaaggctctacccttatttaagctcctcaaacgctccgggccgtttacttggacggaggaagctgaacgtgccctcactcagttgaaggcgtatctcagctctcccccagttctggtcgccccggagccaaatgaacccttgctactctacttagcggcgaccccgcaagtggttagtgtggcgttggttgtggagcgcgatgaggacaatcctcattccgcgcacccccaccctgtgctggcttggcccgggagagagccgggaggagaggcccccgagccgaacggtggcccaaggcccccgacgaccggagcaggccctctgcccgcttgtcagacggtgccaggtgcccccgacccccaggatggcccgagggccactgcgggaaggccgcacctatcgccctctgaccccgaggctaaccctgtgccgactcgacccgggagagagcagggagaagaggcccccgagccgaacggtggcctaaggcccctgaccaccggagttggccctttgcccgcttgtccgacgacgccaggagcccccgacccccaggacggccccgaggccactgtgggaaggccgcccctgtcgtcctccgaccccgaggtcgtcggcacagaggacgagtgcacccctgaggccctccgggacgccaagacccgataccctcaggcccagaagatgctttacgctattctgatggcttcgaggaaactgcgccattatttccaggcacatcgggtcacggtggttacgtcttaccccctcggccaaatcttgcataatcgagagggaactggacgggtggtgaaatgggcaatcgaactttctgagtttgatttgcactttgaaccacgccacgctatcaagagccaggccctcgccgattttgtggcagagtggaccccagctcccgagcccgtctcagtccccgaggccagctcgggcccctcgcagctgcctcacaccgcccactgggtgatgcagttcaacggctccctgtctcttcagggcgccggtgcgggggtcacgttgacctcgccgagcggagaggtcctcagatatttggttcgctttgactttcgggcgaccaataatatggcagagtacgagggactccttgcgggactcagggtggcagctggactggggatccgccgcctcctggtgttaggcgactcccagctggtcgttaaccaggtctgtaaggagtaccggtgctctgacccgcagatggacgcttacgtgcgccaagtacggcgtatggagcgccattttgacgggatagagcttcggcacgtgcccagacgggataacacggttgccgacgaactctcacggctcgcttcctcgcgagcccaaaccccaccgggcgcctttgaagaaaggcttgcccagccgtcggcgcgacccgaccccttaggggagacggacgcgcctgacaggcccccgatgcccgtcggagtccaggcctcgggacccgaggggagcgctcccagctcccttagattgattgcttggatcgctgagatccaagcatacctcacagataagactctacccgaggaccgcgaagggagtgaacgcgtccaacgcatctccaaacgctacgtgctggcgaatgcggagcccactccgccttgcgcaccttggttggcaaagcctctcgtcaaggtttctattggccaacagctctcaatgatgcagtcgacctggcgggccccgggcgggtttgagtatctgtatgtcgcgatcgacaagttcactaagtggcccgaggcttatccggtcgtcaagatcaataagcactccgcacttaaattcattaagggcatcacagcccggtttggagtgcctaaccgtattattacggataacggcacccaattcactagtgaacttttcggcgattactgcgaagacatgggcatcaagctctgcttcgcctcacctgcccaccccagaagcaacggccaagtggagcgcgccaatgcggaaatcctcagaggccttaaaaccaagaccttcaacatcctcgagaagcacggcgattcgtggatcgaggagttgccagcggtgctctgggcgaaccgaaccacgccaagccgagcaaccggggaaacgcctttcttcctcgtctacggcgcggaagcggttctcccatccgagctcaccctgaggtcccctcgggccaccatgtactgcgaggctgatgaagatcagcttcgcagagatgacctcgactacttggaagagcgaaggcggcgcgcggccctccgagccgcgcgctaccagcagagcctgcggcgctaccatcagcgccacgtccgggcccgagcactctgcgtcgacgacctcgtcctgcgccgcgtccaaacgcgtgctggattgagcaagctctcaccaatgtgggagggtctgtatcgagtgatcggcgtcccccggccgggctccgttcggctggccacgggcgacggcacagagttgcctaacccgtggaacatcgaacaccttcgtcgcttctacccctaa

SEQ ID NO: 76388 - DNA, 4842 bp, Oryza sativa
  Clone ID: PAT_MRT4530_76388C.1
atggccgaacaagcaaaggcgcacaacctctctccgagtgttagcggtgacgacggggagccgaacccacgccgtcgagctcgtactccaccgccccctccacgccaaagtcctaggcaggaggaggcgctcgagagggtcgaaggatccgcgacttcgacatccacgggtgatggggaagggcggcgagatggggagcgtcgcctccttgtctacggcgacggcagcacgccccagggcgcgctcctacgtcacccgcccattgtccctgacccggagtctccagcccaacgttggttggacgacgtggccaacttggtcatgacggcacggcagcgcctaggtgctggtgggcggtcctccgccaccaagacctctggcgctgctaccaccggctccgtgtcgtcaaggcggagggcgcggcgagcggcggctgttgctcgccattcagccgccactccttccctttgtggcgagccttcggaacgtccgttggcccccaaggttccggcccacatcgccgaaaaatatgacgggagcgtcaaccccgccgagtttctccaggtctacacgaccgggatcgaggccgccaggggtgacgacagggggggtgtgcggcacaaccgcatgctcgaaaagatcgcctccaaagagccccagactaccgcggagctttttcagctcgcggaccgagtggctcgtaaggaagaggcatggacctggaacccctccggttccggtgtggcagcttcggccgcccccggatccgctgctcggacagggcggcgtgacaggaggaggaagaagaggtcagcccattctgacgacgagggtcatgtcctcgccgtcgagggcgctccgtgggccacccgaaaggggaggcctgcgagcgaccaaaagaaggaggccggcgctctcagtagggagcgcccaaccggcatgtggtgcatcgtccacaacacctcccttcatgacctcgcggactgccgcgcagtcaaaagtttggctgagcggacgaggaagtgggaggaggagaggaggcaggagcgccgagagggcaagtccccggcggttccttccggcaatcggcgaagtgaggccaagcagaaggcccccgccgaggacatcgatgacggcgatgatgacctaggtttccaagagcctggggccaccattgccactgtcgatgggggagcgtgtgctcacgtttctcgccggagcctcaaggccatgaagcgagagcttctggccgcggcccctactcatgaggcgacgcgccgggggcggtggtcggaggttgccctcaccttcgaccagaccgaccacccaccgtgcgttgcccggggaggacagatcgcaatggtggtttcccccactgtttgcaacgtgaagctggggcgtgtcctcattgatgggggagcagccctcaacatcctttcccccgcagcctttgacgctatcaaggccccggggatggtgctccggccgtcccagccgattatcggtgtgacgccgggtcacacttggccgctaggtcatatcgacctcccggttaccttcggtggatccgccaacttccgcacggagcgggtgaactttgatgtggcggacctcagtctgccctacaacgcggtcctagggaggcccgcgttggtgaagttcatggcggcagtccactacgcctacctccagatgaagatgccgggccccggtggccccatctctgtccatggcgacctcaaagtcgcgcttgcttgtatggagcagcgcgcggaccacctcgccgccgcgtccaagcccaagggaggcgacgagaggcttggcacctccgcccccgccgtcccgaggcagcggatagtcacatgcgacgaggtcccggaagacgcgctcgtctctttcctgtgggcaaacgctgacgtcttcgcatggagaccggcggatatgcccggggtccccagggaggtgattgagcaccgtctcgcagtgcggtcgggcgcaaggccggtccggcagaaagtacggcggcaggccccggaacgtcaagccttcatccgcgaggaggtggcgcgacttctggaggccggattcatccgcgaggtcatccatccggagtggctggcgaacccggtggtcgttcccaaggcgaacggcaagcttcggatgtgcatcgactacaccgaccttaacaaggcatgtcctaaggacccttaccccctgcctcgcatagatcagattgtcgactccacagcggggtgcgaccttttgtgttttctagatgcatactctggttaccatcagattcgcatggctagggaggatgaggaaaaaactgcattcattacccccataggaacttattgttatacgacaatgcccttcgagttaaagaatgcaggtcctacttttcaacgtactactcgaatttctttaggtagccaaataggacgtaatgttgaggcttatgtcgatgacttggttgtaaagacgcgcaaccaagagaccttactctcggatctagcagaaacttttgagagtctccgctccgcccgcataaaactgaaccccgataagtgcgtgttcggtgtacctgcgggcaagcttctcgggtttttggtctctgcccgaggcatcgaggccaaccccgagaagatacgagctatagagcggatgcgcccccccagcaaacttagggatgtgcaatgcgtcaccggttgcatggccgccctaagtcggttcatatcgaggctgggagagaaggctctacccttatttaagctcctcaaacgctccgggccgtttacttggacggaggaagctgaacgtgccctcactcagttgaaggcgtatctcagctctcccccagttctggtcgccccggagccaaatgaacccttgctactctacttagcggcgaccccgcaagtggttagtgtggcgttggttgtggagcgcgatgaggacaatcctcattccgcgcacccccaccctgtgctggcttggcccgggagagagccgggaggagaggcccccgagccgaacggtggcccaaggcccccgacgaccggagcaggccctctgcccgcttgtcagacggtgccaggtgcccccgacccccaggatggcccgagggccactgcgggaaggccgcacctatcgccctctgaccccgaggctaaccctgtgccgactcgacccgggagagagcagggagaagaggcccccgagccgaacggtggcctaaggcccctgaccaccggagttggccctttgcccgcttgtccgacgacgccaggagcccccgacccccaggacggccccgaggccactgtgggaaggccgcccctgtcgtcctccgaccccgaggtcgtcggcacagaggacgagtgcacccctgaggccctccgggacgccaagacccgataccctcaggcccagaagatgctttacgctattctgatggcttcgaggaaactgcgccattatttccaggcacatcgggtcacggtggttacgtcttaccccctcggccaaatcttgcataatcgagagggaactggacgggtggtgaaatgggcaatcgaactttctgagtttgatttgcactttgaaccacgccacgctatcaagagccaggccctcgccgattttgtggcagagtggaccccagctcccgagcccgtctcagtccccgaggccagctcgggcccctcgcagctgcctcacaccgcccactgggtgatgcagttcaacggctccctgtctcttcagggcgccggtgcgggggtcacgttgacctcgccgagcggagaggtcctcagatatttggttcgctttgactttcgggcgaccaataatatggcagagtacgagggactccttgcgggactcagggtggcagctggactggggatccgccgcctcctggtgttaggcgactcccagctggtcgttaaccagataagactctacccgaggaccgcgaagggagtgaacgcgtccaacgcatctccaaacgctacgtgctggcgggccccgggcgggtttgagtatctgtatgtcgcgatcgacaagttcactaagtggcccgaggcttatccggtcgtcaagatcaataagcactccgcacttaaattcattaagggcatcacagcccggtttggagtgcctaaccgtattattacggataacggcacccaattcactagtgaacttttcggcgattactgcgaagacatgggcatcaagctctgcttcgcctcacctgcccaccccagaagcaacggccaagtggagcgcgccaatgcggaaatcctcagaggccttaaaaccaagaccttcaacatcctcgagaagcacggcgattcgtggatcgaggagttgccagcggtgctctgggcgaaccgaaccacgccaagccgagcaaccggggaaacgcctttcttcctcgtctacggcgcggaagcggttctcccatccgagctcaccctgaggtcccctcgggccaccatgtactgcgaggctgatgaagatcagcttcgcagagatgacctcgactacttggaagagcgaaggcggcgcgcggccctccgagccgcgcgctaccagcagagcctgcggcgctaccatcagcgccacgtccgggcccgagcactctgcgtcgacgacctcgtcctgcgccgcgtccaaacgcgtgctggattgagcaagctctcaccaatgtgggagggtctgtatcgagtgatcggcgtcccccggccgggctccgttcggctggccacgggcgacggcacagagttgcctaacccgtggaacatcgaacaccttcgtcgcttctacccctaa

SEQ ID NO: 76389 - DNA, 4518 bp, Oryza sativa
  Clone ID: PAT_MRT4530_76389C.1
atggccgaacgggcagtggcgcacaacctctctccgagcgctagcggtgacgtcggggagcagaacccgcgccgtcgagctcgtactccaccgcccccctctcgccgaagtcttgggtgggaggaggcgctcgagggggtcgaaagatccgcgacttcgccacccacgggcgatggagaaggacggcgagacggggagcgtcgcctcctcgtctacggcgatggcagcacgccccagggcgcgctccaggctgcgggcgcgctcctgcgtcacccgcccgtcgtccccgatccagagactctagcccgaccatcgcctaggcgccggcgggcggtcctccgccaccaaggcctctggcgctgctaccgccggctccgtgtcgtcgaggcggagggcgcggcgagcggcggccgtcaaccgccgttcgtccgccattccctcgtcaacgcctccgacccaagaagatgtgcgtggggggccggatgcccgcctcaatatcgagcgccggcgcaatggtcgtcgtgttgcccacgcaacggagggcgcttcctcgtccggagcgccacttcggcccgggcacgggggccaccccccgtgtccccggttggcggtgtcggctatcgagcctttgtggcgagccttcggaacgtccgttggcccccaaggttccggcccaccatcaccgaaaaatacgacggaagcgtcaaccccgccgagtttctccaggtctacacgaccgggatcgaggccgctgggggtgacgacagggtcatggcgaatttcctccccatggccctgaagggtcaggcgcggggttggctaatgaacttgccacccgcatcggtccactcttgggaggatttgtgccagcagttcactatgaacttccagggcatatatccgcgcccaggtgaagaagcggacttgcatgcggtacagcgaagggacgatgagtctcttcgctcgtacattcagcggttctgtcaagtccgcaacaccataccatgcatccccgcacacgcggtgatctacgcgttcagggggggcgtgcggcacaaccgcatgctcgagaagatcgcctccaaggagccccagaccaccgcggagctttttcagctcacggacccttcggccgcccccgagttcgccgctcggtcagggcggcgggacaggaggaggaagaagaggtcggcccatttcgacgacgagggtcacgtcctcgccgtcgagggcgcttcgcgggccacccgaaaggggaggcttgcgagcgacaaaaagaaggaggctcgcgctcccagcagggaacgcccgaccggcaaatggtgttccgtgcacaacacctccctccacgacctcgcggactgccgcgcggtcaaaagtttggctgagcggacgaggaagtgggaggaggagaggaggcaggagcgccgtgagggcaaggccccggcgcctcccaccggcaaccggcgagatgaggccaggcagaaggccaccgccgaggatgtcgacgataacctggggttccaggagcctgaggccaccatcgccaccgtcgatgggggagcgtgcgctcacgcttctcgccggagcctcaaggccatgaagcgagagcttctggccgcggcccctacccatgaggcgacgcgacgagcgcggtggtcggaggttgccctcaccttcgaccagaccgaccacccgccgtgcgttgcccggggaggacagatcgcgatggtggtttcccccaccgtttgcaatgtgaagttggggcgtgtcctcattgacagaggtgcagccctcaacatcctttcccccgctgcctttgacgccatcaaggccccagggatggtgctccggccgtcccagccgatcatcggtgtgacgccggggcacacttggccgctaggtcatatcgacctcccggtcaccttcggtggttccgctaacttccgcacggagcgggtgaacttcgatgtggcggacctcagtctgccctacaacgcgatcctggggaggcccgcgttggtgaagttcatggcggcggtccactacgcctatctccagatgaagatgccgggccccggtggccccatcaccgtccatggcgacctcaaagtcgcgcttgcttgtatggagcagcgcgcggaccacctcgccgcggtgtccaagcccgcgggtggcgacgagagactcagcacctccgtcccagccgccccgaggcagcggatgatcacatgcgacgaggtctcggtcaaggaggaagacgtgctcgtctccttcctgcgggcaaacgccgacgtcttcgcctggagaccggcggacatgcccggggtccctagggaggtgattgagcaccgtctcgccgtgcggccaggcgcaaggccgatccggcagaaagtgcagcggcaggccccggaacgtcaagccttcatccgcgaggaggtggcgcgacttctggaggccggattcatccatgaggtcatccatccggaatggctggcgaacccggtcgtcgtccccaaggcgaacggcaagcttcggatgtgcatcgactacaccgacctcaacaaggcatgtcctaaggacccttaccccctgccacgcatagatcagattgtcgactccaccgcggggtgcgaccttttgtgttttctagatgcatactctggttatcatcagattcgcatggctagggagaatgaggaaaaaactgcattcattaccctcataggaacttattgttatacgacaatacctttcgggttaaagaatgcaggtcctacttttcaacgtactactcgaatttctttgggtaaccacgcgcaaccaagagaccttactctcggatctagcggaaactttcgaaagtctccgctccgcccgcataaagctgaaccccgacaagtgcgtgttcggtggtcagcgcggcgttggtcgtggagcgcgacgagaacaaccctcactccgcgcatccccaccctgtgtcgactcgacccgggagagagcagggaggagaggctcccgagccgaacggcggcccgaggcccccgacagccggagctggccctctgcccgcttgtccgacggtgcctgtcgccctccgaccccgaggtcgttggcacagaagccgagtgcgccccgcgtggcctctcggacgaagagcgccctgggaatgcggcccctggcgaagaggatcggccccgccgaaaggtgcagcggcccgtctacttcgtcagcgaggccctccgggacgccaagacccgataccctcaggcccagaagatgctttacgctattctgatggcttcgaggaagttgcgccattatttccaggcgcatcgggtcacagtggttacatcttaccccctcggccaaatcttgcataaccgagagggtactggacgagtggtgaaatgggcaatcgaactctctgagttcgatttgcactttgaaccacgccacgcgatcaagagccaggccctcgccgactttgtggcagagtggaccccagctcccgagcccgtctctgtccccgaggccagctcgggccccgcgcagctgcctcacaccgcctactgggtgatgcagttcgacggctccctgtctcttcagggcgccgggcggggggtggcagctggactggggatccgccgcctcctggtgttaggcgactcccagctggtcgttaaccaggtctgtaaggagtaccggtgctccgacccgcagatggatgcttacgtgcgccaggtgcggcgtatggagcgccatttcgacgggatagagcttcggcacgtgcccagacgggataacgcggtcgccgacgaactctcaaggctcgcttcttcgcgagcccagaccccaccgggcgcctttgaagaaaggcttgcccagccgtcggcgcgacccgaccccctaggggagacggacgcgcctgaacggcccccgaggcccgtcggagtccaggcctcgggacccgaggggagcactcccagctcccttagattgatcgcttggatcgctgagatccaggcgtacctcacagataagactctacccgaggaccgcaaagggagtgaacgcgtccagcgcatctccaagcgctacgtgctggtagaagggaccctgtatcggcgcgcggctaacggagtcctcctgaagtgcattcctcgggaacaaggcgtcgagcttctcgccgatattcatgaagatcagcttcgcagagacgacctcgactacttggaagagcgaaggcggcgcgcggccctccgagccgcgcgctaccagcagagcctgcggcgctaccatcagcgccacgtccgggcccgatcactctgcgtcgacaacctcgtcctacgccgcgtccaaacgcgtgttggactgagcaagctctcaccaatgtgggagggtccgtatcaagtgatcggcgtcccccggccgggctccgttcggctggccacgggcgatggcacagagttgcctaacccgtggaacatcgaacaccttcgtcgcttctacccctag

SEQ ID NO: 76390 - DNA, 1793 bp, Oryza sativa
  Clone ID: PAT_MRT4530_7638C.1
ctatgaaaatgtccagttatactcgtccaaattttccttggccgctgcactgcggttcattcctatgttgatcctctcatctcgcagcatgttcatgctgggagccaacaatcttgtgtagcgatcaaaatacagaagctgcttcatcagaagagcgaattcgcgaggaaatttcaatccatacgactcgctgaccctcaccagatcaagaaacaatgcattcatctgtctctcgtcaacgacaacattagccgatactgctgtagcatcaggagttcttgctgttgcaactatgacttcagtatccaaatcctgtattgatgagaatattttttccaagtcctttgcaaattcattaacatttatatcattccctgtagcacccatttcagaaagggctgatgccatagcattataatcgtcagttgcaaatgaagccaaaaagacctccattgcagcccaggtccttggcgatatccggccaacaattccaaaatcaagaaatccaacacgtccatctcggagcaaccataaatttcctgcatgcacatctgcatggaaggattcacatgaaatcaagcttccaaaccagacattaagtgcagtgactaaagtcagctcaggatcaggaacaagagaccttatagaatcaaggtcagtgagtggaacaccgtacaatctttccatagttaggacacgctttgtgctacagtggcgatacacaaaaggggctttggcctgcctgtcaaatcccattgcatcgatgtacctctgaaaagcctcaatattcatagcctctttcctgaaatcaacttcttcaagcatagattcctttatatccttgacaattcctaccagtgatgtcctctgtagttcagggtttagaaattccaaaatacgtgcaacaacatagataaaattcaggtcagccaccaaagtgtcttcaataccaggcttgaggaccttgataaccacatccttctgagagctcttcaaccttgccccatgaacctgtgctattgacgcagaagctattggaactggatcaatgtattcatatacactatccaacggctgttgcaactcctcacgcaatattgactcaatctcactatatggaacaggtggtgcacggtcaaaacagttctggaattcctcgacatactctgcaggaaacaaagttggtgcagaagctacgaactgacctagcttgatataagttgcacccatgcgctcaaaaagccttctaagataaagaggagaaagcaaacccagctgcatctgagctggtattcctgctgatgtgttggctgtctttgagaagtcatttagccactccccaccaaccccaaggacagcttggatcccttgggcaaacctaaaagcacctcgtggccctgtgctaattgatgtctgtagaaggtcctcaaccaacttaggcaattcgccagctctatcttggaggcgagtggagaagtcctgggcctggctgtacctcgcgaaaaccctaatcccgacccgccgccccttctcccggctggccctgatcctcctccccacacgcgggggcgagcctcccccgccgcccgccaccagggggaggaggcggaggcggcggtggtgcgcggggtggtggggttaaaatgacaggtgaatgacggttgtacgacaatgcaaaagtcaaagcttaagtaaaaaaaggagataaatgcccatgggaacatagccagtagaaccacaacaatgtactataaatccggacgcgtgggcggacgcgtgggcggacgcgtggg

SEQ ID NO: 76391 - DNA, 5727 bp, Oryza sativa
  Clone ID: PAT_MRT4530_76390C.1
atggccgaacaagcaaaggcgcacaacctctctccgagtgttagcggtgacgacggggagccgaacccacgccgtcgagctcgtactccaccgccccctccacgtcacccgcccattgtccctgacccggagtctccagcccaacgttggctggacgacgtggccaacttggtcatgacggcacggcagcgcctaggtgctagtgggcggtcctccgccaccaagacctctggcgctgctaccaccggctccgtgtcgtcaaggcggagggcgcggcgagcggcggctgttgctcgccattcagccgccactccttcgtcagcgcctccgacccaggaagatctgcgtggggggccggatgcccgcatcagtatcgagcgccggcgtaatggccggcgtgctgcccacgcaacggagggcgcctcctcgtccggagtgtcacatcaacacggacgcggggatcagccctccgtgcccccggttggtggtgtcggctgtagagcctttgtggcgagccttcggaacgtccgttggcccccaaggttccggcccaccatcgccgaaaaatatgacgggagcgtcaaccccgccgagtttctccaggtctacacgaccgggatcgaggccgccgggggtgacgacagggtcatggcgaatttctttcccatggccctgaagggacaggcacggggttggctaatgaacttgccacccgcgtccgtccactcttgggaggatttgtgccaacagttcaccatgaactttcaaggcacatatccgcgcctaggtgaagaagcggacttacatgcagtccagcgaagggatgatgagtcacttcgctcatacattcagcggttctgtcaagtccgcaacaccataccatgcatccctgcacacgcggtgatctacgcgttcagggggggtgtgcggcacaaccgcatgctcgaaaagatcgcctccaaagagccccagactaccgcggagctttttcagctcgcggaccgagtggctcgtaaggaagaggcatggacctggaacccctccggttccggtgtggcagcttcggccgcccccggatccgctgctcggacagggcggcgtgacaggaggaggaagaagaggtcagcccattccgacgacgagggtcatgtcctcgccgtcgagggcgcttcgcgggccacccgaaaggggaggcctgcgagcgacaaaaagaaggaggccggcgctcccagtagggagcgcccaaccggcaagtggtgcatcgtccacaacacctcccttcacgacctcgcggactgccgcgcagtcaaaagtttagctgagcggacgaggaagtgggaagaggagaggaggcaggagcgccgagagggcaagtccccggcggttccttccggcaatcggcgaagtgaggccaagcagaaggcccccaccgaggacatcgatgacggcgatgatgacctaggtttccaagagcctggggccaccattgccactgtcgatgggggagcgtgtgctcacgtttctcgccggagcctcaaggccatgaagcgagagcttctggccgcggcccctactcatgaggcgacgcgccgggcgcggtggtcggaggttgccctcaccttcgaccagaccgaccacccaccgtgcgttgcccggggaggacagatcgcaatggtggtttcccccactgtttgcaacgtgaagctggggcgtgtcctcattgatgggggagcagccctcaacatcctttcccccgcagcctttgacgctatcaaggccccggggatggtgctccggccgtcccagccgattatcggtgtgacgccgggtcacacttggccgctaggtcatatcgacctcccggtcaccttcggtggatccgccaacttccgcacggagcgggtgaactttgatgtggcggacctcagtctgccctacaacgcggtcctagggaggcccgcgttggtgaagttcatggcggcagtccactacgcctacctccagatgaagatgccgggccccggtggccccatctctgtccatggcgacctcaaagtcgcgcttgcttgtatggagcagcgcgcggaccacctcaccgccgcgtccaagcccgagggaggcgacgagaggcttggcacctccgcccccgccgccccgaggcagcggatagtcacatgcgacgaggtcccggaagacgcgctcgtctctttcctgcgggcaaacgctgacgtcttcgcatggagaccggcggatatgcccggggtccccagggaggtgattgagcaccgtctcgccgtgcggtcgggcgcaaggccggtccggcagaaagtacggcggcaggccccggaacgtcaagccttcatccgcgaggaggtggcgcgacttctggaggccggattcatccgcgaggtcatccatccggagtggctggcgaacccggtggtcgttcccaaggcgaacggcaagcttcggatgtgcatcgactacaccgaccttaacaaggcatgtcctaaggacccttaccccctgcctcgcatagatcagattgtcgactccacagcggggtgcgatcttttgtgttttctagatgcatactctggttaccatcagattcgcatgactagggaggatgaggaaaaaactgcattcattacccccataggaacttattgttatacgacaatgcccttcgggttaaagaatgcaggtcctacttttcaacgtactactcgaatttctttgggtagccaaataggacgtaatgttgaggcttatgtcgatgacttggttgtaaagacgcacaaccaagagaccttactctcggatctagcggaaacttttgagagtctccgctccgcccgcataaaactgaaccccgataagtgcgtgttcggtgtacctgcgggcaggcttctcgggtttttggtctctgcccgaggcatcgaggccaaccccgagaagatacgagctatagagcggatgcgcccccccagcaagcttagggatgtgcaatgcgtcaccggttgcatggccgccctaagtcggttcatatcgaggctgggagagaaggcgctacccttatttaagctcctcaaacgctccgggccgtttacttggacggaggaagctgaacgtgccctcactcagttgaaggcgtatctcagctctcccccagttctggtcgccccggagccaaatgaacccttgttactctacttagcggcgaccccgcaagtggttagtgcggcgttggttgtggagcgcgatgaggacaatcctcattccgcgcacccccaccctgtgctggcttggcccgggagagagcagggaggagaggcccccgagccgaacggtggcccaaggcccccgacgaccggagcaggccctctgcccgcttgtcagacggtgccaggagcccccgacccccaggacggccccgaggccactgtgggaaggccgcccctgtcgtcctccgaccccgaggtcgtcggcacagaagacgagtgcaccccgcgaggccgcttggacaaagagcaccccagggatgtggcccctagcgaagaggatcggccccaccgaaaggtgcagcggcccgtctactttgttagtgaggccctccgggacgccaagacccgatacgctcaggcccagaagatgctttacgctattctgatggcttcgaggaaactgcgccattatttccaggcgcatcgggtcacggtggttacgtcttaccccctcggccaaatcttgcataatcgagagggtactggacgggtggtgaaatgggcaatcgaactttctgagtttgatttgcactttgaaccacgccacgctatcaagagccaggccctcgccgattttgtggcagagtggaccccagctcccgagcccgtctcagtccccgaggccagctcgggcccctcacaactgcctcacaccgcccactgggtgatgcagtttgacagctccctgtctcttcagggcgccggtgcgggggtcacgttgacctcgccgagcggagacgtcctcaggtatttggttcgccttgactttcgggcgaccaataatatggcagagtacgagggactccttgcgggactcagggtggcagctggactggggatccgccgcctcctggtgttaggcgactcccagctggtcgttaaccaggtctgtaaggagtaccggtgctctgacccgcagatggacgcttacgtgcgccaagtacggcgtatggagcgccattttgacgggatagagcttcggcacgtgcccagacgggataacacggttgccgacgaactctcacggctcgcttcctcgcgagcccagaccccaccgggcgcctttgaagaaaggcttgcccagccgtcggcgcgacccgaccccttaggggagacggacgcgcctgacaggcccccgatgcccgtcggagtccaggcctcgggacccgaggggagcgctcccagctcccttagattgattgcttggatcgctgagatccaagcatacctcacagataagactctacccgaggaccgcgaagggagtgaacgcgtccaacgcatctccaaacgctacgtgctggtagaagggaccctctatcggcgtgcggctaacggaatcctcctgaagtgcattcctcaggaacaaggcgtcgagcttcttgccgatatccatgaaggcgaatgcggatcccactccgcctcgcgcaccttggttggcaaagcctttcgacaaggtttctattggccgacagctctcaatgatgcggtcgacctggtccggcgatgcagagcgtgtcaattccacgccaagcaaatccatcagccggcccaggccctgcagatcataccactttcatggccatttgctgtctgggggttcgatatcctgggaccgtttaggcaggccccgggcgggtttgagtatctgtatgtcgcgatcgacaagttcactaagtggcccgaggcttatccggtcgtcaagatcgataagcactccgcacttaaattcattaagggcatcacagcccggtttggggtgcctaaccgtattattacggataacggcacccaattcactagtgaacttttcggcgattactgcgaagacatgggcatcaagctctgcttcgcctcacctgcccaccccagaagcaacggccaagtggagcgcgccaatgcggaaatcctcagaggccttaaaaccaagaccttaaacatcctcaagaagcacgacgattcgtggatcgaggagttgccagcggtgctctgggcgaaccgaactacgccaagccgagcaaccggggaaacgcctttcttcctcgtctacggcgcggaagcagttctcctatccgagctcaccctgaggtcccctcgggccaccatgtactgcgaggctgatcaagatcagcttcgcagagatgacctcgactacttggaagagcgaaggcggcgcgcggccctccgagccgcgcgctaccagcagagcctgcggcgctaccatcagcaccacatccgggcccgatcactctgcgtcgacgacctcgtcctacgccgcgtccaaacgcgtgctggattgagcaagctctcaccaatgtgggagggtccgtatcgagtgatcggcgtcccccggccgggctccgttcggctagccacgggcgacggcacagagttgcctaacccgtggaacatcgaacaccttcgtcgcttctacccctaa

SEQ ID NO: 76392 - DNA, 190 bp, Oryza sativa
  Clone ID: PAT_MRT4530_76391C.1
accttttctttcacaatacgggcatacacagcctagggcgcaatggccgacattagggttcatttattggacaacaacatggaaagcactcttgtgaacatgagtgtaaacagaccgttcaccataccagtggaaacatcggctggcatcacgatatgggacacaacaacatttgctgtcatgcaaaacc

SEQ ID NO: 76393 - DNA, 3658 bp, Oryza sativa
  Clone ID: PAT_MRT4530_76392C.1
ggcacgagagactgtgcaggagagaccaccccctccctccttctagaagactagaaccctcgccatcctccccttcccccaccctagcgtcggcggcggcggcggtggcggcggaaatgagcgtgtggaactacgtcgtgacggcgcacaagcccaccagcgtcacccactcctgcgtcggcaacttcaccggccccaaccagctcaacctcatcgtcgcgaaatgcacccgtatcgagatccacttgcttactcctcaaggcctccagcctatgattgatgtacctatctatggaagaatcgccacactagagctcttccgccctcataatgagactcaggacttccttttcattgcgactgaaagatacaaattctgtgttctgcagtgggatggagaaaaatcggagcttctcactagagcgatgggagatgtttctgatcgcattggtcgccctacggacaatggacagattgggatcatcgaccctgactgtagacttattggtcttcacctctacgatggattatttaaggttataccgtttgataacaaagggcagctgaaggaagctttcaatatcaggcttgaagaacttcaagtattggacatcaagttcctgtatggctgtgttaaacctactatagttgtcctctaccaggataacaaagatgcaagacatgttaagacatatgaagttgcattgaaggacaaagactttgttgagggtccttggtcgcagaacaatttagacaatggtgctggtctgttaatacctgtaccagctcctcttggtggtgtcataattattggtgaggagacaatagtttactgcaatgccaactctacatttagagctataccaatcaaacagtcaatcataagagcttacggacgggttgacccagacggttcgcgctatttacttggtgataatgcaggcatattgcatttacttgtccttacccatgaacgagagagggtaaccggtctgaaaatcgagtacttgggagagacttcaattgcatcatcaatatcatatctcgataatggtgttgtctacgttggttctcgatttggtgattcacagcttgtaaaactaaatctccaagctgacccaaatggttcatatgttgaagttcttgagcgatatgtgaaccttggacccatcgtggacttctgtgtggttgaccttgacaggcagggtcagggtcaggttgtcacttgttcaggagcatttaaagatggttcccttcgggtggttcggaatgggataggtatcaatgagcaggcttcagtagaactacaagggatcaagggtttatggtcgttgaaatcttccttcaatgatccgtatgacatgtacctagttgtgagctttataagcgagacaagattcttggctatgaacatggaagatgagttagaagaaactgagatagaaggctttgatgcgcagactcagactttgttttgtcaaaatgccatcaatgatctgcttatacaggttactgctaattctgttcgtctggttagttgtacctctcgggagctagtggatcaatggaatgcaccagaaggattttcagtcaatgttgcatcagctaatgccagtcaggttctgctggcaacaggtggtggccatcttgtttacctcgaaattaaggattctaagctggttgaagtgaaacatatacagttagaacatgagatctcctgtgttgatttgaatccaattggggagaatccacagtatagctctctggctgctgttgggatgtggactgatataagtgttagaatactttcatttccagaccttgaattaatcaggaaggagaacttaggtggagaaattgttcctcggccggttctgctttgtaccttggaaggggtttcatatttgctctgtgctcttggagatggtcatctgttcagttttctgttgaatgcaagtacgggtgaattaactgatagaaagaaggtttctcttggtacccaaccgataagccttcgtacattctcatcaaagggtacaacccacgtgtttgcttcatcggatagaccgactgttatttatagcagcaacaagaagttgctgtatagcaatgtcaatttgaaggaagtcaaccatatgtgtccttttaatacagctgctattcctgacagccttgcaattgctaaagaaggtgaactctcaattggaaccatcgatgacatccagaagcttcatatccgtacaatccccttgaatgaacaagcacgtcgcatttgccatcaggaacagtccaggacactagcgttctgcagcttcaagcacaaccagactagtatagaggaaagcgagacacattttgttcgtcttttggatcatcaaacttttgagttcctgtcaatttatcagcttgatcaatatgagcatggctgctccatcattagctgctcattctcagatgataataatgtttattattgtgtgggaacagcatatgttttaccagaggaaaatgaaccatcaaagggccggatccttgtatttgcagttgaagatggcagactgcaattaattgtagagaaagaaactaaaggagctgtctattcgctgaatgcattcaacggaaaattgttggcagctatcaaccagaagattcaactatataagtggatgctacgggaggacggttcacatgagctgcagtctgagtgtgggcatcatgggcacatattggctttgtacactcagactcgtggcgatttcattgtagttggagacttgatgaaatcaatatccttgctcgtgtacaagcacgaggaaagtgcgattgaagagcttgctagggattacaatgcaaactggatgagtgcagttgagatgcttgatgacgagatctatattggagcagagaataactacaacattttcactgtgcggaagaacagtgatgcagcgacagatgaagagaggggcaggctggaggttgttggagagtaccatcttggagagtttgggaatagactccggcatggttcgctggtaatgcggcttccggactcagagatgggccagatcccgacggttatctttggcaccatcaacggggttattgggattattgcttcgcttccacatgagcagtatgtatttcttgagaagctccagtcgactctggtgaagttcataaagggcgtggggaacctgagccatgagcaatggcggtcgttccacaacgacaagaagacgtcggaggcccgcaatttcctggatggtgacctgatcgagtcattccttgatctaagcagaaacaagatggaggaggtggccaagggtatgggggtccccgttgaggagctatccaagagggtggaggagctgactagattgcactaggtctcgataatgatgatataattaatacgtagaagatgtttgctggaacttatttctgaaatgtatatttttttttctactccagtttattaagcatgtgttggtgggttgaatgttgatgccgctggtggcacaggaagaagcattcctgttaagaagagttactaagttacccatgtggttcggttgtagattttactctgttttgttggttggatggtccagtaattaacgtttgagctgccagttttaaaaaaaaaaaaaaaaaa

SEQ ID NO: 76394 - DNA, 465 bp, Oryza sativa
  Clone ID: PAT_MRT4530_76393C.1
actgtggcaagaaatgcgctgtcgtaaactgttgtgctttgcatgtcctcatctcgttcctggtggtggtgctgctgcttggccagtaattgtccaacctccaagttttgccctcagtagactgatacatatgctgtacaggaactcttaggagaaatgaacttacactgagtgaaacttcagcaaccctttcaaacttgttttgtgcatgttgacggttcagtgaaaagcatgcctggttctccatgtgctcttggagcactatttcgtagtcatagacaggacttgggtacaagaaaaaaatgttctgggggacctcaattgcttaatgtaactaaccacccctttgctacaggctctgcaatgccatgtttcttagagttgtttttgaatggctgatcttcaatatcagtcattctactaccagagaagttgatgcaaaaaaaaaaaaaaaaaaagaaaaaa

SEQ ID NO: 76395 - DNA, 311 bp, Oryza sativa
  Clone ID: PAT_MRT4530_76394C.1
agcgcctgcgcctgggcctacccgttggagtgctgggacagcggttactggatgtcgtacctgtgggcggacgacccggaggtgcgcgccatgctgggcattcacgagggctccatcgcttactggagccgctgcacggcgctgatgctcttccggcacgacgtggacagcgccattccttaccacgcggagcttacgcagtgcggctacagggcgctggtgtacaacggtgaccacgactctgtacatgactgtttttggcacgcagtactggatccggtcgctgggctacaacgtggagaccgcctgga

SEQ ID NO: 76396 - DNA, 429 bp, Oryza sativa
  Clone ID: PAT_MRT4530_76395C.1
atgcggggatctggcagtcggccgccgccggctggggcggatggggcgaggtcgcggggatttggtgcggagtcgacggcggcggcgttggtggcgagggaggagggcgaaaaaggcggcgagaaggcggcgtgggagaaggaggagtgggcgtggggagtacattcagtgaacgaacagagaacgatcgactccggccaggccatgtccaccaccggcggcagccgtaggccacctctgcggtcagcctccgccgtcgttgccggcaccgagagcgggcagcacctgctcaagacggagggctactcccgcgtcagggacgcgatcccaaacggcgccagcgtggacccctacctctgtggggaggaaatgaccccatcgaccgtcgtcgtcgtcgccaccgccgccgccgcatcatgggggaggtag

SEQ ID NO: 76397 - DNA, 1731 bp, Oryza sativa
  Clone ID: PAT_MRT4530_76396C.1
ataaaaacaagccattcaaaattattacaccagccattacaccagctgcggccggctgcttttatctgatttgacaatggacgtgacggccacccgacctctcttttcctactagctctcccctaccctacccctctttccttctagcagtagcctctactacagtctacacaccctctctatgcaaaacgcaatctcatctctgtgcagccactcatccgatatttccccccatttcttttcctctccactgtttccctcctcctttaattattcccccccacttcgcctagctttacaaacccccacaaatcgtcattctaaccaaaagaaatcagcaggattagccctagctaagtactcccaatagctgtgataaactgataattagccttctcttcttccttgctgagctggtcggtgtcgtgtaccaagaaaccctcatcaagcacatacgctaatggaggagcttgaaggccaccggggtgaaggccggctgcctcctcctcctccgttgctgccgtttcccaaggtctccgtgcaagtctacaccgttcctagctcgtccaccgccgcctccgccgccgctgcaggcggagctcgtcaggctgttgcaccggcgacgcgggacggcggcgacggcggcggccgcgccgccggagttcttgacgaccctgtcaaggccaggatcgtctcccaccctcgctaccaccgcctcctcgccgccttcctcgactgccacaaggttggctgcccggcggaggcggccgaggagatcgcggcggcggcgcgggtgcgggaggcgcggcagcgggcggccgcggcggcgagccgcatgccgccggcgccggaggacccggagctcgaccagttcatggaggattactgcaagctgctcgtggagtgtaaggaggagctcagccggccgctccaggaggccgaggagttcctcaggacggtggagtcagagctcaactccatcaattctgggccaccccttacagctctaatctcagaatccaaagccggcctcgattcgtcggacgacgacgaacacgaagacggcagcggcatggagatgatggaggccgcggaagacgaggacctcggcatcatcgaccctcgctccgacgacaaagcgctgaagaggcacctgctgaggaagtacagcggttacctgggaggcctgaggaaggagctgtcgaagaagaggaagaaagggaagctccccaaggaggcgaggcagaagctgctcacctggtgggagctccattaccggtggccgaacccgtcggagatggagaagatcgccctcgccgagtcgacggggctggagcagaagcagatcaacaactgtttcatcaaccagcggaagcgccactggaagcccacggaggagatggagttcgccgtcatggaggcctaccaccaccagagcaccgatgccgcggcggcgttctacgtcgacgtcgacgcccgcctcgtcggagcgacggcggcggctccggcatcggccgtgtacaccgccaggccggatcatggcgtgtggcgcgcatagccgttgctcgattcgcccgttgccgccatctggaattaatctgaactgcccttgcctgttacatatagtagggttgttgatgatggtttcatatgtttttccccaaagggaaagtcagcttggacattggaccaatcaagaaatgaaatctcagcaaaaaaaaaaaaaaaaaa

SEQ ID NO: 76398 - DNA, 546 bp, Oryza sativa
  Clone ID: PAT_MRT4530_76397C.1
cgcctggttgccactccgatctcttcagctcgatgctgcgccaaaccctagaccagcccgcgagcgccgccctcgccggctcccccttagggggttgccagagagccgatgctgtgggacgggtctgcgctgaccgaagaagggtatgagcggggcatacagggatcggacattcggaggcgcggcgggggaaatacaccggaaacgcatcaagagcacccgctctattagcacctgaacaggacggccacgaccacatccaggggggcggacgtgggcaaggagagggaccgcctcgccagcgcactggggaagctgaccgtgccggtcgacctggtcgagaaggcgtacgatggcgcacacaacgtttaaaatggcagtgacaattacgatgaccagtgagctctgatggagtagagacacatattgcatttgatgggtatgctggtcgagctgtattgagcgcttctgtgagagcgacgatgagtatatacaaggatgatttcaacctttgtggtgtgagcattcaagtgccgtactatgact

SEQ ID NO: 76399 - DNA, 594 bp, Oryza sativa
  Clone ID: PAT_MRT4530_76398C.1
agacaatcaaaccaccgccatccccaagctccggcctccaggaatcaatctaacaattaatcaccatggtgtggaggagcaagagcggcggcggtggcgcctcaccgagccgcgagaacggcggcgaggatgaggtcccgagagggcacgtcccgatggtcgccggcggcggcggcgactgcgacggcgacggcggggagcgcgtgatggtgccggtgaggctgctcggcgacccgtgcatcgcggagctgctggacatggcggcgcagcagtacgggttcggccagccgggcgtgctgcgtgtgccctgcgacgccgggcatttccggcgagtcgtcgagcgcgcgctgcggaagggcgccgccggcggccggtcagcatgacgcctgatgtgtcgtgcggtgtacatacacgttgtccgtgtattctttgattgatcaaattattgtaaccttggagtttctaaatagccgtcaagaaaatatgtgtatgcttgtcagcgacttgagtttcaaccgccaagacaatgactaaacttcccaaagaaatcaggtggccgccgattcttgcagtaatttgatactgatttttttt

SEQ ID NO: 76400 - DNA, 264 bp, Oryza sativa
  unsure (1)..(264): unsure at all n locations
  Clone ID: PAT_MRT4530_76399C.1
ngagcggngnancngntggctgagnaacggtgctgngnancggntngtggcggacgntangnggnagcaagaaccaccccgaggcatccatttgcacaccggaggcgtctcgagttcaagaggatcgccaatttccaggattaccacggcctcccggagttcagaaaggcgatggccagtttatggggcaggtnaggggaggcaaggcaacgtttnaccccgaccgtgtcgtcatgagcggcggcgcancgccaagggagaccg

SEQ ID NO: 76401 - DNA, 521 bp, Oryza sativa
  Clone ID: PAT_MRT4530_7639C.1
gggggggaaacccccaattttttaaaaaaaaaaaaaaaattaaaaaccctgcccccaaaaagccccaaaaaaaattttgggaaaacacatggttcccttatttaaaccccccccttttacaaaaaactacccccaaaaaattaatttttccccccccaaaacggggggggacctttttaaaaaaaaaattatttaaagggtcaaaattctcaggggccccaacaaaaaaataggccccccctttacttaaagggggagccccctcttattttcaaaccccccagggaacctttgggggaaaaaaaaatcaacaacccgggaccccccttttttgaaaaagaaacggacaaaaaaggggcccttgagcggccccccacttttaaacccccaggggtaaaaaaaaaaccccttgaaccccacccaatccttgccacccttttttttgatccccccccaaaaaaaggcaaccttgggaaaaaactttaaaatacgggggctaaagcccccaacgaccttgaagg

SEQ ID NO: 76402 - DNA, 520 bp, Oryza sativa
  unsure (1)..(520): unsure at all n locations
  Clone ID: PAT_MRT4530_763C.1
aaacaaatatttgatcattcatcttataaaaaaaatttatacaaatatataaaatataaatcacttaaagtattttgagtgataaaacaacttacaataaaattataactaattaatttttttaaacaaaacgaacggttaaacatgtgataaagagttaacaatgttatcttttaaaaacagaggtactaatattgattaagcataagcaggtcggctctttgaccaaacggcgcgaggaaggagcagaggcgggagggaggatgtctggctgtctgaacgcgtgaggagctcacactctgatcatccatccgcgggtgggttgacctcttcccggcggcgcggcgagagaagggaagacttcaacccggccgcggttggtggcgccatcactccccggcccccgcgcccaccatatacaccgaggcgtcgtcgcctccccgcaccttgcgcggactcttctcctcttnttcctccacctcctcctccacgatctccggtcaagcagagcacaagcgtg

SEQ ID NO: 76403 - DNA, 180 bp, Oryza sativa
  Clone ID: PAT_MRT4530_76400C.1
tcgatgacgcgtgagaagaattattatggatgatttagggttatgacaaaaagactttctgctctgacttatggtgatgcccaactgctgtttgagctgtatcttagcattgaaaaactgcgttgggagctctatgagaacttagaaacaaaggatgaaataaaaggaactacaaaataa

SEQ ID NO: 76404 - DNA, 756 bp, Oryza sativa
  Clone ID: PAT_MRT4530_76401C.1
ttatcgactacttcctctacaccgacatgcggctacgtcagactggtcttctctaactcttatttcactgcttagcacgtcggatggtgacgatccatgatcccttactcctcgaattcgacggatcgcggtttgaccgaagtgtgtgcaccggtctgaccgcctggttgtcatcggtctgacggatgtagatcgatcggtcgaaccgccaaaatcacctcctactgcctgcctgccgccgccggtctgaccgtcggtatatcgccggttagaccgccgaaacccagtgaaacagaagctccccctctatttatacccgaggtaggcagcctaaagccacgaaccaaactcatactagacgtcctaaacaccttacgaaaccctctagtacaagaaacaaactttacataaccaatcataccaaatttggactccttccaaattcaactccgcatcccatactcacacaatacctccatcgtatgccatatgaaatcttcaccaaccacgtgcatcaactctagccggcaaccaccgcccggtctgaccggtattcatcacctgaaaatcaattatctctaaaacctcttgaacaataatctctaaatatcaaaaccaataattacaaatgccaattgttcatcacagaataagaatcaaaacacatattgatcttacatgagttttccggtgtagcttttccttatcagtttccccttactcccttcggttttatattaattgacgttttaaaca

SEQ ID NO: 76405 - DNA, 1076 bp, Oryza sativa
  Clone ID: PAT_MRT4530_76402C.1
cgatttgcacggtgcgcacggccacgacatactcctcgaaatcgacggagatcggtctgaccgaagttgatctgccggtctgaccgagttgatgccgccggtctgaccggtgttgaatctccggtctgaccgccgaagtcaccctgccgcgcttgtcgccgccgccggtctgactgcttcgtatgccaccggtctgaccgccgcttgccgccggtagatcgctccccctctatttatacatgaggtagggagcctaaagccacgaaccaaattcatactaggagtcctaaacaccttaggaaacccactagaacaagaaagaaactttacataactaatcataccaaatttggactccttccaaattcgactccgcatcccatacgcacacaataactccatcaaccacgtgcatcaactctagccggcttccagagcccggtctgaccggtcacataaaatgacgatcctgcgatacacctgtaaatccaatcatctccaaaaccacttcgtgaataaattccaaataacaaaaccaataatctccaatgcccaattgttcatcacagaataataatcaaaaacacctttgattttacaggaaaccatcaatgcatggttttaagagcaaagaataacctcctgaaccttatttcttctagaaccttgtgatggtcaatgatgaaaaagctaccagggcttaataattcaatttgtgcctcgtatctatacaacatgtcaaaactttcattccagctcccatacaactttgtaagagcaagctctctaccaacaaacactcttttgtaattgatcaaaaccttgtgtgtctcatgaatccttctttgcaattcctttgctccaacagtagcatcctccaacaaccaatctttcaccttctcacaaatccaaaacttgcttgcagccttgatagtttcacttcttctagtacttgagcatccatgggcaacaagattagtttttaccatgatggtgacaccatcagcaaccgcacatgcatgaatcctccatttgcagccttcagcagcacaacttgcagtaaatttccctggttc

SEQ ID NO: 76406 - DNA, 602 bp, Oryza sativa
  Clone ID: PAT_MRT4530_76403C.1
ttttgtaagatcaaagtatgttttgattcttattctgtgatgaacaattggcatatgtgattattggttttgatatttggagattatcgtcgaagtggttttggagataatcaattttcaggagatgaatagggtttactggtttgtcgggaccggtcagaccgggcggaggttgccggctagagttgatgcacgtggttgatggagattccatatggcatacgatggaggtattgtgtgtgtatgggatgcggagtcgaatttggaaagagtccaaatttggtacgattggttatgtaaagtttctttcttatactagagggtttcctaaggtgtttaggactcttagtatgagtttggttcatggctttaggctgcctacctcatgtataaatagaggaggagcgtcagaccggcgacctaccggcggtcagaccgactaaggcgaggcggtcagaccggcggtggcggcaacagcgacaggagctggcgattaatctcggcgattcgaccggtgttacaacctcggtcagacagacgatatccaggcggtcagaccggtgctactacttcggtcagaccgcgatccatcgatttcgagg

SEQ ID NO: 76407 - DNA, 542 bp, Oryza sativa
  Clone ID: PAT_MRT4530_76404C.1
atccatacctcaataccgatccatgcatagatgctgctgtttacggggggaggcagtgcaactcagcagtattctctccttcaattggtggtaatggtctttcacgctatcgaactgatttccatgaaatagagaaaattggttatggcaacttcagtgttgtgttcaaagttctgaataggatagacgggtgcttgtatgctgctaaacggagcatcaagcaattgcataatgatatggaaaggaggcaagcagtgaaagaagtccaagctatggcagccttaggttctcacgagaacatagttcgatatttcacctcttggcttgagaatgagcaactttatattcagatggaactctgcgaccgctctctatctatgaatcggaaccagccagtgaagcatggggaagccctagaactgttgtatcagatctgcaaaggcttggatttcatgcacgaacgtggcatagcacaccttgatgtgaagcctgataacatatatgtcagaaatggtatttataagctcggggatttggctgtg

SEQ ID NO: 76408 - DNA, 484 bp, Oryza sativa
  Clone ID: PAT_MRT4530_76405C.1
actagtggatcccccgggctgcaggcaatcagagcacaatgcattccatgtccttgtaaccaatcaacacggtggctggtggtggctatcagatcgattgcgagtctggaatattctatgatagatgttttttttttctccaaattggatttttatagaaccacatgtttgatgaactcttttgccatgtagttggggatattttctgaagatcatcataaatcatctccagttggatggctgctttctggctatagtgcacgtatgtttgtgagttgtgtcaggttgatctagaattacattcagaaatacatgtcaaatatttgcgttatcaagcaccagcattttgtgctgtgaagttccaaaatactctgtactgtttacagtcaaacacctttcttataatttttcaggtaagagaacctttcatataaaacacaaagtacaggtttcttcaataccacctgtattagtgcagtaaaat

SEQ ID NO: 76409 - DNA, 681 bp, Oryza sativa
  Clone ID: PAT_MRT4530_76406C.1
gttatgtcccgtacaagtggtaaacgacatttgcaatcaaaaatcaaaggtgtttttgattattattctgtgatgaacaattggaattggagattattggttttgttatttggaatttattcacgaagtggttttggagatgattggattcacaggtgatcgcaggattcgtcattttatgtgaccggtcagaccgggctctggtagccggctagagttgatgcacgtggttgatggagattccatatggcatacgatggagttattgtgtgcgtatgggatgcggagtcgaatttggaaggagtctaaatttggtacgtttagttatgtaaagtttctttcttgtactagagggtttcctaaggtgtttaggactcttagtatgagtttggttcatggtttttggctgcctacctcatgtataaatagagggggagtgtcagaacggcagcattgcggcggtcagaccggcgggagcatggcggtcagaccggcggcggcgacagcgagcggcaggcgatctcggcggttagaccggtagatcaacaacggtcagaccggcggctacgcttcggtcagaccggctaatctacttcggtcagaccgatctcatcgaaattgagggaactcatcgaggtgcaaaatttttattttagtcatttctccatctgactctattta

SEQ ID NO: 76410 - DNA, 750 bp, Oryza sativa
  Clone ID: PAT_MRT4530_76407C.1
ctcgcagctcatgtagtcacatgtccccgccagccggtgccgcaccacgccgtgccgccacaatcgcacgcacgcaaaggcagccatccatccagcactctcggtcctaggcctaagtcaaattgtgatactaggacagaccaaaatactatcattaaatgtaaaatcaaaggtgtttttgattattattttatgatgaacaattgggcattggagattattggttttgttatttggaatttattcacgaagtggttttggagatgattagatttcacaggtgattgtaggattcgtcattttatgtgaccggtcagaccgggctctggtagccggctagtgttgatgcacgtggttgatggagattccatatggcatacgatggagttattgtgtgcgtatgggatgcggagtcaaatttggaaggagtccaaatttggtatgattggttatgtaaagtttctttcttgtactagagggtttcctaaggtgtttaggactcttagtataagtttggttcatggctttaggctgtctacctcatgtataaatagagggggagctttgtgtttaccgggttttggcggtcagaccggcgggagcacggcggttagaccggcggcggcgacagcgagcagcagctgatctcggcggtcggaccggagatataaccgcggtcagaccgacgacaaccaggcggtcagaccggcaggacaacttcggtcagaccgcgatccgtcgatttcgagg

SEQ ID NO: 76411 - DNA, 351 bp, Oryza sativa
  Clone ID: PAT_MRT4530_76408C.1
tggacacgaggattccagcatgggatcacgagttcgagtttccgatgagcgtggcagagctagcctagtgcgggtggaggtgcagattccgacaaccaccagaaggactacttcggagggccgacctgcctgccctagagggagctccggcaaggcatccgatccgtaaggctctgcgaccaccgcggcgagcccttccgatccgggaaggttctgatgcgcttcgacttgacctgactactacatctgtttgattatcatcatcatcgtgtgagtggaagcagttccatgtatgatatcatgagggatgaagcatcgatcttacttgctacgtaccgaaatatagcaatg

SEQ ID NO: 76412 - DNA, 657 bp, Oryza sativa
  Clone ID: PAT_MRT4530_76409C.1
atggccggcactatgtttttccagatcagcggcgccggggacaacgacggagcggagtggggggcggcggcaggcggacggcggcgcaaagccgacggggcggagtggggcagcggcgggcggacgcgcgggcgcagtggcggcgcccgaagccggcggggcggtggagccaagcgaacggcgggaacctcgtcgttggcggggtgcggcgctaagttcccgcccgtgtgcggctgcaactcggcggcaacctgctcgccggcctcctcttccccctctcccactggcacagccggccgccgtggtctcctcctcctcctcctcctccacggcagcggcgcggaccccgcgcgggggctcgtggaggagttcggggccacggcgccgcccgactccgacgaactggagctcacgcgggcgagctcgacggcaacgaggcagaggagggaccgcagcgcgggctgccgcagcagggaaggggacgcggacgccacgactcggtcgtgcagctcccggcaccgcgcccacatgcgcggccctgaactcctccacgagaggggagggagagggagagggagagggagggaggaggaagaagagaagggtgagaatgatatgtggggctcacggacgaaaatcggactgagcgacgaatag

SEQ ID NO: 76413 - DNA, 508 bp, Oryza sativa
  Clone ID: PAT_MRT4530_7640C.1
gccgccgccgccgccatggcgctccgccgcatcaacctccggaagaagccgctcctcctcttcccgcggcccttctcctcgtcctcctcacccaaccctcccttccctcctcccccgccaccgcccaacgaccgcgacgacgcctcaccaaagcccagcgagggggaggggcgcaacccggcggcctcgctcttccaggacttgcgcgaccggctcatgtccaccccctcgcatctgccgtcgcgccggatcccgaccgctccgccgccccgcccctcggggaacgccgagccggtggcctctatcgacgacatccgccgccagctcgagtcctaccgcggatccctcgccgcgaggggcgcccctcctggctcctcccccgacggcgccgacccctccttgctcgacctggtgaggagcacctcgtccccgacctcacctcagggccccaactccgggcacttctcatccctcgccgagagcttgcgcaatctcccctctggacggc

SEQ ID NO: 76414 - DNA, 632 bp, Oryza sativa
  Clone ID: PAT_MRT4530_76410C.1
acatagagtacacattgagaaaaacaagtctgaattgtgaaatcaaaggtgttttttattattattctgtgatgaacaattggcattggagattattggttttgatatttgaaatttatttgcgaagtggttttggagatgattggatttcacaggtgatctacatgtactactggatttgtggtccggtcagaccgggcatgtgctgccagctagagttcaatgcacgtggttggtgaagattccatatggcatacgatggaggtattgtgtgcgtatgggatacggagtcgaatttggaaggagtccaaatttggtatgattggttatgtaaagtttgtttcttatacgaaaaggtttcctagggggattaggacttctagtatgagtttggttcatgcctttaggctgcctacctcatgtataaatagagagggagcgtccaaccgacgagacaccggcggtcagaccggcgggcacacggtggtcagaccggcggcggcgacaggtgctggcgattgacctcggcggttcgaccggtgttacaacctcggtcagaccgacgtgttctaggcggtcagaccggcacgtctacttcggtcagaccgcgatccatcgaatttgagggtaac

SEQ ID NO: 76415 - DNA, 512 bp, Oryza sativa
  Clone ID: PAT_MRT4530_76411C.1
gcacgaggcttttcctcctgtcacccttgaaagacacaatatattatttttagatagttcagatctgggtagaggtgccttatctctctagtagcacactgcaatatttcaaattacagtaatgatggatcacaatttgtgatttgaaaccaattagagtagctccatctatgttcagagtaaattggaagcaaagttactaatcccatcttcattagaatcttttacactagtctgtaaagtagtatggctatcagttctattagtactctaccactctttgttcaaaccttgtcctgttgttaattgtcttcttgagagagggggccatcctgaactataatgagattccacccatgataggtaatgtggggctaacaattaggattgtctgatggtctgattgttatacaagctacatacacaggctgcccaacttgtttctccaggcaaccatgtaaaaaagctttgaaccttagccatactgtcacctactttaaaattatggttgt

SEQ ID NO: 76416 - DNA, 637 bp, Oryza sativa
  Clone ID: PAT_MRT4530_76412C.1
ttataattgtaaaatcaaaggtgtttttgattattattctgtgatgaacaattgtcattggagattattggttttgttatttggaatttattcacgaagtggttttggagatgattggatttacaggtgaattgcaggttcattatttcatgtggaccggtcagactgggtcggtgcgtaagactagagttgatgcacgtggttgatggagattccatatatatggcatacgatggaggtattgtgtgcgtatgggatgcggagtcgaatttggaaggagtccaaatttggtacgattggttatgtaaagtttctttcttgtactagagggtttcctaaggtgtttaggactcttagtatgagtttggttcatggctttagactgcctacctcgggtataaatagagggggagcttgtatttcaccgagtttcgacggtcagaccggcggcgcaccggcggtcagaccggcggcgacaggagtcggcggcaggcgatctcggcggttcgatcggagttcgatctcggtcagaccgactttcatcaggcggtcagaccggcgcaactacttcggtcagatcgcaatccgtcgaattcgagggtaacatttatctaagcatgaaccccgactgaaacaa

SEQ ID NO: 76417 - DNA, 635 bp, Oryza sativa
  Clone ID: PAT_MRT4530_76413C.1
aaaaaggctcaagaaaagaaaaggttaaaaaacttctcttgattgtaaaatcaaaggtgtttttgattattattctgtgatgaacaattgggcattggacattattggttttgtatttggaattaatcacgaagtggttttggagatgattggttttcacaggtgaaatctgcggcattaacattttatgtggaccggtcagaccgggctctggtagccggctagagttgatgcacgtggttgatggagtttccatatggcatacgatggagttattgtgtgagtatgggatgcggagtcgaatttggaaggagtccaaatttggtacgattggttatgtaaagtttctttcttgtactagtgggtttcctaaggtgtttaggactcctagtatgagtttggttcgtggctttaggctgcctacctcatgtataaatagagggggagcgtcagaccggtggcatcacggcggtccgaccggcgggcacacggcggtcagaccggcggcgacaggagtcggcggtaggtgttttcggcggttcgaccgatcgatctacatcggtcagaccgacgttcatcaggcagtcagactggctcaactacttcagtcagactgcgatccatcgatttcgagg

SEQ ID NO: 76418 - DNA, 636 bp, Oryza sativa
  Clone ID: PAT_MRT4530_76414C.1
gcggaaataaaagttaccctcgaaatcgatggatcgcggtctgaccgaagtagatgcgccgatctgaccgcctaatgaacgtcggtctgaccgatgtagatcgatcggtcgaaccgtcgaaatcgcctgccgctgcctgcttgcgccgccggtctgaccgccctagcgctgccgatctgaccgccgcttgttgccggtctgacgctccccctctatttatacatgaggtaggtagcctaaagccacgaaccaaactcatactaagagtcctaaacaccttagaaaaccctctagtacaagaaagaaactttacataaccaattgtaccaaatttggactccttccaaattcgactccgcatcccatacgcacacaatacctccatcgtatgccatatggaatcttcaccaaccacgtgcatcaactctagccggcatacaccgcccggtcggaccggtcacatgaaataacagtgaatccgatcatcacctgaaaattgattatctccaaaaccacttcgacgataatctccaaatatcaaaaccaataatcacagatgccaattgttcatcacagaataagaatcaaaacacactttgatcttacaccatatataaggggggtccgggtgcctct

SEQ ID NO: 76419 - DNA, 1182 bp, Oryza sativa
  Clone ID: PAT_MRT4530_76415C.1
gcaagtagctcatcatttacactttatgcttccggctcgtatgttgtgtggaattgtgagcggataacaatttcacacaggaaacagctatgaccatgattggtctttttgggcctcctgatgattctttacttcaatttgatgagagtagagttgctgatattcctcagatctctcttttggagaatgaggctttaactcaggatttcactgaaaaggaaattaagaaggctatttttcagatggaacataataaagcgtcgggtcctgatggttttcctgctgaattttatcaagttttttggaatgtcataaagaatgacttacttgacctgtttaaagagtttcacaatggatctttgcctctattctcgcttaactttggtactatcattcttttacctaagtgtgtagaggccatgaaaattcaacaatataggcctatatgcttacttaatgttagtttcaagatttttaccaaagttgccacaaatagagtaatgagtgtcgcccagaaagtcattagtcctactcaaactgcttttattcctgggagaaatatcatggagggtgtggttatattgcatgagactttacatgaattgcatcgtaaaaataatagtgatgtaattcgaaagattgattttgagaaagcctatgataaggttaaatggagataatttccaaactcataaaggccttagacaaggggatccgttatctccaattctttttaatatagtagctgatatgttagctttgttaatcaaaagggctaaagataatggttcgcttaatggggtaattcctcatcttgtggatgatggtttgtccattttgcaatatgcaaacgatactatcatttttttggagcatgacttacgataagcaaagaacttgaaattgattttatctgtgtttgaaaaattatctggcctgaaaattaatttccacaaaagaagctaagtaataatgattggaaggttattgaacaaagaatagagagaaaacttagtagttggaaaggtaattttcagggcaacatattggcttcgactgtgggcccaactgcaaaagtgtgaggaagatagagaattcctgtctgttgcatgtcgtaaccttgagtcaacggttatgtaactttttaccaaccatggatggagattcaccaatagactgaaa

SEQ ID NO: 76420 - DNA, 624 bp, Oryza sativa
  Clone ID: PAT_MRT4530_76416C.1
attgtaaaattaaaggtgtttttgattattattctgtgatgaacaattggcatcggagattattggttttgttatttggaatttatttgcgaagtggttttatagatgattggaatttacaggtgattgacagggactgctgtttgtcgggaccggtcaaaccgggtagggtatgccggctagagttgatgcacatggtttgtgaagattccatatggcatacgatggaggtattgtgtgcgtatgggatgcggagtcgaatttggaaggagtccaaatttggtatgattggttatgtaaagtttgtttcttgtactaaagggtttcctaaggtgtttaggacttctagtatgagtttggttcgtggctttaggctgcctacctcgggtataaatagagggggagcgtctaaccggcgacacaccggcggtcagaccggcagcatcgcggcggtcagaccggcggcggcaggcgacttcggcggttcgaccgatcgatctacatcggtcagaccgacgttcatcaggcggtcaaactggcgcaataccttcggtcagaccgcgatccgtcgaattaaaaaacctcggcactctagaacaacacgccatcgatcgatttcccaaa

SEQ ID NO: 76421 - DNA, 273 bp, Oryza sativa
  Clone ID: PAT_MRT4530_76417C.1
ctatctaactgttgtcgacatggcggtctgaagatctgactcatagttgacaacagggtagtcttcctcctcgaatccgtgcccagcgagatcagagacagcgctatgtctctccccttcgatgacctcaaggagaatacaccctgcagattgcacgttctcatttgacgctctgggaaaactcttgaggccgctacaaccattgctatcccgccggagcgccgccgtctccgtccacccgaaccgcgccgccgccttctcccgcttcggcat

SEQ ID NO: 76422 - DNA, 210 bp, Oryza sativa
  Clone ID: PAT_MRT4530_76418C.1
atgcgtgaggaagaagacagagagttcagggaggatgaacagaaggatggacgaagttctgtcaccagtaacgagaaaggagagcagcaatccagtctggggaggatgaacagaaaggccgagtacccgtgcgcgaagaagaagatagagacgaggaaggagagcagcaatcctctcagatgggcttgtcactgtctgttactagagtaa

SEQ ID NO: 76423 - DNA, 753 bp, Oryza sativa
  Clone ID: PAT_MRT4530_76419C.1
atgagcaggaacaacggcaagagttccaagctggagtgcctgaggctgatgagcctgtcgagggcgcgtggcggcggcggcggcgggccgtcggcgactgtgcgcccgggcggcgacagcggcggcgtcaacggcgcgaacacgtcgccgcgcaggctgtcgtcctcgtcgtcgtccaccgcgtcgccgccgagctcgtgcgtgtcgtcggagggcagcccggacgcggcgggcggcggcgcggggccgcccatggtgctggctgggtgcccccggtgcatgatgtacgtgatgctgtcccgggaggatccccggtgcccccggtgccacagcgccgtgctgctcgacttcaacgacgacgaccagcgccgcccgcgccaacgccggtgatccgatcggcgaggctagctagctggtgcaacagccgggggctcagttcttgcgtttagttcttcttcgtcgtcaccgtcgccgtcgtagctttaatttaattaccatcattcatgatcgatcagagtttacgtggatcccgaaaggaattatttcatagacctgtttcttgcgtgcggtgcaccctgtcaaacggaattggtctaggtaataatttcgcgtttcagtagtatttcctgttctagtgttcagctgagagctacgtgcaacagtgcaaagactttaagtttatcatgtcatcaacatttaaatcatttaatggaagtaatgctcttgtcctgtcaaaaaaaaaaaaaaaaaaaa

SEQ ID NO: 76424 - DNA, 4215 bp, Oryza sativa
  Clone ID: PAT_MRT4530_7641C.1
tcacaaagtgccaactacgctaccctgtgcccccagtagtgcaatcttctcgatgattgcacatcgaacaacacgacgtgtgcatccggctgttagtttcttagcaacaatgagccggtttgattggaggacagtagcattggtagtgggctggatggcgcagatgcggccactgggaatagcttggtcgcgccgccacgccgctgttacagtacagttgggcatcagttggatgagacggggcgcatgccggagaggaggttggcggcctggcggccggcgaagtaggtgaggatgatgtcggcgccggctcgccggaggcaggcacagcagcgactccatcatcaccctctcgtcgtccaccatcttcagcgcgccgccggctttgatcatcgagtactcgccggagacctcttgtaagccgccgtgcggcgttgtaacctcaccccagatatagtgaagatattttcctggttggcgcccgtggttttttctctccacgtgagggatctgagaaatctttcgccggtcttccccacgacgggatcggcaactcttctccaggatttggcagccaattatgtccagatattgaactgatggaggcagttcaggcaatgaaatcagcaatgggcagtcaaagaaggcaagagtctccaaagacgcgaggtctttcattgctgaaatggattggactttgcagttcatgaaactcaggccgatgattgatgagagattttgaatgccctccaacgagaagtctggctcttggcaaccctcaattgtcagcagcatcgggggcgcaaagccctctagttcagacaaatcatggagcagagatgatgtcctaactcggagtgatctccagttccctttgcatccggtaaaagaatcagctccaaggtttgggagcaccaactgcacttcttggagtgactccagagcaggtaaccctactaggaagcaaacatccaggcaatcacacagcttcaggcatttgagagaaggccatgcaccgacttgtagaaccgagggggttctgcatttggatatctcaaggttgaccagaaatggtagatcatcatgcagaaaaccatcatggatcgtgcagccacgaaccgtgacctccttcagctgggagggaaggatgcggcggtccgagagctctagtgagggacagaagcttattgcgaacttctcaagtgaagcaatggctcccaagccagccacggagcagagagaccggcatgaagttatgcccaccgatgaaagcatggacaaattctccataacctgctttgacgggagtgcagataaggtggtgatatgcaacagtgccaggtctttcagagaggtgaggcttcgcaggcattcagacaaggcctgatctgtgatgttgcagcttgatagctcgagcctccggagcgttaatggcaggaccagttgcgcaacatcacggcgtctggcagaaattgtgcttactggatactggagctcctggaagcatgcctgaaactgctccagttctgacccatccagtcttaggatttcagtaagtgtttccagctcggtagagctcgtcagaggctgcaaagctttctccctggccgggtttactccatgttcttcttcctcctttgaaatgaagcagagtgacgagcatccaccgaattttaaacttgtgagattttctgggagaggtgacagcctcttgagccctgtgagattcagaagagctagactacggcagcgggcgaagcattgaagattggatgggaggttctctagaaaggtacagttcaagagctcaagagacctcaaactttgagagcaaccgcttaaccactttgggtatgaagtggatctgtaaccttctattgcaagttcattcagtcttgaagaaggctcaagtccctcgagtacctccaagtcaacattgttgttcttgtatgtgtcatggttccacaccaaccgcaatgcatcaagattggctttttcttggagctttgcatcctttgccgcattcctattttgcacattctcaagattcatgatatggagatgtcctcgaagtttggtcaggctgcctagctgacctatttcatatcccttctctttcttcacttggaattctttcatatcttcaagagaagtaagcatcccgacattacatacgtctttcaaagggccgttgatgcgcctcaaactgatgagattgtttgctttctttggcaatgttttgggcacctttttgttcattttgagtactagcaagtggtatagtttgcacgaagattttggcaacttggaaatggacgtcctttccagattcaagtatctgagatgcttcaacttgcctatgtgctttggtagtgtgtaactgctgaaaaagcagagggacagcacacggagtttcttcagcttcttcagcattggcttgagaaatttgccaatatctgctacagggttgaaaaagatcagcgtgtgaagctgttcaagcttgcaaatgcttgcagcatgcctctcaagactggggacagagatagatatatgccggacaaattgtggtatttcagtattttcttcagtctctatcctgtagccatcatctatagaaagattttctgctaaatcatgaaagaggtcatgcattctatacccaacatgactgtctttcccatgtgattgcttgccgaaaaaaccagataacgacagctcgtaaaagtactgtctggtaattccctctgctctctccgaacggccattagaactcacgaagccttctgcttcccagagtaagataatctcatcaatgtgaaacatgtatccttttgggaatatactgcagtacaagaagcacctttgcacctgtgggtcaagacgctggtagctccacagtagattttccattatgttcccatccagttgtttgctatcccgtgcatgcttccagatttcaacatctaacattctgctcaaccgagatgctacagcttttgcttcaagaggggaccgtcggagcttcttggcaatatcatctccgattccttgtagttcctcttctagttcttcgttccctatcaggacatgaccaagggaatagtacctgaaaaatgttaggaaatcattctcctctatgtcctctaaagaaactgttttcctgcagtttagaactgaaggaagttctttggaacgactagaaacaagaatcctgatgcccttgttaaattcagccgagatgagtggtgccagaaattgttcccactcactatggtgcctttgttcaaaccaaacatcatccagtacaagtaataattccttttcccttttttccaggagcaaattcttgagttttctttgaagagtatcgagattttgtatcttaggagtttcctcagtggccagagactcaataacctctgtcgtatgcttgcgaatatcaagcttgtgtgacatacatacccaaataacatggaaattgttctgtactctatcatcagagcagatatattgcaaaagagtagttttacctgcgcctccagctccaacaattgcgatgctactgtagccttttatattggaatttcctcctccaaccatggcaggatcaaataagaggttgattatagaatctcgatctttgtcacgtccaaaaaccttttcctcacgaaaggttgttgtgtcttgaataaccctgcttcctgcagtgtcagcactcacttgtgttgcaactgaaagaacaccaaggaaattttttgctttttctaaaatgctcttgacctctttcaaatgattcaacatcttagtgttgtgaggggataagctagatatattactgagaacccaaataaaaggatttgaaataggaccctggcactgaccatgtacagaaaacacagataatttcttctgtttcatcctgtgtttgagaagatcgtactcatgttcatcaagcaggtcttcagcttgagacagctctaccttgagtctttgcagacatttctgcactatgttattcacatgctgaggttggctctcggcagatgcaatgatcaggttgagctggggaaggatgatggtctccaggtctaccatctcacgtgccatgtccactccaacgtagcgagatgcaaaactgctgagattgccgatgatgggctgtgctagtcctcgtagcccagcgctagctgctgctacagcaattgaggacatcat

SEQ ID NO: 76425 - DNA, 309 bp, Oryza sativa
  Clone ID: PAT_MRT4530_76420C.1
atggccgagcaacttaggaagctagggggtattcgtacaggggcagccggagctaggagaggagagaagatggggaaggagaagcccaaggcaatgggcatgaaatccagcaatacgacgtatattgacatctctcatgagctgaagaagctcctccttgacaaattgttactgattggaagcataccaaattcagatggtgattgggtcatgggcaagttcaccggccgatgggcaaagttggagctccagagcaaaatgcaatcggaaagcagttcatctacagtttgtgctcaggaacagcactga

SEQ ID NO: 76426 - DNA, 261 bp, Oryza sativa
  Clone ID: PAT_MRT4530_76421C.1
aagctttttttttttgggaaatttaatttttcttttataaagggcaacatgttggatttataacctcttataacgaaattatattaaactctctaatatcaaattaaccatctaaatcggtctttaatgacatctatcctcaacaaaataaatgactttaatgtgcttatctccttctcttattagggtcgttaggttcagcccatgaacgtcccaaaatggcatctttatgggtacctccgtcaatagcggtaaaagctt

SEQ ID NO: 76427 - DNA, 390 bp, Oryza sativa
  Clone ID: PAT_MRT4530_76422C.1
agcctggggttgttccacttccaacctccaaatacttacatgatataaatgtagtagcagcaaacaactgcacttgagatgtgttgccattctttgttcacatctgccacacaagaagaacagacaactaaatcaacagcaacaacaaactgcacctgcatctgcacacaacgagactgactgatgtttatactatccacacacactgacacgctatacaaacacacttatagtactgatgtatgttattcacaagccagcttggtgtcgaagctggtcaaacagatggcgaaagcctggaatgctgagagagggtaccggtagtccatggtgaacatgtccttgccaaccttaccaaactgcaggatcaccttgccatgatcggatgcc

SEQ ID NO: 76428 - DNA, 892 bp, Oryza sativa
  Clone ID: PAT_MRT4530_76423C.1
atggagacaccgtgtgaccagaacgataaactcctattcgcgtctgctttgaaaattaagattggtaatggagacacaataaaattctgggacaacgcatggcttgatgggcgctggccgaaggatgtggcaccactcgtgttctcgatatctaggcggaagaaccgctcactcgcgcaggcaatcgaaagcggccagtggctagatgaccaagccttacccatcaatgatggaatgacaattgagctcctgaaccagcttgtcactctctggacgacaatccaacagagtaaactcatccttgaaatcagccttccatttgccaaagtttgcttgaataccattgaagatcaagtcatttcgtctactccagagatgccagcaacagattgccaaaacttccataaagaagggatgagggaagttcctattcgctgcaatgatcatgttcatgaaattcaggtttagatcccaatttataccgaggatatgccaacattgctgggcaaaggggcagacgaagaagagatgaagagagtcttctgtgattgagttgttgcatgtaacacatgtagctccaccttgggtattgaaatgttttcattacagcaactctttagtgtttaatctgtccaataagaataaccaaagaaacactttgaacttgagtgtgcatttgcttttctagatgagagttaagggaatttcaggttgaatatgagtaaaaaacatgtcataaactcttttcgattgatattgaggtgagttccagatgtatgtccattgatcttccatatgatttaaatttaaggtttgcacagtgctggaaagaaggtgccattcctgaattgcttggatggggagtggagtataaaatacctcttctaagtga

SEQ ID NO: 76429 - DNA, 582 bp, Oryza sativa
  Clone ID: PAT_MRT4530_76424C.1
atgtgttctcgggtagccgagagctgcgcgggcctgggcgaacaatacggaagtttcatacgaatccgctactcccatgggccgtggaggggagcagcgtgcgactttgagggcccgcgtgccaccgatttgtgttccgctgttctgcgtgcgtggacgacgccgacccgatcggccactcccggtcaaaacccaactacccgattgacccgcgtcggcggcggcaacgcccaaccgccaccgccgcgcgtggctccactcgcgccgtgcaatcgtgcatgccagcttatacagctccagccgtctgagtcaccgcgcacacggcagcatccttcgaagtacgccggccatttcctccgcgtacacgtacgtgttcccccgatctcgacgtcgtcgtcagatcctcgtgattatcgcaccagattaatccgcatgcagcccacatcgtatattttcgtcgttctgcctgctgctggaaaagcgttatcctacgctgcagggaagctcaagcttcagccttcaggccaacgggccaagcatgcatgcatacaccgaaaggacaaagctaaggcgcccgactga

SEQ ID NO: 76430 - DNA, 181 bp, Oryza sativa
  Clone ID: PAT_MRT4530_76425C.1
tcgatctttctcattagaacgacatctgaagaatctagcaccgctgctctatgactaaactcacatgagaaaatatttgcccttcagctggacgatcacatcttttattttctctgaaccatatggtgatttgtttgtacacttgagctgaacatatggataatctatgcagaccgaggtc

SEQ ID NO: 76431 - DNA, 1674 bp, Oryza sativa
  Clone ID: PAT_MRT4530_76426C.1
atgcagcttccagaggacatcctttatcacatacacactctcatgcctatgcaggatgcagctcgtgccgcctgtgcatctcgttgttttctgcgttcttggagattctaccccaggctcaatcttaatgttaatacactacgcatagataagagagcacctagcaatgataaactaacaattgatttcatcagtagagtcgaccccattatgctgaatcatgctggcacaggagtgaagatgtttaaacttacaacccacccttgtttcagtctgcatcctagttatgttgaccgctggcttcaaattgcgtttgcaccaggaatcaaagaatttgaactagaaatgacccgagttagcaagatggattatgatttcccatgctcacttctatcaagggtagcaagctcaattcagtcttttttacttggtggctgttctttccaccctggcatacaaattggtcagatgagtaccttgacaagtttgcgtttaagatcagtaaaaattactgaggaggaattatgcggctttctatccaaatcctgtgctttgcagcgattgttactttcagactgccataatattgttgtcctgaagatcccccatctgctggagcttaattacctggaagtgttgcattttagaaaattggaggtgattgacagtagtgctccaaagctctctactttcatctatgctggccccccaatacaaatctcacttggagaagcattattacaagtgaagaaaatgcaaatgttttgtgacggaagccctgacgcgctacattatggtagcaagaagcttccatccattgcgccaaacatacagaagctttatctatcaacacgtaatgagacagtcaatacaccaaaggtacttggcaaattcctgcagctcaagtgcttggagatactgctgcttacaccagatttgtccccgggctatgatttttgttctctggtttccttcattgatgcttctcctgccttggagacttttatcctgcgtattgaacggccagctaaaagacatgattcgatccttgaagcattgagtggtgactccatgcatccaatgcgtgcttcagaataccgccatgacaatctcaagaacatgatgataaccggtttttcctctgcaaagagcatgatcgatcttgccaaccacattctcgagaaggcttcgtctctagagtaccttacattggacaccacccgtggctatgacaggagaaatgacaagattgacccatgtcaatgtttacaaatgagcaaggaagctctcttggaagctgagaaggctctcctcgctattaggatctatgttgaggggagagtaccctcgagtgttagcttaaaggttattgagccctgcagtaactgccacactgaaactagaagctaatgattttgtgtgtagaaagtgttgtttctgccagttgcaaataccttgctctcatgtatgcctgcgtttcaacaatgttgtaacttcatctgttcaagtgatggaaacctatttgaagttctgaaaaaaaaaaaaaaaaattttattgctacttagcatacagttcaattttcctacatagtgataaggaatttatatgttctgcatgatgggcgaacaatcaataaaagggagaaatgacattaaaaaaaaaaaaaaaaaaaa

SEQ ID NO: 76432 - DNA, 732 bp, Oryza sativa
  Clone ID: PAT_MRT4530_76427C.1
ctacgaacgtcggcctgcaggaggtatcttcctgggcggcgtagcgtccctggggctgtccgacttgatggagcacagctcgtccgaatcctcgccatctgaagtccgagtgatgatcaagtcgtctatgtccagatacatcggtgggagatcttcacctccatgctgctccccggtgcccttctttctaccagacttgagagctaccctgtgggccgctagatttccctcgagccgtcgccgcccctctattctctccagatccacatggcgagcgcctgtgcgataccttcgacgaacggcgggtcggctaccgagcctccgcccagcgccatcggcaagatgcagccgaccatcaccaccatctcctgccggcgacgagcttccaccatcccctccactgccggtgctagccaccccaaggcccaagctcagaacctctagatctggatgccccaaccctgggaaccacggatccagccgtatcgagtgtgggtgctccagatctcgcggttctcggctccggcagcgccggcaggagaatgggcgctgcccctccttcccctccttgttcatggcactttgtatttttcttaacaggccatagcttgaatctttaagtgctgcagttaaatatagggtagacctcttgatcttctttttcttctcatcatcctccttcttgtcttccgacgactgtggccgctcagcacggttcttctgcctgtccat

SEQ ID NO: 76433 - DNA, 1535 bp, Oryza sativa
  Clone ID: PAT_MRT4530_76428C.1
ggctgcaggaattcggcacgagccctctctctagtctctcctactattcgctagaagccaagaacgcgacgcggcgtcgatgaggacgaggcgaggcgcgtgctactcgccggcgtcgtgccaggacgggcggcggaagaggcggaggatcgccggcggcggcggggagggatcggctgcggcggccgcggcggtggccggcggcgccgaggggcctgccaatgatatgttcgaggagttgccggatgatcttgtggtgtcgatcctcgccgacgtcgcggcgtccgcccggtcgcccggtgacctcgccggcgccatgctcacgtgcaagcggttcagggagctcgggcagagcaaggtggtgctcgcgagggcgtcgccgcggtgcctcgccgtgcgggccaaggcgtggtcggacgctgcgcaccgcttcctgcagcgctgcgccgacgccggcaacctcgacgcgtgctaccttcttggcatgatccggttttattgtctcgggagccgcgggtcgggagcggcgctgatggcggcggcggcggtgggcgggcaccgggaggcgctgtactcgctggcggtgatccagttcaacggcagcggcggaagcaaggacgaccgcgacctccgcgccggggcggcgctgtgcgcgcgcgcggcgtcgctggggcacgtcgacgcgctccgggagctcgggcactgcctgcaggacagctacggcgtgcgccgctccgtgctcgacgggcgccgcctcctcatccaggccaacgcccgcgagctcgccgccgcggtcgccgcctcggcctcgctcctccgcgcggccaccggcaagccggcggcggccgcctcccgccgccactcgtgcctcctcaacgacttcggctcacacgccgcggcgcccaaggcccgccggcgaggcgcacgccgccaaccgcttcctcgtcgactggttcgcatcgcgcccgctcaccggctccaccacctccgccgccccggcgccaacgccagggagcgccgcggaggacgaggcggccgggctgcgcctgtgctcgcacgcgctgtgcgggcggccggagacgcggcgccacgagttccggcgctgctcggtgtgcggcgtggtgaactactgctcccgggcgtgccaggcgctgcactggaagacggcgcacaaggcggagtgcacgcccatggaccggtggctcgacaacgccgccgccggcgccgccaaccccaatgccgccgccatggccgcgcccgccccatgaccgcctcgccgcgacacgcgcacgcaggcgcagcagtaaatgcaccggacgaacggttggcgaactaggcgtgaactcgcaagttggaaacgaacggatagttattagtgactgtttaattagtacttttactttagacggttaaaaaaaaaagaggaaaattactgtgcgttcttttttttcacccgggtggtcttctactcttctgtacatgggaccttgaaacgagcgaacgaacactgaggtaaaaaaggtaaagcaagtctg

SEQ ID NO: 76434 - DNA, 505 bp, Oryza sativa
  Clone ID: PAT_MRT4530_76429C.1
gaggtatcttcctgggcggcgtagcgtccctggggctgtccgacttgatggagcacagctcgtccgaatcctcgccatctgaagtccgagttatgatcaagtcgtctatgtccagatacatcggtggcagatctgcaaagtttattaattttacagcaattaatgcatgcaataatcaagtaagcaattgaagctatggcaataatgcaagaaatcaagaatcaagaagaagaagaagaagaagaaagctagaagttatataccgtgtttctccctctctcgttgtgtttcactcacgctctgctgcttctgggatgatgaggatccctgactttgctcaccttcacctccatgctgctccccggtgcccttctttctaccagacttgagagctaccctgtgggccgctagatttcctgtagggttccacagccaactcacaggaatattaattttcttgacggggttacttatacccccagaaaaaaaaaaaaaaaaaaaaaaa

SEQ ID NO: 76435 - DNA, 498 bp, Oryza sativa
  Clone ID: PAT_MRT4530_7642C.1
atggctggggccgcgaaaggcgcaacctttccgccgcgttccggggccatggccaagcaggatctggtgggggtggagaaggagctccgcttcggatcaccagccatggccacgcccacacccaccaaaggcgccaaaggagctgcctttccgtgccctggaccaggagccttggtcactctggacctggttccaaagaagctctcgtttgatccactgcccggcgctgctgcagtcggtggcggcgaggctcccaagaaggtggtcacctcgtcgccgtcgtcaccctcgaagaacgctcgtctttacactggtggagaaatgctctttactcctgtgggattggcaatgtttggagtctttggagatttcgcgctcgcagcactcaagagatgggccttcgatttccttcagagtccggaggtgactcagatcctcaaaaccttcatcaacaacagatattacggatatgtgactaaattggttataaacatgtag

SEQ ID NO: 76436 - DNA, 281 bp, Oryza sativa
  Clone ID: PAT_MRT4530_76430C.1
aggaacccccccatggggagggatttttaaaaaacccatagcaaggtaaaacaagtattgcaaagaccattctacttttttaaagcagaaaaattttcccaaaccagaaacaaaaaaagcgaggaagcccacaccacaaaaaaaagggaaggggataaaaagattcccccacccagaagggggggaaaaaaaaaattttgccgctgaattacggacccccggacaccaaagaataacctgccccaaaggccgcccaatagggagccaaacgaaccacggga

SEQ ID NO: 76437 - DNA, 332 bp, Oryza sativa
  Clone ID: PAT_MRT4530_76431C.1
caacaaggcgcttgtcttatcgctgccacgcgttgtgtttgcggtcattgacgctgttgtgtgagcttcattggtatctacttgactgaactgaccgcgacattaaattggcgaaggcccagcaaagaatgaccaaatccaagtcgttcaaggaagagcatactctagacaagcgacaagcagaggcgcagcggatcagggagaagtatccagatagaataccagttatcgtcgagaaggcggagaagacggacattccagatattgataagaagaagtatttggttccgtctgacctgacagtgggccagttcgtgtacgtcattcgtaag

SEQ ID NO: 76438 - DNA, 1851 bp, Oryza sativa
  Clone ID: PAT_MRT4530_76432C.1
ccggccgggacttggccttcctcgtctccggccttcctccaccgcgagctccgaccaccaccgacggcgacgatgcaggcggcggcggcgtggaggcgtcacctcctcgacggcaacatctcccccaccaccgcggcggcgatctccgccttcagatccgcctcccagccggcgctcgcaccccaaggattgggtggagcggatggcgcgaggtacatgtccgcgagggcgccggcggtcaaggggacggggcatctcgtccgcaagggaaccggagggaggtcgtctgtgagtggaatcatagctacggtgtttggagctactggatttcttggccgctaccttgtccaacaacttgcaaagatggggtctcaagtgcttgtaccattcagaggttctgaggattgtcaccgacacctgaagttgatgggtgacctgggtcagattgttcctatgaaatacaatccaagagatgtggattcaattaaggctgtcatggccaaatccaatgtggtcattaacctaataggacgcgagtatgaaacaagaaactatggatttgacgaagtaaatcatcatatggctgaacaacttgcaatgatttcaaaggagcatgggggtatcatgagatttatccaggtttcttccctaggagcatcggcctcttctccttctagaatgctgagggccaaggctgctggggaggaatctgtgttgaaagaatttcctgaggctacaattatgaggcctgcaactatgattggcacagaagatcggattttgaatagatgggcacagtttgccaaaaattggggtttcctccctcttgttgattctgggtctacaaagattcagcctgtttatgttgtggatgttgctgctgctattgtcaactccctcaaggatgacggcaccagcatgggaaagacctacgaacttggtggaccagagatttatactgttcatgagctggctgagctgatgtatgagacaatacgtgaatggccacggtacatcgatgttcctcttcctattgcaagggctatcgcatctccaagggaaatgctgctaaacaaagtgccctttccgttgccaaccccatcaattttcaacaaagatcagattaatgcattttctgtagacaccctagtgtctgataatgctctcaccttttcggacctcggaatcgtgcctcacaaattgaagggttacccggttgagtttcttgtgtgctaccggaagggcggtccagcttttggttctactgtcagtgagaagatacgaagttctgagctgtagtcttccactcctgaagacactgtagaattaatcttttagttgcagaaacgttgttgtgtttgttttcttactatctgctgctgctgctgccagccgcccaacagcgagcaggaccatattcgatgcatatgttggttcctgctcatgtttttcaccaataagacgcacaaaatctttgtcaattttttgagttgcaaatgcaagtgaggcgaatcgttgcagtcctacgacacaataacaaagatatgtttctttctttaccctatacatatatgctcgctggtttgcattgcttgcgagattagctttgtctggtatttcgtttgcttatttggtttagagtgcaatgaaaggcgagtctgacattcattaggcgtttgcttgttttggagtcaagaaagtttggattcttgacacgcttgctaccacttgtaatggccaggatttggcctttatgtaataatacgccttggggcatataaacagtcatatgaatattaacaaaaacggttcttaataagtaataaaataaagataaaaatacatgtttgc

SEQ ID NO: 76439 - DNA, 2923 bp, Oryza sativa
  Clone ID: PAT_MRT4530_76433C.1
gaggacgaccagttgaaatggatgctgtttcaattatcgcaacattcccttcagaaattcgggaggaggtgcttttaacatctccagatacattactggctacacttacgcctgcactagttgctgaagccaacatgttaagggagagatttgctcatcggtatcacagtggctccctttttggcatgaactccaggggcaggagaggtgagtcctctcgacgtggtgacataattggttcaggtcttgatagaaatgctggtgattcttctcgacaaccaactagcaagccaattgaaacggaaggatctcctcttgttgacaaggatgctcttaaagctcttattaggctactccgggttgttcagcctctatacaaaggtcaattgcagaggcttctcttgaacctttgtgctcatagggaaagcagaaagtccttggttcaaattctagtggacatgcttatgcttgatctgcagggctcttctaagaaatcaattgatgcaactgagccaccatttaggctatatgggtgccatgcaaatattacgtactcacgccctcaatcgacagatggcgtgcctccattagtttctcgtcgtgttcttgaaactttgacatacttggcaagaaatcatccaaatgtggctaaactcttgctatttcttgagttcccttgccccccaacttgccatgctgaaacatctgatcagaggcgtggcaaggctgttcttatggaaggtgacagtgaacagaacgcttatgcacttgtcctacttttaaccttgttgaatcagccactttatatgaggagcgtagctcatcttgaacagctactaaaccttctcgaagttgttatgctcaatgccgagaatgaaattacacaagctaagctggaagcagcatctgaaaaaccatctggacctgagaatgcaacgcaagatgcccaagagggtgcgaatgctgctggatcatctggatcgaagtccaatgctgaggatagcagcaaactccctcctgttgatggtgaaagtagcctgcaaaaagttctgcagagtcttccccaagcagagcttcgactgctatgttcactgcttgcacatgatgggttgtcagacaatgcgtatctcctggtagcagaagttctgaaaaagattgtagctcttgctcctttttttctgttgccatttcataaatgaacttgcacattcaatgcaaaatttgacgctttgtgcaatgaaggagcttcacttgtatgaggattctgaaaaggctcttcttagcacatcatcagccaatggcactgcaattcttagagttgtgcaggctttgagttctcttgtcaccactctgcaagagaaaaaggatccagatcatcctgctgaaaaagatcattctgatgcattgtcccagatttctgaaattaacactgcattggatgcattatggttggagctgagtaattgcataagcaaaatagagagctcttcagaatacgcatcgaatctaagtcctgcttctgcaaatgcagccacattaacaacaggtgtagcacctccattgcctgccggaactcagaacatattaccgtacatagaatcatttttcgtgacatgtgagaagttacgccctgggcaacctgatgctattcaagaagcttcaacatctgacatggaggatgcatcaacttctagtggtgggcagaaatcatctggaagccatgcaaatcttgatgagaagcacaatgcgtttgttaaattctcagagaaacacagaagattgttgaacgcatttatccgccaaaaccctgggctattggagaagtcattctctctgatgttgaaaatccctcgcttgattgaatttgacaacaagcgtgcatatttccggtctaaaattaagcatcagcatgatcatcatcatagccctgttagaatttctgtgcgccgggcatatattttggaggattcatataaccagcttaggatgcgttcaccacaggatttgaagggtagactgactgttcatttccaaggtgaagaaggcattgatgctggtggactaacaagggaatggtatcagctgctatcacgagtgatttttgataagggtgcccttctattcacaactgttggaaatgacttgacatttcaaccaaaccctaactcggtgtatcagactgaacacctctcatatttcaaatttgttgggcgagtggttggtaaagctctatttgatggccaacttttggatgtccattttacaagatctttctacaagcacatactaggtgtcaaggttacataccatgacattgaagctattgatcctgcatactataaaaatttgaaatggatgcttgagaatgacataagcgatgttctggacctctccttcagcatggatgcagatgaagagaagcggatattgtatgagaaggcagaggtgactgattatgagttgattcctggaggccgaaacatcaaggtcaccgaggagaacaagcatgaatatgtgaaccgggttgcagaacatcgtttaaccactgctattaggcctcaaatcacctcttttatggagggatttaatgagctcattcctgaggagctgatatcaatctttaatgacaaagaacttgaactgctaatcagtggactcccagacattgacttggacgatctaaaagcaaatacagaatattctgggtacagcatagcttctccagtcattcagtggttctgggagattgtccaagggttcagcaaggaggacaaagcccggttccttcagtttgttactggcacctcaaaggtccctctggaaggtttcagtgcactccaaggaatatctggaccacaacgattccagatacacaaggcctacggaagcaccaaccatctgccttcagctcatacttgcttta

SEQ ID NO: 76440 - DNA, 225 bp, Oryza sativa
  Clone ID: PAT_MRT4530_76434C.1
aagctgtacagcctgcacgtaccggaccggtacatccgggtacacccactcctactgacacagacacctcatctgacagagactgcaacttgaagtgaccacacaacgttgttaagatcaccacatggggcggaaatggaggaggtcgagcgtacctatctgtactgccacagagcttgatacgcttgactatacatacatgggcacacattgaagctatcatct

SEQ ID NO: 76441 - DNA, 2020 bp, Oryza sativa
  Clone ID: PAT_MRT4530_76435C.1
atggcggacgcggcgcaccacctccgccgccgcagcagcgccgcgctcccccgcggctggtgctgctccttctccgccaccccgcagagccccgaccaccaccgcccgctctccgccgcgtcagcggcaggaggagagggcgtcggcggcggcggcgcgcgcggtaagctcccgcccaagtcgccctcggtctcgctgccgtccttccagagctccccgtcgtctaggctcgcgggcttcatcgacccccgccgcattctctcccccggccgcgtctcccccatagaccccgacggctcgccggcggtggcggctggggcgaattcggaggaggatgcgacgccgaggccgtcggtgccgttcgtggcggtgcgtgaagagcgggaggaggaggaggggagagggctggatctgaagctgtgcctccgtggtagggacgggaggagcgtggcgatggagctggactccgccgtgctctgcgagagcagcgccttcttcgcggccatggcgccgccgccggaggccactgtcggcggcgggagcaagaggattgaggtggatggggtggagaacgtggaggcgttcaaggagaccgtggagctcatgttcgaggccgatcccatgcggtgtactccacaacgggtcaatggactcataaacttctattgcatgtacacctatagtcgaagccttgaaggatatgaactgaagcacattgagtgtactgctgatggctaccctgcactgcagactgttagtggtctccagttaaaggtatcttcctctataatgtttgacagaggaatcaaatcatgtttggagtatattgaggcagttccatggaatgagaatgaggaagagaagctgaagaacctctttgctagatgtactttcgatgaagcagtatccaaagatgtactggcaagattaaaaccacaatgccagagcatctcagacgatgttacagttcacctcatccaatctgtcacaagcagcaccaacactggtgcaagaaaagagatgcaatctttagtcaatggtcttctcagtagaagctcagtctatcaaaaagatttgtctgggctaaacaaaggtagcctttaccagatttgttgttcctgtttgaattcactagtggagcattttacggaagacctctgctcggacaaaattgttagagatagtaagcctatgatcgaaagagtcagtaagcaaaccgagaacctcaactggctctttgatattcttgtgaacaatgatatggcagaagaatttgttgagttgtgggctaagcaggaagatctcatcagcatgcatgggcaagcatcagcaatgttcaggtacgaattaagtcggatatcagcgaatgtgtttattgtcctggggaaagggaaagttcagtgccccagcgatttgaggagccaattgttctacggatggtttcggcccatgttaatggattttggttggcttcaaagatgctccaaagggttagatatgagaatgttggaggagaatctcgggcaagcgcttctcactcttccactccagcagcaacagagcctatttgaagaatggttccaatgcttcgcatccaggggcacagagtgcccgaatcttagtagagctttccaggtatggtggagaagatcatttgtcagatcatccctagagtcacgtcgttgagagttgagttcacttgtctgctgatatataatcttgtgtgtatcaatgtaaaattagagttcttgtattagcttgtagaatattcttcttaataaatctagcttagctgcttccattatatgcaacaatgtaagcataaaactggccaagaaaaaaaaactagaagatatgtagcaatttggatatcgtttgccttgaagatggcatcactgtacatgatcttattcctgggaaaaatatacaaactgcaccagggagtgtgtagcccctcccatgtttcatactacttcatacagtagattcatgctacatagaattatatatacattcatgc

SEQ ID NO: 76442 - DNA, 385 bp, Oryza sativa
  unsure (1)..(385): unsure at all n locations
  Clone ID: PAT_MRT4530_76436C.1
tggagaacttgatggtatctctgnccaaagcttccgaacaaatntttgaactggaagcgttgatgatgttatctagcagcgaccatcccggaaagaagactgaaagcttcggttctctcgtgaaagaagcagaaggccttatgaagaataagaaggaaaaaaatgtggcaactacaccagctagcactatgaatggaaaccagtagattgagtagattatcaactaatctgctgatattcacaataaagaactttggcgttcccagaaaattgtttgtcataaagatattctgtaggataaactccttattctgtagcatgtgtgctgaaatctagctatttgtcccatctaaaaaaaaaaaaaaaaaaaaaaaaaaannaaaaa

SEQ ID NO: 76443 - DNA, 479 bp, Oryza sativa
  Clone ID: PAT_MRT4530_76437C.1
atgcagctcaacccgaaagcaagaactcgtcgaaataaaactaaagcaaaaaggactctatccatgtgcggcaatcatcttgaaacacctcaattcaatccaatgtcatacaccaaattatactgtcagaatcggctgtatcggctcacctagtctgactcagacccagccgatcctaatcgtagccgatccggacttcagccgattcttgctccggatcaatctccgccttcgactccaacttgatctaatctcctttttcgatgctgatattaccaaatttgcgaggcgctagtggttcagcagcggcaccagtaccgggcggccgagcagggcgacgtcaaggagcgagacagcggcctcgcccccaggagaagacgaagggggccgccgagccagccgtggaaggagaggcgggagaagggagactcgcgcgccagaaaactcaaaattaaagatgtttttaccggtatttgcat

SEQ ID NO: 76444 - DNA, 481 bp, Oryza sativa
  Clone ID: PAT_MRT4530_76438C.1
cctatgaggcgtaggcggtcctctcttcccgacgaacaccgacagcaggcgctggagcacggcgcggcacgccttggagggccgtgcgaactcgaactccgaccggaagaaaacgttgacaaggatgctgctcgtgctcggtgcggacagaggcgagagggaggaggacatgttggtttggcttgctcgacttttgcctggcaggaggactcgaccgagaggaagtatgggaccgcgatgtcacgccccgctcgtcgccacgactggaagatgactaatggggagtcatgctagctcgcctccctgctttgccttaacaggaggagcttttatatgatgctgatgccatcctctgttgggatgcagataaagcttggcccgcaaaagcggattcatgtttttttgaagccgcgccacaaaaaactctcctcgggaacggggcggactccaaaaacatatggtgtatgagtttgccaccacc

SEQ ID NO: 76445 - DNA, 276 bp, Oryza sativa
  Clone ID: PAT_MRT4530_76439C.1
aggggggaaccagttttattttattctactttctactatctaaactaaactggtttttctgatttttggtttttttttactgcaacaattataagggtaatgataatgattatgagcccaaccactattactatgactattattgcccacactgggaagccagagttattattatttcctccattcaggccagcattatcagaaggggacccaggtgtaattggatcaggggcaaccccagatggattatttggtgggggaattgggggtttttcc

SEQ ID NO: 76446 - DNA, 1091 bp, Oryza sativa
  Clone ID: PAT_MRT4530_7643C.1
tttcagttcagtactcgtagctgcttctgcatgtttggttgatcgattcatcagccatggcgactaagctgcttgctgctgtgatcactgtgctagctttgctgggccatgtcatgggccaaggagggtacggcccaagcccaagcccaagcccgagcccgagttcgagcggcggcgggctcgccgtcggctactacgacagcgtctgccccaacgccgaggagatcgtgaggggcgtcgtcaagaacgcggtggcgcaggacgccggcgtcggagcggggctcatccgcttgctcttccacgactgcttcgtccaggggtgtgatggctccgtcctcctcgacgcgacggcggcgaacacgcagcccgagaagctggcgccgccgaacctgacgctgcggggattcgaggtgatcgacgaggccaaggcggcgctggaggcggcgtgcccgggcgacgtctcctgcgccgacgtcgtcgccttcgccgcgcgcgacgccaccgtgctcctcagcggcagcggggtcgacttcgccatgcccgcggggcggctcgacgggcgcgtgtcgctcgccagcgaggcgctcggcatcctcccgccgccgacctccaacctcagcgccctcaccgccagcttcgccgccaaggggctcggcgtcggcgacctcgtcgtgctctccggcgcgcactccgtcggcaggtcacactgctcctccttctccgaccgcctcaactcgtcgtcgtcgtcgggctccgacatcaacccggccctcgccgcctccctgacgcagcagtgcagcgcgaacgcgagcagcggcggcggcggcgaccccacggtgatgcaggacgccgtgacgcccgacgtgctcgacaggcagtactacaccaacgtgctcaacggcagcgcgctgttcacgtcggacgcggcgctgctgacgtcgctggagacgaaggtggcggtgctggcgaacgcgatcatcccggggctgtgggaggggaagttcagggcggcgatggtgaggatggccgccgtcgaggtcaagtccggcgccggcggcgagatcaggaagaactgcagggtcgtcagctaa

SEQ ID NO: 76447 - DNA, 303 bp, Oryza sativa
  Clone ID: PAT_MRT4530_76440C.1
ttgtggtttttaaatttaatgttttttatttttttttttttttttttttttttatttatttaaattattataattatttttttacatacctaaaaaatcattatggaataactaaaaagttcaaaagctaaattagcctataccaaaatatgagtagtttccttaaagcaaaaagcaaccccacacaaatttgggagcaaatacaaaaccgaaacctaaattgaaaaccaaatatcgacccagacacttatggaatgcttctaaaaaaccaaacaatggcaagagctctccattgaataaaac

SEQ ID NO: 76448 - DNA, 1305 bp, Oryza sativa
  Clone ID: PAT_MRT4530_76441C.1
atggagacggtagcgacggagcccgggacatgtctccgtcgcttgccggatgacctcgtcgccgacgagatcctcacccggctgccggcgaggtccctcgcgcggttcgcctccgtctgcggcgcgtggcgcgccgccatctccggcgacccctcctccttcctccgccgccgccgcaagaaggagcactcctcctccttcctcctcctcctgtacgcgttgctcgtgcacgtgtcggtgttcggcgacggcggcgaggagcccaccctgtcgctgccccgcacctgcgacggcctcgtgctgctccccaacggcgacgacgtccacgtcatcaacccggccaccggcgacgtcctcacgctgcctcaaagcagccgtgtcgccgccgccgccgaccactcgaccgggctgggccttgacactcgcacaaacacctacaaggtcgctcgctacatccacctctccaccgccgccgccgccgccgccgccgaagacgacggcgccgctgtcatggaggtgttcacgatcggccacggcgacgccgccgcctggagggagacgacgacgccgccgccgccgtcgtacccggtctgccacgtgcgaaccgccatccactcccgcggaaacctcttctggaaactccaactccgacgatcgccggcggcggcggcggcgggcagcttcctcctcctccgcttcaatctagctcacgaaacgttcaccgtcgtccaccatccacggccaccatctcatctaccatcggccgatcagaacggagagccgccaccaccaccaccgccattgctgtccgagctcgacggcgagctgtgcctcgggctgctcgtgtcaggtcggcaagagctctggctgtacagcaacaatggcggcggcggcggcggcgatgatcggtggcaatgggagcagcggttcagcatcgccgtgtcggggccggacgccatgtacctgccattgggggtgcttcgccgccatgatcgactgcttcttcagaagggtgtacacctgtaccaccatgactcgggtggtggcgaggagagtgtcagagaagtggcgcgaatggatgagttcgaatttgaatggagtttcccgggagagccctacgcgttcatggtgatcccctacacggagagccttgtccgggttactgccgcgaggcccattaacaagacagcggcggcgacggcgatggcgggggagacggcggcgacgatgatggcgacaccggaaaggcccaagcgtgcgcgtcgagccaacagccgttacattggcgacatgtgggatgtgtag

SEQ ID NO: 76449 - DNA, 219 bp, Oryza sativa
  Clone ID: PAT_MRT4530_76442C.1
atgaggtggaaaaggagggacacggatgatggccgcggtttcccgggcacgggcacggccacgcgtgccggacggggcgtgaacagaagccgcgcccgtggtgccgggaaggaacagcaacagcctggcccggcatcgcccgtaaatggagagtttggacctgggttaggaggagaggagaaaaggcatcgggtgcatgagaaggaggcggagttctga

SEQ ID NO: 76450 - DNA, 334 bp, Oryza sativa
  Clone ID: PAT_MRT4530_76443C.1
ccattaagatttatccatatttgctcaaaatgatcaccacgggccccaaatgtcctcaccgtacagtggcgttaacatggaagcagcacaccaaatcaaaagagagacccacccccagaagaggaccgggaatccaacgccccccagaactaatccaagaacacagggctaatcaagcccagcccagggcgattcattgttgacacagccgatagaagggaagaaaaggtgtaaaaccgcccaaagcccatgggtaattagggagccgactactaaagaggactgggtctggacaaaggccagggggaaccggccacccgtaggacaggcggcc

SEQ ID NO: 76451 - DNA, 499 bp, Oryza sativa
  Clone ID: PAT_MRT4530_76444C.1
gggctgcaggtctggtgccccatcatgctgttataatattgtgctcaggatgtacatcaaggtcaatctgaagaatgggaattaccagggcaattgtgtctaatcacgtgtcttatgtagatattctttatcacatgtcagtttcttttccaagctttgttgcaaaggagtcagtgtccaggttgcccctagttggtctcataagcaaatgtcttggatgcattttcgttcaacgagagtccaaagcttcagattctaaaggtgtctcaggtgctgtaactgaaagggtccaagaggcttatcaagataagaattcctcaatgatgttgctatttcctggtttgtgtacaatcataatcctttgcggtttcttttgaactttgtgatggctggtggaacttagttcttttgcagcaattattgatgtttcttatcattgtaagaaaagttatatttattataaggcactgtctcccatccattgaatgagtcatctttt

SEQ ID NO: 76452 - DNA, 795 bp, Oryza sativa
  Clone ID: PAT_MRT4530_76445C.1
atgttggcaggaaaaaagatcaaggcaccagcaatcaatccatctgctctggctcccaagaagaaagccaagaagcaaaagcccaagccagcagatgatttgccagccttagatccatccatcgagcaagctctggatgaagaagatattgaagaggatgttgatcaagctgcagctgaaaaaaagaagactggtgtgaggaagaaattggcagcaacaacccttaaaccagctcctccaccccctcatcctccttcacctcctgtgcagctcgaatcaagtgatcatactccatcagccgcaggcagtcataatgttgaggaagaagaacaacccactgctcctaccatcccagtcttagccgatctgttctcgtttgatatcaaagactatcttgatgaagagacagaagatgataccaccagcaaggctctagctcccttgtccgatgacgtgaagaaaacacttgaagacatttcccatcggctagagcagtcatcactagacagcttggtggtaggctgtgggtcgaataggactcggctccatgaagttcaagctctgatccctgatgaactagccaacgcccttactccagccgtttatcttgagcaacatcaatttaagctggggaaggccaagcaaagattagccaatcaccgagagcgcagggatattgaagctacaatccaggtcaatcggcagcttgtgcatgaagaaaagcccaagcttgatcggctgtctgagggtctgatcaagtccaacattgatcggctttgtcagggttacgggtaa

SEQ ID NO: 76453 - DNA, 2913 bp, Oryza sativa
  Clone ID: PAT_MRT4530_76446C.1
ccacgcgtccgcaccagaataatttttatgcattcatacaagttgcttttctagaagcaaaggtgaaaggtccaagtttcagtgagatgagaatggaccagttaagttactctaagcaaacatgatgtgccctttattcacaacatttaacaattgttacttgagcagttttgcccttagcctaaataccaaatcatgaataaacattcataaaaaggaatttgggcccgcttattgttctgcaaatgcactgctagaggtttatagcatggatatctatccaaagtcttgagtgtaaagttcatataacaaaccccaagtaattaactgcaggactactggaaagtacaagaggagaacaaaccagggattggatcattcgtttctgtcagaaaaaaaaaaactttgcaaagcagtcacgatcattaggctagtagaagcacacttgcatagccaaagaaaactcatcattatcaattcaattatcggaatgaaaggagcttcatttttgcaaactgaatatgaccttagaacagcaggcacatgccctttaggatgtgttgccttcactcttcaataggtggcagcataaaccatagcactataaatggcaccttgtatggccaccttagagcaatcaaattcacctgaagcacctaaggttcacatggacttgccatcctcacagctcaccaatcttggaggcaccgatacattgtgatggaatttcagccatttcctcagggagttcacccaaacacttcagaaccagccatggagcccatggcaagtgagtcatctgtgcccatagggacagcttttgcagacttgctgctgcaagggccagagcacccaagcctgtggaatgatctcaccggcatgttcaggaaggcattccgttggcaaggtgcagacaagcgcttcacactgtctgtgtatgtgatgtctgttctacagggtctgtttccaatacttgactggtggaaaacctacaatctgaaattctttcgaagtgacctcatggctggcctaactcttgcaagccttagcattccacagagcattggatatgcaactctggcaaaactggatcctcagtatggtcttttacaagtgttgtgccacctcttgtatatgctgtgacggggtcctctagggagatagccattggaccagttgccattggtgtcattattgctttcatcaatgattcagaagatagttgacccatctgttgatccagcgttctaccgaaaaatggtctttaccgtgacattccttactggtgtctttcagtttgcatttggtctgttcagactgggatttcttgtggattttctatcacatgctgctatcgtcgggttcatgggaggagctgctattgtgattggattacagcagctgaaggggctgcttggacttagtcattttacaaatagaactgatgtcgtctctgtcaccaaggcagtctgggtttcagttcacgaaacaggaaggaagtacaagaaactcttttgggtctctgccattgcacctgtactatcagttgcactatctactctgtttgtctatgcgacaagagcggataagcacggcgtgaagattatacaaaaagtgaattcaggtattaatgcaagttctgtcgagcagatagatctcaaaggaggctatgctgccgaatgtgcaaagattgctcttgtttgtgctgtgattgctctgacggaagctgttgctgttggccgctctttttcagcgatcaatggatatcggttggacggaaataaggaaatggtagcaatgggcttcatgaatatagcaggatccttatcatcatgctatgtagcaacaggttcattctcgcgcacagctgtgaacttcgctgctggttgcaagacaaccgtttcaaacattatcatggctgccactgtgatggttgccttggagcttctcacaaagctcctgtactacacacctgtgtccatccttgcatcaatcattctgtcagctcttccaggattgatcaatgtgcaggaagtctgcttcctgtggaaagtcgacaagatggacttcctcacatgcatgggatcattccttggtgttctattcggatcagtggagattggtctttcagttgcacttcttgtttcctttgcaaagatcattatacagtcgatttggcctcaagtagagattcttgggaggcttcagggcacagaaatcttctgtaacgtcaagcagatcatgggatgggtaaccgatgagcgcgaggcattttgctcggtcgttcttgacatgtcaaatgtggtaaacatggatacttcaggtcttgtggcgctggaagaactgcacaaggagctggcgtgtctcggcatccagtcgataggggttcatcctgtcctgtccggggtgaggcggggcgccggtgaaccacgaggccgacgacggtcctccatctacacctctgccgtcgccggcgagcttcgcgatgggatacaaccggagacgcggccgtggatcctcctcctcctcgtcgtcgcgccgcaccaagcaggaagccgcgtggactttggccaatgtgatgttaaaagatgcactggtcgtaagctttcaagatttgggctattaaaggagttgcgagtgaccaatggttttggtggtgttgttctcagagagctgctcaaagcatactcgcagtgtgaaaatggcaccgagataatcaatgtgcagaattcttggttgtcaagtaactctaatgttccaaagtcacctgtaaacgagaaatcacaccaaagcacagaggaaggatctgacgctgactccgacgatggcttgccacctctagaggaaaacctgaaccacctgaactttaaccaagatgacgaaagtgaggaggaaagtgaaagtgatgagtaa

SEQ ID NO: 76454 - DNA, 492 bp, Oryza sativa
  Clone ID: PAT_MRT4530_76447C.1
atggactgccatcgccgaggccagatccatctcaccccgccatcatcaaggacagatccgccactccttgtaactgttgaggctggatccgctgctccatctagttgtggtgaatctggtgatggtgttggtcgttcaaagctcaaggatggacagccgaagaggccacctgttgtggcagtgttgctccatggggcaagccgccgccggaccctagcgtggggcagattgcctgacatgttggtggtgcaaacaggagggtgcaatttccaccgctggttatctacattcttcaagtgtgacaaggcagcgatcgacgctagggacgggaagggagcaacggaggcccgacatagagaagaggaggaggagtcagcggcgctccttgcttactcacagaggtggccagggcggcagagaagacgacgtagagagtgtattcggacaaattcactatcttatagtgttcccagtaaagatcgtattttttaa

SEQ ID NO: 76455 - DNA, 290 bp, Oryza sativa
  Clone ID: PAT_MRT4530_76448C.1
agttattaataaatgtacaatttgatggccggctaacgaacaaacaaaaaacaaacacagtggaacccacaataaattaaatttggactcacccccctcatctagcctttaatgacataccacattttttccctccccctccccggggcggggccggaaaacctaaatacctatcccctccccctgagctggggggcgggtgcgagctgcgggcgcctgtgcgaaggtggtcgcttacgccggggaggaagaaggacgccccgggcatgaacagcaggtgggggggggaa

SEQ ID NO: 76456 - DNA, 1269 bp, Oryza sativa
  Clone ID: PAT_MRT4530_76449C.1
atgaggctaccctcgaaggaagattgcccggggtgcagtgatgccgacgagaaccatgtcagcagttcaagccgatttcaccccgggaaagaaaatcgggaacggttccaagaggtttatgaggaaattgaccatcggctgaagaggaccaagcaagaatggcgcataaagagtaaaatcgttccagccgatgaggtcgacgccgacaaggcaaaacagggcgcgggggactgggcggctggcccttatggcgacgcggcgcgcggcgcggggctcgagacacgatggcgacgggcgaggcggcgacgcgacgttggcgcgaggtggcagtggcgacgcgacggcgacgggacgacggcgctgcaacgggacgggcgacgacgcggcagcggcggcgcacggtgcgaggcgatgccgatgggtgacgacgcagcagcggcggcgcgcggcgtgaggcgatgggacggcgcggcagcagcgacacgacgggcgcgcggcgcggcgacgggacggtcgtgcggcgacgggacgggcgcgcggcgcggcgacgttggcgaggcgcgcggcacggggcgcaaggcggcagcggcgcggggcttggggcgatgtgacagcgagcggcgcggcgcgaggcacgaggtgacgcgacagcaacggcgacagcgacgcgacggcgacggcgcgcggcagcggcggcgacggcgcttggcagtggcggcgtcggcgcatggcagtggcgggatgttacacaacccttcagaggccaagtgcgtttcaaacgtcgagctaaccatcggcaacaagacaatcccgactaccttttttgtcatcgatgggaagggttcatacggacataagatcataaacttcatggatggtaatgctggatacaatcagatttttatggccgaagaagatgttcacaagacaacttttaggtgccctggcggtatgggcttgtatgaatgggtcacaaagagccgtgaatggaaagcgtgtggcggcgacggtaggcgtgcgggcaacgacggcgtcttgggtgtgggcgcggcggcgctcgggagcgggcggcggctcgcggggaggccggatctgccgccgccggccgcgaggtggccagatccgccgccgccgggccacagggaggccggatccgcctccgtcgaccgtgctcctgcggatgatgtggcaacgtttcagcttcgtgaaaacggcaagggcatctattacggctgtaatggccagttagatctcagtatctcacactaa

SEQ ID NO: 76457 - DNA, 1044 bp, Oryza sativa
  Clone ID: PAT_MRT4530_7644C.1
atggggaactcctgctcctccgtcgacgagagcgccgccgccatcgccacattagcggagagcgctgctgcaggggctcgggaaaccgtcgccgacgagttcgccagggcagcggggtcgggagcgggagggcgaggcgacgtcgccggatcagcggccgcaggagtcgcctctggagcgggagggcgagacgacgccgccggggacgaggttgtgatcgctggcgtcctgtcgctggccgacgggcagaaagccgccgccgcgggcgccattagcggggtcgagtcgatgcagtcctacatgagaggtactcgattcttctgtttcggagagcgcgtgtgctcggaccagatggccgcgctcaagatggccgccgcgtgtggttcggccgccggcatgagggcggtagccatggttgccgcccgagctcggcacgccgcacggattgccgcgaatccagacgttgagaatcctctgcatgatatccccgagcccaactgtgttcctaacaatcccctctccttaatattcgacttgtcctcaagtcgatgcaaattattgccatgccaccaggatcccaaggatcgtcctgattacatgctatccgccgctgccactggagcaagagcaggggttctatgtgcacggatgaagatacaagcagctggtggtgattctacttcacatgcgaagtatgtcccttttctcgcaccgttcattggaggtgcactaccagggtcatatgcggcctatcacctcgtgaaacattctcctgaatgggtcatgggcgtggtctttggtagcatttctttgggtttcttcgcagcttgcacaggaactgtttctggtttactaggcacgtcatccgccacattccagtacagcagatttgctgccattacaaccttcacggctgtatggtttttattcagcttcgctatgacttccgtgttttcaaaaacatggcgcaagattctctgtggatttatatgtggtgtgcctggggtaactttcgtgggggcctggctatattcagggtggtga

SEQ ID NO: 76458 - DNA, 451 bp, Oryza sativa
  Clone ID: PAT_MRT4530_76450C.1
gtctattctgattggttgggatgtactggcctggatgatcattagtctccaagtgctaacagatcggccgccactaagttttcgcgagcacatcctacagactacacgtctaacaaactgcgggagatgatccgtgtgatgaagcaaaggaatgtccctgcctctattaaatggtaggggaactaccacataattgactctctatcgaatgacatcttgttttacaaaatggtcatccatgtgctcagtgaatctgtttgtagacgctatgagccagagatgacgagaaatccagggatgtggccactgtatagggggatctttgctggtgtagacatgttcaaggataataatatgaaatctttcatacctgaggaagacattgtcatctggctgaaaaatatatgtggtgccttggatataaattcgtcagctaatgatggtctggctg

SEQ ID NO: 76459 - DNA, 294 bp, Oryza sativa
  Clone ID: PAT_MRT4530_76451C.1
atggccatgtcgagagcgccgtttggcctggctcttgttgctgtaccggctgctcttcttcttcttgttgtttcctcctgccatgcatccagagaacacccagatatacgtaatactatggcagtggggagcagcaagacggtggtgatattggatgatccaaagtgcgaggtgatggagaagtgcgaccccaagggctgtacggattactgcatcggcattggcctgggacaaaataatggcttctgcaccttccatgatcttcagttctactgctgctgccccatcgactaa

SEQ ID NO: 76460 - DNA, 1707 bp, Oryza sativa
  unsure (1)..(1707): unsure at all n locations
  Clone ID: PAT_MRT4530_76452C.1
gttttcgttttttttttgcttttgaaaacacaaattgcaattatgttatacgaaactatagtttgaatcatcgtgccggaacacgaggatcataagaggactggaataccacaaatttcaaccatcttacccagacatttcaaaacataaattgcaaatatattataccaaactttgtatgcttgcagatctttttcatgtctgttgcctaaaagctataatggtaataattaaggagcagcaattaaactacggtgcaattgcttatttcagctaaactctgacaaagacctccgaatgcaagggtagtatctgaggactaacagactcatcaaaaattatctgggcgattgctgaagctctttcaagatgcaatacatctgtcttgagaaaatggggcagtgcctccgagtggacctttcggaggccttgtgggtgaacctccttgggagcaatcaggaacagtttgttaagacggctagctttcctcagcaggaaatccaccagtcgtagttcattgcgataacccttgaagtttgtcatcttgaccaaccgaaggttttctaatccgccttcaggcggttcttcctctgctacctccaaataattcgtcgtgaacgaatcataagtgtttgttgggagctgcacgaagagcctctccaactgaggacaacggcaggccttgaggaagctatagatatctgcgaggttggagttggccattccgaacatgagcagctggagctctctcaagctgttcaagctcttctccacgttgggggtggctactgaagcagagacatactggagagcaatgctgcatagggtgagtacggtgaggtttgacaggcgggggactgccgacggcaagttggtgcgcggcaaacctgtctccggcccgccggagcagaggtagagatgctcgacacaatccgcggtgctaccgaaaatgttgctgcagaggaacgcgccgctgaaccggaacgaccggaggaggggcgccgatggcacgcgcagctccgtggcgcgggagcagtcgacgacggtgaggctcttgagattggaggccccgacggtgaaatcgatacggcggaggtgtcggcagtaccggagctcgagctcgcggaggcgcgggcaggcggagaccacccgccgcagcgcggcgtcggtgagggagacggagtggaaatggatcacctcgagcgtggcgaccatcgcgttggcggacgccgtgaggtggagcccccgcaccgacagccgcgcgaggagcttgctcccgatggggaagtgcacggcgagcgcgccgggccgccgcgtgccccctctcgccccacgcccgccgccgccgtcgagccgcagccgcacctcctccacgtcgcacgccgccgcgtactcgatgaaccgcttcagctcggggggcgcgagctgccccgcgtggaaggcgagcgagaagaggtccattcgacgtcttccgcgccggtcgatgcctgcgaggtgctcggcccgcagcgccgccaccgacgccgacgcggttccttcccccgatggcagccgcacgtcgagcgacgacgggtcgggccacccgtgcttccacaacccccgccaccgcgacgagagggcccccgtccggattgccgacttgagcggcaggaggctcagaatctggagccgcagcgcgtcggggaggtccgagatgcggtncttctn

SEQ ID NO: 76461 - DNA, 1089 bp, Oryza sativa
  Clone ID: PAT_MRT4530_76453C.1
cgccgcccgaccacgaccagatccacggctcctcctccggcacctgggaccgcgtgcgtgcgggcgggcgggcgggcggcaagaaacagggatcttgaggttttctgagttaatgcacagaatatagagaattttccagttaatttgcttatgagatcagtaaactgctatggatatatgaagcagaagtgaagctcacactgtttcacactggtgaatgatcagtattttgtctgtttcagatcttagtgtccctagatatggaaggaagagaggcaggcttatggtaagccctggtgaatatttgtgggaggtcagtaagtggtggcctgattaagactgcatcagagaaatttgtggttatctttctttactaatgacggcattgacgagaatgaagttcccaaagcgctatgtcattgtgctgctgacattcatctgcacaaatgtttgttacatcgagcgtgtcggattctcgattgcttacaccgtggcagctgatgccattggcgtgaatcaagcaaacaaaggcatgatactttccatgttctactatggttatgtcttatcacagatccctggtggatgggcagcacagagaattggaggtagacgtgttctgctgctgtcatttgtgctgtggtctttgatatgcggtttaattccactagaccccaagagagaagtcatcctggtcctttctcgcctttttgtcggcgtagcacaaggattcatatttcctgccattcacattctggcacaatgggtgctgccgcaggagggctcctcctcagtgtctctaacaacctcagggatgtaccttggtgcagccggtggcatgttgtttttcccaagtttggtgaagcacatgggagctcagtcagttttctttgttgaagcagtgttaggtgtagcatggtctgtaatatggttaaagttttccagcgagccacctcgcactgaccttccgaaagtgtcaatgccaaaagtggcatcacgagagaagatcaaggcacaagcaggaggggttgttgcacctcgcactgtaaagatcccatggcgaaggattatcttcagtctaccagtttg

SEQ ID NO: 76462 - DNA, 934 bp, Oryza sativa
  Clone ID: PAT_MRT4530_76454C.1
atggagggctgtgattggttgagtagtggagctctgtttgcataccagttcaaactgactcttatagttgaagaaagcgatagagtgaaagccgaagttgctgctgctgcacaggcatctgcaatgctgtttgaacatacaagcttctctcccagtagtgggccacatggcgattttatgttctctctggatgactttgaagctcttggaaacaatgctggaccctccacgagtccaccagccagcgaaagaaagcttttctccgatgttgcacggcttggctttgcgtctgcccaagactcgcctcctctaagagttgaatctggggatttgactggcaaaagtgaaagcacgggggaacaagggccagccgcaacacccgcattatcctttgccagcatcatttcctccactagagcgtcagacaatagcctggacacgcacaaaccaaatgtagtcgggaagaaaggcaagaaacccaccaaagtgctcttgtccactggcggtggccgccgatactgaaggaagagtgacactggaatggaagcagttgccagttggctgtttcctataagcagtgtgtatagtgcataacctggacttcacatctgtaacactcccaagtcccaagtagcagctttttctcccatgtggtttgatctaaatcgcctgactgttttagaaggtttttactgtgtatctacatcctgacccatgctaagggagtaagggtgactgccctgtcgcaaaatgagaagagctatgtaaaatttgataaataatcttgcctcggtgcacgcccacgacttggcccgtcatgggctgatacagcctgctgtttaaaaaaaaaaaaaaaaaaaaaaaaaaaaaaaaaaaaaaaaaaaaaaaaaaaaaaaaaaaaaaaaaaaaaaaaaaaaaaaaaaaaaaaaaaaaa

SEQ ID NO: 76463 - DNA, 395 bp, Oryza sativa
  Clone ID: PAT_MRT4530_76455C.1
tttggttgtcgtcgcaaacatacaccaccatcgcgcgggtttaaggagtatggggcgggggcccctcccgggcgaagctcgcgctattaatattgctgactacaatgctactcctcgccggggacctgtccctcaccggcaccgcggcgaaccgatgggtgcggttccaatacctgcattagatccgcaacagcggcggaggtggcggtggtggcgggttctgtgtccgccgccaagaggccaataacaacgagctttcttggctctcagtgccagacccgtccaacttcacagaggaactaactgaacggcgtctgacgcccggtgagactgcgtgccgtgactcctggacggagaacatctccatcccttgtcttgactaccccgcccccggc

SEQ ID NO: 76464 - DNA, 1200 bp, Oryza sativa
  Clone ID: PAT_MRT4530_76456C.1
atggggcggccgccgtgttgcgagaaggagggggtgaagaaggggccatggacgccggaggaggacatggtgctggcgtcgtacgtgcaggagcacggcccgggcaactggcgcgccgtgccgcccaggacgggcctcctccgctgcagcaagagctgccgcctccgctggaccaactacctccgcccgggcatccgccgcggcggcttctcccaccacgaggagcgcctcatcctccacctccaggccctcctcggcaaccgctgggccgccatcgcctcctacctcccccaccgcaccgacaacgacgtcaagaacttctggaacacccacctcaagaagaagctcgccctcacctcctcctcctcctcgccgccgacgccgacgacgccgctcgtcgccagggggcagtgggagcgcaagctgcagaccgacatcgacctcgccaggcgcgccctccgcgacgccctctccgtcgacgacgccgcctccccggcgatgatcagcagcgggccgcccgcgccggcggcggcggcggcgtacgccctgagcgagcgcaacatctccgtgatgctgagcggctgggcggcgccgcctccggccaggaaaggattgtcagcctgcaacccggcggcggcgacgacgacgcccggtggcgccgccgcggagagcgcgtccacggccgggacgtcgttggagctcaccgccgactgctgctccggcggcggcgactccagcgcgtccaactgcctgccgtcgtccatgctcctcgcgtgcgacgacggcgacgcgacggcgacggcggccggggtggcgccgctgtcggcgatcgagtcgtggctgctgctcgacgacagcggagagccgcagctggcactggacgagcagctgctggacaagcaagttaaggagattgattgggccgacaccttccagccactggtgccaaaaccccacggcaccatatatgccaacatcgagcagggcttggccgcaacgcgcagccggcgcgccgcccgccgctgcgccgacagccggcgcgccgcccgccacgaggccccgcggtccgccgccgcgccgcagcgccgcccaccgccgcgaggccgccgcccgggcctttgcccgtcggcgtgccgccgcgaggccgccggccgccggccgcccgatgggatgatggagggggaaggagaggagttatag

SEQ ID NO: 76465 - DNA, 731 bp, Oryza sativa
  Clone ID: PAT_MRT4530_76457C.1
ctcagcggtggtgtctctggcatcgctgtcgctcatcctgtggctcgtcctccgcccatcccccccgcgcttctcgctgctcgccgccaccaccaccgccaacgactctgcctctgtcgtcgccatcaacgccgccttcgccgcccgcaaccccaactcccacaccgccgttctctacgaccgcctccaggctagcgcctcctacgccgggctccctctcaccgccccctcgccgctgatcccgcccttcttgccgcagcagggccagggcgacgccatgctctccgcgtcgctcacgtcgccaccggcagcggctgctgtggcgggagggcgggcgctgctgaggctgcgcgtggaggggcagctccgctggaaggtggcggcgtgggtcaccggacgccacgcgctcaccgtcgactgcatcgccgttgtggagctgcagccgacgccgacgccgtcgccgagcgcgatcgtcggcgtcctccagccccaagatcaggccggctcccgctgctccaccaccgtcgcctaataatataatatccatcaaaaccaacaccacaaaccatgcaaactgatcgatggatgcatggaggaacagtcctagttcttgtacatgtacatgtattctctctcgcgttatgtatgtatattgtcctgtaccgcgcgcggtaaacaagtaataaatcaaagcatctgaatcgtacacataaaaaaaaaaaaaaaaaaaa

SEQ ID NO: 76466 - DNA, 1308 bp, Oryza sativa
  Clone ID: PAT_MRT4530_76458C.1
atggggcggccgccgtgttgcgagaaggagggggtgaagaaggggccatggacgccggaggaggacatggtgctggcgtcgtacgtgcaggagcacggcccgggcaactggcgcgccgtgccgcccaggacgggcctcctccgctgcagcaagagctgccgcctccgctggaccaactacctccgcccgggcatccgccgcggcggcttctcccaccacgaggagcgcctcatcctccacctccaggccctcctcggcaaccgctgggccgccatcgcctcctacctcccccaccgcaccgacaacgacgtcaagaacttctggaacacccacctcaagaagaagctcgccctcacctcctcctcctcctcgccgccgacgccgacgacgccgctcgtcgccagggggcagtgggagcgcaagctgcagaccgacatcgacctcgccaggcgcgccctccgcgacgccctctccgtcgacgacgccgcctccccggcgatgatcagcagcgggccgcccgcgccggcggcggcggcggcgtacgccctgagcgagcgcaacatctccgtgatgctgagcggctgggcggcgccgcctccggccaggaaaggattgtcagcctgcaacccggcggcggcgacgacgacgcccggtggcgccgccgcggagagcgcgtccacggccgggacgtcgttggagctcaccgccgactgctgctccggcggcggcgactccagcgcgtccaactgcctgccgtcgtccatgctcctcgcgtgcgacgacggcgacgcgacggcgacggcggccggggtggcgccgctgtcggcgatcgagtcgtggctgctgctcgacgacagcggagagccgcagctggcactggacgagcagctgctggacaagcaagttaaggagattgattgggccgacaccttccagccactggtgccaaaaccccacggcaccatatatgccaacatcgagcagggcttggccgcaacgcgcaggtacccatctattacacaagatcagaatagcacagaatcacgaatcgacaagattcttagaaagaaaaagaagaaaaaacacaaggctgtcggccgctgcgtcgacagccggcgcgccgcccgccgctgcgccgacagccggcgcgccgcccgccacgaggccccgcggtccgccgccgcgccgcagcgccgcccaccgccgcgaggccgccgcccgggcctttgcccgtcggcgtgccgccgcgaggccgccggccgccggccgcccgatgggatgatggagggggaaggagaggagttatag

SEQ ID NO: 76467 - DNA, 2396 bp, Oryza sativa
  Clone ID: PAT_MRT4530_76459C.1
atggctgcggggacggcggcggcggcggcggcgagctccatgagcccccaagccgggagcgcgacgcgcgcggcgcacgggacgggggagcgctcggctctgccgcggtatgtacgagcgagagaagcaagcaagcacgggacgggggctccttcgccgggaggagggaaaggcagaggcgggacgggaatgcggtccgcccaagaactcgccagcgcttgcacgggcgcggccgtggaagaagtagaactgcttcgcgtcgtcgaggcgaacgcaagggacggcatgggaggcagccgcggggagagctcttccgcgcctccaccgcctcctcggtcaagagtgctcaggcagggagggctcgaggaagaatacgccaagaactccccctcccctctcggattcgcaccaagactcatccgccacgacagacagacatcgtacgaacttgcaagcacgtcaagaccaccagcacctgagatgggagaaccacttcgtatcatcacaaagaaagcaatgagcgagaaaaacagggcttacacaggaggcaatcaaggtagatcctcctctgccctgctaccacaatcaagattctggcaagggatgtgcgaggaagccaagaaggttcttggcatcgctaagtactcttcctccccctcaagattggctgcaagaatcctttgtgacaagcaggtgttgcctgaatctgcaggcacatcaaggccagtgctagagtttgtggatgaatcataccagcagtggttatgttctcaaaaaagcactagcttagtcgctgacgtgattgctgcagtgtaccatgatcagtctgtcctttctccatctgcctctactggaacactgtccagcctgttggtaccttcagaggaaaaaattcaagctatcctaggaaacttagggaaatcggtgttgtgtacagaggctttgcaccagattcggatactctgcgattccagtaagggagcacaatctttcctcaacaagtgcccagacatgatacaagtgttgatagatctaactacggaatggaaatcgatatggacatgggctcttgaggaagagaggctgagcattgtccttagtttgtcaattcacaggccaaacagggagaggatagctgcgcagaaaaaattgccatgtttcctcaaacagactgttgaagtggcaattgagtctggtgctagtgcagcagcatctttggtgaaggtagcttctatagtttccatcctgtcagagtttgacatgttcaggaaaagtgtgctggatattggtgtagtgacactgttgtgtaatctgctcaactttgagaacgacgctgtaagaaaagaagctgccattgctgttcttgcactctgcggatatattggaaacaacatggtcactgatgatgtcctgcttctccttgactatctgccaaaaggtccatgtgtgctggaggtgatctgcaatcagactgtagttgagcagttggttaacattgttatggctgaacatgaaagtgggctggtaacatctcaaggcatttactctgcactttccttgattctggtcattactcagaatgatgtgagtaaaatgaaggtggagcacatggagaattttatgaagtggttgcgagagctgtcctcaaatgaattgccaatgcagacaatgtttcagctgattgaaataataagccttttgtcacaaaggttgtattctcataagcctaaggaatttgttgttaagtggcgggatgatgatgatcagatttggtaccctttatatgccgaagttaccattggtcggcctatctcaacaagcaaagtggcaaggagaagagaatggactgacataaggatagttcgtaggttgaggcctctcagagctcaagagaaaatgctgacaaagctcgagttttgtgaccggtatcaaaactacatacaagggaaaaatacatacaagcaactgtacagggttgccatggactgcaatggttccaaaattgctccgctgtcctttgtcaggaaaaatcatgcagtacccggtgataattgcaaccggccagatttttagacgagtctacatcaaagagtggtttaccctgcatgggcatgtctgtccaatcactcaagagcctgtttatcaattgttctaaggaatcacagattacgtgattatttggaatattggcgggattcagtccaaatggtaacatccaaggtcacgacatgatgaagggtgtcttgactttccaaaggctactattacttgtgcagagtgttgctgctatgtaaaaagacaagaatgtaattgaattcatattttcagtgttgatttttttcccattgacatgtccagttgaccatggtgtttttttaatattttttttaatattg

SEQ ID NO: 76468 - DNA, 486 bp, Oryza sativa
  Clone ID: PAT_MRT4530_7645C.1
aaaaaaaagaaacgcggggtcaccagggagacacgggcggggggggacaggcggccgaacccgacccggcccggccggcacacaagcggggcggaggggggggcaaagaagggcccggcgggaacaggggaaaagctgggaaccggggaaaatgggggaacggtaacaaacccgaaaaaaaaacggggaggccggggagggggaaaaggcgggggaaccgaaagagagagaaaagcggcaacaggcggggggagcggggggaacccggcggagccaggaaaccggaagaaccaggcaagagacgggaaggggcagggcgcggggagggggcgagaggggaatgatcgaaaaggggggaaacagggaaaagaggaagaccgggaacagcgggacccacagaaagggctggcacgggagagaccccagtaagccgaaaaagccgaaaagcccgggtaagggaggaaaacggcaggaaggtggaaaagg

SEQ ID NO: 76469 - DNA, 902 bp, Oryza sativa
  Clone ID: PAT_MRT4530_76460C.1
ctatgtgccgtggctgtcgacgtcaccaccaacagatgggcagccgtggagcagcagtgatgccatggcattcacggacgccggcgttgatgcgttgtcagatttcatcagctgggacaaaacctgttggatggacaccatagctgaagggaagaggacgaccttacaggggctgccgtctctgatgacgattcgcttccagcaagcgacgtacgaataggccataggtctagggaaatcaatcttctgccgcctgctgggaacgaggaagtcgccgtgcccgtgagttgaagcatgttgtgcctgccggtgaagcgcgccaacaggtcgaaggaatgcgccggccgtgatgccgccatctacgcttctccgatggggtggatcgtctgtcagcacgtacgccgaatctccgatgagcatgtcgccccctcccgtgaccgtgaccgtgaccgtgagcagctcgagattggtttcttctcccgctgtcccgcatcgatcccttttctgctgcttctgttcgccaccaccgtggtcaacaacacctagggttttcttcgcccgcgcgcgtcgatccccttttcccctgctccttttccggtcctcttcgctgctgccgtgctccaccgtgtcctccatcttgggctccttggtgtcgaccatgcggctggcgagcgggtgcacgttcaccaccggctggatgcaacacctcgccgcctccgtcctccggcgaccgccgagaggcagtgcgagaagggaggaggagagctcgcccgaggggtagggagggcaaggagaggaggggaagatggttagcttttctgcatcgccccctttcatctctctcgccctctcctgtgcgatgcgccgccgttgctgcctcctgctctcctctctacgccgct

SEQ ID NO: 76470 - DNA, 249 bp, Oryza sativa
  Clone ID: PAT_MRT4530_76461C.1
ggcgctggaattagcgtcagacaaaggagcaccgactgctttgcagagctcaggacgtcctaccaggttgaacctccacgagcaatcctagtgagcgaaggtcgctggacacatcagatcaacactgcaaaagatagaaagcccgggccactcgacggcatccaggatgctgtgctcttcgtaacaacggagaatgatcagaggattgcacgaaggctgcagctcatgaaagccttaaaaactgaagag

SEQ ID NO: 76471 - DNA, 1947 bp, Oryza sativa
  Clone ID: PAT_MRT4530_76462C.1
atggcgattccccgtcgcctcgccgccgccgcggccgccgaaaccaccaaacgctcggcggcaggtctcgccgccgccctcggtggaagcggagggaagcccgcaacagccgacctggccgctgccgcgacggccgcggcggccgccggtcgcgcctccgaatgccagtccctcctcctccgcatgtcgcgccgccgcggcgcctgccgtcgcgagatcgtctcctccctcctcggctcctcccccaccccgcagccgcgggtgtttgacctcctaatccgcacctacacccagtcccgcaagccccgcgaggccttcgaggcattccgcctcatcctcgaccaccgcgtccccatccccgccgccgcctccaacgccctgctcgccgccctctcccgcgccggatggccccatctcgccgcggacgcctaccgccttgtcttctcctccaactccgaggtaaacacgtacacgcttaacataatggtccacaactactgcaaagccctggagttcgacaaggttgacgctgtcatctccgagatggagaagagatgtgtctttcctgatgtggttacacataatgtgatggttgatgctagatttcgcgctggggacgcggaggcagcaatggcgttggttgactcaatggttagtaaagggctaaagcctgggattgtgacgtataattcggttctgaaagggttatgtaggagtgggatgtgggataaagcatgggaagtgttcaaagaaatggatgattttggtgttgcgcctgatgttcggagttttaccattttgattgggggattttgtagagttggggagattgaggaggcgttgaagatttacaaggagatgcggcaccgtggtattaaaccagatttggtgagctttagttgcttaattggattgtttgcaaggagggggaagatggaccatgcgatggcgtacttgagggagatgaggtgctttggattggtacccgatggtgtgatttacacaatggtaataggcggattttgtagggctgggttaatgtcagatgctctgagagttagggatgagatggttggctgtggatgtttgccagatgtggtaacttacaatactttgttgaatgggctctgtaaagagcgcaggttgttagatgcagaagggcttttgaatgagatgagggagagaggggttccaccagatttatgtaccttcacaactttgattcacgggtattgcatagagggtaaactagacaaggcgctgcaactgtttgacacaatgttgaaccagcgtttgaggccagacatagtaacatataatactttgatcgacggaatgtgcagacaaggtgatcttgacaaagccaatgatctatgggatgatatgcattctcgtgaaatcttccccaatcatgttacgtacagtatcctaatcgacagtcactgtgagaagggacaagtggaagatgcatttggttttttggatgaaatgataaataagggcattttgccaaacatcatgacatataattccatcattaagggctattgccggtctggaaatgtttcaaaggggcagaagttcttgcaaaagatgatggtcaacaaggtgtcacctgatttaattacttacaacaccctaatccatggttatatcaaagaagataagatgcacgatgcttttaagttgcttaacatgatggagaaggaaaaggttcaaccagatgttgtcacatataatatgctcataaatgggttttctgtacatggtaatgtgcaagaagctggttggatttttgagaaaatgtgtgctaaaggaattgaaccagatagatatacatacatgtctatgataaatggtcatgtcacagctggcaactcgaaggaggcattccagcttcatgatgagatgcttcaaagagggtttgctcctgacgataaattctga

SEQ ID NO: 76472 - DNA, 2944 bp, Oryza sativa
  Clone ID: PAT_MRT4530_76463C.1
cgcttattacgccagctggcgaaaggcccaccggctgcctcccgcttcgccccggggccgcccggggctctcctggccccccggccggaaagctccccccccgccgcttcccctcgcccaccggaatcctgctccgcccctaggcaaggcaaggctaggattgccgcccgccggaatatctcccccaccgccgccgccctcccgccggcccacgggattggattcgcctctttacaaggcctatcctgccctctctactaccacccttatcgatctctatctggtttcctttacctttcgatttgattcaaccacatcgaaatcgattctatctctacccgcgacgcgatgaccacctcctaccggtgtatttcacttactcttttggatagcatggcttatatcggaactacctctatgctaacattgtctaggtctcattagctagattaacttaactgttttcacttagtggtgttagtctgtaaagaaaatgaatacccagtcttagttgagtcttttgtaaaaaaaaaaaatggaaccaaagaatgcaattgcactggatgaacatgtgctggattctactatccgcaagaggaagcgtgtgggtgctactcaatgtgctgaggccaatgacgcccccaacctctctcagaatggtccaaaacagaatctcgctttatttcctgattcgactggacataagaagtccaagatgatgtgctctgccgatgacattctggagaggtacaataacttcaagataagcgggatgcctgttcgtgtgatgtctcaccaacatggtggatggagagacttcccagaggatgttgtcaattcggtacagcagagcttccagttgaagaggccaattactagtgcagtattccagaacaggcacatcctgttggacttcatgcagatggtttgtttagattctgtgatggccataagcaagccaattgcttggatcgatgatcatggtaaatgcttctctccggattcatgtgctggagtaataccatctgaacctctgcagcatggaaaaaatgagttcttgaaaagttttcatgatctaagcagtagttatgaagctcatgaacatgatgggatgtctgcagctgaaagctcaagttcagcgtcttttgatgcagtgctttctgatgttcaggaggtcaataatgtagtggaggacaaacagaaggtactcaatgaaagtggtgaagtttctggggaaaataaaaagggccatttaagccatatgaatgaaactgctgatggggccatgcaagctcctcgtaataatcaaagtgtccagcgtgctgattcagctgttcggaatttgttgtttcaaggatcaggccatctatttactgaaaaagacatcatcggtatttatagaaccccaatgctagatcaacttgggaggtcccgttatagtcttttccagaaggaggtacaagtcacaaaaaatcaacggggaaatgcaaatgagcgttatgcatggcttgcttgcactaagggtactatggaggagatgatgatgaatggtgctttggaaatagcaaaacctctgcagggtccaatgtatggtgttggggctcatcttgctccagcaaactcctccaatatctgtgttggtttatctgatattgacgaaaatggaatcataaggatgatgttgtgccgtgttataatggggaatgttgaggtggttttccctggatcaaatcaatgccagccaaccagtgaaagttttgacagtggtgtggatgatctccaaaggcaaagcattacatcatatgggatgctaatgtgcataagcacatttatgctgaatatgctgttattatcaaagtaccttacatgaacaatggagatactgcatccaatatctctgagataagaaattctggtgcactagacaatccaaccaaggatgacagtctacagaccattgcgtcttcaggtgatgaacaacaagcatgtatgcttgggcgtgctccaagtccaaggtctcctagttcaccttggatgcccttttcaatgctttttgctgctatttccgctaaagtaccccgttcggacatggatctggtgcataaatattatgaagaattcaagaggagaaagataagcaggcctgacctagtgaagcagctgagacagattgttggtgacaagcttttggtttctacagtagtgagacttcagcagaagttgccacccatggcagcaactgaacaagcgccaagagcacctggaaggggaggaggtgctagtccgtaattaaaaatgacagtttgccgacataacaagctgtggaggagtcgggttgagcaaagagagctcaaggaaatgtgtgtaaaacgtttgtgccgtaatgcacagactttagctcttgacaaacaaaactagtctaaacttccttgttgacaacatgttgtttggttgtataaccatgcatggtattctcgactaccggctgtagtgttgttctttttcgccgtcaaatgtagctgcggcttgaattcatcaatatctcctgtggatatttcgttcccaaaaaaaaaaacaagtgtaaaaaaaaaatcgaccacatttcctggatgtacactgctagttccctgtggcgctccatctcttgttacatcactaccttcatacatgtcgcttaaaagcgatcatcgctagtaatccatttactatactcacaactcgagtgacggatggagttacacttgaataggcccgaaatgatccatgtcgattggggctctaaactgcacaggcataagcatccaatatctttttctaggcacaattaatttaatttcttgcgtgactctacgatctaaccttcattggcggatgctaacagctcattccctgagaagctaatatgttctcttcatccatcaacttattaccatgtcaacctaaa

SEQ ID NO: 76473 - DNA, 1178 bp, Oryza sativa
  Clone ID: PAT_MRT4530_76464C.1
gcaccacggggggcaccaccatgtcgtcgtcgtcttcctcgccggcgccgccgcacgtcgtcgaggactgcctcggcatcgtgcagctactcagcgacggcacggtgacgcgttccggcgactactccagcatctcgctcatgcgcgacgtcccgatcgacctgcccgtccagtggaaagacgtcgtctacgacgccggccgcggcctccgcctccgcatgtacgcgccggcgaaccacggcggcgaggaggggaagcttccggtgctcgtctacttccacggcggcggcttctgcatcgccagcttcgagctgcccaacttccacgccggtgcgctccgcctcgccggcgagctcccggccgtcgtgctctccgccgactaccgcctcgcccccgagcaccgcctccccgccgcgtacgaggacgccgtggccgtcctctcgtggctccgcggccaggccgccgccgccgccgacccgtggctcgccgcgtcggccgacttcgagagggtgttcgtctgcggcgactcgtgcggcggcaacatcgcgcaccacctcaccgtcggctgcggctccggcgacatcgcgctcgacgcggcgaggctcgccgggtgcgtgatgctctggccatacttcggcggcgaggagaggatgccatccgaggcgccgccgccgccgccggagggcgacgcgtcgccgtcggcgatgggcatcacgctgttcgaccagatgtggcggctggcgctgccggcgggggcgacgagggaccacccggcggcgaacccgttcgggccggagagcccgccgctcgacggcgtcgcgttcccgccggtgctcatcgtggaccccgagctggacgtgctccgcgaccgcgtcgccgactacgcggcgaggctgcaggccatggggaagcgcgtcgagctcgtcaagttcgaagggcagggccatggcttcttcgtgctcgaccccatgagcgaggcctccggcgagctcgtccgcgtcgtcaggcgcttcgtgcacgccggctaggtgatcgtccgaagtaaaccaagatatggaactcggatgacttgtgtactactccagtgttctagcgcgggagatttgcagcttgatcctttcgtcttcatcttgtcatccgtagccaatatttcaatttcataaatcgtttctatagtt

SEQ ID NO: 76474 - DNA, 443 bp, Oryza sativa
  Clone ID: PAT_MRT4530_76465C.1
agcccatcttctcatacgtcaacctatccacgagatacattcgtcatcttaatgtggcggagctctcggcgctcgctatggacattgccactgcgctgactgctgccgaaattataaaaactaatggcctcgctgttgaaaagaacatcatgacatggactgctgatttcaaagacgactcaaagacccttcctatgcgaaacgcgaagattgaaattttgcttgggacgacgtctacgattgatgagctgatgactgctgctgccaagtagaggcaagccgcgactgctgctgcgggcgaggaacaacgctagctatataaactattataagctgcctgctgagttcaattgaagactcctgctaggtttaagtgtccgttcattgctgtcctaaatagacttatcttggcgcatcaaaaagctctgcttatttgattcgct

SEQ ID NO: 76475 - DNA, 366 bp, Oryza sativa
  Clone ID: PAT_MRT4530_76466C.1
atggcgatggggacggcgcggcagccgcggcgcgcggctcggagcgacgatgggacgcgacggcgacgatgttacaggctccaacttccacaagtcctcgtcgtctctcgccgccctcctcgctggcggaagctcgccaaccacgcgcttgtcctcggtgccaccttcctcaagcttcgctgccgtgatgaggtgctcctcctctccgacggcaacagggagctcgcccacgccatgggcgtcgagctcgacgtccggtcccgccgccgccgcctcgtcgccggccgcccgcccgacctcctcgtctcttgcctcgccctggcagcttcctccccatccaccggccgccctgcagaacaaaagtga

SEQ ID NO: 76476 - DNA, 113 bp, Oryza sativa
  Clone ID: PAT_MRT4530_76467C.1
atggcggttatggcagtattgacggtcaaatattatgatttaatgaccgtcaacaacacccctacacttaacatttgctcatcccgagtgaaggctatggactctacaacagg

SEQ ID NO: 76477 - DNA, 495 bp, Oryza sativa
  Clone ID: PAT_MRT4530_76468C.1
atggcgcggtggagtaggagtctgaagcgggcgggattgagatgggaaggggagctcggctttgggctttataggggtggtgaagtcggtttgggaggaaaccgacctaggcggtcaaggagcgggatatggcggtcgagcgtggtcacgggcgcgacagaggaggcgatggtggctggaagggaaaaagcaaaaaggaaaagggggaaggagctttgctccttgctgtttttgggtgagttgagggaggagagagcgcgtgggagagagaggcgctgcctccgcgtcttggacgcacgcgcgctgcggcggcagaggaggcgcgggcggctgcgcggcgcaggcgggctaggacggacggcgaccgagggcggtcagccatgccgaaatacggaggagccaaggaatggattcaaggtggactcggatattttggaatcaggacaagtatttggcgaggattcaaaggaggcgattgacctttggaataattga

SEQ ID NO: 76478 - DNA, 825 bp, Oryza sativa
  Clone ID: PAT_MRT4530_76469C.1
ccgccggccgggacgcacaccccgctgcttccgatcaaatcgatccccaaattccccgatccccgcagccgctcctgcgactcgtaggtctcgtcaagtcggcggcgacgactttgatctctattcaagatgcagatctttgtgaagactctcactggcaagaccataacccttgaggttgagtcctcggataccattgacaatgtaaaggccaagatccaggacaaggagggaatcccaccggaccagcagcgtctcatcttcgctggcaagcagcttgaagatgggcgcacgcttgctgactacaacatccagaaggaatccaccctccaccttgtcctccgcctccggggaggcatgcaaatctttgtcaagaccttgactggcaagactatcacccttgaggttgagtcttctgatactattgacaacgttaaggcaaagatccaggacaaggaagggattcccccggaccagcagcgtctgatctttgctggcaagcagctcgaggatggtaggacccttgctgactacaacatccagaaggagtccacccttcaccttgttctccgcctaaggggaggaatgcagatcttcgtgaagacccttactggcaagaccattacgcttgaggttgagtcatcagacacgatcgacaacgtgaaggcgaagatccaggacaaggagggcattcccccagatcagcagcgtcttatttttgccggcaagcagctggaggatggcaggaccctcgctgactacaacatccagaaggagtccacccttcaccttgttctgcgcctaaggggtggaatgcagattttc

SEQ ID NO: 76479 - DNA, 624 bp, Oryza sativa
  Clone ID: PAT_MRT4530_7646C.1
atgacggagagcgagaccaagcagaagacggcggccaaaaccctgaaccctagctcggccctcctgagctccgaccgccgcaccttctctgggacgccgccaagaagccatctcttagaccccacgcctcctcctccaccaccgccgccgccgccgactgatgcgacggcggcggtggtggtggttgctgctggtgcggccttctcgggcaccggcttcgtctccgtccccgcgtggtcctcgccggagaggagcttggcaatggtcagggcagactccttctgcggcgatccggttggggactccgccgcttccgcggccttcggcggcgtcggcggcatcgccttctccgtctccgtctccgccagcgcaagggcaagcgtcatgttctccgcatggattccggggaccccggtgctgggggagaaggcggcagtgatggtggtggagaaggcggtgctggttgatcgggagcgggagcgggagggggcgccgcccgcggctgtggagttcggttgtcgtgggggaggggaggagacggatcggcggtgggaggagggggcggtgccggggcctgcgaaggaatggggcgagagggatcgccggagtgatttggtgacggag

SEQ ID NO: 76480 - DNA, 1131 bp, Oryza sativa
  Clone ID: PAT_MRT4530_76470C.1
ggcgcgtctggctggcttctcgccgcggcttctgctttgcgttgtttgaacgggctcggccgcccgccgactgcgccaaatctgaaatgtagaggctcttgaatttatagtttttttttgtgtttttttttttttttttttagcaacgcagattaatagtttacttattaattagtttaaactgctatgacccagcaaatgttcggacagcagtacagcacatttaaacggactcgatggtccactaacagcacaaataaagttttcacgaggataatgcagacacaggataacagtacagcagcaattccatcaatcaatgattactgaccacccctgaggcggagcaccaggtggagggtagactccttctgaatgttgtagtcggcgagggtacggccatcttccagctgcttgccggcgaagatcaggcgctgctggtctgggggaataccttccttgtcctggatcttagccttcacattgtcgatggtatcggagctctcaacctccagagtaatggtcttgccagtaagagtcttgacgaagatctgcataccacccctgaggcggagcaccaagtgtagggtagactccttctgaatgttgtagtcggcaagggtgcggccatcctccagctgcttaccagcgaagatgagtctctgctggtccggggggatgccctccttatcctggatcttcgccttcacgttgtcaatggtgtctgagctctcaacctccagggtaatagtcttgccagtgagagtcttgacgaaaatctgcattccaccccttaggcgcagaacaaggtgaagggtggactccttctggatgttgtagtcagcgagggtcctgccatcctccagctgcttgccggcaaaaataagacgctgctgatctgggggaatgccctccttgtcctggatcttccccttcacgttgtcgatcgtgtttgatgactcaccctcaagcgtaatggtcttgccagtaagggtcttcacgaagatttgcattcctccctttaggcggagaacacccccaaccgtggactcattccccctgttgtagtcagcaagggtcctaccatcctcgagctgcttgccagcaaagatcagacgccggacgcgtccc

SEQ ID NO: 76481 - DNA, 455 bp, Oryza sativa
  unsure (1)..(455): unsure at all n locations
  Clone ID: PAT_MRT4530_76471C.1
agtgacaatccagagccaaatcaaatgtccaataatatagtcctattacanatnctcagtccagnnnccaatntacagttcatctacaaattccaaatacaaaattcttcccaattccaatccttacaaatacagagagtccccattctgttgggccttcttttccagccagcccaactcaccccccagcacaagtatgtctttgctccctcaccagctctccctctctcttgcagccaagtctactccccctccttccttgcctcagccagcaggctgacacgccgcccgccacgtgctcggcaaaatgccgagtcgggcgaggctggcgcaccgggtcaccgagccaccgtgccgtgccgcgccgctcctccttgcgtgcgccgcaccgcgctcctgcaccgagccgcaccgcaccgcgctcagtgccgcgccgtgcactgaccgtgccccta

SEQ ID NO: 76482 - DNA, 909 bp, Oryza sativa
  Clone ID: PAT_MRT4530_76472C.1
cgcccttcacagtctttgattttagtactcgggaggtcagagcagaaggagttgaagcactcagattattgctttagatttcaagagaaggctattttgtcgactgcaaaggtctcgggggctactgtagagattatggataccccatatctacatggcatgtatagtccgactgggtacaggcgtccgcatgtgtagaaagaatatatttatggagattcgggttaaaatctaaacttgtatgttaagaaaatatccgagatcctagtcggttacgattgtattttatctgtaactgcatattccgttagggatatggactatattttgtaatacggaccccttcccctatataaagaggggtccgggtgtatctaggggcacgattttcttccagatcatacgatcgataatatactcggcggatcaatccccggataggagtagggtattacttcttgattaattaagaaggcctgaacctgtataaaatttcttatctcaaaacccttccacttttccagcttgatagctaccccttttagtattgccgaaatcttgtttcgacagatgagatggagtactgcgcctaagcagagagcaacatgaacccatgaacgacctcgttatcgattagttgcagtgcctggatgccaccgccgaggtgtacggcaaggaagggcacaatggggagctagctcaacgcaccggcgtcatcgtcgtcggccgaccagaggatcacggtctcacagagctgtccatggtcactctcgatctggcccactctcattttggtactgggctacccattttaggtacttttaagtgggtagctcctatttttacaccattcgatttctcccgctggatgatctgtatttgtttcaaccattgtaaaaatttctcaag

SEQ ID NO: 76483 - DNA, 452 bp, Oryza sativa
  Clone ID: PAT_MRT4530_76473C.1
tcttcaataagttcagcacaaaattgtgagtgttcctttcttcgtctctcgccttgtacatttctaattgttatatgttatttaactgtataaacaattaataacaagaattgtgtataggtggcgcgtcccagtatctagtatatttgaatgttggtctaggtaccagaatttatccatttatctaagcatatgctgctgttattgtacccttcctgactccaatatgatgaaaatgtagatctttctacatagaattgaaatctcactacagtaaacatcatgctgtgattaattgttatgcatatgtcagtgtatgttcacctacacacatgtctcaaggacaacatagatagaaaaattgatctgctaatgattaattgttatgcatatgtcagtgtatgttcatggggataaaatgtctgcctattcttatttttctgcagagaata

SEQ ID NO: 76484 - DNA, 144 bp, Oryza sativa
  Clone ID: PAT_MRT4530_76474C.1
atgggttacatgtacacactccacttgtcatgtggggaattccgttccagaggtgaaggtgcagggctgcggcaaatgatggcgctggcgctgacgcgatacaggatgggagcggagtcagggtatgtagagaatgaaacaaag

SEQ ID NO: 76485 - DNA, 610 bp, Oryza sativa
  unsure (1)..(610): unsure at all n locations
  Clone ID: PAT_MRT4530_76475C.1
aattntttgtaacncgactcantggngngnnagntgggtggcnggcccccccantgagttttttttttttttntatnangagaaacctataatncctcaacatgtcttcctaagtcatcacgttgtcaaccaatcangnnaatctnagctnattnananatcccnatccnccnctncgttgacanncantnnatgnccccgccantggtggtattcgtaactaggtgcancanngcaacctatggtatatacctcctctacatcgttcntggaaatcttgaagatacttgganctcgagccacgatgccgatccnaagttggaatatcaancaacacctgttggncagttccnancctgcttgctgctatcgtcntggtacnatcgttggatcgtcttanantacatgataantgcgttgcgaccaacgggccccntaccgagtgtgcncagactangttggtctctctctcngagacaccgnnaatgacncgangnggctcgtcgnctatttccctnctgccgccggggataactcanttnttgagcgnccccccnnttggtgtaacncgacngcaattncctctgatantggttatncnagancgctt

SEQ ID NO: 76486 - DNA, 612 bp, Oryza sativa
  Clone ID: PAT_MRT4530_76476C.1
atggactctaaaaccactgagaccgaagagagtgcagagtcaaaaaccctagagttccgttccttccacagttgccaagagaccaggtggatcagggagtcgaagccggtacggaggcgttcagctcctgagcgcaaaaggggcaagccgagtggctatcgatgccacgcttatggaggagatcagccgtccgacagcgctgctgaatcgatgccacgcttctggaggacccttcgcgtgccagagaagatcagcacatgcaaaagagtgctggccatagaagagcgcctggtacgccgaacgcaccgagtagcattggtcactcgtccagcgctaaacaagacgatcaccgacacccggcgaaagctgaatgtgaagcaccgcatcctaaacaaggagaaactgggagatgattgggacattgagggcgccgcggatgtcagaaatccaggaattgttcgcaggccagaagcaattgtgcgcgaacctctaagccgcaggggcacagcgaagacatgtcaaacactcataacttatacttataccatggcccacatgtcagtcgcagttctgccaatcaccaccaccattatagattttaggttccattaa

SEQ ID NO: 76487 - DNA, 243 bp, Oryza sativa
  Clone ID: PAT_MRT4530_76477C.1
gccatagcctggtgtatttgttcaagggcatgctcgagttcaggtcgttagtaaccttggaaagacggtattcaatggcgttctacgtccaggtcaattgctgatcattccgcgaacactacgttgtcttgaaggaaagcagagcatgaaggatgccaatacatttcattcaagaccaagtcaactcaggtgtagccaccttgcagggagaactatatgcgtcagtcagtgagtgtatgccat

SEQ ID NO: 76488 - DNA, 3594 bp, Oryza sativa
  Clone ID: PAT_MRT4530_76478C.1
ctaaaggtccgggtcttgatcaacgcccgtacaacagctccttgcccacaaatacaaatgcccaaatagcaccacactgccaatgaagccaaaaaccaacctccaaaaccacaactcattgtcgtgaactgcaggggccaaaggtgacgagggtggaggaggggccaatggcgaagttggcgtactcagtgccaaaagatagatgctgtatatgactagaactgaaaaggccgcatacaggacatgtcccatatgccgactgaagatctttggaaacttctccccaaacatcccggcagggagaccaacgctcccgaagccccagatagttgcaaatgctgcaagcatccatataccataaccagcgggcaacagaggccggagaaagaataacacggctaaagatgtgcccaatatgtagacatagccaatttgtcttttattccaaacgtccttgtctcccgtatctgtgacatcagcacttgtattctgagcagtcggactgggagcaacaactgtattctcagtgctgaatatttggggagtcgaagttttatcaggcctgggcattggagcaaaaatcaacggggacaacaaatcttcattgcccgagagagcgtaagtgttccagcgaaaaagacagctctgtatacgtcggtgaacacgttcagattcctccatctccagtgctttttgacacagaattaatctttcaattgaaagctgctcctctctgagccaaagatcatcctctgccttctctaaattagtccacaataccatcctgtcattgtccacttcggtatttatccttcctttacccttggctctcttgccgctagccatgtccacagctgaggaagaggaggcctcggcatcgactgccctcatgccgccactgaggttgttcttggtgatgtcgtggcgctcgtgctcagctgacgggtccgactcagtcgagcggtgatgctctgaagacagcagcgacggtggaactgtagaatcggcggtgtggttggagccagcagcacccgtagcggtggaggagccagcagcccccatggagttcattggctgcatctcgtcagtcagagttgaggacaacaatttatcatcccctgtggtgttggtcctaataaggacgatatgtagggtctcctgactgcgaggcaggttgatgagcagaggggtgagccgcccatggaggccggtgcggacgcacagcataaactcatcgtagcccacaatgcccgcaagcttctctctcaggagctgcactgacctcccggcgaacttgacatgattactggggaaggcagaggtccggagagtttcttgtgtctcgtctactggcttccgtttcggtatgctcaagataaaagcagcctggtcatttgttgctgctattgaggttattctgtaaccagtctcccatcgccgatggatgccttcacttggatataggaaatccaattctacaacctgttcagagtaacctgagttccttgacataactacaccccagcgatttccagcggtggccatagatgtcacatgaaaaccttctttccactttttattgatccacttgaagggggaatgactcactaaccttgtatgactgttgggagtaaggtgttcctttggacatcacaactaaagaacttccgttagctgatccagctattgctgttatgtagaaattcttctcccactgatccattatccagtccttatgcagaaaaactggtgagagctcatgaacttgagaaaggaaaccagttcctgcatccattatgagggcccaaagatttgctgaagacgccacacaactaatgtatagaccatcttcattacccttctctatatgctgctgaagcctgttgtcagccacgttatagtggtacctttgcttcatggcccgcctggcgttataaacagaaatccattgagctgctgggctacctaatctaactttcttcttgggttgctcatcttcttcatggtttcttccacgtttctgcccaaccttaagagcgccatcaattctgataggtcttgaggcaggtacctcaatcaaactatcaaagagagaaatcagtttggcgtaatttggctcttcatcaaatttcatatttgtgacaacttcaagaaactgtttgaatggaggtggacagaaacagcttagcatctccggagaagtagccattttcttcttgcaaacaaggaaactcttggtatcaccctggtaaccttgccaaggcaatcttcctcttattagaaatataagggtgtacgccaatgactctaaatcatccctcctactaccagtacggcctaaatgggcatggacactggcatatctaattgtacccctaaagatatcaggcctttggtcataatcaacatgttgccctgatgactccctccatttcgatgctaaaccaagatcaataagataaagcttcttctcgtcaggtgatccaggctggccaagcagaaagttctctggtttcacctcaccatgcacaaacctacaaacataaattaagaatggtgcatctaaggataacgtctgccctaatgaattccacacatcccaaaggctgggaccaagcatatccatgacaagaatatagtagtcgccctgacgacccttgtagtggacagctggtatgccatagcagccattaagattatggtaaacttgccactcatagggggcaccataattgcaccctttactgtttcgatgctcaagcttcaatgcaacctcatatgcatcaggaccagtacgattagttccaccagatacccttctaccaacataaacttgaccaaaaccacctttacctaatttcctgtcagttatatattctggagaattacctacttgaatcctctcagggacaggtagtgatgattcatcgtcagccgcaacaagcttctctgcgctttccccatccattcgcaaacccttattggcgacaacctcaggtgccttaacgttctttgcttcaccaacaactgcctgtccaacaacaggtttaggggaatctccacgaccctggccagcctccaaatcaacaacctcaaccgcctttcttctaccccttggtgctgctccccctcttctcccagcagcaccctttctgcccctgatagcagggggaggaacacgctttcctgctctctgtggagcaggcaacgctggtttcgcagcctgttccgctggcttctggtcgtcaggcttcctagacctcagacgtgcttggcgagtactgcttcgcagctctggcatcctctccccatgcaactcaggtcacctctccagccctctgggatccttccaatatcggcgggcggcggcggcggcggaggcggcgtcgcctcgggagccgcgcggagacgggaagctctctcctctctctcctcctcctagtcctcgctggtggtggtggtggtgttggcgagatagctcctcctcctcctcgtgcggacggtggtgggcttttgcctttgggctctagtcgcgtctcgcctccccttccttgaggcccggggggacgagttgttttgcgccgtgtgaaccga

SEQ ID NO: 76489 - DNA, 777 bp, Oryza sativa
  Clone ID: PAT_MRT4530_76479C.1
atgaagggttccgacctcccgcccggcggctccggccagaagccaccgggcggcccgccggggaacaggaagggcaagcgcggcgctgaggcgcctccggctacctcgtcgtcgacgccgacaaccgcgaggcggagtaagcgcctcgctggtgcgcctccggatcaccccgcggaagcagggccatcgtcgacgaacgcgaggcggagcagtcgcctcgctggtgcgcctcctgctacccccggggctgcggcggcagcgccgacctcgtcgtcgccgacagccgcaaggcggagcaatcgcctcgctggtgcgcctccggatccccccgcggctgtggcagcaccgccgacctcgtcgtcgccgacaaccgcgatgcggagcaatcgcctcgctggtgcgccttcggatccccccgcggctgcgacagcagggccgacctcgccatcgccgacaactgcgaggcggagcaatcgcctcgctggtgcgcctccggatcccccggcggctgcgacagcagggccgacctcgaaaaccgcgagacggagcaagcgcctcgctggtgaggctccggagacccccgtggaagcagggcagacctcgccgtcgtcgacaaccgcgaggcagagcaagcgcagcgctgcagaagccctagaagaagaagagctcgggatctttgaaaaggtccaggaagtagaagtatcaaaagaatttggatggtgggtcattttttgtagcagaggaagtagaaaattcagagaagagtttgatgtctaa

SEQ ID NO: 76490 - DNA, 468 bp, Oryza sativa
  Clone ID: PAT_MRT4530_7647C.1
cggcggcggcggaggcaggagcgcggcgagacggcagcggcggcggcgggggcgaaggaggcgaggcggtggcggcatcatgatgctccaacgcatcggcgcccgcatggcgacggcctatctcgcaatggtcgtggcggcgctcatcgaggcgaggtggctccgcgtggcccgcgacgccggcctggtcgaccggccggacgtggcaacggcctgcctcaccatggtcgtggcagcgctcgtcgaggcgaggcggctccgtgcggcccgcgatgccgccgctgcaccccaccgccgctcgtctccttcgccgcaccccgccgccactcgtctcctccgccgcaccccgccgccgctcgccgcctcatcccccgccgctcgcctccaccgccgccgccactccctgttgcccgcctgcctccgtgcgccctatctttggctcgtgctcctccacctctcatccccctc

SEQ ID NO: 76491 - DNA, 156 bp, Oryza sativa
  Clone ID: PAT_MRT4530_76480C.1
atgacgatgatgacggcggcccaacagcttcgagcgacgacgacggcggtagatctgacgcgactacggtggcgtcttcggcttgatgatgatcaaactaactggcacgctctgaacccgattgataggatctacactggagctaagaaaatatcc

SEQ ID NO: 76492 - DNA, 548 bp, Oryza sativa
  Clone ID: PAT_MRT4530_76481C.1
cccgggctgcaggaattcggcacgaggcgctacgaagacacagacgcgacggcgggggcggagcacggcgcgactagaggcgagggctacggcgacggcgacgacacagctctcttctccggccgccaccttctctccaatgagcacgcttcccttccccctctcccctcctctttcaaagttagggtagggtttccttctcttctctctttccggctttcccgtcgtcggacgcaccgtgccgtaggggccggccgtctggtcgtgctccggcgccaatgccgaccgcgtgttcagcttcggctctggcttggggcttgggcttgggtggcttcggcttcggcagcgctttgtccttgttcggctccggcggtggcattgccgggacacgggagggttcttggacgccagagaggagaggagaggaggagaaggaggaggagagggttcttggttcttggcccgtagccttcaaagtgtcggcaccctccacgtcggaatctgagtcatgtagttgcagttgcaggttccatgaaatcgactggtag

SEQ ID NO: 76493 - DNA, 181 bp, Oryza sativa
  unsure (1)..(181): unsure at all n locations
  Clone ID: PAT_MRT4530_76482C.1
cggctgcttggcntgccctaccgtcgccccatagtgtttcttcacnggtttgctgtgttctctcttgtgcgattgtgttccctagctccggcgngctttttggtgcctgagtctcttagtcaattggcatgagtttctctgtcgtggnnngtctcgagtaggatgttgtatttgatttggt

SEQ ID NO: 76494 - DNA, 1470 bp, Oryza sativa
  Clone ID: PAT_MRT4530_76483C.1
atgggaggcttaggtttcagggaccttcgcctttttaatcaagcgttgttgagcaggcaagcatggcgtcttattcagtatcatgacagtctgtgtgcaagaatcctgaaggctaaatattaccccaactgtgagcttattgatgcagtgtttccggcagatgtttccccaacttggaaagctgttgagcatggtttggagctgcttaagaaggggttaatatggaggattggagatgggaggaaagttcggatttggaaggatcagtggatacctcgccagtcgtccctcaaattgtcgccacagaatggaagatgcaggcttaggtgggttcatcagctgatcaatcaggatacaaactcttgggatgctgacctaattaaaaatgtttgctctccccttgatgtaaatgaaatcttaaagattaaattgccacatcgtggaatggaggacttcctggcttggcattttgagaagactggagtattcacagttcgcagtgcctaccatctagctttgcacaaccaactgaaggctaatgaactgggttcgtccagttcgtcgacaagtggagaacgcaaaatatgggcaagcctttggacagctcctgttccacagaaggtaaaaatttttgcttggagattagctagagaatgccttgccactatggagaaccgaaaaaagcgaaaactggaaattgactcaacttgccgtatttgtggccttggcggtgaggatggttttcatgctgtcatatcctgtactaaagccgcggcactgcgatcgctgatccgggaggtttgggagctccctgacgagcgttttctgattcggtcaggaccggactggctgctcattatcctggactcaataaacgctgaaagcagggcaaaatttcttttactcttatggagagcctggtttctcaggaatgatagtgtgcattgttctgggaaagcttcagtactagggagtttgttattcctccagagcctttgggagtccctgtttatgagtacaagccaagggaagagttcggaacctgctagtgctggatttgtcattcgtgaccacactggctcagtactgctcacttcctggagaattatcagccattgtggatcagcggaagaggcggaagcgactgcatgttgggaaggggtgaatctcgcagctgagtgggtgaaaaaaccgttaattcttgagacagactgtgccaacttggtatctatgcttacgagctctggatttgatcgagcgcagctctgccatgtcctccggagtattaagttattactccaagctttgcctgattttcgtgtgcagaggattagaagggaatgcaatagagtagcccatgatttagctaaatttgccatgcgtacgaaccattcagctgtttggcgtatgcaggctccttcttgtgtttttggggctctggcaaatgattctaatcacattgatgagtaa

SEQ ID NO: 76495 - DNA, 570 bp, Oryza sativa
  Clone ID: PAT_MRT4530_76484C.1
atggatgggccgccgagcctaaacgatggcagcgagttatcgaacgtcaccctcgaggatgtttccccgaggctcgagcacctcggccaccacctccaacatcctcccactccgatcaccccttcttgtaggccagaggatgaggtggtgagtcatggctaccctaacctcgagctccgcctcctgtcgctacaagcattgacccttaaggagagcttgagatatacctctgatcgcttggatctgacgtcattggcacatcggctcctaaaccaccctccttgccatctcgattcatcaccagcgtggagggagagccgtctctactcacaaagctctgtgcccctcatccgtggcaagctcctctgcactgcccggggcctggctggtctccaaccactggtccagcctcgacctcctcatggcctcagaccatgccgcctcctagtactggatcgacgcaggccatggccgtcttcgccgttgcccctctatagaggactgagggtttgtccggtattaaagttcagggtattacctatccccgaactggcaaaaccggattactag

SEQ ID NO: 76496 - DNA, 2496 bp, Oryza sativa
  Clone ID: PAT_MRT4530_76485C.1
atggcttcggtgaactcgcctgccgccgccgcgtgggttggcgaggagcgccggatgggagccgggggagtggtggtggtggacgctgtcgacggcgtggggcgagcggggccggcgggggaatgggcgagcgcgggctggcggccgacgacggcgcgggccgaagggagcaccggcgacgaacccatcatcatggccgggccagtgccgttcgtcgacgtcgtcgtcgacaatgccggcggcgccgtcgccaacaaggccgatccgggcgtcgtactgccgcaggaagaagagtacgagagcttcgtgtcgtcgctgccgagcaaccccaagctgcagctgctgcgctaccaggggaagtggctgctgcagtcgtgggtgcccgggatcatcgccatccagcgcggcggcttcgcgccgcgccgcggcggcggcgacgtcgtcctcgcgagcctccccaagtgcggcaccacgtggctcaaggccctcgcgttcgccaccatggcgcgccgcgcgcacccgcccgccggggatgagcagcacccgctcctccggctcaacccgcacgactgcgtcccgtcgatggagaagctgttcgccgctgggttggggagcaagatcatggacgcgctgccgtcgccgaggctcatggcgacgcacgtgcaccactcgcttctccccgcctccatcaccgataaccctcactgtaaaatcatctatatatgcagggatccaaaggacatgatagtttccctgtggcacttcgtgagaagaaggctaccggagatcccattcctcgaactgttcgagtctgcttgcgagggcagatgcttgagcagcccaatctgggaccatatcctcggctactggaatgcgagcaagacgaggccagagacggtgttgttcctgaggtacgaagagctgctacatgacccggctgatagcgtcaggaagctggctcggttcgtcgggcagccattctcgcccgaggaggaggaagccagcgacgtggaagacattgtgaggctctgcagtttcgagcagatgaagaacctggaggtgaacagggcagctggcctgtctcctgcgctccagcaaaacgcctacaccaatgggctgtggcggggctttgtagcggcggtggcgaggcggaggccggcagggctcggtagcggcatcgtcgcggtggaggctgcggtggggctcgacaacggcggcgtcgaggaggaggcggtggttcttgttggccacttcaaggacgacgccgacaatctcgagtgcgacaacgccgacgacgatgtgccattgccgttcaacgacgccatcgccgccggcgacacgccggcggtggatcccggcctgatggaagagtacgggtggctccctagcaaccccaagatgcacctgaattgctaccaaggtgcgtgggtgcagaggacgtgggtgcccgggatcatcgccatccagcgcggcggcgacatcgtcctcgcgacactggtggagaaaccatctttgcttggtcacccaaaattcacaatagtcccgggagacgggcagccgagcaggcggcaggcgaggccggcgaggcggcgggcggccggcgagacgagtctggcgaggcccgcgaggcggcgggcggccgggcgggcgaggccggcgaggcccgcgaggcggcgcgcggccgggcgggcgagtccggcgaggcccgcgaggcggcaggcggccgggcaggcgggcggtgagacccgcgtggcggcactccccaggcgggcggcgaggcggcgggtggtggtgctcccgggtttgtccaccattgcgagcctccccaagtgcggcaccacgtggctcaaggccctcgccttcgcctccatggcgcgccgcgcgcacccgccgccgcccgccgtcggcgacggcgacgcgcagctgctgcaccacccgctcctccggctcaacccgcacgactgcgtcccgttcatggagaagctgttcgccgccgggttggggagcaagatcatggacgcgctgccgtcgccgaggctcatggccacgcacatgcaccactcgcttctccccacctccatcagcgacaaccttgactgcgaaatcatatacatatgcagttcgccagaagaatactacctgagctccaattccatgacgtgtttgagctttgcttgtgagggtcgctgcttgagcggccctatttggaaccacatcgtcggttactggaacgcgagcaaggcgaggccggagacggtgttgttcttgaggtacgaagagatgctgcagtaccccatcgacaattttaggaagctggctcgattcgtcgggcaaccattctcgcccgacgaggaggaggctggtgtcgtgatggactcatggacatcaagaggtggagcaggagactggacgaaccacatgacaccagagatggctcgacgtttggacgctatcatgaatgagaagctccatggaacaggcatctctttctcgtga

SEQ ID NO: 76497 - DNA, 1946 bp, Oryza sativa
  Clone ID: PAT_MRT4530_76486C.1
gaggcataaaccatttgccaatctgatttattgatatttaggagttaggaccaacacaacacattggcctaaattaccagctttttatccaagataataactacaagagcacatatcagggcaaaagtactaaaatcaaagtctcttaacggctcacatctttgaacataattaagacaaatcgtaagctaggtgttcgtcccaaatcaggatcatgtccggcgaccaccaccgtcgacgataatgtccttgaaagcgccattgctggggatcatcggctgcacgtgctcctggtgaggcacgacgacgtccagcaagtacggccccggcgccgccatcatctcctcgacggcggcgcggacctcgcccttcctcgtcacgcgggccgccgggatgccgaagcctccggcgatcgccacgaagtccgggtacacctcgccgccgccgttcgccgccggattgccgaggtaggtgtgcgcccggttggcgtcgtagaacctgtcctcccactgcaccaccatgcccaggtgctggttgttcagcaccatcaccttcaccggcaggtcctcgacgcggaccatggcgagctcctggatgttcatcaggaggctgccgtcgccgtcgatgtcgaccacggtggcgcccgggttggccaccgcggcgccggcggcggccggcaggccgaagcccatggcgcccagcccggcggacgagagccactgcctgggcctcctgaaggtgtagtgctgcgtcgcccacatctggtgctgcccgacgcccgtggcgacgatggcttccccgttggtcacctcgtcgagcacctggatggcgtactgcggcgggatctcctcgccgaacgttctgtagcccagtgggaactcggccttcttcttctccagctccgaccgccacgcgctgaaatcgaggttcttgcgctgttgttgttccagcgtggcgttcatgccctgcagggcgagcttgacgtcggcgcagatggagacgtgcggctgcttgttcttcccgagctccgacgggtcgatgtcgacgtgcacgatcttggccctgctcgcgaacgcctcgactttgccggtgacgcggtcgtcgaagcgcacgccgagcgcgaggaggaggtcggcgttgtcgacggcgtagttggcgtacacagtgccatgcatcccgagcatccgcagcgagagcgggtcgtcgctggggaagttcccgatgcccatgagcgtggtcgtcaccgggatgcccgtcagttcgtcgagcagtttggcggacggcggcttcggcagccgggagatgtatcccggcaggcgcatcggcgcgtcccaggatggcacgggcatctgctgctggatgtccttggggatgtcgacgagcaccgggccggggcgaccggtggtggcgaggaagaaggcctcgttgatgacacgggggatgtcgtcgacgtcgaggactaggtagttgtgcttggtgatggagcgggtgagctcgacgatgggcgtctcccggacagccgcgaaggcctccccctgctcgtggcggagcaggtggttgcggatggccggcgaccgcgtcagcgcctggtggatctccatcgacgcgccgcccgggtacccgaacacgtcgcggacgccgcaccgccccagcgcctccacgaggatgtccgcgcccttccgccgctccgtcggcccccacctccgttgtagcggctcggcggcctgaggcggctgtggcggcggcggctgggagcgcgtggtggtcgtggtcgtggtcgtggcagggcgggtcgacaccgacaccgtcgagcaccccacgcgcgtcgcgtggtggcggaggcggaggcggtggacgggggcgcgaggcggccggatgccgcgcggttcgggcgcggccgtagcggcggcggcggcggcggcgagggaggcgggtgtcgtggccat

SEQ ID NO: 76498 - DNA, 234 bp, Oryza sativa
  Clone ID: PAT_MRT4530_76487C.1
atgtccacgcacagatcccgccacaccggccagctcgagcgtctggccagcgcgaccacaacgctctgcaaccgcgagccgccgcgcaccgtcgccgtcgttgcgcaggaggctacaggtagccaggcaggaggtagcaatgccgccttggccgatggcgatcacttgatcaggcggcaggcgctggagcctaaaggcggactgacgaactcgcggtcgccagtagaggactag

SEQ ID NO: 76499 - DNA, 940 bp, Oryza sativa
  Clone ID: PAT_MRT4530_76488C.1
atggcgcgccgtggccatgtgttcgccgtggtggcgttcgtcagctacgcgctgctcgccgccgcctcgacgacggtggaggcgttcgcggcgtcgggctggagcaagggcaccgccaccttctacggcggcagcgacgcctccggcaccatgggcggtgcgtgcgggtacggcaacctgtacacgcaagggtacgggacgcggacggcggcgctgagcacggcgctgttcgacgacggcgcgtcgtgcgggcagtgctacgcgctgacctgcgacgcgagggcggacccgcggtggtgccgcgcgggggcgtcggtgacggtgacggccaccaacttctgcccgcccaactacgcgctccccagcgacgacggcggctggtgcaacccgccgcggccgcacttcgacatggcgcagccggcgtgggagcggatcggcgtgtaccggggcggcatcgtgccggtggcgttccgccgcgtgccgtgccggaggcgcggcggcgtgcggttcacggtggccgggcgggactacttcgagctggtgctggtgacgaacgtggcggcggctgggtcggtgaggtcgatggaggtgaggggcagccgccgtggcgccgggtggatggccatgtcgcgcaactggggcgccaactggcagtcgctggcgtacctcgacgggcagggcctctcgttccgggtcaccgccaccgacggccagaccatcgtcttcgccggcgtcgtgccgccgtcgtggaggttcggccagacgttcgcgagcacccagcagttcatgtagctagtctcactctcgctcggtttccctttgtttggcacttggcagtggcgttgtttgctatactttgctctcctctgtgggggtttaattaacacccccccaccaatttgggctttgaatcgggtaaattgaccgtttttggggggtt

SEQ ID NO: 76500 - DNA, 1191 bp, Oryza sativa
  Clone ID: PAT_MRT4530_76489C.1
gcacccacgctcgtgccgaattcggcacgagcggatccccggactgcgagtgagactagacgggacaggcggacgcgagcgtcgtcctcttcgtttcgcttctcctcctcctcctccgcctccgctctcgcgagatctcctgatcgactcgctccgccatggctggagaagctgatggaaaagccccactgggatcaagatacccccctgctgctctcaacgagcgcatcctttcttccatgtctcaaaaacatgttgctgctcatccatggcacgatctggagataggtccaggagctccagcagttttcaactgtgtggttgaaattcctagaggcagcaaggttaagtatgagttggataaggcaactggtctaattaaggttgatcgtgttctttactcatctgttgtttacccacacaactatggtttcattccacgcacactttgtgaggacggtgaccccatggacgtcctcgtcctgatgcaggaacaagttgtccctggatgtttcctgcgagctcgtgctattgggctcatgcctatgattgatcagggtgagaaagatgacaagatcatagctgtttgtgctgatgaccctgaataccgccacttcagggacatcaaggaaatcccccctcaccgccttcaagagatccgccgcttctttgaagactacaagaagaatgagaacaaagaagttgctgtcaatgagtttctcccagcagaagatgccatcaacgcaatcaagtactcaatggacctctacggcgcctacatcattgagagcttgaggaagtgatctccagctgatcaactgcagaggctacatgattcactgaacagtttctcatcaatagtacgacatatgttaacatacatggtctaaaaccagtacttcggggatatataccttctactattcatgttaagacaagaagcagcaccttttctttccatgtatgccatgtcagatactcgggtcccaagcacctgacccctttgctgaactctctgctgcccaaaccgacagtttgctgaacggttacctaatagaaatcaaccatttacataaaggctcattggaatcctttttgacaaatcgtgtaattctgcctgtgtaagcatgatttactgcattctgattctgccttgtgttttcaaaaaaaaaaaaaaaaaaactcgagggg

SEQ ID NO: 76501 - DNA, 801 bp, Oryza sativa
  Clone ID: PAT_MRT4530_7648C.1
atgtcgctcaccaatgctccctcgtcgatggtgtcgatcgtgacgccggtgacggacagggacagcgggcggacggtggcgggcgtgccgccggtgctcgtcggggcgtccgtctcgtcggcgccggagctgcgggggcgggcgtacctggtgcaccacgtcttctacgaggacggcagcgccagcgccgacggtggcggcggcgtggccccggcgtccagggcatcgatcgcggcgctgagggaggtcgaggaggaggatgacgacggcgaggaggcgtccgactgcgcgatctgcctcgacgacggggaggagtccagggagacgtgcgggagcgggaggaggaaggagatgccgtgcgggcaccggttccacggcgagtgcgtggagcggtggctggggatccacggcagctgcccgctgtgccggcacgagatgccgccggcgacggcggcggaggcggaggaggaggaggtggtggtggcgatggtgcatggggagagggtggtgatgagggggaggcgcgtggtgctgagcgtgctggtcatgggccgggcccacgatgacggcgagggcccggagcaacgcggcacggatccgattcctcctcttccgcgtgtgctcatagatgatgtggattaattaataactcctctcaaatttaagaaagggtgatctggattaactaggattttgccgtgctatctatgtatatactcgcatgcaaatgtaagtatgcaatgctttccctttgtttaagtataaagtaaatagaaggaatgtcgaggtgcttctttcttt

SEQ ID NO: 76502 - DNA, 936 bp, Oryza sativa
  Clone ID: PAT_MRT4530_76490C.1
atggcggtgttctacaggtacagaagcagggtggacaccttctccgtgcccgtgccggagccttttgtctccgtcggggagctcaagcgcctcatcacggccaccgcgcgccacggccatggacgttcgcgcggccggggcccagggacagcgtcgcgctgtgcagcgacaagactggcgaggactcaagtgggaggccccgacgtcacaaggaggcctgcatcgggggagtctgacggcgtcatcccggcggagctctactgcaagatttgccggaacgtgatggccgacgcggtggtgacgagcaagtgctgcttcgacagcttctgcgacgggtgcatcagggaccacatcgcctccaagtccaagtgcgcgtgcggggcgcaggcgcgcgccgacgacctgatccccaacacgacgctccgcaccaccatcgccaacctgctcgccaccaccaccggcgcggcagcaagcgcctcaagtggaaccgacaagacgaggagctccgccggcagcaacgcggcacatccggcggcgccgctgagccccgcagcttcgcaggcgagccgcagcagcaacgtgagctcagagaaggccgagcacagcgacggcggcgcgtccacgtcgaagaagatcgccacgatctcaggtgccctcggcccaagaaaggcgcaggagacggtggctggcgaccactctgcagaatccggagctcgcgccgtccatggcggcgatcactacggcgtcccgttctgcccggcgaccggctacgtcgaccccttcttcttcggcggcatgccattcggagccgatccttacatgtactacggcggcgtgccttacggctgcggtggtgcacccaacggctactacggcggcgaggagctccgtgacaggaagagggcgcgcgtctctcccggaaccggatgttggtga

SEQ ID NO: 76503 - DNA, 738 bp, Oryza sativa
  Clone ID: PAT_MRT4530_76491C.1
atggcaggtctcaagctctcatcatgcgttctggtcgcattgctcttcgtgtcgagccacgttgtgcgccacggcgaggcgaggcggctgaccgcgggggtggcggcgccggcgagcaagggcggcgaggaggaggcgccgcagtacgcatccgctcgaggcggccagccggcggctgctgccggtggcggcgtgacggcggcgtcgaagatggcgagcaccgacggccgcccaacctctcccggccacagcccggggatcggcaacaaggccaccggcaacggcggcggccactcattcccaagagactggatggaggaggctgccctccaatgccacgtggccctctcccgaggggggtcgggcccaaggtgcccacctacccgtatttatggcgacccgagcggtcgcaccacgccgcatttaatgcggtgtgcagtgcactcaaccgggggcgcgttcgtgatttttgaggttctttcgagcgctggcgtgataagcgccgcgccgccgatgcggtgtaaggcacagcctcctcaggagtgtcgcgcgaccccaggcagggggctaggcccccgacatccccaccggatccacacgacgatcatagaggagacggggggtgacgaccgggtcatggcgaacttcttccccatggccctcaggggccaagcgcggggttggctcatgaacctgctgcccgcctcggtccactcctgggaggacccctgcagttga

SEQ ID NO: 76504 - DNA, 183 bp, Oryza sativa
  Clone ID: PAT_MRT4530_76492C.1
atggtgggaggcagccgtctgttcctcctcctcctcctacctttgctgctgctgctgctgggcgccggctgcagagatggccgccggtgcgccgccgcggccgcgcagactcagaggctgccgcagcaagaagaattaattactgtagtaagcatgcgcctaagtgtgttttcgcttagctaa

SEQ ID NO: 76505 - DNA, 630 bp, Oryza sativa
  Clone ID: PAT_MRT4530_76493C.1
atgaagcgtaataccctactcctgaagccaagcgcacgtcgtcttgatgatggggcttgtcagatcttcgcctgcgatcaagcgaagctgagcgtcttgagccgggccgggcaccgtagccagccggcgggaccaaagctagccgctacggaagagccagcacaggggatcctgggcttcgacggcaaccggagctcaactgcaggggtcctcccaggagtggaccgaggcgggcagcaggttcatgagccaaccccgcgcttggcccctgagggccatggggaagaagttcgccatgacccggtcgtcaccccccgtctcctctatgatcgtcgtgtggatctggagggactcggagttttgacgctgtcgtcgtacttctcggtgaggctaggcctaaactttgagggccatcggacattccgaagactcgccacaaagaactggccgctagccttacccggtggggatgtcgggggcctagccccctgcctggggtcgcgcgacactcctgaggaggctgtgccttacaccgcatcggcggcgcggcgcttatcacgccagcgctcgaaagaacctcaaaaatcacgaacgcgccccctacctggcgcgccagatgtcggagaatga

SEQ ID NO: 76506 - DNA, 474 bp, Oryza sativa
  Clone ID: PAT_MRT4530_76494C.1
ccggccgggaagtctgcggttaggggggcataaccccaaccggagaagacggtcgactgctacgagctacgtagacgaggtccggcgagccagggattcaaggacccaacgaataagaacattgtgaagtgtgatgagaagctgaagaccgtattattgggtaggtccaaagtgcaactgtctgaactcccaatgattgttaagctccattttccaaaattaccaaagtagtgacaacatagtattgtatattaaagttctgtgggaacatgatatgaaagacagaaccatatatgtattgttttgctgaaatttccattcactgcctgtatgtactggagcgatctatacatcgagcataccgattagattgcttgtcattttgataacatgtttgatttatcgataacttcgctcatgtttaactgaagagataagatgtgcaggaaaaaaaaaaaaaaaagaggtgtgacc

SEQ ID NO: 76507 - DNA, 825 bp, Oryza sativa
  unsure (1)..(825): unsure at all n locations
  Clone ID: PAT_MRT4530_76495C.1
cccacgcgtccgcttactttgggcaagaaacaaagatgagcgtactgtgttgtaatagatttttcacgaatgctgtcgcaggtcacagccatggcaaacaaacaaaaaaaatgaacagtatctcaacagtcacaaatcttgcacataaaagggacagtatgaggggcaatcgatattgaccccttcttgatttttgcaatatacgactatcactggaactctaagtaattgggttgcttccatccctgacgaagactatcgtaagcaacattgctagttgttgcttggcttatcagccacagcacaaaaaaaaagagagtaaatgattttctaattatagtatgttttccaaacttatttttataccatgtattatgtacaaatataaaagttttggggaagcactagtgaattttatgtacatgcagatggattttaacaataatattgtaagattagtgatatgtcactaatttttatttcttagaatgtgtgtacatgcatcaatcgtataattgtaaaaaagaaaaagttatcattaattgttttttgattgcttccatgagctaactgatgggttcttgttcccatgcctatgcgagcccatagtctaacgcttcagtagcaatgcgagctcacatatttgcagaacaaacaattacttgtaagcaggatccaaaaatatatggtaacaagctatttgcagaacaaacaattacttgtaagcaggatccaaaaatatatggtaacaagcaaaaaagcacctcttgtatacatggaaaatacttttccnaaaaaaaaaaaaaaaaaaaaaaaaaanaangn

SEQ ID NO: 76508 - DNA, 1436 bp, Oryza sativa
  Clone ID: PAT_MRT4530_76496C.1
tccccgggctgcaggaatcggcacgagggtctcgagttttgttttttttttgttgattatttttttttttttttttttgtggaaaccaaacaagcagaatcaatcccctactctactctctgaactgagtgatgaatgacttcaacattccagatctaccagcaacatgtagtaatacagggagtagtctccgttaattcctcttagaaaagtacaactagctagattaatgttctactcagtagttcctgaaaatctgaatgctggttggagtgcacctagctaagttacttgtgctgcttcttcctgcccgggatgcatctccccctgatcatcccttcctccccttccatctgctcatccgtcgttgatctctcctcgctgacaccaagcctcgaactcctctcctcgttgtacgagttggagcgtttgagcgagctggatggcagtggagtgcccctgactccgctctccacgatgctgccgctgaagtactccttctcctccaccgccaggtggccgaaccgccggctcagctcgccgccgccgccggcctcctcgtcgtcgtcgacctccgtgccggcgcgtgaggccgccgccagccggctcaccaggccgcagctccgcctcggctcggtccggcacttggccgagccgccgccggccgccgacccgcaggcgatgagctgcaggagcatcgagccggccctgttcgactcggtctcgtcactaccgcggccgccgcccggctgcagctgcggcgcggcagggggcttgtcggaggaggtcgacgacggcggcgaggtctcctccacgggcagctccaccgggcggctccggttggtgcgcgccgagacgggcttcgcagcgaggcgagcgccgccggctcgccggtggtagccgtaccccagctcgtcgtcctcgggatcctccgcggcgtcgtcccggtagctgtccacgtactgcttgtggctgggcggcaacgccagccgcttcgccggagacctatcggtgacacgaaggtgtgggaaccgatcggaagaacagccagggaagatttcggagcccttgagaacgtactccacgccgtccgacgggtagatcacatcgttctcagatagatcgttccacacatacccgttcttgtagttcctcttgcaagaccatgagaagagagcaggcatgccttttcccctaagcagcgtgagcctatccatcacatctttgaggcgaagtggctggtgaggatgctgagccagctccatgaagtgcgggtgctcgagctgcccgttcctgcagaggtagtagatgatctgcaccttcctcatcggcctcgccggcgccgacctcaccggcggcgcgtacgccggccggccccgctccgggctcgcctccgccctgcccaccaccttcctcccttccaccgtcgcctccat

SEQ ID NO: 76509 - DNA, 1247 bp, Oryza sativa
  Clone ID: PAT_MRT4530_76497C.1
atgaaggtcatcccgtatgtgttcgaacaactcttagagctgaaaataaactttcataaaagtgagattttttgctttggggaggccaaggaagtggaggatcaatatagacaactattttgttgtaattctagatctttcccctttaaatatcttggttttcctattcattatcgaaaactccggaatgttgattggaaaggagttaaagatagatttgagagaaaactcagcacatgaaagggcaaaaacatatcatacggtgggagattggtccttctaaactcagttatttcgagcctttctctgtttatgttatctttctttgaaattccactaggtgtgttttaaagattatatttctttatgtcactttcttttggagtaatgatgaccggaaaagaaaaatatagactaactaagtgggaaaacatatgtcgaccaaaacatcaaggtggactatgtgtccataacattgatatcaaaattagctacttattaagcaattggattttctagttgcttaatggtgaaggcgtatggcaagaccttttgcaaaataaagacttaaatggtaaatcattctctggtatgtccagcaagataggtatttcttagttctgggccggtttaatgaaagttaaagaccaatttcttagatttgggtcttttagataatgcaatgggacagatataagactttgggaagacacgtggttggaatcgcgtgctctcgaagttcaataccctactttatataatgtagctcgaaagaagcagtctaccgtggcagaggttatgggcacaatgtcgcaggatatttcttttaggagagccattgttggttaaaatctaatcgagtgaaacgatttgatccccaggctttctaatataactctgtcaaatgaaaaggactgttttgtatggtcgctacataagaatggccaattttcagtcaactctatgtataccacgatcatgaactctaatgttcggatccaaaagagaattctatgggacttcaaggttccactaaagatcaaggtctttatgtggttttttcacaagaaaataattctatcgaaagataacctgactaaaagaaaatttgtttagggagggggacaagcactattctttctgctatgcataaaagacaatccaacatcttttctttgagtgtcatgaggagcatgatactcggcgcaatgatgctacactcttggaatcggtagccaagggtctcc

SEQ ID NO: 76510 - DNA, 2880 bp, Oryza sativa
  Clone ID: PAT_MRT4530_76498C.1
atggagagaaccctactgaacccgccgccgtctctccgatcgccggcatgccgtaccaccaccgccaccaggatcaggccctcctcctccatggctactatgatcccaacgcctccgccgatgcggcacgcccgcctcgtcaaggcatcggccgcgggccggcgagagctccacgctcccccgatcgcgccgccaatattactcggcctccgttcacccgcggcggcgtcgtacgggcgtgcgagcggcggcggcgggaggaggaggggggcgcgggtggtggcgaggatggggttcgacatgttcacggacaaggcgatcaaggcgatcatgatggcgcaggaggaggcgcggcggctggggcaccacgccgccggcagcgagcagctcctcctcggcgtcatcggggagggcaccggcatcggcgccaaggtgctcaggggcgccgggctcagcctcaaggcggtgggcgccgaggtggagaagatggccgggaggggccccggcatggtccccatggagatcaagttcacccccgccgccaagaacgtcctccaggcctcccaagaagaagcgcaccagctagggcataactatgttggatctgaacacctcctacttgggttgctccgtgagcatggtgccgcgcttgttgtgctgaagaactttcaggctgatcccagcaacatccgcagtgaggttatccgaatgatcagtgacacctctgaagatcatcaacctgttagtgctgcagttgggggaggaagcagtacaactaagatacccacacttttagagtatggtactaatctgacaaaactagcagaggaggggaagctggatcctgttgtcggaaggcaaaaccaggttgaccgtgtagtgcagattctcggcaggcggaccaagaacaacccctgcctgattggagagcctggagtagggaaaacagcgatcgcggaagggctcgcgcagcgcattgctgcaggaaatgtgcctgaaacaatcgatgggaaaacgaatttacaatttgagcactatgagattgcgaagagttacctttctagattaccagaaaggaagcatggaaatcctttccaggttatcacccttgatatgggtctacttgttgctggtacaaaataccgtggtgagtttgaggagagattgaagaagctgatggacgaagtgaagcagaatggtgagataattctcttccttgatgaagttcacaccctggtgggtgctggagcagctgaaggggccatcgacgctgccaacatcctgaagccagcgctagcaagaggtgaactacagtgtattggagccactaccattgatgaatacagaaagcacattgagaaagacccagcactggagaggcgttttcagcctgtcaaggtccctgagccaactgttgatgagaccataggaattctcaaaggtctccgggagcgatatgagatccatcataaggtccagtatactgatgagtcgttgatcgcagctgctcggctctcataccagtacatcagtgatcgtttcctcccggataaagcaattgacttggttgatgaagcaggttctcttgtcaggctgcgaaatgcccagctacctgatgaagctaaagaactcgagaagaagctcaagaagatcatggcagagaagagcgaagccatccgaagccaagacttcgagaaggcgggagcgcttcgcggcgaggaggtggagctcaagtcggagatcatgtcgctggtcgacaagagcaaggagatgagcaaggcggcggtggactccggcgagtcgccggggccgacggtgacggaggcggacgtccagcacatcgtctccagctggaccggcgtccccgtggagaaggtcaccgtcgacgagtcgagccgtctcctcgccatggagtcgtcgctgcaccggcgcatcgtcggccaggacgaggccgtgacggcgatcagccgcgccatccgccgcgcccgcgtcgggctccgcgacccgcgccgcccgatcgcgagcttcatcttcgccgggccgacgggggtcggcaagtcggagctcgccaaggcgctggcggcgtactactacggctcgccggaggccatggtgcggctcgacatgagcgagttcatggagaagcacacggtggcgaagctggtgggctcgccgccggggtacgtcggctacgccgagggcggccagctgacggaggcgatccggcggcgcccctacgccgtcgtgctgttcgacaaggtcgagaaggcgcaccccgacgtgttcaacatgatgctccagatcctcgacgatggccggctcacggacagcaaggggaggacggtggatttcaagaactcgctcatcatcatgacatccaacgtcggcagcggcgtcatcgagaagggcgggaggcagctcgggttcgccggcgatggcagcggcgacggcgggtacggggtgatcaagaacatggtggaggaggagatgaagcgctacttcaggccggagttcctgaaccggctggacgagatgatcgtgttccggcagctgacgaagctggaggtgaaggagatcgccgggatcatgctcgccgaggtcaccgggcggatcggcgggaaggggatcgggctgcaggtgacggagaggttcaaggagctcgtcgtcgagcaaggcttcgacccgagctacggcgcgcggccgctgcgccgggccatcatgcggctgctggaggacacgctcacggacaagatgctcgccggggagatctgcgccggcgactcggtgatcgtcgacgccgacggtgacgggaacgtcgtcgtggtcggccggcgcagcgccggcttgccggacctgaaatcgccggcgtttactgtctag

SEQ ID NO: 76511 - DNA, 449 bp, Oryza sativa
  Clone ID: PAT_MRT4530_76499C.1
gcggccggtgccgacacgcgggaacggcagcgagcggcggctggaggcacggcggcgagcggcggagcatggggtcacgcggggagcacgagagagggcgcgaggagctcgggtaaatgggggaaacgagcgaggggaatgcggggaggagttttatagcgctcaggggcgacggggaggccgggcgagatggatttggggcggcaaccgctggcgacgtgggcgacattgtgggcgaagtggagctcgatcctggcgcgatttttgggggaaacgtcgggagagtgtagaggccgatttcactcggtttgggcgcgagggtgtgagcgggagaggcctgaatcgggggcgacgtgggcggcaacggccggccatggtggcttatgctctggagaccgaaggtagaggaagggcctgacaggtggggtcgccgggcccacctgtcgggg

SEQ ID NO: 76512 - DNA, 1296 bp, Oryza sativa
  Clone ID: PAT_MRT4530_7649C.1
atggcctccccaatccactcgccgccgccggagccggccaccgatggcgatgatgcccaatcccaccctccccctcccaccccgcacccggcaaccgatccccctcccatctcaccccaaaatccaacccctcctcctcctccccttcctgcctccgccgccgcccctactactccgtcaccaaatcactccggcgatccctctcgccccattccttcgcaggccccggcaccgccccctcctcccaccgccgatccgtctcctcccctcccccacgacaaccgaactccacagccgcgggcggcgccccctcccgctcccgctcccgatcaaccagcaccgccttctccaccaccatcactgccgccttctcccccagcaccggggtccccggaatccatgctggagcgggaggcgtcggaagcggatggagaaccggagaacatgacgcttgcccttgcgctggcggagacggagacggagaaggcgatgccgccgacgccgccgaaggccgcggaagcggcggagtccccaaccggatcgccgcagaaggagtctgccctgaccattgccaagctcctctccggcgaggaccacgcggggacggagacgaagccggtgcccgagaaggccgcaccagcagcaaccaccaccaccgccgccgtcgcatcagtcggcggcggcggcggtggtggaggaggaggcgtggggtctaagagatggcttcttggcggcgtcccagagaaggtgcggcggtcggagctcaggagggccgagctagggttcagggttttggccgccgtcttctgcttggtctcgctctccgtcatggccgccgataccacgccgggctggtccggtgactccttccgccgctacaacgagtacaggttgcgctctcaacgccgtaccatgatgcttgccaaatccccctctggcggccagcttctgttattgatggaagttgtgtgcttctgcaatgcagatattggcttacctcctgttgtcagcatcttcagcagcactttctcgcaatgatgtttgggtgtctcggtttggagtggatcaatttgccaaacttatcaatgcttcagcctccatggcattcttagctttcgttgctcttggttttagctccataatctcagcgtatcatgtcttcagctcggttttttaaacccattgtacattacttgttgtaagtactatgtgctagtctgctagatgtatcttggtcaagccaaccttgattgttgcttcttgtttgtagaattgtggccacgatattggactccg

SEQ ID NO: 76513 - DNA, 701 bp, Oryza sativa
  Clone ID: PAT_MRT4530_764C.1
ccttagaaatcatcacgtctcaacctaatttttcctgattttcatgctatatcattaccgaatgttttgaagtttcttatattatccaactaaaaaaaaaatactagatagctagtaattgctgactaattcagttcggcaatcttatggatatttgtctataaattagatgaacctacaaaacgataaattctatacctttttcatcatacatttactaggatatggttgctgtttgtattttaatttttttctgtatatttgttatttgatctagtgcccttgcactttgtgtagtatcttttcaacagggatttagaattgtgccctccatttagcaagttaaagactttggtgctcaaatcatggtttgtgcctcctgacctcagtgcattaacttggtttctccaacacgcaccacttcttgaaaagcttacgcttaatctttcaaaggtacccaacaatttaggggtaatggatgacagttacaatccatgggaacaatcatttgcagctagtcatcttcaaaaagttgaaatcgagtgcaaaaatgttgatggaattgttctaaaaattttgaagatcttgaatgccaatggcgtaccactagagaatattagtattcaatgttctgactgtgagttatctataaatacccatgcttcctattactcagttacaaagccagttagcactatcca

SEQ ID NO: 76514 - DNA, 882 bp, Oryza sativa
  Clone ID: PAT_MRT4530_76500C.1
atgagacggcacgataacgccctcaggaggggaagtgatgctcaaaacgccatcgttgcaggcccgaccaaggctgggctaggttttcacctgccgtccattgcctgcctatccatagctgacgcaccattgctcccaccatctaaacctctgccagcgcatgggtaccactgcatcggcgtcccctgctggccagcttctgcatgtcaccaccggctgtgcctgatcatgctgcaccggcatgcgccttgtcggcctccgcctccgccggcctcgcctcccactgggccggccgcatctcctcgtgtcgcgctggcatccattgccggtggccgagcatccctgtgcctctttgcgccgcgaccacgaaccagccacgcctcaccggcctccgtaccagctgcgcctcctcgtgcctcaccggtctcctcttccgctagtcgcgcctccgcacgcgcactatgccgccctccgtcattgtcgacaccacatccgcacaccgcgtcgtcactggctcacccagccaccggtctccctgccagcgcctttggtgtgccgactcctgccggatccagcacgggggcgccgaatccaacaacgcgtgcaagatccaggcgccccgccaccggatccggggtctccgccaccgccaccgtcgcaccatcaccatccccgctgccatcaaggctcccgccgccgccgagactcggccggccccgtcccgcccgccgagactctatcgttgtcgtcgcctttcccgccaccgttgctaacgccgtccctactgccagccgccacccctctagatctggccgaagcgacacggatctggcggtctccactactgccaccctaggcaactccctggctgcccgagtgtga

SEQ ID NO: 76515 - DNA, 436 bp, Oryza sativa
  Clone ID: PAT_MRT4530_76501C.1
gcacgaggcaagcttagaacagaatggaggagacaggcgcggccgaggcgaatgtgatggagtcgccaccatccccgacgacggccatggccaactctggcagctgcgtggtggacatggacaggatggtcagccatgataacggcagcgagccgtcttctggggagaaatcgatggtgcgaccacagtgggagagccggcactcgatttatcgggtgccagagtacatgaaggacatgaccaaccaggacgcgtatcggccgcggatggtgtcgctggggcccttccaccacgacgattccagcctgctgcacatggaggtgcacaagcaacgcgcggtggcgcaagtggtcagccggagtgggaagccacgggaggagttcaccgctgccgtggaggagatcgccgagcagctgcgagccgcttacgaggacct

SEQ ID NO: 76516 - DNA, 206 bp, Oryza sativa
  Clone ID: PAT_MRT4530_76502C.1
cggtccgacggctcgagccgggacggctcggcgcgcggtggagaaaggtagcggcgcatcactggaaacccatcggcggcggcggcgaggcacggcggccacccgacgcgcggcgcgacggcgcgtggcggcaccgagatcgcgagaacggcggcagcgcaatgggtgtcgattcaagcacagaagacttcgatttaaccatctag

SEQ ID NO: 76517 - DNA, 112 bp, Oryza sativa
  Clone ID: PAT_MRT4530_76503C.1
aaaacagggaatcacacatatcctctacaaatcttccttacaaacaaccactccaatttcaaaagctctatacaaaatctcaaatcaccaatgtctcatttctataaacccc

SEQ ID NO: 76518 - DNA, 1005 bp, Oryza sativa
  Clone ID: PAT_MRT4530_76504C.1
atggagaagaaccctttacaagcctcaaaccctagaagtaatcttggttgcatatgtgtaaatcttggtagtgtcatcttcctgcaagttcttggctttgttgcatccaacatcttgctgattctaatgggagatcccagccatgatcgtgatgcggccggaagttccatgattcgggaaatacttggtatcctcttacccaagcaagcattacatttaaaagcaactctgagggcttctggctcaaaattttccacagcaagtctttacttcaatgatttttgtggaatatatatttttctgcaagaattgaagttgagtgatgataactttattgcttcaatggctgtgccaatggcagaaaaaattgagaaatattgggagacatgcaacaagttattatctattgcaaccattcttgatcctcgctacaaattgaagtctattgagtacttctatggattgctttatccttctgaaaaagatgtgaaatttgaacatatgaggagatgctttagtgaattatttgatgagtattcaaagcaagcaacaatgcaatcctcatcagttgttgacacttcaagaaatttccaggagtgcagttcacaatcacatgagtcctcgttgagcttattttctaccatagtaggattagaaaagtatatccaagatagcaactcaagccagcaaacaacatcagagctcaatgtctatcttgatgatcctccacatcctggaatcagtgatacttcttttgacatcttggcttggtggaagttgtatggttccaaatatccaattatttctcgaatggctcgtgatatcttaagtgttcctatgtcgacagtagcatctgaatcatgcttcagtttagctaatcaagcacttgatgagaagaggtgcagtctactgcctgaaacacttgaagatgagtttttggaacagatgatagcagaagatgtgtcatttactcaagaacaagcagttgtagatcaacttgaatga

SEQ ID NO: 76519 - DNA, 111 bp, Oryza sativa
  Clone ID: PAT_MRT4530_76505C.1
atggcttctactggggcactccttgcacttgttgctgtggtgatcctccttgctgatactgaatatgaaggaggctagccaggtgatatctactgcaccgtctgctactga

SEQ ID NO: 76520 - DNA, 740 bp, Oryza sativa
  unsure (1)..(740): unsure at all n locations
  Clone ID: PAT_MRT4530_76506C.1
acaaaaanantggatnnnntcaccngcangtgntggcaggcnctggctcntaagaaacctaagntggaatcccnccccctgggcntggccaagggaaaattccgggccacggagggaaaatttcncccnccaattctttaaatcctttggattaccaggatgcagntggccagnttccaaagaggtgaaattcttattaacccgaggaaaacggccaccttccctttgttccacnccatttttgaggaaaaccattccaaaacgncttcaaccaggcggttnccggattggttaatgatnttaacttccaaagaggccccggttgacncncgngaggattttcnaaagntttggnttccaananccaaaaccnaaaattgngnaaanaggcacccaggttggttnccaaaaccgggancgganagganctttttcggccncgnaccgggggaaancnaaggccttggnncctntagaatntnaatttaaacccccaaanccaagaacccaaacctttaattggnnccaaggnttttggattanaaaaaaggacaaaagggggaccaancnaaaanaaggnaaggcaaangggganattgggttgggccttttgaaaccaatttttggcccgaatttttcccnaanagggaaanccccnaaaaatttcccctttaaaaaaccctttcctttaattggggggtttaaaagggccccccaaacccaaattttngggnccnagg

SEQ ID NO: 76521 - DNA, 477 bp, Oryza sativa
  Clone ID: PAT_MRT4530_76507C.1
ggctccccaatgggcaagatgttttcaaaaaaacattgaagttcatcattttttcaccatatgtatatatgcttcctgccaaatgaaaggggggggtttttagcacccccacagggtcatacccacagctggctttagtggcctagggaccagttctcggggccctaggataacctacccgggggcagaccccacctggcccattgggggtgcccccgttgcaaaaccccgggaggctcgccgccgggcgctccaagtcccctttccggggggcggggaacacctgggccctggggggcccaacatggggggggccgggccccctgtgggtgcccccacccctgggggtgggcgccgggcccctgccccattttgtcgtgcccggggggagctgccggctgctttcctgccggggttgttcgtccacggggcccccgggggccccggggcccccccctggcgcttttcccccgcccg

SEQ ID NO: 76522 - DNA, 186 bp, Oryza sativa
  Clone ID: PAT_MRT4530_76508C.1
tggatctgcgcgcgtggaggccggatctgcgccgccgccgccatctgcacctgtcgccggagcccgtgcctgccaccacaatgccatctgccgcgcccgctacctcccactcgagcacgccatcaactccgcgcaagggagagcggaggggggcaccgccgtcgaccacacctgttgttgcgggag

SEQ ID NO: 76523 - DNA, 748 bp, Oryza sativa
  Clone ID: PAT_MRT4530_76509C.1
ccggccggggcaaatcacaagcaacatcaccacagatcgatcgagacagctactgacatcaacgtgaaaaagggaagaagaactaaccatgtccatgcaggagatgctccgcattggagacgacgacggccggagcgatgctctggaacgcgagctcaaggagaagctgaggttgcgcggcgatgcctcaccggcgaaatgcaccaggcaggagcagcggtggcggtctgatcatggcatcgtcgacgcccgcgagaggttcgtgcaggcgtacggccgcctcagggacgatctcgtcggcgacgactcgtgcgagctcaccgacgaagccaggcgctggcttgctcagatgatcgactacaatgtacctggaggaaagttgaaccgagggctgtcagtgatagacagttacctgctgttgaaacaaggaagtgaggttactgaagatgacttcttccttgcttgtgtgcttggttggtgtgtagaatggtttcaagcatgtgcactactacttgatgacatcatggacgattcacataccaggagagatcagatttgctggtaccggcgacctgaggttggcctcaggggtataaacgatggtatcatactaaaatgtcacatcttgataatgataaaaaagtatttcagagaaaagccttactttcttgatatcttagaaatatggagcgagatagctctgcagacttctctggggcagatgcttgatctttatagcacacatact

SEQ ID NO: 76524 - DNA, 288 bp, Oryza sativa
  Clone ID: PAT_MRT4530_7650C.1
atgtccgcaaactccgtccccgtctaccatctagacgtcgacaaaaccatgtgctctttcgtccctgtcgaaggtgcaatgtctctcgctggcaaccgcgacgggagtgagctcagggatgatggtcaagccttgagacgacggccgacgagctcggagacgaagacaaagacggacgacgcggacaagcagacggaatggcacgaaatgaagaatttcgcgtgtctggtgaagggcgttttggtgtcactgtcagtgtcaccagagccaattggaatggacccctag

SEQ ID NO: 76525 - DNA, 732 bp, Oryza sativa
  Clone ID: PAT_MRT4530_76510C.1
ctacaagctcagagcattcagaagagaaactctgctctggatcaatctcctgaacaaagtctcaactccgctctcgagatcactgatgtccaactccagcgcctgcaattgctcctcctggcatgcaatccttgccttctggaaagccttggatacaagagaccacctgctagaattcggcatcacaatctgcttcaacaagagatgcaacgaggactcaaccattgagattgcaacctctctagcttcagctgacagcttgagcaccctgcatccctcctgatcatctgaagcagacttcttgctaatcttcttcgactgcttttgtgccttcttgctcagacggatgaaggactggaccttggcttgaacagcggcatcatcggctctcttgatagccaactgcatgtcctggatgcttgccttgagttcacagatactctcttgcatggcattgcagaggtcaagcaagacaagagagcgctcaagctcttgctctgctgctttcctctgctgtggctgccaaaggagaacttggctgctgggaaagcacatgatctcctcaatgttcctgtactctcctccaatcctgctgaaaccatcaagcattgtttcgacggttgcagagggtgaagagatggttgctctcaagctctgaagctgttcttcaacattggcttcattggagcaggggctggaaggcacacttgcagatctaagcatggatgccat

SEQ ID NO: 76526 - DNA, 1998 bp, Oryza sativa
  Clone ID: PAT_MRT4530_76511C.1
aaacagacagacagattgcgtagcttaaactccacggctccatcttcccttgaaacaaccaaaacagctaagccaactgaaaattttcatgtccgattgaattatatccactgcttcattcatatttggagcgaaggtgcctagcactgttttgccaaaatgattgttggggctggttactttgaggattcccacgatcaaagtctcatggcaggatctttgatccatgactcaaatcaagctcctgcaagcagtgaaaacacaagcattgatttgcagaaattcaaagtgcacccgtactcaacagaagctctctcgaatacggccaatctagctgaagctgcaagagcaattaaccaccttcaacatcaactagaaattgatttggagcaagaggttcccccagtagaaactgcaaactgggatccagctatctgcactataccagatcatatcatcaaccatcagtttagcgaagatccacaaaacatattggtggagcaacagatccagcagtatgattctgcactttatccaaatggtgtttacacacctgcaccagatctccttaatcttatgcagtgcacaatggctccagcattcccggcaacgacatccgtattcggtgacacaacactgaatggtactaactatttggatcttaacggtgaacttacaggagtagcagcggttccagacagtgggagtgggttgatgtttgctagtgattcagctctccagttagggtaccatggtactcaatctcatctaataaaggatatctgccactcgttgccccaaaattatgggttgtttcccagtgaggacgaacgagatgtgattattggtgttggaagtggagatctttttcaggagatagatgacaggcagtttgatagtgtacttgaatgcaggagagggaagggtgagttcggaaagggcaagggaaaagctaattttgcaactgagagagagaggcgggagcagctaaatgtgaagttcaggaccctaagaatgctcttcccaaatcctaccaagttcatcagtatgatgttctttactgataacagtgccatgttattaagggttgttttggttttaagccaaattatgccctaccaaattgttggcattttgaaaagttatttggcaaagtttggcttgccaccaaagttggtcaagttttggcactaccaatatattgacatggtaacaaatcaaaacacccctaattgtgttcatcctaaccaaaatgacagggcctcaatagtaggtgatgccattgagtatatagatgagctcaatcgaacagtgaaggagctgaagatcctggtggaacagaagaggcatggaaataacaggagaaaggtgttaaagttggatcaagaggcagccgctgatggcgagagctcatcgatgaggccagtgagggatgatcaagacaatcagctccatggagccataaggagctcatgggttcagaggaggtcaaaggaatgccacgttgatgtccgcatagtggacgatgaagtaaacatcaagctcactgaaaagaagaaggccaactctctgcttcatgcagcaaaggttctagatgagttccagctcgagcttatccatgtagtgggtgggattataggtgatcaccatatattcatgttcaacactaaggtatcagaaggttcggcggtttatgcatgtgcagtggcaaagaagctccttcaagcagtggacgtgcaacaccaggccctcgacatattcaactaatctttagcaacagtactgattatttgaacaatgtcctagattttcagttaccttgctgagcaaacttatttgaccaggattggagagaattttatctttagcactagctacctagcaaaactttttaacaatttggccatgtaacggcttgctgctgtccggttgtacaccttaactagcctgactaggaaagctttgatgcttgtcttgtgtatttgatcatgttatctc

SEQ ID NO: 76527 - DNA, 936 bp, Oryza sativa
  unsure (1)..(936): unsure at all n locations
  Clone ID: PAT_MRT4530_76512C.1
ctatgacgtcgcatgcacgcgtacgtagcttggatctctanagcggcggggcgacgggatcccaccccgcccgccgcatctcgccgagcatcgacttggcgaaggagcggaccgacctggcggcgtggcgcagcgcggcgaggaagtgggtggcgttgaggccggagaggtggaggccgtcgagcgcggcgagggtgcgtcccgggtgggcgcgctcctccagcgcgcgcgcggcgcggagatcgtcggcgagcgcggcgcgggcgcgctccgcctcggcgtcccgcgcgcgcagctcccgcccgagcttccccgccgtgatctcgtaggtccggaggaggtggcgctgctcgtcggcgtgcgcggcgagcgccgcgggcccggccgccgcgctcttggccgcggcggcggggtccctggcgaacctccgcttgtggtcggagagtttggtgagctcggcgaccatcgcggcgtccgctgactggatcgcctcggagtcgtacgggtgctgcgcctgctgcagctgcgcgtacgccgccttcaccgccgacacgccggcgaagaggctcgccacgagcgcgtgcgccgcggcggcgtccaccgccggggacgcggccggctgcgccgcgctcctgaacagcacgtcgagcttcgccgcggacagcttgagcttgctcagcgagttgatggagctgtccatggacgactcgtcgtactcgccgccgccggcgacagagcccgacgtggagcgcttccggcggagcagcctcaccagccgccgcgccaggccgccgccggccttctgctgcggcagctcggccgccattagcgtctccattggtagctcaagctctcactctcactgagctcactcagagcaagcctcctccggctcagcttcttgctgctcgctttcctcgtgccgaattcctgcag

SEQ ID NO: 76528 - DNA, 1289 bp, Oryza sativa
  Clone ID: PAT_MRT4530_76513C.1
cccacgcttccgtccacgcgtccgcacaactcttcccaatgtcgcctcccctcgagccgcacgactacatcggcctctccgctgcggcggcgtccccgacgccgagctcgtcgtcctgctcgtcctcgccgaacccaggcggcgaggcccgcggcccacgcctcacgctccgcctcggcctcccggggtcggagtcccccgagcgggaggtcgtcgccgcggggctcaccctcgggcctctgcccccgaccaccaccaaggcggcctccaagcgcgccttccccgactcctccccgcggcacggcgccagctccggctccgtcgccgccgccgcagcttgccaggacaaggcggcccccgccgccgctccgccggctgcaaaggcgcaggtggtgggatggccgcccgtgcggaactaccgaaagaacacgctggcggcgagcgcctccaagggcaaaggggaggacaagggcacggctgaagggggccctctctatgtcaaggtgagcatggatggagccccctacctcaggaaggtcgacctcaagatgtattctagctatgaggacctctccatggctctcgagaagatgttcagctgcttcatcactggtcaaagcggtttgcgtaaatcatcaaacagagataggcttactaatggttcaaaggctgatgccctccaagaccaagagtatgtccttacatatgaagataaggatgctgactggatgcttgttggtgatcttccttgggatttgtttaccactatctgccggaaattgaaaatcatgagaggatctgatgctgctggaatagctccaagatcaatagagcagtcagggcagagcagataagattaaccttcgtccggacgagaaaggcaactgatctagcagctttggaattgttcatcgcaagtatcccaaatatctcaatgtctgtgtagtttaatgtgttcatcagacctgtgcattgtatgtctgtaatttgttcctttcagatcgtgcaattgtgcgttgccccctcttttctttgcattgaaggtcaagtcgggctcttgtccgcttatttctctaaatcctagtcagttcaaaaattatccatcatgacacatgaactgatggtggataatatggcaagaagcttttctaatcattcaagcttgaacctcttgtgtgttctactactatattacatgaaagaaaatgtctaatgtctatatgttaatctccaaaaaaaaaaaaaaaaaaaaaaaaaaaaagggggggcctcgtgccgaattcctgcag

SEQ ID NO: 76529 - DNA, 153 bp, Oryza sativa
  Clone ID: PAT_MRT4530_76514C.1
atgatcggttgccgcgagtggctccaaaaccggcacgagtccacgcccttctcgctgatcaagaatccaatggggggccgtgcgggttgcggaaccaagatgacggtgatcttgcttgcttggaccatggacactcacactaggaccatgacg

SEQ ID NO: 76530 - DNA, 512 bp, Oryza sativa
  Clone ID: PAT_MRT4530_76515C.1
atggtccatctcagcgtcatcccggccacggtgcgccgaggggcgcggtggccgtgcgaggatgcagaggacgccatcccggcggtggtggtgggcaagatgatggaggccggctgcaacggcgccaaggccacggggccagtggctgtggcggtggggatgaggtggaggagagtggtggcggcagtggcggtggggagcggcagtgatggcggtggggtcgaggcaaaggtcggggagcggtggcggctgtggcggtggggagcggcagcaatgggaagcggcggcggtggggatgaggtggaggggagcggcggcggctatgggtgtggggagcggcggtggggagcggaggtggggagcggcgatggctatgatggttgggagcggcggcggtggggatgtggcgaaggggagcggcagcagctgtgggtgtggagagcggcggcggtcggggagcagtggcgactgtggctgtggggagcgacggcggtggggacaaggcgaagggg

SEQ ID NO: 76531 - DNA, 235 bp, Oryza sativa
  Clone ID: PAT_MRT4530_76516C.1
atgcgtacgctgggcaagacatcgactgctgatggcttacgcgaggaggagctcgccgacggcggccacccatggaggacctcggcggccggctgcgctcgacggcagccagatacgcgtgtgtacgtccttgctggccggcggagcgctgggaggacctcgtcggccgatgggacgagcgagctgctccccgcccgatggacgaacgacagcgcttgcacggaccaattgacgg

SEQ ID NO: 76532 - DNA, 315 bp, Oryza sativa
  Clone ID: PAT_MRT4530_76517C.1
atgcggtgggagatcgatcgcgcaatcaatcgtatccccttactccgcttccttcctccgcaatggcaactgcgcctccgcctctcctccacctccggcttcccccaaagtccattcgatcctctcaccctcgcctcgcctcgcctcggcgaatcggattccgagcactcacaaccggatcggagtgagttccatggcctgaatcactcctccacctccggcttcccccaaaatccattcgattctctcaacctcgcctcggcgaatcggattccgagcactcacaaccggatcggagcgagttccatggcctga

SEQ ID NO: 76533 - DNA, 492 bp, Oryza sativa
  Clone ID: PAT_MRT4530_76518C.1
gattctttctttttacttgttgatcattgactttttagtatgtttaatttattgttattatgtaatgtaatggaggttgtttttttttttcttttgggacaaaaaaagaaaataaagggtttaggcggaggggggcccaaaagaaaggatgtcttaaggggtttttgaacacaaatgaaagaactatttttttttttttgcaaaaaaaaggcagaggggggccccctacaacacccgaagttgaggtggtttccctcataaaagtagcggtgtttaccgccggcgccgagaagggggctaccgcaataaaaagaagaaaaacttggcagggagggcccaacactgaaatttctgcgccctctgggaaagttacctatctatgtattggagctaccattttaaggggcctgtggaataaacaggaggtacgacaggaaatactatctcacttcgagtttttgtaaagatgaagcggcgcgttttttttttttt

SEQ ID NO: 76534 - DNA, 1963 bp, Oryza sativa
  Clone ID: PAT_MRT4530_76519C.1
gaagtccattgtgatactttgtgtaaaaaaccctaaaacccaagaccgaatcaagggtctcttgtttttaactacttctgtgattttcctcagtttccttgtatcaacagatggcttagaaccagatccatgtaaggctgtgtcaattaccaattggcctgctccacgtgtactaacggaagctcgtagttttcatcaacttgcttttctttttatcagcgtttcattcggaatttcagtatcatcgtgatcccttttactgattgcatgaggtgaagtgaaatgaatgtactaactaaagacatgcgcatgaagcatttgaggagattaacaccataattgcttcggctggttatctagccttaccggattttgacaagtagtttgaattagattgtgatgcttatagaatagggattggtgctgttcttagtcaaggttctcaccctgtggctttcttcaatgaaaatttaacaggtgcacaacttcgatattctacttatgaaactgaactctatgcggtagtttgagccttgagattagatgcattacttgttgcatcaagagtttattctctacggtgatcatgaagcattataaaatattcaaagtcaaccaacattcagtcaaaaacatgcgcgatgggccaactttcttgaagaatacagttttgatttaaagtacaagcctgaagtacgaaacaaagaggctggtgcatttgagtcgtagaacacattgcctaagcatgactaggaaaaagtcattgaatttaaattccttctagagctctatcctaatgatgcttacttcggcgtaatttatcactctatgcaagccaagaggtccgctcaatatactgtccatgatggtattctctttcgtgaatctcagctctatattcttgattgttttgttcgggaaccgactatcaaggatattcataattaaggacaacatggtagggataaatctattgaattattgctacgacaatatttttggcttcatgttcgcaaatatatcgaaaggtttgttcaacaatcttatatttgtaaggtttcaaagggagcatctacaaatgcaggcttgtatatgccactgctaatacctgatggactatgcacatatctaagtatgtattttgtgttaggtcttctgcgtacacaacaccatgtagactctatttttaccgtagttgatcgtttcagcaagaaggcaattttatagcttatgggaagacatcagatgcaagtcaatttctcatttgttcttttgcgaggtcgtgtgcctccatggtattcaacgagacactaagttcatgtcataattttgacgatctttgtggaggcaaatgggcacaagtttaaatttcaaatatggcttatcatgcccaaacgaatggtaagatagatatgctatgggcttatcaagttgtgaatcggagcttgggcaatatgctacgggctcttgttggtgacaaaacaaaaaggtaggatactattttatcttatgttgaatttgctttcaaccacacgccaaatcgttcaagattttctccatttgaggtagtatgtggttgagttccgaatgttgtccttgaattaacacatttgccttctcttggggagaaaaatcaacatgttgatgttctagttggtgagttaggcatgattcacaagttagatcagcagctacccagtgatgacatgctaaatacaaggttgcaacagacaaacctcgtcatcgcgttgtgtttgaagccggtgattatgtgtgggttgtcttaactaagaatcattttcctactggacaatacaataagttgagtcaccaaaagattgagccatgtaagttacagaaaaagataaatgacaatgcaaaatatcggctgcaaccacaaaggcacttacaaacgtctgatgtgttcaatgtgaaacatctcattccatataatggagatcca

SEQ ID NO: 76535 - DNA, 210 bp, Oryza sativa
  Clone ID: PAT_MRT4530_7651C.1
accctcatatacccggccatggtggagctgagccgcacctgcggcgacgtcgacttactgctcggcgggcgctacgtatgctccggtagggggcacctcatcactgacatcctaagatacaaccaggttaaggtcacctagacatatacagattcatcactacgcagctgagctgcatgcagaagccgacatcccagccgcggctagctt

SEQ ID NO: 76536 - DNA, 2386 bp, Oryza sativa
  Clone ID: PAT_MRT4530_76520C.1
tcgtttgttttttcttttttgccgctaattttcgattttaaatttggcaatttcaggggtcaggcaatacagaaacggtgcttgcgattcttcgtacaggtgcataccccgtttctacgaataaatcatatatgtcaagacgtttccaaaagagatattacaacatttttccgtccctactatgaacatacaaacagcatgagattggtgcttctgtcagctcctttgatcttggatgttctagacggcatggcgagctcatttggcacttctgtacatgttgtcaattgttccctggtagtacttgagcaattgagggcgcttctttttatatgttggagtaatcaaatcacggtccatgtcaaatggcactggttcaagatgtacagcctttatgaattcaaaacctttgagcttcttctcttttcctacttttgacagttctcccaaaatgtattcttttgctttggggttctcacacaatgcctccaaatcaccactgattccatttgctgcagcccagctctccaatgcttccttgtttggattgaccacagcaacaaggaatgactcaaagctattcccatatacccatatcgaatctatagcagaaacaagaccataaatgttctccaaattttctactgctacatattctccttgtgaaagcttgaagatattctttttgcgatctatgattttcatacttccatcaggttgccactcaccaatgtctccagtatggaaccatccatcaatcaaaacatcctttgtaaggtcttcacgcttgtagtatcctgagaatactgtttctcccctgatgcagatttcgccacgcggtctagttgcaagtgcatcataattcatttcaggcactgattccaggcagacatcaatatttggcactggaggaccaacagtccctatcatgcacatctgatttggtagggagacgaaagatccagcacaagtctccgtgagaccatatccttgtaagacatgtgcacaagtcaccactctcaggtattcttcaacatgagtagcaagtggagcagctccggacaaaataacacgaacatttcccccaagaccttctttcaccttactgaaaactactttgtcacatattgcggcagcttcattgtgcttagctcctttcatcattctaaattgcttgctgcaaaatataatacctaggtcatactcgattaatttgtaagcaagattgaacaatgtactctttatgaaacccccagatgcaattttagcttggagtccagaaaatatccggtcaagcacacgtggaacagcacacaagatagttggtttcagtgtcccaatatcttcaacaagcagcttaacatccccacgccaaaatccaatggaagcaccatggaacataaatagctcttccacaacacgatcaaagatatgagcaagtggaagataagacatgtaaacatcggtttgctccagctgctcatttacacagttaagcagccgatctacacctgcgactaggcaaataatgcttgcattggagatcagtacacctttggggtcaccagtagttccactggtatacattatagtacatatgtcagtctttgctttcactggaagatcgaattcttggtctgccaaagaaagaaattcatcccatgaatagatctccagcccatatttggaggcattttccttttgttcctgagttaccttcccaaaactaacgattgttttcaagaattcagctgacttggggaaagtcttgaagatctgctcaatttttttctcctctgtgaaagcaatctcaacttctgcatggcacaaaataaactctacagcaccagctccaagagtgtcatataatggaacgcagtagattccatgagcattgcaggcctccatcgtgataatccattcaggacaattagcaccatagataccacaacggcttccctttgcaagtccacggctcctaatagagttaccaatcttagtcgaaaggtcaaacacctccttgtatgtcttccaaacgtatgcaccagccttcccgtcaacaatctcacggtgaccaagcattctgttgtctgggaacttctccacggccattcggaagatgtcgtagcagcagtccaggccggcgacgggcggcgggaagccgccgcgggcgaaggcgctccggtaggcggggcccacggagggccggccgtcggcggccgcgcggccctgctcgacctccaccacgtgctgcatctccatgccctcctcttcctcttcttcttcttcttcgtatgcttctccctctcgctgcttcgctttgctttgcttgcttccctcctctctcgtgttcgggtcgcgtcgcccacgcggtggatagagcgtt

SEQ ID NO: 76537 - DNA, 1279 bp, Oryza sativa
  Clone ID: PAT_MRT4530_76523C.1
ggttgacataccacaagcagtcgactagggaacgagacctagaatggaaccgcactccgatcatcttgttaggtacgcaagcgctctcaccatcattatttgatgggacatgtcaggctgcacgccgcctgacacacgagcagcgcacaggcgcactacctagtcccatcggtcattcgaccggaaacagaccggttgagtacactgcacgcccttgcgcccatatcaccgacagtagcccccggcgttagccctgaccaaaacctttcccaggtggtcatggttgacgccactctgctagttagttgacatgtgggcccgatattctgtccaatcatcctgggagttgcaagccaagctgggcgctgtagccagccggcggggccaaagccaaccactacggaagagccatgaggttcccacgagcctgtgtccccacgttacacattttgtttgctctttcctttcggtggcctccttccaatatctctctcttttacatggacgactactttcgcacgagtgtgagagccgaaaaactctagagccagcgatccctgtccacagttgagccaggctaggcgccgtaaccagccggcgggaccaaagctagccgttgaagcttgaaaggacgattagttgagccgggccgggcaccgtagccagccggcaggaccaaagctagccacaaggcgggtggcaggttcatgagcgatccctgcgcttggccctggagggccatagggaagaaattcgccttgacccggtcgtcgccccacgtcgcctctatgatcgtcgtgtggatctggagggactcagaggggttgacgctactgtggtaccttacggtgaggctgggccgaactttgggggtcatcggacattccgaagactcgcaataaagacctggccgccagtcttacccggtgaagatacggggggcctagccccctgcctggggtggtgcggcacttctgaggaggctgcaccttcccccgcattggcggcacgaagcttatcacgccggcgctcgaaagaacctcaaaaataacgaacgcgcccctacctggcgcgccaactatcgagaggtgatcctctctagcgggagatcatgagatccccctttttcggtttggccgagggcagcaggtgagatccgaggttttcgagataaaagagacacaagggatttatacaggttcgggccgctaagaagcgtaataccatacttctgtgctatgctccttgagtgaaggattacaagatctccttgttggag

SEQ ID NO: 76538 - DNA, 217 bp, Oryza sativa
  unsure (1)..(217): unsure at all n locations
  Clone ID: PAT_MRT4530_76524C.1
ggaggaagcggatggcgtttgcatggacgaggaggccagccgctgccggtagaaaaggcagtggagcacccaaaccacacagccgctcttatcggcaggagantggaggaggccctcacctaaaccctcgtcctccaatctcaggatggngcncgcacgcngcctcgccaaccgcgcgctgctgcgccgcctcctcgcggcggcgacggcggagtcc

SEQ ID NO: 76539 - DNA, 1902 bp, Oryza sativa
  Clone ID: PAT_MRT4530_76525C.1
tttttttttttttttttaaatctttaagacgtatatattgtcagggaggagtttgcacggtgtcaagacaacgaccaatacgttgttgtacagcaaaagaatatattctgttacattgattgaattcaataggagcgaccggctaatttcctcttgaaccgcactacacccggcccatctgaaaatttttgaccaaaaattggccaccacggtggcagctagaaatagtcagtatgggcaaaagaagactattacactttaaaatttgaatcgtatgttgggttcagctcatttgtttgactcgataaactccctatattccttcttcattttaacaccagagacagtcctgagcatttctttatttttaaaaaattgaacacatggtgttcccatgatgcctgcagcttctgctatttcaggatcctcctcgatgtcaatttcgacaaaatgaacgtgttcgttgtactcatctataaccttgcttagaattggctttaaggttctgcaaggaccacatgttggagaagtatatagaacacagacaagccttggactttcatgatatactttgcggagtgcatactgtcccctatgctttgtgtgagaaatgtcaaagcccatctcgacatctctatctgtaatctccttctccttttcttcgcgaacaggctggtgaaattcaacaagaaggtcgttggcaactaagtatctttccaccgacaaagcggctacacatccggatccagctgcagtaacggcttgcctccattcatgatcctgcacatcaccagcagcaaatacaccatcaactgatgtttttgctgtgccttcttcaaccaaaatataaccagcatcgtcaagatcaatttgaccttgtaacaactgactgtttggagtgtgtcctatgccatagaatagacctttcacctcaagaactgattcctctcccgtgtcggttctcttcagttgaataccagacatctggcctttgggattgctgacaacatccacagcttctgtattgaaatgtactgttatgttgggattgttgagtactctgttcgtaatcacggtcctgcatagctttggatgctcgtagctgatcctttcgaacaagtaaatgaacgtgacgtgcatatttggtcaaatatatagcttcctctgtagctgtatcaccacctccaacaactgcaagaacttgacccttaaatagtggggatgctccatcacatattgcacatgcactgatacctctactccaaaattcatcttcacgaggtaatcgaaggcgcttagcagcagcaccagtagcaatgattacactatggcatttcacctcacgatcactgctacgaataacaaacggtctgctcttcacattcacaaactcaacatcctcctggtgaagctcagcaccccaccgctccgcttgcttccgcattttgtccatgagatcaggcccagtgacgccatccggaaacccagggaaattctccacctcggtggtggtcatcagctgcccaccaggaacgccaccaacctggtagccttcgaacacgacgggcttgaggttcgcccgagcggcgtaaatcgcagcagtgtaccccgccgggccagagcctatgatcaccaagttctccactcccttaccaagatctgatggaggcggggacgcgggggcctcctcgtcgacggcgggggcagccgacgcgcgcaacgccttggccgccaccgccgacgaagggagcgggcggcaggagtggtggaagaaggccctgcggcggcgggaggacggcggcgcggccgagagggcggcggccacggcgaggcgcgtgaccgccatcgcgagggagggagggagagtggagaagccctctcgccccggggtcccgcagcccg

SEQ ID NO: 76540 - DNA, 261 bp, Oryza sativa
  Clone ID: PAT_MRT4530_76526C.1
atggcggcgcttcccgacgtccggcggcaagcagccagctgcggatgcgccatctctgctcctggaggacccgcatccatcggccgtggtctccgcggcatcggcgacggcggcggccttgcggcgcgaagcttcagctccggccagatcaacggcgcccttgccgccgggcctccgtggagagcagatacagcgactacggggaaaattagagatgtggcgatagaggagaaagcctatcatcagcagccaattgtctga

SEQ ID NO: 76541 - DNA, 342 bp, Oryza sativa
  Clone ID: PAT_MRT4530_76527C.1
aaaggatcaacccattatggttaccacaacattcggaggggggaatggtgaggacttacttatacccccatacgcaggtacgcgacaatttcttacaaaagccatttgctctgacaacatggttgcacagttgactaacataattcacacaaaaatcacgagaacactataaacgaaacagtattaaacgcacaaaaaccgggcattgtaaagaatgaaggtgcactaaacgtatacacgaacagtatttttagctttggctccattctctatagatggaacgtttggaaatgttaaaggctattggatcttgggtaacactacagggaggtgaagatgctt

SEQ ID NO: 76542 - DNA, 346 bp, Oryza sativa
  Clone ID: PAT_MRT4530_76528C.1
ggggaggaacaacccccccttgaaaaaaaaggttggaaaacaggttcacacacaaccggggggccccggcccactagttaaataacttccataattggaaatcaggggaacagttccatagttgaaaggccacagggatcaaaaaaaaaattcctgggaacattggggaacaaggggaaaagggaacaagagttcgggggcagggggggaaaactaaaccggggggctggggcttctccagggggggggaggggggaaacctcccggggggggcaacaggggccaagagcattcgccggggggagaaacggcccaaacccaagggatccagggcatccccctttgg

SEQ ID NO: 76543 - DNA, 243 bp, Oryza sativa
  Clone ID: PAT_MRT4530_76529C.1
ttgagaatttgagatcgttcgatcatcacctcgtttcttgctgagattataccaagctccatgattccgtctatgtccggtagtgacactgcaaggtgcacaccagtagattgctagtggcagcagcagcagcatcagtggagctagtcgtcgtcccggccggcctcgccgtcagagatcgatcggtatatcataatcagcagcagctggtagaattcccgagaagttcgtccagatgatgct

SEQ ID NO: 76544 - DNA, 605 bp, Oryza sativa
  Clone ID: PAT_MRT4530_7652C.1
tatatggaagaaaatgtcgaacaccattgatatggacagaaaccagagaaagaagtatattcggaacagaccttttaaaggaagctgaagaaaaagttcgacttattagaaatagactaaaagtagctcaatctcgacaaaagagttatgaagactctagacggagagagttaacttttgacattggtgattatgtttatctaaaagtttcacctttacgagggataaaaagatttaaagtcaaaggaaaaatagctcctcgttatattggaccatatcaaataattgctaaacatggagaagtagcctatcaattggctttaccagattatctatctgatgtacatcctacattccatgtttcacaattaaagaaatgtctacgtatttcagaagaagaaatatcagtaagtactgttgaactgaatcaggatttaacttatccagaatatcctattagaatcttggaagaagcacagagaacaactcgtactaaggcaataagaatgtttaaagttcaatggaatcatcatacagaggatgaggcaacttgggaacaggaagattatttacaattcgaattcccgtatcttttcgaagactcc

SEQ ID NO: 76545 - DNA, 942 bp, Oryza sativa
  Clone ID: PAT_MRT4530_76530C.1
gaacgtgatggacatgaacaccgtctacggaggcttcgccgccagcctcatcaaggaccccgtctgggtcatgaacgtcgtctcctcctacggacccaactccctcggcgtcgtcttcgacagaggcctcatcggcaccaaccacgactggtgtgaggcattctctacataccccaggacgtacgatctattgcatcttgatggcttgtttactgcagagtctcataggtgcgagatgaagtttgtacttcttgagatggaccgtatccttcgtcccactggttatgccataatccgcgagaacgcctactttctggattctgtagccaccattgccaaaggaatgagatggaactgtgacaagcatgacaccgaacacaaggcagacaaggagaaggtcctcatctgccagaaaaagctttggtcaggaaagaacacccagcattgaaaaaaaaaatcaataacttgatagcctcaccttgatcgaacctggagggatcacaatgtaaatctgctcaacgatttcaagacagtgctcaacctaaggcacttcaccctcccactagacttcacactctgatacaagaacgttcgtataatgattaaattaaataaaatgagcaatactccaatataggatccaatacttcctactctctgccagttatcacacaattattttttacagttactaggggaccaattaattaataccaccaagaggcagctgtaagttattacttttttttagaatggacaactgtaagttacttttatactactatatagaatgttcatttgtattagccatagcttgtttctacgattgtaacaataggaacggctatatatttattttaattgaatgtttacaggagtaagatattgatgttggtatatgttcctcaaattaacaagagttggctgtgggttttgctgttg

SEQ ID NO: 76546 - DNA, 355 bp, Oryza sativa
  Clone ID: PAT_MRT4530_76531C.1
gcacgaggtggtgtttgaatgtcctgaagatgaagattaagtttttcacgcaaaacgagggcctaaattaataatggattttaatggatgagaaggattaagatgtgcaacaccgtcaaagctgtcgcccgagtgaaccaaagcttgccgtcagcggccttgcagtctcgggaggtcgtctttatacggattttcagttgcgtgggcttctcttttgtctgtatctctcgtgcaagggcgggcatctaggaaatgctgctgcctatttcaacatagccataatttagtttatataggctgtgtttagttcagcgtaaagtttagattttgattaaaattagagatgatgtgattg

SEQ ID NO: 76547 - DNA, 500 bp, Oryza sativa
  Clone ID: PAT_MRT4530_76532C.1
gataggtaggcaggcagacctgcgtgtcgccgcggcggcggcggcggcggccatccgccccactgccgcgctcctcctcctcttcccgcctcaccgccgcaccacctctctgcgccgctcctcgctccccttcgctcgcccgcggcgccactctaccaccaccaccaccggggagtcacacccggagcccaacgaaagcaacgccgcccgccgccgccgcgcccgcgactcgcccgagggcctcctcaaggccaagctcgacatgtgctcccgcgacaacgacctccccaccggactcgccctctacgaagccgccatctcccccgattccctcatcccgctctgcctcgggcactacaactggctcctctacctctgcgccaacgccgcgcgcgcagactcctcgagccccggtgccgcccagcgggggttcaacatcttctcccggatggaggctgacggcgggcaacccaacgagggcgccctcaccatcctcggcc

SEQ ID NO: 76548 - DNA, 348 bp, Oryza sativa
  Clone ID: PAT_MRT4530_76533C.1
agagatttgtatggcagtcagatatatcaatgtgctgtatgacgaggagaaaattccattgaaggcactggatttggatgaaagtaaaatcttttatcagtcgaaggctaagggggattatcatgtcctattaactgacatcaagatggaaatttcaccaacgggcaatgtgagaaagaaccggagagccaagggcaaagtttctagcacaggagtaccaactgttgatgacgttaaaactgcgaactggaatggtttgggacaatttcttaaaaagctccataaagacctcaagctgcacatagaattgagccatctttcagaagagctcgggaaagaatcagtaaa

SEQ ID NO: 76549 - DNA, 3003 bp, Oryza sativa
  Clone ID: PAT_MRT4530_76534C.1
atgcgcctccactaccaccacctcgccgtcgtcctcctcgccgccgtggcggcggcggcgacggcggcggccggtggcgaaaccgacgcgctcctcgcggtgaaggcggcgctcgacgacccgacgggcgcgctcgcgtcgtggacgacgaacaccacctcgagcccgtgcgcgtggtcgggcgtggcgtgcaacgcgcggggtgcggtgcacctggcgcgcctcgacctcgccgcgaacgcgctgtcggggcccattccggcggcgctgtcccgcctcgcgccgttcctcacccacctcaacctctccaacaacggcctcaatggcaccttcccgccgcagctgtcgcggctccgcgcgctccgggtgctcgacctctacaacaacaacctcaccggcgcgctcccgctcgaggtggtgtccatggcgcagctccgccacctccacctcggcggcaactttttctccggcgggatcccgcccgagtacggccggtgggggaggctccagtacctcgccgtctccggcaacgagctctccgggaagataccaccggagctaggcaacctgacgagcctcagggagctctacatcggctacttcaacagctactccggtgggataccacccgagctcggcaacatgaccgacctcgtccgcctcgacgccgccaactgcggcctctccggcgagatcccaccggagttgggcaacctcgcgaacctggacacgctgttcctgcaggtgaacggcctcgccggcggcatcccgcgcgagctcggcaagctcgcgagcctcagctcgctcgacctgtccaacaacgcgctcgccggcgagatcccggcgacgttcgccgacctcaagaacctcaccctgctcaacctgttccggaacaagctgcgaggcgacatcccggagttcgtcggcgacctgcccagcctcgaggtgctgcagctatgggagaacaacttcaccggcgggatccctcgccggctgggccgcaacgggaggttccagctgctcgacctctcgtcgaaccgcctcaccggcacgctgccgccggacctctgcgccggcggcaagctggagacgctcatcgcgctcggcaactcgctcttcggcgccatccccgcctccctcggcaagtgcacgtcgctcacccgcgtccgcctcggcgacaactacctcaatggctccatccccgagggtctcttcgagctcccgaacctgactcaggtggagctccaggataatctcatctccggcggcttcccggcggtgtccggcaccggcgcgccgaatcttggccagattagcctctccaacaaccagctcaccggagcattgccggcgttcatcgggagcttctccggtgttcagaaattgctccttgatcagaacgcgttcaccggcgaaatcccgccggagattggccggctgcagcagctgtccaaggctgacctcagtggcaattcgttcgacggcggcgtgccgccggagattgggaaatgccggctgctcacctaccttgacctcagtaggaacaacctctccggtgagataccgccggccatctctgggatgcggatactgaactatctgaacctgtcaaggaaccagctcgacggcgagattccggccaccattgccgcaatgcaaagcctcaccgccgtggatttctcgtacaacaacctgtccgggctcgtgccggccacagggcaattcagctacttcaatgccacatccttcgtcggcaacccgggattgtgcgggccgtacctcgggccatgccatcccggtgctcccggcactgaccatggcggccgcagccatggtggactctccaatagcttcaagctgctgattgtgctaggattgcttgccctttcaattgcatttgctgccatggcgatcttgaaggcccgatcactgaagaaggcgagtgaggcgcgtgcttggaagctcaccgcattccagcgcctcgaattcacctgcgacgatgtgcttgatagtctcaaggaggagaacatcattggcaaaggtggagctgggactgtgtacaaggggacaatgccggatggtgaacatgtcgcggtgaagcggcttcccgccatgagccgtggttcctcccatgatcacgggttctccgcagagattcagacgctcgggaggatccggcaccgctacattgtgaggttgctcggcttctgctcgaacaatgagacgaacctactcgtttacgagtatatgcccaatggcagccttggggagctactccatggcaagaagggtggccacctgcattgggacacaaggtacaaggttgctgttgaggctgccaaggggctctgctacctgcaccatgattgctcaccgccgatattgcaccgcgatgtcaagtcgaacaacattctccttgactccgatttcgaagcgcatgttgctgacttcgggcttgccaagttcttgcaggactctggcacatcagagtgcatgtctgcaattgctggctcttatggttatattgctccagagtatgcatatacgctcaaggtcgatgagaagagcgatgtctacagcttcggtgttgtgctccttgagctgatcaccggaaagaagccggtaggggagtttggggatggcgtcgacatcgttcagtgggtcaagacgatgacggactcgaacaaggaacatgtgatcaagatcttggaccctaggctctcaactgtgccggtccacgaggtcatgcacgtcttctacgtcgcattgctttgcgtcgaggagcagagcgtgcagcgaccgacaatgagggaggtggtgcagatcctcagtgagcttcccaagccgacatcgaagcaaggagaggagcctcctagtggtgaaggtgctgtgtttgatcttgtagtgccagctgaatctgcagaggccaatgaagccaaagagcagcagcagcagcagctaaactcaccatcttcaccgccacctgatctcatcagcatatga

SEQ ID NO: 76550 - DNA, 138 bp, Oryza sativa
  Clone ID: PAT_MRT4530_76535C.1
atggagatcagaacggcggacacgaggagcacagtggaggctggaggggaatcggatgtgagtgtggccggcaggtggggccgcatcgagtcggcggatgaggctgacaggtggggatgggagggtggctcgtgggcg

SEQ ID NO: 76551 - DNA, 3072 bp, Oryza sativa
  Clone ID: PAT_MRT4530_76536C.1
atgcgcctccactaccaccacctcgccgtcgtcctcctcgccgccgtggcggcggcggcgacggcggcggccggtggcgaagccgacgcgctcctcgcggtgaaggcggcgctcgacgacccgacgggcgcgctcgcgtcgtggacgacgaacaccacctcgagcccgtgcgcgtggtcgggcgtggcgtgcaacgcgcggggtgcggtggtggggctcgacgtgtccgggcgcaacctcaccggcggcttgcccggcgccgcgctgtcggggctgcagcacctggcgcgcctcgacctcgccgcgaacgcgctgtcggggcccattccggcggcgctgtcccgcctcgcgccgttcctcacccacctcaacctctccaacaacggcctcaatggcaccttcccgccgcagctgtcgcggctccgcgcgctccgggtgctcgacctctacaacaacaacctcaccggcgcgctcccgctcgaggtggtgtccatggcgcagctccgccacctccacctcggcggcaactttttctccggcgggatcccgcccgagtacggccggtgggggaggctccagtacctcgccgtctccggcaacgagctctccgggaagataccaccggagctaggcaacctgacgagcctcagggagctctacatcggctacttcaacagctactccggtgggataccacccgagctcggcaacatgaccgacctcgtccgcctcgacgccgccaactgcggcctctccggcgagatcccaccggagttgggcaacctcgcgaacctggacacgctgttcctgcaggtgaacggcctcgccggcggcatcccgcgcgagctcggcaagctcgcgagcctcagctcgctcgacctgtccaacaacgcgctcgccggcgagatcccggcgacgttcgccgacctcaagaacctcaccctgctcaacctgttccggaacaagctgcgaggcgacatcccggagttcgtcggcgacctgcccagcctcgaggtgctgcagctatgggagaacaacttcaccggcgggatccctcgccggctgggccgcaacgggaggttccagctgctcgacctctcgtcgaaccgcctcaccggcacgctgccgccggacctctgcgccggcggcaagctggagacgctcatcgcgctcggcaactcgctcttcggcgccatccccgcctccctcggcaagtgcacgtcgctcacccgcgtccgcctcggcgacaactacctcaatggctccatccccgagggtctcttcgagctcccgaacctgactcaggtggagctccaggataatctcatctccggcggcttcccggcggtgtccggcaccggcgcgccgaatcttggccagattagcctctccaacaaccagctcaccggagcattgccggcgttcatcgggagcttctccggtgttcagaaattgctccttgatcagaacgcgttcaccggcgaaatcccgccggagattggccggctgcagcagctgtccaaggctgacctcagtggcaattcgttcgacggcggcgtgccgccggagattgggaaatgccggctgctcacctaccttgacctcagtaggaacaacctctccggtgagataccgccggccatctctgggatgcggatactgaactatctgaacctgtcaaggaaccagctcgacggcgagattccggccaccattgccgcaatgcaaagcctcaccgccgtggatttctcgtacaacaacctgtccgggctcgtgccggccacagggcaattcagctacttcaatgccacatccttcgtcggcaacccgggattgtgcgggccgtacctcgggccatgccatcccggtgctcccggcactgaccatggcggccgcagccatggtggactctccaatagcttcaagctgctgattgtgctaggattgcttgccctttcaattgcatttgctgccatggcgatcttgaaggcccgatcactgaagaaggcgagtgaggcgcgtgcttggaagctcaccgcattccagcgcctcgaattcacctgcgacgatgtgcttgatagtctcaaggaggagaacatcattggcaaaggtggagctgggactgtgtacaaggggacaatgccggatggtgaacatgtcgcggtgaagcggcttcccgccatgagccgtggttcctcccatgatcacgggttctccgcagagattcagacgctcgggaggatccggcaccgctacattgtgaggttgctcggcttctgctcgaacaatgagacgaacctactcgtttacgagtatatgcccaatggcagccttggggagctactccatggcaagaagggtggccacctgcattgggacacaaggtacaaggttgctgttgaggctgccaaggggctctgctacctgcaccatgattgctcaccgccgatattgcaccgcgatgtcaagtcgaacaacattctccttgactccgatttcgaagcgcatgttgctgacttcgggcttgccaagttcttgcaggactctggcacatcagagtgcatgtctgcaattgctggctcttatggttatattgctccagagtatgcatatacgctcaaggtcgatgagaagagcgatgtctacagcttcggtgttgtgctccttgagctgatcaccggaaagaagccggtaggggagtttggggatggcgtcgacatcgttcagtgggtcaagacgatgacggactcgaacaaggaacatgtgatcaagatcttggaccctaggctctcaactgtgccggtccacgaggtcatgcacgtcttctacgtcgcattgctttgcgtcgaggagcagagcgtgcagcgaccgacaatgagggaggtggtgcagatcctcagtgagcttcccaagccgacatcgaagcaaggagaggagcctcctagtggtgaaggtgctgtgtttgatcttgtagtgccagctgaatctgcagaggccaatgaagccaaagagcagcagcagcagcagctaaactcaccatcttcaccgccacctgatctcatcagcatatga

SEQ ID NO: 76552 - DNA, 3827 bp, Oryza sativa
  Clone ID: PAT_MRT4530_76537C.1
ggggcacgagcaaaaagctctcacctttgcctcctcactctcctcacactctcttgtctccactcgccgcgccacgccacgccgcgccgcgcaatgcgcctccactaccaccacctcgccgtcgtcctcctcgccgccgtggcggcggcggcgacggcggcggccggtggcgaagccgacgcgctcctcgcggtgaaggcggcgctcgacgacccgacgggcgcgctcgcgtggtggacgacgaacaccacctcgagccctgtgcgcgtggtccggcgtggcgtgcaacgcggcggggtgcggtggtggggctcgacgtgtccgggcgcaacctcaccggcggcttgcccggcgccgcgctgtcggggctgcagcacctggcgcgcctcgacctcgccgcgaacgcgctctcggggcccatcccggcggcgctgtcccgcctcgcgccgctccgcgcgcacctcaacctctccaacaacggcctcaatggcaccttcccgccgcagctgtcgcggccccgcgcgctccgggtgctcgacctctacaacaacaacctcaccggcgcgctcccgctcgaggtggtgtccttgcgcaagctccgtcacctccacctcggcggcaacattttctccggcgggatcccgcccgagtacggccatgggggaagcttcaagtacctcgccctccggcaaacgagcctctccgggtacccaccgggaggcctaggcaacctaacgagcctcagggagttttacatcggctacttcaacagctactccggtgggataccacccgagctcggcaacatgaccgacctcgtccgcctcgacgccgccaactgcggcctctccggcgagatcccaccggagttgggcaacctcgcgaacctggacacgctgttcctgcgggtgaacggcctcgccggcggcatcccgcgcgagctcggcaagttggcaagcttgcaacctaaggttgacctttcaaaaaaggggttggccggcgaagatccggcaaaggttcgccgccttcaaagaaccttcaccctgctcaacttgttccggaacaagttgcgtggtgacatccctgatttcgtcggcgacctgcccagcctcgaggtgctgcagctctgggagaacaacttcaccggcgggatgcctcgccggctgggccgcaacgggaggttccagctgctcgacctctcgtcgaaccgcctcaccggcacgctgccgccggacctctgcgccggcggcaagctggagacgctcatcgcgctcggcaactcgctcttcggcgccatccccgcctccctcggcaagtgcacgtcgctcacccgcgtccgcctcggcgacaactacctcaatggctccatccccgagggtctcttcgagctcccgaacctgactcaggtggagctccaggataatctcatctccggcggcttcccggcggtgtccggcaccggcgcgccgaatcttggccagattagcctctccaacaaccagctcaccggagcattgccggcgttcatcgggagcttctccggtgttcagaaattgctccttgatcagaacgcgttcaccggcgaaatcccgccggagattggccggctgcagcagctgtccaaggctgacctcagtggcaattcgttcgacggcggcgtgccgccggagattgggaaatgccggctgctcacctaccttgacctcagtaggaacaacctctccggtgagataccgccggccatctctgggatgcggatactgaactatctgaacctgtcaaggaaccagctcgacggcgagattccggccaccattgccgcaatgcaaagcctcaccgccgtggatttctcgtacaacaacctgtccgggctcgtgccggccacagggcaattcagctacttcaatgccacatccttcgtcggcaacccgggattgtgcgggccgtacctcgggccatgccatcccggtgctcccggcactgaccatggcggccgcagccatggtggacgctcgtgccaggaactggtcaattcagctacttcaatgctacatcttttgttggcaacccaggcttgtgtggaccgtacgtccggccatccggacctggcgtgggtggcaccgaccatgatggtcatcgtcttggcgggctatccaatggtgtcaaactgcttgcttgactgggttaaggaggataacctaatgggcaaaggtggagctggaattgtgtacaaggggactatgccgaagggagaacatgtcgcggtgaagcggcttcccgctatgagccgtggttcttcacatgatcacgggttctccgcagagatacagacgctcgggagaatccggcaccgctacattgtgaggttgctaggcttctgctcgaacaatgagacgaacttgctggtttacgagtacatgcccaatggcagccttggggagctactccatggcaagaaaggtgggcacctgcattgggacacaaggtacaaggttgctgttgaggctgccaaggggctctgctacctgcaccatgattgctcacctgcgatattgcaccgtgatgtcaagtcgaacaacattctccttgactccgatttcgaagcgcatgttgctgacttcgggcttgccaagttcttgcaggacaccggcacatcagagcgcatgtctgcaattgctggctcttatggttatattgctccagagtatgcatatacgctcaaggtcgatgagacgagcgatgtctacagccttggtgctgtgctccttgagctgatcactggaaagaccccaggtggaggagattggaggtggcccagtgctcgttcatttggatacattgctcaaggacacaaataaacactcaatgatgaagatgcaatggtcacgactccctcaactgtgttgtgcctctagatcaggttactggacggagtcccattgctgtgcttcgaggatcagagttgacagcgaccaacaatgtggggattgttgcagattctcagagagcttcccaagccgacatcgaagcaaggagaggagcctcctagtggtgaaggtgctgtgtctgatcttgtagtgccagctgaatctgcagaggccaatgaagccaaagagcagcagcagcagcagctaaactcaccatcttcaccgccacctgatctcatcagcatatgaagaaatgctgaactaaattgttacagttcagtttgatttggtgaagtttgggtttctaatctggaatgcttagggtgtgtggtatgtaggccttcgcatttagggtgtggaaattgtaggccactgaatttcttgtgtggcatgtatctttggtatcttaggtatttgtgttgtaaatataagcttcttaacctccagtttcctgctacaatcaagaaactttgtaggaagttaagagcttagttatctgaatccattttagcttcttttttttttctttcacatattccactttggtgggttgtcctgttaccagtttgtttcctttggtgctgcaatgtaggattccatagcgagtttcggtactttagagccttttatcatctagccccaatgcaatgtcaaatgctatctccatccaatgtgacagcataaccttttaactgtggaatcatgattatcaaggtgttctgttatctgtacttgagagtgtaaactgctgaagtgagcaggtgttgcattcaagagttgtactcaaaaacctcaagtctgaaggcaaagaacaaatgtactttcacatctggtgaacaagaaccactcattcagatttggccagttaaaaaaaaaaaaaaaaaaaaaaaaaaaaaaaaa

SEQ ID NO: 76553 - DNA, 195 bp, Oryza sativa
  Clone ID: PAT_MRT4530_76538C.1
atggcgaggagagcggtggaagaggcggtgggggaggggttgcgccagatccggtctttggcgggattggcagcggcgacgacaagctatgaatacgagtatcgatggaggcgaaatcctaggaggtgggcaatgtgtacgaagtatgctcatgtggacaaagatggacaagtgactcacttacgccgtgtttag

SEQ ID NO: 76554 - DNA, 285 bp, Oryza sativa
  Clone ID: PAT_MRT4530_76539C.1
cggatgcttgggaaataaaaggctaaatccggtggcgacgatataaaagaatccgcgggcaacaacccataaacctacaaggaaagattttggtcggaaagtcgcagacacatatgaaaagcttggactagcagacgagaaaaaggagtggcttgggaaacacaatgcattgtttgacaagccatcaagtaaagagataaagaacgggcgggagatcaaacaggctgtgatgaacacgaacaccgggtagacatcgcatgatgcctccacctataaaatctacag

SEQ ID NO: 76555 - DNA, 516 bp, Oryza sativa
  Clone ID: PAT_MRT4530_7653C.1
ggcaaacaaactgcttgacacataagtgcgggggcattagaaaaaaaacagagtacttacgaaaggggtcgcaacactacaatctgcactagcccaacaaaagtaaaagttggttaactaaaggggcgtctttttttgcgaacaaatcaaacgagctaagtgcaaagcaatactaatggcgtcactgatactaatggcggggagggagaacaatggcaacaacaattaatactaatggcgccaaagatcgagcatggaatccagatcgaaataaaatcgctatcactatcctttcgccctaaagctgttcttgcttcctcagcctgtacaaagttccaaaattcccagggatgatgtgggatcaccaccaccgaggatccgttcaaaatcaacccccgcccaaccacattaaccaaccaaaacgatgccggcctcaaatcgaagcagaaaagaaagctatcgaaaagaaagaacaagatctccctcctagcctcgcctgcctatcctatgtccccc

SEQ ID NO: 76556 - DNA, 497 bp, Oryza sativa
  Clone ID: PAT_MRT4530_76540C.1
ggaaaaaagtacaactttaaattagagcgacggtacgaattgcccctctaaaccacgaaatcagacattcttcaccctcaaatttttatattggacaaattatctccttgacttgttttggagcgattttggtactatcatgtgacctgagtagtaccccaaggtttttaagttcaaatctccatcgaagcgaatttcagattgggttgtttgtggggctaagttcctaatttaaatgaccgcatatatccagttggatgtagagactgggtaaaaaatactcttctctaaaaaaaatcatgtgacacacgtggtagtctggttagcataaaaagaataaaaacggtgagactcacatgtcagatttgatttgtgggtttgaacatttttttaaaaaaaaaacttaagaaggtcaaactgatgtgtggatcaaatcgcttttcttaattcttttatgctaactagactatcacgtgtgtatcaactagactgaaact

SEQ ID NO: 76557 - DNA, 249 bp, Oryza sativa
  Clone ID: PAT_MRT4530_76541C.1
atgtctttcgtgattagtctcacccttctcatcataataaaaggtgctttaattggtaataatttgattagctcctggtttggaatggtatattcctggtttggagatagaactgtgcagccgggatggttgttcagaatggttggcctatacaacagggtatgttgtatagcgttggattaatattgtctattacttaactgttttattaaattctgaaatgttttattaaatgctggtttatgcaaa

SEQ ID NO: 76558 - DNA, 188 bp, Oryza sativa
  Clone ID: PAT_MRT4530_76542C.1
gtttgctcctcctcccacaagccattccctctcccactaactaaggtgcaagcggatagttggggctcgaatacgccaacgcgagacctggacggcgccggatggcaccatagctgctcaccgtctgcgcgatgggcgctctgctgccggcgccggcgccggcggggctacctgcgccgggggggggg

SEQ ID NO: 76559 - DNA, 1290 bp, Oryza sativa
  Clone ID: PAT_MRT4530_76543C.1
atgccgaggagggtggagaggaagaagaagaagaagaagaagaagaagaagaagaagaagaagaagaagaagaagaagaagaagaggaggaggaggaggaggaggaggagaatcgagctcgatcgtccgcgcgaccgaccaatgcttcctgctccgaccagctgctgccgcgccgccccgccgccgtctcgcccctcctgcctgtcgccggccgcggcggcggcggcgaggaggaggaggatggcggcggtgaggagcgcggcggcgtcggcgtcgcgggtgagcagagaagaggcggtggcgaggatgccgccgctggcacaccgggaggtgatgctggcggtggccggcgaggcggaggcgcggctcggggcgcggctgctgccgtcggaggtgcccgccgacgtcgcgtggttcggcaacgccgccggggacgccgtcggctccgtcgacgtgcgccgcggcgcgccgggatcctcgatcgccttcatgctggaggcgtggttccaccgcgagctccccggcggcggcggaggcgccatcgacatcaccgccctcatcgtcaacctcaacggcgccaccgacgcgccgcacctcgtcatggagttcatccagggcgggccggcctccctcatcgtcctcctcgacctcctcccgcgcgtcgacctcccgctccacccctcctacatccaccggtactacgccgccacgggcctcgacgcccgcgcccgccgccgggtcgccggcctggtgccgcagtcccgcccctacgtctcgccgtcgctgctcgtccgcagcctgtggtcgccggcggccgtcgtggccgacgtccagtgcggcgagggccctggaggggcggcggcgctggacgggatcgtccgcggcgagctcgccgccacggccatggacgtgctcggcgtctggctcgagcactgcgccggcggcggcggcggcggggagatggaggcggcggagagggagcggatggtggcgagggacaggaaggtggcggcggcggagctggaggtcaacctggcggcgaacctgccgaggatgttcgacgccggcgtcgccgacagagtcgtcgccgagatccgcaaggcgttcatgggaagctaattaagcattttttttgcatggctctagaggtttctctcgccaccacatccatccgcttattatctttggatatatatttcttttttttttacgtaaggagttcatttcggtatttactttcaagaagctagagctaaactaatctttgtagatttgttttgaagataggaa

SEQ ID NO: 76560 - DNA, 177 bp, Oryza sativa
  Clone ID: PAT_MRT4530_76544C.1
atggcaaagcgtgcttcgaggatcgtaaccaagaaaaagaaaaaaatataccaccacccacacgacgacatcgccatcacacaaggccaggagaaggctaacaccggaccggctgccgctaagcgtgaccgaccgccactaggccaacaaagggacacagacgaggtcgccacctag

SEQ ID NO: 76561 - DNA, 163 bp, Oryza sativa
  Clone ID: PAT_MRT4530_76545C.1
gcaagggagaacgccacaagttggggcactgttgcgagaaaggcaatggaaagatgttgcactgagaccctggatggagcgcagtgggatgactgcagatgccagtgcaatgcacactgaaaggaggtatgtggtgtggcttggaagccatttgcatgttggg

SEQ ID NO: 76562 - DNA, 1899 bp, Oryza sativa
  Clone ID: PAT_MRT4530_76546C.1
atggcgggatcgcagctcaacgttttggtcaagctcgaccaggccaagacgcaatggtaccatttcatggcgatcgtcatcgccgggatggggttcttcacagacgcgtatgacctcttttgcatcgcgctggtcaccaagctgttgggtcgcctttactacaccgacatcaccaagcccaacccagggacactcccgcccaacgtgtcgtccgccgtcaccggcgtcgcgctctgcggcacgctcgccggccagctcttcttcggatggctcggcgacaagctcggccgcaagagcgtctatggattcacgctcatcctcatggtcgtgtgctccatcgcctccggtctctcgtttggccacacgcccaagagcgtgattgccacgctctgcttcttccgcttctggctcggcttcggcatcggcggcgactacccgctcagcgccaccatcatgtcggagtacgcgagcaagaagacccgcggggccttcatcgccgccgtgttcgccatgcaggggttcgggatcctcttcggcgccatcgtcgcgctcgtcgtctcggccggcttccgtcacgcgtacccggcgccgtcgtacgcccagaaccccgccgcgtcgctcgcgccgcaggctgactacacgtggcggctcatcctcatgttcggcaccatcccggctgggctcacctactactggcgcatgaaaatgcccgagacggcgcggtacacggcgctcgtcgcccgcaacgccaagcaggcggcggctgacatgtccaaggtgctccacgccgagatcgaggagcggccggaggtggtcgagagccaggtggtcgccggggagacctggggcctcttctcacggcagttcatgaagcgccacgggatgcacctcctggcgaccaccagcacgtggttcctgctcgacatcgccttctacagccagaacctgttccagaaggacatcttcagcaaggtcgggtggataccgccggcgaagaccatgaacgcgctcgaggaactctaccgcatctcccgcgcccaggcactcatcgcactctgcggaaccatcccgggctactggttcaccgtcgccttcatcgacatcgtcggcaggttctggatccagatcatgggcttcttcatgatgaccgtgttcatgctcgcgctcggcgtgccctacgaccactggacgcacccggcgcaccacaccggcttcgtcgtgctctacgcactcaccttcttcttcgcgaacttcgggcccaacagcaccaccttcatcgtgccggctgagatcttcccggcgaggctccggtcgacgtgccacggcatctccgccgcgtccggcaaggccggcgcgatcatcggcgcgttcgggttcctgtacgctgcgcaggaccagcacaatcccgacgcgggatactcccgcggcatcggcatccggaacgcgctcttcgtgctcgccggcacaaacttcctcggtatgctcatgacgctgctggtgccggagtccaagggcttgtcgctggaggagatgtccaaggacaacgtcgtcgacgagaccgcccaagaagcgatcgcccaagcgtgatgtcataaacatgccgtctcgacgtgagtgactgaaaaaaaatgtatgctttattactctattggtgtgattacttaatctagttttgtatacttttgtagtgtctctccttttacagttgtggatttgtggggtttctctttctttctttttttttggttgaaacaattaaacttgtttgtgagattttgtgaactttccctgcaactgatataaatggcatacattcatttcaattgtattgtaaatggcgtgagcggctttgcaaaccgctaataatattgttacactttcgttattttcaattgcccc

SEQ ID NO: 76563 - DNA, 521 bp, Oryza sativa
  Clone ID: PAT_MRT4530_76547C.1
aactcattaactcaatagctatgttatatttacacgatataatatatgtggaaggagattaattattactagatacattgccaattaaaccagttgtacatgatttgaggcaagattgcataggtaataaaacatgtagtgcatgcatctggcagccctgttgtaaaaatattcaaaagtatactacaagtcacgacaagattaaatagaaaagttcgtataatataactttttagtaagacgaatgatcagacataataataataataataataataataataataataataataataataataataataataataataaatcaacggtatgatttattttatttaagaaaacaaaacattcatgaaactttttggctgcgaagaagaatatataaattggcgtttttttccccatcatgtcctagtacgtcagccggtgcagatgggcggtggatgaggcggcggctggttgacgcgaggaagacgacgcagggcagcgcacgcgatgtcgtacaccct

SEQ ID NO: 76564 - DNA, 471 bp, Oryza sativa
  Clone ID: PAT_MRT4530_76549C.1
atgctccaccaccactcaacctttgctgatatgtgggacccctgcaccggcgccccccgctggcaagccttcgtgcaccgaagaccgcgccacacccaccggcagctcctcctcgcaccaagcgcctctcgcgccaagccggcctccatctccgccgcccgtgcctcttgcctagccggcctccgctgccatcggccgcgcctctctgcaccaagccggtctccgacccctcctccatacgctgccgtgccggccagatgcagccatctgccacgccctcagctagccgtccgaggtcgccatgcctcctcccacaccaccaccgcagccgttgctgccgacggccaccttgccgccgtccagccgctacagcgaccgtcgccacaagctccgtgccgctgcctccgccgtgagtgcgccccgttgccacagcagccggcagccgccactaccgtcgaccagccaccgtga

SEQ ID NO: 76565 - DNA, 609 bp, Oryza sativa
  Clone ID: PAT_MRT4530_7654C.1
aaggaaccccccccttttttacttatgcaggggttttttttatgatccccccccaacgggggggggggtgaagaaactttagttagcatttaacatgatcatttaaattttttaaggccacacccttaacctgttcaaaaaaagggaaaaaacgaaaatgggctttttacccagcatttttttttttagggaagcaaaacccctttttacggttttcgtttttttttgaaaccctcaaaactaaaaaaaatctgggcgttttgtaactgcagctggggggcctttttaaggaacaaaaaaaaaaacctggtggttttttttaaacttttaatagaaaaactttttgggggcagcccccttgacgttgaattccataaaaagctcctcaaacaaaacggccatttttggttttgaaggatgcaaaacggcccttgcacaagtttggtttttaagggtggggtttttttccgctgttggtggcggatcctcctgcataagaggggggcctgctgttttgaatccccctcggccttgttagggactacggacccaaccttatgaccttccctggaatatttgcctgcccccaaaatggcatgaccaccgggg

SEQ ID NO: 76566 - DNA, 534 bp, Oryza sativa
  Clone ID: PAT_MRT4530_76550C.1
atggaggcaaatctagccccctcgtggccaagtcgggagggagcggcgccggccgcgccacttcaaaggccggcggaggagatcgagttgccgttggaggaggccgtggcgcaggcggaagaggcggacgaggtgatggcggcggggctgaggagcggcggcggcgcgtatggaggaggggtcggagaccggcttggtgcagagaggcgcggccgatggcagcggaggccggctaggcaagaggcacgggcggcggagatggaggccggcttggcgcgagaggcgctgccgatggagggaggccggattggcgcgagaggcacgtccggtggaggaggccggttggtgcgagaggcgcggccggcggtggaggaggcgaccttggtgcgaggaggagctgccggtgggtgtggcgcggtcttcggtgcacgaaggcttgccagcggggggcgccggtgcaggggtcccacatatcagcaaaggttgagtggtggtggagcattggtgcgtcaaccgtggattcgcaggtggtga

SEQ ID NO: 76567 - DNA, 268 bp, Oryza sativa
  Clone ID: PAT_MRT4530_76551C.1
atagagatccaatatgagcttaattcggatagggatccgaataggagtcctactggccttggaggcccgagtgatggatcctatatattcgtgaggggtgtcgctggcggaggtattgcgtcaccgtgggagtacggcgaggagaacgcacgaggaggagaaggtcgagccggtgcgatcgactacttcctctacatcgacgcgcgctacttcgcaagatttccttcgacttctcagcgtcttcttccgctgcgcagcgcgtcgagtg

SEQ ID NO: 76568 - DNA, 675 bp, Oryza sativa
  Clone ID: PAT_MRT4530_76552C.1
atgtggatcctacgtgtcagcatgccacgtggggcaaggccggcggggcgaggccggactgccgccgctggggaaggagccaccgccataccagaagggcggccagagcaagcgaagcggcggcgtcggcaggtgagcgcggtggggagcggcggcccagcggacggcttcggcggcgtgggcacgctctacatcgtggcgaacggcttgacttacggtgacattgagcaggccactggtataccacatgctgatctgaaacgctgcctccagtctcttgcttgtgttaagagtaagaatgtgttgcggaaggaacccatgagcaagatatatctgaagatgacacttactacaatgacaagtccacaagcaagttggtcaaggcaaatcgtcaatctcgctggacatgttctttcaggcaattcctcctccgacaacgctactgtggctgctcatgtgggcgaccgccgtgggcctcctcgtgcagctgctcgtcggcagggtgtgcgtcgccacggggaggcactcaggcacctcgccgagctctgccgcgacgagtaccccggctgggggtgccgcgcgctgtggctcagccgagcgtcagtgggcgagcgcggctgcggcctgcggctgcggcaagcggcgggcaaacgcgaccgcaggcgggcgagctag

SEQ ID NO: 76569 - DNA, 324 bp, Oryza sativa
  Clone ID: PAT_MRT4530_76553C.1
gtcatgaaaccgaagacttcattcatagcaaatcagtattagtcggagcccaaattttgtgtttacatataattgaggtgtgattacaattcatcagcatcaggatcccaggttctaagttttaattgtacagtttgattgatgctaaaactatactctagaaatgcttaagtatcgatgggctctttcctgtcctgttcggtcgacttgaacattacttaagagttaagaggtctgtaacatcagaagagaaagctcagctagtgttctggatcatacgtctgaatctgctcatgatcttatgcctaagatcattaatttgca

SEQ ID NO: 76570 - DNA, 346 bp, Oryza sativa
  Clone ID: PAT_MRT4530_76554C.1
gcggtctgcttcgcgctctaacccacactgttggtgcatggcgtgcgacacactggtgggagtgggaggcctatcggctgccctcttctcccgctcccgacccctgtggtgctgcaggtgcacctcctgctcgggcccgttgatactccgagccggtggcagatgcaacagcccggcgggatggacttcgacgcctctgtaccccactgagagggagcacctgcaggggagagagtacgaactcacgtgtacttcagtgtgccgatgacgctaatgcggtgaccgatgatgacatcgtgaacgatggtatccatcatcaaacccctttcgatgctgaaatggatga

SEQ ID NO: 76571 - DNA, 297 bp, Oryza sativa
  Clone ID: PAT_MRT4530_76555C.1
atggagaaggtaggggttctgggtgaggagcgtggtacgccatcaccgaggtcatcaagtgcaagaggtggcaacacgatattctggtttctgctagggttccaactcgggaatggagatgatggtgtgacgttaggggtgcttagggacatccaaaaggtgaggactggcatcatggcatggggatctccagatccatcagcgggcagggaggcagcagcctcaatcggagcaggcatcggtggccaagctcggggcagcggagtcacggggcaagccagggacgccactggctag

SEQ ID NO: 76572 - DNA, 350 bp, Oryza sativa
  Clone ID: PAT_MRT4530_76556C.1
gcctaatttgattttgacaaataatacaaccattaaagaggctggggtggattaaaattatgatcgcggattaaaacaaccacctacgtggctttctttttctacgatattgtcatactgcgtaccctttatgaaagattactgtacattgctcttctgtacagggctgttttatagagcaatgctattgcgctgcgatggctctggttgaacgtctacagctgtttatgaggtgattacctttcgctaaatagccgcgatagtcatatcctgggcataccaaaacttgacgttggtttcctagtgtttgccaattcctatcgattagctgtgggccaaacccgttctat

SEQ ID NO: 76573 - DNA, 2166 bp, Oryza sativa
  Clone ID: PAT_MRT4530_76557C.1
tttggtgcaacgtaatctgataaggggagaaagaaattcaagattgtagcagcagcagcaggtgaccagagagggcatctattcttggtggtgccaggggagccaccggagtcgtgggggtgcaggtggaggtgggggcagcccgacctcgggtgcccgcggcggcgatggccgaccggctggatcggtggcgcgagctcctccgcggggcggccggctccgccggaatctgcgacgtgatcgagaacgccatcctcgtcgccgccgccgacgcgccgcaggagctcctgcgccgccgcgaccgcatctgcgagatcctcttcaccgcgccgcgcgccccgccctgccaccacgggtgcggcagcgccgccaccccgaccccggccacccccgtggaggaggacaagggcagcgtgcgccgcgtccccgagaagcagagcaaggtggacagcagcagcaacggcgccctcggcggcggcggcggccgccgcgacgacgtcgatgacgactctgactctgactccgacgacgagcgcctccgccgcgccgcggcgagcaactacggtcacaactacgatgatgacgacgaggaggaagaggaggagcaggaggcggcgccggctgaagaggacgaagaacaagagctggaccccgaggctgtggagcttgaggcactcaccaacgagatcgacgaggagtcacaggtcgtcggcgaggttctccgcatcaaggacctcttcttgcacaaggaagatcattcggatgctactttgttcgaatcactgaggaggctgcagctgatgcaattgtccgtttccacgctgaaggctactgagattgggagggctgttaatgggctgcggaagcacaactcgcagcaaattcgtcaccttgtgcgcactctcattgaaggttggaaaattttggttgatgagtgggtcagcaccactaatgttgcccttacagacaactccccgggctcttcaaaaacatctgttgtcgatgatgctgatgatgaagggcttccttctccacctctggatgaaggggcgttctttgcaacccagactactgctattcaactctctgagttctttgatgaaatggatgaagatggaaacttgagacataacaatgatgggagccttggaaataagagagaaaattatggcaggaggcctacaagccatccagctttgacaaagcaagagcctccccgtaacatgggagctgttgaaaaagttcaatccaggaggccggaattggcaaggcaagagccatcaatgaggcaggctaacccacaaacccctcaaaattcaagtttgcaagtcaaacagcaggccatgcttcacaagcaatctaagcccttgagttctgattctggacctgggagaccattaagggcagctcctcagcagaagccctttgttgagatgaaatctagactggctcgagagcaggttgctgttgaaagaaaacctgcagcgagccatgtggataaatcgaggcttcctgcacaaccttcagcaggagtcaagctagagtcggcaaagccaaagatctatgatggtttggaaagcaatagtaggctggaagcagcaaagaggaggctccaggagcgctaccaggaagctgaaaatgcaaaaaggcagcgcaccatacaagtaatggtgctgggcgacataccaaagcctaagcatcaaaatagacaacctatgatgaagtcaaggaatcacattagaagttgggcaaatggtcggcgataattctcccgtgattcttttttccctcatctgatgaatcattaccatgcctggctggtcggagcgcatatgcatgctgactcgaaacacctgaacttagttgccagggcttagaacagaacttttttgaacatataaacacctccaatgggtggtttctctttgaagacgcaagagctgctccggatgcaaatccaataagtaacacctcttgcatccggaagagtttagtcatgtctggttattaggagattgggcatgtagttcgacctgtaccggctggttactttctttctttttcttcaaaggaagctgtagataccagatagaataatcgtcaatattctcgtacattctatctgccctcaacattttacatgattcagtgaaacactcatggctc

SEQ ID NO: 76574 - DNA, 399 bp, Oryza sativa
  Clone ID: PAT_MRT4530_76558C.1
gcgattctgagtttggaacgatcgatgctgatgcacctaacctgtgagataaaggcgtatacccttaaggctgttgggatagcgaacacaattgtgatgctcccaaattgatctgatgaagatctaacttgcgcttgaaacaggtcagaagataaaaggacatctggacgccagacagcgcatatctttgcttcgcctagcacgatgacttctactgctggcactagggataaaagttatgcctggagcaccacagcttacagcaattgtgcccgcacttcatgaaagagggagaatacttcatctggggaacagcaacataacgacccttgatgtaccgagatctgttctactgaaagctgataacaagaaactgacccttgcacaagctaggtgaca

SEQ ID NO: 76575 - DNA, 571 bp, Oryza sativa
  Clone ID: PAT_MRT4530_76559C.1
ttttttttttttttttttttgaggaaaatgttgccctatgttccttgtttttttggccggtcatgttattcctttcaatgcaatccgaatattacatcatctatctcaatggcatcatgcatgacattagcaaaagaaaatgtctcggttcaatggaccttcaacatgacattcctctgtcaaggactgacaaaataaataaagatgaaacatctctatctaacaacctagagaaggaggcccagaaaattgggacctgtttgggctcaatcaccagtaatcatacagatttatcatgccaagtctcatgtttgtggacaatgagttggttttttcttgctgatatagtaccatatttcctgacatggaagttatctcaacatgctgctagtaatcctacgaaatggaattttattgcccaataaggtcatggcttcaatattgcacccaatcaatttttttctcgaaaacggtattgcacccaatcatgaactcaagtttagaataccagagtctgacatagatatatccagaattgttgggttcctttttttcccttgaaacaataact

SEQ ID NO: 76576 - DNA, 200 bp, Oryza sativa
  unsure (1)..(200): unsure at all n locations
  Clone ID: PAT_MRT4530_7655C.1
caccgccgncgcccccgccggggattcgccgccttcctcaggcggcgcagngtgccagagcaggcgtcagtcgtctcggnantcgngcgaggggtcgtggtcgctctgganatggggttgtggcgcttgagatggnggtgggcaggngccgaggttgagttcgccgtgaggtatggntcccaaccgcttgaaatnnaggg

SEQ ID NO: 76577 - DNA, 144 bp, Oryza sativa
  Clone ID: PAT_MRT4530_76560C.1
ggccactgagcagtactcacttacagctacaagagtgccctgaagaaacagaatttgcatttttggattaagcacaagagtcagatccaaacagtggtgtgctagtactagtaaaagaaagaagattgccgggaagctttattc

SEQ ID NO: 76578 - DNA, 702 bp, Oryza sativa
  Clone ID: PAT_MRT4530_76561C.1
atggcagcgcgcgacgcacatgcatatgcacgcgccccggccgatcatcgtcacgcgcccaggatcgcatcggagcaccgcatgaacttccgttgttccgctgttcgcgcgcaggattcgagccgcgatgggccacgtacgggcacctgcggggctgtggctgcgggcgaacgatcgagccgagaacgcgacaggccgatccggtcggctgaccgatggataaccaacggttggccgctcgaccaacccacttgcagagtcgcggcaagaaatggggtgagagtgaagtcggcaaaggggagaattcgttggatcggaccaaaagcggaccgaattcccgatctaaacagcgatatgagcttatcccctccgatccaacctatccgccgcccaacttcgtcatgcgtcacgcgtcaaaccgttcctaacttccgcaagctaccggcgaaaacgcccacctcacgtacataccgttcgcgccgttacgtaccggaagctcgcgttcgcgtcgcctacctgccgtgccgtcacatgcgtttccagaccaaaagcacgcatagccgcttaccctatattatccggaattccggactccgtcgccgacgcaagcgggacagcgggtcgcttcgctctcggtcgctagctcgttgcccgtcgagtcgtcgaccacttgctggtggaaagtggaaacaaccacggaat

SEQ ID NO: 76579 - DNA, 282 bp, Oryza sativa
  Clone ID: PAT_MRT4530_76562C.1
atggaggattcccctgtggcagtggccatcccctggtttgccctcgctgccgctacggctgtgctagcaggagctgcttggctgataatccgcgcatgcaaagctgatgaaagctgctgcaggctgccgccagggtcgaggggcctccccctcctcggcgagtcggtcgagttcttcgcccggagcccatcccttgagttgcttccaggaattccgcaccccctcgagagattacccaagtactatattaagtcacataaccaaattttgggacttatttag

SEQ ID NO: 76580 - DNA, 291 bp, Oryza sativa
  Clone ID: PAT_MRT4530_76563C.1
atggctgagctccacgagagcagaagaaatactgctgttgcttacgacactggaacatacaaacgcacgcaccatgacaagaagaggagagattttctattgcaatggctcatctgtgacgaggagccagtcgagagagttggagtccgggagagcccccatgagaaggtattcgagcggctaagccgggatggtgccatctccaccgtcgccgccaccgtcaccgtcaccgtcaccgccgctgccagtgttagcctcgacgttgcctgggtgtccgacctcatcaactga

SEQ ID NO: 76581 - DNA, 1779 bp, Oryza sativa
  Clone ID: PAT_MRT4530_76564C.1
atggatgggcgagacgagctgacaacgaagcccatcgagatcaagttctcgagctgccgtggcgtcaccttcgagcccaagccctcgccggcgagccccttcgccatcgccgccgccgccgccgccgcatgccctgccaagccgccaccggcggcgccgagcaccggaaggtggatctggctgcctctactgtcgtcgagccgttactcctccttctctaggatcattccggcgaagccggactgcggcgttggacggtcgcagagccgcgccagcagccacttctgcgacctcgacgtcgccggcgacgaggaggaggatgatggcgtgtccgtctttgacggccacgacgaggagatggctgtcgccgcggccgcagctgccgacgtcgaggatgatttgaaagggaagaagaagccgagcgtgtcggcggcggcggcggcggcgccggccaccgccaggcgatcgaggctcgccgtcatactgttcgaccagggactgttcaccgtgtacaagcgcctcttcgtgctctgcgtcgcgctgaacgcggcggcggtcgcgctcgcggcgtccggccatttcccgtacgcggagcggcgcgccgccgtcttcgccatgggcaacatcctggcgctcacgctgtgccgctccgaggcggcgctccgcgtcgtgttctggctcgccgtcgcgctcctcggccggccgtgggtgccggtcgtcgccaagacgggcgtcacggcgatcctccagtccctcggcggcgtccacagcggctgcggcgtgtcctccgtcgcgtggctggcctacgcgctcgtccaggcgctccggcgccgcgacgagatgccgccggagatcgtcgccgtcgcgtcggccatcctcttcctgctcgcgctctcctgcgcggcggcgttcccgctcgtgcgccacctccaccacaacgtgttcgagcggacgcaccggttcgccggctggggcgcgctcgccctgctctggacgttcgtcgtgctctccgccggctacgaccgggaggccaggtcctacgtcccgctcgccggcgccgtcctcgcggggcgcgaggacatcaggctcgcggccgccatcaccttcttcaccaccctcccgtggctcaccgtgcgccgcgtgccggtgacggtgaccgcgccgtccacccacgcggcgatcctgaccttccagggcggcgtcagggcgggcctcctcggccgcatcagccgctcgccgctctccgagtggcacgccttcggcatcatctccgacgggcggcgcacccacgcgatgctcgccggcgccgtcggcgacttcacccgtggcctcgtcgccgacccgccgacccacctctgggttcgcggcgtccacttcgccggcctcccgtacctcatcggcatgtaccggcgggcgaccatggtggcgacggggtcgggcatctgcgtgttcctgtcgctgctgatgcagccgagcacgacgacggcgacggagctgtcgctggtgtgggtggcgaagggcgtcgaggcgaactacggcgaggagatcagggcggcggtggcggcggcggcgggcggcaagagcatggcggggcgggtggtggtgcacgacacggcggtgatggggcggccggacgtgcgggagctcgccgtggcggcggcgcggcggtggggcgcggaggtggtggtggtgacgagcaacccggaggggagcagggacgtggtgagcgggtgcaggaaggccggcatcccggcgttcgggcctatatgggattcatga

SEQ ID NO: 76582 - DNA, 327 bp, Oryza sativa
  Clone ID: PAT_MRT4530_76565C.1
cccacgcgtccgcacgcgcacacgacacgacgcaccaatggcgctcgtctccgcctcctcctccaccacgcgccgtctcggcgctccccgtgctcctcagttccttctccttactaagtgggttcattaataacaactctatgatgatgatactgtccttatagatactatttattttgtgacaacagtaattttttttaaaattaattaataattatttagttatatttattagtaatattttaaaaaaaattattaaatttattgaataattatattatataaattatatatcttaaataaataatatatttataataatatata

SEQ ID NO: 76583 - DNA, 1279 bp, Oryza sativa
  Clone ID: PAT_MRT4530_76566C.1
agaagaaagttatttcatcataggcgtcactttgtaaacacttcaaaattggtttttaatgcgaatttctttctatcagcctggcactattatcgaacgtcagaacagacactcgtttgatattgcaggaagccaaatgaaatccagtcggacaacaacagagagtaactatcgagagatcatgatgtcacatatcaaaaaccgtttcaagtcggtacacattgcaagaaatgccaacacctatccaacaaaatacagacgactgccaatttgatgaaacacagagtatatcacaaactgtaatatgttgggcttgctatccccaatctatggacatcactaagctcgtagattctgagcctcctgaagtgcttcctgcagattctttacggcgctgtcatagtacacgaagcccatgaaccagaactcatgattatcaacggaaaccacctggatgtatttctcagatgcatttgttctgctcgttgaaggattcactgatctcagttgggtgtggggaatgacaaccttatagtagctccactcatctttgtctccaaccttgtaagcaagtggattatcgctacagaatgccagctttttattggacaggtatagcacacccatgacaggaccagcagaggttgacagataacatgcatatggtttcttcagtttctcgtcagggaggacatcaaatgtttgatggaagattttatcatatccaccttctgctatgactttggtgatctgggaaaccctgcccattgctgcatctgtaatgcttggtccagttttcaagtgttgccagaagttgccggtgagggtctccgtcttgcgagccgcctctccaaacctcttccccatcttgccgagaacatccttcaccgtatccattgtattcttggaggcgggcgcgacgccgccggcgggtgaggagacgtaggggttgcccgagtagggcggcgcggaggaggcggcagcgtggtaggacggaggggggggcggggccacgtcctccggcgagagcctcgggtagtgcgcgtagtccgacgctgttgctgcggctgcgccggtcgcgggggccggcgccgccgtggcgtggtctcctccggcggcggccggcgggtgcatgtcgacggcggggaggtggggcctactggtcagacggtacagctgggcgccgcgtcgtgctcgacgtaattcctggacccaacggacgcttcaggtggttgccttttttttcttttctcccctttttttcttttcgagttcgtgc

SEQ ID NO: 76584 - DNA, 501 bp, Oryza sativa
  Clone ID: PAT_MRT4530_76567C.1
cggccaaaatcagggccccctttttaatatggaaccatggccccaggggggcaactggggaaaaaggaaaacaaacggggtttatagacggaactgaaacttgattatacagttggccacgactcctaactaaagcccctatgacggggatacatatggacaaaagttttgaccccggaaaaaaagaccaagttcccctacagggaaagctagctagaagctatctcatggcagggaggggggccaaaaaggggcccaacttgacattggcacctggaaacaaaaacttgatgcaaatgggccccctggcccccatgagggtcagcatggacagaaagatcgagcccaccccgtccccgaaaataaccccccaccccagcgccggggaaagcatccgcccggggccggggtccattttttcccaaagggaccccaccaggttgccgatgcacatgccgacgggcacccccgggggaatgaaaaaggggatggccatcccca

SEQ ID NO: 76585 - DNA, 1206 bp, Oryza sativa
  Clone ID: PAT_MRT4530_76568C.1
atggcggcacgcacgcggccgcaggctcaaggcctcgacctccctctggcccgcgcgctcgtcctcctcgacgcgccgccccatccacgccatcgccgctgccgcgcctcttcgcgccccgtgccgccgcatgccgtcacgtcgcctgtcgtcgtcgctcgcggcgggccgggcgtggcgttctcgtttgacggcctctgcgacctcatcctgctcatggccgtcgtcgtcgacatcagcaacggcggcgccaccgttgccgtcctgtacaggagggagagggagttcgccatagcccgcacgggcgagcgctcatggcgtctcatcaacaacaagctggacagaatcgtcgacatggcgaggcacggggatggcaagctctatacggtgcacctctccggcaaggtcgcgcgctggaagttcaactgcaatgtctgcaggtcgccgaagattcttgagtcggtgctggtcattgactcgccctaccactacgtcgtcaaggcggacggcaatggcaatgccatcatcatgtctcgggaatacgaacacgaccaccgcgaccgcgccagcgagtgctgctacctcgccggagcaccgcgcggcacgctctacctcctcaagcgggtgtacaagcacaagcagggcggcggcggcggcggcggcggcggcggcacctcgagccccggggtaattcggatgaccataatagttgggggggtcgtcatcgatccgtcgagccaccatgccaccatcaggtcatcgctaatccctcatctttccatcacgccgccaccagccaccgggacccctcgcacccgcaggtcactgatcccgcacgccaacaagatcaatcaacggaagcagtggcagatggcactgggcgtgcaatggcaggtgtgcacgaataagatcatgtgctatgactatgcaaattcatgccatatgactcatctccaaactcatcttaatggtggtgaacagtggcacttcccttatcggttccatgacaatcgtgctgagttctggcaccatgtcaccatgaactctcttcagtggctcctgtggctgttgttgcgattggtgccattcttgtgcccggacgcagtgcataccaagaatttcatggagggaactcttttgcagtacgggggacatgaggaacttcaaatggttcatgagatggagctgctgactccctactgctga

SEQ ID NO: 76586 - DNA, 2680 bp, Oryza sativa
  Clone ID: PAT_MRT4530_76569C.1
atgaggatgatgatgatgatgatgattagccaccctacctcgggcgtgatcttcttccgtcccttggagaggtcgaccttccgctcgagcgtgacggcgccgaacgacccgtactgcttcccacccttcatcgccggcggggcgcgggtgggcgccgaggccggcgcggcggacccggacgcggcgaggcaccgctccagcgacgacgccgcgtcggaccggccccaccccgcggccggggagggcgacgcggcgcccgcgcccgcggaggaggcggagaccgcgaggcgcgggggcggcgcgggccctccggcgcgggggtgcggggaggcggaggcggaggaggccggtggccgggttgggggcggcgcgggtgcggccacaccagcgccccaatggcttcccccctcgccgtcttccaccccgcctccgccaccgccgccgccgccgctcgccgtcaccaccccccgcgcccgccgcacctgcacctccacctcccgctccaccaccagccttcgtcgccccgccgcaggttcgctgccgaggtactcccgaacccctgtactcaaccctcgtatcctccgtgaaatggacgagcggctttccgagtgtgacgcgttccgttctaggaccccgcagttcgcggtcggcggtgctgacggtggcaccggcggcggcggcgggaggagggcgaggggaggcggtgacgtcgatgtcgccgcggtcggcgcggcgctgcgggacgccaggacggccgacgaagtggagaccctggtgaagggcttcctggacgacggtggcggcggcgaggagcacctgccgctccaggtgtatacctcggtgatccgggggctgggcaaggagaggcgcctcgacgccgcgttcgccgtcgtggagcacctcaagaggggaagcgggagtggcggcggcggcggcggcgtcaaccagttcgtctacaactgcctgctgggcgcggtcaagaacagtggggaatttgggaggatccacgatgtgcttgcagacatggaggcacagggggttcccccaaacattgtgacattcaacactctgatgtcaatctatgtcgaacaaggcaagattgatgaggtcttcagggtgtttgacaccatcgagggcagtggcctggtgcccaccgcggcgacatactcgacagtgatgtcggcctacaagaaggctggcgatgcattcgcggcactcaagttcatcaccaagctaagggagatgtacaacaagggtgaattggcggtgaatcatgaagattgggaccgagaatttgtcaagtttgagaagctgactgtccgtgtctgctatatggcgatgcggcggtctcttgtgggtggtgagaatccagtaggtgaggtgctgaaagttcttcttggcatggatgaagctggggtgaagccagacaggagagattacgagcggcttgtgtgggcatgtacaggtgaggagcattacaccattgccaaggagctgtaccaaaggatccgtgagcgtggtgatggcgtgatcagcttatctgtgtgcaatcatctgatttggctgatgggcaaggctaagaagtggtgggcagctcttgagatttatgaggatttgttggacaaaggccccaaaccgaataacttgtcgtatgagctcatcatgtcacatttcaatattctactcaatgctgcaaagagaaggggcatttggaggtggggtgtaaggctgcttgataagatgcaacagaagggcttgaagcctggaagcagagagtggaatgccgtccttcttgcgtgttctagagcagctgaaacatctgctgcagtggatatatttaagagaatgatagatcaagggttgacaccggatgtagtttcttacggagcgctgctgagtgcgcttgagaagggaaagctgtatgatgaggcactccgagtttgggaacacatgtgcaaggtaggcgttaagccgaacctacatgcatatacaatcttagtatcaatttacattggcaaggggaaccatgctatggtagattctgttcttcgtggtatgctgtcagcaaagatagaaccaactgttgttacgttcaatgcgataatcagcgcatgcgtgagaaacaataagggtggctctgcttttgaatggttccataggatgaaagtgcagaacattgagccaaatgaaattacatatcagatgttgattgaagctcttgtacaagatggtaaacccaggcttgcctatgagatgtacatgagcgcttgcaaccaagggcttgagcttcctgcaaaatcatacgacactgtaatggaggcatgccaagattatggttccctcatagatctaaattctttgggtcctcggcctgttaagaaagtggaacccatcaggatagagaacaagttttcgagtagttattatgttggggatcttcccagcagcacaaaacattttggtagcactggaacatctagtttatatagatacagaacggaaaggtggatcatgtagcattcggccccctcttttttcgtgaacacttcaaactcactccaagtctccaacattgagaacacactgatatttgtttgtaagttgcctaacttgtaatttgtaaacattcaatcattatacagtagtgaatttgttatttgctttaaaaaaaaaaaaaaaa

SEQ ID NO: 76587 - DNA, 243 bp, Oryza sativa
  Clone ID: PAT_MRT4530_7656C.1
atgcataggatggtgaagctactctgcacgctgctgctggccctttctctcacggcccactattcggatatgtcgatgaaggtgtcggccgattgtcagagcgtcaacgtacccggcccctgttctcccacaacgtgcgatgataactgcaagtcgcaaataggtgctggggctgttggcgagtgtacgtccgggggatgccaatgcaccttttgtactctccctcctccaaagaagaactga

SEQ ID NO: 76588 - DNA, 222 bp, Oryza sativa
  Clone ID: PAT_MRT4530_76570C.1
atgggtataaatacaagccccctgggaggagaggggacgagccacaagacacaacatacacccaagccaatacgccgccagatatcgacattagagtctagacctaccccatccggtgtctacggagaccggcaagaggaatctagcgccatctctgatctcgacgggttcatattcgaggaggaagactgccctgtcgtcgactacgagttagttatctag

SEQ ID NO: 76589 - DNA, 1581 bp, Oryza sativa
  Clone ID: PAT_MRT4530_76571C.1
ggacagaagattcatttttccaattgtgcactaaccacatgttacaaagtgctaagagaatagagatggcatcgatccacgatacagaaggacaaatcttgtttcatagtaagacacataactacacatttctttgcaaatggcatcgactcgtttattattattatctgttaagaggacacagcaatatgacatagtaaaacgtaatgaaaagcactataggatcgatcaaacagcaacactccttattcctacctcaaggaaacaccgatggttaacttgagcccacctcttctgtgacagccacaatgtatcagtttctaggtaataatgcaaccccaatctcccaagaaccaaaccatatggtagccaattctatggctgctgcttgggatcacggtacccggcatcgacgaggaccttctccttcttggcaagctcaatgtcgttatcaaccatcatctcgacgagctgctggaacccgaccttgggcttccacccaagctccttcctggccttggttgcatccccctggaggctgtccacctcggcggggcggaagtacttcttgtcaatgactacatgatccttccagttgagccctgcatagccgaaggcggcctggaggaactcctcgacggtgtgggactcctcggtggcgacgacgtagtcgccgggcttgtcctgctgcagcatgcgccacattgcctcgacgtagtccccggcgaatccccagtccctggcggcggagaggttgccgaggaagaccttggtctggagcccgaccttgattcggccgacggcgcgggtgatcttgcgggtgacgaagttctcgccgcggcgtggggattcgtggttgaagagcacgccgttgcaggcgaagaggccgtaggcctcgcggtagttgacggtgtaccagtgggcggcgaccttggcggcggcgtagggggagcgcgggtggaagggggaggactcgctctgcggcggcggcgtggagccgaacatctcggaggaccccgcctggtagtagcggatgcgcttgctggcgaggcgcacggcctcgaggaggcggagcgcgccggtggcggtgacgtcggcggtgtagtcggggacctcgaaggagacggcgacgtgggactgggcggcgaggttgtagacctcgtcggggaggatgtggtcgagcgcgcggcggagggaggaggagtcggagaggtcagcgtagtggaggcgcatcggggggcgcggcgtcgacggctgggagtgcgggtcgtggtagatatggtcgaggcgctgggtgttgaagttggaggagcggcggatgaggccgtgcacctcgtagcccttgccgaggagcagctccgtcaggtagctcccgtcctgccccgtgatgcccgtcaccagggccaccttccgcggcggcgcgagggagggcggaaccgacggcggcgcggcctcgccgttgtcgccggcggcgccgccgttggagtgctgcgtcgtggccatttcaacctgcttagatctggtgggtgggggacgaggcgaggcgaggcgaggcggacgcgtggtcgacggggattccgg

SEQ ID NO: 76590 - DNA, 369 bp, Oryza sativa
  Clone ID: PAT_MRT4530_76572C.1
atggcgcgtcaccggcaccgcaacgtcgtgtttgccttccaccgtttccaccaatcggcatacgccggcgactccaacggcctcggcaagcgactgcggcagcgctctcggcagcggacggcggcgcggcggcctcagcaagggacggcattggtctcggtagcggatgacggcggcgtcggcagcgaacgacgacgcggcggcctcggcaagcgacggcagcgcctccagggccgcccgcttcatcacaacgcccccgacaccctggcggaccacaagatcgtcaacgccttgaacctccttgtccaggacgtgagccgtgcagcgcctgtcggtgtccgcctgacggcggacggcctggccgcctag

SEQ ID NO: 76591 - DNA, 317 bp, Oryza sativa
  Clone ID: PAT_MRT4530_76573C.1
cacgaggttttgaaactaaaccggcaagagaactgccaattatatttcaattaagcaggagtaaagaacccagacaggattacagaaaaagaaaaatacaaccacttggcgagtagaaactcgccaagtacctcaaccgtggccggtacaaaccacacagcacacggagcactacacaacttctagccaaactaccacgacggaatccaaagacgaacatcgacatcgagatgctgaagacagtggcacacgactttgacatccacaaagcgcatgtcatcgttgccgagcttgccgtccaacgaccaagcagcttc

SEQ ID NO: 76592 - DNA, 202 bp, Oryza sativa
  Clone ID: PAT_MRT4530_76574C.1
cctgctccacgtgctcgccagaaccgccggttcagaggcgtcggattcaccggttttcaccaaaaactgcccggaacctctttctcttcacttcgaggaggcctacggcttctttggtgaccttgagggtgccggtgacccgtgctgcgatcttatcgaagattggttgaatatccgtcttgcgcatccttccaagaagtag

SEQ ID NO: 76593 - DNA, 417 bp, Oryza sativa
  Clone ID: PAT_MRT4530_76575C.1
atgtgcacgaacgggtgcgggttcttcggcagcgaggcgaccaagaacctctgctccaagtgctaccgggaccaactcaaggaggcggcgtcgtcagcggcggttgccgccgcggcgcctgacgtcgcgaacaaggaggaggaggcgagcacggccgccgccgccgccgacgagcagctagcgctgtgcgcgagcagctgtgggttcttcagcagcaaggagaccaagaacatgtgctccaagtgctaccgcgaccacctcaaggcgacgtcgccggccaccgccaccgcctccactcccaacatcatcgtccccatgactccggccgccacggcgccgacgtcgtcgctcaaggggaaggaggaggcaaccgccgccgcatcatcgtcgacggcgccggcgaagccgaacaggtaa

SEQ ID NO: 76594 - DNA, 297 bp, Oryza sativa
  Clone ID: PAT_MRT4530_76576C.1
atgtttcattacaggatagcaacataccaagctggggggcttgtatttctgcttagtgttttgtctgcgctaccgggcgccacgcacacaggagatagagagctgccctaagaacaggatcacaagggccgttccactgatgtttctggaaaggaggggaccgattgaggagatatgatgcctactaatgactatgggcgcttcgatccgactccagggtgatgcaaggacaactccaagcttatacccagctaatgacactcacacttgctgcatctacatgctcactacatggat

SEQ ID NO: 76595 - DNA, 918 bp, Oryza sativa
  Clone ID: PAT_MRT4530_76577C.1
gtaaatctatgttcatggtgcttaacctcaaaacgctttgaaacagaagcttatgcaaagattgatttgagaatccaaaatagagccctacttatgacacatttgcacaaattttacagcaaagctcatgtaccttgggtaaatcttatttggtcctcttattacaaggacacagttcctcaccgtttatacgccttcgccacgccggccgtccacgggaatgattctattgcacaacacttggccagaggcccccaagatcaattcttccttcccctctcgcagcaagcgtttgatgaatatatggacatgcaagaaaatctccaatcccttacccttccggaggttgatgattcatggacattcgtttggggatcagggaaattcacttcgcggctctgttacaagctcagttttctggctctcactcccccacctactatcaaatggatatggcagtccaaagtcaatatgaaaattaaggtctttgggtggctcttcttcatggacagggttaatacaagggatctccttgatagaaagcactgcgcgccacccaatacttcagtcctttgcctctcttgctcagctaatgccagagaaactagagatctcctgttcttcctttgtccttttagtgcggcttgttggagtcgtctgggatggacatggaaccctaacttggattttcatcaaaggatccaggctcaaaaagtggctgtcttgcatccttgctttatggagctattcttaattgcctcatggaatatctggaaggagaggaatggacttatcttccaaggcatccagccctcagtgcaaaactggttgatgaacttgaagttagatttgagcttacatttaattaggctcaaagaatgttacaggcccctagttcaatcatggatagatcagctg

SEQ ID NO: 76596 - DNA, 285 bp, Oryza sativa
  unsure (1)..(285): unsure at all n locations
  Clone ID: PAT_MRT4530_76578C.1
attaaccgattagttgtatntatatgcatgctgcctgatgatgatgnttanatatntatattanatgtgatgngatgatgttctnggatctccttttgttattcttnntgttcgatcagtcgatgagcttcgcggaaggatcatatgtgtgtgttgctggtgatcgtttcatgtgtaattatgtagtttaatttaatcccctcaaatttgttactctcttctatctatgcgaacattgctacgtacatatgtatatatatatgttctttaaaaaaaaaaaaaaaa

SEQ ID NO: 76597 - DNA, 1548 bp, Oryza sativa
  Clone ID: PAT_MRT4530_76579C.1
cccacgcgtccgctcattggccagctcgttaattgattccatcgtttaatttccgccacgaattcgagctagctctgcccctccatctccatggtcgccatggagaagaagacgaagctggtggaagaagaagatggctgctactactacgactacggcggctatggcgatggcgtcgtcgacgacgaggggagggcgacggagctgcggccgatggcgctgtcgcggccgcacacgcaggcgttccacctggcgtggatgtccctcttcgcgtgcttcttcgccgccttcgccgcgccgcccatcctcccggcgatgcgcccggcgctcgtgctcgcgccctccgacgcctcggcggccgccgtggcctcgctctcggcgacgctggtggggaggctcgccatgggccccgcctgcgacctcctcggcccgcgccgcgcgtccggggtcgccagcctcgtgtgcgcgctggcgctcgcgctcgccgccgtgttcgcgtcctcccccgcggggttcgtcgcgctccggttcgtggctggcctctcgctcgccaacttcgtcgccaaccagcactggatgtcgcggatcttcgcgccctccgccgtggggctcgccaacgccgtcgccgccgggtgggcgaacgtcggcagcgccgccgcgcaggtggtcatgccggtcgcctacgacgccgtcgtgctccgcctcggcgtccccgtcaccgtcgcgtggcgcgtcacctacctactcccgtgcgccatgctcgtcaccacgggcctcgccgtgctcgccttcccctacgacctcccgggcggcggcggtggtcgctgccccggcggcggcggcgggcggaggaggagcttctgggcggtggtgcggggcggcgtcggcgactaccgagcgtggttgctgggcctcacctacggccactgctacggcgtggagctgatcatggagaacgtggcggcggacttcttccgcaggcggttccggctgcccatggaggccgcgggcgccgccgcggcgtgcttcggcgcgatgaacgcggtggcgcggccggccggaggggtggcctccgacgaggtggcgaggcggttcgggatgcgcgggcggctgtgggcgctgtgggccgtgcagagcgccggcgccgcgctctgtgtgctcgtcggcaggatgggcgccgcggaggcgccgtcgctggcggcgaccgtggccgtcatggtggcgtgcgcggcgttcgtgcaggccgcctccggcctcaccttcggcatcgttcccttcgtctgcaaaaggtcgctgggcgtggtgtcgggcatgacggcgagcggcggcgcggtgggggcgatcgtgacgaaccggctcttcttcagcgggtccaggtacacggtggaggaggccatctcctgcaccggcatcaccagcctcctctgcacgctccccgtcgccctcatccatttccggcgacagggcggcatgttctgtggcccatcggccacgatcgacggcgacggcgatgttgatgacgatgatgattacatgcttctgaaatga

SEQ ID NO: 76598 - DNA, 274 bp, Oryza sativa
  Clone ID: PAT_MRT4530_7657C.1
accaatgcagatgcatccatcagatcaacgaagtgcattgagtggaacaacaaaatattgtacaacaagcatgggtacagtgaaggagatatcaagcaagtgcactgtgcacagctattggtgcagcattcagtgcgtgctcctcatcagagataccaggaaaactacttacatgagtaagccaatcagggggggggggggggctttgcctatctaaattaccaccaaaataatcattagaaaaggagaaggtctttgtttagcgggtccaagg

SEQ ID NO: 76599 - DNA, 1356 bp, Oryza sativa
  Clone ID: PAT_MRT4530_76580C.1
atggcgcggcggagcaaaggcggcggcgcggagggggacggcatgcggatgcaggtggtgtggcggaagggcgcggtgcggctggtgctcgtctccgccatcgcctgggcgctgctcgtcatcctcgccctcgccttccacctctggtcctgcaactccgacgtcccctttctctcaggctgccccatacctgttgcagatgatcctgattctattaccattccaaagagaactcccaacacaatcgtgaacaaattgtcctacataacagttgacaaacaggacaaagatccatcaccgctgttcggaggacgtcaaagctggaaacagagggaggacagcttcaaactgaatgctacaatgaaggcaactactttcctttattgtgtgcactgtggatttatgaaaaacagtggtgcggacatggatgatgtcgatgtcaagtacatacagaaatgcaaattcgtggttgcctctggtatatttgatggttatgacattccccatcagccatcaaatattagcattcgatctcaaaagttgttctgcttcttgatggtggtagatgaggtatcccttgattttattgaaaagaataccactgtcaagtttgataaggcaggagggaaatgggtaggcatatggcgacttataactttacaccgccttccatttgatgaacctagaaggaatggaaaagtgccaaagatattaacacacagactatttcctcaagcttggtatagcatttggattgatgggaaaatggagcttatagtcgatccgttgcttattcttgaaaggtatctctggcggggaaaatacacctttgcggtagctgtccataagcatcataagagcatttatgaggagggtgatgcaatcaaacggaggaagagatatgcccggcctctggttgatcttcagatgaagatgtactatcatgaggggatggagccttggaacccaaagaaaaggatgcctagtgatgtgccagagggggcagtgctgatccgggagcacacaactatgagtgatttgttcagctgtctctggttcaacgaggtcaatcttttcacgcctcgcgatcagctcagctttggctacgtggtgtataggcttggagatgctcttaaattcttcatgttcccaaactgcgagtacaattcgctgttcattttgcacagacacacaagggaacactcatcaaaagtcgagtgggctaaaacaatcgatgagatcgtgaaaaagggattgaaggagagcaagggaggattagggctgtggactccataccctgcagacctgagctctgtcgaactccccagtgtaaaaagaacttcgccagcaggctaa

SEQ ID NO: 76600 - DNA, 594 bp, Oryza sativa
  unsure (1)..(594): unsure at all n locations
  Clone ID: PAT_MRT4530_76581C.1
ccgagacgagacaaagatcatggcgactcccaaaccctaaatcccgctctcactggagagcagaagcaagtaagaggtggagcaatggcgcggcggagcaaaggcggcggcgcggagggggacggcatgcggatgcaggtggtgtggcggaagggcgcggtgcggctggtgctcgtctccgccatcgcctgggcgctgctcgtcatcctcgccctcgccttccacctctggtcctgcaactccgacgtcccctttctctcagctctctgtaaaaaagacagtaaagttctgtatgcgttggactccatacgatcctcatcaaagccacttcaccgctgccccatacctgttgcagatgatcctgattctattaccattccaaagagaactcccaacacaatcgtgaaaaggttgtcctacataacagttgacaaacaggacanagatccatcaccgctgttcggaggacgtcaaagctggaaacagagggaggacagcttcaaactgaatgctacaatgaaggcaactactttcctttaatggggttggatatcttcttatcttcttaagtataatatatgatcctctgataag

SEQ ID NO: 76601 - DNA, 391 bp, Oryza sativa
  Clone ID: PAT_MRT4530_76582C.1
tattacttgtttgcttatttaaatataggaaaaagtacgaattaccccccctcccgaactatcgcggtcgtacgaattaccccctaaaccacaaaaccggacattcttcaccccaactatgcaaaccggacgaattacccccctcggaccaattcagagcggttttgtccaacgtggcgcacacgtggcaatccggtcagcttttctctctcgcggctcgcggggacggcgcgggggcggcgaggatggcgacggcggaggtagcggtggcggcggcggaggcagcgagcgcggggaggcgagtggcggggctgggcggcggaggaggcgagcggcggtgggagctcgtgctgctcgcggaggaggcgaggtggcggcggcggaagcttcc

SEQ ID NO: 76602 - DNA, 483 bp, Oryza sativa
  Clone ID: PAT_MRT4530_76583C.1
atgtactatcttatcttgattatgtggagaattaaggacggggttgttaagatcgggatgtttggtgcaacaaccaatggaaccatgcgtgatattgatgtggcacctgtgtccctcaagtccgtgacggttgggagcatagacaccgtcgactgcatcagtttcaactttgaggacaaggatgggaatgagcttgctgtcggcccatggggtggcacacttggaagggatcacacgtttgtgttgaagtccaacgagtacgtgagggaggtttcggggacgtttgggccattcgccacacaacaccttgatcgcaccgtgaattcgctcacctttgttaccagccaaggtacgatatacgggccattcggaactcctaatggcacttctttcaggatcccggtggagaaaggcagcattgttggcttttacgctcttgcagatggatttgtctctgctattggtttctatgttcgccagtaa

SEQ ID NO: 76603 - DNA, 332 bp, Oryza sativa
  Clone ID: PAT_MRT4530_76584C.1
aaaaaaaaaaaacagagatggccatgcccgcgcggggggtattaatttcatagcctcacgaaaaacacggggagctccgggcagtcgccgccgggcgggctgatcatgtagagggactccgagttcctggagcccatgatgggctcgaagctcccacgcatggaccccattttgccgtttttcccgtccatggccgaaatcccgggggggacgccgtcgcccatggacaccgcccacagagtcttcagcacggggatgtcctcgccgggcgggttttgccgcaccgggtaccccacctttttgccgttgcaggacatggtccacatggactt

SEQ ID NO: 76604 - DNA, 533 bp, Oryza sativa
  Clone ID: PAT_MRT4530_76585C.1
ttcaagtgtcaactcctctcctctcctcgcgagttcgcgcaccgcctccgccgatctccatctccgccgccgtcctgctgcttccgccgcatcacatcccgacgaacaggggggagggccgggcggcgatctccatctggcgagcagagcagagcagcggaggtgaggggatcctgcatcatgtcggatatgaaggacaccaatgctgctggacctgaaactgttggaaatcctgaccctatggaccaaactgaagataactccatgccctcagctcaagaacaggaattagcaatcaagaagaaatttggaggactaatgccaaaaaaaccaccactcatctcgaaggatcatgaacgggcctattttgattctgctgactgggctctgggaaagtctggacagcaaggcgctgcgaaacccaaaggacctcttgaggcacttaggccaaagttgcagccaacacgacaacagcagcagcgttccaggcgcttgataacacctcatcagataacgaggatggagacggtgct

SEQ ID NO: 76605 - DNA, 1128 bp, Oryza sativa
  Clone ID: PAT_MRT4530_76586C.1
ctcgtcctcccttggtcaagtgtcaactcctctcctctcctcgcgagttcgcgcaccgcctccgccgatctccatctccgccgccgtcctgctgcttccgccgcatcacatcccggtgagcatccctatccgtcacgctcacgcgcatcctctctcttagcgcgtaaaagaagaagaaatctcccgtctcgttctcgttactgtctcctccgctcctctccttgcgccgctgccaagacgaacaggggggagggccgggcggcgatctccatctggcgagcagagcagagcagcggaggtgaggggatcctgcatcatgtcggatatgaaggacaccaatgctgctggacctgaaactgttggaaatcctgaccctatggaccaaactgaagataactccatgccctcagctcaagaacaggaattagcaatcaagaagaaatttggaggactaatgccaaaaaaaccaccactcatctcgaaggatcatgaacgggcctattttgattctgctgactgggctctgggaaagtctggacagcaaggcgctgcgaaacccaaaggacctcttgaggcacttaggccaaagttgcagccaacacgacaacagcagcagcgttccaggcgcttgattaacacctcatcagaaaacgaggatggagacggtgctggtgctgaggatatgaacatcaactgacctgctcagggagtgttctgttgggaacctcatgattcaaagcagctcattgttcgtggatcgcagggaaggatatgatgtctttgatgtttccatagatatgaaaagaaatgttgtatttttcaaagaccgatgttaattcatcgcacagcttacctatatctgtgccaaatttcagcatagactaaaccattgtttgcatacggcgttgcactccagtcgtgctacggcctatttgtcaatggatatttttaaacaagtttgtattgtacaaaacagtggcaaatctacagtgttctagatgggatcatcctatgctttcagaaaaaaaaaaaaaaaaaaaatagaggtgtcaagcttataatcgcggaaacgctgacgtcatatactttttttttgggccacctaaatctaattaactggccgttctt

SEQ ID NO: 76606 - DNA, 547 bp, Oryza sativa
  Clone ID: PAT_MRT4530_76587C.1
cacgaggcaagtttgatgaacatggatgagaaccagacaagtgtatatgataccacgaaaaagattgtccttttctctaactgtcacgtgtagatgagaatcctcactttgttgaagtgatgccctcttttcccttgtactagatgcttgctcccagttttgagcataaaacaaaaacatgttctagtacagagtatataataagggtgcatatatactcagagtagggaatggtgcacatcagcacatggttcaatcattccttattgattgtctactctttgattggagtcatgcttatgatcaataaacagttatgctttcaattcagaaaattataaaaaaaaattgtgatgaaataacaaatactccacatgcattacaagtacaagtttgtttctgggagacatacaagtagtttagaatcatgagattacttaatgcttataatggcgttttcgatggatgaattcagaccaaatgagaatgaatcttgtattcttttgcactgacactttcagcaaatttcatttcttagcattctggt

SEQ ID NO: 76607 - DNA, 534 bp, Oryza sativa
  Clone ID: PAT_MRT4530_76588C.1
attcttaatcctgctttatttcacaattataagaaatatatacatacatatatatatatatatatatatatatatatatatatatatatatacatatatatatatatatacatacatacatacatatatatacatacatacatacatacatatatatatatatacatacatacatatatatatatatatatatatatatatatatatatatatatatatatatatatatatatatatatatatacatacatatatacatatatacacatatatatacatatatacacatatatatacatatatatatatatgtatacatatatacacatatatatacatatatatatatatatacatacacacacacacacatatcatgatagtaagttacttggctagagaatttgttttgaatacatcattcgcattgaggtacgactaattgattgtattagtactttcaaaaactaaaattctatcttttcagttttatatgtaataacaagttgtgcattctacagttttatcatgagt

SEQ ID NO: 76608 - DNA, 465 bp, Oryza sativa
  unsure (1)..(465): unsure at all n locations
  Clone ID: PAT_MRT4530_76589C.1
ggaagccgtggccaccttgtatttcacttgcacccgtggccgcgcctccgccggcgaatccacgtcgccgtcgccgtcgccattgccgtgagatcatcccctatctcgccgcctgtcctcttgcgattcatggcgctctcatccccgtcttctccgcccataaaatcgcggaanccagcgagctctgaggacagcgtggccatggcggcggcgccctccacttcgtgctcgtnccgctcccggcgcagggacatgtcatcccgatgatggacatggcgcgcctcatcgccggccatggcggcggcggcgcgcgagtcaccgtcgtgcttacgcccgtcatggccgcncgccaacgggcggccgtcgcgcangccgcgcgtttccggcctcgccgtcgacgtctccgtgctggaatttcccgggccggcgntggggttcccgccggtttcaaaataanaaaatgtt

SEQ ID NO: 76609 - DNA, 510 bp, Oryza sativa
  Clone ID: PAT_MRT4530_7658C.1
atggcgtcctatgtgctggatctcaggaggggcctggccgtgttcgccgggaccgggcgccccgaggaggcggtgctcaggaagaacgtcgcgtgggccgacgcgcgccgcgcggcgcttgctggagaaggagctcaggactccggcgatgatgccgtccgtagccgtaaggccgggttgttggacagcgcgatcaagttcgaggacgccgtggtggggaagatgaccgcgttgaaggagaagctcacgcgtggcgccgccgccttcgtgggggaggaggagatcgtgcaggcgctgaacaagcacgccgcgacggccgaggcggagattgcagaatcacaagcgttctctgcggtcctgttagccgatgccaaccgagcagcaattctcgtcgttgtcgtgcacaagaggccggcgccggagacggagacggagacggaggaggaggaggagccgccacgacagaggcgaggcacaggagatgccggagacagtgccgcacaagactag

SEQ ID NO: 76610 - DNA, 732 bp, Oryza sativa
  Clone ID: PAT_MRT4530_76590C.1
aaacttgttttaaatagaaactgcacaaaaactcgattgaaaatacatagcaagctctcagaccgattagcggacatgtgtgtgggcagcggcgcgacaaaaatcgctggcggctcggccggcggcgctgccagcagctcggcgtggcgaaatcctcagtttgcagacgtgtttgatttgcggctcgccggcgctgcacatcctggcgagctggtccgcctccgtgggggcaaggtggaccaccaactgcttgtcctgctcctgcaagggcgccatgatggcgcccatgtacgccaccgagccgttcgcggctatctgcagtggcacgacgggtggcgggatgaggtcgccgcagcccatgcgcggtgcatgctcggcgagggagataggacggcgacggaggcggggatggaggggaatagcgtcgtgggagtagaactaaatctcaaccctacaattaaagatgatcaacggctcagattactttctactccgagtacaaagcaccggagtaggactagcgtttttttgacaaattggtccttgcagaaaacttatttcgaaactagtccctaccaaaaactatatccagaaataggccgtcggatcagcgccaaagcggttggcgctgaggttgttcttatctgcgccaacgggactggcgctgacatcgcgccagcgtggcgggcgaggcgcgatgtggcagggcctcagcgccaatgcacttggcgc

SEQ ID NO: 76611 - DNA, 158 bp, Oryza sativa
  Clone ID: PAT_MRT4530_76591C.1
tactaatcgaacgaaagcaggaaggggttcgtcggggcggaacatatgccttccgctgtccccatggaaagcactcatacgaaacatgaaacactggggattattgcgaagataaccacatctgatccacattcactgggaccatgtgttacagttaa

SEQ ID NO: 76612 - DNA, 119 bp, Oryza sativa
  Clone ID: PAT_MRT4530_76592C.1
tagttttttgggccaaagaatggcgatggtaggaaagggattataacggataaaagagacccatgacagtgggagcgaggtgaaaagttacgtgagccggcacggaaagcgggacaagc

SEQ ID NO: 76613 - DNA, 345 bp, Oryza sativa
  Clone ID: PAT_MRT4530_76593C.1
ggcttaaacacctttctaagttctaaccaaacaaaattcaaatgtgtttttatttgaacacacaaacacatcgcttcaaacaaacttagtttgaacggaaacacaatccgttctcgcaaacatttgggtggttctgcccagcaaatccccaaattacagtagcttctacatagacacatctgctgcacgtcactggcacagtggctacaatctaggacttgtacgtgtgtgccacgtacgagaacgatgatacttactagttcatacgagcccgacacgttacgagacgcgtggcatggcggtgtatcgatgacgtgtacatgtgctttgacccgccgggtcaat

SEQ ID NO: 76614 - DNA, 306 bp, Oryza sativa
  Clone ID: PAT_MRT4530_76594C.1
atggatgagagggaggcgtcggcggcgcggtcgtcagtgcagctgtcggagttgccagacccggagaccagccgcatccgcgtggaggagaccaagcagctggtcgccgatatgcaaagcatcatcgaggcgctgctggtgttcgtcgacgccggctgctctcccgtccccgtcgacgagatccacgagatgatccgccacatgagggaggttggatgccccttggtccgccgctcgctcgatcagatacgcagggacactgaggcgctactagcggcggcggcggccctcgagcctcgaccatga

SEQ ID NO: 76615 - DNA, 327 bp, Oryza sativa
  Clone ID: PAT_MRT4530_76595C.1
atgccggcgtgcatgatccttggccggacgacaaagttgttgaagtggaaggatgttatcacatgccgactacgtgtttgggttgatataaacgtcgccgtggcgtcagggaaccagccgctagctcgtttcgccggccggggccgctctctgtccggcgaagcgctgcggcacgcgtacgcgcgcgtgccggtaggccgagtggtcatcgccggatggccccgattagttggctggatcgatcgagctttcgagcatgctgggcgtggcgtgcttgaagaagaagattgggctggaccggcgtaccgtctccgtcctgggaagtga

SEQ ID NO: 76616 - DNA, 336 bp, Oryza sativa
  unsure (1)..(336): unsure at all n locations
  Clone ID: PAT_MRT4530_76596C.1
ccatggcgaaatgcatctgcatgcaancctagcttgatcagttcactagctaactagggtttncgatttgagactctactaattcatctttcttttttccttattattttttgctttcttcttcgtagtttgtttggtggggttcgcttggggtaatgaggtggtattgggaagatttagggtttacaattgatttaagattcgattttagtaattgaaaatccatttgcatgcaacatcaatggatgcatgcttaattatgacaagaatatgatatgtattttttattgatctttgtatataaatgagtagcaatgtttcaaaaaaaaaatctga

SEQ ID NO: 76617 - DNA, 636 bp, Oryza sativa
  Clone ID: PAT_MRT4530_76597C.1
atggcgatggcgatggcgagggctagagccgctgcgtcgtggctgctcctccttgtgctcctgcacatgaggataggtgcatcgtcgtcgcagctggagtgcaagctcgagtacacgagcttggcgttgctgtcatgtcaggagaccaccccgacgaccccgactccctcctgctgcgacgctctgctctactcgctcgacatctggcctgtcaaccagcgagagaaaggcctctgctgcctctgtgtctacgtgcttgccaggcagccttccttcgatcttgccactacctacatcacctgccgcggcagctacgcggcttcggtcgcacaatggacgcaacagcttattcgaggtgttcctccccacgactgtaatgaaccatgcggcgttgacactggcgaccatccgccaccactgcccagcggcaagaagaataagacgaggaggaagaagcagaagcagcagctaggagttggggtgatcatcgccatcgtcgtctgctctctggccgctgccggtctgctcggatactgcctctaccacatcttcttcagtccagcggccaaagcacgcaggtcgcctgatcccagctcaaacaacagctctgcttcctcccgtcagcggagagcttag

SEQ ID NO: 76618 - DNA, 607 bp, Oryza sativa
  Clone ID: PAT_MRT4530_76598C.1
ttaccaccagttcctggcatctatcattccgtctatcaaacggcaattcttacaggcattgctcattacccatattgtaacctcatttttattctcgatcgtcttgtgggttgccctcacgaagtaattgtgatgtggaccttgtgctattgagccccgtctgcccatgaagaactcacgtggatgggatccaccgcgccactgttggatccaaaagtacgcacttgagcaagaagtaagtatcctggcggccgggccagctggaggaccgccggcggcaccacagcaccgaggccagccagccggcggcacagttgctccgggcgcggcgcgattccactgcacggccaaggccgggcagcgccgcgcctcgggcgccatgtcggagggtgggatcatcgacggtagctgctggggccgggatccccatttattccttctggcgtggccccgcgggctgggcggggcgggcgcgtcgccctcttgggacgtcgctctcgcggccagtgagatcgctggaatgggacacagaggctggaaaaaacaggatggagggaaggatggaaggatcatttcattttctgtcatcctgttctggtgcccgtag

SEQ ID NO: 76619 - DNA, 234 bp, Oryza sativa
  Clone ID: PAT_MRT4530_76599C.1
atggcagcggcgtggacctcgctggggctagcggcggtggccgtggtggtggtgggaatcgcaatgccagcctccgcctccgccgccgcccccgcgcagccgcccgcccccgcgccctccagcgacggcacatcaattgaccagggaattgcatatgtgctgatgctggtggcccttgtgctcacctacctcatccatccgctggacgccttatctccatacaagctattttaa

SEQ ID NO: 76620 - DNA, 1337 bp, Oryza sativa
  Clone ID: PAT_MRT4530_7659C.1
ccacgcgtccgctgccatgtctctatcgattccatggtctgttgctgaaaaggacaatctggtagagcggctcgcacgatacagacacatgcacttcttggggatgctcgcccctccttcctagtaacattcttcaccccccattttctttgtttctacttctctttccctttcttgtgctccctcccctcctcaatccgtatatataagctagctgctcgttcttgttggctccttcttcctattatttctttgtttgctccctccccttgctggttggctggctgggtcggtcgggttctttcttgatctgcatttcgccctccgccaccgggatggagaacggacacgccaagaatcttgtggccgtcatcggcagcggcaactggggcagcgtcgcctcccgcctcatcgcttctaacaccgctaagttgccctcctttcatgatgaagtaaggatgtgggtgtttgaagaaatattaccaacaggcaagaagctctctgagtccattaaccaagcaaatgagaattgcaaatacttacctggtataaagctcggagctaatgtaattgctgatcctgatttggagaatgcagtgaaagatgcaaatatgcttgtttttgtgactccccatcaatttgtggagggtatatgtaagaagcttgtgggtaaactaaggccaggaactgagggtatctccctcatcaagggcatggagattgctgttgagaaattcagtgaagcgacaattggatataagaaagacaaggaagtggcaacccgatgggctaaactttttacaacaccttacttcctggtttctgttgtagaggatattgaaggagttgaattatgtggaacactgaaaaatgtcgtggccattgcagcaggtcttgttgatggtttggatatggggaacaataccaaggctgcaataatgaggattggtttgcgggaaatgcgtgctttctctaagcttctatcccctacagtcagggacaacactttctttgagagctgtggtgtggctgacctaataactacatgccttggtgggagaaacagaagagtcgctgaggcctttgcacgaaatggtggcaaaaggtcttttgatgagttggaggccgagatgctacatggccaaaaacttcagggagtgtccacagcaaaagaagtttatgaagtcttgacttatcgagggtggcaagaattgtttcctcttctgtccacagtgcatgagatttgtattggtcagctacctcctacatcaatagttgaatacagtgagcacacgcccaacctctccatcatcaatggttctaatgcgtattactga

SEQ ID NO: 76621 - DNA, 267 bp, Oryza sativa
  Clone ID: PAT_MRT4530_765C.1
tcagacccagccgatcttatcgtagccgatctggactccagccgattcctgctctgttttcaaactcgatctccgcttccgactttgcttcgatctaatcttctttcccaacgcgtcaccctcgagaaacctcacaccgtgacttctgttttctctttcttctccggcgactcctccggcgcaaaggcgatttctaggcgacttcctcctcgacgagatctccgcccgcaacaatgtcgtcttccgccagcccatctggtgcgccat

SEQ ID NO: 76622 - DNA, 408 bp, Oryza sativa
  Clone ID: PAT_MRT4530_76600C.1
atggcgacgccttcatcgccgccagatgcgccggtttcgtccgatgcttccctctcctccgcagcttcccgatataagcacgacgccgtcgccgccggcgtccatggtttcgatgcatcccaccagctcgatcgcagtggcgccgcgacggcgggggccttcctggctcttctcttctgttggcctccgtggtcattgacggctgtggaaaagtggcagcggtggtaccgtggtagccggccggcgaggaagctcgaggagagaggaggattggccgggaggaagaggagaggagcgccacatcaccgccacgtaggacgagggccaagtcaaatcagccacgtagtcgccacgtcagctgataccgtcatccaaaccgtcgtaggatcttatttgtaccgattttga

SEQ ID NO: 76623 - DNA, 393 bp, Oryza sativa
  Clone ID: PAT_MRT4530_76601C.1
ccacgcgtccgctctctcctcgagcttcctcgccggccggctaccacggtaccaccgctgccacttttccacagccgtcaatgaccacggaggccaacagaagagaagagccaggaaggcccccgccgtcgcggcgcctgccaccgccgcgtgcacgggcgggtgcggcgatccggtgttactattctcggccgtagagttggccggagcgctcaccactgcgatcgagctggtgggatgcatcgaaaccatggacgccggcggcgacggcgtcgtgcttatatcgggaagctgcggaggagagggaagcatcggacgaaaccggcgcatctggcggcgatgaaggcgtcgccatacgttcatcgccgtcatacgcggcgatggcttggatga

SEQ ID NO: 76624 - DNA, 279 bp, Oryza sativa
  Clone ID: PAT_MRT4530_76602C.1
atatacatataaaggcatggtatttaaatatgaatgacaactttatttctatatatatcacccaaagtttcacatgttacatatgatgatatctgagctcatttttatcttccgaaccactatactgctaaaactcattacaagacaccggcaagggtggtaatggttctgggtgcaccattatacctagggtagataccatatctagatggcacgttaaaagccaacatagcttgaactggagccatattccgatcaaagtagagatcaccaaactgc

SEQ ID NO: 76625 - DNA, 398 bp, Oryza sativa
  Clone ID: PAT_MRT4530_76603C.1
agattctgctacaacgtggtgggcacaaatcctgggagaagctgcaactaccttggaaaagattatacactgtttttacttttacacattgcaacctcctgggtcaagctaacagactccaggcagcagaacacactcctcccagcttacagaacttggtgggggtgttgttccagtttctgcggctgccaagaattacggttgtatttacaatgaatcgaattaggttggacaacattgtacaatgatcacggtggggctgttaagatcgtccaagtactgtcaccgactaaagctgtcaacccggatggtgagggcgaatccgtcactgtcgtacatgctctaaatctccttctggtaattgtggagctactcttcacaaatgacctgtgatcaac

SEQ ID NO: 76626 - DNA, 369 bp, Oryza sativa
  Clone ID: PAT_MRT4530_76604C.1
atggcatcttcgcttctcgtggcgttcctcctcctgagctcatacgctgtcctctctgtttgttcctcgcgccccatcgcaggtggcgtggaggtgatctggagcactggagcagcaacgacgacgatggaagcagacggtggccagagccattgtcgccgaggaggtggcaccagcgtcgtggtgagatatttggtggccaggaggacggtgatggggatggaggtgcctagtcgcgagtcgaccatgatgaggaggttgccggaccgcgagccggttgtgtatttgcagcgccatttgcatgccaagcattggttgcttccgaaatcctataatactatacaattgagagatgtgatccccacttag

SEQ ID NO: 76627 - DNA, 314 bp, Oryza sativa
  Clone ID: PAT_MRT4530_76605C.1
gccagccacaaattgctatgacaaactctactgatattgtagatctgcacagcagattcaatgcacctgatgaagatatgatcatcgtggaaggagaatctcagtttgcactgatcttgaaggggatccccaaggtatagtgtgctagatatatcatggcacatgaagactgccacaatgtgtgaattcactcgccaggaatgcataggaggactgcatgcaatcggcgtggattcaattgaaaggctcacgaagaaagtgccatctttacgggctgagataacagatggccataacatgtcgtgagatataca

SEQ ID NO: 76628 - DNA, 446 bp, Oryza sativa
  Clone ID: PAT_MRT4530_76606C.1
aagctaaaatttgaacagtggtcaagtatacagggtatctaaagaaataggttatgcaaccatgcaaacataacattacagagcctggttagattataactatctatgaatgagagcactattaactattgatcccaactccataggtacaatagtctaacgcatgaagaaaggaatgggatcaacagcattacagacaagttctacgacggctactgacaaacaatcgttgtgacttgaaccattgattgggcgacagcttgtcggagctctgcatacggaattatatgcatttgacaaccgcacataaaccctttttgatctgtcttaataccaatttttgaagaatctctgaaaaggcgcttcctttttgttctgagaaatgacaaatattctcggcatagaaagatggtggagatactatttttgatgcaacataacgcatc

SEQ ID NO: 76629 - DNA, 553 bp, Oryza sativa
  Clone ID: PAT_MRT4530_76607C.1
actagtggatccccgggctgcaggtggatttgatatttcaagaaagattcttatggtctaaaaaatccaatcaccctgatgagtcatgtaagccgagtgatggccatagccaccatggtactctctctcttaatggatccttggagcgattttcagaagaacacatattttgatagcccgtggcatgtcatgcgcagttttttacttatgcttgttggaggaaccttggcctttttcggggtgttaacagagtatgtacttgtttcagcaaccagtgctataactgtgacaatagctggggtagtaaaagaagctgtaaccatcttggtaaaatttaaaatttgtatatatcttccaactttcatcatctatagcagaatctgaattttattgaccccttgcaaggtagtatcttaattctacctaatatttaagtgaatactgctattaataacagagaacgcttcatttgaactagaaccaggataataaacatggtcaaccattgataactcatgaaaagaatgactaatagtcttgaaccggttttttt

SEQ ID NO: 76630 - DNA, 918 bp, Oryza sativa
  Clone ID: PAT_MRT4530_76608C.1
atggaggcggcgccggcaggagaaagcgcggggatcgaagcggcggtggtgggagcggcgcgggtggcggaggacgacgggagtggcgcgaggatggaggcggcgccggtgggagcggtgcgggcggcggaggccggtgggagcaagcgagcgacggcgaacaacaacgaggcggcggctgcgagcgggaggccacgacgaagccctccctcgctggcccctctaccacctcgtctcccatctcactggcgccgccgcttccttcacgccgctgcccctcatcccttcttctctctcttcggcgctcaagagggcacggcggcaaggcgacagaaatcagcgctggatgccggcggcgacaagtgggaggctgcggcgacgctcgccgtcgtgccgccatgccaccacatcctcttccctggcggcgctgccggcggcggagggcggtgggcagctgagacggaggcgaagcgggcggccggcagcgggaggcagagctcgcctgcgcaggttgctgtgcaggttgaggtggcggacgagcgcgagcaagccgagcacggtcggcgcacgtacccggacaggtcatcccgtctggccgttcaccaccagcgctccagccgctccattccaactgctggcggtctactgccacatccgcgccgcgcgcctttccgtcggtcaccgcggcgcgaccgcgcgaatgcaactgcgacctgccctgatatttgttgccatttgctgatccgccgtccgccacccgcagccagcctcggcctctgtccccacccaccgcccgccagccgcctcgacaacgacgtgttgacgcacgtcacaccggcccaccggcacgggtcggcgtcggcgtccgaccacgacgacagcgtccccccgacgggtcatcggtcaccgccatcttga

SEQ ID NO: 76631 - DNA, 3969 bp, Oryza sativa
  Clone ID: PAT_MRT4530_76609C.1
atggcttcggagagcaaattggatctgttgttacgaactatggaggagaatgaaaggaagagggaggtggctgagaagaaaagggaggaggcaaaggagagggcgaggaaggatttctcggatctcaagaaggtgttcgaagtgcgaattcccttggtggagaagaaggtggaggagctaggcgcatccgtacagaccctcagcgacaaggtcactcacattgagggcacaatctttaagcaggagaaccctcaggaacccacagggcaggaatcgtcatggctagctggtaagcgcgatccgtctctcttcactttgaatcgctctaaccttgagtcgccgtcctctagttcagccactgcacccgtagatttgagtgctaatcttccccctatgacctgtccaaaattcgatggaaacaacccgcaaatgtggaagagcaactgtgaacagtactttgatgtttatggcattttgccgatgcactgggttaaggtagcgaccttgaatttctgtggaaatgcggcattctggttgcaatccatccgttctcagattgctggtatcacttggccaactctttgtgaattggtgtgtgctagatttactagagatcggcaggaagctctcattagacagtggttccatacacagcaaaatagctcagtagcagagtatgtggagcaatttgatagtctaatgcatcagctcatggcatatgacagtgctttaactccagtctactttgttcaaaaatttgttgaagggcttagagatgatattaggggggtagtaatggtacataggccacaggatctcgatactgcatgctcaatagctctgttgcaggaggaggttttggaagggatgaaatctgttagtggcaaaggtgggaacaatcaggtttatatcaaacctgcagcaccaagaactaccacctactcatctgtgattcctaacagcaaaggtttaactcctagcagtccaacagaaaggaagttttcagaagcagataagaccaaagatgatcgattggcgtctcttaaggcatatagaaggtctaagggcctttgttttgttcgtggagaacgatggggacgtgatcataagtgtgctacttcagtgcagttaaatgttgttcaggaattattggaagccttgcattctgatttggagtctgatcaacctggtactactgaatttactgatgaccaagtagagaaccaactgatggccatttcccaacaggcattgtggggtactgattcctctaaatccattcggctaagaggttgggtacagggtactgaggtgcttatgttagttgactccggtagcacccactcattcattgatcagcaaattggtcagaaactggcaggcctcactcctcttcctagttcagttaatgttagagtggcagatggtagtatcatgcagtgtactcatgagctggtcgattgtaactggtggatgcaaggtcccatgaaggttgattgggtggataaatggttagaacttcagattgctggacacactgttaaattccatggtattactccaattactggacagtgccccctcatttccttggaacagtgtcatggtatggttaagaatggttctgatcagtgcatgattcaattatattctactctgcacactgattccagttgcatacctgaagtagtccagccaatacttcaacaatttcagtctgtatttgctgaaccaaaagggttacctccacaaagagtgtgtgaccacagcattcccttgcttcctggttctaaaccagttaatttgagaccatatagattcaatccagcccttaaagatgaaatcgaatcccaaatttctaaaatgcttgaatctggagttatacaaccaagccacagtgcctttgcttctcctgctcttctggtcaggaaaaaagatggatcctggagattggtgattgattataggcagctaaatgctattactgttaaaagtacatacccaatgcctgttattgatgaattattagatgagttagcgggtgctaagtggttttcaaaacttgacctacgggctggttaccttcaaattagaatgaaggcaggggatgaacataaaacagcctttcagactcacactgggcattatgaatacaaggttatgtcatttggactcactggtgctccagcaactttccaaggagctatgaatgcaacattgaaaactgtcctcagaaaatttgccttggtattcttcgacgacattctcatctacagtcctgacctagcctcacatttggaccatttgcaacaagttttatcccttctgcagaaacatcaatggcaggttaaattgtccaaatgctcctttgctcaacaacagcttacatatcttggtcacatcatcagtgcagcaggtgtatctacagatcctggcaaaattaaggaagtagttgactggcctgttcctacatctgtgaagaaattgaggggtttccttgggttagctggttactataggaaatttgttagaaactttggagttatcagtaaacctctaacccaactattaaggaagggagtaccttttgtctggtctgatgcaactgatctggcttttcagcacctcaagcaggcattagtttcagccccagtgttggcattgcctgacttcagtaaaccttttacagtggaaacagatgcatctaaagcaggcattggagcacgtatccatacaccttggcagcataaggcgtttactaaactacttggtctttcttacaaaatctgctatcgaaagggtacaactaatgctgccgctgatgcactgtcaaggaaatttcaagctaaacctgggtatactctgcattccggcgtgatcaaatataagggcagaatctgggttggtaataaccctattttacaatccaaattgattcaagagttgcatgctagcccaattggaggtcattcagggttccctgttacttatgccaaattgaaacatctgtttgcttggcagggcatgaaatctcaagtcaagcaatatgtccagcagtgccaaatttgtttgcaagctaaaccggatagggctaagtatccagggctgcttcaaccactacctgtgccagcaggagcttggcaagccatttcccttgatttcatagaaggtttgcctcgctcgaactcttataactgcattcttgtcgtggtggatagattttccaagtatagtcatttcattcctttggctcacccattcactgcaattgatgtagctaaggtgttcatggttcacatttttaagttacatggtcttcctcagattattgtttctgaccgtgcagaatcttcactagccagctttgggagcagttattccagtgattgtgccattcctgatcttgcacaatggctcaaggaaagaaatcttatgcagtcactggtccagcaacaactcaatcgtgcacaacaacaaatgaagcatatggctaacaagaaacgcaatttccgggattttgctattggtgactgggtttatcttaaactgcagccttacatccaaacctctattgccactcgagcaaatcactcgagcaaacctgctacaagtgctatacacccagttttccatgtctctcaattgaaggacgctaaggggtttaagggcactatacagactactctgcctgctgctgacacggaggatgtgacttgggaggacttggaggacttgcgttcttgttttcctgctgccttggcttgggggcaagccaaattccaagggagggggattgccagcgatcctggaggctctgatgttactaagaccgatgatgcagcaagggtggaggctgaggagcagatcatgctggatgctgaccaggaggatcaggaggtggcgccaaggcaaacaacaagatttgtcaaaccgaatgctaagtacgttgggccggactgggccttgtaa

SEQ ID NO: 76632 - DNA, 819 bp, Oryza sativa
  Clone ID: PAT_MRT4530_7660C.1
atggcggacgacatgccgcccgccgtcgacgatgacctccaggacctcatcgacgagctgatgaatgccggcccggaggacgaggccgacgaccgagagtgcgaggaaatcacggcgaaagcgctgtctgaagccaccgagtaccttgaggaccccgaccctccctcgccggagcaggtgggatgggcggaaggcgcagtgatctccgcccagtcggcggcggataacatggcgtcctatgtgctggatctcaggagggctctggccgtgttcgccgggacagggaggcccgaggaggcggtgctcaggaagaacgtcgcgtgggccgacgcgcgccgcgcggaggcggtggagatcgcctccgccgcgcgccgcttgctggagaaggagctcaggtgcatggcggcgagagaccaccccgtcattccggagcttgcggcgctgatcaccgccatgcgcgagtccaccaaatcacgggtcctgcaggactcctccggcggtgatgccgtccgtagggccgggttgttggacagcgcgatcaagttcgaggacgccgtggtggagaagatgaccgcgttgaaggagaagttcacgcgtggcgcggcggccttcgcgggcgaggaggagctcgtgcaggcgctgcagaagcacgccgcaacggccgaggcggagatcgcggaagcacaagcgttctccgcaaccttgtcagcagcaagtctcgtgttcgtgcagaagaggccggcgccggagacggaggaggagccgccgcgacagaagcgccgcacaggagacgccggagatagtgccgcacaagactag

SEQ ID NO: 76633 - DNA, 194 bp, Oryza sativa
  Clone ID: PAT_MRT4530_76610C.1
atgctagatcattaattccccgttgcttattctgttcgcatgtggatcgtatcccttttttaagagcgagtctcgtacataaagagattagtttatctgagcgaagaacatgctctcagccttttttttctctcctcgatgcgtgcagagctgcacggacgcgtgggcggacgcgtgggcggacgcgtgggcgt

SEQ ID NO: 76634 - DNA, 439 bp, Oryza sativa
  Clone ID: PAT_MRT4530_76611C.1
gtcctttttttttttttttttttttttttttttttttctttttgggttgggttcacttttttattatagttgttccatgctggtctaccacataatatcgtttcaacaccttcaaaccatacttatggttcccctttcaagggaaaaggacacattgtatcgttctcggccaaagaccgggccagacatcttgggaacattgggggagacaaataggcagacttgtgaaccctataacagcacgccccccatggtggtgtctggctggtaaaaacagttgggggaccctttttttggggtgggcggaaaacccccccccttcttcccatgtttctggccatccccatgcgccttttttttaaaaaaaaaaaatgcctttcctaaaaaaatttctgggaaaacacggaaaagagaacttttttcataaaggggggtcccc

SEQ ID NO: 76635 - DNA, 1449 bp, Oryza sativa
  Clone ID: PAT_MRT4530_76612C.1
atggagatcatcagcacagtgctgggctcaacggcggagtacgcggtcaccttggtggccatggctgtggggctcctgctgttgggctacttgtacgagccatactggaaagtgcggcacgtgccgggccccgtgcccctgccgttcatcggccacctccacctgctcgccatgcacgggccggacgtgttcaccgtgctcgcaaggaagtacggtcctgtcttcaggggttcgaggtggacggcgttgcgaaacatgatcatctccatctaccagccgtctcacctggctagcctgatccccaccatgcagtcgtgcattgagtgcgtgtccaagaaccttgatggccaagaggacataacattctccgatctcgctctcggcttcgccaccgatgtcatcggccaggcggcgttcggaacggactttggcctgtcaaaaatatcagcatcttcgaatgacgacgacatcgacaagatcgccactgataccagcgcggaggccaaggcatcatcggagttcatcaggatgcacgtgcacgcgaccacgtctctcaagatggacctgtccggctcactgtccatcatcatcggccaactcctgccattcctccaagagccgttccggcaggtgctcaagaggattccctggacggcggaccacgagatcgaccatgtgaacctcgcgctcgggggacagatggacaaaatcgttgccgagagagcggcggcaatggagcgcgaccaggcagcgccgcatgcgcagcagcgcaaggacttcctgtccgtcgtcctcgcggcgagagagtcgaacaaatcctggcgggagcttcttacgccggactacatcagcgcgttcacttacgagcacctcctcgccgggtcggccacgacggcgttcactctctccacggtgctctacctcgtctccaagcacccggaggtggaggagaagttgctcagggagattgacgggttcggaccacacgaccatgcgccgacggccgaggatttgcagaccaagttcccctaccttgatcaggcatgcatgcccttcttcgacattggtcgtatttatggtcttcgattgtggagtcgtgaatacaagggaaacggaacatgggtgtggctggcaccaggagtcctagcgaaggatcccaagaacttcccggagccagaggtattccggccggagcggttcgaccccaacggcgaggaggagaagaggaggcacccatacgcgttcattccgtttgggatcgggccaagggcgtgcatcggccagaagttctccatccaggagatcaaactgtcagtgatccatctgtaccgtaactacgtgtttcggcactcgcccagcatggagtcacctctcgagtttcagtactcgatcgtttgcaacttcaagtacggcgtcaagcttcgggtcatcaagaggcacactgcatag

SEQ ID NO: 76636 - DNA, 1975 bp, Oryza sativa
  Clone ID: PAT_MRT4530_76613C.1
cacgttgtgttattaatgataccagggcacgagggaggcacggccggctgagagtgagatcgctgagatggagatcatcagcacagtgctgggctcaacggcggagtacgcggtcaccttggtggccatggctgtggggctcctgctgttgggctacttgtacgagccatactggaaggtgtggcacgtgccgggccccgtgcccctgccgttcatcggccacctccacctgctcgccatgcacgggccggacgtgttcaccgtgctcgcaaggaagtacggtcctgtcttcagatttcacatgggaagacaaccattggtcatggtggcggatgccgagctgtgcaaggaagtgggcgtaaagaaattcaagagcattcctaaccgaagcatgccctcagccattgccaattctcttattaatcagaaaggcctgtgcttcacaaggggttcgaggtggacggcgttgcgaaacatgatcatctccatctaccagccgtctcacctggctagcctgatccccaccatgcagtcgtgcattgagtgcgtgtccaagaaccttgatggccaagaggacataacattctccgatctcgctctcggcttcgccaccgatgtcatcggccaggcggcgttcggaacggactttggcctgtcaaaaatatcagcatcttcgaatgacgacgacatcgacaagatcgccactgataccagcgcggaggccaaggcatcatcggagttcatcaggatgcacgtgcacgcgaccacgtctctcaagatggacctgtccggctcactgtccatcatcatcggccaactcctgccattcctccaagagccgttccggcaggtgctcaagaggattccctggacggcggaccacgagatcgaccatgtgaacctcgcgctcgggggacagatggacaaaatcgttgccgagagagcggcggcaatggagcgcgaccaggcagcgccgcatgcgcagcagcgcaaggacttcctgtccgtcgtcctcgcggcgagagagtcgaacaaatcctggcgggagcttcttacgccggactacatcagcgcgctcacttacgagcacctcctcgccgggtcggccacgacggcgttcactctctccacggtgctctacctcgtctccaagcacccggaggtggaggagaagttgctcagggagattgacgggttcggaccacacgaccatgcgccgacggccgaggatttgcagaccaagttcccctaccttgatcaggcatgcatgcccttcttcgacattggtcgtatttatgcaagggaaacgtgcgaacaggttgaaattggaggatatgcccttccaaagggaacatgggtgtggctggcaccaggagtcctagcgaaggatcccaagaacttcccggagccagaggtattccggccggagcggttcgaccccaacggcgaggaggagaagaggaggcacccatacgcgttcattccgtttgggatcgggccaagggcgtgcatcggccagaagttctccatccaggagatcaaactgtcagtgatccatctgtaccgtaactacgtgtttcggcactcgcccagcatggagtcacctctcgagtttcagtactcgatcgtttgcaacttcaagtacggcgtcaagcttcgggtcatcaagaggcacactgcatagtcacatcatcaggagaactattcgtttggattttgggtattgcgcatattattaagtactcgttttcagtttatgttgtactgtacttgttttcgccgggcagtccgtgttgtactcgtaatatatatgaaccacagctagcaaatctccgaggcataaagtttcttatgagtaaatatccgaatataagatttttcttctcataaagacctctataggtaaaggagcaggccgtgggacatatcatgttgtacgatgaaaatagatctaataaagacagttattttgttt

SEQ ID NO: 76637 - DNA, 1775 bp, Oryza sativa
  Clone ID: PAT_MRT4530_76614C.1
gcacgacgcaaatcccagagaggagtcgcgagcttttcatcaatcctctgattttcccccaggtttccccacccgcaaagagcctcaaaattccccctcctctgtcgcgaccgatcgcgacgacggcgccggacgagcagacaccgccgccacgatgccgccctccaccggctccgtcccacccgccgcatcaacgccggcggctggggacgaggccaccgccgccgggagggtactcctcggcaggtacgagctcggcggcctcctcggccgcggcgcctccgccaaggtgtacctcgcccgcgacctcctcaccggccgcgacgtcgccatcaagtccttccccaacccccgccacggcggcggcctccgcggcggcgaggaggatgtcctcctccgccccgcgcccatcgagcgggaggcggccattctccccaggctgcgccaccgccacgtgatgcgcctccgcgagattctggccacgcgcaagaaggtccacttcgtcctcgacctcgccgccggcggcgagctcttctccctgctcgacgcgtccggccgcatgacggaggacctcgcgcggcactacttccggcagctcatctccgccgtccggtactgccactcccgtggcgtgtaccaccgcgacatcaagccggagaacctcctcctcgacgacgcgggcgacctcaaggtggccgacttcggcctcggcgccgtcgccgacggcgccctccaccacaccctctgcggcaccccggcctacgtggcgccggagatcctgtcgaggaaggggtacaacccagcgaaggtggacatctggtcctgcggcgtcgtcctcttcgtgctcgccgcggggtacctccccttcaacgacgccagcctcgtcaacatgtaccgcaagatctacgccggcaagttccggtgcccggcctggttctcgccggagctccggtgcctggtccgccgcatcctggaccccaacccggcgacccgcattgacacggaggagatcatcacccacccgtggttccgccaggacgcgagccacttcgcgatggcgcagctgatgcagcacggccacgacgaggaggccaaattcaagaccgagttcaaggaggacgacatggcccgggacatgacggcgttcgacatactcgcatgctcccctggctccgacctctccggcctcttcggcgccgagccggggaaggagcgggtgttcgtcggcgagccggcggcggcggtgctatcccgagtggaggaggccgggaagaaggaagggtacatggtaacgagagaagggaagaagggcaccgggccggtgtacgtgaaaggcgagaacggcggcattgtggccaaggtctgcgtgttcaagatcgccgacgcggtgtccgtcgtcgaggtggtgaaaggctacggcgccgaggccgcccggttctggaaggccaggctcgagccggcgatgaagcctccggcagccatctgagctgccgacgagagggtgagctggttcgttgccgcgtgcttgcaaattgcaatcgagatttgttcttgtgttgttcagtgtaaccgtgtgagtgatgtctcccgtcggcgaattgtttgggtttttttgggatgtatttgttcatggacggcgtcatggaggtggtatgtaagcacgatttggtgatgtctgggctggaaaataagaggcaaaaaattccctgctacacacaacaaaaaaaaaaaaaaaaaaaaaaaaaaaaaactcgagactagttctctctctctcc

SEQ ID NO: 76638 - DNA, 868 bp, Oryza sativa
  unsure (1)..(868): unsure at all n locations
  Clone ID: PAT_MRT4530_76615C.1
caaacatatataatatagaagcataatagtagaatcctacaaaaatgaagatcattatatcgtataataagctctccttagactattangtaagcatagcaacgctatctaagcacagagattatagaatagccaactaaaagatacaaaaagtttaattaagaaacaaaataattcaaaactaaacaaaatcagccaattctaccctnggctaacaagacaaacaaagtagctacagcccatagcagatagagattacgtaaaggcaacagcatagacatacgatggcaacccccttactaggcaaccagactacgtaatcaatatagataaaacaaaacaanatacaatgacagacaaacagatgattagcccaaacagactacaagaggcaaggatacgaccaccaaacaaaatacatacaacataacacaagagacacaatataaagataaagacagattaacaagagcagaantatagatagaccaagacaaaacataaccaagacatagccaagccacgagntcagagatgatttgntcctaacnttatagacttcaagaacatcnaaagactacaaaagacatacaaaagacatatatagacatagaggcccatataacaaaaccataagacccccaaattccccactaactttgattagagataacttcataactttcccataaaaacataaacataaccaatataggcatccccgaacgagaacgcccaataccacccacccgataaaggntnggatgatcctggggtaccctgaaccttggtaacatacgttactacactgggnttcccaacactgattcaacaaaacaataacacgatcacatagcccatntccaat

SEQ ID NO: 76639 - DNA, 444 bp, Oryza sativa
  Clone ID: PAT_MRT4530_76616C.1
atgcaccgtctctgcgcgtggaaggcgggatggcgcacggagcagaggtttgacgacgtggcgtggaggcggcggatccggtggcaccgcggctggatccggtccccccacgggtggatcgcgccggatctggccggagcaaagctactcgggcggcgacgacgggaggcggaggctgtggcgtctagcggcgggcagccgccggtgaagaaggccggcgcgcgcggagaggccggcgctcatggaggccgcggtggcgaccggcggcggtggaggccggcgctcgcaaaggccacggtggcgcacgtgcaaagctcggccagcgacgacggagggcggccgacgacagcagatgactgcacgacgcgacttggagcggccagggggccgtggtggtgcctgacggcagtggtgacgctcccggtggtcggcggttgccagtga

SEQ ID NO: 76640 - DNA, 774 bp, Oryza sativa
  Clone ID: PAT_MRT4530_76617C.1
atggcggcaagccgctgccacaagaagacatacacctggaacgaagctcgccgcaggcttcaacacccccctcatagcgcaaccatcgtcaccgcctcaaccaggctacccgtgttcccaacggatgcttggtcgcatcgtcatcgcctcaccgcagccatcgcctcactggcaaccgccgaccaccgggagcgtcaccactgccgtcaggcaccaccacggccccctggccgctccaagtcgcgtcgtgcagtcatctgctgtcgtcggccgccctccgtcgtcgctggccgagctttgcacgtgcgccaccgtggcctttgcgagcgccggcctccaccgccgccggtcgccaccgcggcctccatgagcgccggcctctgctgcctgcagccgcacctgggccggcttccgttgctgtcgtccgcacctccgcgcgcgccggccttcttcaccggcggctgcccgccgctagacgccacagcctccgcctcccgtcgtcgccgcccgagtagctttgctccggccagatccggcgcgatccacccgtggggggaccggatccagccgcggtgccaccggatccgccgcctccacgccacgtcgtcaaacctctgctccgtgcgccatcccgccttccacgcgcagagacggtgcatcgccgagatttggcctcgccgccgccatcccggctggctgcacggatctccagcggtgcgctccggcggcggcgaggggagggagaggaggagagaggggaggcggcgacgctag

SEQ ID NO: 76641 - DNA, 303 bp, Oryza sativa
  Clone ID: PAT_MRT4530_76618C.1
gtatacatatatatatatatatatatgtatacatatatatatatatatatatattgcacacgtgatgcacgttttatatatatttaacgtgatgtttagtttttttttttttttttggaatttctatctcgataccggtttgttttacgacgagtactgatagtgatatgcaagaatgaatgtgcaaataaatgtaactcaaaccagtttgtcctttctgacagtctgttgacaatgtatcacatcttcattttcatacaataaagatgcatttatataaaaaaaaaaaaaaaaaaaaaaaaa

SEQ ID NO: 76642 - DNA, 489 bp, Oryza sativa
  Clone ID: PAT_MRT4530_76619C.1
acaagcccgaactttggcgatgcaaagagatacgaattcaatgatcagtatctttcaggcaccagcagtcaaagcgggtgcttattggcatgtacgaatcagcatgtgacagtagggggcggttgccatggccttataagctctgtcgaactcaagtttccgccattatcaccaacttcacttgttgtgatacgatatcgtcaagtatgccttttgaaggaaagaaagaaaaaaaaattcaatttttgttaacgtcgattttccctctcttttcgagaatgcacatggcagattttttagcatcgtctattccctttttcttgtcatcctgaagtcttgcgcgaacggtatggaaaaaaatggcttgtggccgctgggggagcaacgggatctgggctttccaatgacggtcatgttttatggcatctttgtactggtaaattcggttcgttgtttaaagctactaacccaaaaaaaaaaaaaaaaaaa

SEQ ID NO: 76643 - DNA, 843 bp, Oryza sativa
  Clone ID: PAT_MRT4530_7661C.1
atggcggacgacatgccgcccgccgtcgacgatgacctccaggagctcatcgccgagctcatggaggccggcccggaggaagaggccgacgaccgagagtgtgaggagatcacggccacagcgctgtctgaagccaccgagtaccttgaggaccccgaccctccctcgccggagcaggtggactgggcggaaggtgcagtgatctccgcccagtcggcggcggataacatggcgtcctatgtgctggatctcaggaggggcctggccgtgttcgccgggacagggaggcccgaggaggcggtgctcaggaagcacgtcgcgtgggccgacgcgcgccgcgcggaggcggtggagatcgcctccgccgcgcggcgcttgctggagaaggagctcaggtgcatggcggcgagagaccaccccgtcattccggagcttgcggcgctgatcaccgccatgcgcgtgtccaccaaatcactggtcctgcaggactccggcggtgatgccgtccgtagccgcaaggccgggttgttggccagcgcgatcaagttcgaggacgccgtggtggagaagatgaccgtgttgaaggagaagctcacgcgtggcgccgccgccttcgcgggggaggaggagatcgtgcaggcgctgcagaagcacgccgcgacggccgaggcggagattgcggaatcacaagcgttctctgcggtcttgttagccgatgccaaccgagcagcaagtcccgtcgtcgtcgtgcataagaggccgacaccggagacggagaaggagcaggatcaggagccgccacgacagaggcgccgcacaggagacagtgccgcacaagactag

SEQ ID NO: 76644 - DNA, 436 bp, Oryza sativa
  Clone ID: PAT_MRT4530_76620C.1
acgtgataccaggcattggttttatggccagagcggagcacactaagattcattaatcacattttagtggatcaaaacaaacaccagacgtgcttttttcttgcacatcaaaaacacatgtgggcctccaaccattaacccaaactggatgggaggtccacacaaatctcatatgtgttacgagcggatgacaatgatgggggccctatccgatcggtagataacttggccatgggggccccaccgttgatttattacaaacaccgtcgaaattaccgccgcctactatgattatacccccgaattaaccagcgcgatgctcgatgttagctaagttgccaccagactcctcgtaacctgcttgacggtgctggatgaagctaatgaagtggacatgactgtagtcgccgaagccactgatacctacaaatgcgtc

SEQ ID NO: 76645 - DNA, 396 bp, Oryza sativa
  Clone ID: PAT_MRT4530_76621C.1
gccggccggccgtcggacgagtcctgagaggagtgagagagagagagagaggaggaaaggatcagcaagggagtccaagtcaagatggaggtccacatcaagtcgatttcgagtacgtttcagagtccaggaccaatctacactaaaacgggtgtccaggtcgcatatgtgctcggattggagcgttctttatatggatggaaagttaagaagataaccttttcaatggttctggtcccatatccaaaggttttcgacacggttgataatcagaggagacatggtgctgtgactgcggggctcaagagcgtgtttgtttagaagccggatcgatttgtgtcgcgactccaccaaattgactgtttatcagaacctctcgaaagatcggaaaccctt

SEQ ID NO: 76646 - DNA, 768 bp, Oryza sativa
  unsure (1)..(768): unsure at all n locations
  Clone ID: PAT_MRT4530_76622C.1
cagtctccatggccacctcccacctcctcgccgccgcctcctccaccgccgcctcctccgccaccttccgccctcccctcctcagcctccgctccccgccgccctcttctctccgcctcaaccgcaggcgccacttccaggtggtccgcgcggccgagaccgacaaagagacgaaggccaatgcgcccgagaaagctcccgcgggaggctccagcttcaaccagctgctcggcatcaagggcgccaagcaagagaacgacatatggaagattcgccttcaacttactaagccagtgacatggcctccgcttgtatggggagtgctttgtggagcagctgcctctggaaatttccactggacagttgaagatgttgcaaaatctattgtctgcatgataatgtctggtccatgtcttacaggatacacacagacaattaacgactggtatgatcgagatatagatgcgataaatgaaccttaccgtcctattccttcaggcgctatatcagaaaatgaggtcattactcaaatttgggcactgttgttagcagggcttggcctgggtgctctgttagatgtatgggcaggacatgattttcctattattttttatcttgctgttggtgggtccttgctttcttacatatattcagctccacctctgaagctcaagcagaatggatggattggaaactntgctcttggtgcgagctacattggcttgccctggtgggctggccaggcattatttggaacccttactcctg

SEQ ID NO: 76647 - DNA, 661 bp, Oryza sativa
  Clone ID: PAT_MRT4530_76623C.1
atgggggatatcgacgacgccaccactggaaccctctccagtctcaacctctccgcgaacacgaatctcgtcgcttcgcctcaagcgccgccgctcggcctacccactaccccaatctcgtcggctcgtcggcgttgccgcgccgccgcggcactgcccgcgcgctgctgccggcgtgctgcccctccgtgcgcccgtcgcggcgcgcaccgcctgctgccgtgcagccgtgctgctgtctacccgactgctgagatagcgagggggccaatcgccgagccggaggaggagggggccattgaagtgaaggtgacgaacagagcagcacaatggagtccatacaatcttgtaatatcggcggcgaaccccttcacgtcgcgctttgagccgtttctggagccgcccatcatcgagccgtgcttggagtgacagttctaactaaaagactactgagcttaattttttatgttaaacacaaatggttgagaaaacaaaaatatacatgatgcactttgattgtcagtctttaggaagttatgattctttaggagatagataaaaatattttatgattccttgtataaaaatgactttatggaagcaactatagatgacacagtggaatgtcccatagctatagagctcaattacttcttgctgg

SEQ ID NO: 76648 - DNA, 1029 bp, Oryza sativa
  Clone ID: PAT_MRT4530_76624C.1
ctattgggttaattccagtcgtgacaatggcacaaccttcttgctcctgacccactcgactactgctacttcggaatcatcctcttcatcggaaccatacatgtaagggtacacgtggttgatctttttgatattcttcttagcctctgcaaacatttgttcatgcagggttaccttctgtgcaagatgagataagctttcgaactcctgagatgaaaatttctccttgatcggagctatcagaccccttaaagcgtcaatagccgatgcctcaccacattgagccaagaatcggctgacatgttcataagttgagacattgtcttgtcctaagaattttgaaaaatctggaactttgtatcggttaggtaatggaaccctctcaaaccactcaaggtatggatgccgatacaagtttccagtatccttcggcttaagcccaaactgctccctcatcacatctgcaatcatatcgtcccattgtctcagatgctcagggacaacctgagtcacattttgatgcgtcagccgattatcaggcgtcctcaacccagtcggcatcagctggaccatctgttgctgtatcggctgagttgtctgctgttgaatcgactgaactgtctgctgccttggcggcgtctgctgaattggtccaccagttggttcattgttatcttcaccaagatcctcaaccactccatcctgaaggccgtcaactttattgcctgagccatctgcaatgcctttatcaccttgggatgagcttgagccaacttcgtcggcagcaactacttttactttgtacttttggtaaactttcctgcgggtttctgcgaacgatttcatgaattgctcctgagcgctcttcatcatgaattcaaaatcctttttttgttctagtgacagcttgtcgacagtgactggaacaatgttcccattattaacatcggacccagtcagttttggaatcttggtttgagggtctaacgacttgcccattgatggcggaggtggcttatctgctgacat

SEQ ID NO: 76649 - DNA, 459 bp, Oryza sativa
  unsure (1)..(459): unsure at all n locations
  Clone ID: PAT_MRT4530_76625C.1
ttgtcggnnctatgcccaaactcaacaaangggatattttgaaatgttcaaacggttcttcagtgggtatcatgcccgaactaacttccttgaaaacaggaagtagcctggaatctgacatggtgtacaattggatcgatcgcctcacgcttctggattactcgtatatttggtataatacactgatgggcatgtcaaccattcctgtattacataacctaaatgagctaggtttgctttgctgccctggcataactgaagctcccaccctggcatcactttcgaaattatggatatacagatgtccagacttaagtgtgattggttcactcccctcacttaccaccttgtatctcaaagatccacttcttaaaggtgaggtattgtacagcctattgaatgacattgaccaccccaggctcaactgcatatcaattctttgtgaaaccatgatgaact

SEQ ID NO: 76650 - DNA, 414 bp, Oryza sativa
  Clone ID: PAT_MRT4530_76626C.1
cttgtttttcagaggaaaatgcccccacgggggggttttgacaaatgtaccgtgtaaagcgctcatcaaccgaccctacgcttgtacggcttttgctgacggctgccgactagtgcgagggtatgctgagcttgaggagctgcattgagtacctgacactctcgactgtgactacttaatctgctctactatacctaaatcttacatggtccatttagctggtggctgtattataagctctaccacttgcaggctaggactactatatcaacagatacagagacgcgactaggatccaagatgaagggatgaacatacgtctagctggaatcgaacccatgatgaggtggtatgacctccaggcggcatctgaagatgctctctaccagtgctcgatcaggtgggctcgcgcac

SEQ ID NO: 76651 - DNA, 1431 bp, Oryza sativa
  Clone ID: PAT_MRT4530_76627C.1
atggctcaacaagcaaaggaggtaaacacaaacagaagtaggtgtggaagtagcatcagcatgcgaatggaaggagatagaaatggtgccttggcgatgctttcgatatcctcctcctcggcaagatatggaaatgatcaccaagagcttgcttctgctgctgctgctttcagagagtcggcaggtgatccgaggaaactgtcgtcgggaatgagtagcaggctgttgccagcacggagcatgaggtctaccggcgctggggacgatggcgaggtggcggcggcgccggtggctggcgctcggtcgctgtccttctccaagctcttcagcttcagaattgcaaatgctgcgcgttgttcgtcgtcgctggattttgatcatccgctaccttcagatgcagcaagcagtgatcacatttctgcactatctatccagcctgcagcctgcttattgttcgctcgatttgccaagaacgatgagacgacggcgacgaagacgaagacgaagacgaaggcgaagcacgcgagtgaccacatgaacatcagccgctcacagtccgtgccaatgagcaccctgtcgagattcagctccaaggggggaggaggctccaagagagtggcggactcgagctcccttcgtattcacgacggtggcagcgtgcggttcagggtgtcggtgataggcgcctctcctcccgacggcaatgcggacgccgccgccgccgccggagaagaggaggacgacgccggcagcgtggaggcggaggaggaggcgctggtttgccggatatgcatggtggcgctgtcggaggacggcgccagcggcggcggcggcggcacgctgaagctggagtgccggtgcaagggggagctcgcgctggcgcacggcgactgcgccgtcaagtggttcagcatcaagggcaacgcgacgtggcgacgtctgcaaccacgagggtgctcaaccctccccgtcacgctgcgccgcgtccacgaccgccagcagctggtctatgaggcagccgcggggggcggcgggccgccgccgccgcagcggccgctgctcgtcggcgaccacggcacggcggcgctggccatctcgctgccgttcgcctgcgtgctcggcctcttctcctccctcaccaccgccaagatggtgtccaggaagtatgtgtggatctactcagctgtgcaatatctcttcatcgtgcttttcacccacctcttctacagatatgtgcgattgcaagcggtgattgccatcatcctgtccaccttcgcgggctttggcgtggccatctgcgccaacgccatcctcctccagatcatcagatggagggccaggcgggcatccatgtcagcagcacaggaagaagaggaagctcgccgtgctcccacacaggcggacctcgagaacgctctacctccaccctag

SEQ ID NO: 76652 - DNA, 461 bp, Oryza sativa
  Clone ID: PAT_MRT4530_76628C.1
cccacgcgtccgatgacacgttgatactatggatatgtttctatgaataggctttcagaggtgtaggtggatcaagcagaccgtgtattgatgatagccaggttgcctttagcacgttcagatactggtgctaaaggatcatgtgacactggtgcacaaacctctcgtcatgctgtgatgactgtggtctatacccaccccgtatgttatgctcccgctgtgccgaacctctgggagtctaactacatgtgtcactgcccttcgtcatatgagtttctgagcttgcgtcacagcctgcttgtgtctaatgtgcgtatgtggctccgtgtaggagagctcgctgctcatgaatggttaacaatatgagaagccagcactgatgatcagatgggggcattactaggattcacgtacctgaggctcaccaaagtcctcttcgagagagctaatttttttggaat

SEQ ID NO: 76653 - DNA, 1863 bp, Oryza sativa
  Clone ID: PAT_MRT4530_76629C.1
aaccggcccagaagaatcagatgagagtcggcgcgtgataaacggaacttttggatgccctatggtgatctgagctctggtcagccgagccaacccagccggtcgccggaggaggcaacgacgaccatgatggcgccgtccttgtccaccgccgtctcctctcttctcctcctcctcctcctagccgctgctatctccgtctcctcctcaccgccgatgccggaggacagcatccgggtcatctccgccgagaaaaggatcgacctcaccagccccatagtcaaagttttcctcacactaaagctcgagaatgatgccactgcccctgaagcatctcaagttctactcgcattcacacccacagaggttgaacatcttgcgattgtcaaggcgaccagagcggaggggaagcgcaagaagaagatatatgtgcctctctctgtgaaagcctctgatcttgctgccgctccaaatggtgctcgcctgtactccattttgctgagcactccattgaaacctgctgaggtgacgacgctggaagtattttatgctttgacacactctttggagcccttcccagcagagatcacccagtcagatccccagctggtttactaccgtgacagtgctgtgcttctatctccgtaccatgttctggagcaggttacctacatcaaaatgccgagcaatagggtggagtcctttacaagggtggaccccaccagtcgagctggtaatgaagtgaaatacggcgcatacaacaaccagcttccaaactcgtatgtgcccatacttgtgcattatgaaaataatcgtccgtttgctgttgttgaggaatttgtgcgcaaggtggagatttctcattgggggaatgtccaaatcactgagcagtataagctgaaacatggtggtgctcagcacaaaggagtcttttcaagttcattgctttatggttactcatttgaaacctttcttgctaggcttgagtatcaatccaggccttctataagtggagtgtcatcatttaagaatcttcttgcaaggttgcctcctcgagttcattcagtatactatcgtgatgagatcggcaacatatcttcatcccatttgcgtagtgattcgcacaagtcagaacttgaaattgagcccagatatccattatttggtggttggcactgcacgttcaccattggctatggtttgccattgcaagattttctctttgaatcagatgatggtcgacgctacataaatcttacttttggatgccctctgttggatacggtggtagatgatcttaccatcaaagtcgtgcttcctgagggatcgacaagtccacaagctgtagttcctttcctgatggaacaatatcttgagctgattgccatgatatgcatgatgctgatcacacatccacactctacagcattgtccatcgagccgcaaactagttattcataccttgatgttgttggaaggacgacagttgtactaaagaagagaaacgtagttggagagcacaatgttcctttccaggtgtattacgaattcaatccgatcttcatgctcgcagaaccgttgatgctgatatcagccgtgttcctgttctttgtagcctgcattgcttatcttcacatggatctttccattgggaaatcataggctccttgaaatatttagaggcgctctccgcacttgcccttctaattatcacagttgaatcaaggctgccttttgtgttagtttgtacggttcccgtgggggagaagatggtctttttgtagaacgttgtcgttgtaggaatgggatgatgaggatgactttatataagtatccatacttgattgatctgctcacttacct

SEQ ID NO: 76654 - DNA, 494 bp, Oryza sativa
  Clone ID: PAT_MRT4530_7662C.1
cccccccccccccccccgccgccgccgtccactcctacgccattcccttgaaggggaaacgagggctcgaggaagaagatgagggcacgaggaagaagaggaggagcgtggcgctgcgggaggccatggcggggctcccggaggtacagtcgtggtgcctccctcctcttctccgctctgctctgtcggccaccgcgcgctcgcacgccgcctccgccctctgccgctcggctccgctagccgccgcgccctcgcacgatgcctccgccggccgccgctcagccccgctcgctgctacccgttgctacttcactatggcagagagaagaaaagaaagaagagagcagagctactcccctgctcagctccgcctcgctgccaccaccacccctgccgccgcggcgtcgccggtcgccagaaatcctctcccgccacaccccatgcccccatcggtctcctccccacctgtcgaccgatctacgagagaaaagtga

SEQ ID NO: 76655 - DNA, 279 bp, Oryza sativa
  Clone ID: PAT_MRT4530_76630C.1
cgaattcaagcagtttccgttaatggattccattctattttgtaaactatatgtttgtttcccaaatacaaactgtccgtaaaaggcttccattctttttggaaaaaaaaaaggagggtcccctttcccgaatggggctggaaaaaccctgccttgcccttactaaaaaaaaaatcagtgtctaatgaccctgcctatccctaaaaacctttgccgcgagttttgtggggggggaaaaattttttaaagaaacggctttttttgggggcggtggcgctt

SEQ ID NO: 76656 - DNA, 117 bp, Oryza sativa
  Clone ID: PAT_MRT4530_76631C.1
atgctcgaactctattctcgttcgagctcaaaaagaggaaaatcccgcgtgacgaggaatgctcgaactctattctcgttcgagctcaaaaagcggaaaatccacgtgacgaggtaa

SEQ ID NO: 76657 - DNA, 462 bp, Oryza sativa
  Clone ID: PAT_MRT4530_76632C.1
aggaagcgaaacaagtgcttattgcacatatgatttttattcaataagcgtagcaaaatatacggtgcccatgctagaatgggatgctatgtcatcctacaaacagagctaatttaggggagatacaaaccaagttttctggatgtatctagcagttaacgttaaataatgtcaatcctaatatagtagagacaagtggcagctataaacaaccacaatatatatttatctttcttgttggaatgaaacatgtttgcctgcattttcagctattgacagttgcttttcttcaatttacttgcggtgaatagtctgtagttgattggttccatatcactgattataccgaactgcttgttgtagaagccccatagctcgcaccagtatgccaagaactgaaacggggcatacttgccgtagatattatccaattccttctgaacagaactgatggtgcttgct

SEQ ID NO: 76658 - DNA, 252 bp, Oryza sativa
  Clone ID: PAT_MRT4530_76633C.1
atggggtggccgtggcgactcgggcaggatacggaccagcggtggggactcctgcgggggaacctcccctcttcagggtcgacggcggcgaccaacagtggcaagagagccgccgtgcgagtcggaagcgacggcgtgatccacatcggcctgctgtcttctgccctgccggcgtcgcaggaccacgaaacggcatcgtctggctccgctcgacagaacgagtataggtctaggtatttagcgatgcgctga

SEQ ID NO: 76659 - DNA, 675 bp, Oryza sativa
  Clone ID: PAT_MRT4530_76634C.1
atgacggcgccgggtggagcactacctctccttgtcggggtggccgccgcgggagatgacggtgctgctatgctcgccgaatccgacttggggctcatcggatccggccttgggatgaagcctggcatatatctgaccggaaccaacgtgccatctccaggagctaacacgccggttccggctagggacgagtgcttggaggctctcatcctgacgggatggggcgaggcagagttcgattgcccatttcaccacccgtccagtaccctctcggttatacaagatttggccgaggggataagacgtaaccaccgtgacccgatgcgcctggaaataatggcgcaacttcctcgaagttatcaggatagcgtaaagcatcttctgggcctgaaggtatcgggtctcagcgtcccggagggcctcgctaacgaagtagacgggccgctgcacctttcggcggggccgatcttcttcgtcaggggccacatctccagggcgctctccatccgagaggccacgcggggcgcactcggcttctgtgccgacgacctcggggtcagagggcgacaggcgcggccttcccgcagtggcctcggggccatcctgggggagtgcggtgacgacggtgcggacgacagcgacggcgaggccggctacccgggcacgtcggagtga

SEQ ID NO: 76660 - DNA, 912 bp, Oryza sativa
  Clone ID: PAT_MRT4530_76635C.1
atggtggacaagaatgaccgatttgtgaccggtctgacactggtcatgtcgtcagcagacagccatgttcccacgtcgcgcctgcttccggcggaagtggagggctcccggccgaaccggcaaaggggggcctgcgcggtctcccggcctgcgccgtcgtcctgctctgggaacttccgcgtgcagcgagggatggacgagtgggttcgccaggccgaggtgtgggtgggacaagccgagaggtggatccggcagcagcctcccgagcaggtttacgtcgccgtcgcggtggtcgccgtgacgagaggcaaagtaaaacctgttcatgttgttgacgttcctggtcatgcaaggctcaaacccaaacttgatgaagtcctgcctcaagcagctggaatagtttatgttgttgatgctcaagatttcttgtctaccatgcatgctgctgcagattgctatggtcttacaatattctctttccgcaggtacttgtatgacatcctgacaaaggcaactgtagtgaagaagagggttcctgttctgatattctgcaacaagacagataaagttacagctcactcaaaagaattcatcaagaagcaattggaaaaggaattaaacaagctccgggaatcaaggaacgccatatcatctgctgacatcactgatgaagtcaagcttgggaaccctggagaagcatttaatttcagccaatgccagaacaaggtgacagttactgaaggtgctggtctgaccggtaatgtttcagcggttgaggagttcattcgtgagggcacctcgagtttttcggcgaccacaacagatggcaagcgacatttcaccagatgcaaggggaccttctaccccatcggcgtcccggagaacaagccttggtatgaaggggctgtttga

SEQ ID NO: 76661 - DNA, 727 bp, Oryza sativa
  Clone ID: PAT_MRT4530_76636C.1
ccggccgggaattcctcctcctcccccaaaacccactcctcctccccatcgccgccgccgccgacgagggagatggcgacgctcctccggcgatccgtcggccccgcgcgccagctcctcctccgcccgcgcccgctcccgctcccccacgccgcctcctccacccgctccttctcccgctactactcccgcgacgacgtctcgaggtacgaggcgctgagcacgccggtgaactggggggtgagcatcgtgccggagaagaaggcgttcgtggtggagcggttcggcaagtacgtcaagacgctcggctccgggatccacgtgctcgtccccctcgtcgaccgcatcgcctacgtccactcgctcaaggaggaggccatccccatccccgaccagtccgccatcaccaaggacaacgtctccatccagatcgacggcgtcctctacgtcaagattgttgatccctaccttgcttcctatggtgtggagaatccaatttttgcagtcatacagcttgcccaaacaactatgagaagtgagcttggaaagattacgctagacaagacttttgaggagagggatacactaaatgagcaaattgtgaggtccattaatgaggctgcaactgattggggactgaaatgcctccgttatgagatcagggatatatctccgccacgtgggtgttaaggtggctatggagatgcaagcagaagcagaaaggaaa

SEQ ID NO: 76662 - DNA, 1182 bp, Oryza sativa
  Clone ID: PAT_MRT4530_76637C.1
ccggccgggctctcctgctcggcttcccccccaacccccgccttctcccctccgactccggccacctccgcggcggcggagcatcctagggtttcgcgccggctcgccgccggcgtacggagagggagggtgtaacacgcgcaggcctgcgccgtcgtcctgctctgggaacttccgcgtgcagcgagggatggacgagtgggttcgccaggccgaggtgtgggtgggacaagccgagaggtggatccggcagcagcctcccgagcaggtttacgtcgccgtcgcggtggtcgccgtgacggttctgttgctggtcgcagtttcgtgcctgaaatcctcgaaagcaaacaccatagtgctatctgggctcagtggtagtggcaaaactattctcttctaccagcttcgggatggatcaacacatcaaggaactgtgacttcaatggaacaaaacaacgatactttcgtgcttcattctgagctggagaggagaggcaaagtaaaacctgttcatgttgttgacgttcctggtcatgcaaggctcaaacccaaacttgatgaagtcctgcctcaagcagctggaatagtttatgttgttgatgctcaagatttcttgtctaccatgcatgctgctgcagagtacttgtatgacatcctgacaaaggcaactgtagtgaagaagagggttcctgttctgatattctgcaacaagacagataaagttacagctcactcaaaagaattcatcaagaagcaattggaaaaggaattaaacaagctccgggaatcaaggaacgccatatcatctgctgacatcactgatgaagtcaagcttgggaaccctggagaagcatttaatttcagccaatgccagaacaaggtgacagttactgaaggtgctggtctgaccggtaatgtttcagcggttgaggagttcattcgtgagtatgtgaaagcttaggccttagagttgtcggacctttacagaatagagtttgtattcgttcaaaattgtcatctaagcggagactgattttcctgatggaagaaggaaaaccttcatcatctcatctgcatctgcttcattccattcatgcgtgtgagaaatttcaacattttcttgaaaggaaagcatcggacattcagttgaacttaaaaaaaaaaaaaaaaaaaaaaaaaaaa

SEQ ID NO: 76663 - DNA, 870 bp, Oryza sativa
  Clone ID: PAT_MRT4530_76638C.1
atggaagggcagcagttcgcttggggaagggaggagggagggtggaggaaagggccatggacagcgcaggaagacaagctgctggttgagtacgtgaggcagcacggcgaagggaggtggaattctgtcgccaagatcacaggtctgaagagaagtggcaagagctgcaggcttcgttgggtgaactacctgagacctgacctcaagcgaggcaagatcacgccacaggaggagagcgtcatactcgagcttcatgccttgtggggaaacaggtggtcgacgatcgcgcgtagcctgcctggcaggacggacaacgagatcaagaactactggaggacgcacttcaagaagggcaagccgtccaagaacatcgagcgcgcgagggctcggttcctgaagcagcgccgcgagatgcagcagcagagccagctgatgcaaaccggccagcagcagcagctcggccaagacgacgacgccaccagcgcggtggtggacgacaaccttgcggaggtcgcgccaccagccgccacctcgctgacccacgacggcgagctccagataatgcaggagatggcgccggacatggacgacctgctgtactaccacccgggagacatgtcgccctattcctacgacgacctcctcggcagcggcggcggcgagtgcggcgccgtggcggccagcgctggcgctgccgcctcgacgagcgagggctcaagcgaggagctcgacggcggcgccgccacgtggggcagcctgtggaacctcgacgacgtggtgcacgacatgatgatcgactgcgccgccggcgccggctgctgctggggtagcttccctccgctacaggataaaggcctcgctttctactag

SEQ ID NO: 76664 - DNA, 1621 bp, Oryza sativa
  Clone ID: PAT_MRT4530_76639C.1
atggcgacgctcctccggcgatccgtcggccccgcgcgccagctcctcctccgcccgcgcccgctcccgctcccccacgccgcctcctccacccgctccttctcccgctactactcccgcgacgacgtctcgaggtcagcgccccaactcctcctcctcgttttggttttggttttggttttggaagggtggttgatgtgtggtggtggtggttgcaggtacgaggcgctgagcacgccggtgaactggggggtgagcatcgtgccggagaagaaggcgttcgtggtggagcggttcggcaagtacgtcaagacgctcggctccgggatccacgtgctcgtccccctcgtcgaccgcatcgcctacgtccactcgctcaaggaggaggccatccccatccccgaccagtccgccatcaccaaggacaacgtctccatccagatcgacggcgtcctctacgtcaagattgttgatccctaccttgcttcctatggtgtggagaatccaatttttgcagtcatacagcttgcccaaacaactatgagaagtgagcttggaaagattacgctagacaagacttttgaggagagggatacactaaatgagcaaattgtgaggtccattaatgaggctgcaactgattggggactgaaatgcctccgttatgagatcagggatatatctccgccacgtggtgttaaggtggctatggagatgcaagcagaagcagaaaggaaaaagcgtgcccaaatccttgaatcagaaggtgctatgttggatcaggcaaatcgcgcaaagggtgaggctgaagcaattcttgcaaagtctgaagcaactgctcgaggaatcagattggtctctgaggccatgaggaccaagggcagcactgaggctgcgaacctgagagttgctgaacaatacatgaaggcatttgctaatctggccaaaaagagcaacacgattctccttccaagtgacgctggcaacccatcatccctcatcgcccagtctctccagatatacaagcacatctgccagaccaacagcttgaagagtgggaagtacctcacagatgctctagaggagacggaaccggaggaagaagagttggactctactgacctaccttctctgagcagcgggatgccgtcccccgacatgccagatgaccatgacaagactttctccctgcagcgccgcaacaaggacaagcactgagtgagtccccctgttcgagtacctgaaggagaggagaccctttttttggcccactgtttttctacgagcatggaactgtaattgaaagcacactagcttagtagcggtagaggtttctgagtttcgacactgttgatctgggaaacgttttgaggatggtaggaaattaacaagacattggcttctggtagccgattgggagtaagtttagcgaccagaaagatttttgtccctgctaaggatggtttgggatagctctgattttcgttcttaatctgtttcagcagcaagtctgtttctgtaaatgcatggattatcagtcgttcatgaaacaagttcaccatgacggcaatggctcatggccgctttgattccgtgccgattcctgcagcccgggggatcc

SEQ ID NO: 76665 - DNA, 552 bp, Oryza sativa
  Clone ID: PAT_MRT4530_7663C.1
cccacgcgtccgcccacgcgtccgcccacgcgtccggagaaagctggtatgtcatgccacaccaaacacgggagggcacgcgtgtaacatggacggatcctgcgctgcaagatcaactacaccatcaacagctgcttatgggtcatcttaaagcggactaacaaaaggaccatcatcacttttgaatgaaagcaggagatcataagccagtgtgcactctggttttgctggcatgcctactacggaccgacttatgagcagggtgtgtttgagtcataaacagatgtccactgtaatcattctgcttagctagacacctgcggggacatggaagcagtgctaccgagttgcgaaactaactaggacggcgatcaactactagacaccaccgcacatcttgatcaccttcactactagacatacggtaagctgtacatgtgcattgcacaagccggcaacagcgaggtattcaagggcggctgatagatcgcgtagagcgcatgcaggtccttcacgcttgtatgatacagatactatgtatatgagctcata

SEQ ID NO: 76666 - DNA, 933 bp, Oryza sativa
  Clone ID: PAT_MRT4530_76640C.1
ctataccacaccctgcattaattccgtttcattgcagatcacaacctttgtacccaagaaggagccgagcaggtcgattagttggtgcggatggacggcgacggccttgatgaccagcggtggctgcaccagcagcagcggcacagaggcaaggatgggattggcgggtggcggcggatcggtggagacgcgcaggcgcgagcatgcgggggcgcggcagcggagcggtggagatgcgcgggcgcgcgacggcggcgccgattgatgctctattgggctggggtccaagtagtctggctcaaacggataccccgtctgcatcgcgcactgcttgccgatgccaaacgggaacaggatctcgacatcgccacacctctccgggcagccgggacgctggccctcaaattcgatggagatcggtctgaccgagattgatctgccggtctgaccgaagtgtagccgccggtctgaccggtgttgatcttctggttgaaccgccctggaatccctgccgcgcctgatgtcaccgccggtctgaccgcctcgccctagccggtctgactgccggtgcgtcgccggtctgtccgccggtgagtcgccggttagaccgcaaatttggactccttccaaattcgactccgcatcccatatgcacataatacctccatcatatgccatatggaatcttcactaaccacgtgcatcaactctagccttagtatcccgcatgatatctgaccaccacggacatcgtcttaccaccaagccgactcccagtccatcactgcaaatactctcccgaggcatcgagtcacctacatgatggaggacagatcataaaccaccactacattttttaggagtgaaagatttatttgttctttatgttgaatgtttggaattaaacggtatgttttttagatcctttgtaac

SEQ ID NO: 76667 - DNA, 636 bp, Oryza sativa
  Clone ID: PAT_MRT4530_76641C.1
ttaggtggcgacaggcgatctgacgcacgcctcgccccatcccgtcaggacgagggcttctaggcgcttgtccccagctggagctagcgtgttacctcccagagatggcacgttagtcctggttagatatatgccaggcttcatcctaaccattacaggcgagatgttgtgtgaagaagggccaacatgtagattgctaaactgacacgtggtggacaagaatgaccgatttgtgaccagtctggcactggtcatgtcttcagcagacagccatcctcccacgtcacaccatttcttcattccgtattccttgtcgagatccagcaaccgttctccagtgatcgagaaggcgtagagtctgcgatggagccttgtcgacatttgtcgtactcgccttagttgatcttggtgtagaaccatagagacatggagtcttcgataatgtcgaatagaattttccttgttgcgtactcgttcgatatcatgcgatctgacatcttttggtacgccacggagcttgaggcttggatgatctcgatagaccaagttgtcgatgacgatgatggttccgatctggttaggttggatctccccctcagctgaagtcatcgagtagctcgttgtcggagaatccat

SEQ ID NO: 76668 - DNA, 503 bp, Oryza sativa
  Clone ID: PAT_MRT4530_76642C.1
atgaggtggaaactagatcaatatggaacacacaatcgcccacgtggcctggcaccctcggggggcgtcgggcccgagggtgatgtgttcgccctcctatttgtctccccgagggggtcggaccgctcccgcctcggccccgagggatggggcgccccgaccccttgtggattttgcgccgcgtgtataggcggtctgacgcacgcctcgccccatcccgtcaggacgagagcctccaagcactcgtccctagccggagccggcgtgttagctcctggagatggcacgttggttccgaatgaccgatttgtgaccggtctgacaatggtcatgtcgtcagcagacagccatgttcccacgtcgcgcctgcttccggcggaagtggaggtaggtatgggccgtcccatcagaaggagcttagaacctcacccagggtccccggccgaaccggcaaaggggggcctgcgcggtctcccggtgaggagccccaagctccgtcagac

SEQ ID NO: 76669 - DNA, 1431 bp, Oryza sativa
  Clone ID: PAT_MRT4530_76643C.1
aaccaatcattttgatcacatgtcccacatggtagagctgaaagaacccttgtggctgcgattggaatggatatcccttgaagaatttatcacgataacactattccatatgattatgcgaaagtgcagttgcaagtggtgaacaaagggttagagtcatacgatctggacatccaaactcctgatggcatatccgtacttggggatgcggttgacattatagtattgtagcacataaagatatactctttgggactggcaacaatgctctgtcgaaaccactgagacctcctcaaaaacaactatcgaatgataaggtggaagaacatgagcaacctaagagcactgaagtggcatctacatcagcaatattgtcaattatgccagcaatagaaccgaaatcgaagtcgcaacaggtttggaatgggtcgaaatagaaccagatgtgtatgaggatccatctcctgcaaaagacaacgtggacgcaccctcggtcgatgactatgtcatcgacaagtccgaagtgcctaaactggtcaaaagccacaactccaagtccaaggataatcagaaggtgaagtggatggtaaccgccttctgaggtggtaaaaaacgtgccaaggaaagagatgttgatgagaagaagaccggtgaacttgccggcccaaaatactttggaacagatgattgtctggcagtgtttgaaaatggcaaagccttttggctggattatgcacttgaagaaggtccgtgggagatgagaagattacataaatggtacacggacgccaacaagaaaggcctaatgtcattagctgtttgaacatcacctgatgctttcatggccgaggaaggtttcttgtggctcaatttcgctgatcttcacgccgtctgtcggtgacatgggatcaggagtatcatgactagaggtttgaggcagacgcaatcgcccacgtggcctggcaccctcgggggacgtcgggcccgagggtgatgtgttcgccctcctcctagtccccccgagggggtcgggctgcacccccctcggccccgagggccgaggcgccccgaccccggtcagatcgcgggttaggtggccacaggcgatctgacacacgcctcgccccatcccgtcaggacgagggcttctaggcgctcgtccccagctggagctagcgtgttacctcccagagatggcacgttagccctgatcagatatatgccaggcttcatcacgtggtggacaagaatgaccgacgtgactggtctgactccggtcatgtcgtcagcaggcggccacgattccacgtcgcatgcttctaagcggcccgaacctgtatacatcgccggcgtcttctgtgcttcctgtctcgcgaaccggcaaaggggggcctgcgcggtctcccggtgaggagccccacgctccgtcat

SEQ ID NO: 76670 - DNA, 417 bp, Oryza sativa
  Clone ID: PAT_MRT4530_76644C.1
atggctcatgaggggaaactagatcttccgttgagaactatggaggaaaacgagaggaaaagggaggagtcggaggagaggtcgataaatgattttgcaaatttgaagaaggtgatcgaggtgcggattcctcaggtggagaagaaggtggaggaactcagggtttcagtgcagacgctcagtgacggagcgtggggctcctcaccgggagaccgcgcaggcccccctttgccggttcggccgggggccctgggtgagattctaagctctcggatgaagcctggtatatatctgaccgggaccaacgtgccatctccaggagctaacacgccggctccggctagggacgagtgcttggaggctctcatcctgatgggatggggcgaggcgtgcgttagaccgcctgtcgccacctaa

SEQ ID NO: 76671 - DNA, 534 bp, Oryza sativa
  Clone ID: PAT_MRT4530_76645C.1
gaaaacattcgttctgttcccgacatttctgatcatgatttcacataatcacataccaccaaaggaccgaatgaaacaaaaaaaaaggataatctaaaccttccatggtctaaagcctaaaacagccaattaatcaggccaaatgtaccagaactagtgtataaatgctgtactgcaatcagtgggcatcctagctcctactgttaataatacacaaatgttacatgaacttacaagcaggggagcggatactggacacgatttccaggtcgcaaggccaagacgcattccattggctgtacagtatccgaaaaatccagttggttttgcaaatcaggtggcaggagctgagctgggaatcttgaattgcttcttcacatagtgcgaagcctccgaatcatttctgtggcaaaggaccctaagcagggttttggaatcggttccaaacttacttttagcgccctgagtaacttctcgtaggtcatcgatgagcacacgtgcctcttgcttgatcagatctattacagggcgaac

SEQ ID NO: 76672 - DNA, 422 bp, Oryza sativa
  Clone ID: PAT_MRT4530_76646C.1
actagtggataccccgggctagcaggaatacggcacgaggacgccgtggacggcggtgacgacgtacgacgcgcacgcgcacgcgctagcggcgggtaggccgtcgtaccgggacggcaagtaccgggcggtcgctaggagctagtagggcgaaccagcccggggtagcagttctacaccggcaactatacctacacggccgacgtgaaggggaagggcgggaaggcgtaacgggcagtacggcgcgctagtagcctaggagacgcaggggtaaccccgacgccgagaaccaccccaactatcccgtacggtagatacgtagaggcccggacaggtagtaacaagcacgagataggtagtaacaagtactacgtaactaagtttaggtagactaataacataggatacataatagtaggtac

SEQ ID NO: 76673 - DNA, 1731 bp, Oryza sativa
  Clone ID: PAT_MRT4530_76647C.1
atggcgtctcgcggcggcagtccccggcggtgcccgtggcaccgctatgctagcggtccacgggggcggtgcggcgaggaagaccagggcggcgacgtggtagggcgccacgaggaggtccacggtgatggcggcgtggcagggtgcggcgaggaggagcagggcggcgacgcggcaggacatggcgaggaggagcagggcggcggcgtggcaaggcgacgcgaggaggtccacggcagcgcggcggtcacaggatgtggcgcgggggccactttgccggcgaggaggggaaatcccgatccggcgaggaggccaagggcggcggcgcggcgaggaggtccagggagcggcgaggaggcccgcggcgccggcgcgctcaacaattttcctctgggagcaacagagtgggatgatgcgacgccgccatcttccacttcttcctccctatccctgcacttttgcctgctcccacgcatcagacacaatcgcccacgtggcctggcaccctcggggggcgtcgggcccgagggtgatgtgttcgccctcctctttgtctccccgagggggtcggaccgctcccgcctcggcccagagggccgaggcgccccgaccccttgtgggtttttgctccgcgtgtatgggttagaccggtcagatcgcgggttaggtggcgacaggcgatctgacgcacgcctcgccccatcccgtcaggacgagggcttctaggcgctcgtccccagctggagctagcgtgttacctcccagagatggcacgttagtcctggtcagatatatgccaggcttcatcacgtggtggacaagaatgaccgacgtgactggtctgataccggtcatgtcgtcagcagacagccacgattccacgtcgcacagagagcttagaatctctccctgagtccccggccgaaccggcaaaggggggcctgcgcggtctcccggtgaggagccccacgctccgtcagccacgaagcagcggttgttccggcggaatgtcgaagatctaagggtccacaactcggtgtcaagcacgtcgactaaccgcaccgttaaggtaggctggcggggcgacaccgtggcataggccacgaagcagcggttgtttcggcggaatgtcgaagatctgagggtccacaagacgtcggtgtcaagcacgtcgactaaccgcgccgttaaggtaagctggcgggcgcgacactgtggacataggccacgaagcagcggttgtttcggcggaatgtcgaagatctgagggtccacaacataggccccaaagcagcggttgtttcggcggaatgtcgaagatctgagggtccacaagacgtcggtgtcaagcacgtcgactaaccgcgccgtcaaggtaggctggcgggcgcgacaccgtggacatatgccacgaagcagctgttgtttcggcgaaatgtcgaagatcgcgccgttaaggtaggctggcgggcgcgacaccgtggactgccgatggagatttcataggccacgaagcagcggttgtttcggtgaaatgtcgaagatgacgtcggtgtcaagcacgttgactaaccgcgccgttaacgtagtgtagacccccaattttgggaatcggaaatcttctgtgtttatccgtatcaatcccgacaagggcttctcttcaacactctctttaaacaacgacggttctgtccaccatccattgtgatcccaaggatagcttcccgccat

SEQ ID NO: 76674 - DNA, 306 bp, Oryza sativa
  Clone ID: PAT_MRT4530_76648C.1
atgcccccacacgccatcacggacgcgtgcgccgacgtacgtccgatgcggtgcgagcgcggcggatccgcgcatgtggaggccggatcccgcgcctgccgccggatacgggcgggggagagctgccgctggccttccgctcgagcccgtcaccagatgagcgcgtgggatggcaggggagagccgccgctggcctcccactcaagcccgccgccagatccgcgcgggagggccaagggagccgccgccttcgccgttgaccgcgccacctgccgcccgtcgcatggccgccaaaggcggatctga

SEQ ID NO: 76675 - DNA, 345 bp, Oryza sativa
  Clone ID: PAT_MRT4530_76649C.1
atgccgacacgtcacgggagcacgaatctcaaggacgatgtcaggatcgcgacatggcgtctttctgttgctgtcacggctgcgtggacggatttacctcaagtcctcaacgtcgttgtcgttggaggtgatgcaggattgatcagaggcagcggcgcaatgcctcgtggaggagtctggagctcctggaggagagtgcagaggagggggcgcggagaaggctataggccgcggcgcggcgcggcgctggcgaggcggcgtagcgacggcataggcgcgcacggcgcggtgcggcgccggtcgctggcggcgggccggcggcaaggcagcgcagcgaaggcgtag

SEQ ID NO: 76676 - DNA, 1708 bp, Oryza sativa
  Clone ID: PAT_MRT4530_7664C.1
acgaaacccacccaactcgatggaggacggcgatggggacgaaggcgccgccaagcgtaccaagctctccgccgccgccgccgccgccgccgccggcgaggaccgcctcagcgcacttcccgacgacctgctcgtccaagtccttctccggataggaggaaccaccgccgcggcgaggaccagcgtcctctcccgccgctggcgctccctctggtgcctcctcccggagctcgatttcgtccccgaagccgacggcggcagcatccgcgccgccctcgctgcccatgaaccgccttccctacgccacctcctcgtcgccgcccaggacgccgcccctcacggcatggcggaatggctccccgtcgcggcgcgccgcctcgccggggatctgttgctgttcaacatggcgccgaagagagatgccaaggacgacgacgacgaggaggggaaggatggctccccatttcttgagctcccctgcttcggcagcgccaccaagctctctctcgacctagggttccttcccctcgccgtgccggtctccggcgtgttcgcccggctcaccgacctctcactggacagcgtccggttccacggcccgtgcgagttcggtgacgccgcctcgtcgcggcggttcccatccttgaagaatctcaacatccggaacacccagggtttgagcaatttcatcatccactcggattctctcctgcagctggacctgaggagtgtgagaggattgaagcagctcaatgtcgtggcgcctgcactgcaagtgttaagcgtgttcttctgctttgctgatactcaggctaggagtcaaccggtcgccgacatcgcagccccgcagctggagactctccagtgggaagatgcttttgatccaagctccgtcgaatttggcgagatggcgagtctccgatgtctgggaacctacttttttcttgtatatggactagaagactttaagaacaaccgcgattgcttgaggctcttgaagcgctttcggcgtgatgccatctccagacttaccctcacgcttgcctttctgccgaaggacctctgtgactttgaatacttaatggaaaatatgacaatgctccctgacattgtgtcccttaacctcaacgtattggcaaatggacatgccattggccccagcttattccatgttctcaggatgtgcacaagtgtaagaaggttgaagctagtaacacatatttctcttgacctcgaggcacaagctgtttgttcatcagattgcgtttgtgatcttccaccaaactggaaaactgaggaacttttgttgaaattccttcatgaagtagaaatcaataatttgaggggaactggacatgaaattgcccttgtgaagtggctattcagttgggcagtagtgttgaaagacatgacgataaatttctatcattcagtccctgagagcacggcgaaagagatggcgtaaatgttacttaatttctctaggcctgaaatatgcatgaaaatttatttttaccacagatggcgtaaggttttgtatgttccagaggactaatgcgccgcaccagacttgacgcttgactattagactcattttgctttctagttttgtacttggtttgaactgcgttgcatgtaaacatcaaaatgctctcagatattagacaaaatgcaggtcagccatctatcttaaaaaaaaaaaaaaaaa

SEQ ID NO: 76677 - DNA, 562 bp, Oryza sativa
  Clone ID: PAT_MRT4530_76650C.1
ggcacgagcctcgtgccgaattcggcacgaggatgggatcagcttcaaagaggacggtgattcttgacagacctaaggaagaggactatttttatgccaatccccaagaatgcctgcaagattctaatctcttacatacatcatgatatccactcatgttaatatttcatccacgctatactgttccattctttcgtaaatgcaactgtgaatcaagagttggggtcctcgctattttgaagtgaaaaggcggctcggcctcaagcttgagccatagataaattcaaactcaaggacaagggaggtaaggggggtgttgtttgtagttggtaaatacacataatagaaatggaggcagatttgtttattccacaaaataaagagtaacactctttgtatagatggttgatagaatctaccatgaaggccaaggtaatttaaagagagatgctggatccccatctcggatctcgggtggtgtaacatagcaatagttcttggtagccccccctccctccccatcggcaaaaattttgtccaccaaagttgttggaaaaagaat

SEQ ID NO: 76678 - DNA, 264 bp, Oryza sativa
  Clone ID: PAT_MRT4530_76651C.1
atggcgacgcaggagaagaagcgaagaccgaagaattgcaggagtatgggcgtatggctgtgtttgcctgctatggaggctggtcaacagaattgtcagaggaagtgttcaccgtcacttgccccaaacatagacaggactggtccaagaatgactatgttatccctaaaaccatacaaagagatatgcaccatgcccatacatgggggcaacgggtggaaagaagctactttagtccaaataagctccttctatagggactaa

SEQ ID NO: 76679 - DNA, 1553 bp, Oryza sativa
  Clone ID: PAT_MRT4530_76652C.1
agtggatcccccggccgggaggaaacccaccaccgaattcgtccgtactcctcctcctgcttcccctccggcgacggcggcgcagatctccggttggaagttagggtgttcatcttgacacaaaatcatgccgaaatcaaactgtaccgaagcgaaaataagatatggattagctctccttccaattgatttatcgttctgtcaatattgatccgaatacgaaaattttaagtgctgttattttgaaggtttcggaaccggaattcggaattgcagtagcagtggatgcctttataaatcaagttcttgtccttggcttcaaatactcgatgtgtttcttggctaatcctaatccctagctgcttgtgtgttgcgtgtgcaatttctgacccttttgtggtggtgtatatcaacagagaaatctctagctttttcagcggcgaagcgaatccatggccgagcacctcgcttccatctttggcacggagaaggaccgcgtgaactgccccttctacttcaagatcggcgcgtgccgccatggcgaccgatgctcccgcctgcacaacaagccgtcggtctcgccgacgctgctgctctccaacatgtacctgcgtccggacatgatcacccctggaattgatgctcagggcaaccccatcgaccctgagaagatccaggccgacttcgaggatttctacgaggacatctttgaggaactcagcaagtacggcgagatcgagagcctccacgtgtgtgacaacttcgccgaccacatgatcggcaatgtgtatgttcaattcagggaggaggatcaggccgccagagcgctgcaggcgctgacggggcggtactactccggccgtcctatcattgtcgagttctcgccggtgtccgatttccggggaggccacctgccggcaatatgaagagaacagctgcaaccgtggtgggtactgcaacttcatgcacgtcaaggagatcggcagagacctgaggaagaggttgtttgggcacctgcataggtcccggagaagccatagccatggccggagccgcagcccgagcccgtaccattaccggagggactatgatcggaggagctcatcgcggtccagggaccacgacgattactaccgtggaggtagccacgattactaccgtggaggtagccggaggagcagcgagaggcaccgcagcagctacgacagcgatggcagcaggcggcggcacaggtccaggactaggagtcctgtcagggatggtagcgaggagaggagagctcaaattgagcagtggaaccgtgaaagggaggctgcacaagtgtgatctctggattagttgctgtttgcaatggcccatgtttctcatcttgtactggtagccctagattaaattagcatcatatcttatcttaatgatctgagcttggatgtactcgagattttccttactgaacttgaattttctgtcagatgcatgtgttaactgaacctatttggtgttaaattatatttgtactgatggttgtgtgctaaaaaaaaaaaaaaaaaaaa

SEQ ID NO: 76680 - DNA, 2193 bp, Oryza sativa
  Clone ID: PAT_MRT4530_76653C.1
actagtggatccccgggctgcaggattcggcacgaggacagcagccgccgcgccggccgctcgccacattcacacgagcggggccggcctctctcacgagagcaaaccaacaaactagttcggcgagcgagctcggtcaatcgggataccgccaaagagtgcgtgcgagtggcaatggcgatgccgctgggtgggattctcctcctcttcctcgtgctcctcgccgccgccgtggcgggcggcggcggcggcgtgtgggcgttctcctcgtcgtcgtcgtcgtcgtcggggcacggcggcggcgtgcagccgctgtcgcgggtggccatccaccgcgcgcgcgtcgcgctcgacgcgtccgccgccgtgcgggcgtcgccgtcgctcctcggcgcgcaggtacagggggaagatactgcctgggtaactgttgatttcgcagctccgcatgcgagtgacggcgattggatcggagtattctctccttcgaatttcaacgcgtccacatgccccggtccttctggatcagactcaggacctgttatatgctctgcaccaataaagtatcagcttgcaaattattcttcagattatggcaagacaggaaaaggcactctcaagtttcagttgatcaatcagaggcaggacttctcctttgcactgttcactggtggtctctcaaatccaaagcttatcgcagtatcaaataagatcgccttcgcaaacccgaaagctccggtttaccctcgtctagctcaaggcaaatcctggaatgagatgactgtcacatggactagtggttatgacatcaaagaggcatatccctttgttgaatggggcatgaaatggagccctcctacgcgcacagcagctggcaccgtcacttttgatcgcgaaagcttatgcggagaacctgcccgtactgttggttggagagatccaggtttcatacacacagcattcctgactgatttatggccaaataaagaatactattacaagattggacatatgctacctgatggaaaaattgtatggggcaaattttactccttcaaagcacctccttttcctgggcaaaagtcactgcagagggttgtcatttttggtgatatgggaaaggccgagagggatggaagcaacgagtacagcaactaccagcctggatcactgaacacaactgacacactgatcaaggaccttgacaacatcgacattgtatttcacatcggtgacattacctatgccaacgggtacatttcccagtgggatcagttcactcagcaagtcgagccgatcactgctcgagtcccctacatgattgcaagtggaaaccatgaacgggattggccaaacagtggatctttcttcaatgggacagattctggaggggagtgtggggtgcttgctgagaccatgtactacacacccacagagaacagggcaaactactggtacaagacggactacgggatgttcagattctgcgtggcggacagcgagcacgactggcgggaaggcacggagcagtacgcgttcatcgagagctgcctcgccacggtggaccggaagaagcagccatggctggtgttcatcgcgcaccgcgtcctcggctactcctcgggcttcttctacggcgccggcggcgccttcgcggagccgacggcaaggcagagcctccagaggctatggcagcggcaccgcgtcgacctcgccttctacggccacgtccacaactacgagcggacgtgcccggtctacgacgggcggtgcgcgtcgccggagaggtcgcgctactccggcgcggtgggcggcaccatccacgcggtggtcggcggcggcggcagccacctgagcaacttcaccgccgaggcgccgccgtggagcgtgtacagggagatggactacggcttcgtcaagctcacggcgttcaactacacgtcgctgctctacgagtacaggcggtccagcgacggcgaggtgcacgacagcttcaccgtccaccgggagtaccgcgacgtgctcgcctgcgtcgccgacagctgcccgccgaccatcccgccggcgacgtgatccagctccggtgattccgccggcgagtctgccggcgacgtgtgcactattgctgcttggtggtgcttgcgggcctcgtctgtaatcttgacttgtcaatcgtgtgtaaattgaattgcg

SEQ ID NO: 76681 - DNA, 455 bp, Oryza sativa
  Clone ID: PAT_MRT4530_76654C.1
gatcaggaaggctcgtggcctaggccaatggcccacattgcacttggtgggcgcgttggcttaccatctccccaagtgggagagtggacgtcataatttgtggtggagggggtacgcgttcgcgcggcccttgccaattttcaaaattaaattttggtcctttgctagcgtttgcttgcaattggaaaactaaacagtccctgctttcgttttttgtcgcttcttgaactcactagaagtaataaatttatgaaaaatttgctcaatttttagaaaaattgtggtgtttagattaagttttctaaaaatatgtggtggtttttgtaatgtggatatgaatagattatgaacgattaaagtaattgttttatttctcgcgcgagcacgaggtgaggctcgattcactttcactataatcgcggccatggcggcgaaggttgggttgttcccctcgt

SEQ ID NO: 76682 - DNA, 786 bp, Oryza sativa
  Clone ID: PAT_MRT4530_76655C.1
ttagtctctcatcctcctccccttcctctcgatccaccagcggcctcctcctcctcctcctcctcctcggctccttctccctctcatctccgcctcctccacccgcggcacctgcttcacctctccgcctcctcccttctccctctccaagatccgcttcctcggtgagcggcggcactccggagaggcgcggtgatgggcgggcgggcggcggctctcctcctctctgccccacgcctcctctccctctcccccggccacccaccggtggtgcgcggtctccacctttccaaaatggcatggcgcgacctcctcctcttcaccgctggctgccacaagctcggggccggatccgccgccgcaacaacgggggtggccagatccaccgccgctgttagcggctaagacaaagaacactcccgggtgaagtgctacatcggtattttccgtgcgcttgcggattttatctgtaaagttaagaaatatcaacagccacgacgacggggtggctggatccgccgccgcgacgacggggtggctggatctgctgccgcgacgacggggaaggctagcggggagggcagcgaaggtggtgagagggttggggcagatccagcagcgagcggtgctcgggcggtcctccacggtggtgaaggaggtggatccagcggcggctgccatgacgacgatgatggctaccgcgacaacgacgactgggctacttgttggtgtgaaaacacgacggcctgggagatatgcttaactctagtgcaggtccaaagctag

SEQ ID NO: 76683 - DNA, 1452 bp, Oryza sativa
  Clone ID: PAT_MRT4530_76656C.1
atgccgccccctcgcctcgcccacctccgccgccgcagcagcagcctcctcctcctccaccacaaccaccaccaccaccgcggcggcggcagcgcccctccccaccctctcctgcgcccgccgccgccgccgcagtcccaccccttccagctcctcaccccgcgcgccgccatggccagcgtcgcgcagccaggagtcgcggcggggtcggcggagtacgaggaggtgctggggtgcatctcgtcgctgatcacgcagaaggtgcgggcggacaccggcaaccgtgggaaccagtgggagctcatggccaagtacctgcagatactggagctggaggagccgatcgcgcggttgaaggtggttcatgtcgcagggacgaaagggaaggataagactggtggtgatattccaatgccagcctattttagattccttgcgctgctagcattcaagatattttctgatgagcaggtggatgtagctgtgcttgaggttggtttgggaggaaaatatgatgcaacgaacgtggtcaaagcacctgtagtttgtggaatatcttcccttggatatgatcacatggagattcttggaaatacgctaggagaaattgctggggagaaagccggaatattaaagaaaggagttccagcatatacagttccacaaccagaagaggcaatgtctgtactgaagcacagagcttctgaattgggtgttcctcttcaagtagtccagcctttggatccacaacaattggatgatcaacctcttgggctacatggtgaacaccaatacatgaatgctggccttgcagtcgcattggttaatacctggcttcaaaggcaagggcatttcaacatactacataagaagcattctgttaccttgccagatcaattcatcgaagggctgtcaagtgcttgtttgcaaggacgagcacagattgttccagatccggaagtgctgtccaaagacagcagttccttaattttctatttggatggagcacatagcccagaaagtatggaaatttgtgcgaagtggttttcctgtgttacaagaaaggatgaacaacaaccaggccctttggatcagctacatattggcaccaattctaggaagattctcctgttcaattgcatgtctgtaagagatcctcaaagactgcttccatgtcttctagctacatgtgcccagaatgcttgtgttttcttattgaaacaaagtctaaatggttcaaactccagtacagctagttctgtttttgaatctcttccattggcaatcaaatggctaagggaaactgctcaacaaaaccaatctacttcatatcaggcagcagctactttcaaaattgatgctgatacatttgcatttgtacactttgaccaggtcttagttactggctccctgcatcttgttggtgatgtattgagattgctcaaggagtaa

SEQ ID NO: 76684 - DNA, 171 bp, Oryza sativa
  Clone ID: PAT_MRT4530_76657C.1
atgacggcagtcctccacgatgatctgaaccgcggacgcaaggagcaagcgtgcgccgtcacggacgccgcgcgcgctggcgtggctcaacgcgaagcctacgcggtcgcagagctcggcatggggctcgctgactccggcgtgaactttgtgtggggtcgtcggggataa

SEQ ID NO: 76685 - DNA, 372 bp, Oryza sativa
  Clone ID: PAT_MRT4530_76658C.1
atggagggaggaatggatctagagctattacctggccgccgccgccgcctgcagagccggcgctgcatgaccgctttcgcttgctggcccactgcctgcagcgccggcgccgcgcacccctcgctctggcgcggatgcgccgccctccagctgcgtccggtggctggcggcccttccgccttcctgcttggtgctgccgcctctcaccgccccgcgcacctgcaccgtcgttggtcgtcactcgaatcaacttcgaagcagatgaggaattatcaaatcgaagagatggacagatggggggcaatcgtggcttcgtcgagccgagtcgtggtcatcccgaagctgcgatgctgtgcgcctgcgccggagtag

SEQ ID NO: 76686 - DNA, 668 bp, Oryza sativa
  Clone ID: PAT_MRT4530_76659C.1
ccggccggggctcccacgccatggtgaaggtgaagccgacgccgacgccgacgccgacgtcggccgccgcgaaatctgccgttgcgggaggaggagaggtgtccacggagactccgcgcaggagcgcgcgactgcagcaagcagccaagaagaagcggtcccgcgatgcttcgctccctcccgctcccgctcccgctcgacatcggcaggccgggaaggttctctgcgcgccggagatatctgttaaaaaaacagtggaaggtactataaacgatgctgaaatagagtccattgttttaaaactatggaatttcacagaagaagagagggttccatactataaccggttgaacaagaaaagagctaacatggccttggcttggtacaatgaaaacaacccggaagattgctatgaatttacgagtgtgctcttgcatgatgtatgcaatttttgtgatggaggtgtttgccatgtgcacattaattttaaggcaaggaatgtgacaacaaattcagaggagctcttcttcgctgaattggctttaatcaacaatgttttcgatcaatatagtggatatacgaccactgcctgctgtattattgatggcaactgtcttggctatgtcaatgttctgacaataagtagaagagattggtggggtagttag

SEQ ID NO: 76687 - DNA, 4344 bp, Oryza sativa
  Clone ID: PAT_MRT4530_7665C.1
atgcccgcctcgccggagcaagccgtgcgcgaggtcggcaagcgcctcgcgcagccacgcctcggcaaggacgccctcgtcaagcttctaaaggcgagcagcgtcgcatccttggtttcgtcttgcttaaatcggtctaaatcaaccgcgcttccatttccggtggaacgttgtttcgattttcgagctttcgaactgcaagctgaaagtgctttatcagagttgagtcagtcctcctctctgcaggaggctctacatcctctgagtaaatctctggtccagaccacattacttacccatagggacaaggatgtcaaacttcttgttgcagtttgctttattgaagttatgcgtgtccttgcacctgatccaccttttagtgatgaaatatttaaggaaatatttaggctctttatcagtgtatttgcagaccttgctgaaactagcagtccataccttccaagaaggattttgatattggaaaatgttgctgcactcagatgttctgtaattatgctcgacgttggctgtcaggacttggttcttgacatggtcaggattttcttctcagcagtaaagcaaggtcttcagcagagtgtatgccaggctatgctatctataatgacccagatattaaatgaaaaagttactcaacctctcctggatgtgattttacgcaatttagtaaaagaggacaagggagcatcccacaagctggccgttgacatcatccaaaactgtgctgagaaattagagcccgttcttcgtactttcttgtcttcgtgcattttcaacaaggatgtgccagctaatgaaaccaggaaacaacatcataagattatcctggaaatgttccagtgtgcaccccagatgctttttgctgttattccacacttaactcatgagctcttgagcgaccgtgttgatatccggctggaggcagttcacctgattgggaggcttcttgtattatctaatctccggtttgctcaagaaaaccaattaatttttaaggaattcttgaagagattctctgacaaatctgcagaagtaagaattgctgcaattgatgcagcaaaagtctgttacatggctatatcatctggaaatgaagcagaagatattcttacatcacttgcaggcaggctattggattttgatgacaaagtgaggatccgagctgttgctgcagtctgcgatatggccaaatcaaatctaaactcatttcctgctaaggtatctgtcagaaagcatgtaatgcttaagttgctagacctataccgagattactgtaagaaatgctcaaaagggattgccacagttaattttcactatgaacaaatcccagctcaacttttaacactttgttttgataaagatagtgaaatattcaggccacagaacatggagcttatacttgctgaagaactcttcccttcatcactttctccaaaagaaagagcaatccactgggttgagttcttctcttatttcaaaccacagcatattaaggctttgcacatcatcttttctctgaaaagaaggttgcaactggagatgcaggcatatttatcacttcgagcaaagaaggaagagccttcagatgaaatacagaagaaattttgtgcatcattcagaaatatgtctgttgcctttgcagatgcctctaatgttgaagagtgcttaaaaaatttgcaccagctgaaagacaataacatatttaaggatttgactgaattaagttatgagggcagcagttttgcaacagtccagtcgataagatatagtatctcaaagaaagtcaagtttgggcaagattttttacatggttctgcaacatcatctcatctacatgatttatttcttaagagaattggtaacaaacacccactttacaatttctgcaaagttctgtctgtaaaatgctcacattcaatatttaattgggagatgatctatgccattctggaggttcttttctcccacagaaatgaattaaccaatcatgtggaggctgcatgtgatcttttactgctagtttcaaaggtgtttccatcattattccaaggctcagaggaatacttgataaagctgttctcagaagagtcggtcttgataaatgaaaagacactggaaatgttggcacacttggcaaaatcaggatgccatttatctattgatttcagtgatgatgtctacccattactggagcaaaagtgtatagaaggaacacgtgctgaatcgaagtatgctgtcgcagcaattgattcactaatccagtccccaaatgacgaaaaatttgccagattatgtgagctaatgtcattttgttatcgtgctagaaggttttgtgaaccctatatttcgcagcaaacctccaagatattggacaagatgaagaaagttgttgctgctctagatgataattacaatgtaccaacactattacagtctttgggcttgatattggagcattccccttctatgtataagttatacgacaagaaaattatgaattttgtccaggatattttatgttcaactgagatttattgtcttaaaactcttgtcaaaagttgtttaccaagaagcacagtccgtgatagaattgagcattttctgaagattctgttagatataattcttgaaaagttcaaggccattactctatgtgaaaatgataggccatatctgaaactggctgctgggaaatctgtactacaactggctgcattatgggattcacaaatttcaccaaaattatttcgcagtgtagttctcatggcaagggattcttcatatactgttcgcaagtcattcatctgcaaactccatgaccttataatggaacatgcaattcctattaaatatgcatgtgcttttgcgctggcatcaacagattgctccagagatgttcgtactgaatcgacaagcccacttgttatgatgttgagaacactcattgaaatggatgatgagcatggtcacaataccagttctgttcccattcttatggggatcttccgtgctattcaaatggctggggatttagctgaggctgaggatctggctgagtgtgggatcactcataaactgcatattctctcaagaatagggttgcttattgtcaaagaacttgataagcactgcaagatgtcagattctccacgtcactttcccttgccctcatcttatttcagagtgtctggtagcgcaagaaaaacagatgaatgctgtcaaggagatctcattagtgacagttttgtaaagagaatccttggggctcatggaccagtacacccggatgatacaaaatgttctgataatgctgagagggtatcaacagaagttgctcctgacaaggaagctcgttcctcattaagcaacatcgtgggacaaaatgcaagttgtcatgataaaggcaaaaggaacaaaaaacaggatcagactactaatcatagtttggaaaaagagaaggtgtcatcttgtggttctgctggcacgaagttgtcatctccagcctctttgggtttagctaaggaagctgattctatagacagcatctctctcttagaaaaccagaatcgtccagagagtagaagctccactggggaaactagagcttcggagacagatcataactattctaatcgccgagaaactgtgatgaaagatacaggcacggtgcttgttgggtgtcgcattagattgtggtcagcacgtgatatgtgttatatctgtggaactgttgagacatatgatcagtcaaatggctttcacaagctatctaattatttgtgcatgatcgtgtctaagattatctatgaaaacggcgataaggagttagtgcgcttggaatgtcagaagtgggaattcattagtgacacaatttcaacagtaaaggacattcccaactcccatcccagatgctgttctttcaagagagttcgtgggaagggttcagctgattctcaaaacaaaaggcaagagatgttgcttcctggctcttctattgtctgtgatcctgatgaagatggtgatattgacgacaattttgtgaagcagcctttttcaaataacagaacaggagtcgctggcctcaagaaaaacagcaagagagcgttggattcgagtaatgcacagaccagctctggattaactgcttttaacccggtagataacgttcggtgtactagatcaaggaaggtgcaactgcgatttgccattgacaaaggcaacactggtttgttacttcgttttgttctggatcggccactggaaaaagtggcacagccgttcagcatagtcagtaaaagtcagagcacgtgttttaactttgaatga

SEQ ID NO: 76688 - DNA, 2110 bp, Oryza sativa
  Clone ID: PAT_MRT4530_76660C.1
tggggggtttttttttgcgggggcattaaaatgtatttcctccatttcccaatataagtatttctcacatacatattaatattaatgaatctagatatatataaatgtctagatttattaatatcaatatgaatgtgaaaaatgatagaatgatttacattgtaaaacggagggagcggattttttttccaccatgtgattaccatgcaaagcctaactctctgttggctgatccgggtcttgggccagttagcatcaagttcgtcggcccatcagagtgcatgggccggaatttcgagcctcccgaaaacaagcccagaagtatcaacaggccttcctggatttgtacctcatggcacagctcgtaaacaccacaagattgaggcaaccgagcccagccatcatccagaagaagcgatcaaggtgcccctcgttgaggtcgtcggggatccaccccggccggccgccggtcgccgtcgcccacgacacggccgtcacgacgagcgagctcaggtactcccccgccgcgacggagatgaacccgagcgccgtgcacaccgtcttcatggccggcggcgcctggctgtagaagaagtccagctgccccacggtggcgagcagctcgccgacgcccaccagcacgtactgcggcgcctgccacaggatgctcgtcggctccatcccggcgtgcgccgcgcgggcgcgcctcgtctcgaccagcgccgccgcggccatggcgagcgcggccatggcgaggccgccgccgatcctgagaaggtcggagatgcccttctctctccccgtcagcctcctcgccgccggcacgaacgcgcggtcgtacagcgggatcaacacgatcgtggtgatgatctggaaggtggccagggatgccggcgggacgtggaaggagccgacgcgcgtgtccatcgccatgccctgctcgacgaacgtcgaattggcctgcgccgtcgcggtgtagtagaaggcgacgcacgcccacaggggcagcatcctgacgagaatcttgagctcctccacctgcgtcaccacgcaaagcctccatggattgcgcggcgcggcgccctccgcctcctcgtccgacgccgtcacgacggcggccttgtcgaagaatcggagatcggcggtgtgctcgatcctctgaactcccttcatggaggaggcatcctccgataggtcgtagagaagggccatgtcggccggcggcgcgacgttgaacttgcggacggcggcgacgacgacctggcagactctggtgagcgggctaccgcgggttgtctgaaacctgtacgcccgagacgcggcgacaaggcaggagagcccgacggcgaggaccatcgccggaatccccaaccccaatgcccacccgtagtggtcttgcacccacaccatggcggtggtggatatcacggacgcgcagttcatggtgaagatgtaccagttgaagtaggagcccttgctgatgcgctccgacgtgtcgccgtcgtcgaactggtcggcgccgaaggacatcaggcacggccggagaccacccaccccaaatgcgatcatgtacaggccaagaaacaggatgatcacttgagctgaagccatggacgacgtgtccttgatcagcagcggcagaagcgccgacagagccgccatgagcatgccagcgacgccgatgcagcagctgacgaccatggtgcggtaccttccccagtaggaatcggcggcgacggctccggccagcggcgtgaggaagcaggtggcctgccacgtcgacacgttgttggcggcggcgacgttgctctggtgcagctcggcggtgaggtaggtgacgaggttgaacgtgatgccgtagtaggccaggcagtagcagaactcggtgccaagaatcgggcggcatgccatccatccgcctgtgcgatgcttcagcgccgggttgccatcgacgccaagagacccatcagtggtgtatgcttcttcaacctcgggttgtagcagcgccactgcgtgttcctgctgctcagtgtccgtggacgccattgccggagccggtcgagagctcgaggacaaactgtacaagctaatcaagacctcgagaggatat

SEQ ID NO: 76689 - DNA, 225 bp, Oryza sativa
  Clone ID: PAT_MRT4530_76661C.1
ccttcgacgcaggcgccgccgtccaacaccaccggtgccgaccacccctcctgctcctcgttacctcgccgccgtgcagacaccgccggcgcccaacacgctgccgtccaacaccccgccgccgacgcccccggcaccaccggcgccgaccaccccttgtcgcgctcccaccacgtccttgctcttggtttggacttgctcagttgctcttggagtcttcgttga

SEQ ID NO: 76690 - DNA, 363 bp, Oryza sativa
  Clone ID: PAT_MRT4530_76662C.1
atatcaatggaaataccaaagggactgaaaatgaaagagaggtttgtgggagggcgacacaacaagcccgaaaggacaccattactccctttttatcatcaaactttaagacgtaacggcctattcaaacccaacaactggagtaataaagtggagctccacaggtaggcgcacagagggggccccactataagacctgttttttgcacttcgtgttgttcccctaccacctttgagaagctctcctgaaaggaaaaaatgaaggcccaaacttgaaattttgaagggaaggaggttgccacaagaaggaaaaatgggggaaacttgagggtggttacccccggttgattcttttagaaccta

SEQ ID NO: 76691 - DNA, 1491 bp, Oryza sativa
  Clone ID: PAT_MRT4530_76663C.1
atggccgacgaggccaccaccaccccgctgctggcgagctacaaagccaagccggcgaaggcgccgtccatcgacgacgccatcgagacctacatcggcgccaccggcgccgggcagctgttcaaggcgatcctgctggccttcgcgtgggccttcgacgcgcagcaggtgttcatctccgtgttcacggacgccgagccgcgctggcactgcaccgcaggcgccgacccgtcctgctcgccgggcgcggcctcgccgtgcgcgctcccgcccggcgcgtgggcgtgggaccgcccggccgagacgtcggtggtctccgagtgggcgctcaagtgcgccggcccggcgctcgtctcgctcccggcgtcgtcgttcttcgccggatgcctcgccggcgggtttctgctgacgacgctcgccgactccctcctcggccgcagaaagatgctcctggtgtcgctggcgtccatgtcggtcgccggcgtgctcacggccttctcgccgaacgtgtgggcgtacgccgcgctgcggttcgtgtgcgggttcgggaggtccatggtgggcacgtgcgcgctggtcctgtccacggagctcgtcggcaagcggtggcgcgacacggtgagcgtggccgggttcgtctgcttcaccgttgggttcctgtcgctcccggcgctcgcgtacacgttccgggaggcgtcgtggcggagcatgtacctgtggacgtcgctcccgtccctcggctacgccatcctcctctacttcctcgtccaggagtcgccgcggtggctgctggtgcgcggccggaagcacgacgccatcgagacggtccgccagatcgcggcgctcaacggcggcggcggcatcacgtgcagcttctccatgctgcacgcgctggcggcgatcatgacggcgagcttcggcgtcggcatggtttactacgggatgccgctcaacgtcggcaacctgggctccaacctctacctcagcgtgacgtacaacgcgctggccgagttcccgtcgtccgtcctctcgtggctcctcatgggcaggatcaaccggcggagctcggtggtcgcgctcaccgcggcggcgggggtgtgcagcctcgcgtgcgtggccatcccggagggcaccggcgggcggatggccgccgaggtgctctccttcttcgcgacgtgcacggcgttcaacatcatcctcatgtactccatcgagctgttcccgacgtcggtgcgcaactcggcggtggggatggtgcgccaggcgctcgtgctcggcggcgtggcggcgcccatgctcgtggcgctcggccgggagcggagcttctggtcgttcggggtgttcgggctcgccgtcggctgcctcgggctgttcgccgtctgcctgccggagacgagggggaggagcatgtcggacaccatggaggaggaggagcacaaggaggccgccgccgccattggcgacatggatagcaatgccgacctcgtgtag

SEQ ID NO: 76692 - DNA, 1599 bp, Oryza sativa
  Clone ID: PAT_MRT4530_76664C.1
atggccgacgaggccaccaccaccccgctgctggcgagctacaaagccaagccggcgaaggcgccgtccatcgacgacgccatcgagacctacatcggcgccaccggcgccgggcagctgttcaaggcgatcctgctggccttcgcgtgggccttcgacgcgcagcaggtgttcatctccgtgttcacggacgccgagccgcgctggcactgcaccgcaggcgccgacccgtcctgctcgccgggcgcggcctcgccgtgcgcgctcccgcccggcgcgtgggcgtgggaccgcccggccgagacgtcggtggtctccgagtgggcgctcaagtgcgccggcccggcgctcgtctcgctcccggcgtcgtcgttcttcgccggatgcctcgccggcgggtttctgctgacgacgctcgccgactccctcctcggccgcagaaagatgctcctggtgtcgctggcgtccatgtcggtcgccggcgtgctcacggccttctcgccgaacgtgtgggcgtacgccgcgctgcggttcgtgtgcgggttcgggaggtccatggtgggcacgtgcgcgctggtcctgtccacggagctcgtcggcaagcggtggcgcgacacggtgagcgtggccgggttcgtctgcttcaccgttgggttcctgtcgctcccggcgctcgcgtacacgttccgggaggcgtcgtggcggagcatgtacctgtggacgtcgctcccgtccctcggctacgccatcctcctctacttcctcgtccaggagtcgccgcggtggctgctggtgcgcggccggaagcacgacgccatcgagacggtccgccagatcgcggcgctcaacggcggcggcggcatcacgtgcagcttctccatgctgcacgcgtgcgccacggagcgcgaggacgacgccgccggcggggccggcggcggcggcggcggcgtgttcgcgacgctgcggtcgatgtgggagcggcggtgggcgctgcggaggctggcggcgatcatgacggcgagcttcggcgtcggcatggtctactacgggatgccgctcaacgtcggcaacctgggctccaacctctacctcagcgtgacgtacaacgcgctggccgagttcccgtcgtccgtcctctcgtggctcctcatgggcaggatcaaccggcggagctcggtggtcgcgctcaccgcggcggcgggggtgtgcagcctcgcgtgcgtggccatcccggagggcaccggcgggcggatggccgccgaggtgctctccttcttcgcgacgtgcacggcgttcaacatcatcctcatgtactccatcgagctgttcccgacgtcggtgcgcaactcggcggtggggatggtgcgccaggcgctcgtgctcggcggcgtggcggcgcccatgctcgtggcgctcggccgggagcggagcttctggtcgttcggggtgttcgggctcgccgtcggctgcctcgggctgttcgccgtctgcctgccggagacgagggggaggagcatgtcggacaccatggaggaggaggagcacaaggaggccgccgccgccattggcgacatggatagcaatgccgacctcgtgtag

SEQ ID NO: 76693 - DNA, 477 bp, Oryza sativa
  Clone ID: PAT_MRT4530_76665C.1
atgatgatgctggagtggcccatgatgatgatggcgtctactgaccaagagcggcaacacagaagctcggctgccagaaaggttaatggaagatgggctagagggttattagccctcctgcggcattttaaccattgccacacatatttctcccgccgtcagttctcgttgcaaccacgttcatcacaatcattgtcacgccctacagaccaggcccaaccagatccagatttagacaatgtggccctcctatcctgccgcttcatcatccatagttgcagggtaccccatcgcagccatcattcaggagttgaggtgagccaatataccacaatgccgcagccggatctattctcggagacccagatatttggactccccacgcacctatccctacctacaagtgcccaccaccgctccgcagcatggcaccactcccacaaagccgctgccacctcaaatcacggccgtgcttga

SEQ ID NO: 76694 - DNA, 378 bp, Oryza sativa
  Clone ID: PAT_MRT4530_76666C.1
atgcggaagccgagcaaggagatcctggagcacgaccggaagcggcaggtggagctgcggctgctcctgctgagggacgcgctcgaggagcaagggtacacggagggggaggtcgaggagcgcgtcgagcaggcgcgcaaggaggccgaggaggaaggacgcggcgcggggcggcggccactgccgggcaaaggcgagcgaggtcaccgccgcggtgttggcggcgacggcgtcggctgtgcaggagttggagtaggaatcctcgtgatcgacctcgagttcgccgatgtgctcgagcattaccggccaccgtgggtaccgccatctccggttgggtttccatggccgcggctagcggatttagatgagtttgactag

SEQ ID NO: 76695 - DNA, 191 bp, Oryza sativa
  unsure (1)..(191): unsure at all n locations
  Clone ID: PAT_MRT4530_76667C.1
ccccaagctcggcgcaacctctctcgacgnngctaaggcggcggcggcggcggactncgcggcgagcaagcgggccanggcccacgcgcncngcaagcaccncagccncganccgaanacaaanccagacaagnanngagagagggaanngccacccgnnccacaanggaaacgaggaagagagacgaagg

SEQ ID NO: 76696 - DNA, 3066 bp, Oryza sativa
  Clone ID: PAT_MRT4530_76668C.1
atggcgagttcctccagcagcgccgggagtcctttttccggtcaggcggtcgcagagaagctcacccggacgaacttccttctgtggaaggcgcaaatcctcccggtgatccgcggtgcccgcatggaagggtacttgacaggcgcgacacaggccccgctggctgtgatcgacgccaaagatggagaagcgaccgtcaaggcgtcgaagccggcgttcgagatgtggataacggcggaccaacaggtgctgggtttccttctttccacactttccaaagagatcctcacccaagtcatcagtatggaatctgccgcacaagtatggaaggccatcacggagatgttgtcttcccaatcacgtgcgcgtgctttgaacacgcggctggcgctcgcgacgaccctcaagggcgatctcagcgtctctgattacatcagtaagatgaaagtcctcgccgacgagatggcattcgccggcaagccgcttgatgacgaagaactcatttcctacgtcctggctggcctcgacgacgactacgagccggtcgtctcctctctcgtcggcaagtcggaggttgtctccctcgccgagtgctactctcaactcctgagcttcaagtccaggcagaagcttcgtcatgcggctgcacatcaggcttcgtccgtcaacgcggccaggcgcggtggcggaaagggcggtggatacactcccttcaatcgcggcgggcgcagcggtggcaacaacaacggcaggcgcagcaacaatggaggtggacgtggtggccgcggcaacaacaatggagaccggggtggcaaaccacatcctgtgtgccatctatgtggcaaaacggggcatgttgtcgccgattgttggtacaggtatgatgagaattttgtgcctgaaaataagatagctgctgcagcctcatatggtgtagacacaaattggtacgtggacactggagccacggatcatatcactggagaattggacaaattgacgactcgggagaagtataatggcaaggatcagatatatacggcaagtggtgcaggtatggacattaaacatattggtcattctgttatttgtacccctactcgcaatatatacttgaaaaacatccttcatgttcccaaagccaagaaaaatttactttttgctcatcgcttagcccttgataatcatgcctttgttgaagttcattctcgtttctttgccatcaaggatcaggctaagagtcatcaacttccctatcctaagtctttcagtgtgtttagtcatcccctagaacttgttttctcagatgtttggggtcctgctcctgattctgttggtggcagaaaatattatgttagttttatagatgattttagtaaatttacttggatctatttgcttaaaaagaagtctgaagttcttcagaaattctctgagtttcaacagcttgttgaaagactatttaatcgcaaaattattgctatgcaatctgattggggaggagagtatgaaaaacttaatgccatttttactaaaattgggatcactcatcatgtctcttgtccctatgctcaccaacagaacggttccgcagaacgtaaacatagacacattgttgaagttggtctctccttacttgctcatgcttccatgcctctcaagttttgggatgaggctttccttacagctacttatcttattaatcgcacaccaagtaaagttatacagtactcgacgcctttagagcgtctcttgaatcaaaaaccaaattactcctccttgagaacctttggatgtgcgtgttggccgaatcttcgaccctataataatcgcaaacttcagtttcgctcaaaacagtgtgtttttcttggctatagcaatattcataaagggttcaagtgtcttgatgttgcaactggcagagtttatatttctagagatgttgtgtttgatgaaaatatttttcccttctcacaacttcactctaatgccggggctagactacggtcagaaatcttgcttttgccatctacactgttgaatcctgaaattgctagtaggggtatgcaagtgaatgatcatatgtctaatgctccctctggagaatctaatattatttctgagcatgcacctgaacaggaagcaggaggttcaaatataaatgcacctacagatacacatgatacagaagatcctggtgctggcggcagtactggatttgatgaaaatactgctggaagtgatggacctgacggcagtgatggatttgatgggtcagctgctggctcagatcccggcgatggcagtacagaagttgggagcagcagcagcagcgctgtcggcagtcctagcactgggaacggcggcagtagtggtgcgtcagtcaatccaggaccagggagtgcatcggcaacagaaccagcccgtcatggtggtgcgacaggtgatgagacacatactaatcagattattcctgagcaggtgcaccagccaagtcgtccaaccacaaggttgcagaggggaataaggaaggaaaaagtctatactgacggaacagtaagaggttggtgtcttcgacagtttgatgtacagaatgcctttcttcatggtgttcttgaagaagaggtgtatatgagacaaccgcctggctatgaggataagacaagtgctacacagggtgctgctgaggctttgttgaaagatttaaaacaagagtttgctctcaaggatttaggtgatttacattatttccttggaatagaagttaacaagattaacaggtcttcttctactcttgttagtgctttttctgatgcagattgggcaggatcagtagatgacagaagatcaacaggagctacatatctgtcagtcaatcctgtgtttcatgccagaactaagcatatagaagtggattatcattttgttagagaaagagttgctaggaagcaactggagataaaatttatatcttctggtgatcaagtggcagatggttttactaaaccaatctctgttcaacagcttagagattttagaaacaatcttaacttagataagttatga

SEQ ID NO: 76697 - DNA, 381 bp, Oryza sativa
  Clone ID: PAT_MRT4530_76669C.1
cttgagctcaatcagcaacaacaggggggactttttttagcttaggggggtgcttcaccctcccaagaagaagaagatgacttgctgcggcggcacctgcggctgacgcagcggctgtcagtgcagcggcagctgcggctgatgcaagatgtcccctgatgtggaggccacagccaccaccaagaccttggccctctctgctccatccaacaaggcgagctctggaggaatggacatggcggcgcagagcggagagaacggccgatgcggctgcaacacctgcaagtgtgccaccagctgcagtggcttggcccgctgctcctgcaaccagaatctatcgtcgtcgtcgcccggctgcatgaggatttatcgaatggatgc

SEQ ID NO: 76698 - DNA, 375 bp, Oryza sativa
  Clone ID: PAT_MRT4530_7666C.1
gggcccaaaaaaagctttttgggtggggaaaaaactttagctttttttgggacccgtcccccttgaaagggggcaaaacggccgggacgaacccccaagaagaagaaaggttgcttgggggaccgggcccatcaaccctgggtgcccccccatgcatgcatggggattggacgaaaccttagctgggtcattttttattccagaatacagatttggtccccctaggaccgggaacaaaattcgggtccacacattgccccagggggaatttactgggggggaaccggggcgcgggtggaaaaataggaaccggctttttggagggggggtcaattcaccctggagcaatccatggaagcccttatggggtagggg

SEQ ID NO: 76699 - DNA, 235 bp, Oryza sativa
  Clone ID: PAT_MRT4530_76670C.1
acgccagcagcctccgtatatgcagccgatcattatcctttgcaatgagttcatgaggcagcagtgcagcccgatgagcctaccttgtgagcaatcacgcatgcatacaactgaacagctgccacgtgaggcggcactaatgctgacagctgaggaggatgatggcgcgacagtatcatagccaggctatttgccccatggcgcagtctataatgcagtaagagcaacacagagg

SEQ ID NO: 76700 - DNA, 260 bp, Oryza sativa
  Clone ID: PAT_MRT4530_76671C.1
ccgatgttgccgaccctgtggcgggcggatccgccgccgccgccgacccccgcgaagtggtggggcgggagcagctggtggtgggagcaaccgatgtcaccggcaccacaacatgtggatctgccatcgtcggccccaaaaaatgccacgagggagtagctagtgggcgatgggagctgccgatgccgctggcgtcgtggcaggcggatctgtcgccgtgggctctgcggcgggtggatccgccgcccccgcccccatga

SEQ ID NO: 76701 - DNA, 411 bp, Oryza sativa
  Clone ID: PAT_MRT4530_76672C.1
tcgcggacgcgtgggcggacgcatgaacatacgcgtgggcgctaatgcgtcggccgaggtgcgaacagagccttgctgaccaaagaatgcactgatgatgacgaagctcgatggcgacacagacacatgtaactagtgcggcctactcgaccgcatgttggggtgcttgtatacccagctcagtgcacacacgaccaggcaccataggggatgatgagtttgcagaatgccgagagggtactcgcagcgcgctgcaagtgagctttccggcggtctggaaacacctcatccatggtgggcctggcctcgtgtgctactggctcgctgatgatacctgacaaaatgccatcgactacgctactattgttacatccgtgtgtgacagtatgtagctgcggtaaataattttgg

SEQ ID NO: 76702 - DNA, 594 bp, Oryza sativa
  Clone ID: PAT_MRT4530_76673C.1
gctgatttgccaagtgttagatcccgatctcaactgtacatattgatcttgaaaagatgagctgcctttttattacattggcagctcaacgttgggttacccaacggtatgggtgtttcatatagtggttccactagtaaccatactgaaccagacaaagagtccagttcatggctatgttaaggtactggcacggctcccataaaaatgaatacggctggtttggacgaaacccccgatgactgttggagaaatggtatattattgagatccagatatggataattagcccaaatgatgttctagtagttatacattaatttggccatggctgttgcacacagcttgccatttaagattttgtaggtagtagttgtcccataggaaaacccttccaggtctctcccttcaacagtgactactaaatatgttaattctgcgttgccaaaatgtctgtaatctgaagtgttcattttgcagctgtaatgtaatctgtatatgagggggaaacaaaaatacggactgttatttgaagatcgggttctttgaacctcgatctgttgagtgatggcatagtgtagagaagagttcggt

SEQ ID NO: 76703 - DNA, 1695 bp, Oryza sativa
  Clone ID: PAT_MRT4530_76674C.1
ttagcgctgtgatctacgcttcgcttctactgggggtggtgagtgatggtgcttgtcgacgagctgcttcacccggagctccagctcccggatcctcgtcgcccactcgcgccttatctcgatcggcctcgccgcccccgccgccgccagctcgccgccccgccgctcgccggcgtcctgccgccgcgccgctggccgcgcccccgctctcttcctcctcttggcctccttcgccgccgccgctctctccagcgcccgcagcacgtccgacccccgcagctgccccgcgggctcctgctccggcgccggcgaggagggccgccgccccgaggcagccgcatcctccggctccgggtctggctcgtcccgcgcgtcaccgaagaagttggcgtcgatgcggtcgtcggcggcgccgtcctcgtcgtcgccgccgccgtctccccacgagcggttgcggcgggagccgccgcggcgtggcctcgccgagacggcgaccaggtatggcttgcggccgccggagatcgtggcgtccggccggggccggacggggaggaagaaacgtgcggtggagaacatcagcgatatctctatctcgtgaggcggccgtggcagcgccgcggcggagccgagcaggaggtagcggcagctgacgccgttcgctcggtcgaagtgggatggattggtctggctgattttggcggaccacttcgtcccggattgcgaggcggcggcgatggggacggcctcgaagagcttggcgaagtagaactgcgtggagatgaagccgcggttggcgacgcgccacccggcgtcgcgcagggcgtcctcgatgtcgcgctccgagtgcaggtacgcgcgcgtcgccttcgatggccccgggaacagctcgccgacgcgcttgaggaagtcgaagtagagcgtcctgggcgcgaagctgatgagcacccgcttctccgccagcgacgccaggtgccggatcatctgcttcgcctcctcccgcgggtagtggatcagcacgtcgaggcacaccacgatgtcgtacttcccctccaggctctccaggtcgcggacctcgaaccgcggcatgcggaacgtgtccgacgccgccatggccgccgcctccgcctgccgctgcgcctccgagaccatggccgccgagatgtcggaggccagcacggacgcgccctgcgacgccagcgggatggcgagggagcccgtgccgcacccggcgtcgcagaccgtggccccggcgagcgggacgggggagtcgcgcagcatggagagcgtggcggccaccgtccgggcgtggccctcgcggatgtcgagctggacgcggttaacgccgtcggtggcggagccgtagatcttgcgccaccgctcgaagccggtggagttgaagtaggcgcgcaccgcctccttgtccccgccccccgccgcctccgcctgcgcgcgtcgccggcgctcggggtcggagagggacaccgccgcggccagcgcggcagccgcggccgccgcggcgggcagggagagcgggggcaggtcggccgccgggggcagcgccgcggcggtggtgagggccttgcgctgggggtggaggagtcctacacgcgaatgtgaatgtggatgccgcggaatgagcggcggcggcgagtggacgcgggagagcggcgcggtggagacggcggcgcgcgccat

SEQ ID NO: 76704 - DNA, 449 bp, Oryza sativa
  Clone ID: PAT_MRT4530_76675C.1
ataagaaatttgtgctttttgaggtagatgtttcctcgggcggggaggcgccgcgcaattattggaagtttaaagaattccgaaactgtcaaaactgtaccacctggacaaaatggtatacgggtttgcagaccattttatacaactgtcactcattgactttccaagaatacaccaagagctttattgattttgcctaccaaagattaaaaaaaatggccaagtctgcattaactcaatcctcatccacaaagaatgtttcttgcttgaagagtcccccaaacacgggccttacattcggcttggattccgggtggtttggtggtgggcttgtcttctgggcccggggcttcacaacaaatttttgtggtggcaggttctttgcttttggctggcctctcacgggggggaactgcgcttttggtttcaccccctctgaatcctgagag

SEQ ID NO: 76705 - DNA, 371 bp, Oryza sativa
  Clone ID: PAT_MRT4530_76676C.1
tgttaacaaccaaatttggtaatccaagtatcggagatgaagatagaatcgaagcggaattcaagatggagatcgttacggaaacatagcgagaatcggctaaagtccgaatcggctatgatcaggatcagcagagttcgagtcggactaggttggccgattgagccgataccgacaatatgacatgtttgggcaaaagtctgccgcaaagacttatggtatcttaaaagtttgttagaaataagagtcgtgtccgacacggacatattttgatcaaatcaattggcacgctcacgaacctaaaaggcaagatttttggacctgcactagagttaagcagatctctccggcctcgtgttttttacatcaac

SEQ ID NO: 76706 - DNA, 376 bp, Oryza sativa
  Clone ID: PAT_MRT4530_76677C.1
gcgatcgtctcctcctccgcgcgcctcctcgccagacgccgaggcactgcggccaacgtcaccggccgccgagcgcacaagttcccgccggatgccgagatacggcagctgatgtcgccggccgcagagcacgcgtgttcccgccggacgccgagatactccggccaagacgacgtgcgcgatggttgccgatgagcagcccgtgtccgctccttgtccttgtgcttctctgtgtttctctcctgtgtctatatgtatgtctctctatggactactgccaaggctgggcacggcgcagcgcctgccggcggcggcggcgtgaactgcaggccggccctcggctcgtgcctctttttccattcgaatcatctaggaa

SEQ ID NO: 76707 - DNA, 697 bp, Oryza sativa
  Clone ID: PAT_MRT4530_76678C.1
gcgggggcgcagtggggcgaggaggccgtggcggcgaggaaggcacgagggagcggctggggggaggcggcggcggccggtgcgggcggggatgtcgcgcgccggggtgggggcggcgcaccttcttgagcgccacgatcttgcccggcaggagtacgtaccttgtcgatcttctcgaaggagtcggcgcggcgcagggtccagccgtcgatggcctcgccgacgacggcggagagccaggcgggccagccggccgccacctgctccccgcgcgccctgttggcgaagctccccccgagccccaggccgaccgcctcggcgggacatcttgttaacaacaaattttggtaatccaagtatcggagatgaagataaatcgaagcggaattcaagatagagatcgttccggaaacaaagcgagaatcggctaaaattccgaatcggctatgatcaggatcggcagagttcgagtcggacaaggttggccgattgagccgatgccaacaatgtgatatgtttgggcaaaagtctgtcgcaaagacttatggtatcttagagtttgttagagataagagtcgtgtccgacacggacatattttgatcaaatcaactggcacgctcacgaacctaaaagcaatatttttggacctgcactgaagttaagcagatctttcaggcctcgtgtttttcacatcaa

SEQ ID NO: 76708 - DNA, 302 bp, Oryza sativa
  Clone ID: PAT_MRT4530_76679C.1
acccagactaccattctcatgtcaccacaggtcatctagtggtgattcaacactctgaacaacttcaccatcatcaagtatatgtaatgctcggaccatctcgaccagacatcattggagcgctatccctgagcaagcccaactgcaaacttttggtcataaccgctggccctcaccaccacatgctggccttatgtgacctggagctgctcgacaaggatgccaccccattctggtcaccaaggataagaagagcgctacagcgtacaaaggcaaaattaccgagcaatgtgtgggtctag

SEQ ID NO: 76709 - DNA, 440 bp, Oryza sativa
  Clone ID: PAT_MRT4530_7667C.1
ggtggggttggtgtgtcttgtttctatcttccgccccgttgtggtgtttgacctgctttggaaccttgttttcatttaccgtcttttttttccccggcgaacacgcaaaacattttaccactcccaccgggggctaagggccccttcacccaaccccttgaggcgggaagaacccccccaatttggcgggggaaaaaaaaaaaaaccccccggggggccccccacccgggggggaagcccccaacccctgtccggggggggggggggccccctggacacggggcggaaaacgggggggcccccgggcccggccccaggcacccggaacgggggggggcccgggccccacgggggccgggggggggggccccccaggggggggaaaaccgggtccccccccccggcccggggcctgttccccgggaccccccccggggggc

SEQ ID NO: 76710 - DNA, 435 bp, Oryza sativa
  Clone ID: PAT_MRT4530_76680C.1
atggcggtgagttcgcaaagggtggaggaggcggctgcggagggtggagaaggaggtggcggcggcgttgagggcttccctccctgggcaggagggaaggcagcacatctacaaatagtggcggtgccgagggtggctgatgcggttgcggcgcggacggtccaggcggtggcaccggtggctccctccctcccaaatatggccggagggcggtggcggctcccctctcacatcttcggtggaggcagcggtggagggaagcggtggtggcgcggagggtcaagactcggcccagtcatggcgaaggggctccttgagggcacgacggcccgccatgccttcctctggcaaggcccggctggcacgaagctcgtatacctcgccatacagccttcgcccatgtggccctcttttgatagggtccacctccggtga

SEQ ID NO: 76711 - DNA, 270 bp, Oryza sativa
  Clone ID: PAT_MRT4530_76681C.1
atggcggagtggagtggcggttgcggctgcgtcgcccattggatcccggaaattaaggccttcgagtgcgagaaagctggtcacgaggccattataatgcctccgccgcgccgcgcacgcgaaggcgtcggcaccggcaccggcaccgcgccgcgtgcggcgccgccctgcctcgccgcaattagcgcggcgccgcgaccgtccaccccggcctccagcggcctggcggcgctctgtccaccaaaccatcctagcaactttcatgtatag

SEQ ID NO: 76712 - DNA, 3915 bp, Oryza sativa
  Clone ID: PAT_MRT4530_76682C.1
ttattctccaatgacctgcaccttagcacgcttctgcacttcatggagcatgcctaaacttgatgcatgatcctcccgatgatgcattgccttcacgacgcggaacagatccttgatggcggcaaatttatcctcctgtgcacagctgggcttattctttgttataccgggtcgcttcccgtaactggcctcgaagtcacttgacttctcattagccctttgaagcactgatgcaggtattcctgccaatcgagcaacatttacaccatagcttttggggcatgaaccaggcgttaacttgtagaggaaagtaacttcttccaaacctccttctcccttgcttatctcacatgccatatggcagagtgataccttgctatccttattttctgctgctaacctatggtagtgtgttgaaaataagcctaggcactgcacatgatgaactagatattctagaacagatgccgcaatagcttgtccatcagaggttgatgtaccgcgcccaagctcatctaaagccacaagagaattcttggttgctgatgaaagcacagaagcagtttccatgagctccactaagaacgtactttgcccagccataatatgatcccttgctcccattcgaacaaacatacggtcaacaagagaaagttcaaagctttcagcaggaacatttgctccaatctgtgccaaaattatggtaagacaaacttgacgcaaaagagttgattttccacccatatttgggccagtaagaacaataaagctggcatttccaggcccacccatcttaatgtcattgggtacaaaagatccactgcctaaagaatcacttcggagggtggggtgccctaaatttcttgcatggagagtaggagtatcatctggaccatatgattctttgataattggacagcaagttggtccctcaaaaaaatcactggcaatagcaagactaatcaaaacatcaagctcagcaactacagaaaccaattgtctccacttgctgtgatgctcaacaaagagttgaatcagattctgaagaatgcatttcaattttgcctctttctctgcctcagccttagaaagttctgatattaattcttttacttctggcgtccagtaccgatagaaacccttttttgtagactgcaactcatagttatggggaacagaacctcgcaggttctcagacacttcaaggaggtacgtatcctttccaacatctacatattttaccgatgaatcactcaatagctttctttgttccttcaggtatttttgaagactggattcaatctcctcaattgcaatgcaagcagcatcatattgaggatcacaaccttcatgaggtatgatccgaccattcctgtctgcttctgaccaatcaaatgcatctctgaagtggtccagaatagaagaaacatgtggtagccctttgcctagtgataacaaatcatttaatagagaagatccatctgtgcttgtcaacatactaatagaagagcatgcttggaacatctgctggcaaccacgaagagcagcagtaaactgatgaagcagtctctttgatgcatcttcataaagaacaactgactttgaacttcttccattcttatcacagctagaaaaaaggcgtgcaagtaggcgctccatgtctggaagccgagacagatccttacggaattggatagcacattcatgcccagatcccttgaaagtagcgatggcactttgacgctgtagtattgcctggcgttcatacaatggccttgcaatccaccttttaagcaacctttttccaaatccagtaacacaatgatttaactgcgcatacaatgtccctgagagaccaccatttcttgcattttctaaaatttccagattttccaatgctgccgcatcaagtatcatatgcttgcggatagggttggtgagccctgagcatgtaaggcgctcaaactcagcacatggaagcaatttctcatccagaagggattgccttaaataaaacaaagaaccaccaagagcagaaagtgcatatgttttgtctcccgcttcaattagctcactcaatagctcaggcagataggcagaactgatttgtgcaccggcaccaggtgtgtccaatgagcaatagtattgctttatttcatgaatagttttctctgcatcccagaactccatggatggaagcaaattgtttattaaagggtctctcgtattgctcttcagtgctttctcagtttctggactcaacattttagctggttttatgatttctgcaggcctaatctcagataaaatagaacatagcccatggcgttcagcatcatcttggaactgtcctacaataaatttgcttgttgaaacatcaactatgcaaacaccaattgtatgaccatcttgatccttctctgaaccacactgataactttcagccacagaaaatagatatgatggatctggatttgccagcagagactccccttctgtcaatgttccttttgtgaccattgcacatatttcacgcctcacaaccttgtcttttacaccagtttctttacggcggaggtcaagctgctccggtgtttcagtctgctcgataaccagaactcgataacccttcttagctaatttctccaaattcaattcaaaattcttctccgggaatccacagtgaggcttgtcacccttcatatactgaagatcaagctcctttgccccaacatgtgcatccatttcaaataattcatagaatttgcccatcttgaagaacagaactttatccatgtgctgtgatttaaattcccaccattgcctctgtccgcctgtcaagctattcaagaactgggaaggcaaggaaagagttctaggatcatagttggggtttccgggtcgtctccctttcgcatccttacgcccttccccaaggaatttaaacttttctgcttgccgctgcgcaaagcgctcggcgacctctccagtaagagcggtgagagcattctctaacggctgctccctctggctacagctgattggcactttcaattcgacttttccagtggtattagctggttcaaagctgaactttttagcgcagtccaacgcacccgcatcgacttttctcctcttcttcgacaatgtggaccctgaaatagaagccgagcccaaaccggatgctaattttggcgtcgaagccgacgtcgacaaagggttatttttctttccctttcttgttttcacagcaacaacctcctcctcatcgtcttcttcatcatccagctccacctcctccgaatcattctctgccgcagcatcattcttccagtcctcgtcctcctcctcagcggaatccgcagtctcatccccacccccaccaccatccaccgcaccaggtgacttggccgttgcggcatccgacatccgccggagccgccgcagcttcctcgacggctgcggggtcacctcctcctcatcggcggcggcggcccactcgtacctctcgctcgcgaggtccaccacctcctcctcgccgtcgtcgtacctgacgcggtgccgcctggaccccacgtcgtagccctccaccctcccctcgtaccacgcgtcgtccagcggccagtacacccgcagccgcctccccaccgccgtctcctcctcctgcggcggggatggcgggtttggagggggaggggaggggacccgcaaaagggggcttcttccccctagggtttcacgccaagggccaagggcttggccggtgggggaagaaaaaaaagccggtaatctggggttctccttccgaagaacgggggacgggccctttttaggcggcgcgaagacgggggacccccgtctccgattgaacggccgtatcaaccgttttccacaatactggttgacgctgaccat

SEQ ID NO: 76713 - DNA, 210 bp, Oryza sativa
  Clone ID: PAT_MRT4530_76683C.1
atggagaggcatggcctcatgaaggccgccacaatgcgtttactcgaggaagacgacgacggcgaccagagcaaatgtgaaactgtgaaaaccgtgccatgccgtcaatcaagcaagcacacaaatgacgcaaaaaaactcactctctgctgcagcttcttgatctccatgggaggaggaggacgatgcagagacagagacagagcgtga

SEQ ID NO: 76714 - DNA, 424 bp, Oryza sativa
  Clone ID: PAT_MRT4530_76684C.1
tggaggtgatccactcgcggtgggcgatgctgggggcgctgggctgcgtcttcccggagatcctgtccaagaacggggtgaagttcggggaggctgtgtggttcaaggccggaccgcaaatcttctgcgagggggggctcgactacctggggaaccccaacctggtgctcgcgcacagatttctcaccatctgcatgatatatgtgttgctcatggaattcacagagggctaccaccacaatggttatccttttgcataggtaccaggtaccattctctatggatggataattgtagtctgaatcgtaaaatgttattcctttactggggcatcatacttgttcattctggtattctgtatcgctgtaactttactggtgattattcacaattcttatgctttacatcagcatgttagatcatt

SEQ ID NO: 76715 - DNA, 486 bp, Oryza sativa
  Clone ID: PAT_MRT4530_76685C.1
atgaatgtggtgctcccgacggcgagcgggccgcagaagaccccaagggtcaaagttggaacacttgaggcacctctcggcacggcgctagttcatctcctcggggccttgttgccaaccggtaacacggccaacggccccaagaagcagctgatcaagcttaattttagtgaaagcccagaccaggccatttcagtaaggaagttcgcaacaacgtccatgatgtcctcctccatcacagcctccggtgacgttcgtgatcgcatcgcaggagatcgacagtgtccgcgcgtcaccggctgcccgcgcttcacgatgggcccgtcaaactacggcgatgtcacggcggaggacatgtgggaccagatcaagaaggtacggagccgcttcttgtgcccgtcttgcccgatgccgtcaaccgcgaggccgtcgcggagccgcttctccttcccaaaccggtggcggaagccgacacggtgcacgtga

SEQ ID NO: 76716 - DNA, 694 bp, Oryza sativa
  Clone ID: PAT_MRT4530_76686C.1
tggctcacacaagttgcgggccccgtagttcaaattttcttggccaaggggtggtgtcctgcttgtagggggtccattcctgcctacctgtcccggagggtcccgccgttaggtggggtttggtcggtactcttgtttatgctaagaatgggttggaaactatgtcagtttttccgtccgtatacccaacaactaaaatgtggaatggttggcctgggttggcttgggacgagctgggacccagggtcgggttgccagttcggtggtggttgtactcagtcttgctcaattttttcccaacacagaagaggagcccctggatgatgaaggctttggtgtctagctcgtgcctgccgtcaagtgcctgtggtcgtcgccctagtcttccgctgtttctcgtttgtctttgtgtgtgctgggccttcgcgattgcaaccttagcctgatcggtactcaagcacttaagcaacaccccatcaatcgtctctaccttgacatctttgatcatcggcttatatcccgacgccccttgggccaaatcattagcttcaatattctgttctcgagatacatgcttcaaagtcaccagccgaaattccttcatcaactcttggcacttctcattgtaaacttcggggacgtcgggcccgagggtgaggtgtccgccctcctcctgatttcccccgaggggggg

SEQ ID NO: 76717 - DNA, 5478 bp, Oryza sativa
  Clone ID: PAT_MRT4530_76687C.1
atggtgagcccaaccaccgctgaagctactcggagaaggtgcaaggccgccgccgccgccgcatcggcagcaccggaaaagcacctgaaccgcttcgtccgcctcatcgcgttcatagagagggcgggcaacggcatcggcacgctggtattcacttgggcgaccgttgttatactcggcggattttcaacgatggtcaccacgcgtgagtttctgtcggcaacgttcttggctttcctcgaagcaacaaggatgttcagccaaaacagcaggttggagtaccaatttttctttcggacaaggggtgctttcagacgtccacgttggaacagggtggttctgattttgtgcatggctgagatcatggtgtacgtcgtggaaaaattccaatggagtccagcatcatattcacatcagcactacggtccgataccagcagcggtcgcacgtgttgtaatcgcaatggtacagccaacaactcttatctgtgtcgacaatgtacaaacttttgccaaagcagtggtaaaaatcttgttctacactcaggcaggtgaatatgagcccctagacattcctacgagttgcagctgggccggagagcgtaactattctgacgggacaacagaagatacaaagaaaaatatcatgttctctctaaacatcttctatgtaatagtacttatccaaggggcactctacattgtggcatgcgtcctcgagatcttctccttcatcctcagaataatcctggtccatcaaagcaggttcaggcggccgtggggaatgaaatgcatcaaccagtactactcatacatatttgaacaatgcatttcgggcggtgtgctttctaaaatgaacatggaactgaccagctttgccatggatttaacagactcagactcacccagcaaccagctcgatggggtccggatgttacacagctttctgaaaaggaagaacactaaggcgcttctgctcttcagactcagcacctccacaaaaacattggaaagatcgatcagcatgttgggctggactgctccagaggatgcggaaatcagattgttggctgcgaaagtcgtagttgagcttgcaaggagcctccaggttatcgcgatccctgggtcaatgcagaacatatcttcacttctggacactgataaccaattgagacagcgaagtccactactttacacgtatgatagccaggaggaaagacaacgtacaattgcggatacaggcaatggccaagagcatcttgaccaagatcatcttcttcacaacaaccaagaaaattcttggattcttgggtgctgggaattgatttcaaagtgctggtcgattccgaaggaggagacattcatagaacaagatcgccttcctttactgggaatgtcaatccttgctaggcttgcaaattgtgatcctaacaactgtgtggaaattggcagagcaagagacctcatcccgaagattatagggtacactgatgggacacagccaaaaatactgaaaggttcatcactgaaattgctcggaaggctctcaaacactggtggggaaatcggtataatactgcggcagaagatgtcaggccatccattcctgttgagaaacctagaagaagtattggacgacgacattgaaggctggcaagaacataagaagctggcagcagagatcctcagaaaccttgccattaacgaaaacacaagacaggagataggttcaatccaagcgatcattagcagtttgatccaagcatttcttgcccaacatccaccatcaaacacatattctgatcgatctctaaaaataacagctggtcaagcattagccatgctggcgatggaaagtgtcaataactgctcaacaatgttaaaagaagcagggaatgcattcattagagagctcactgtcatgatccaagatgacaaatacaaatatgtgtctgcaagtcttcttcaaaatctatgcttgcatgctcaatccaagttcagcagctcagacttgacagaactatctggttccttacgacaggttttgcatggaataactgacacaacagttgcaacaaaacgagaagtccttattggcctaagttcacaaatatgccatgtcattcctgaagactttgccatagaactagagcatgatcagattaaggaaacattagtgaagaaactggttgaggcactgaattcaaatacaaaacctactgcccagtgccccaggataaggagggtgatagttgagcaagttatatatatgatggagatcaattctagctatgcaacctgtttcgatgaatgccagatgatgcaagcactctcaatggttgaagcaacaccttcgaaggttgaaaactacaggctcttcatggggaatgaaggactaatggaatacagcataccactctctaatcttgtggcaagagcaaaagaagaaataatgcatcattattgtaatgttcaaagaatcaacggcagtggatatttcaggcgattactgttctacctgtcaagggcatcgcagattcgcagttgtagcatgaattggttgaaagtgagagtgcgaaaccaaacacgtctgcatgcactggaagtctggaacaagaggaggaaaagtcagaagaagcgggagctgatggccggcggggagcatcgactgcagatagcggccaagtccgacgggcaaggcaaggcagccgcagccgcgccggagaagtggctgaatcggttcgttcgctcggtggcgctaatcgagcgggtgggcaacgcgctcggcacgctggccttcacctgggccaccgtcgtcctcctcggcggatacccgacggcgctccggtcgcagcacgatttttggtacgccacagccatattcttcctagaagccgccaggatgttcagtggcagcaacaacaggcacgattaccaattgttcttccgaaccagaggtgctttcagacctcttggctggaatggtctgatcgccatcgtctgcattttagatgtttgggtgttgttggctctccagaagaaaatagttatggcagctgtagtggtttacgctatgataattctgcttgcacttggccagaatatatctcctgagtttcaaccactatgcaatccattccgccgtgccatatctctatggagccccttagctgcaatactgttgctaactccaaccgtgcagcatcactcaagggaacttgtttggaataccacaggaagcagatcaatacccaaaataacggctgaaattaacttcatcccaagtaggttcacagttgccaaatggacagcgtttttcatattgctcatagttgtgctcatggtaacaatcagcaggttgcggttcccaatagtcatcaaactagtagatagtgctctgtgcagaaaactattagtttggggtcgaactatccagaacatgtgcatgcttgctgcgctagtgatgttggtactgactagtgatgggtcctttcggtttgtaacaatcttgtcactagtcagcattacattgatggtgtcatctggcaacttccagatactagcagcagccatgcgtgctgaaatcgcaaacttcgcactgcaccgccttatcatgccacataacggctacagagaacatggagaggatccagacagcaagactaacctggtaccatctctcattatcttctatgggatggtgatggcccaaggaatactctacattgtggcatgcttcctcgatatcttttcattcatcccccggagattcctcatccggcgtgctggattgagaggtcagctgggagtggaatatgtcaatctatattatgcatatgccttcgagaaatgcatgggaggggctgtgtttgttccaaagaaaatcagcctgagtaactttgccataaattccctgaactcagattctcctaagaatcatttctatgggattcaactgatgcatagccttctggagaatgaaatgacaagggttcggatccttgacaaactcatcacttctacaaagaccatcgatagaataatcagtatgttgggctggactagtccaaataatacgacggtcagattatatgcagctaaggtgactgctgagcttgcaaaggacctccaaatcatcactgttcctacggcactgcagcttgtatctgcacttctggacaccaatgccaaacttaaaaagggaaatccacttctgcaggtagatgatgaacaagaggagaggcaagaccccattctcaacacagcaaatagccaagaggaaagaccggatgcaattaggaatccagatgatgacccaaagcaaagacaagagccagttgaaggcactgataacctgccggagacacaaacttgttcagcccacatccatgaacagaactgcatactcagacgaagatggcagcagatttcagagtactggaaagttcccaaagagcattcattgacatactatgatcatcttcctgcacttggcatgttgattattgacaagcttgctagctgtggtcaaaataactgtgtggaaatcgatagagtagctgacctcattccgaagatcataggatttacaagcttcagaggtgacatgacgaacagcgaggcacaacaaatggtcctggtaaagtcatcgctgaaggtgttgcagaggctcacaagcattggaggagagatcggcataacactgcggcagaagattgggcacatgcaggtgctcataaccaggctgacgaaggcattcctcaatttagatagaacctcaagcacaaatgttgattgcttgctaacaaaggtagccgggcaagaactggcaatgctggcaacagataatgtgcacaactgcttggttatgttgaaagaaccagagtttatcaataaactcaaacatatgatcctgatccatgatgaaaagtatatatatgtggcggcaaccctattgtgtcgtatgtgccagcacgccctagccaagctcacagaatcagacctgaaggaactatgtgagaccttacatgaggtcttggagagaataatgaatgcagaaggggcagaactagagatcctcattggcctaagttcacagatatgcaaagtcattcctgaagaattttcccaagaactagatgacgaacagattaagcaaagattcataaagaggctagttgacgtactgaatgcaaatatgaacccaggtgctcactgtcctgggattaggagggtgatacttgagcaatctatatacatgatggagggcaattctcactataccagttgtttcaatgaattccgaatgatagaagcactgtggatggtagaagagatgccctcaggggttgagaactacaggattttcttgggtgacgcaggttttatggaatacagcacacctctctttgctcttgtggacagagcaaaagaactgatgggccgtcagtgcctgcaaggagacagtagagttaactga

SEQ ID NO: 76718 - DNA, 365 bp, Oryza sativa
  Clone ID: PAT_MRT4530_76688C.1
tggtgcacgatggcgtactcctggagccatagcttcaatgcgaccatggatgggaactctaaaccctttagagggagaagaacagcagctcgctgctcgggctgggaatggcgaaaatgggagtggggaggagaaaggtgggacgcgccagctatgctggcgccatggtatgaggggcgacgccattgtggctggcgccccctttctgcccagtcagcacctccacgacagccctagtgccacggtggcacgggcacggcgccagtgtggctggcgccgccatcttggggtacggcgccagccactctggcgccccaaaaaggactatttccggtttaagttttcccaggggtctatttgtaaaa

SEQ ID NO: 76719 - DNA, 215 bp, Oryza sativa
  Clone ID: PAT_MRT4530_76689C.1
ttttttttttttttttttttttttttttttttttccggcaaggggggtccaatttgcatgaaaaaacaagttttacatctcttttgcaaatcaattcatccccgctccagtcagattgtggcaacagcaaggactggaacaacgggtagcccaaaactgaaaagaatgatcctcattctcaaatgtgcaatcatggccctagaacgcaggcaacc

SEQ ID NO: 76720 - DNA, 104 bp, Oryza sativa
  unsure (1)..(104): unsure at all n locations
  Clone ID: PAT_MRT4530_7668C.1
atatgtctccacttctaaccaagaaaattataaacaacgagaggaaccctctcaattttcacatattttaccatatcacttctttnataacatttccaattata

SEQ ID NO: 76721 - DNA, 5385 bp, Oryza sativa
  Clone ID: PAT_MRT4530_76690C.1
atgcaacgccgctgtctatccctctacgttgccgttctcatgctcgtctggctcttcttcgcgccgctctccgtcgtcgccggcagccttatcgccatccccagcgcactcgacggtagccgcacctctcaccgtcgccctattgaaaatccacggttcaacgtgacgctctgggagaaaaacgagatcaatactagacctaaggcgtcccatggatttgacgatggtgacgaagtctcctacaccgtggccatgcccttcatagagaagcttaggcggcgatgcgccgtggccaccggcggtagccatcgtcgctgcgatgccacagcgatcaggcagtttgaggaggatgtggctccctgcctgctagagatgttgaagcaatatgctcatgcatcctaccattatgcagttgtcagggttacggatgaggtataccctctacccttggatgtgcattgtatattgatacggtatacccgctcgtatacggatagttcccgtatacgttacggaaatctatcacatgatagggatgatatctacggatggaaggagttctattcggacaagactgggtctttaccatatcgtgaggggtccgatatctccgagtcctacttggagatcaatggacccgcgatcctcgtaccaacggaccccaataccctctatatccggtctacggaatgtcatgggacccttcgaccaggcctgctgaaaccgtgcgaccagtcaggattcaggctcaaggtgttaagttcatcagggcgaagccccatggcgaaggcgacgaagccacatggcgaagacagtggagcgaggacggcaaaagatggagccccatggcgaagactatacaccctggacgaagggtgcctgccgaaggagggtgacttcgccatcccgaccgctctggccgaccttcgggccggcattcgcccaccaggcccattagaggcccatgcgcagcttcaagctttccttcagcaactcagtcaacaccacaacatttcaaacgcagcctcttcggcccgaccggaggggaacacaagtcaaggtgcacccagttggctgccgtcgaaccagctaggtccgggggcttcgccttggagtcaaggaccgcagttcgacttcagcaacgctgctcaagcaccaaccgttcaaccacaggcaccaacaccaggcttcggagcaaatcaggcaccgaaccaggttgccatggcttggacccagcctccgttcaacccatccttggcggcgccccaagagtcagcattcgaagccgggcagctgaacactgtggcccaaccttacgtgcaagccatgacttcgcccttcgccaaggcatatccacagcaaggtgccgcgagcaaagcagggggcgaaaaggggctaccgctgagtgggggaatcaagatccgtcaaatcccaccccagttcatgttccctctcgttccgcgatactcgggcgaaacagacccaaaagagtttctgtccatctacgagtccgcgatcgaagccgctcatggcaacgaaaacaccaaggcaaaggtccaagcccttcgcaaggagttcgatgctcagcaagcaggcagccatcaacagcttgttcgcaagaaggtcaggaaggacctctattgcgcgtaccacggtcgatcctcgcacaccaccgagcaatgccgaaatatccggcagcgtggcaacaatcaagacccaaggccgcaacaaggggctactgtcgaagcacctcgcgaagctgctcaagaacaagcacccccggtcgaacagcgccaagacaaccagcgcagagtaatccaagtgattacaagagccgatccgccagtccaacagtcgaagcggcaaaagaagatgcagctgcgagcggtccacaacatcaccgcggcaggcaaaggggctccgaggtacctgaaccagcaaatctccttcggaccagaagacgccgaaggggtcctattcccacatcaagaccccttggtgatctcgggcgaggtagctggcttcgaagtccggcgaatcctggttgacgggggaagttcggccgacgtcattttcgctgatgcatatgccaagatggggttgccaaccctagccctcacccaatcaccagcctcgcttcgtggtttcggcggcgaagcagttcaagtcttgggccaagtacagctggcagtagtcttcggcacagatgaaaacaggcgtaaagagcaaatactgttcgatgtcgtcgacatcccatacaactacaatgccatcttcggccgcgcaatcctgaacaagttcgaagccatctctcaccacaactatctcaagctcaagatgccgggtccaacaggcgtgatcgtcgtcaaggggcttcaaccttcgggtacatcaaagggcgatctggccgaaatcaacagggcagtgcacaatgttgaggccgaatcacatgaccatgctaaacgcatgccgaagcccgcccctcaaggcaaggtgatcaagaagcaaatcgacgacgccgatcccacaaagcttgttctgcttgggggtgatctaggcgaagaggaagccgaaaacatccttgaggtgctcaagaattacattgacatcttcgcttggagccccgacgaaatgggaggtgtttcgacggacctcatcatgcaccatctggcagtcaagccggatgccaagccaaggaaacagaagctacgcaagatgtccgccgatcgccaagaggcagcaaaggccgaagtgcagaagctgctcaacgcgggggtgatccaagagatcgaccactcagagtggttggcgaacccggttctggtgaggaagtcaaacggcaagtggtgcatgtgcgtcgatttcacagacctcaacaaggtgtgcccgaaagacgactttcccctgccgcggatcgaccagcttgtcgattcgacaaccgactgtgagctcatgagctttttggatgcatattccggctatcaccagatccacatgaatccggcagacatcccaaagacagtcttcatcacgccgttcgacactttctgccaccttaggatgcctttcggcctgaggaacgctggagcaacattcgccaggctcgtgtacaaggtcctttacaagcaattagggcaaaatgtggaggcctatgtcgacaacatcgtcgtaaaaagccgcaaggctttcgaccatgcgtccgacttacaagagaccttcgacaacttgcgcgcggctggtatgaaactaaaccctgagaagtgtgtttttggtgttcgcgcgagcaagttgttgggttttcttgtttctgaaaggggcatcgaggcgaaccctgagaaaatcgatgccattcagcaaatgaagcctccgtcgagcatacgcgaagtacaaaagctcgcaggccgaattgcggcactaagtcgattcctctcaaaagcagccgaaagagcttcgctggtggcggtcagtgcagctcttgtccaagagacagagtcaggccagaaaccagtgtatttcgtctccgaagcttttatcctttgggcgaagtgcgagatcactggccgactcagcaagtgggcagcagagttatcacctttcgacctgcattttgttgcccgtaaggccatcaagtcccaagtcttagctgacttcgtggccgaatggacgccggcgttcgccgccgaacccgagcccgtcgaacagccttgggtaatgcactccgacggctcgtggtcacacaagggggcgggcgccgcggcagtactctcttcgccagggggcgtgcccatttggtatgccgcaaggttgcagttcgacacgaccaacaatacggccgaatacgaagctgtacttttgggcctaagaaaggggaaagctttgggggttcggcgcttgctcatccgaacagactccaaactggtggcaagtcatattgacaaatcctttgaggcaaaagaagaaggaatgaaaagatatctagaggctgttcggtctatggaaaagtgcttcgccggcattatggtcgaacacttacctagaggccagattgaagaagcagataccctggcgaaatctgctgcctgtgaaggcccgcattcaccaggcatcttttttgaggtcttgtatgcaccaagtgtgcccacagaaagcctggacatcatggctatcgacctggcagaactgggcgaagaccaagaggactggcgaacaccgttcgtcaagtacctcaataacggctggctcccagaggaggaagcagaagcgaagcgattacagctcagagccgcaaaatacaagcttgtctccggccagctgtatcgctccggggtgctccaacccctacttcgctgcatctctttcaccgaaggagaagaaatggcgaaagaaatacaccaggggctatgcggtgcacatcaagccgcgagaacagtcgcctccaaagtgtttctccagggagtctattggcccactgtgctgaaagtttgtgtcgagcgagccaggaagtgtgaaagctgccagtggcatagccgaagccaaaccgcacctcactacgagctgcaacctatcgcaccagtatggcctttcaccagatgggggctagacatcatcgtcctattccctgtggcaagaaatgggtacaagttcgcgattgtagccatcgaatacttctcccgctggatcgaggccgaaccactcggcgcgatcacttcggcagttgtacagaagttcgtgtggaaaaacattgtttgctgtttcggagtgccgaaggagttcatcactgataacggcaagcaattcgactctgacaagtttagagaaatgtgcgaggggctgaacctggaaatcaggttcgcctcggtcgcgcacgcacagtcaaatggggctgccgaacgcacaaatggcaaaatccttgaggcgctcaagaaaaggcttgagggggcggcgaagggccttcgaacgacccccgcaaggccaaccaagttcagcccattcatgctcctctattgtgacgaagcaatgaccccgactgagctaggggctaatttaccaagggtaatgttctcgggaggcgaagatgggcacgaggtgtcacttgaactccttgaaggggtaagagtcgaagcactggaacacatgcgcaaatacgccacaagcacctcggcaacttataacaaaaaagttcgaccgacagagctgttgcctggccatctcgttctaaggaagaaggcgaacccggtggcggtcgggaagcttgaatcgaagtgggaagggccgtacctcatcaagcacaggtctaggacaggctcctttcacctagcgacgctggaaggcgaagagttcgaccactcctggaacgctgcttcccttaagcttttctatgtctag

SEQ ID NO: 76722 - DNA, 442 bp, Oryza sativa
  unsure (1)..(442): unsure at all n locations
  Clone ID: PAT_MRT4530_76691C.1
gttctcttctacgtgcggaaaatatttcgactccttcaccccttatgtggggantaagccacactagcgccgtgcccgtgccaccgtggcactagggctgtcgtggaggtgctgactgggcagaatgggggcgccagccacactagcgccgcccctcataccacggcgccagcatggctggcgcgcccctcctctgttggccgaccccttaaaccccgcgggccccaccacctatctcctccccactcccatttttgcccaagcaccagcccgagctgagcagcagcagctctccccctcacctccccacctcaaatccactccatttgaactcgtttttcgcgggatttttttgtggaaatcgaagagaaaggtagactccttcattcacccctcgtgcaggcagggagtggcacggtatggaattcctaacgcggtcaat

SEQ ID NO: 76723 - DNA, 400 bp, Oryza sativa
  Clone ID: PAT_MRT4530_76692C.1
atggtccttttcgggacgccagagtggctggcgccgtaccccaacatagcggcgccagccacactggcgccgtgcccgtgccaccgtggcaatagggctgtcgtggaggtgctgactgggcagaaagggggcgccagcgacattggcgccgctcctggtaccacggcgccagtatagttggcgcgcccctcctctgtgccttaaaccccgtgggccccaccacctttctcctccccactcccattttcaccattcccagcccgagcagcgagctgctgttcttctccctctctctccccctcacctctccacctcaaatccactcaatttgaagccgtttttcgcgggattttttgtggaaatcgaagagaaaggtagactccttcattcccccctcttt

SEQ ID NO: 76724 - DNA, 1049 bp, Oryza sativa
  Clone ID: PAT_MRT4530_76693C.1
ctcgtagcattgagagtcagatcatatcaaatgcgaggaagcatgaaagaatgatgtcactgagaagaaagaggagcagcatgaagcaccccggcgaatgcgagaaattcaccatgccacagctcgcgatggcgaccaacaacttcgccgtggacaggcagatcggtgaaggccgcagctttggcatgatgatgtacaagggaaggcttcccgaccggcgcgaggtggccatcagacgcgcatctccgcgcaggaagggggatttcctgagggagctcgcaatcctctccccgctccgccacgaccacatcgtccgcctccttggctgctgcgctgaggacgaggactgcctccttgtctacgagtacatcgacaacggcacgctctacgatcacctccacggatcagatggagcatcatcactggtgaccacatcgtggaagacgcgcatcgagatactagtaggcgtgtcgcgggccatcgagcaccttcactcccacgccgtgccgccggtgatccaccgggacgtcaagctgtccaacatcctgctcgactccagctacgcccctcgcttgtcggacttcggcttggcggtaagctgcgacgaggtagagtgtacggccgagatgcctatcttaggcacgttcgagtacatggaccccgagtacctgagcacggggaacctgacgccggcgagcgacgtgtacagcttcggcgtcgtgatgctagagcttctgacggggaagaaggcaattcacgacgagaagcacggcgccgttgttgccacaagcttggttgcatccgtgctgccaaacatggaggctggggatttgatgaaggagctcgataggggcccagggctgaagccaacgccaaggcagctaaaggcgacagaggtggtggcgcggacggcagtacgctgcgtgcattcacaggggaaggagcgtccgcccatgacggaggtcgtagccaacctccaggaggcgctcgacctccttagtctcgatgagtagagggtagctagctcggtaattgatctggttaaaatc

SEQ ID NO: 76725 - DNA, 407 bp, Oryza sativa
  Clone ID: PAT_MRT4530_76694C.1
atggtcctttttgggacgccagagtggctggcgccgtaccccaacatggcggcgccagccacactggcgccgtgcccgtgccaccgtggcactagggctgtcgtggaggtgctgactgggcagaatgggggcgccagccacactggcgccgcccctcataccacggcgccagcatggctggcgcgcccctcctctgtgggccgaccccttaaaccccgtgggccctaccacctatctcctccccactcccattttcgcccaagcaccaacccgagctgagcagcagcagctctccccctctctctccctctcacctccccacctcaaatccactccatttgaactcgtttttcgcgggatttttttgtggaaatcgaagagaaaggtagactccttcattcacccct

SEQ ID NO: 76726 - DNA, 696 bp, Oryza sativa
  Clone ID: PAT_MRT4530_76695C.1
ccggccctggtggggtctctccggcgcggtctccggtgccgagctccctcgccaccgccaccgagctccttcgccaccgccgagctccttcgccgccacccaggtcggccttgccgttgacgacgctgacaacgaaagccacctcacgggtcgactcggcgaccatcgtgctgtcggggcatgtggtgaggaagccgaggcatccaaggagaaggcggcagagtgggccgcggctgcgccaccgtctccggccagcagcgtcagcgtccctggccaaggacgcgcacgacgaggtccttttcgcagcgaacgaccggcgaggcgacgaggagcagccgcatcgctccctgcggtgtcctcaaccgccgtcatggcatgggggctgctccgcacgggattccggccttcactcgcgcctgcgccaccacgagaaccctaagccgccgccgccgccgccgccgcttgcgcctgcgtcggtgtcgtcgccgaagccggagtcagtggtggtgtcctctggctcagtcctcggacggggaaagacggcgtcaacgggagtggatggaaaacgcgacggagtggtatggatccaatttcccaaaattgcagtggcgcccagccgatacgatgaatagtagtagtatttttttaatttggcaaagttgcggtggcatggatcgaattagcccgatgatgaat

SEQ ID NO: 76727 - DNA, 1841 bp, Oryza sativa
  Clone ID: PAT_MRT4530_76696C.1
aagaggggtgaatgaaggagtctacctttctcttcgatttccacaaaaaaatcccgcgaaaaacgagttcaaatggagtggatttgaggtggggaggtgagggggagagagagggggagagctgctgctgctcagctcgggctggtgcttgggcgaaaatgggagtggggaggagataggtggtggggcccatggggttcaatgggtcggaccacagagaaggggcgcgcaagccatactggcgttgtggtatgaggggcggcgccagtgtggctggcgcccccattctgcccagtcagcacctccatgatagccctagtgccacggtggcactggcacggcgccagtgcggctggcgccgccatgttgggccggcgttcacccccgaacccgagcccgtcgaacagccttcgataatgcactccgacggcacgtggtcgcacaggggggcgggcgccgcggcagtactcacttcgccaagaggcgtgcccattcgatatgccgcaaggctgcagttcgacacgaccaacaatacggtcgaatacgaagctgtacttttgggcctaagaaaggcaaaagctttgggggttcggcgcttgctcatccgaacagactccaaactggtggcaagtcatgttgacaaatcctttgaggcaaaagaagaaggcatgaagagatatctggaggctgttcggtctatggaaaagtgcttcgccggcataacggtcgaacacttacctagaggccataatgtggaagcagacaccctggcgaaatctgccgcctgtggaggcccgcattcgccaggcatcttttttgaagtcttgtacgtaccaagtgtgcacacagaaagcctggacatcatggcaatcaaccaggcagaactgggcgaagacccagatgactggcgaacaccgttcgtcaagtacctcaagaacggctggctcccagaggaggaagcagaagcgaagcgcttacagctcagagccacaaaatacaagcttggagtctattggcccaccgtgctgaaagtttgtgttgagcaagccaggaagtgcgaaagctgccagcggcatggccgaaaccagactgcaccacagtacgagctgcagcctatcgcactagtatggcctttcgccagatggggtcttgacatcattggcccattccctgtagcaagaaatgggtataagttcgcaattgtaagcatcgaatacttctcctgctggatcgaagccgaaccactcgggctaaacctggaaatcaggttcgcctcagtcgcgcacccacagtcaaatggggcggctgagcgcacaaatggcaaaattcttgaggtgctcaaaaaaaggcttgagggggcggcgaagggtaaatggccagacgaaatgctatccgttctttgggcccttcgaacgacccccacaaggccaaccaggttcagcccgttcatgctcctctatggcgacgaagcaatgaccccgactgaactaggggctaactcgcctagggtagtgttcccgggaggcgaagatgggcacgaggtgtcactagaactccttgaagggataagaatcgaagcgctggaacacatgcgcaaatacgctgcaagcacctcggcaacgtataacaaaaaagttcgaccgacagaactgttgcctggccatctcgttctaaggaaaaaggcgaacccggtggcggtcgggaagcttgaatcaaagtgggaagggacgttcctcatcaagcacagatccagaacgggctcctttcgcctagcaacgctggaaggcgaagagttcgaccactcctggaacactgcttccctcaagcgtttctatgtctaa

SEQ ID NO: 76728 - DNA, 1459 bp, Oryza sativa
  unsure (1)..(1459): unsure at all n locations
  Clone ID: PAT_MRT4530_76697C.1
ctatctatctatatctagttcgtccttcattgtggtgccagcaatctggataagtgggggagtttggccccattctctaatcccaacatggcggcgccagccacactggcgtcgtgcccgtgccaccgtggcactagggctgtcgtggaggtgctgactgggcagaaagggggcgccagccacactagcgccgcccctcataccacggcgccagcatagctggcgcgccccctcctctgtgggccgacccttaaaccccgtgggccccaccacctttctcctccccactcccattttcgccaagtcccagcccgagcagcagcgcaggagttcttcccctctctctccccctcacctctccacctcaaatccactcaatttaaagccgtttttcgcgggattttttgtggaaatcgaagagaaagggggtgcaagtaagactgagttggtacgagaagacttggagggggaaggagagaagaagagacctttgcttggaaatgatttatgggaggcaggaccatcaaagagacattgcggtactgatgatgtggatgcagcgagggtgatgaaaagggagttagtacaagaggggcttgatctaagtgaacatttgtcggcgagtgttcattggtcgtcgtacggagtcaaccctgaatacccgacagaagtagcaggccaatatatgaatacagatgattactttgatgtcgaattgagtggtggtcacgattctgtctcagtagaagtcaatagagatgatgttgacgaggaggcaagtgttgagcaatatgatgttgaatttgctgaagactctgatgatgaccgtccattccctccacttactaataatgacaagttagcattagaggaatgtcgtgcgtttgagaaggtgtttaggagaaagccggacattcctgagtttagggacctaacacatgcccatggtgcactactagatggcggcatcaacctagatcagttgccagaaccattccaggtggatggtctcagaaagggtttagagttcccatccatggtcgcattgaagctatggctccaggagtacgccatcgtgcaccatcgtccataccgtgttgtcaattctgccgcaaataggaggtacactgttaaatgtgaaaacccacggtgcaaatggaaggtccatgcaactaagaggtctagtggatggctgaggagggacaaccgccgacttacccagccttggaggcgtactacgaggcccgtcatcgtggggctgcgatcgaggcggggaggggacatcgggcccgagggtgatgtgttcgccctcctcttagtccccccgagggggtcgggccgcacccgcctcggccccgagggccgaggcaccccgacccctcgtgggtttttgctccgcgtgtatgggttaggtgagcacagntgngcttacctgccttctggaatagggatgggttga

SEQ ID NO: 76729 - DNA, 370 bp, Oryza sativa
  Clone ID: PAT_MRT4530_76698C.1
ggcctagaaacttggaatctttattcccgcttataacgctttttatttttcatactacttcatttcatgatgtaaattggcccctcataccttgcagaactattgacttatatacatcacaacagaacacttctttcctcactacactaaaaaaaataattacaatagcaaattctcccaatcatattagtcaaaactaatcacagactgccatttttaatgccacgggtgcagcgcgcgtcccacgctagtagcattaactttataagaaattgagaataacataccagctagaccaaaccaatctttttcgccatatccattttttttgccgcatacccacacatggtctgagtgtgatgaaattctc

SEQ ID NO: 76730 - DNA, 1449 bp, Oryza sativa
  Clone ID: PAT_MRT4530_76699C.1
atggccaccttcttcacggcgcgccggcggaaggcggagctcgtggcaccggcgaggccaacgccgcacgagcacaagcccctctccgacatcgacagccagcgcgggctggagctctacgccgccggcgtcgagttcttccgtcgccgccatcacgctgcggccgtcttctccggtggtgacgacgacaatagcggtgacccggtgggtatcatcagagcggcgctggcggaggcgctggtgagcttctacccgctggccggccgcatccgggagctccccgccgccggaggaggaggaggtggaggcggtaagctggtggtggagtgcacggcggaaggggtggtgttcgtggaggccgacgccgacgtgcggctgcaggagctcggccatggccagccgctgggccctccgtacccgtgcgtcgaggagctcctctgcagtaacgacctcgtcggcgaacctgacgtcgtcgttggcaagccgctgatcttcatgcaggtgacacgattcagaaacaacgaagggttctgtatcggctaccactactgccactccatcaccgacgcattcggcatggcccagctgctccacaccgtctgccgcctcgcgggcggcgacgacgacggcgagtccctcaacgatccgccggtctgggagagggacctcctcgccgtcgcgccacgacgctcctcgccacgcatcaggcacgtcgtcgagcatcccgcctacgacccgctgcccgtctcatcggccgcggcgaaggacgtcgtgtggacgacaccgcgcgagcagatggtgacccgctacttccacctcggcccgacggagatggcagccctgcgagcccatgttctgtcgtccgccactgtcttcgagctcgtcaccaccgtgctgtggcggtgccgggcggcggcgctggggtacgccgcggcgcagcgcgtccgcgtcctggtcatgtcgagcgcgcgctggagctggaaacgcaatccgccgctgccgcgcggcttctacggcaacttgctcgtcccgcaggtcgccgaggccaccgccggcgagctgtgcggccggccactcgcccacgcggtggagctcgtgcgggggaggaagttcgccgtgacggacgagtacatgcggtccatgctcgacatgctggcgcggcgcggccggccgttcttcaacctggactggacgttcgtggtggctgacgccggtggcctcggccgtagcctgggcgtcgtcggaaggtgggagcgcgccggcggcggcctcacgccggttggacaggcgactgcggcgagcatgtacagctactacgagaggtgcaagattggagcaggagaggaagccgcagtggtgtccatgtgcttgccggcgccggcgatggagaggttcgtgcgggagatcaccggatgctccaacaccagatcagcgaagagcgccatgtag

SEQ ID NO: 76731 - DNA, 167 bp, Oryza sativa
  Clone ID: PAT_MRT4530_7669C.1
gaaaaagcagggggagtccgactacttaacgctggagctaaactggactgggaacatactgcgcctcaacccgacactgatgggccataaaccaataatagagatcgaaggcgttccagacctctacagaaccatggttttttggcgaactaggacgacgggacctg

SEQ ID NO: 76732 - DNA, 1794 bp, Oryza sativa
  Clone ID: PAT_MRT4530_766C.1
atggctcggtgcctggcaagggattttggagtctgcttatttcagctacgggctcaaggcaaggtgggggaagattcaggcaagggaggtgctcatggcattagcgcctgcaacctgttcaatggaatgtctagtcagtatgaggtgtccaaggaagaaattcttcttgtcatgaatgagaaggtaactaaggaagaggcactgcatctaatacaagggttgagggatgccaagcgtcgaatagatgagaagctagatcgattattggagatgttcggtgtaaagttggtggttagtgaggacgcaatctttgatccctacattggcatctctaaccatcctaaggagacgcacgccaagtgttcaacggtcgtactcaatagcaacaatggcattgtccagggtgtgttcccactcttgcttggcacactagacattgtttcagcaccggggaagtccacaccagtcatggcattgaagacatcaatggaagatgtcaagaattgtccagggccacatcctcccataatagaatcgagagctagtagatgtgagttacaatcagcaccttggccaacaaataggactggcaccaaggtgcaattgatgtctccatggccacaccccaagcaaatggatgttattgtcagcaatattgatcttcagccaatgccatggccttcattcaatttttatttgatcaaaggtcatcaggatttctttgatgcaataggagaatcttatcatctgcttgctatcaaggaactatggaattattctttgcttgggatcttactgtgcacgagaatcagcacaaagagcttacaacttgaaatagcaagtatgttaatggagcttgtctggtttcaagaaggagagcaaaaatggattggtgtgcatgtgttcagttttgtgtatcctgaaggttccttactcttggttaattttatgcaagatgttagcaagaatggcataatttcttatgacattgaaggaattgcagaatgtactcaaataaggtactttgcatcattacttcttgatattgcaatattgcccacagaaataatgctcacagtaaggcattgggcagtgcatttgatgctgccatggcctccaccccatgagaatagcattgtgctcttgattgatgtgcatgcatttgccaaattagggatagcaaatatggttgaagcaaaggaagaaatgaaattatttgttgctaagttatatgtactggacctgagttgtgcaactccttctattggtcactttggaaatcatggtccctttcaactcttagtgtgcaagatttggcctcaattcctgttatggaagatatggtcctctgaggcagaaataaagctgttaattgttgggcatcctaaacagtacatcgaagacacgattctggtgttagtggaagttagtttgtatgatttgggtggtaattgctccttctttgaggcagaaaggggtgtactcactggtaacaagcatttttatggggtgcagttagaatttctatctgacaagctggagcttagaaagaaacatatgctaaaaattatagatgcttgttatgaaagttggtccacaaggaagtggattgatgtgacaagaaaatggctgcactggatgctgggaggtggtgaacatgcaagtaatttcagttggtatctttgttggactttgaaagttgatattaagctgaagaaattattgcaaggggcaaacaagattagcagcaagctcaaaaatggaggggacatccgtgaagcttttgagcagtaa

SEQ ID NO: 76733 - DNA, 1097 bp, Oryza sativa
  Clone ID: PAT_MRT4530_76700C.1
tctgtctcgcggagggaaacccgcttttgccgggagcaaacgaaaccaagcggggggaggagaagatgttgctgcaccggcaccggcacaggctgctctgctgcggcggcggcgtcgccaccgcccccggccggttcgccggcgatgccatcgcggaccatcagcaggcagccgccggcgccaagaacgcggcggccacgtcgtccgcgaggcagctgtcgtgggcgcaggtggaggccatgacgcgtgggttcacgtcggccgtcgtcggcgagggcggcttcagcaccgtctacctcggccgcgtcgccggctccctcgcggccgtcaaggtccaccgcagcagcgagcgcctccagcgcgccttccgccaggagctcgacgccctcctccgcgtccgccacccccacatcgtccgcctcctcgcgttctgcgaccagcgagacgagggcgtgctggtgctggagttcgcgccgaacgggaacctgcacgaacagctccacggcggcggcggcggcggcgcgatgccgtgggcgcggcgggtggcggtggcgctgcaggtggcgcgggcgctcgagtacctgcacgaccggtgcgagccgcaggtggtgcacggcgacgtcaagtcgtccaacgtcctgctcgacgccgccatgggcgcgaggctctgcgacttcggctcggcgcgcgcggggttctcggcggccgtccactgcccgcgcccgcgtccgtcggcgctcgccgtgctcggctcgccgggctacgtcgacccgcactacctccgctccggcgtggtcaccaagaagagcgatgtctacagcttcggcgtgctgctgctcgagctgctcaccggcacgcaggcgttccgcgacggcatgctgctgacggcggccgtcgcgcccaagctcaagggcgccgccgccggcgacgtggagaagctcgtcgacgagaggctagggtgccagtacaacgccgccgaggcggcgaccgtggcggcgctggcggcggcgtgcatcggcgacaacccgagcctccgcccgtcgatggccgacgttgtacggaccctggagaagcccgcgcaaaaggccggacggtga

SEQ ID NO: 76734 - DNA, 274 bp, Oryza sativa
  Clone ID: PAT_MRT4530_76701C.1
cggcaaaggatctctggtgcaaggtctcgtgaggttgccgtcattgaccgcacatgtccccctgcgcatgggctcgtccgggcaggcttcggccagcccgtcagcccgtgactaccgctccccttggccgcccgattggctcaggccggtctgggccgtccacgtggtggacgcgcacccgaggccccgtgtggaccatgtccaccgtgcgccctccccctttgactcgctgacgtgtggggcccgcgtgtcggcgccggccgccccttgctga

SEQ ID NO: 76735 - DNA, 1099 bp, Oryza sativa
  Clone ID: PAT_MRT4530_76702C.1
ccggccgggaaaaaaccaaaaaaaaaaacccggccgggctagaagcccccctgcctcctgcgcctccgccgccgccgccttcttcgtctgctgagttcgtagattagctcgagctcgccgccatgtcgtccagcgaggtcgcctgcacgctcgccgccctcatcctccacgacgatggcatccccatcacctctgagaagatcgccaccctggtgaaggcggccaacatcaaggtcgaggcctactggcccggtctcttcgccaagctcctcgagcaccgcagcgtcgatgacctcatcctctccgtcggatctggtggtggtgctgctccagttgctgctgctgctgcccctgctgctggcggtggtgctgctgctgccccagctgccgaggagaagaaggggagctatacatacaatttgcttgaggaggcgaaggaggagagcgacgatgacatgggtttcagcttgttcgactaagcagtccacagatgttagccagtccgcctatgctttgcaagactatcttatgttgtgtcttttaggttcacttaaagtactctcaagttttgagttttgatatggtgttatcgagaatctgtgtctgtgggatgagaacctcaaacctccttggatggtcctattagaatgaaaccgttctacattcttaaaaaaaaaaaaaaaaaaaagggaaaaaaaaaaaaaaaaaaaaaaaaaaaaaaaaaaaaaaaaaaaaaaaaaattcgctcgcacaattaaagcataatacaacaaaaatttaaaaaaactactgccctgaaaaaaagaaaatcattttcggctttgctttccttggtattgtggaatgcaacaccacagcgcagatttgatgttttaaatcaaaatattaggcaatatgaggggcagttctccttttctggtaaaggaacaggtgcttatccaataaaatgagttggaaaggcaatagtatatgcattggggcaagccctttattgaaataagttggatttaaaaagaaaaaaaaccaagttttgcaacaggttagggtgggggcaaaacaatttcactaccaggaaattaacgttggccagaccatagcg

SEQ ID NO: 76736 - DNA, 337 bp, Oryza sativa
  Clone ID: PAT_MRT4530_76703C.1
tcctccttcctggttgcgggggcaccgtggactgccacgtgtacgccacgtagaccaaaaccaccgcggattgggtcgaggggggtaattcgtccggtttgtatagttgggggtgaagaacgtccgattttgtggttcagggggtaattcggacgatcgcgatagttcgggggataattcgtactttttccttcaattaacttttgtttgcaagacaattcagacatgaatgcagatgcagctcatggttcggtttgttcgatgctagggattttcacgctttgtgtttcaatgtacttaccactccgtactattcatcttaaaactttaaactcat

SEQ ID NO: 76737 - DNA, 444 bp, Oryza sativa
  Clone ID: PAT_MRT4530_76704C.1
agttccaagagcaggtggattacatcagactgaacttacacccaggtgcaattcagcacatgtaaccactggctaaattgtggggtgagggtcctacatatgagccctgcgcccagaattaatttttgacactgagatcagactaccaattaacacctatattaatttgtgcccactgcccattattccctacctcaccccgggaggacaagaagttacaggccggaattcgcagtgtgtatgcacaaaagaactcagaccctatgctggtcttgacaaggcaagagccttgtcccattgtccatggaccttctatgatatgactgccatctttattagcaccttcccgtccttgacaaccctgtcggccagctttgccgtgccgaggcgtcccataggcgcttgagctagcgttttgcccttggcgccgccaccgtggacgac

SEQ ID NO: 76738 - DNA, 234 bp, Oryza sativa
  unsure (1)..(234): unsure at all n locations
  Clone ID: PAT_MRT4530_76705C.1
aacgnaacaacgcagcagcaaaaccgcgagacacatgacganggngacgacgacgacgaccttgccggcggcggcggcgctgctgctgctgctgctgtnggcggcggcgcantntnctcggcntgcccgccggcggnagccanacggcggagaacaacccncngntncagcnggcntacntngcgctgcaggcntngcggcggcgcgtcaccgacgaccccaagaacctcaccg

SEQ ID NO: 76739 - DNA, 433 bp, Oryza sativa
  Clone ID: PAT_MRT4530_76706C.1
gttccacatttgataggggatcagtgatccttgagaaatagtgacatacaacataaagaatctcatgaaagaatcacatattcattaaccaataatgagttatctatttcaaggaacaatatcagataaatatgtaaacatagtatgtgtggggatacccggtttgagtatggtatcccgaaaccacccaaccgtccaggatttcgatcgcgcacagattgatatacagaacaactttcgatacgtatacccaagtttttatagaaattattacataaaagataactaagacaggttttaggggccgacagggcaaacacactccccacaaacagaagacccatacacaaaataggataaaaacaccacaggcaacgcctgagagcagatcgacctaaaacaagaactcgtcagcaccatagaattcttcccc

SEQ ID NO: 76740 - DNA, 756 bp, Oryza sativa
  Clone ID: PAT_MRT4530_76707C.1
atggtggggcgcagccttgcagccttgcggcggcggcgtgaccctgtggtgggctggcgcagcggctggatgtggccggatgcgaccggaggccaggacgacaccgcccacagccgtcaagcccccacccgccgcacacctctcccaccggccgagctcgccgccgccgtctgcaccctacaggtcgagctactcatcgccaccgtctcaatggcattaatgtctcatcgccagctgctcccggccaccgcccgcttcaccaccggcgaccgcgatgaggtgcggcgcggctgcgcgtgctacggcgtgaaggtgcgcggcttctacgcggaggatgttagcgacgaggggcgctgcagccgcgctcacgacgacggcaacgatcctgacgagccgcgccgtggagacgcggcggcggtgggggcgcacgtggtagatgaggcccggcgggtggggaagagactggcgggaccctatgggcgaggagacaagggaggccatggcggtgcccaaccgcgatgtgctcctctacatgagtcgcggtggagcccggtgtggcatggcgccatccacggtgaagacgtccgcgacgcgaagacggcctcggacgcaacggccgctaacgtcgcacgcctctttgccctctacctgccagcactcacctacggcatccacaccaacctcctcctccgcctccccttctcctgcatcgccgccgccaacctcattccctcccgcctcgcgcccaccggctag

SEQ ID NO: 76741 - DNA, 1291 bp, Oryza sativa
  Clone ID: PAT_MRT4530_76708C.1
atggctcatctggcgccgctcttcctcctcctcctcctcctcctcctcccgctccacgccgccgccacgccgtccgcccacccggcctaccccaacgagccgccgtcctgcgcggcggcggtgccggtgccggagcggcgggaggcgcatggcggggggcgcatcctggacataacccactactaccgggaggacatgccgtcgtgggagtcggacggcggggtcggccaattcctgtggctccccgcctccatgcgcaacggttcccgcgccaacaactccgagatgcgcctgcccacccacaccggcacccacgtagacgccccgggccacgtcttccagcccatgcgcaacggttcctgcgccatcaactccgagatgcgcctgcccacccacaccggcacccacgtagacgccccgggccacgtctttcagcactacttcgacgccggcttcgacgtcgactccctcgacctcgaagtgctcaatggtctggcattgttagttgatgtcccaagagatgataatattacagctaagatgatggattcattacatattcctaaaggaattcaactagtgctatttagaaagctgtcatcttgcaggcaactaatgtggaagaaagaatttgacactagttatgtgggttttatggaggatggcgcacaatggttggtagacaacacagatattaaacttgtcggaatagactatttgtctgttgcagcttttgatgacttgatcccgtcacatttagttcttctcaaaaacagggatatcattcttgtcgagggcctcaaactggaaaatatcatgcctgggatatactccttgcactgcctgccacttcggctgcggggtgctgaaggttccccaatcagatgcatccttataaagtgaaggggactaggatcagtgcgtttgctagtatcaatgcaacttcagttgcactggatcactgcatgatgcaggtctgccaaataaaattgtgtcatgtcggtgctaagctcttggacttggaagctgtacagcatagtcgtaaaacccccaactatcgatgaactgcccaatgggcccattttgcgacttctcttttgaacaaactcaattgaagtttagggcccctttgatttgtatgaaaaatgtaggaattttggaggatttccattctatgaaggcctttgaaataaagaattgaatcatatccaattctttaaaattcctatggaataggtaattctatgtacattttgaaggaaagttagtaagaggtctaacctccaagtct

SEQ ID NO: 76742 - DNA, 1656 bp, Oryza sativa
  Clone ID: PAT_MRT4530_76709C.1
atgggcgggtgcttgtccggcgacgtgcgcggcggcatggaggccgtgggcgggagcggcggccgcggggcggcagggaccggaggaggagggggaggaggggcggggcagggcggcggggcgaacgaggcggtggaccacttcttcaacgccgccggcctccgcggcctctactcgcctctcgagctatccttttcagcatcaaagttgcggaatatggatgctttttccaagagtgatccaatgttagtgatctacataagaaaggatgcaaggctagaagagattggccgtactgaagtgatactgaactcactggaaccctcgtggatcacaaaggctacaataagttaccaatttgagattatacagccgcttgtattcaagatatatgacatcgacacaaggtaccataacacgccagtcaagacactgaacttggctcagcaagattttcttggagaagcatgctgcaatttgtcagagattgtcacaaacaatcacagcctgacacttaacctcagagatagttgtggacatacccttctaggaacagtgacagtacatgctgaagaaagtaattcctcaaggatggcagttgagatgacactccatgccctaaacttggaaaacaaagatgtattttcaaaaagtgataacccattgctagttgagtgttttgattttgattcaagtggtgaccacgaacttattgggaccttccagacaactatcactcaacttgagaatgtatataattcaaagtctggagcaaattttttcagccataagggacagaaaaagttgaagggacaattgtttgtggataagttccaggaaaaagttcaacatactttcttggactacatttccagtggttttgagctaaattttatggtggctgtagatttcacggcttcaaatggtgacccccgttcacctcagtctttgcactacattgacccctctggcagaccgaactcataccagcaggcaatactaggggttggcgaagttctgcagttttatgacaatgataggcgattcccggcatggggttttggagcgaagacaccacagggctacatatcccactgttttaatctgaatgcaactaccaatgattgcgaggtcgtcggagttgaaggcatcatgtcagcatacacctctaccctttacagtgtcacccttgctgggccaactctgtttgggccaattatcaacaaagctgccgagattgccagccactcccttcaatacggaaacaacaaatactttgtcctactcatcatcacggatggagttctcactgacattcaagaaacaaaagattctatcgtgagggcatccgatctgccattgtcaatcctcatcgtgggcgttggaaatgctgatttcaagcaaatggagatcctggatggagataacggcaagcggctggagagctcgaccggcaggatcgcgacgcgggacatcgtccagttcgtccccatgagggatgtccaaggcgggcagatctccgtcgtccagtcgctgctggaggagctccctggccagttcctggcctacatgcgcagccgggacatcaagccgcgagccccgctgcagcacgacaacgccttttccgctccgcccctttaccctccaaccaagtga

SEQ ID NO: 76743 - DNA, 417 bp, Oryza sativa
  Clone ID: PAT_MRT4530_7670C.1
atgacccggcgacgacctcgcgatggagacgacggcgatgaccctgcgacggcggcgacggcgcccccgaccagatctggccaccgctccccgtgcgccgctcgctgcgggaaggttggcgacggcggcggcgggaaggttcgcgacgatgtgatgggcggcgctggcgacggcgcgacgggcgccgacggcgcccccgaccagacctgtccaccgccccccgtgcgctgctcgctgcgggaagtggcatccatcaccgcctctgcctccatcaccgcggccatccaaaactacaacgcaccagggctatcttctacaatggcaagctatctcggcgaaggcactgcgttgcaaagaatgcaaatgcatcagaccaagaatgcatatgaatcgacggaacaacatatatatgcatga

SEQ ID NO: 76744 - DNA, 656 bp, Oryza sativa
  Clone ID: PAT_MRT4530_76710C.1
gggcgaaataaggaggtgggccgactagcacgtgggctggcttgttggaatctgattggagaaatagtggtttttggaccaaatgtaatctgtgaggccaaagagagttgctctaataagggatagattaaaggtaggccttattaacatttcaatagggtttatttcaatagggtttatttaatcgccgaagggatttaacctttaaaaaggaagattatgtgtatctgaaggtgactccagtgagaggaaccaagaggtttcaggtgaaaggaaagctagcccccagatatattggaccattccggatcattgctcatcgaggagaagttgcatatcagttggaactgctgccttcgatgtctggtattcatgatgtgttctacctatcttagttgaagaaatgtcttcgcgtgcgaaaagaggaaacaccgttgcagttagtggagttacaaccagatttgacatatcgtgaggtttcaatcaagattctagagattgtagagggaactacgaggagtaagagcatttgtttctacaaagttcagtgaaatcatactgaagctgaagccatatgggagcgtgaggatgatttgaaggcagagtttccgaagttgttcccaagctagtccgaatctcggagtcgagattctatt

SEQ ID NO: 76745 - DNA, 305 bp, Oryza sativa
  Clone ID: PAT_MRT4530_76711C.1
tcttaggcccccgtcatccgagacaacctggtcgccctctactaccccccggcgcagggggcccccttaacctgctacgctccctgcacgtatcgactgcctctccagctgcgcctccgacggcgctggtgagcacttgtgctcccaaacacagcagcagcaccagtcggagacgttcctgacggcgtcggagcaccaccagccgatcccgcaggacgaaggggcgcatttgcagagggtggatcagaaggagcatcaccagcagcagtaccatcagcgatcagcacccagcacgatggcggcgg

SEQ ID NO: 76746 - DNA, 720 bp, Oryza sativa
  unsure (1)..(720): unsure at all n locations
  Clone ID: PAT_MRT4530_76712C.1
acgcctactcctctgcccacacgcaaccaccgcccccgccgccgagtgtcctccccagcgctccctccctactccctggcgcatcctcccggcggtctctccttcgggcacccctcctccccggcagccctctggacgtcgaggggggcagtggcggccgagcaaggattgccctggggggacgacgagtccctgctccttggcatggcatcagcctcatccagcccggcgacctctcctttgggcgcccctcctccctggcggccctctggatgtcgagggggaagtggcggccaagcaaggattgggacgatgagtccctgctactcgacctggcatcagcctcatccagcccggcctccatcactgtgcctctctcttctcagatccactgtagccggagtcatcctccatcgcgcctctgtgcttttgctcaccggcgccgcctaccagcattacatctctgaactctcaccctctccatcgagagtttgcacaagcctttataaacatattcaatcacctagcaatttggttgtgggagatgacttgcattgcataatggaggaaagaatagccatcgatctggactanaaatgttgccaccatctggaattaaatactgccaatgaaagtgctcagtaatattcccagggctcatgatttggtaaagcactcgggagaccatggtaaagatgatgaagcactcgcttttgatga

SEQ ID NO: 76747 - DNA, 1318 bp, Oryza sativa
  Clone ID: PAT_MRT4530_76713C.1
tacttttcttcttccatagagtcatacccccatctctccctacatgcccttatcgtgctaaaaaaacaaatagatgactcattgatgtaactctctccaaatgctattggatgggagttttcgtcggatgacgacgacaaatttatttttgaggcacttcaactagtgtacgatcagaacatggaagaaccgaagcgaggcaggtctgtctttggacatgaggtgattggagactgtacaatgactatttttctgaagaacctacataccttcctgtttattttagacgcatgtgtgtattaaagtcctcttttttttaacacataatgaatgttgttgaagcacataatgattattttgtgcataaaagaaatacggatgttatccttgggctatcctgtttccaaaaggtaacagcagtgtcacgtattgtacgctatggaatagctgcagatacagttgataaatatgttcgtattggagataatactgttattcagagtctcagaaggtatattaattgtagctgttgatgaagtttttggggacgagtacatgaggacaccacatgagaatgatatagctaggttacttgcaattggagaaaaaaaagaggatttccaggaatgttgggttctttagattgtatgcactgggagtggaagaactgcccgactgcatggcacaatcagtataaaaggaaagagtgagttcctactttagttttagaagttgttggctcatatgaccgatggatttggcatgcgttctttggtttacttggaactcataataatattaatgtgctccaacgatcactattgtttgcaaagctagctgaaggaaagactcctagagttaattatagcattaacagacatgactatactattgggtattatcttgcagatggtatttgttcttcatggaaaacattggtgaagagcatctagcttccacaaggcaataagataaaatattttgctaaaacacaagaatctgttaggaaggacattgaacaagcatctggggtgctgcaagctcgctttgttattgtccatgggccagtttgttttgggatccgttgactctatgtcaaataatgagagctttgtgtaatctcgaataacataattgttgaggacgagcatgtcgatggggaagatttacattatgatgagataagagaacatgtggatagtaactgaatttaagaatgccttgcaaattacgaaaaaaaattaaagacaaggcaattcacaaccagttacgagagaacctcattgaacatttgtggcatcatcatggagatcaatat

SEQ ID NO: 76748 - DNA, 404 bp, Oryza sativa
  Clone ID: PAT_MRT4530_76714C.1
aaaaacaacaacaaacaggggttttccatgggggggggttttttaaaaagcaaaaaacaaaaccggtttgcctaaaacaggggccaacaacaagaccccctttaaaaaaaaaaaaaaggggaaaactttttttttttcgaggatttcatcgaaaaacccaaaacagggagtctccctcaccccccaaaaaccagtttttttagggaaaccaccatgttgaaaaggaccccttatgctcaggccccaagccacggggagggaccaacagcccccccccagggaggccccccgcccaaaaaaacaaacccgccctgtttacccctggaaaaaacccaaacccacttggcgggcgaaaaaccccttgccggagagagggggcccaacctttgttgggggggaagggg

SEQ ID NO: 76749 - DNA, 301 bp, Oryza sativa
  Clone ID: PAT_MRT4530_76715C.1
gggaaaaagcaaccaattggaaaattgtttaatgcataaaatgcttaaggggggttttgttccttccgcccattgggaagtaacccagacgggggggtggtttattatttttaagggtttacaaattggtttcagccttattttttcccgttttttttaaaaccaaagcctccaagggccttttcctaattttttttttttgggaaatacgcgggatcactttgggggtactcttttttttgggccttgggccctttggggggtttggccttcccttttttgttataaatgggtgaccgga

SEQ ID NO: 76750 - DNA, 160 bp, Oryza sativa
  Clone ID: PAT_MRT4530_76716C.1
gatcttctgcgagggaccgaccaaaacagcttggggaaatctgtggatacgtgccatcaagctaaccccatgggtgaaggacggtgacgaagacacgtcggcaccgagcagtacttgagatccaaagctacgcaactatctttgtgtctttttgtttagt

SEQ ID NO: 76751 - DNA, 1041 bp, Oryza sativa
  Clone ID: PAT_MRT4530_76717C.1
atgccttcctcctcctctcgccgccgccgccgccgcggccgccgccgcaagaagaaggaggaggaggcgagggactgggccgatggcctgccgctggacgcgatcctggccatcttccacaagctcggccacgccgacatcctcatggccgccgaccaggtgtgtgccacctggcgccgcgccgcgcgggacgagcccgcgctgtggcggcgcatcaccgtgcgcgggaccgaggcgctctccgccaggatcaaccgcggcggcttggcctgcgccgccgtccgccgcagcgcgggccagtgcgaggccttctgcggcgagtacgccggcgacgatggcttcctcgtgtacctcaccgagcaggcctcctgtttgaagagccttcggctcatctcatgcttgggtgtctcaaatgaaggaattgaggaggcaacaaaggaattccctcttcttgaggagcttgagctctcattctgctacaatgttactcatgaggcgtatgcggctatcggcgcggcatgcccacagctcaagcgcttcaggcttagcaaacgatccttctatgattcaggaggtatccgctggaaaaacaacgatgatgctggtggaatttcaaagatgcacgggctacgctccctgcagctcttcgccaataacctcacaaatgaaggtctctcaaccatcttggataactgccccaacctggagtctcttgacattcgccattgcttcaacatcgacatgggcgccgactccctgcgagcaaaatgtagcaggatcaagatgctgaggccacctgatgactcaactgatgactatgacttcgatgtgtacactcccaggaggctccccatctcccccggttttgtgcggtattattcggtgtattctgatccggaatattccatgtactcggatgaatggacgtctgaggaatttgatgatgatgatgatgattattccggtccttcccgctacgaggaagatcttgacaagtatgataacgcgcttcccaggtgcatgaggacgtttctgaaatga

SEQ ID NO: 76752 - DNA, 1044 bp, Oryza sativa
  Clone ID: PAT_MRT4530_76718C.1
tcatcccccgttcactcgttttagccccctcccgagcctccccgtggtccctctccacctccccgtcgccctcctctctctcccacgctgccggccgcctccagccgcctgtgccgcctcgaccgtgcgccggccggccgcgccgtcgcctcctccagcgtcgccgccacctcctccaccccggcttgccctccgtttcccgcggagacccccggagctgcctccccgccgtcgcccttctcgtttctccgcgccggccgcctccagtcgcctctcccgcctcgcccgtgcgccgtccggtcgcgccgtcttctccctcggcctcgcagccacctcctctccctcggtcagccctccgtttcgcggggaaagcaccggagacgcgtcctcgccggtgtccagtggcgtcgccaccacctctccgtctccggccggctgctgttcgtcgccggtacgccgaccgacgtcgccgtctcctccgttgacgtcgcagcgtcgccctccaccccggctgctcctcggtttcgccggaacaccgtcgcccgcgccggcttctccttcctcctcggcggcatctcctccggctgcccctttcgccatgcccgtgcgtcagccggcgctgccgtcccctccctcggcacggtgaccggcgtgttccacgccgtcctcgtctccgtgcagccgctgccggctgccctcgtcgcctcctcgccggccccggtcgtcgccgtcgtcgtcctctcgtcgttcccggtcgtcgtggcgttcgtccctccgtcaagccgttcttgtccgtcgtccgcgtccgtcaagtgtgtcgctgcagcccccgtcctcgtcttcgtcctcgcctccgcgtcgtcaagccccgtgccggccgcgtctcgccttcgtccaaggatcgccgccgaagtcgttccctcgccgtccgtctccgccgcgccactttcgtcgttccggaggttccagaagcatggttcgcggtcgtcgccaaaggttcggaaggccgttctctctgagcaaggcaagtcacatcatcgttga

SEQ ID NO: 76753 - DNA, 360 bp, Oryza sativa
  Clone ID: PAT_MRT4530_76719C.1
atggaggaggcacgtgatggcggcgacggctatccccgtcttccctcccgacagcgggctccagcggtgacgggcgatggcgggtgtcccggccttcctcttcttctcccccactcatctcccctctcctccctcccaacggtggtggagggcttgggcggcgagggagggcagaggtggccatccaccgcacgtatccggcggcatccaccttccccccatgcggatccggcggcaacggccctcccctgcacggttctggtggcggccgccctcccccgcaacgacgaagtcctcgaaagcgatgatgatgacctcaacgacgatggcctaggtggaggcagtgggctagggttttga

SEQ ID NO: 76754 - DNA, 429 bp, Oryza sativa
  Clone ID: PAT_MRT4530_7671C.1
tcgcgatctagaactagttttttttttttttttttttttttttttttttttttttttggtataaacaaaatatttttgttgcgaatatacccaacaaacagggggtctccaagtgtggacacgggggagaagacagagggggcgcatgtatcaagtctatacacacgagcagaagagacaccaccgcgggcccccatggggctcgcaaataacccccccgcgcgggggggaaataaactccaagcgggcgtaaaacctccttgggcaccccaccatttgcaaattggagaaccacccctttttacaccaaggggggcccccaagggggccaccccggcatcaaaaaagatgccccccgggggaacaaagcaaagggggccccccgcaggaacaaaaaaaacaggccaaaggttgcgctcacacactggg

SEQ ID NO: 76755 - DNA, 2820 bp, Oryza sativa
  Clone ID: PAT_MRT4530_76720C.1
atggcgcccccaatcgccgggaacgcccgcgtcttcctcggccgccctccattgccgccggccgtgccccctcccgagcctccccgtggtccctatccacctccccgtcgccctcctctctctcccacgctgccggccgcctccagccgcctgtgccgcctcgaccgtgcgccggccggccgcgccgtcgcctcctccagcgtcgccgccacctcctccaccccggcttgccctccgtttcccgcggagacccccggagctgcctccccgccgtcgcccttctcgtttctccgcgccggccggctccagtcgcctctcccgcctcgcccgtgcgccgtccggtcgcgccgtcttctccctcggcctcgcagccacctcctctccctcggtcagccctccgtttcgcggggaaagcaccggagacgcgtcctcgccggtgtccagtggcgtcgccaccacctctccgtctccggccggctgctgttcgtcgccggtacgccgaccgacgtcgccgtctcctccgttgacgtcgcagcgtcgccctccaccccggctgctcctcggtttcgccggaacgccgtcgccgcgccggcctctccatcctctttgtcgccggcgtcctttcggcctctccttcctcctcgtcggctcgtcgccccgctgcaccaccaccttcaccaacatcgtagcggcgtgttccacgtcatcctcgtccccgtgcagccgctgccggctgtcctcgtcgcctcctcgccggtcccggtcgtcgtcgtcgtcgtcgtcctctcgccgttcccggtcgtcgtggcgttcgtccctccgtcgagccgttctcgtccgtcgtccgcgttcgtcaagcgagccgctgcaaccccgtcctcgtcttcgtcctcggctccgcgtcgtcaagccccgtgccggccgcgtctcgccttcgtccaaagatcgccgccgaagccgtcccctcgccgttcatctccgttgtgcccgtctgtctccgccgcgcccctttcgtcgttccggaggttcccgaagcgtggtttgcggtcgttgccgaagccgctgggcgcgcccgaaggcggcctcgccggcacagccgacgggaggcggcgcacccgcgccccgatggtcgccggcggcgacctccggcgcgacggagcggcgcccgagagaggggagggaagggggaaacgaaatgggtggtccacggctcatcccgggtcaacgacgacgacggaaacggcgaccggagtggaggaaggcggcggcgcggctcgggtagacgaggacggcggcgttccggcgatcggcgaccgaaacggaggggtggacgaggtcggcgaggacacggcgaagccgaaggaggtgatgccgaagcgggaggagccggaggggaaggaaaccggcgcggcgatctcgggctccatcaatgacgccggcgaggggatgacggagaagacgtcgtcgttgttgtccctcaagccgaagtgcggttgggttgtgagggataacgtgcttgtcagcaaggtatactggcacagaacaagggcacgcggggataatgacagctttgtcccagaatcagagaaagagatgctgtggaccacaatgctcgagacgttcacgctccctgcgggtacagagaacatagtgaaacagtggactcttaagaaaatggcagaacagttccagagcttcaagggagatctctacaagaaatacatcttgaagggactaacaccgaacttcgacgtattcccaaagctaagggatcattgggacaagttcgttgcttacaagacagggcaacaagggcaagcgatgatggtcagaaacaaagaaaatgccgccaagaagaagtaccatcaccacttggggagtcggatgaggagcaagagagataccgaggcgaagattgcagatcttgagtacatggtatcgagctacgaactcagcatgcaagaggaggtggcaaggaaggtggatgaacgcatggccgcacatcggttccaggatccccagccgtacattcctcctgcaatggtcagcccatcaggcaatcatagcagctgcgcctcaacggggcagacaccacgtgagctgcatattcccttcaagaacttatcaatcaaggtggcgtcgggaatggccatcccaacggacatttcagggacttaccactgcaggccgattccagcaggatactcgagggtcgaagttgagctggtggaagccgcatacgaggacctcgagttggactacccaggagtagacagcgacaagcggcgcgtctcgtgcaccatctcctccggctccgccatctcctcctgcaccatctcctccaattcctccgccacatcctcctgcaccatctcctccagctcctccgccacctcctcccgcaccatctcctctggctcctctgcctcctccacctccaccgtgtccccctgcacctcccaagacaaggtcgagccgttggtgaccggcgaagaatttggcataacggatttcatttcggacaccgctctaactgtggatcagttgattggagacgcaccaatcccgaaggcagaagtggcatacaagtttgaactcgataaaccgcttgtcacgcctgagcagctacagtccctaccgacacagatgttcaaattccatgaacggtacatggaaatgagcgacaagggtagagagatgttcggagcgaggatcagaaacctcgacttattgcaaggagaagatgttctctggatccatttcaaggatgtctttgatctgtaccatctcgacgccctcaacgtctcgtccatctcctaa

SEQ ID NO: 76756 - DNA, 428 bp, Oryza sativa
  Clone ID: PAT_MRT4530_76721C.1
tttgttttttttttttttttgggttactttttctttgtgtcattaggtttttttttttttttcaccaatagagcattggaagcaaaaggggcaaagctctaatggaccggaaacaaaaaacatcgttttttgggcgacgggcccacgaaggtaggaagaaaggaccctacaaaaaaagaaaaaaaaatgacacacttaagtaacgctcgacggggaagagaagaaactactaatgacgggctattgcaaaaacagaacggccgaacaaggccgaacgcatcggttggggacaggaaataacccccaccggggaggcacagggggggctcctgacacgggggggcgagaacacccttccgtgggagcccacattgggcttcagggggccccgggggcaccccaggagccttaccaaagtggctgacggc

SEQ ID NO: 76757 - DNA, 179 bp, Oryza sativa
  Clone ID: PAT_MRT4530_76722C.1
aaaaaagttaacggcgtcaaatattttgagatggaggaagtattatgatgtagtgataaacaatctacttgtagaatgcaaagaaacgaggtcgtggcgacccacacgcacagacaaaagatttcagtagtcaaagcgagacgattccgtcacttccgtgagaaacaacgacgttttct

SEQ ID NO: 76758 - DNA, 1630 bp, Oryza sativa
  Clone ID: PAT_MRT4530_76723C.1
tggattttcacccggattctgttgtctcccattctcatccatagaccagcggtttaatctctgtcgagcaatctctacctgtttttcccaatcagttctaagagtgataaatagaagcacaatagtctggactagtgtaccaagaagcataccaatccaaatgccctttacttgaaatcctagcacatagcctagtattacaccaatagggataccgaacaagtaatatgatgtaacattaacataggcaactacactttgccaacccgatccaacagcgacacctgagagcactggttgaatactattcaacaaattggagaaggctagcaagggagaaagctctgcaactgcatctgctactaccgtactttcagtaaatatgtatacaagccttccacgaaagataaggaagagcacaaacaacataaatcctatcgagaaagaagtggtgaccacattgaaaatggcaaacttagcccttcttgcacttccagctccaagttcatttgccacccgcactccttttgcagacaaaaaccctatagaaatcatcatctcccaaccattgatattaaggcatattgaaagagcatcaagagcaatctctgcattcttcatataaccagtgaggagaaccaaaattgtgttgtaccacaattccacacaaagcatcactccagaagacagtgaaagcttgacaatagcaccgagttcagtaaaagcagcaaatgagaatcctgtccatgttagagggcaaccaccaaagaagacaaaagcaagctgaccaaatactagaatctagtaggcaatgaccatggagcccatgaccccagcaaggccaaggtagaactggaccgttaaaagccatgatagaaaaaggtgaagcccaagattgagcatggcaagataagtgacaatcatgttcttgctctgtgcttgtaggtacatttggagcgtgaagttcccaacattggatatcataacagggatgtaccacaatgaaatagtgccagccatagcagcgatcttaggatcctggccaagaaaaattaggagtggagtggtgaagaggtatatcgggaggaggaggactgcacaacacaagagaactatccatgaacgttgtagatagatgcccaacatgtggtattgcttggcgccatatgattgcccacacaatgtttccaatgcacttgccatgcctagaaggatgccgccgctgaagcgcatgaggacggtggagacgagagcgtatccggcgagctcggtggcgccgacgtggccgatgaaggcttggctgatgacggtgacgccgaaggtggagaagcgcgcgcagatggaaggacccgccaccacccacagcttcttgctctccaccaacacccgccgccccaacgacccaacctcctcttcatcttcttcttgcttgtcgttgttgctgccttcgccatgagcgtgcttaggctccagcagaggaaccgtcctgcagtcatcatgttcatcacccggcctctccatttctcctagcacagcttggctttagctagctgctgctaactttaattgtgcagcaatggagcgaattaattaatgggaataattgcacttgaggggaagaggagctatc

SEQ ID NO: 76759 - DNA, 439 bp, Oryza sativa
  unsure (1)..(439): unsure at all n locations
  Clone ID: PAT_MRT4530_76724C.1
cgccatcaaggctgcgcactgtttggaaggcgaatcggtgcgggcctcttcgctattacgccagctgcgaaaaggggaatgtgctgcaagcngattaagttggggaccgccagggttttcccagtcacgacgttgtaaaacgccggccagtgaattgtaatacgactcactatagggcgaattcgagctcggtacccggggatcctctagagtcgacctgcaggcatgcaagcttgtggccctaagggcattcttacagggatttacgactattgtcagcttagtaatggttgcctggctaatctatgcgagatatacgaccgacgattcagagcttcatgaccccgcaaagctgtcatttttaattgttctctctcttagtttggcggcattcggcttctgctctacttcagaaactgagctacagagactactagat

SEQ ID NO: 76760 - DNA, 101 bp, Oryza sativa
  Clone ID: PAT_MRT4530_76725C.1
atgcagggaattgaaggccctgggagatgggagaaggacgcacaggaggacagacgtgacagcaagcgggccccaccacaccgctcggaaacgcaggacac

SEQ ID NO: 76761 - DNA, 229 bp, Oryza sativa
  Clone ID: PAT_MRT4530_76726C.1
ggaagggaattaaactggtttattacttggtccattaaaaccattacacttgggttcctggggaaaccgggaaagttaaaaaacaaaaaccgttattataaaatgggggccttgttgcttgttccttaaaaggggccgaaaaaccaagccaacaaccaaagattccagccaaaacccagaagggaaccggtgggattgccgccgccgccgccggccattccgccgccgg

SEQ ID NO: 76762 - DNA, 445 bp, Oryza sativa
  Clone ID: PAT_MRT4530_76727C.1
gtctcatctacaatcaggacctatgtcccttgctcatcaccagccttgctgtgagtcatatcactgccttctcagcagctatgactggtcttgctcacatgcaacgagatgccgtatcactctgaaactgcgggtgcgaacatctgcggacagcataacggactccattgcacgcagtctttctaatcctaagacactcagattcgacgattgctgactctctgatcaatcttacagactatcgcgcggacagaagtctagccatactgccactgcgaggtggtaaatgcactcgacgcgctgctgacgaggaacaagaatacatctcatagtgttattacactggcaacgactgtctgggttatcttagagtgtctggactactacttgctgacgattgcatgctgtggacttgcacttggaatggctgtacagattgcatgga

SEQ ID NO: 76763 - DNA, 123 bp, Oryza sativa
  Clone ID: PAT_MRT4530_76728C.1
gaaaggtacagattgtagcgtccagctttattgaaaactataacacgaaccttaagtagaccttatgaaagctgagatcaaataccatgccaaccgcttctgacaaatgggcaccagatttcc

SEQ ID NO: 76764 - DNA, 258 bp, Oryza sativa
  Clone ID: PAT_MRT4530_76729C.1
atgacgcacaaccgcaagaacgcacggagttgtagtcttggatttcttgccaagatcgagcgacagatcgacaaagaagaagatgggggatgcagtgtcaaacgatcaaggtgctataattccgacgtggaggccagcagcaagctcctcctggggttcctgcgcgggagctcgacggcgccgacgacggcggcggcacggctgggcgccggcgagaaagctctaattcatcatttcgaccggtttgatctcttgtag

SEQ ID NO: 76765 - DNA, 149 bp, Oryza sativa
  Clone ID: PAT_MRT4530_7672C.1
gggcaaaaaaagaaacacatttgggtttatttatttgcaaacaaaaacccagttccataccaaatacccccaaaaatacatactttaaacagacgggggtggacggacatcacgtcacagggaacattgggcgtcctctaaaacgggaa

SEQ ID NO: 76766 - DNA, 2340 bp, Oryza sativa
  Clone ID: PAT_MRT4530_76730C.1
ggaattcggcacgaggaacatcatcgcccaaaatccgaggttggagcttttgctcgggcgattgattttggaatcggaggaggggatgtcaggaccactcgatcgatttgccaggccatgttttgaaggttttacgcataatgatgaaaagaaagagatcagatctgacgcagacaactccgaaggagagaagaagactaaaattggttctttcaagaaaaaggcgattaatgccgggaacaaattcaggcattccctgaggagaagaagcaaaaagaaaaatgaacctcggggttccattgaggacataagggatgttcaagatcttcaagctgttgatgcatttcgacaatgtttagttgatgaggacctgttgccgcaacagcatgatgattatcacacaatgcttaggttcctcaaagcacggaaatttgatgttgagaaagcaaagagtatgtggtcagatatgcttaaatggagaaaggaatttggggctgacaatatagaggagtttgactacaccgaggcggatgaggttatgaaatattatccacaattttaccatggagtggataaagaaggaaggcctatctacatagagttaataggaaaagttgatgcgaataagctaatgcaagtaactactatagagcgatatgtgaaatatcatgtgaaggagtttgagagatgcttccaaatgagatttcctgcctgctcgattgctgcaaaaaggcccatagattcatctactactattctggacgtgcaaggcgtgggtttaaagaacttctcaaaagctgcaagggatctaatcacacgactgcagaagatcgacaatgacaactacccagagacgttgcgccgcatgtatattattaatgccggccaaggcttcaagatgttatggagcactgtaaaatctttcctagatcctaaaactgcttcaaagattcatgttctaggaagcaagtaccaaaataagttacttgaaataattgatgagaatgaattgccagagttttttggtggaaaatgcaagtgcgaggcatttggaggttgcaaaaaatcagataaaggtccttggaaggatcctaacataataaagagggtcctgaatggcgaagcaaattatgggaggcaaattgtgaccatatcaagcactgatggaaaaataattcgttatgctgggccacaatacccaacaagaaaaggaagtgatggctcagcggagtctgggtctgaagtggaagatggcgcgtcacctatggcatcaaggaacctgataacaaatccccttttgacccctgttcatgaggagtcaaaattggcagcacatggatttacatctgcttccccttccattattgaagaaagcattcctgttgttgacaaggttgtggatgatggatggggcagtcctagagctagttcatcaccctcgagaagtttgcctatcacatttgatggcctctggacacaagttatcacatggctgactgtcttgatcgtgagcctttttgctatggttcgctctgtcccaagcaggatggctaaaagattctcaagccaatccactgaccatgatcactcctatgtggagtatcctcaagaagcagagtacaaggaagaattccggccaccgtctcctgctccgtcttatactgaaaaggatgtcctctcatctatggtaagacgactaggcgagttggaggagaaggtgcaggcgctcgaaacgaagccatccgagatgccatttgaaaaggaggaattgctgaatgcagccgtccgccgtgtggatgcattagaagccgagttaatctctacaaagaaggctctctatgaagccctgatgcggcaggacgagctgcttgcgtacattgacaagcaagatatgatcaagtttcgtaaaaagaaattctgcttctagcagctcaacgacgagttaattctccatacacagagctgttcgtgtatatttggatcaattaatcaccacgaatatgaatgaatgcagctagtttggagtgtaaaattaaaagtgtgcatatggcaaattgagaatccaacaataacaccacggtatcggtatgtgagttacaaggtggaccttgaggtgttgttggctggtcattcagaatccagacgatgcatcgtcttgtgctggagggtcctggctgctgtaaattaagcctgtaattaatcttgtgacttgtaacatatatagcacaaatgtgagttaaaatcgttgtaaatggacttcaccttggaatcaaacatcttctcatcaaaaaaaaaaaaaaaagtacagacaaaaagctcgacggtatcgataagctgata

SEQ ID NO: 76767 - DNA, 787 bp, Oryza sativa
  Clone ID: PAT_MRT4530_76731C.1
tttttttttttttttttttatcggctgagatcatcacagcgaggaaacatcatcttccctaacgaaacagtcaccaaatggtgtgaatatgatacatgatgaacaaattcaacagaagtgctatcatagttgatccataacaagaaagaagtcagttcaattgaagttgagcctgggtaagatcatgattcattgacccaagtgttgggaactatagaagcaatcaaatatcagcactacaaagtgccttaggcagcaggaaagctggtggccaacaagggaaagaaacagatcacctccagccatcatttgaagccactatatcagattcaaacttatttaggcagagcagcattcttatcgagtagcttgagctcagctctttccactctcctcctctttcatctttttctcccatctacgtttcttgtagtcaaggagcatctggggcatcttcttcatcagctcaaccgtgttcgcacgcttctcggcggagatgcggtcgcacttgtggcccttccgcttggtgcgcatctcgccgcggggagggtcgtaggtccagtcctcgccggcgaggaggacctccttcctgaggcgcgcccgcttccgggcgctgaggccgagcggcttccatgccccgagctcccagtacccccacacccccttcgtcagctcccccttgtactttgcaagcttctccctccacgggtaaaccctcgccgccgcctccgccgccgtcgccgtcgccgccttcccggccatcgcctccacccgcgctagggttttg

SEQ ID NO: 76768 - DNA, 2253 bp, Oryza sativa
  Clone ID: PAT_MRT4530_76732C.1
atggacccgtgcaccgggtccatgaacccagcacgtgcgcgcggcacaggtcaaccgcttcgagtctatggaccgggtccatgcaccgagagtgatagaatccttttcgtctcgtctcgtctccctcgcgagagcttcccaccattaaagcccatagcggcagcagcaggagcttccctctctttttggtccaaaatcatcgcccaaaatccgaggttggagcttttgctcgggcgattgattttggaatcggaggaggggatgtcaggaccactcgatcgatttgccaggccatgtttagttccctgtaaagctctattatttgtcattctccctaagcggctaagccacctatcagttgccggttttgaaggttttacgcataatgatgaaaagaaagagatcagatctgacgcagacaactccgaaggagagaagaagactaaaattggttctttcaagaaaaaggcgattaatgccgggaacaaattcaggcattccctgaggagaagaagcaaaaagaaaaatgaacctcggggttccattgaggacataagggatgttcaagatcttcaagctgttgatgcatttcgacaatgtttagttgatgaggacctgttgccgcaacagcatgatgattatcacacaatgcttaggttcctcaaagcacggaaatttgatgttgagaaagcaaagagtatgtggtcagatatgcttaaatggagaaaggaatttggggctgacaatatagaggagtttgactacaccgaggcggatgaggttatgaaatattatccacaattttaccatggagtggataaagaaggaaggcctatctacatagagttaataggaaaagttgatgcgaataagctaatgcaagtaactactatagagcgatatgtgaaatatcatgtgaaggagtttgagagatgcttccaaatgagatttcctgcctgctcgattgctgcaaaaaggcccatagattcatctactactattctggacgtgcaaggcgtgggtttaaagaacttctcaaaagctgcaagggatctaatcacacgactgcagaagatcgacaatgacaactacccagagacgttgcgccgcatgtatattattaatgccggccaaggcttcaagatgttatggagcactgtaaaatctttcctagatcctaaaactgcttcaaagattcatgttctaggaagcaagtaccaaaataagttacttgaaataattgatgagaatgaattgccagagttttttggtggaaaatgcaagtgcgaggcatttggaggttgcaaaaaatcagataaaggtccttggaaggatcctaacataataaagagggtcctgaatggcgaagcaaattatgggaggcaaattgtgaccatatcaagcactgatggaaaaataattcgttatgctgggccacaatacccaacaagaaaaggaagtgatggctcagcggagtctgggtctgaagtggaagatggcgcgtcacctatggcatcaaggaacctgataacaaatccccttttgacccctgttcatgaggaggcaagttgccatgcttcaaaattggcagcacatggatttacatctgcttccccttccattattgaagaaagcattcctgttgttgacaaggttgtggatgatggatggggcagtcctagagctagttcatcaccctcgagaagtttgcctatcacatttgatggcctctggacacaagttatcacatggctgactgtcttgatcgtgagcctttttgctatggttcgctctgtcccaagcaggatggctaaaagattctcaagccaatccactgaccatgatcactcctatgtggagtatcctcaagaagcagagtacaaggaagaattccggccaccgtctcctgctccgtcttatactgaaaaggatgtcctctcatctatggtaagacgactaggcgagttggaggagaaggtgcaggcgctcgaaacgaagccatccgagatgccatttgaaaaggaggaattgctgaatgcagccgtccgccgtgtggatgcattagaagccgagttaatctctacaaagaaggtatatgtaaaaatattactaccttataaaaagaaggtgatgaagtacttcaattttcatgagcaggctctctatgaagccctgatgcggcaggacgagctgcttgcgtacattgacaagcaagatatgatcaagtttcgtaaaaagaaattctgcttctag

SEQ ID NO: 76769 - DNA, 339 bp, Oryza sativa
  Clone ID: PAT_MRT4530_76733C.1
tatattatcgcgacggccgccctttataccctggggggctaaggaacaacgctgcgctatatcatgactatctccatagcttccaatcatactaaacaaactttccccagagggatccatgatagctacacgagcttaaacgtcagaaaacacaatggaagaacagactaaccactactatcatacatcccatcacgaggggtcaagaaacacggcttaggtgtcgcacccgtaaaaatcaacaccttaccaagagctgggccaaaagaaccagtcactggagatcctgctgctccatgctctggcccaaagaaacaccctagccaaccatagcttgca

SEQ ID NO: 76770 - DNA, 951 bp, Oryza sativa
  Clone ID: PAT_MRT4530_76734C.1
atggtgacgccatcaccggtcgtggcgcccactctggtgcctgtcgtgacgctcactccgctgcccatctcacttcctccatcacccctgcttgctatggctcctaccagattggcttctccatccccattggtttctacgcagacaaaaattccttttactgttgtagatgttgcccattgtgcctcaaaagagatactctcctcaagtattgacggcgttaatttggtatttaacagccgtcaacaccttgggagttgttctgttttcagcttgcagaatttcgagaccttcttcaccttgggagctgtcattagtgtccatgttctcatgatatttgatgctagaatttatagtgaagccaccgagggcggcggcggtggtgatcgccagatccgctacgctctggccggatctggcggggtggcggctgacggtggggaaggcgacggcgatgaggatggcgagctacgccgagtggtggggaccgatggcggcggggatggcaacagcgggccggatctagccgcgccggaggcggatctgcgcccccccaaaggcagatctggtgtggggcaaactcgcggcgatggcgtcggcgacaacagggtgaactcgcggcgggagagcacgtcgcggcggcaacagcggcacggagctcgtggtgacggtggcgacagcgacgatagcaggtggctggccggcggcaacagcggctggaggagccggtgtggctgccagcggaggcggaggcacgactgcggtgaccgagatatgtttgggcaaaagtctaccgcaaagacttatggtatcttagtgtttgttagagatagtggtcgtgtccggatcaaatcaactggcacgctcatacattcgaaggcgagctttggacctgcactggagttaagcagatctcccaggcctcatgttttctgtcaacagaaatgctag

SEQ ID NO: 76771 - DNA, 330 bp, Oryza sativa
  Clone ID: PAT_MRT4530_76735C.1
atggatggggtttcatcgagtgacagtaatgacaaccaccatgtgatggagcttgggggtccgaggaggcgacagagatatgaccgggatggatttggttggtggcgtcggcttggtcgatccggccggtcgccgtgcatggcccggccggccggtggcggtggcggtggtcaagggggaggtgtggagctaggagacgacgacggctggtgtggtggccatcacggtgggcgcagcgatcgatcgatcgatctgagcggagtcgccgcgattaatgtgggtttttggttgcttctgatgatctgtcagcgacggattttgtggccgcgt

SEQ ID NO: 76772 - DNA, 231 bp, Oryza sativa
  Clone ID: PAT_MRT4530_76736C.1
gggggctaacgcttgagctaactggcatatacatggcggttccctgcttgcccacttgctgacacctaaacctgcactgccacgtgtgaacctgaatcggcctgcccacctggagaggttgttattttattgctgcgctttccattttccgatggggatttagtgttctgagtagagtagatgtcgcgagagatatcagcgtacctccctgccgtagtaccgaggttctca

SEQ ID NO: 76773 - DNA, 489 bp, Oryza sativa
  Clone ID: PAT_MRT4530_76737C.1
atgactcgggacttctacctcctcctttactgcaacgggagcaccctcaatgagttgttggtactgggtggtgaggagaagatggaggagaggagttgtgacttatctcacgcagcatccgttgggttgccctactcctacttctgccagccgggctctctgccactttgtcctgccctgctcccggcgatgaggcaacgtatctctcgccgaataacagcacatgctctccatcgtaggatcggcacgtcgtacggttcggcaagagcaaaatcgtgtgatccaccacagggccccctctccgcgtgcagcgttgctgctgctcatctagcgtgggagcactcctactccgctgctgctctgacgtcgcccaagattgtcagaaacttcggctggccagtggccaccaccaccacccgcaccgcaggaagggatacgtgcacattgtcagcagcggctggatttttcccggtgcacgcgcgcggttaa

SEQ ID NO: 76774 - DNA, 303 bp, Oryza sativa
  Clone ID: PAT_MRT4530_76738C.1
atgtcaagtcatgtcttcgccagcgtcggctttgctgcccactcgaagattgagctcgccagagctgtcccagctcgagatagccctgccgacctctctatcgccggcgaggtcgtcgcccgtgtcatgccggcgatgatgacactgagaagcggcgagaagtccgtgggggtcgcaggggagtccatgcctctgatttttgaggggtgccgtggtggtacttcggggcatggcaacatgtgtggaatcgtgtcttgtgggtacagtggtacacctctggccagagtaaaactattcgaatag

SEQ ID NO: 76775 - DNA, 549 bp, Oryza sativa
  Clone ID: PAT_MRT4530_76739C.1
tcaatggaagacataaacgttgtactcgacaatggcatcaagtccgtttgggtcgagaaagtaggtgcgggcttgggcatagccacgagcgaagcgaaagtggccggttccgcccaaaatcggcatctcatggataatgtcggatatgtggttgctgccaagcactatgaccacgcttccattatacgacccagcggtgagcacgatattcatggcctgcaagaagcctatccgggcttggtcagacgagacatacatgccctgggcatggcccacgagctttgatgcgggatcgggccgttcggtcaatgggtcatccatgacaaccaccatccccaagaaggtcaacgatgtgttgtttggcgggtttactaccctcaccgctgacggtgacggactggtcaccttgtcatggaagtagaagtgtaggtgtgtcggcactaaactgttgcctaaggcgttgggcctagacctgccttccatgtcagccttagtagtagtggccaacacaaataagagtacactcatcaccgccaatcctcttgccat

SEQ ID NO: 76776 - DNA, 421 bp, Oryza sativa
  Clone ID: PAT_MRT4530_7673C.1
aacaaagcaaaaaggtgaaaatgcatattaagggtgtggcaggtgagaggaaaaggacatgaggaggggggtctattaaggccctacagttacgggacgtgacgatgcctaccatgactcttatgtttaatacagtgtaatagaccagaagagcttgaccgatgaatttcagcccgagtcatattgcattagatacatacttaacattggggtagaaggaccaagtatccgatcagcatgttccagattctatatacagaggatggcactaatagctgaaatagccataacattatcccctaagtaaatacacacaaggcgccacagtaaggaattaggttgcgtcaccaagctaagaacaacattcaacttggccataccaaccaatgtacgatacggtctggagccgatcctaactctg

SEQ ID NO: 76777 - DNA, 326 bp, Oryza sativa
  unsure (1)..(326): unsure at all n locations
  Clone ID: PAT_MRT4530_76740C.1
agaaaactaagtgtagtaacacaagggtccaccaaggaaaaatgcaaaatactctgtacagccattcagangctaacttccctcaaaactctctatctgaatgctcatggacccttggatactggaacacttgaatggctacattctatttcccattcttccnttccctgnggntcatcagattgatcggatacatgaaagagatgcccaacttggtttagggagctcagacagctggtgaagattcacttgcagattagccanctagaggtggttaaaacaatggaggatactcggagaactnccttaatcttatggtcccnttt

SEQ ID NO: 76778 - DNA, 1020 bp, Oryza sativa
  Clone ID: PAT_MRT4530_76741C.1
ggcacgagggcggtttgcgccaaaatctcctcgcccttcttccccacgacgttctcccctcccctcctcctcgggccccgctcgccggttgctgcaatcctcccaaggagaggagaggactccactccacgctggggattgggatattccttgtcccgcggggtcagtttttagcagcagcagcagacgcagcagcagtacagtagttggctggttgctaccactacacgagctcgggaggaaggaaggaaggaaggaatcgcaaggcgaagagtcggagctggcggaggaggaggtgctcgcgatggggtccgagggatccgccggggtcgtcgtcgttcccagaaactttagactgcttgaagagcttgagcgaggtgagaagggcattggtgatgggacagtgagctatggaatggatgatgctgatgacatatatatgcgttcctggacaggaactatcattggccctcctaatactgttcatgagggacgaatctatcagttgaagttgttctgtgatacagactatccagacagaccacctactgttcgattccagactcgaatcaatatgtcatgtgtgaatcaagaaactggaatggttgaaccaagtctattccccatgcttggtaactggcaaagagaacatacaatgcaagacatcctgatcggcttaaaaaaggagatgtctgctcctcagaatcgtaggctccatcaaccccatgatggcaatgaagatcaaagagtagaacagaaagggctatcgcttaggtgtgtcatcatgtaagagatgcgaattgcaatgtacagtattattaaattgagtagcatcaggcgcaaaaaagagaacccatgatctcctgtaatttggcagtaactacattggatccaaaccgtgctgtcgcctcaataaaatgtcggcaacttcgttaatttgcacattgtgtaaaccgttcatcccctcgttcagtaagattgcaacttgcaagttgcaacccatgtcgccacggtttcagg

SEQ ID NO: 76779 - DNA, 870 bp, Oryza sativa
  Clone ID: PAT_MRT4530_76742C.1
atgctgcgcgcccgacccatcaatggggtcggacccccacctcgcgtcttcagtgcagtggcgagagaagggaaggcgagggaccatgatggcggccgctgccggagtctggccgggtgcgagggaatcacccagcccaaaaaattgggccatctggcccacggagcggcgtgggcctctcgatccccgcatccattccacctccgcctccgcctccgcctccgcctccgcctccgcttcttcttctcctcctccgacgtagcctgcggcctcgtgctgatggcgacggtgtcctcctcctcctcctacgcgtcctgctccgcctccgccgacgacgctttctactcgacgtgcttctgcggcccgatggtggtggcgcctccgcctccgcctccgccgcgcaccgccgcgtcgccggagtacaccccgtctaccccgtggcgccgggccgcgtcgccggattacaccccgtcgactccgtggcgcagggccgcgtcgccggaccacgccccgtccccgccgtggagcccttcgcgccgcgccgcttcgcctgactactcgccgtcgactcctccgcgtcgcgccgcttcgccggactactcgccatcgacgcctccgcgccgcgccgcgtcgccggattacaccccgtcgactccgtggcgccgggccgcgtcgccggactacgccccgtccacgccgtggagccctccgcgtcgcgcctcgtcgcggactactcgccatcgacgcctccgcgctgcgccgcgtcgccggactacaccccatcgacgcctcctcgccgggccgcgtcgccagactactcgccgtcttcgccccctcgccgagctgcctcaccggagtacaccccgttga

SEQ ID NO: 76780 - DNA, 358 bp, Oryza sativa
  Clone ID: PAT_MRT4530_76743C.1
ggcccgaatcccaggtccgggctcgacccacgcgtgcgaggggcggctttttgtttcacaaccgccagcgaaagctcttcaccaacatctccacccacaactggagcgacttcaacggccttgccacggcgcgcgggaccacgattagcgctgccaccccagaaggctcgccagggccaccatggaccggtccctaaaagcggacttctgcacctaccgtgagatcctcaactccaagaggatcaacgcccccgagaccgggaggccacgaaggacgggtttcttcagcgacggcccgccgggccccggaaaacccccctgaacggccccatggccaaaaaccttgactgcccacata

SEQ ID NO: 76781 - DNA, 1215 bp, Oryza sativa
  Clone ID: PAT_MRT4530_76744C.1
atgccgcacggttcttggctcctgcagacgtgctcgccgtcggccgcgctcgcgtcgctggccgtcgtcacgactagcctgctgatcatcggctacgcgtcgagctccttcttcctcggcgcgccggcgtacgagtacgacgatgttgtcgaggcggcggcggccgtgccgaggcgggggcccgggtacccgccggtgctggcgtactacatctccggcgggcacggggacagcgtgcggatgacgcggctgctcaaggccgtgtaccacccgaggaaccggtacctgctgcacctggacgccggcgcgggcgcgtacgagcgggcgaggctggcggggtatgcccggtcggagcgggcgttcctcgagtacgggaacgtgcacgtcgtcggcaagggcgaccccgtcgacggccgcggtccgtccgccgtcgccgccgtgctccgcggcgccgctgtcctgctgagggtcggcgccgagtgggactggctcgtcacgcttggcgcgtcggactacccactcgtcacgccggacgaccttctctacgccttctcctccgtgcggagggggctcagcttcatcgaccacaggatggattccggcggcgccgaggcggtcgtcgtcgaccagaacctcctgcagagcaccaacgccgagatatcgttctcgtcggggcaacgagcaaagcctgacgcgttcgagctcttcagaggctcgccaaggccgatcttgagccgggacttcgtcgagtactgcgtggtggcgccggacaacctcccaaggacgctgctcctgtacttcagcaactccctgagccccatggagttctacttccagacggtcatggccaactccgcccagttccggaacagcaccgtcaaccacaacctccggcacacggtggcgcaggacggcggcgcgccgacgtcgcagggcgcggatgggcagcaggcgtcgcggtacgacgcgatggtcggcagcggggcggccttcgccggggcgttcggcgacgacgacgacgcgctgctgcagaggatagacgaggaggtgctgcggcgtccgctcgatggcgtcacgccgggcgagtggtgcgtggccgacggtgaggagggcacagacaacgagtgctcggtcggaggcgacattgacgtggtcaggcacggcgccaagggacggaagctggcgaccttggtggttgacctcgttggggcctga

SEQ ID NO: 76782 - DNA, 345 bp, Oryza sativa
  Clone ID: PAT_MRT4530_76745C.1
aaaaggcccgccctgcatggcccggcccaggcacggccggcacttcgtgccgggccgtgccggcccatgggctgcgcctcccgcccaggcacggcccaccagccgtcgggctgtgtcgggccagcccgaaggcgcgggtggcccatcgtgccttttttaaataagtctattttttgtccctcctggcccatcgtgccagtggagaggcccaggcacggcccggtggtcgggccgggccggcacgggcccgacccttgacgggccgtgccgtgcttgggccaggccaaaacaccgtgccgtgggccgggtcgtcgggcctcgggccttttggccatctattgatct

SEQ ID NO: 76783 - DNA, 770 bp, Oryza sativa
  Clone ID: PAT_MRT4530_76746C.1
atgtcggcgtcgatgaccacggacggcatcgcgtggatcatcatggtggtgtacatcctcgccgaggcgttcctcgtgtcgcccgccacgtcgatctgggcgttcctctcgctggcggtgctcgccgcgttcatactgttcgtggtgcgccccgtcgcgctgcgggtgatcgagcgcacgccgccgggcaagccggtggaggagacctacgtgttcgtcttcctcctcgtcgtcctcctcgtcggcttctacagcgacgtcatcgggacgaactcgttccacggcgcgctgatgctggggctggccatccccgacggcccgccgctcggcacggcgctcggcgagaagatcgaggcgatggtgtccggcctgatcctgccgctctactacgccatgaccgggctcagcaccgacgtgtggcgcatgcactggggcaggctgcaggtcgtcatgttcctcgcctgggtcgggaagctcgtcggcgtcatggtgtcgtcgctgtaccttgagatcccactccgcgacgctgtctcgctcagcctcttcatgaactccaagggcatcgtcgaggtcatcaccttcaacttcttcttgaccaacaaggtgaatttaatgatcccaatcgtggcaagatattcgaatcgattaatggagtcctgcctgttgacgagtgtgaggttgatttccttgcagctcatcggcaagaacacgttcagcatcctgatatgcttgtcagtggccatcacggcggtgttggtgccggtggccat

SEQ ID NO: 76784 - DNA, 294 bp, Oryza sativa
  Clone ID: PAT_MRT4530_76747C.1
atgaaccgccgtcctggctgcgacgtggtccagtacctgtacagtgcgttggtgtgtttcacaattttctttcgttttaacccgcatgccggtgtggccgtgtgggcgcggcttgcagtgcagggcgccggcgtggcagccgacgagaaggggtcggtggcgcgtgccagggccgcgctggcgcccgtggtacggcgcgacgcggctcgcctcggcgtatcatctcaggccgcgaacgcgtggcgcgccgtgtctcctccgtgccacgccgcggcgcgtctacctgactcttga

SEQ ID NO: 76785 - DNA, 904 bp, Oryza sativa
  Clone ID: PAT_MRT4530_76748C.1
gcacgaggcgcttctcaccaccagccatggccgcggatcccaccaccggcggcggcgaggcggagtccttcttccgcgccgcgccgccgctccgcgaccaggaccgcgtcgccggggacctcgccgacttcgtcgcccgccactccggcaagtccctcctcccctcgcctcctccttccctctcctccgatctcatctccttcgatgcgtcgcgtggtgggtactttctcaaagctggctacgcggtcatcttcatctaccgccgactaaatgataaactctcatgtaagttacttacgaagaatcagatatccaagtcccagaatctcatgccgcggttgtcaagacagcaataagaaattatcgaaaggcgattgatgaaggcctattgctgaaacttcctttcaccactatctttgagtaccttcagttactgcaaatggtaggtacggcgatgaattgcttgggacgccaaggaatgttttaccttgctgcggcagtttctgacttttatgttccatgggaaagcatggctaaacataaaatcgagtcagcaagtggtcctttgaacatgcaactcaatcaagttccgaagatgcttttcattctgagaaaacaatgggctccttcagcattttgtgtatccttcaagcttgagacggacccagatatccttctgcagaaggcagaggcagctctgagaaagtatggtatgaatgtcgtggtcgccaacgagctagcgaactacaaagatgtagttgtgatggtcacaagcaatgggaggacaaccgtgcgaaggcccagcaaggaggacgacgtcgaagaacagttaatcgatctcttggtagagatgcactccgaacacatcatgcagctcaatcaagacgtgcacaagctgacataa

SEQ ID NO: 76786 - DNA, 273 bp, Oryza sativa
  Clone ID: PAT_MRT4530_76749C.1
atggcttacggtcaaacaggtactggcaagacatacacagttggtcggcttggaaatgacgacccttctgaaggtggaataatggtcagagcattggaacatatcctttctgtcatgtctttggagacagatagtgtggcaatatcatttctccaggggggtgtgtgctttgcgtttggggttgagagggtgggatggttgatgttgattgaggtgatggatccaacggcggagaatggatgttggagtttgctggatgtctctcacgactga

SEQ ID NO: 76787 - DNA, 762 bp, Oryza sativa
  unsure (1)..(762): unsure at all n locations
  Clone ID: PAT_MRT4530_7674C.1
gtctcccatccctggggcgtgggatccccttccgaccaggcaaggcgaggcgaccacctgtcgccgccgccgccgccgccatgaagcctccgcggcgccgctatggtttactcgcggtggtcgtcactctcatcgtcctcgcctccctccagatccagttccaccacctcaaggaggaccgtctcaccggggaccgcaccttcgccaccaccaccaccgaccccgttcactggcggaccggcgccgagggcctgccacgcggcattgttcactccaactccgacatgtacctccgccctctctgggactctggcgccaaccccaagaataaaaacgataatcacaatgctcttttggcgatggcagtcggcatttcacaaatgcagaatgtagacattatggcccgtaaggtgtgtctttatctcatatttcttcttcttgcataaaaataatatatatttcttcttcgcctttattgttttttcttatttatgttgnttggtaaaaaaaattacctattctaatatggttttaaccatttacttgtttagtttcttaaccaaaactacacagtcatgctcttccattatgacgggaatgtagatggatggcacaatcttgagtggagtgataaggccatacacatacttgctcgtaaccaacaaagtgggtggtttgctaagcgctttctcatcctgatgttgtggctatctacggttttatctttttatgggatgaagaccctggagtggacaactttga

SEQ ID NO: 76788 - DNA, 1415 bp, Oryza sativa
  Clone ID: PAT_MRT4530_76750C.1
cccgcgtccgctcggttctgtgaattgtgagagattgcctccgcttccgttgctattttatcgtcttcaattttcttcccccccttggagagataaggccgtggccgtccggccgccatcaccaatcccatcatcacctctcctcatccagaggcagaggaggcattttctgttcgtcttcttgacccttcttctgcttcctttataagattgcaatgtcgtcgccggacaaggtggtggccaggacgggccgcctcaggcagcgctacgacaacgagtaccgcctcgtcgcaggctgcgtgccgtaccgggtgaagaaagacgaggccaaccctcgcatcctcggcgacgttccgggccaggtggaggtgctcatggtctccacccccaaccgcgccgacatggtcttccccaagggtggatgggaggacgacgaggaggtgtacgaggcggcgtcccgcgaggccatggaggaggccggcgtcaagggcatcgtcaataggactaccttgggacactgggtgttcaagagcaagagcagccagaacagcagcagcccaaggggagcttgcaagggctacatcttcgccatggaggtcactgaggagctcgagtcgtggccggagcaggcgacccatggccgtcgatgggtctcccccggtgaagcctaccagctctgccggtacgaatggatgcgcgaggcgctcaccgctctgctggagcggttgtcgatgatcgagccggtgccgtctgcgcaggaactgtctgatcaaactagcatgtacatgatgctgcaggcatcatctgatagcgcggtcgcgctgtgctgattgatgatgatgatgatgctgatgctgtggataaaactgatgaacgcagaggcgtgcaactagtatagctgtcaatccccttcaaccgcaaacatggctaccagaaaattcagaatctctaatcacttctttagaatctttcttttttttttcttgagcagctagtgatgagtctgtaatacctgcagttgttgccctgcttgaacaactgcacattgtctaagaaagattctatgacctgaacccctcagctccaggcacttccatccacaactttggtattggttggcttcggaggttaaggcaaaaaactgtttcataggtgactgaaactttaacctctgtggatgcatattgcagtgtccatttgcatgatcaatccaatgtctgctgatgactggggtctcctgtgtaattcttctgtgtaatattcaaaaattagtaaggtatataacatgtttgcatgtgttcatgtgttgtatatgccttcaatatccttagatggactttctgtatagatgaaatgttctgaacaataacaaattttatatataatggagatgatttatatcaaaaaaaaaaaaa

SEQ ID NO: 76789 - DNA, 149 bp, Oryza sativa
  Clone ID: PAT_MRT4530_76751C.1
atcatgacaaccgcaccccgcactttagaactgccaccacgttggttatgtacatatttagcgaagcacacagaggctaatgcgtattcacaccaacaacatgaagagctgacagagctgcatcatgagctgagtgggcacattccaat

SEQ ID NO: 76790 - DNA, 393 bp, Oryza sativa
  Clone ID: PAT_MRT4530_76752C.1
atgagtgctgctgactgcttgctccatgctggatgccgctggtctgctgcggcgctgcgcgctgcctgcctgccggcggctgccgccgtcacacgggtgatgggccttgggctagatttctatggtggtccatggaccacagggaccacagtaggagactcgtccatcagggtgatagggagagtgggagaggagattggagtggtcgagggcattgacagggtgcgagctagataccccttggcctcatatccagatggaatggtgttcgacgagaaggagagccagatgcacactacttgcaccaacgctggagacaagtgccatcggcctcgctggctgccgaaaagcccacagtcgttggatctgccaccactagccgccacctcctaa

SEQ ID NO: 76791 - DNA, 255 bp, Oryza sativa
  Clone ID: PAT_MRT4530_76753C.1
agaacgcacaatatcatatttggttgggtattatcagctgttgtgcgttcaaaacattttattattcattatttgttttgatcactatttcgttgcatgcaacacagcaccggaaaaatcctactattttttaggaaagccatctaatcctagggctgccccccggtaatatgcatcactgttgtggctgaacccatgacatcaacggtaggtgaaccacaaactgcctaagagtggtgaaacttacacggggca

SEQ ID NO: 76792 - DNA, 186 bp, Oryza sativa
  Clone ID: PAT_MRT4530_76754C.1
aatagtccggccatgccagtggatatgatcgctaatgcttaccgcatatcgagggagcaagcacgaagccttaagaataataggggagaagagctggtgccttcactctagatatcaacaacagacctaccaggcttctcaatgagtggagaacgagctagagtgatgtactaataaatgtatagg

SEQ ID NO: 76793 - DNA, 287 bp, Oryza sativa
  unsure (1)..(287): unsure at all n locations
  Clone ID: PAT_MRT4530_76755C.1
aaggtaggctccagccatggcttcccagctctccgccgccacatccgtgcccgcagttccatgggcctccgggacctactcctctcctanggtccatgggtgacgcttncattcgtttgaggatgaagcaaagaaagaaggtccccaaggggcattcccgggtggcgaacttacattcgggcttcaagcccaccaaacgtttatcattgggtggacgaacgaacgaacgcctgantgcttgttcgcgggggagggttcgggcctgggcgnccgtcgggcgaaacagg

SEQ ID NO: 76794 - DNA, 2070 bp, Oryza sativa
  Clone ID: PAT_MRT4530_76756C.1
atgactgccatgagatttaagacagagaaagaaggtttcctcttctataacaggtatgccaaagaaaaagggtttagtgtaaggaagaattacattagacgtgatcctattactgctgcggtaacccataggcagtaccaatgctctagagaaggacataggaaagaagtgtatatggaagcggctaacagaagtagagaaccaaaagctcttactagatgtggttgcaatgcactttttgagattaaacttgacaagaagaaagatgaagtagctttcttacggtcacatcgcacaattagcaatgctcaaaaggctaatattttggaattgaaagaagtgggtttgcgtcagcatcaagttatggatgtcatggagaggcatcatagtggttttgatgctacaggttttgttagtagggacctgtacaattattttactaggctaaggaagaaacatattttaggtggtgatgcagagcgtgttataaagtattttcaatggaggcaaaaacatgacatggagttcttttttgagtatgagacggatgaagctggtcgtttgaaacggttattttggtcagaccctcaatcccgtatcgattatgatgcatttggggatgttgtagtttttgatagcacataccgggtgaataggtataacttaccttttatcctattcgttggtgtgaaccaccatggttccactgttatttttggatgtgctatcgtagctgatgagaaggttgcaacttatgaatggattcttaagcagtttctagattgcatgtatcagaagcatcctagaggattgatcacagatggggacaatgccatgcatagagcaatagcagctgtgatgccggattctgagcatcggttgtgcacttggcacattgagcagaacatggcaagacatcttcgtcctgatatgctttcagattttcgagcacttgtccacgcaccatatgatcatgaagagtttgagagaaagtgggtcgagtttaaggtgaagcataaaggttgtgaagacaaccaatggcttgcgaggatgtacaatttgaggaagaaatgggctactgcgtacactaaagtttttaagaagttgaagttggttattgctaagtcgatggattgggaggtgatagattgtgtagaagaggacaacttggttaagtatggcgaagtatatacatggtcagaccagatggagagatatcgcaggctgcgtagcatgggcacagaagtgtttttcaagtgttcggtgtctaaggaaactactttaatggtgatggagatgctagaaaaattagacttagaaactgatgaatgtgagacaaacaactcagatttgactttatgtggtcatgtgctagctcaaagttcacgtacagacattgagagtcatgataaggtcatagatgcatacattatgttgattaaagacatgcaatgtgaaagtccaagagagaatggtactgcatttctagaaagtacagcacattgccaggcctggaaaacaaatggtgaacaaattggaacccgcaacaagcaatatcaagacaagagagcaaaagttacagcaaaatatttgcaacatgatatgattttcctaccactcaatagaaactcaactcattggtacgtggctgttctcaatggtgctaaagaaaaaattcaaatactagactcgatgcgcatggacaagagctactacgacaaagataaagacctcaataatacaataaaaggaattgaaaagtttatccagtatgcaaggctagaagatgaagttgaaaacaaatggaagaacaccaagattaccaattggccattctgcccaatgaaagtccctcagcaaagtgacagctggtcatgtggcttgcacacattgaaattcatacagcattggaatggaaaagaactctcccctgagttcaatgaaatggatacaaccaccactttcaaacataaggttgcagccaacctcattaattctactatgaacgaagtgattgaagtgcagcaagatattaaacgcctagtgaccgaggcaaatgaaggcaactag

SEQ ID NO: 76795 - DNA, 1896 bp, Oryza sativa
  Clone ID: PAT_MRT4530_76757C.1
atggagttcttttttgagtatgagacggatgaagctggtcgtttgaaacggttattttggtcagaccctcaatcccgtatcgattatgatgcatttggggatgttgtagtttttgatagcacataccggtttctagattgcatgtatcagaagcatcctagaggattgatcacagatggggacaatgccatgcatagagcaatagcagctgtgatgccggattctgagcatcggttgtgcacttggcacattgagcagaacatggcaagacatcttcgtcctgatatgctttcagattttcgagcacttgtccacgcaccatatgatcatgaagagtttgagagaaagtgggtcgagtttaaggtgaagcataaaggttgtgaagacaaccaatggcttgcgaggatgtacaatttgaggaagaaatgggctactgcgtacactaaaggtttgttttttcttgggatgaaaagcaaccaacgtagtgaaagtctgaattctaaacttcataggtatttggatcgtaaaatgagccttgtccttttggtagagtattatgagcattgcttatcacgtatgaggtatagggaggctgatctagattgtaaagcttcacaatcaatccctttcacttctaatgatgctagtcttactgagaaagatgctgcccgtatatttgcacctgcagtttttaagaagttgaagttggttattgctaagtcgatggattgggaggtgatagattgtgtagaagaggacaacttggttaagtatgttatttccatgaaaggtgattctgagatgctacaaatcttgaattgtacatatatggaatcaacaatgaagagcataaattgcacatgcagaaaaatggatcgtgaatgcctcccatgtgagcatatggttgcaattatgcatcatttgaagctcgatgccattcctgaagcatgcatagtgcgtaggtggacaattaaagcgaaacacatgtttccttctgataggtatggcgaagtatatacatggtcagaccagatggagagatatcgcaggctgcgtagcatgggcacagaagtgtttttcaagtgttcggtgtctaaggaaactactttaatggtgatggagatgctagaaaaattagacttagaaactgatgaatgtgagacaaacaactcagatttgactttatgtggtcatgtgctagctcaaagttcacgtacagacattgagagtcatgataaggtcatagatgcatacattatgttgattaaagacatgcaatgtgaaagtccaagagagaatggtactgcatttctagaaagtacagcacattgccaggcctggaaaacaaatggtgaacaaattggaacccgcaacaagcaatatcaagacaagagagcaaaagttacagcaaaatatttgcaacatgatatgattttcctaccactcaatagaaactcaactcattggtacgtggctgttctcaatggtgctaaagaaaaaattcaaatactagactcgatgcgcatggacaagagctactacgacaaagataaagacctcaataatacaataaaaggaattgaaaagtttatccagtatgcaaggctagaagatgaagttgaaaacaaatggaagaacaccaagattaccaattggccattctgcccaatgaaagtccctcagcaaagtgacagctggtcatgtggcttgcacacattgaaattcatacagcattggaatggaaaagaactctcccctgagttcaatgaaatggatacaaccaccactttcaaacataaggttgcagccaacctcattaattctactatgaacgaagtgattgaagtgcagcaagatattaaacgcctagtgaccgaggcaaatgaaggcaactag

SEQ ID NO: 76796 - DNA, 1506 bp, Oryza sativa
  Clone ID: PAT_MRT4530_76758C.1
atgggtattttttgcccctatccccccaggacagctcaagcagcatatgccccctaccggtttagggtttcctcccagctgatgagaaggttgcaacttatgaatggatttaagcagtttctagattgcatgtatcagaagcatcctggtggattgatcacagatggggacaatgccatgcgtagagcaatagcagctgtgatgccggattctgagcatcggttgtgcacttggcacattgagcagaacatggcaagacatcttcgtcctgatatgcttttagattttcgagcacttctccacgcaccatataatcatgaagaatttgacagaaagtgggtcgagtttaaggtgaagcataaaggttgtgaagataaccaatggcttgtgaggatgtacaatttgagaaagaaatgggttactgtgtacactaaagttttcaagaagttgaagttggttgttgttaagtcgatggattgggaggtgatagattgtatagaagaggacaacttggttaagtatgttatttccatgaaaggtgattctaagatgcttgatgccattcctgaagcatgcatagtgcgtaggtggacaattaaagcgaaacacatgtttccttctgataggtatggcgaagtatatacatggttagaccagatggagagatatcgtaggttgcgtagcatgggcacggaagtgtttttcaagtgctcggtttctaaggaaactactttaatggtgatggagatgctagaaaaattggacttagaaactgatgaatcgcaaagtttacgtacagacattgagagtcgtaatatggtccatgatcctatggaaattgtgcctaaaggagctccaacaaaaagattacgaggattcatggagaagcgcgctaggcgttgtggttattgtcgtggtcatgggcacactgttcgaacctgtccaattttcgtaagaggaaactcaactcattggtatgtggctgttctcaatggtgctaaagaaaaaattcaaatactagactcaatgcgcatggacaagagctacaacgacaaagataaagacctcaacaatacaatcaaaggaattgaaaagtttgtccagtatgccaggatagaagatggcgctgaaaacaaatggaagaaaaccaagattatcaattggccattatgcccaatgaaagtccctcagcaaagtgacagaggggcactggaaggggatgtaatgcgacttcaggccatcccgaagtcggaatccgacgcatccagataccctgttggattccatccagcgcaaatcgtagtaaaaacggaagagatcaaggaatggctctaccccaatgtaggcctcgcaaagataggagaaaatgctaaggaatgcgatggaattggggttcaggtgaagcaaagaaaggccatagaagttcaagacaagaataagaaattcggaaggttgaggaagaaaaccgcaagaaatataatcttcgaccgcgaccatacggcctaa

SEQ ID NO: 76797 - DNA, 264 bp, Oryza sativa
  Clone ID: PAT_MRT4530_76759C.1
atggtggcagcatcggcggcaaccacgggtggatccggcggcggcagctccctctgccccctctcgcctccctcccgtggtagatccggcgacaattgtggctttagcggcagcggggatctagcggcggtggcggtggcggcgactaagggtggatccttcggcagctccgtccgcaccctctcttcttcctctggcagcagccgcgtgtggatccggcgacggcggcggtggccgagggcggatccggcggcgggggagtga

SEQ ID NO: 76798 - DNA, 1493 bp, Oryza sativa
  Clone ID: PAT_MRT4530_7675C.1
gaaacttgctattaagataactgcacaagtgtgtatatcatgtcactatacacccgtagtgaaatgaggaattaaattaaattacaagacactgtgttaagtctctggttagtttgggttgccgttcagttgcaccttgatccttgtgttgatggtaccgtatccagtggctcttcaccaagtgaggacataatggtgaacgctagtcaaataaatgtctgtaacaaaccgtttactatgaagcccacagattgccatgtgagatgatctcgagtccaattattgtaatcgatgtggactgtcctgcaactctaatgtgaggtgggcttgtatatttgtatcaggtgggcttgtatatttgtatcggattcttctttcaaagtaatcaagtatcaaaaggatctgtccattcttcatcttcccttacagctctgttccagcgctctttaaacttctccagctcagcagacgattgtcttctaatgtgggtccgtaaatccagagatctccgaggggtcttactgcttagtgatggtcctcctaacgatggtattccttgatgaacaacatactcactgtcgattacgccaaccttctcagctcgatcaccctgagcacaataaccaagcttcatgtcaaggccccatccatggatcaggtcattctgaatcaaatgccatacacatctccaagcagcccgagcaggtgctcgccccatgccctcaacccaccctgtgcatggaggtcctttacttccatcagaacaattcatacttgcacggttatcatatattctcctatgcactttcatcatcttgttgcggattgtgatccgatggtgaatatcagtcgatagatcagggtccagagcaggttgtgtaatttccaatccttcagaaaccattatatcaagatatcttctcgggtcaaagttgtccactccaaggtcttcatcccataaaaagataaaaccgtagatagccacaacatcaggatgtagaaagcgcttagcaaaccaccactttgtttggttacgagcaagtatgtgtatggccttatcactccactcaagattgtgcacctgtgcccagggcctccaccccccatccatctacattcccgtcataatggaagagcatgactgtgtagttttggttaagaaacttacgggccataatgtctacattctgcatttgtgaaatgccgactgccatcgccaaaagagcattgtgattatcgtttttattcttggggttggcgccagagtcccagagagggcggaggtacatgtcggagttggagtgaacaatgccgcgtggcaggccctcggcgccggtccgccagtgaacggggtcggtggtggtggtggcgaaggtgcggtccccggtgagacggtcctccttgaggtggtggaactggatctggagggaggcgaggacgatgagagtgacgaccaccgcgagtaaaccatagcggcgccgcggaggcttcat

SEQ ID NO: 76799 - DNA, 4626 bp, Oryza sativa
  Clone ID: PAT_MRT4530_76760C.1
atgtttgggccttactccggcggcggcggcgttccgcttccgcagatggatgctgacacctacgtccgcaccatcgccgccatgcctccgcatccgcttgcaccgccaccggactccccccgtacccctcacacctacgtcggcttcctccccgtcttcggtgatcttccaccgctcaccggcgccgtcctccaggagcccgtgccggtgccacccgagcagcgcgccgatcagccggtggccgtggccaccgagaactcggcgccgacacggccgcagctgtgcgcgccctacgacgacgaggtcgaggccaccctccgtgccatggagacgaaccccgcggagcggccgtcgccgtacttcttggagacgactcagggtgggcggatgagcgctttggtgcgcgcctcgatgatcgccttcatgggcgagttcagccggaaaaacaagctcgccgacggcacgctccagcgcgccgcctacttcctggaccgctacctgtcggtgacgcccgagtcggacgacgcgctgcagctccgccttgtcggggccacggccgtgttcctcgctgccaagtacgaggaccagtacaccctgaggaagatcgacgccagcatggtcgccgcccggtgcggctacaccagcgagacgaggcacaagatggtgtcgatcatggagaccgagatgctcgccgcgctgggcttcaacctcggcggcccgacggcgtacacgttcgtggagcacttcacgaggtactacggcgacggagaagaagagaagcagttgaaggaggcggcgcatcgggtcgccgacgggacgctgctgacgtacgggttccaccgctacctgccgtccatggtggcggcgtcgtcgatcttcctggcgaggctgcacgagctggggcatgagccgtggagcaatgatctcgcggagctgacagcttttagtactctgatctctctacaattatggcccaaccgtggattcgtggagcacttcacccggtataacagccggggagaggaagagctacgggtgcagcggctggagcgcgacatcgccgaccagtcactgatgaactacggctgcccgcgggctacctgccgtccatggaggcggcggccggcggcgtcgatcttcatcgcgaggtgttcgctgaaccggcccgaccggtctggactctggagcacggagctgcaggagctgacgggtttacagggcgctgttatacgaaagaagcaagcacatcttgtgtgccccgtgcggagcagctactgtgccatgcgcggtcgagcaaggagccaccgtcgtcgcctcgccgtgcctcgcagccatcgcatggaccaaccgcgcacggtcgaaccaccctccagccatcgccgtcgtcgcctcgccacacctcgcaagcagtcgccgccaccgccgccgccgtcaaccaagtcgcctcgcttcgcagccgcacgcggtcgacccacctgtgaggccgtcgtcgtcgttagaggtgatgctgaggccgatgacccaatgggcggagacggagctggtggtgccattgggagcgtggacgaaggggattcggtggctggcggagaagccgatggtggagaccccggctggctccgacgcgtctcgctgtccaccagagccagcggccgcctcaacgtgtcagcccgagcactgccctccgctggccacgtgcgcgctggagtcaccgccgcctcgcgctgtagcggccccctccaccgccgaagccggagggccttgctagatccggcgacggcagcgccggatctgccgccgcctagccgggagacctcgctgccaccactcaccgacaccggcgaacgccacctcccccgccgccgccatcgccgctcaccagtcgactttgccgacaacgacgagcgcacgcttgattgcacgggcattgccactgctggcgatgttgtctgcggcgagcacgaccacgatgctagggatactggagagctcgtggcggctctcgctggacttggcgaagacgacgagcacctccgcggcgcgggcagagtcggcagcggcgaaagaacttgtatgggtgatgaaatgggagacaattttataagcttagaagaacaagaggagtacagaacaatgactgccatgagatttaagacagagaaagaaggtttcctcttctataacaggtatgccaaagaaaaagggtttagtgtaaggaagaattacattagacgtgatcctattactgttgcggtaacccataggcagtaccaatgctctagagaaggacataggaaagaagtgtatatggaagcggctaacagaagtagagaaccaaaagctcttactagatgtggttgtaatgcactttttgagattaaacttgacaagaagaaaggtgattggtttgttgtgaagtatgtagcaaagcataatcatccgttggctaaatcagatgaagtagctttcttacggtcacatcgcacaattagcaatgctcaaaaggctaatattttggaattgaaagaagtgggtttgcgtcagcatcaagttatggatgtcatggagaggcatcatggtggttttgatgctacaggttttgttagtagggacctgtacaactattttactaggctaaggaagaaacatattttaggtggtgatgcagagcgtgttataaagtattttcaatggaggcaaaaacatgacatggagttcttttttgagtatgagacggatgaagctggtcgtttgaaacggttattttggtcggaccctcaatcccgtatcgattatgatgcatttggggatgttgtagtttttgatagcacataccgggtgaataggtataacttaccttttatcccattcgttggtgtgaaccaccatggttccactattatttttggatgtgctatcgtagctgatgagaaggttgcaacttatgaatggattcttaagcagtttctagattgcatgtatcagaagcatcctagagcactgatcacagatggggacaatgccatgcgtagagcaatagcagctgtgatgccggattctgagcattggttgtgcacttggcacattgagcagaacatggcaagacatcttcgtcctgatatgctttcagattttcgaacacttgtccacgcaccatatgatcatgaagagtttgagagaaagtgggtcgagtttaaggtgaagcataaaggttgtgaagacaaccaatggcttgtgaggatgtacaatttgaggaagaaatgggctactgcgtacactaaaggtttgttttttcttgggatgaaaagcaaccaacgtagtgaaagtctgaattctaaacttcataggtatttggatcgtaaaatgagccttgtccttttggtagagcattatgagcattgcttatcacgtatgaggtatagggaggctgagctagattgtaaagcttcacaatcaatccctttcacttctaatgatgctagttttattgagaaagatgctgcccgtatatttacacctgcagtttttaagaagttgaagttggttattgctaagtcgatggattgggaggtgatagattgtatagaagaggacaacttggttaagtatgttatttccatgaaaggtgattctgagatgctacaaatcttgaattgtacatatgtggaatcaacaatgaagagcataaattgcacatgcagaaaaatggatcgtgaatgcctcccatgtgagcatatggttgcaattatgcatcatttgaagctcgatgccattcctgaagcatgcatagtgcgtaggtggacaattaaagcgaaacacatgtttccttctgataggtatggcgaagtatatacatggtcaaaccagatggagagatatcacaggttgcgtagcatgggcacggaagtgtttttcaagtgctcggtgtctaaggaaactactttaatggtgatggagatgctagaaaaattggacttagaaactgatgaatgtgagacaaagaactcagatttgtctttatgtggtcatgtgctagcgcaaagtttacgtacagacattgagagtcatgataaggtccatgatcctatggaaattgtgcctaaaggagctccaacaaaaagactacgaggattcatggagaagcgtgttaggcgttgtgggatagctgaagctccacacatcattgaaagcgatgatgatagtttgtttgaaaaaaacatggttgacacaatcggtgcaaggctgagacgtccacatggaagggtcatagatgcatacattatgttgattaaagacatgcaagtgaaagtccaagagagcatgattttcctaccactcaatagaaactcaactcattggtacgtggctgttctcaatggtgctaaagaaaaaattcaaatactagactcgatgcgcatggaaaagagctactacgacaaagataaagacctcaataatacacattggaatggaaaagaactctcccctgagttcaatgaaatggatacaaccaccactttcaaacataaggttgtagccaacctcattaattctactatgaacgaagtgattgaagtgcagcaagatattaaacgcctagtgaccgaggcaaatgtaggcaactag

SEQ ID NO: 76800 - DNA, 570 bp, Oryza sativa
  unsure (1)..(570): unsure at all n locations
  Clone ID: PAT_MRT4530_76761C.1
nnnnnnnnnnnnnnnnnnnnnngaattcaagcgcccttcatcctctccgctcccgcagagaaaaccctagcttgcctctttcgctttactctccagcaatcctccggcggcgatggatctcgacaagtccacctacaccaccgcgccctgaagaagttgcaggatgacggcgccctccctggtcacgggacaatgcagagggagataggaggtattgaacccgaacccatcttaggccgtatggtcgcggtcgaagattatatttcttgcggttttcttcctcaaccttccgaatttcttattcttgtcttgaacttctatggcctttctttgcttcacctgaaccccaattccatcgcattccttagcattttctcctatctttgcgaggcctacattggggtagagccattccttgatctcttccgtttttactacgatttgcgctggatggaatccaacagggtatctggatgcgtcggattccgacttcgggatggcctgaagtcgcattacatccccttccagtgcccctcttctcgcagcaattggcgggtgagatggttctaa

SEQ ID NO: 76801 - DNA, 279 bp, Oryza sativa
  Clone ID: PAT_MRT4530_76762C.1
atggtagaggggatgcccgttttttccccccccatgtgtctgcggttcctagcaatgaagccgatgggttggtgcgggatccgacgacgttggaagaagctgagcgaagggcgccgtgacggtggaagtgaggatgggtcgccggtcgagattgatgcaaatcaagctggaatcgaggttgatcgacggcttgggaaggagctcgagggcgacaacagtgagagcgtctggcacgaaggaagcaaagatggcgaggacgaggaccgccacgacagctag

SEQ ID NO: 76802 - DNA, 873 bp, Oryza sativa
  Clone ID: PAT_MRT4530_76763C.1
atgatcctagcatttgggatggcatccgctgagaaaggatcgtgtccacgagaagcacccaaagacacggccaatacccatatctacaccaccattgacgcaatcccggcgctgttcaacggtttccccctcctcaagggtgtggacaagccatactggtttgaggacaccgacgacgacgtgccgccgccctttcccgtcgcttgtgccggcttgctccagccgccgccgcttagctctgccggccggccactccgctcagacctgctccgcccagcaagctgccaccctcgaggcgcctcctctgcatccttcctccatggcggcggcgcggctaaactcgtggccaaatctaagctatcgggacacctccgccaccctcgctgcaacctgcggccacgacgacgacctcaatacgacaacgaaaagacggccacagtgatgtgctcagcgccacagacgcagcgctattacggttgccgagagcttgaagatagaaaggctgtgaaaattttctactgcaacggaaattgcatggccagggtcgccatggcgcacataaaagctgcatgggtcatgctcatgcactccattcatgaaaccgatcactatggccgtcgtgcaattaaaaacagcactgacgtcgcactgaatcgcttgcaactttcagtcctggagggatctgcattaccagaagcacccaagacggagaggtgtatggcggctttgattaccctaatcatccagacccattcgaatgatgacagaaagcaaacatcagtttttgttggagccaccaaatccacttgtgtacttctagagttgcaccaaattcagagcgcgcgcttcattacgtgcaagctgatgatcatc

SEQ ID NO: 76803 - DNA, 363 bp, Oryza sativa
  Clone ID: PAT_MRT4530_76764C.1
gtcatagatgcatacattatgttgattaaagacatgcaagtgaaagtccaagagagcatgattttcctaccactcaatagaaactcaactcattggtacgtggctgttctcaatggtgctaaagaaaaaattcaaatactagactcgatgcgcatggaaaagagctactacgacaaagataaagacctcaataatacaataaaaggaattgaaaagtttatccagtatgcaaggctagaagatggcgttgaaaacaaatggaagaacaccaggattaccaattggccattctgcccaatgaaagtccctcagcaaagtgacaagtcaaacaaacagttaatttttgtcgcaaattatctataa

SEQ ID NO: 76804 - DNA, 1698 bp, Oryza sativa
  Clone ID: PAT_MRT4530_76765C.1
ttagtcaaggtgcccgcgctgctggacattctcaacatgaacatccctttcgttgccggccaccagccccctcatcttcaggaggtcctcgcgggcctccgccagttcacgcgctagcttgtcggcgcgttggttcgccgacgacgccgctgccttggcctcctcgatctcgcagcctacgctgcgagcaccggcctggaggatgcactccatctctgcttggagctccccccaggtgagggcatcggcaggcgggccccgagcaggcacaaggccgacggcgaggctactcggcgtcacctcccggtccttagtagcgaccacgacatctgtcgaagtcgctgcaggggacgtgctggaagtcgaaccagtcccgccttgcgccggcttcgcccgtgccgccctgcgaagagtttcctctctttcatgaagttcttgccgatcgtcacaagcctctgccttcgctgaggtggaggagacgcgtccgaggccaccgggcttggcgccttccgataggtcccgagtacagaggagaatttcctccccttcttcggaacattgctgccactcatggtagcagcagcaatgtcggacgcctccttggtgacgccctccttcaaggacgctgccgcttagtggtccataagtggcccgatgacgtccgtcagagggagagcctgcataacatgaagtcacgacgcgatcgttgatcgcagcctcgtgttcagccggacccttctcgcaaagggggatcgggatgtcgctcgccgtcgaggcagcgctgatcatcacctggccgacgcggcggttcatggtgtcactgtccagaccccgaggagagacccgggtcgtgtcctctggccccgagtaatcaaaggccggatgggcgggggcctggagcggttggatccgtctacttatgaagtcggcagcgacttcataccccgacaaccctcgagttcggaggttatcgatgatgttgatgaaagactgaagggagggagtcagggcaggtttggcggtccactctgggattttgtctggttgttcttccgggacaacaaggacgggatccgagttttctatctgaagatagaaccatctcgcccgccatttgctacgagaagaggggcactggaaggggatgtaacgcgacttcaggcgatcccaaagtcggaatccaacacatccggataccctattggattccatccagcgcaactcatagtaaaaacggaaaagatcaaggaagggctctaccccaatataggcctcgcaaagataggagaaaatactaaggaatgcgatggagttggggttcaggtgaagcaaagaaaggccataaaagttcaagacaagaagaagaaatttggaaggcggaggaagaaaaccgcaagaaatgtaatcttcgaccgcaaccatacggcccaagatgggttcgggttcaatacctcctatctccctctacatggtcccgcgaccagggagggtgccgtcgtcatgtaacttcttcagggacgcggtggttgaggtggacttgtcgagatccatcaccgccggggaatcgccggagaacaagagggaagaagcaaattagggtttttatctgtgggagcggagaagatgaagggcgctgggatgcagaatggctttctagcggacggacttcaaatgggttcccaaaatccctttaaataa

SEQ ID NO: 76805 - DNA, 2596 bp, Oryza sativa
  Clone ID: PAT_MRT4530_76766C.1
atgccaccgatcccatctctgtggatccgcgtcttcttctcctggctgctgctgtcgctgcccgccgcggctgccgccgatttcagccactgcggcggctgcgacgacggcgacggcggcggcggcatatggagcacggacaacatcctgcaatgccagagggtgagcgacttcctcatcgccatggcctacttctccatcccgctcgagctgctctacttcgccacctgctccgacctcttcccgctcaagtggatcgtcctgcagttcggcgccttcatcgtgctctgcggcctcacccacctcatcaccatgttcacctacgagccgcactcgttccacgtcgtgctcgcgctcaccgtcgccaagttcctgaccgccctggtgtcgttcgccaccgcgatcacgctgctcacgctcataccgcagctgctcagggtcaaggtcagggagaacttcctcaggatcaaggcgcgggagctggaccgggaggtggggatgatgaagaggcaagaggaagcgagttggcacgtgcggatgctcacgcacgagatccgcaagtcgctcgatcgccacacgatcctgtacaccaccatggttgagctctccaagacgctcgagctgcagaactgcgccgtctggatgcctagcgagagcgggagcgagatgatcctgacacatcagctgaggcagatggagacggaggactcgaatagcctgtccattgcgatggacaacccggatgtacttgaaataaaggcaacaaaggatgcaaaagttctcgcggcagactcagcgcttgggattgcaagcagaggcaagcttgaagcaggtcctgttgctgcaatacggatgccgatgttgaaggcgtcgaatttcaaaggagggactccagaagtgatggaaacaagctatgctattttggtcttggtactacccgaggatggttcactaggatggggtgaagaggagttggagattgttgaagtggttgctgatcaagtcgcagtcgccctatcacatgctgcagttctggaggaatctcaattgatgcgagagaagctcgccgcgcaacacagggacttgctgagagcaaagcatgaaaccacgatggccactgaagctaggaactcctttcagactgccatgtatgatggaatgcgacggccaatgcactcgatccttggtctagtctcaatgatgcagcaagaaaatatgaaccctgagcaaaggcttgtaatggatgccattgtcaagacaagtagcgttgcgtcaacattgatgaatgatgtcatgcaaacatcaaccgtaaatcgtgagtatttgtctttggtgaggagggcattcaaccttcattcgttggttaaggaggcaatcagtgttgtaagatgcctaactggctgcaaggggattgattttgagtttgaagtggataattctttgcccgaaagggtcgtcggtgatgagaagagggttttccacatcgtcctgcacatggtaggtactctaatacagaggtgtaatgcaggctgtctatccttgtatgtgaatacttacaatgagaaggaagagaggcacaatcaggattggatgctgcgaagagcaaacttctctggcagctatgtgtgtgttaagtttgagattaggattagagagtccagaggtaatcttttgagttcgtcatccagtcggagacttcaagggcccaactctaccagttctgagatggggcttagcttcaacatgtgcaagaaaattgtgcagatgatgaatggtaatatttggtcagtctctgattcaaaaggccttggagaaactatcatgcttgcccttcagttccagctgcagcatgtgactccggtctctggagcatcctcggacttgttccgatcagcgccaattcccaattttaatggactccaagtcattcttgtggacagtgatgacaccaatcgggccgtaactcacaagctcctggagaagcttggttgcctagtcctctcggttacttccggcatccaatgcatcaactcctttgccagtgctgagtcatctttccagctggtggttcttgacctcaccatgcgtacaatggatggatttgatgtagctcttgcaatcaggaagttcagggggaattgttggccaccgttgatagttgctcttgcggcaagcaccgatgacaccgttcgggatcggtgccagcaggcaggaataaacggtctgatccaaaaaccagtcactttagcagcactgggagatgaactgtatagagtccttcaaaacaattgaaagagcctcatggttctcatttctttcaatctcaatagattgctgtagcttgattaatagttactacgctactagtttctgccaggttaggtccatacaatcacaaaacatttgcacaaacaaaatgtatagggagatattaaaacatcctgcctttaccttggttccttggtgaaggaaagaaggtagaaattttgaagaggtcatacagttagaacttacttattcatttgtaaaccctatttagattattaatcatttgtcaggtaaattaaaaaaaaaaaaaaaaaaaaaaaaaaaaaaa

SEQ ID NO: 76806 - DNA, 1192 bp, Oryza sativa
  Clone ID: PAT_MRT4530_76767C.1
cccacgcgtccgaaactctctctctctctctctctctctctgaatctctggatctctgaaaactctgaacattccaagaactcataagttacctgtgatctgtgaagcttgagctgaagctgtgacagtgtctcactgatcgttgatcactcagcttggctgctactgtgcattcactgcgtggttagctagctaactgagcagaagagctttagcaatggcgacgccggggcagcagctgccgccggggttcaggttccacccgacggacgaggagctggtggtgcagtacctccggcggagggcgctgtgccggccgctccccgccgccgtcatcccggacgtccacgacgccaccgtgctcgacccctgggacctccccggcgccggcgatggtgaggcctacttcttcagcttccggcagctcgcggcggcgagcggcggcggcgggtggcggaggaggagggcggggagtgggtactggaaggcgacgggggcggagaagccggtgttcctgcgtggcttcgggtgcggcggcggcggcggcggcggcggccagcacctcgtcggcgtcaagacgacgctgctcttcctccgcgcgaagccgccgtcgcgcacccactgggtcatgcacgagtaccgcctcgccgccgccggcgctgtcgccgtcgccgccgccggacagacaaagcgcgggaaccatagttgcatggctcagccaggagaatgggtggtgtgccggatttttctgaagaacaacaggtcatcaagaaggcgagccggcgacgccgacggcgaaacgccggtcaccggtgtccacggtcaccgtcggcggcagccgtcgccgtcgccgtcgtcgtcgagctgtgtcacggctgaggtttcagacggagaaggagaagaagaagtcagcagtggcagcatcaatggtgctccatctgcctctcaaagagaggcctagacatgctgaaaatctccttaattaattactagtactagggattttttttcttcttcttcttggtctcctttggccctccattgcttttcctggacttctccttgtaccataatgattagtaagagcttaagcttaagcaccacgctgaagagagaagcccccgcttaagaaagctcctaagtaaagattactgagcagcagctgtgacatctgtatcacatggaacttgcc

SEQ ID NO: 76807 - DNA, 471 bp, Oryza sativa
  Clone ID: PAT_MRT4530_76768C.1
tcagtcaagcggcctcacccatctgcaccctcttctctcctcccgacggcagcggtgggcgtaggcgatggcggcggtggaggagcaggatccggcgggcggtggccaacccctgcacggatccggcggtggtgaccgtccctgcatggatccggcggccggccggccaccctcccccgcgggatccggctccctcccctcctcttcattctctccccagatccggcgaaggggaggggtgtcggcaacggtggcactcggcagcagcggcggcgtggcggcggtggaggcgtaggatccggcgggcggcggccaacccctcccttccctccccagatcaggctgaggggaggggcgtcggcggcggtgcggccggagcccggaggggagcatggaggccggcgagagggcagatccagcggaggccggcacggaggccaccgcttcaacatgtgttcctgatacctccat

SEQ ID NO: 76808 - DNA, 258 bp, Oryza sativa
  Clone ID: PAT_MRT4530_76769C.1
atggcctcgccggggcgccactgcttcgccgggccgcatcagcacgactgcgtggccgccgtctgccgcctccccctcgtgcgccgctgcgtgccgccttccctcccagcggacgggagggcgccgccgcccgccgtcgttttcatcgcagctgtcatcggcttcgcagagagggaggggaggagggggatcaagaggagagggaggacgacggcgaagaagatatggagagggtacgatgatagtgatctactgtag

SEQ ID NO: 76809 - DNA, 1076 bp, Oryza sativa
  Clone ID: PAT_MRT4530_7676C.1
aggcgatgggcgcggtggattcctcgaggtgaggaggaggtgatgtgctcggcggcgacggcggcggcggcgcggcggcgatggaactcccgtggctggatctgcccttcacgctgctgacgctgctgctggcgacgcggctcgcctacgactactacggcgtcgtcgcggccaccttcacggggagcttctcgctccagatcttcctcttctactgcttcgcgcgctggtaccgccacaccatcgccgcccgcgccgccgcagacgccgacggggatggcggcggcggcgcggtggcggatgaggaggcggcgccgcccgtgctgatcccgctgctggagggccggggcggtggaggcgggggcgcgggcgcggcgtcgtcgctggcgaaccggtgcttcgccgtggtgttcatggtgttcgtgccgctggtcatcgtggtgttcgagcggagccaggccgacgtcgtggcgtacgcgctctgcctcgccaacatcctcgtcatggtcgtctggctctcgcccgacgccgccgcggaccccgcgtcggcggccaagtcgttcctccgcctcagcgacgacgaggacgaaggcagctgcagcggcagcggccacggcgccgccgaggacaagtgctgcgtctgcctcgccgggatgcgggaggcgcaggcgctccgcgacctcccccggtgcggtcaccgcttccacgccaagtgcatcggcaagtggctcacggcgcacccgacgtgccccgtctgccgcaccacggccgtgccgccgccggcgccgctgcccgccagcggcgaccatgccgacgacgccatcacccctgtctagctctgcacatagtctgacagacaaactcaggtaaattaatttcttgtgctattaatctgtaaaattgttgggaaatttttttcttgaagatgttgtatatagatatatagctgtatgaatgaattgcctccaatttttcatgcatcaattggaaagaatggtaagtagtagtaatctgtaaattcttttgtaacattgctctatgaagattcaagattgtgataaaaaaaaaaaaaaaaa

SEQ ID NO: 76810 - DNA, 1925 bp, Oryza sativa
  Clone ID: PAT_MRT4530_76770C.1
tgacgagatggcgggaggcggcgtggcggcgctgggggtgaagaaggagcgggcggcggagtacaagggccgcatgacgctcgccgtcggcatggcctgcctcgtcgccgccgtcggcggcgccatcttcggctacgacatcggcatctccgggggagtgacgtccatggatccgttcctcaagaagttcttcccggtggtgttccggaagaagaacgacgacggccagaacaactactgcaagtacgacaaccagggcctctcggcgttcacctcctccctctacctcgccggcctcgtctcctcccttgccgcctcgccggtgacgaggaactacggccgccgcgccagcatcgtctgcggcggcctcagcttcctcgccggcgccacgctcaacgccgccgccgttaacctcgtcatgctcatcctcggccgcatcctgctcggcgtcggcatcggcttcggcaaccaggccgtgccgctgtacctgtcggaaatggcgccggcgcacctccgcggcgcgctgaacatgatgttccagctggcgacgacgctgggcatcttcacggcgaacatgatcaactacgggacgcagcacatcaggccgtgggggtggcggctctcgctggggctcgcggcggcgccggcgctgctgatgaccgtcggcgggctgctcctgccggagacgcccaacagcctgatcgagcgcgggcgcgtcgaggagggccgccgcgtgctggagcgcatccggggcaccgccgacgtggacgccgagttcacggacatggcggaggcgagcgagctcgccaactccatcgagcacccgttccgcaacatcctggagccgcgcaaccggccgcagctggtgatggcggtgtgcatgccggcgttccagatcctgacgggcatcaactccatcctcttctacgcgcccgtgctgttccagagcatgggcttcggcggcagcgcgtcgctctactcctcagtcctcaccggcgccgtcctcttctcctccaccatcatctccatctccaccgtcgaccgcctcggccgccgcaagctcctcatcagcggcggcatccaaatgatcatctgccaggtgatagtggcggtgatcttgggggtgaagttcgggacggacaaggagctgacgaggagctactcgatcgcggtggtggtggtgatctgcctgttcgtgctggcgttcgggtggtcgtgggggccgctggggtggacggtgccgagcgagatcttcccgctggagacgaggtcggcggggcagagcatcacggtggcggtgaacctcttcttcaccttcgtcatcgcgcaggcgttcctgtccctgctctgcgcgctcaagttcggcatcttcctcttcttcgccgggtggatcaccgtcatgaccgtcttcgtccacgtcttcctgccggagaccaagggcgtgcccatcgaggagatggtgctcctatggaggaagcactggttctggaagaaggtcatgcccgacctgccgctcgaggacggcgacagtcatcacaagtgaaagaaatgtactctgagatagtatatgggggttacagtagatgagacatgacatgtaggatgaggagattaagattgatcatgtgcggtaatgcattctgtgtgtatgttaattgaagttcatggatcatgatgtctgtttgtcgtggccagagaagagaaatattggaaacaacaaattttatactactcgattattaattgtctgaatcctcgtgaaaatattgggggttgttcagattgtagcaaaaccaaattttaccaaattttagcatgccaaaaaagaaaaaaaaaaggcgccgctctagaggatccaagcttacgtacgcgtgcatgcgacgtcatagctcttctatagtgtcacctaattcattcctgccgtc

SEQ ID NO: 76811 - DNA, 508 bp, Oryza sativa
  Clone ID: PAT_MRT4530_76771C.1
atatagaaaccatgcggctcggactggatatattcataacacagatgccaactgctacaccatataggcaacagcataaccatacttgtaacactaggtaagatgcagatcacacaagctaagaccgcactccgagcacactagaggctaaatgcagagagagtacatcactcgctcgcagttaacatggcagatgtcattgcaagcataaagagggacaatcaagcatgagtctatatcacagctgcttctgaagcaccagcagcatgatgagaagcagcagcatcgatggcagtgaactcttggagctgcacctggctgacgagcgctaagactatgatacgggctaatgcatcagggtacgccttctcggcctgctcgagctccttgagcacctgggtggcgtaagtgcacctgaacatgggcagcttgcacatggtccagtacctgccatggtagtatgctttggatctgtgattgtcacggaagacgaatttgatcttgttga

SEQ ID NO: 76812 - DNA, 2014 bp, Oryza sativa
  Clone ID: PAT_MRT4530_76772C.1
gggtccttctgggcaaaaagatttgagaacttgtattatactcatggaagaggcatctgaatttctcatgtactatacaacctgtcactcctgtgtatgaaatggcagagggtccatccatccacatagaaaaaggaatgggtgcccttgcgccgtaaacagatgctaatcttccatatgtacattacgattttgctttttcttttttcactttacaagttacagatctctcgatgtatatacatactatgatcctcgcctaatctcttcaatgtgtgcttcctcttcttactgtatagaagaatgaaataattggccgactagctgcgtttggtttccagtttcttcagcatttacctatgagcccggctacgttttgggcaatatcttttttggcctgcaatgagaccggtgaatcgccaatgtacataccgaacagagccctgcagaggtctttgctcttaacagcaccaatttgtctgccatcaatttctgttattagctggccatcagaagtttggcagaagtcgatctttgtacccgcaggaataggaatgtcttcattgaagtaagaaccaaaagttttcaagcaatgataatcagtgttgggattcatcttctggaggcgcaggccaagtgacttctcaaatacatctcgcactgcaccaatgctaaggccgttgtagtgaagtaccaatctaactctcataggaaggttttccctcaaaagatcatcatagaaatctgggttgtccttcaagttgatggttggaacagaagcatacttaggtcccagcttctcagaaatagtattcggttgcagatataaaccaaaagcgtacagatccaaatttttgaccctcattactttcacacctttgaaacccatcccaacaaggaccgttgtagatggactggagtcatcttcgagaaatgcaggaaacttgattccagtttttggttcaattgcatctccctgaaatattgtgcttggcactgcaacagatctactttttatgcatttgtcctccagataaggcttatccataggtctgctgacatagtccttgatatttcccagtgccattgactctgcgagcgtcttcagtgatatattttcaagagggggtacaatagccatggcaccagccagagtaagaacattgcaggcatgttgctgctgaaaatcattccagagtcgcccaagtgttgtgcttgcgaagttagctaaaagcagttgtacagcatgctcttctcttactagataaccaaactgcaatacagccaaattttgcatacgggagctcaaatgattgatatgtgactggcaagctccagagctagggccttccatactcattagcctacgtaaattcttgggattagacactctagaaagccagtagcagaaagctctggcaaacttgttgaggcgatcaaatgcttcctgaacaatcaaatttcctgaagaacagatctgcctgtgctgtcgcaaagaacttcccaccattgtaccggcatgcgtaaacaagctcaacccaagatcatgagacattggaaaatctgagggaaacttgtgtaggtatcccaaatcatggtcgagattggacaacattaaccgatcggccttcatgttaaaatgttattcccaatataatcttcagaatgtagaaagtcttcagagaaagcttttgaatgtacggcgaggaaaaactttgtgatctggccgatagactataaatcgcgccgtgtccagatcagcgcactggaggaagaacacgagaggatccgcgagtgccaccccccctcgatcgatcggttgcggatcaaccaaccgaccgaccgaatccgaacccgggggagaagatgggggaggggaatgggatcaaaggcaaccgccctcctccgaatcgccctcctcctctcctcccgtgaggcgagagaggcgaggcgaagaacgcgtgctcctcctcctcctctctcctctcctctcccggacgcgtggggacgcggg

SEQ ID NO: 76813 - DNA, 723 bp, Oryza sativa
  Clone ID: PAT_MRT4530_76773C.1
atgggagccgggaggccgccgggcgccggccggacgcgccgacgcgggacaaggggcggagagggcgcggccgcgcgggcgccggcgcggtgcgcgaaggcagcgggaggcgccgccggccggaagcgggaggcgcggcggcgcgagtcgcgggctcgcgggagcgccggccgccggagtcgcgggctcgcggctcgcgggagcgccgtcgcccgtcgggagtgggaggccgggagagccgtcggctcagcgccagcgccaacgggactggcgctgacatcgcgccagcgtggcgggcgaggcgcgatgtggcagggcctcagcgccaatgcacttggcgctgacaccttgcacaccctaaatagaccgatgtgcggcaatgaattaacggtgtcgctcgtggtgcaacgcctgtacaaggggtcagcgccaaatacattggcgctgaggccctgccacgtcgcgtctcgcccgccacgctggcgcgatgtcagcgccagtcccattggcgctgatatgaacaacctcagcgccaaagaggttggcgctgagccgacggcctatttctagatatagtttttggtatggactagtttcgaaataagttttctataaggaccaatttgtcaaaaaaacggtgcttttaatgcaaattttatcgggtggcagcgatggggggaatcaaaggtgttggtcttaaacggtacctcttaggttccagga

SEQ ID NO: 76814 - DNA, 260 bp, Oryza sativa
  Clone ID: PAT_MRT4530_76774C.1
ccgcgtaccgtccggattcccggtcacccacctcggtctagatcgcgagcggcgccttttttttttttcacatatacattatgattgatcatctatggagaaataacatgacaagccaacatccattccatgtcctatagttaactgaaaaaagaacactgattccctaaaatccatcagactataaagatagaatagggagagatttggtttttaccagagaaaatagcataccgagagaaaaacccttctaaaatcct

SEQ ID NO: 76815 - DNA, 168 bp, Oryza sativa
  Clone ID: PAT_MRT4530_76775C.1
atggcacaaccacaagtctacaacatccctcactgccctgacaaccgcgccagcgcctatcctccctaccgcacgtcgccaccggccatccacgccttgcagaccgcatcctcactttcactggaggtcctaaatcttgataaggttcggacgtgccagttagtttga

SEQ ID NO: 76816 - DNA, 516 bp, Oryza sativa
  Clone ID: PAT_MRT4530_76776C.1
atcgacgaaagcactagcttcttcttcggagtgaaggggctgactgggctcatctgcgactagcaacctcacttggatgaacacgcgatatgagagatgatttaccggatgatactatgctccggcctgtctatgaaatctccgtctacacatgacgtgaacggacgcgagaaccacggtgctagcttcctgctaattacatacactgcgagctccaagcatgtactggtattaccatgtcactactgacacatggagtcttaactgaccgtacaaccgacgtataccacgcatactggactgtggcaattgagctgaaaggcgctgttggactcatgcacacagaacgcgctgagcttgactggaggctctcatctcttatagactacgaactcttatcatctgatgccgatccatatcacaattgctcaatgtttatgactgtccagctgttaccctttgaaagctatagctaatgcactggctgcagcttcattcatgtggattcttggaaat

SEQ ID NO: 76817 - DNA, 2228 bp, Oryza sativa
  Clone ID: PAT_MRT4530_76777C.1
cgggctggccgaacgcggcggagagagagagagagggtgaatttgctagcgagatgccggaagccgaggccgcggcggtggtcaccggaggcggcagccgcgccgccggccccgccgactacgagcgcttcatcaccctcttctccccggagggccgcctctgccaactcgactacgcgttcaacgccgtgaagctggccgggatcacctccgtcggcgtgcgcggcgacgactccgtctacgtcctcacccatcggaaggaggacaagttgcacgacccgacgaccatcacgaacctgttcgcgatcaccgaccggattgggctgctcgccaccgggatgccaggtgatggaagggcaatagctcaggaggcaaggaacgcagctgccgagtttcgcttcaagtggggatataaaatgtctccttgtatgttagctcaatggattgcagacagagcacagatccgcacccagcatgctcagataagaccttatggagttgtttctatgatctttggaattgatgaagagaaaggaacccccgagctcttcacatgtgatccagctggacaattctttgcacacaaggccacaagtgctggtccgaaagagaaggaagttatgaactttcttgaggaaagaatgaagagcaaaccttctctatcatctggcacaacaaaagggttggcaaaatctgcgttgaaacatgtcctggagggggatttctatgcccgagaatttgagcttggatttatcaagaaaggggatccaactgtaactctgcacccagtgaaattcaagcgcacgcggaggtgaaggacgagagcagaacaaagtgctcgatataggacgatcaccagtctttcaaatcttttacagcatggaagttatgcaaaaccattaccgctaactgattactgtacgctatagctatatgtatgactgcgctcaagctgtgtcaagtgtcaattatgagttgcccccggatttacgataccaactgatgatcacacatcaacacttcaaactgtaactgtctacgaaggaactgcatcctcctgctcccgtgtaaccttagccagggataattttcctatgaagttggtcgcaaggctgccgaggaagagatctccgttgaactctgtcaccgaagtgaccatgttgatcacattcccttcagagtcaccaagaaccctcacgatctcgccgttcaacgacacctgagccaccactgctcccttgagcgtcgccttggtcctctcgacgagcgccgggaacgacgcgatgaccctcctcgtcaagctccagcgagagatcaggtccagccatggagacctcacctggagaagggcaatccagaagtgaccatctgaacccagccgaatgttgtctggattccccggcaggttgtccacgaagatctctgcctccccagccttctcccctttcagccacactctcaagcatctgaacctcatcgtctcgcagacgacgacgaaggcctcgtcgggcggcagggcgacgccgttggcgaagccgaggccgtcgagcacgacggaggcctcgccggtgcgggggtcgtacttgagcaggcggccggtgaagcggtactcgaagaagtcgaggaaccagttgtcgaagctgaacctggtgctggcgtcgctgaagtacaccgtgccatcggaggcctcgatcgccgcgtccgcgaacctgatcgtggagccttcgacagtcgaagcaagaagcgtcacgcgtccattctcatccactttcaacaatcccttgtcggcgtcgcagacgagcatggcgccgtcggcggacggggcgacgccgaggagccccgtgccgccgacgagcccccaccgctcccacgacccgttcgcctgcatcctccgcacccacccgtccctcgtcgccgtgaacacctcgccgccggcgtcgtccacgtacacgtcctccggcgcgctcagcatcccttccccaagcttctccagattctggaggaggttgttgggagggaagcgagcggcggcgggtgggcgtgcgggcggcggggcgagcggctggatggggcagtggagcgcgacgtgcacggcgagcgacacgaagacggcggcgaggaggcccagctgctgcgccatgccgccgatcgacccaccaatgtgtagccgacgacgagctcgatcgatcgatcacgctatcggcgtcgactcgactcgaactgtagat

SEQ ID NO: 76818 - DNA, 288 bp, Oryza sativa
  Clone ID: PAT_MRT4530_76778C.1
cgacgcgtggcggacgcgtgggcggacgcgtggcggacgcgtgggcggacgcgtgggccagaagttgtcatcgctatcgctgttccggatgggttcttttccgcctggtggaggttccgctagaataaagaccctctaaatgccctgggcgagtgccgcttcgctcgtcttatcaactaatagcggtaggttaactatttaatatctgctagcgtattcggctcgtacccttgatggtctggattcatcatttcttgttgatcaatagttagtaaaaaaaaaaaaaaa

SEQ ID NO: 76819 - DNA, 658 bp, Oryza sativa
  Clone ID: PAT_MRT4530_76779C.1
gttcgcggacgcggcgatcgaggcctccgatggcacggtgtacttcagcgacgccagcaccaggttcagcttcgacaactggttcctcgacttcttcgagtaccgcttcaccggccgcctgctcaagtacgacccccgcaccggcgaggcctccgtcgtgctcgacggcctcggcttcgccaacggcgtcgccctgccgcccgacgaggccttcgtcgtcgtctgcgagacgatgaggatgtaccatgaggttcagatgcttgagagtgtggctgaaaggggagaaggctggaggcagagatcttcgtggacaacctgccggggaatccagacaacattcggctgggttcagatggtgaggtctccatggctggacctgatctctcgctggagcttgacgaggagggtcatcgcgtcgttcccggcgctcgtcgagaggaccaaggcgacgctcaagggagcagtggtggctcaggtgtcgttgaacggcgagatcgtgagggttcttggtgactctgaagggaatgtgatcaacatggtcacttcggtgacagagttcaacggagatctcttcctcggcagccttgcgaccaacttcataggaaaattatccctggctaaggttacacgggagcaggaggatgcagttccttcgtag

SEQ ID NO: 76820 - DNA, 558 bp, Oryza sativa
  Clone ID: PAT_MRT4530_7677C.1
atggagaagggcaagggcctcgcccgccgctgggcggtggagctccacgacgcctcctcctcctcctcctcccactcctccatccccgacccgcccggcttcaccagatccgcccccgacgcggacgacgccgccggcgcgcggcagcggaaggattccgagaccgcgtggaaggcgcagaaagcgtgggaggtggcgcaggcgccgttcaagaacctgatgatgatgggtttcatgatgtggatggccgggagcaccgtccacctgtttagcataggtatcacgttctccgctctgtggcagcccatcagcgccctccgctctgttggcaaagtttttgaaccattcaaggacccaagggtggatactctagcacctaagttggtctttattgctctcaacttggcagctatgggtttaggtgtatggaagctcaatacgttgggtcttcttccaacaaatgcatcagattgggtgttttcactggctcctgctcggaggctcttgataccagccttcttttccttaaggcaatcttggtttgattatgagctgtga

SEQ ID NO: 76821 - DNA, 420 bp, Oryza sativa
  Clone ID: PAT_MRT4530_76780C.1
ggagaaaagctgcagggatgagacctgaaaaattgcatatcccacaacgcgggaacacacagggaactgctctacatatagttttcggatctcctttataaaacctttgcatagccactaaaagggtgtccaaggattaactacctcaataatgacataccctctttttccgctcatttagggatgctgatacaacagcaggacgcacacccttaggtggaaacagaggatggagataaggggcaaacaaaactttttacccacggcgacggcaagggcacaaccgccatgtatttagaacaacttggtgcgacttaatcctcagcttactcctcccagcaagcttaactagttgaagcaagcctatgcaggcagagatcgacctgaaattggagaactcaatcgctaaatgatttatcc

SEQ ID NO: 76822 - DNA, 795 bp, Oryza sativa
  Clone ID: PAT_MRT4530_76781C.1
atgccggaagccgaggccgcggcggtggtcaccggaggcggcagccgcgccgccggccccgccgactacgagcgcttcatcaccctcttctccccggagggccgcctctgccaactcggtgagtgcccgccgccgcgacatgccccctccacgccgaccaaattcgctgctggtgtctgcgctttggctaacgatctgctgcttcaattccgccgcccgcctccccgtgcggccgtgctgtgtgctctcgcagactacgcgttcaacgccgtgaagctggccgggatcacctccgtcggcgtgcgcggcgacgactccgtctacgtcctcacccatcggaaggaggacaagttgcacgacccgacgaccatcacgaacctgttcgcgatcaccgaccggattgggctgctcgccaccgggatgccaggtgatggaagggcaatagctcaggaggcaaggaacgcagctgccgagtttcgcttcaagtggggatataaaatgtctccttgtatgttagctcaatggattgcagacagagcacagatccgcacccagcatgctcagataagaccttatggagttgtttctatgatctttggaattgatgaagagaaaggaacccccgagctcttcacatgtgatccagctggacaattctttgcacacaaggccacaagtgctggtccgaaagagaaggaagttatgaactttcttgaggaaagaatgaagagcaaaccttctctatcatctggcacaacaaaaggggtgtgtgttactattcttagcaaaccatga

SEQ ID NO: 76823 - DNA, 176 bp, Oryza sativa
  Clone ID: PAT_MRT4530_76782C.1
accccgcaaaactttgaataaacgaatttcaattgtttttgataccgttacgagggcacaaactgctgtaaaatggtgctcaattaaaaaagaaaaactattccttcctatttggtttacaacagttacattttagccaatgacactagaaagaaattatggagaaaagcacattt

SEQ ID NO: 76824 - DNA, 4758 bp, Oryza sativa
  Clone ID: PAT_MRT4530_76783C.1
atggagttctactccgatctgttgttgggttatgcagggtctgcacctgcgtttggtaaggctgtgacgatcaggtctcacccaaaggtgggtgatccggtggattggttgcttcgggggaaaagtaaacctatcaagggccgattggctggggcagatatgatccatattggtcttccagagttgggatctcggtgggggcgacaaagggatcgtcatggcgacggttacccgcccgaagccgatgacggatggcagggttggatcgtcgagtttggcgctggttctggcggaattgccggcgccgaatcaaggagaggtcttggctgtggcagggaaggaggcgggggagcccaaacagaacctgatccctggaagtacatcggttgtggctgggactccaagggtccggcgactcacatagaaggtgatatactggaggatgaagatgacgtggttgaagtcagtcttgatgcagatgaggcaaacctggtggggcagtggaccgtccttgctcgctactactctttgaagacgccaaatcagaatgctctctttgatgacatgcgtcgagcgtggagattgagggctgacatgaattacaagtctcttagggacaacctgttcattgtttccttcagctctgaaggggattataagtttgttaaggatggaggtccttggttacatcgaggtgatgctcttttggtggcagagtttgatggcctgacaagcccatcgcaagtcccactggaggtggttccaatttgggttagaatctatgatctcccgttggttttgatgacgaaggataggggaatcttatatggcagcaagctgggacatgttcgggaggtggatgtggaagcagatgggcggaacaagcatgatttctttcgtattcgagttgatctccccgttaatcgtgctttaaaaacacacatagctatcaagatcaatgtccaaggcaatgaggaggcctttgagaggaagattaacacagtgaaggctgtgcaaagctctggggtggctaggaaactatcgtttagtggagcgggcagtgctagctccacttcatcgagacataagaaggttgagcaatgggatgaggcagttcctccaaggatggaggcttttgatggttttgaattaaatgagaaggaaggggatgctaatgttgacctgcagcttgccgatcagacccgcaatatgcaggtgtcagggggtggttctcaggatgccgaaggcctcacaaaaggaaggaaaactaaacaagctagaccggcaccttcaggaagagcactgaagcgtgtcaggaaggaggcaacgggggatacacagatggaggatatggaagcaaccagctcgggggctgctggagcaatgaattgcttatcgtggaactgccgtggcatcgggaacgccacgacagttcaagagctttgtgccttggtcaaagaggccagttcccaatttgtatttttatgtgaaactaggcagccagtggataagattaagcgtttgcgtaatagattgggtttgagaggttttgcaggggttagcagtgatggaatgagtggtgggcttgctcttttctggcatgagtctgttcatgtggaaatcttaaataagaatgaaaggtttattgatgcttatattcgtctgtctcctaatgatcctttgtggcatgctacctttgtttatggggaacccagagtagagaatagacacaagatgtggtcgttgctcaactcaatcaaacaatcttcaaacttgtcgtggctagttataggggattttaatgaagctttgtggcagtttgaacatttctccaggaaacctagaagtgatgctcaaatgcaggcctttagggacgtgttggacacatgtgagcttcatgatttgggaatttctgggttaccacacacgtatgataatagaaggggcggctggaacaatgtaaaggttcgcttggatcgtgctttggcagatgacgagtggagggatttgttcagtcagtaccaagtccaacatttggtttctccctgttctaaccattgtcctattgttcttaaattacatggttctgtcccagatcagtcttggagtaagaaaaaatacaagaatattggcagagaattggagaaaacaaggaagaaactctcaaaccttttagaagctggaactgataaagctgctatacggcaaacctcggattacatgaatgaattgttgtatcgggaagagatgttgtggcttcaacgatcccgcgttaactggctgaaagaaggagatcgtaatacaaaattctttcacaatagagtggcctggagagccaagaagaacaaaattaccaagctgcgagatgctgctggtacttttcataggtcgaaaatggtgatggaacaaatggcaacacagtattttaaagatatgtttactgctgacccaaacttggatcattccccggtgactagattaattcaaccaaaagttacggaagaaatgaacaacagattatgctctgaattctcagaagatgaaatagcaaatgccttgtttcagatagggcctttaaaggcaccgggtactgacggctttctggccagattctaccaacgtaattggggctgcatcaaaaatgatatcgtgagagcagtaaaagaattcttccattctgggattatgctggaaggggtgaatgatactgccatcgttcttattccaaaaattgaacaacctagagacttgcgagacttcaggccaattagcttatgtaatgtgatctacaaggttctgtccaagtgtctggttaataggctgaggccttttttggatgaattgatctctaaaaatcagagtgcttttgttcctaggagaatgatcaccgataatgcacttcttgcttttgaatgctttcatttcattcagagaaataagaatccgagatcggctgcctgcgcgtataagcttgatctctccaaggcttatgatcgcgtcgactggaggtttttggagcaatcaatgtataagtggggtttttctcattgttgggttagttgggtcatgacctgtatatccacggtctgcgacaaggggacccgttgtgacccctttctctttctgtttgtggccgatggtttatccttgctacttgaagagaaggtggaacagggagctatctccccaatccgggtttgccaccaagcaccagggatctctcatctactgtttgcagatgacacactgttattcttcaaggctgatctttcacagtcacaagctatcaaggaggtgttcggcagttatgctactagtacaggtcagctaatcaatccaacaaagtgctctatcttgtttggtaactccttgccgatagcttctcgagatgccatcacaaactgcttgcaaattgcaagcacggagtttgaagataaataccttggtctccccactccgggaggacgaatgcacaaaggtaggtttcagagcttgcgagaaagaatatggaaaaagattctacaatggggtgagaattacctatcgagcggcggaaaggaagttcttatcaaggctgtcatccaagcaattcctgtctatgttatggggatttttaaattgccggagtcggtttgcgaggacctaacaagcttgacccggaatttttggtggggagctgaaaaggggaagcggaaaactcactggaaggcatggaaatctctcaccaaatccaagtctttgggtggcctaggtttcaaagatatccgtctgtttaaccaggccttattagcaaggcaagcgtggagactcatcgataaccctgatagcttgtgtgcacgggttttgaaagcaaaatattatccaaatggatcaattgttgacactagttttggagggaatgcctccccggggtggcaggccattgaacatggcttagagttggtgaaaaagggcatcatctggaggattggtaatggcagatcggtgcgcgtgtggcaggatccttggctgccaagagatctgtcaagaagacctatcacaccgaagaataattgtagaattaaatgggtggctgacctcatgttagacaatgggatgtgggatgctaataagattaaccaaatcttcctgcctgttgatgttgagatcattctaaagctgcgcacctcatctcgtgatgaagaagattttattgcctggcatccggataaactcgggaatttttcagttcgcacagcttataggctggcagagaattgggctaaagaggaagcaagctcgagttcctctgatgtcaacatcaggaaagcttgggaattgttatggaaatgtaatgttccatccaaagttaaaatcttcacttggagagcaacctctaactgccttcctacttgggacaacaagaagaaacggaacctggagatttctgatacgtgcgtcatctgtggcatggagaaggaagatacaatgcatgccctatgccgctgtccgcaagctaaacacctctggttagccatgaaggaatcaaatgatctgtcactaaggatggatgatcacttattaggcccatcctggcttttcaatcggctggccttgttgccggatcatgaacagcccatgtttcttatggttctgtggcgaatttggttcgtccataatgagatcatacatgggaaaccgagcccttcgatagaggcttcacaacggttcttacagagctatatgaaatcacttttagagattaagcaacatccttaa

SEQ ID NO: 76825 - DNA, 992 bp, Oryza sativa
  Clone ID: PAT_MRT4530_76784C.1
ctagggatagtactggaatgcggtgattaggatggaagaagcattctggacgatacaggatcggacatctgggcacgattactcctcctggaagtaaaaaccagccgtcacggccgatagtgacgctcgttgtcgttggcaggtgcattacataggctgaaatgtttggtaccccattacatattagtcttgatgattcaatatacttttgcaggttggcaccgttttttacttgacgctcttagcatctccctcggagaaactttcccgcctcccagcggcaaagcctcaacgctcgagctgattcatgttggctggagtactgttttggttgtcccaatggttggcgcttcacttatcgtgcagcaatttggcaaagctccaattctcttttttcttcaggtgagatctagccattcaagcttgaattctccttttccatctcaactatacaagctaatctatcatgcacctccgaaagtttacttggcgtttcatgtttgaacttctcttgataccattctcggggtataccagcttcatcacgagctgggtagttaaatggacccttcagcaccacatcatgctcctttattaagtctctaaaagttgcatctgggacacgacccatcatttggcatacttttaggaaccaatgcagacctacagaaacatgtgcaagctcttcctgtgctactttagtcacgatatctgcagatctatgatccccgaaaccaagtaacttttggacaagccttggtccagcatcgaggcctcgagcttcctattaaagttctaataatcaacaatttcatcaattgcaacaaggcaaagctcttcagcaagtaccctacctgaagcctactatctcgaaatgaaataggtattttacagaagaaatagataatgatctggaacctgaactagcggtatcactgccaatcgtgcagaaacgtcatttgaggatttcgcacactccctccacagaagat

SEQ ID NO: 76826 - DNA, 2958 bp, Oryza sativa
  Clone ID: PAT_MRT4530_76785C.1
atgtcgtcgttctccaagagagtccctcaccatgtggcatcactcctagcaatgatgctcatcctccagctagtccaggccaccacgctcgacgaccttacgacgacctcctccgaaacgacgccggcaatgtgccttccagaccaggcttccgcgctgctccggctgaagcactccttcaacgcgacggccggcgactactccaccacctttcgatcatgggtccctggtgcagactgctgtcgctgggagggcgtccactgcgacggcgccgatggccgtgtcacctcactcgacttgggaggccacaacctgcaagccggcggcctcgaccatgcactgttcaggttaacctcactcaagcacctcaacctctctggtaacatcttcaccatgtcccagctcccggccactggattcgagcagctcaccgagctcacacaccttgacctctcggacaccaacatcgccggcaaggtgccggctggcattgggcgcctcgtgagcctggtctacctcgacctctccacgagcttcgtcatcgtgtcttacgatgacgaaaacagcatcacacagtacgctgtagactccattgggcagctctcagcaccaaacatggagaccttgctcacaaacctcactaacctggaggagctccatatgggaatggtggatatgtccaataatggcgaattgtggtgtgaccacatagccaagtacacacctaagcttcaagttcttagtttaccttactgctcactgtcaggtcccgtatgcgcatcatttgctgccatgcgatcgctcaccacgatcgagcttcattacaatttattgtcaggttcagtgccagagttcttggctggcttttccaacctcactgttcttcagctatccacaaacaagtttcaaggatggtttcctcccatcatcttccagcacaagaagttgagaacaattgatctttctaagaatcctggcatatctggtaatctgccaaatttctcacaggacagtagcttggagaatttgtccgtcagtagaacaaacttcacaggtatgattccgagctccatcagcaatctcagatctctgaagaagttgggcattggtgcaagtggtttctctggaacactgccctcttcgttaggtagcttcctatacttggatttgctagaagtgtctgggttccagatagtaggatccatgccgtcatggatatccaacctaacttctcttactgttctccagttctccaactgcggattgtctggacatgtaccttcttcaataggaaacttaagggaattgattaagttagcactgtacaactgcaagttttcagggaaggtgcctccgcagatcttaaatttgactcatttggaaactctcgtgctccattcgaacaattttgacggcacaatagaactcacctcattctcaaaactgaaaaacctatccgtcctgaatctctcaaacaataaactagtagtggtagatggagaaaatatttcatcactggtgtcattccccaatttggagttcttaagtttagcatcttgcagcatgtctacttttcccaatatcttgaagcatctcgataagatgtttagtcttgacatttcacataaccagatccaaggagctataccacagtgggcatggaagacatggaaaggcttgcaatttctcctcttgaacatgtcgcacaataactttacaagtcttggatctgatcctttgcttcctcttcatatagaattccttgacctcagtttcaacagtattgaagggccataccgatacccaaagaaggcctccagaaacaaactctctggagatattccaccatcaatatgtaccgctgctacgaatttgcaactctttgatctctcttacaataacttgagtggttcgatcccatcctgcttaatggaggatgccattgaattacaagtattaagtctaaaagaaaataaacttgttggaaatttacctgatagcatcaaggaaggctgttcacttgaggcaatagatttaagtggcaatttgattgacggaaagatacccagatctctagtttcttgcaggaacttggagatccttgacgttggaaacaatcagattagtgactcctttccatgttggatgagtaaacttcgtaaacttcaagtccttgtcctcaagtctaacaagttcactggacaagtaatggatccttcatatacagttgacaggaacagctgtgcatttacgcagctcagaattgctgacatggcctcaaacaacttcaatggaacattgccagaagcatggtttaagatgctcaagtccatgattgccatgactcaaaatgatacactagtcatggaaaataaatattaccatgggcaaacataccagtttactgcctcagttacatacaaagggagtgacacgacaatttccaagatattgaggacccttatgctgattgatttctcaaataatgcattccatggtaccattcctgagactgtcggggggcttgtactgcttcacgggctcaacatgtctcacaatgcccttacaggatcaattccaactcagtttggcaggttgaatcaacttgagtcattggacctctcctcgaatgagctcactggggggatccccaaggagctagcatcactcaacttcctttcaacactgaatttgtcctacaacatgttggttggaagaataccaaactcatatcagttttccaccttttccaacaattcttttcttggaaacattggtttgtgtggaccaccgttatccaaacaatgtgacaacccaaaagagcccattgttatgacatacacttcggagaaatccacagatgttgtactagtcctcttcactgcattgggatttggtgtttcctatgcaatgacaatcctaattttatggggaaggtgcatgagaaagcaacgctga

SEQ ID NO: 76827 - DNA, 102 bp, Oryza sativa
  Clone ID: PAT_MRT4530_76786C.1
atggcatcatccagggcgtgctacgcgccagcaagccgggaaccagaggcggctgccggcggagggcaaggggtgcgcgcggcgcaggagctggagaggtga

SEQ ID NO: 76828 - DNA, 2830 bp, Oryza sativa
  Clone ID: PAT_MRT4530_76787C.1
aaaaacaaggcaatgcgcaactcatcatttatgtacagtaataatggtataccatctttactcgactgaacagtcagcagccatgaaatgaaccaatgtaaccaaacatgtaaatggggcaagggagatatacatgaaatgtacaccaaactgagtgatcagaattcctaacgttcaccacggcaccaccaaccaattagagaaacctacttctttccaccaatcgtaggttgaccaccatttgcactacccatgctagtgggtacgcccatcttatttccaccactgagacccttcaagtcaatcaaatcattgtagtagaaccattccatatcggcaatgaggctgaaggtggcacatatgccattgaaggggaagtatatgatgctgagggagctgaataggttgaggaaacagaaccaacaggtgggggttgttcttggtaagtagctgaccgatgggttgtgctgcccatcagtaactgcaggctgctgaggtccattaggaccctgcgttgaagaatctgtagaagcttcatgtgtaggactgcacaaggtgaggcttaaaaggtcgatcatatcctgctcttttgtttgaggactgctactgacaagagctgggtcaacaggaactaaagcattgcttgcaacagaagatgaagattctgaactttccatatcaatgggtacaagggcaaggtctccagtgctagataatgaatcatcactagtcatcacagacttattttttctttgtgctagtcgagtgaactcatcctcctcctcctcctcctcctcaagagtgctgataggaggtgcagatggcttttctgctggatcctctttaggagcctcaacattgtctgccggaggtgcttcaactgctaaatgagtactggaggccataatgtcatattttgaaataatattttgtagccgatcatttatctccaaaccttgcttcagtaactgttcattccctgttgagctgacaaactgcatgagcttttgttggtttgagcgacattggctcacaagatctgtgataatttcatctttgacagcctttacttcaagatacgcaaagtgatattgtgggtatttacttccaggtccaccaaatgcttcttgccaggagtccaaaagtaataatattttatcccttactaacatatcattcttcttctggatgattttcaccatttcttgcagaacatgttgctcagcaacttcaagttgaacatattcaccacaattcttcatcatagtctccaagagcgtcaaagcatagaactgaacttttgggtctttgttctgtagtcgcttcttcactgcctttaccacatcctttgtttgccagacgtcggcgttgatgatgtcgcagatttcgaggttgacggcccagtcgggccccatgagcaggtggcttgtcgccttctccacccgcggcgccgcccgagcgggcgcgcccgccgccggcgccaccaccgcccccgccgggtgcatcgctgcggcatggcctccttccaccttgccgctgatggagctcatgacgttggaggcgatggcgatgctgctcgtgatcacggccagagcgatcatcgtcgctgccaatgccttgtccttcgtctttgctatcccatgagcatccccggagtactcgaagagcgtccagatgctggggatggcgatggcgagcgcgtagagcaccgccatgagcacggccgtgagcgccacgaaccggcgcgtgtccgtggccagcggccgccgccccgggaacaggagctcgtcgacgttgacgcggagcgagaagtggagcagcgggaagacgagcacgaggtgcagcgcgtagctgaggcgcgccgcgtctttcagcgcctgcgggaccccggccatagcactcttcttctggatgatgtgcacgatttcttgcgggacgtcttgctcagcaagttcaaggtgaacatattcaccacaattcttcatcatagtctccaagagcgtcaaagcatagaactgaacttttgggtctttgttctgtagtcgcttcttcactgcctttaccacatcctttgtttgccaggcgacgacgactatggggacggcggtgaagagctcgaacggagaggagaggcgcgagaaatccgggagcatccgcggcatcttcgctgtgccggtgaagagggcgtacaccgcgatgcccaggctgatgaacatgaacaccactgccagtaggatggacacggctgatgtgaacttcagtgaatcgacacgcttccggagcacaagagggaggaggagcaccgcggctgccaccagcaccgcctcccgccctgtccaccattgctgcccgaaccactccgtcagcaccccgtcgtgcaccttcccgtcgctcgtcgtgccggacatcacgtcgccgatgatgatgaggtacacggtgagggtcccgatggcgttgaaggcggcgaagacgtcgagcgccgccaatgggccccggcgcggccgaacgcgtcgcccatcagcgcggcgtacgacgacggcccgcgggtgtaccggagcatgaagtccacggcggcgttggccaggagcgcgacgccgaccacgagcgccaccgtcggcgccacgccgagcacccgcatggccgccgggatcgacatgatcccggcgcccacgacgctcgtcgacacgttgaacaccgcgccgagcaccgacgcggctgcggctggcgtccccgctccggcgtaacgctctggcagcagggacgtttctgctgccccgctgtcgccggcggcggcggcggcggcggcgatggaggtcttcttggacaccat

SEQ ID NO: 76829 - DNA, 2022 bp, Oryza sativa
  Clone ID: PAT_MRT4530_76788C.1
atgcacccggcgggggcggtggtggcgccggcggcgggcgcgcccgctcgggcggcgccgcgggtggagaaggcgacaagccacctgctcatggggcccgactgggccgtcaacctcgaaatctgcgacatcatcaacgccgacgtctggcaaacaaaggatgtggtaaaggcagtgaagaagcgactacagaacaaagacccaaaagttcagttctatgctttgacgctcttggagactatgatgaagaattgtggtgaatatgttcaacttgaagttgctgagcaacatgttctgcaagaaatggtgaaaatcatccagaagaagaatgatatgttagtaagggataaaatattattacttttggactcctggcaagaagcatttggtggacctggaagtaaatacccacaatatcactttgcgtatcttgaagtaaagaggataggtgccgtgttcccaaggcgtcctatagatgcaccaccgatatttacacccccggcgacacatacttctcaaagctatggttcacccagatatgaggcaggaagtctgaatgagataatgtcttccgatgttgagacactaagtttgggtgacctgaataacattcgaaatgtgacagaactactatgtgatatggtgcatgctttgaatccatctgatcacatggctgtcaaagatgaaattatcacagatcttgtgagccaatgtcgctcaaaccaacaaaagctcatgcagtttgtcagctcaacagggaatgaacagttactgaagcaaggtttggagataaatgatcggctacaaaatattatttcaaaatatgacattatggcctccagtactcatttagcagttgaagcacctccggcagacaatgttgaggctcctaaagaggatccagcagaaaagccatctgcacctcctatcagcactcttgaggaggaggaggaggaggaggatgagttcactcgactagcacaaagaaaaaataagtctgtgatgactagtgatgattcattatctagcactggagaccttgcccttgtacccattgatatggaaagttcagaatcttcatcttctgttgcaagcaatgctttagttcctgttgacccagctcttgtcagtagcagtcctcaaacaaaagagcaggatatgatcgaccttttaagcctcaccttgtgcagtcctacacatgaagcttctacagattcttcaacgcagggtcctaatggacctcagcagcctgcagttactgatgggcagcacaacccatcgggtgtgccacagtatccttcaaaccaccagtcgcatccaataaatcaggaatatattcgacagaacagaaactatgttgcaccttgggcacaaagtggtcaatattatccagcaccaccatgggctgcacctccaagtgtcaattctaatcctttccagtcagctacttaccaagaacaacccccacctgttggttctgtttcctcaacctattcagctccctcagcatcatatacttccccttcaatggcatatgtgccaccttcagcctcattgccgatatggaatggttctactacaagtaatggactaagtgcaacacaagctcaaatgaatgggaatcaacaaccgccaggttcttcagcggcagcaagcaaaccttattacatacctgacaatttattcagtgatttgattgacttgaagggtctcagtggtggaaataagatgggcgtacccactagcatgggtagtgcaaatggtggtcaacctacgattggtggaaagaagacggagggagtagtaatttcggaacagaaggaacagaagttgatatgcacaggaacagaaggatctaaaagtcacgtttctttctcgtcgcgcgcggagcgcaaagcgacaactgcaaatctgcaatgccgccactccactttaattagtccactccatgaactggcaattaatgatcaaatctctgcaagcataaatgctgatgaggaggatatgtgcattaaaatgtga

SEQ ID NO: 76830 - DNA, 335 bp, Oryza sativa
  Clone ID: PAT_MRT4530_76789C.1
cgcgcggtaggcgggttacaacaacggcggacggccctggcagcacaggtttctgctgtgtgtcatcggtggggaggcatgtccagcgttacaggtgtgtgctggcccagcactccggtagccatgtggcgcgatgggacgggatggtgggcaggcgcattgcgtttaggtgccttcctcgctacgagtggagtgctcgatctagtttggcgaaattccgtgggatccacgaattatcgctgccagaagaagctttgggcgcccaggctcgagcttcagagtttgcacgggccccactagtgagtcgtatcacgtagctttggcgtaatcgtggt

SEQ ID NO: 76831 - DNA, 1125 bp, Oryza sativa
  Clone ID: PAT_MRT4530_7678C.1
gcacgaggccggtaatttgacgggattcactaattggaacttggtgttggggccggcccggccggggcactcgacagtcgatcgccaacaagcccaaacccggagagagccggaggagatccgtcgtctcccgcatcctcaccggccgccggcgatggagaagggcaagggcctcgcccgccgctgggcggtggagctccacgacgcctcctcctcctcctcctcccactcctccatccccgacccgcccggcttcaccagatccgcccccgacgcggacgacgccgccggcgcgcggcagcggaaggattccgagaccgcgtggaaggcgcagaaagcgtgggaggtggcgcaggcgccgttcaagaacctgatgatgatgggtttcatgatgtggatggccgggagcaccgtccacctgtttagcataggtatcacgttctccgctctgtggcagcccatcagcgccctccgctctgttggcaaagtttttgaaccattcaaggacccaagggtggatactctagcacctaagttggtctttattgctctcaacttggcagctatgggtttaggtgtatggaagctcaatacgttgggtcttcttccaacaaatgcatcagattgggtgttttcactggctcctgctcgggaggttgaatatgctggtggagggatccccttgcactgaaacctttatgtgcttcagttagtacttattaaagttttaccacttggaagatggtgtctgtactaagcgaaaaattaccctgcagatgggacaagtctggtttttgtgaggatcatatttcagcacctgtactaaacttgcactatatcttgagacaagtaacttacaatttccttgaccccttttgtttaccctggttatttatacagagtcagttgattcttagtaaagctgaattatgttgttatgatgattgattgttgtcctgcagaggctcttgataccagccttcttttccttaaggcaatcttggtttgattatgagctgtgaggctcaagatggaatatgttggcctgttagtgctagggaccaatttgttgcccttatatacaacacctttacgttttgttctgaataaaaaaaaaaaaaaaaa

SEQ ID NO: 76832 - DNA, 616 bp, Oryza sativa
  Clone ID: PAT_MRT4530_76790C.1
tggccggactcgatcgatcaagccgtatcgtatccatctccatcgccagatagcatggcagccgtccgcatatacgctggatccagtaggatcaaacaaagctagagatagctttcgcggcacggggcggggcagtgcattctcggcatcaagcgattcggttctactctgcctaggccacggtgaacggctgacaggaacccagcccggtgcatttgcatttgcatttgcaaagtgggatgaatgcatgcgtgccgcctcatggggctttcgatctactgaaaggcaacgcctccgagggattcattacatgcggaaggctcttatctgtgatgctatagctttagagctcgactgtgtgtcgaagagagacgacagagggtacaaattaggggtgaaaaccgtacggaatctttccgaattctggacctattttcgaaaacggaatctgtcggttggaatttttcgaaaacggaaacgaaattggaaatattttctcgcaaacggaataaaaaatgataagggcagtttccgtcggaactgggaatcggccgaaaactttccgggaattttctcggaattttcagaatttttctcggaattaccagaaattttg

SEQ ID NO: 76833 - DNA, 414 bp, Oryza sativa
  Clone ID: PAT_MRT4530_76791C.1
atggtggtatggtggaggaagcagtggcaaccatgcatccctgccaactcttccttatgcaactacctagtatggctgcctagtcctcaacaaccggtgattgaaagcacatgccatggtggcaatgtggaggtggagctcgtcgggcccttgtcgacgtctgaagtcacgactacaatatttgcatggtatggggatcgttggtaccagggtggatgcgagattaagacctttgaaaaaccgttgtcgtgctcacttgaccgttcttggtggcatgaggaactagccattggcatggtggatacaggacctcctaagggctcgacatgtcgtgtcgagaacatgaagaacggcgacgcccatggctcagcagccgtcctcgccattctcatcttgttagcgagctcaatgtag

SEQ ID NO: 76834 - DNA, 278 bp, Oryza sativa
  Clone ID: PAT_MRT4530_76792C.1
aagggaattgcgacaaggcccatccacagtgagaccgggcacaatacaatacattattactgaagttatggacaccgatatcattggaactttatagggcaataaccgaatttgtatttgcataagttttaccgttcaaagtgcatacatttaatttgagaaaatccggggtacagataggactctgggtaatacgctccatatgagccttagcaaagaaaactggttctcctgatttatggagaattcgactggaatgatgcaaatgagggttaaat

SEQ ID NO: 76835 - DNA, 457 bp, Oryza sativa
  Clone ID: PAT_MRT4530_76793C.1
gtgtgatttactctatgggacgaccactctcttttgggatgatacgtggaatggtcatataaggagtaattcatatccaagtctatgtactcatgctattaacaaagtttagtcagtggttgtcacttgttcgaaactcatgaggcttatatggaattcctacagctcagagcggaacttgatagtttaactttgtcccatcagcaaggggataattggagcttcattcggaagcgcaacctacacctcaaaatgcttttacatgctgaactttgctttcatgcaaccttcaagaccttttcactggagatggaaaacaagatgtgtgatgaagaacaaagtctttatttggttgcttttcagtgataggctgaatacaagggacatgctggatagaaaaaaatgtgctcctctgaatgctgatcttatatgttttctctcttctttgcagcatagg

SEQ ID NO: 76836 - DNA, 867 bp, Oryza sativa
  Clone ID: PAT_MRT4530_76794C.1
atgcaggtgtgcggccgacggcggagcgggcgcggctgccggcgcagcgggcgctgcgacgcgcggggaagaagctggagagggggagaggaggcggccggcgcgaccgcccgcgacggcgggagcagcgggcgccgccgcctctccccatacggagccacgccggagcacctcgttcagcacgcaccccatcttcgtcagcttccccagcgccgccgcgtcgaggaggcccgaccgcccggccgcctccaccacctcctcccgcaccgccgcctgccactccgggtgcgccgccagcatcagcagcgtccacgacagccgctcccgctcaccgcagtgctcgacacgggtagcgacctcatctggacgcagtacgacgcgccgtgccggaggtgcttcccacagccggcgccgctgtacgcgtcggccaggtccgtgacgtgcgccaacgtgtcgtgctgctcgccgatgtgccaggcgctccagagcccgtggtcccgctgctcgccgcccgacacgggctgcgcgtactacttctcctacggcgacggcacctccaccgacggcatcctcgccaccgagacgttcacgctcggcacggacgccgccgtgcgtggcgtcgcctccgggtgcgggacggagaacctcggcagcatagacaactccttcggcctggtcggcatggggagaggcccaccgtcgctggtgtcgctgaagaagaacgtcttgcactcgtccaccagctcccgcgtcgtcagcttcctctcgcgcccccgcgctcgccttgttccctcccagcagcagctacagcaggtcgttcgtcttcttcctcccgctgcagccgctggtgacgccgcgactcgatga

SEQ ID NO: 76837 - DNA, 1732 bp, Oryza sativa
  Clone ID: PAT_MRT4530_76795C.1
gcacgaggccaattcccaagccaaccaccacagcaaagcctcccttcctttcctctcttcgtcttcctcctccctcccctctctccacaggtcaaatcctccccttccttgcttgcaatcctagcaagctccaagatcgcggcaagctagcctcgagggaggcccgcctgcccgggcctcgggctccgggggcccggttcttgaggtttcttggtcgtggggtcgaggaggtggtgggtggtggtggctgcggcttggcgcgatgaacaaccacgcggcgggcgggagcacgagcaacggcggatccggggtcgacggggatggcggcggcggtggcggcgcggccaggaggaacaccaagatgcccaagtattccaagttcacgcagcaggagctgccggcttgtaaaccaattctaactccaaaatgggttgtatcggtgtttttccttgtcggcgtcatcttcgtaccagttggtgttgtttcgctgctagctgcacaaaatgttgttgagatagttgatcggtatgatgatgcatgcgtgccagccaacatgactgataacaagcttgcttacatccaaaacccaaacatatccaaagagtgcacaaggactctgacaattacagaggatatgaatcagccaatttttgtatactatcaacttgataatttctaccagaatcataggagatatgtgaagagccgaaatgatggacagctaagggacgctgcgaaggcaaaccagacatctgcctgtgaacctgagaaaaccacggcagatggaaaaccgattgttccttgtgggctgattgcttggagtttgttcaatgatacatatagcttcactcgtggcaatgagaacttgacagtagacaagaaggacatctcttggaaaagtgatagggagcacaaatttggcaaaaatgtctatccaagcaactttcagaatggtttgctcaaaggtggaggaacacttgatccggcaatcccattgagtgagcaagaggaccttatcgtttggatgcggactgcggcacttcctacattcagaaagttgtatgggagaatatatgttgacctcaagaagaatgataccataactgtgaagctgagtaacaactacaatacatataactttggtggcaagaaaaagctggtcctttctactgcaacctggcttggtgggaagaatgattttctaggatttgcgtatgttatagtcggaggggtctgctttttcttggcatttgctttcaccttgctatacctcataaaaccaaggaaattgggtgatcacaactacttgtcctggaacagacatcctggaggccgttaagacgtccaaaacacttgtcgcataaaaatggctcatccggtgacatgtatcatgtacttaatgatgatatactgaaaattgtcagggagtgtaatcaggtctttggtttgacctagaccttcatgtacatcttagcataagaaccacgctgttttgtttcattgtttcttttgttatttcggaactgcatatagcagtgatgaatagaatcggtactgattgttttgtgatgaatagaatcctatcattctgaatgcctaaaccgttctgttattggcttaagtggttcattcatcatgctgatatgcatgcttcagtaataaaacaaacaaactgtcttctgataatgggaatatgggattgaataatttttaaaaaaaaaaaaaaaaaaaa

SEQ ID NO: 76838 - DNA, 1371 bp, Oryza sativa
  Clone ID: PAT_MRT4530_76796C.1
atggcatcgatagccatatacgaagattgcaacaatttacataatggttttgatagggtttctattgagtattgtaatagagaggcaaaccagagctgcatcgacatcgagaagggcgtggtctggaacgccgccgagatcatcgccaaggccagcttcggcatcggcaccgacgatgacgccaccggcgctggggcgagcgcgggggcgcgagaggaagctgacgacgcgggagctggtggacgagtgcaagacgttcttcttcagcgacaccagcgacggtgggcctctccccatgccgaccaggccgaaggagttgtctatgctgccgaggttctccgtcccgcacccggaggcgacgccacgcacggcggcgtccgtgccgagcgtgaacgtctcggtggcgaggatgccgtcggtggaggtgccgtcgccgtaggagaagtagtacgcgcagcccgtgtcgggcggcgagcagcgggaccacgggctctggagcgcctggcacatcggcgagcagcacgacacgttggcgcacgtcacggacctggccgacgcgtacagcggcgccggctgtgggaagcacctccggcacggcgcgtcgtactgcgtccagatgaggtcgctacccgtgtcgagcactgcggtgagcgggagcggctgtcgtggacgctgctgatgctggcggcgcacccggagtggcaggcggcggtgcgggaggaggtggtggaggcggccgggcggtcgggcctcctcgacgcggcggcgctggggaagctgacgaagatggggtgcgtgctgaacgaggtgctccggctgtaccagccgtcgccgaacgtgcaaaggcaggcgctgcaggacgtagtggtggtgattccgagggcgccgaatgacagcatctgcgcggcgctgtggaggcggcgtggctggcgacagcgaggtcgccgctcgcccgctcacccaccgtggctccgtatggggagaggcggcggcgcccgctgctcccgccgtcgcgggcggtcgcgccggccgcctcctctccccctctccagcttcttccccgcgcgtcgcagcgcccgctgcgccggcagccgcgcccgctccgccgtcggccgcacacctgcatcttcctgcctaggcgatataaaggtgcttatcaattgccagaacaacaagaagttactaggtcgtgtgagggcatttgatagccattgcaacatggttcttgagaatgtcagggagatgtggaccgaggtaccaaagactggtaaaggcaagaagaaggctcttccagtgaacaaggacaggttcatcagcaagatgttcctacgtggggactcggtcatcattgtgctcaaaaacccgaaatga

SEQ ID NO: 76839 - DNA, 1291 bp, Oryza sativa
  Clone ID: PAT_MRT4530_76797C.1
ctctctctatacgtagcctcggtgggtgagcgggcgagcggcgacctcgctgtcgccagccacgccgcctccacagcgccgcgcagatgctgtcattcggcgccctcggaatcaccaccactacgtcctgcagcgcctgcctttgcacgttcggcgacggctggtacagccggagcacctcgttcagcacgcaccccatcttcgtcagcttccccagcgccgccgcgtcgaggaggcccgaccgcccggccgcctccaccacctcctcccgcaccgccgcctgccactccgggtgcgccgccagcatcagcagcgtccacgacagccgctcccgctcaccgcagtgctcgacacgggtagcgacctcatctggacgcagtacgacgcgccgtgccggaggtgcttcccacagccggcgccgctgtacgcgtcggccaggtccgtgacgtgcgccaacgtgtcgtgctgctcgccgatgtgccaggcgctccagagcccgtggtcccgctgctcgccgcccgacacgggctgcgcgtactacttctcctacggcgacggcacctccaccgacggcatcctcgccaccgagacgttcacgctcggcacggacgccgccgtgcgtggcgtcgcctccgggtgcgggacggagaacctcggcagcatagacaactccttcggcctggtcggcatggggagaggcccaccgtcgctggtgtcgctgaagaagaacgtcttgcactcgtccaccagctcccgcgtcgtcagcttcctctcgcgcccccgcgctcgccttgttccctcccagcagcagctacagcaggtcgttcgtcttcttcctcccgctgcagccgctgcttccacgcctcatagttggcgcggcacgccgacgaggcgggtggagcggaacagcatcgcctgcatggcctgcagcttgtggaagaccccagcgccggtggcgtcatcgtcggtgccgatgccgaagctggccttggcgatgatctcggcggcgttccagaccacgcccttctcgatgtcgatgcagctctaccccgacaccaccatgtcgctccactcgcccagcatcttcgacgtcgtctccggatggggagaggcgggcgctagccgccgctcccgccgtcgcgggcgttcgcgccggccgcctcctctccccctctcccgcttcttccccgcgcgccgcagcgcccgctgcgccggcagccgcgcctgctcagccgtcggccgcacacccacatctgcccgcctgcgcgtgagaactaacaagatgagaaga

SEQ ID NO: 76840 - DNA, 255 bp, Oryza sativa
  Clone ID: PAT_MRT4530_76798C.1
atgggggtcctcaaggtgtcaagcttgtgcttcctgctgatcatgccactcctgttaacttcaggtgtgtttgcagggacagtgaggacagaaggctgcggcgacaccttcttcagcaggacgtacaagtcgctgttctgcaggaaagggccgtgcagggagcactgcgacaacgagggcgccgatggtggctattgcatcttcttctacctcttcgtccgctgcatctgcaacgagaaatgcagctcaaaatag

SEQ ID NO: 76841 - DNA, 503 bp, Oryza sativa
  Clone ID: PAT_MRT4530_76799C.1
ccatcgcctcctcctcctcctccgccttccgcctctcaccaccacggcttccagctctggccgtagcagcagcagcgcgcgcgcgggtgcctgtgcccgccgctgctcacggctcctcgccgccggcttgtgcctccgatacggggtgcgagggggtctggaaaccggcggatctcggccgctcgccgccggagtccggcacgggtggaggagtacggcgacccgcttttttcttagcgattttctttcctcttctctcaggctgagctccccaagcgccgtgaattggtaggacttttgtgggaggcgctggtttctgctctactcacagcaagtttctaaagactcggaagcaattgattgtgaagtattcctttcagttcggcttgaagtagtcctctcagaccattgccgcatataagagtagcttattaccttgtataggaaaaagtagaaagcttattccgagcatgtcttgttcataatagactggactctttgat

SEQ ID NO: 76842 - DNA, 1602 bp, Oryza sativa
  Clone ID: PAT_MRT4530_7679C.1
atggctgacaatgagaaaggcaataaggtcagaagtcaggacattagtaccttaagctcccgagtgaatgaagcaccagacaccagttgtgtgacactggtccaacacctgattaaccagaaccgattgcttatagagatactacagcagcatcagacgccaattctgaacccgagtcaaatacgacctcaagtgcagttggaggcagtccaagcactcacaccacaagtcagcatgccgccagcatcccgaaggacccatggtgacgtgccacatgttgacccaaaagaagcaagtaacatttgctttatgtgtgaggagcaagggcactatgcaagggagcgtcctcagcagaaaagaaaaacaccaatgcgaaccgaagatgaagtccgtaagatgatcattactagcacagaatggcctccaccaggaatgaccagacgtcagagaagaaataccttccgaggtgcaccacagttgacagagcatcttttagctaatggaggtagagtgtctgatagtgaagattcagatcaagtctcctcagatgatgaagatgaaatggaacgtaaggcatgctctcgttgtggagaaatcggtcatgtcgccagctcatgtgccactatatgcgttcattgcgaggaagaccatccacccgacaggtgtccaacgagcaggatcacttgtttcttttgtgaaggaactgatcatgtaccaaaagattgtcaattcagttttctgctgacgaagaagatggctaaccaacccgccagttccaacggagagaagcatcaaggcaacaccaatcctcgccaagattacagtttcagcctaactccagtgccaggacagaggaatcgaaatgagaaaagaaaatgccgagtccgggaagacatctgttgcttcaattgtcaaggaatgggtcatttcgccgacaagtgcccaaaaccgagaaacatagctgccggcacgtcagtccacgcaactccctgcaatcagaagcttgcacctcaacgaattgtcatccatgcatcccgaagcagtcctatagcccgcgttgcaacagctccaattccaatgaatgcactaccacaaggtgtcaatgctcaatttcagccccagccaccagctgacaagacagaggccagtatctgcgttgtacctttggaggttccaatacagcagctgagaaatcaagtacaagatgaagaacccgagttgaagaagggcattactccgaaaactgtccccaaccaaggcaaaatcgacctccacattaccgccaatttacacgaagcagacattccaatcgtattgtggtcactggagcaaacgccgtaccctggtaacttgtctgaggttgactccgaagataggaatcatgagaagttctggaacggaagcatcactgcactaccgcaacctagtctgagtcagccaaaaggtgcaccctggtccaagtcaggtgaagagaagattccatcctcaacaggaggtcaagccaagcagttccgagtggtgaagttttgctggaagtttgtcaagacgcaacggaagaagtcagacaagaagagaagaccgcccaacctatcttcttgctag

SEQ ID NO: 76843 - DNA, 285 bp, Oryza sativa
  Clone ID: PAT_MRT4530_767C.1
ctacatcctgatggccgcaccagtgttggccgtatgggctggcttcatcagtggaccagaaatctccttcctggcattcttgctcgacccaagccgaccgccgtcaccggccagaggctgcaaaacccccgctcgtcgccgcctcacgccagcctcaccccactggcgccaccggcggccgaaggcggcagatttggcgccgtcgtgcgtggatctggcccccttgcgggcagatcgggatggagcggtgccggcggaggaggtcgcgcagatcgtcgtcggcat

SEQ ID NO: 76844 - DNA, 1677 bp, Oryza sativa
  Clone ID: PAT_MRT4530_76800C.1
atggccaagaccaagctcttccccgccctcttctccctcctcctccacggcggcgccgccacattgccgccgccgcgtgttcccgccgtgaccgtccacgggtgcacgcctcccgcggcgcggctctccgccggcggcgagaagacggtgacgatggtcgtcgacgtcgagggcgcgctgctccgctcgtcgtcgtcgcgctcgctcttcccctacttcatgctggtcgccgtcgaggccgggagcttcctccgcggcctcctcctcctcctcctctaccccgtcatctccctcctcgccggcgccggcggcggcgacgtggcggtgagggccatggcggcggtggcgttctgcgggctgcgcgagtcgcggttccgcgccggccgcaccgtgctgccgcggtggctcctcgacgacgtcgggaaggaggcggtcgacgccatcgtcacactcacacggcggcgttcgtcgccggcggcgacggcgacggtggtgtgggcgagcagcatgccgagggtgatggtggagccgttcttgagagagtacatggcggcggcggagggaggaggcgaggtggtggtggcggcgagggagatgaaggtggtgtgggggttctacactggggtcatggaggacggtggcgaggtggcggcggcgtcgccggaggtgaggagggcgatggaaggggtcgatgacgtcgttggtttctcgggaggatccatggatttgctccggagtcctttggtgtcattttgcaaggaggtgtacgtggtgagccacgaggagaagagcaagtggcggccattgccgcggcggcgcgagtaccctcgccccctcgtcttccacgacggccgcctcgccttcctcccgacgccgctcgccgccgccgccatgctcgtctggctccccttcggcgccgccctcgccgccacccgcctcgccgtcgcgctcgccctcccctaccgccacgccacgctcctcctcgccgccaccggccagtcctggcgcctcaggggctcgcccccgcccacgcccacgccgccgccgcggcgccaccggcgagcggcggcgcgggcagctctacgtgtgcaaccaccgcacgctgatcgacccggtgtacgtgtccatcgcgctggaccgccccgtgcgcgccgtgtcgtacagcctcagccgcgtctccgacctcctctccccgatcggcgccaccgtgcgcctcgccagggaccgcgcccacgacggcgccgccatggcgcgcctcctcgaggcggggggcccacgtcgtcgtctgccccgaggggaccacctgccgggagccgtacctgctgcggttcagcccgctgttcgcggagcctcgccgacggcgtcgtgcccgtggcgctcgccgccgaggcggcggcgttccacggcacgacggccggcgggtggaagtccatggacgcgctgtgctacctggccaacccgaggatgtgctacacggtggagttcctccccgccgtcgacgcgtcgccggtgagggaggggaaggcggcgagcaccgagctggccaacgccgtgcagcggcgggtggcggaggcgctcgggtacgagagcaccatgctcaccaggaaggacaagtacctcatgctcgccggcaacgacggcgtcgtccgccgccgcggcgacgtcggcgccaagtaa

SEQ ID NO: 76845 - DNA, 366 bp, Oryza sativa
  Clone ID: PAT_MRT4530_76801C.1
ttttgtttttttttttttttttgtttttttttttttttttttttttttactttttaagaatttgaaatttagcgaataccattaattttttgaagggcggaaaatacatggagaaaaaacagcggaatgggaatacgggcgcaacattgaggaataaacccccccccaagactttatgggaagggaattttcttggtgaaaaaaaaacatggacattggaagggaccaaaaaagggaaattaaagatcaaaacacggagatcgaacaaggggctcggggggggaacgagccccccttttgcagggaaaaaagcaagaaaaatttttcaaagaaaaaaacgggctggatggcaaacgggttcgggct

SEQ ID NO: 76846 - DNA, 402 bp, Oryza sativa
  Clone ID: PAT_MRT4530_76802C.1
atggccttctccccgaccatccacctccaccacccacattgcctcctcctctctccaaccccttgtctatctccccctaccacccatggctctccgcctgatcgagcccccgccgccatgacccccttcgtcgtccctcctctactctcgacctcctcccgagcccttcccctccttcgacttcggatgaggatgcacgggcttggagcgggaggtggagagggcaaggagctcgcttgctccactctggctgcttcacccaccgctcgctccactctgcccttctcctcgcaggggagagaaagggggaacatagcgatgctcacaaaaatgcgtttaaacgcatttaattctggtttaggaatcacctggtccatattgggccgacccgaaccagattaa

SEQ ID NO: 76847 - DNA, 289 bp, Oryza sativa
  unsure (1)..(289): unsure at all n locations
  Clone ID: PAT_MRT4530_76803C.1
tcactaatgngggaataagcttgcggcgctctacggcactaagtctctttccgaattcttggccaaatagggcacaaatgccctatctggagtctgattaaaatcgtaatcctgtataactgccacctgtgtcaaatcccgatgccttaacagttaaacccggggtgccaaccgaatgaattaactgacaatacttgggtggctcttgattgacctttttcacattggaaaccttgcgctccctgtccgtttatcaatcgggaaacccgccgggacaagtggattgatg

SEQ ID NO: 76848 - DNA, 419 bp, Oryza sativa
  Clone ID: PAT_MRT4530_76804C.1
ttcggagtccgtcgtcgtgttcaacttggagttatacatacaccaccgtggtcggggaggcgatccaccggtggcaaggagaggcgacggtactgcgggatgctgagaacccgcagctgtttggcaacgggatgctggtggccttgtacggaaagaggttcgtgctgggccgggaaggggcaccagttaaagctgacaagatgctgttagatcctggaggcatgctatggcagagggcacatggtacctgtcagacataaggacggtctttgtcgccagcacgcctgctgggaacttatctgctgttgatatgcgccctgtggtatgcgcatggtgagaaaatcaatcaggcaatatggcagtgtaacgacatatcgggtggaggtgagcccggtgtaccagagatccagaacagggcc

SEQ ID NO: 76849 - DNA, 2077 bp, Oryza sativa
  Clone ID: PAT_MRT4530_76805C.1
ttaccaaatttcactgtcaaggaaatcggcagccgaccagctcacaatcacattcccggccacctcacgcctgctaatcccgccgctcttaatacaggacgcggaggctgcgccaccgccgccgccgccgctgccgctgccggccacttcctccaccctcccctgagcctgtgcgcgcccaagctccacttcgtctcgcctctgaaccctagctccccctggtggtgtctcgaattctctcgtcgcgccatcgccatcgaacccggcggtgatttcgtttgcttggtgttcaagttgtgaggagacaatatgaggcagtggttttgttgtaattgccactttgacgaggaggatgaccatgggaaggaacgctccaatgctcagggcaataagatggatgccaagcaaaagtcttcaaaacctcctgctggtcaacctgaaccagagatagccccacttacaattgatgtccctgagttgtcactggaggacttaaaacaaaaaaccgacaattttggatcaaatgctctgattggtgaaggttcatatggacgagtataccatgccactttggatgatgggaggcaagcagcagttaaaaaattggatgcatctgaaaatgagcctaacgacgaattcttgaaacaggtctcccaggcatcaaggctaaagcatgaaaatcttgtggagatgttgggttactgtgtagagggcaattatcgtatactggcatacgaatttgcgaccatgggttcccttcatgatgttctccatggaagaaaaggagttcaaggtgcgcagcctggtcctgtacttgattggacgcagagggtaaaaattgctatagaggcagcaaaaggcttagagtacctgcatgagaaggttcagccttcaatcattcatcgggacatcagatcaagcaatgtacttctgtttgaggacttcaaggcaaaaattgcagatttcaatctcttaaatcaagctccagatatggcagcacgccttcattcaactcgtgtattaggaacctttggatatcatgcaccagaggtgcacataccttcaggttcatatcgaatagacatcaccagagctatcttatgtgctcctaagatcagaactgtgtactctcagtgcctccaaagtaacaccagaggcagtggctggctggcagccctgccgaccagggccacatgcatgaagcctcaaatgtggaggccatggcacaatactgtgagacttactgacctaaatgacaatggaccaaacagtctgacaatggtaccatgtaggtgttgccaaaaaacaactttacttattttgggtgtgattatgccatttaagttaattgtaatttctttagaaacaagtcttttgtttgctagtttgtccagatatgctatgactggccagctgacgcagaagagtgatgtgtacagttttggtgtagttcttttggaactcctgactggaaggaaaccagtggaccacacaatgcctcggggacagcaaagtctagtcacttgggctactcctagattaagcgaagacaaggtcaaacaatgtgtagatcctaggttaaagagtgaatatcctccaaagggagttgctaagcttgctgcggtggcagctctttgtgtccaatacgaagcagagttcaggcccaacatgagcattgttgtcaaggcgctctctcctctgcttcaacaaaaaccagcagtgccagctgcctcagagccggcgccagcaactgagaattaagatgttagctcatggtagacctcccggcacatgccagttcgtaatcagcgcattctgtgtgtaattgcaattggtttaagaagtttcttttgtggggttctctgttggatgcagatcacatggatttctctttgccttttgttgctaccttaggtttgcggtttgagatttgtgctgtacattggtctgtaggtgcaaagaatactgcttcctctcttttccacagcttcacttcagaggtgtcaaatactccagacatcgtttgaactttcaatagatgcaacatgttctgaatttcaaaaaaaaaaaaaaaaaa

SEQ ID NO: 76850 - DNA, 310 bp, Oryza sativa
  unsure (1)..(310): unsure at all n locations
  Clone ID: PAT_MRT4530_76806C.1
ggccgattttaaccctgtcgggtggacangtgtgatgcaaccccctgggagtgctgtcagatatggtgagccaccaaatgctatagcttggagcaagagtgttangttcactcagttgggttccccacggtaagttgcctcagagccactgctataactatgaaattcaacttgagctgtggaggaaaatgatttggatgttttcagatctagacaggtctgaaatgtatcaactcctcaatgtggtctaccacttttattaattattatccccataatgtacaattcctttttataaaaaaaaaaaaaa

SEQ ID NO: 76851 - DNA, 513 bp, Oryza sativa
  Clone ID: PAT_MRT4530_76807C.1
atccaaacaacaagtgaaaacccaatcctcctttaatggttccctctttaacaaaataactacacaataaataaatatgaaccccgcgagcctaaaaagtatgcgtgcacgaaaattgggggtccatataaccaaaatccaaggggccaaattccaaataacacgacctttagggttttttaaacaccacaaattgaggcctcctcccccttaatcaaagggaaggggctcaactggtcggttgggaggaggtgccggcgccgcgggcttagcccctaaaaaaactgctaaaggcgcgacagaccgccttaaccctgcgtaaatcccggtacccaaaaatgttgctccttgcacaccgaacacgcgtggttgtacccggcgcaatctcccggcgggaagggtgactgcccccccacgtctgcttcataccggggtccaccctggtcccattgagcgccggcaccaggctgggaggaagtccatgggcacgtagaatgcttctatgagggatat

SEQ ID NO: 76852 - DNA, 175 bp, Oryza sativa
  unsure (1)..(175): unsure at all n locations
  Clone ID: PAT_MRT4530_76808C.1
aatgtacggtaagggccgtancngcactcaatttctggcatgcgtagcacacatcaccagcttcaggggncaaccanacatcctcccatcctcaatatatcctagcatagcttgcctgtngcctagcgttccagcatagcattccagcattagtgtcacccgcagcagcacattg

SEQ ID NO: 76853 - DNA, 348 bp, Oryza sativa
  Clone ID: PAT_MRT4530_76809C.1
atggactgggtgtgtcactactacccaatatcaggagcagccattcaccaccaccctacccgccgttggatccacctatcctcccgcgtgccgagaaggggaagagacaagggagggcggagaggcgcgcaagccactcctgtcggcaccacccacgtcggaggaggaggagccagtggatccgtcaacctcgtcttctccgtcatcgcctgctacccatcatgtggttgtctgaccctgccgctctcgtctcctgtcacggccacctacgtcggaggaggaggcaccaacggatcccatgtccccatcatctccgccatcacccactacccgtcgcgtggccacccg

SEQ ID NO: 76854 - DNA, 633 bp, Oryza sativa
  Clone ID: PAT_MRT4530_7680C.1
atggccaaccgaggggaaggggcgcgcggactgggtccacgggagtggggcccacgcagcagcctcacggtccacggtggaccgggtgcacccgggctcacactggccggcgccgtgggtcccacgcgtcagtcgcacctaaaggcgcgggcggctgacggccgggccccacgcggcagccactcggcgcgcccgagggcggccaagccggcgcagccggcgggaggcggcgcgcccgcgccccgatggtcgccgccggcgaccaccggcgtggcggagcggcggccgagagaggggaagggaagggggaaaagaagcggcggtccacggctcaccctaggtcgacggcgacgacgaaaaaggcggccggagcggaggaaggcggcggtgcggctcgggttgacggggtcgacggcgttccggcggtcggcgagcgaaacggaggggtggacgaggtcggcgaggatgcggcgaagccgaaggaggcggcgccgaggtgggaggtggtccggggcgacgacggcggcggaccggagctcggcaacgacggcggagagagagagcgacggcgcgagctcgattccggtgaggacgaagggcggcgaggggcggaaacggacggaggaggcataa

SEQ ID NO: 76855 - DNA, 603 bp, Oryza sativa
  Clone ID: PAT_MRT4530_76810C.1
atggaggattttggtcgacgtgtcgcgtgcgcccgcgaccatactaggcgactcgtccccacgcagagcagcgcaaaacttcatccgaatagagtcagtcggtcgaaccgtcaaaccggtctgtctgaccgcaactttaccttcgctccaaccggcgccaccaggccagtccgactgacatcatccagcgacgaaaacactgtgcttgctgatgggcgataccgagctaaccatacgcgcgcgcgtcgttgtgctctcccggagaggttgtcgccggccaccagctcccgttctcctgcacgagctaactgtcactcagacagtcagacccgtctaatagcggcgtcgggctgtcatggatgcttgtcatcagttatcatgttgaaattgtgtagcatggaaaaaagcggaatcagatcttggactggttttacttttctatatatgttcaacactcagtctccggaacttctgggttggagacaggccagccatgaaggcttcgttaggattgcccaagcaagcaagtccacaggagtgacaaaggggcagcgaaacttggtgaaacaagacgaggcaagtccacatgagtgcgaagcgtgg

SEQ ID NO: 76856 - DNA, 339 bp, Oryza sativa
  Clone ID: PAT_MRT4530_76811C.1
atgggtgataaacaagagaccgaatccacaaagacacattttgtcgatcccactcacaaccccaccaccgatgccacgctgcaacaggatgagcatgagagtgatctccccgaagagtttggggtgacaagccctcctccactgtcgccacccccttacccgctgtcgccatcgatggaagatgatggcatgatctacgcgaggacttgggctttcatcgacgacggcggtgaccttgatattatacaagaggacatttacaactttcgatatgaccagaccccgccaagagatgctcagtcaccagtaacccggttcaagcgccataaacgtgattag

SEQ ID NO: 76857 - DNA, 432 bp, Oryza sativa
  Clone ID: PAT_MRT4530_76812C.1
atgggtgataaacaagagaccgaatccacaaagacacattttgtcgatcccactcacaaccccaccaccgatgccacgctgcaacaggatgagcatgagagtgatctccccgaagagtttggggtgacaagccctcctccactgtcgccacccccttacccgctgtcgccatcgatggaagatgatggcatgatctacgcggaggacttggggtacatgtctaccccatgcccttcccccccttcggacgtcgacgatctaaatccgccggaagaccccaacaacaggattattctgcacccagccttcgtcgacgacggcggtgaccttgatattatacaagaggacatttacaactttcgatatgaccagaccccgccaagagatgctcagtcaccagcaacccggttcaagcgccataaacgtgattag

SEQ ID NO: 76858 - DNA, 2497 bp, Oryza sativa
  Clone ID: PAT_MRT4530_76813C.1
atgaggagcatccatcaccccaatctcctcctcctccgccgccgccgctgccgccgcctctccggcgcaaatcgccgccccgaaaccccaccgagatccagcctctccaccaaatccgccgcgaacccaccggaccccgccgaccctgcccgcgccgcctcgatcttggccgaggatgactggttcccccgtctcaacgccgagttcgccgccgcgctcccccgcctcggcccccgcttcgtcgtccgcgcgcttcgtgcggcggcggagagggaggggttgggggagccgctgctctgcgtgcggctctacgtgtgggcgtcgcggttcggcgcccacttcgcgcgcgacggcggcgtgcggcgggcgctcgtgggcgcgctgtggcggcgcgggccggtggtgctgtcggggaggctggtggcggaggtgaggggttgcgggtgcgaggtgtcggaggagctggtgtgcgcgctggtggagagctggggcaggctggggctcgcacgctacgcgcacgaggtgttcgtgcaaatgccgcggctgggtctgaggcccagcacggcggtgtacaacgcgctgatcgcggcgtcggtgagggcgggggccgtcgacaccgcgtacctcaggttccagcagatgcccgccgacgggtgccggcccgaccacttcacgtacaactcgctcgtccacggcgtgtgccggcgcgggatcgtcgatgaggcggtccggctggtgaggcagatggagggggaggggatcaggccgaacgtgttcacgtacaccatgctggtggacgggttctgcaatgccggcagggtggaggaggcgttccgtatgctggacaagatgaaggagaagggcgtggcgccgagcgaggccacttacaggacactggttcatggcgtgtttcgctgcttggagagagacaaggcatacaggatgttgagtgattggctaggccatgagacgtcccttcacccgagcgcatgccacacgatgctgtattgcctgtcgaagaaggacatggccaaagaggcagttgagtttgagaagaggatgagtgctaggggttatctccttgacagcacagcatttggcattgtcatgtcttgtgctctgaaatgcctggaggtgagtgatctatgtgagttactagattctttcattaagaatggcgggaatccaggatttgatgtatatattatggtaatcaaatccttgctgaactgcaagaatttttcgaaggcaaaccactatttggggcacatggttttaaagggactcttgtctagtgtgatgtcttacaacatggtgatagattgcttcgtgaaggccggggcagttgataaagcagaggagattgtcaaggagatgcaagacaaaggtttcttgcctaaccttgtcacctttaacacactaataagtggatattcaaaattagggaatgtacataatgcaaaggttgttcttaagatgcttatggaacatggtttcatgccagatatcattacatttacctctcttattgatggcctgtgcaatacccatcaactggatgatgcttttgtttgctttgaagagatggcagagtggggtgttagaccaaatgctcagacttacaatgtattaatgcacacactttgttcagcagggcatgttaacaaggctattgatcttcttaataaaatgaaaatagatggcgttactcctgatgcatattccttcaatgccctcatcttgagtttttgccggatgaggaaggtagataaagctgaagatattttcaatgacatggtgagatttggtgtggttccagacagttacacatacaattccctgataaaagctctatgtgatgaaaggagagtcaataaggccaaagaaattctatttgcaagggagcgcagtggctgcagcacgagcaataatcaatcatattggccaattgttgctgcacttgcaaaaatgggtcaattcagtgaggcaggagagttaatggataaatacctcagtagaaatgctcagtcgagttgtggctctaatcagagcatagagtctgaagttgctgttcaagttgtcaatgcgtgaagtgtgatctattgactgcatgctaatttacacatgaatgatgccctatcctcagtgaaaggtgcaaaacagcctcatctttgcttaagatgaaggatttgtaccttccaacgccatagagatattaagctctatggcatcgatggaatttcaaaaattatatggatttaagctttctactcaggaaacaattgcagaacaaatcggtgcattccttttaacactttcacatgttctggtaactttggtgcatcataggcttcataaaaagttcactatttttgatcttgtgaatactgctaaagacaagacataagctaagaaaaacttaactgcatttgtaattttccttgtatttgattagctgtgaagcatcatcatacaaattgaaagcgaaaacattcaa

SEQ ID NO: 76859 - DNA, 892 bp, Oryza sativa
  Clone ID: PAT_MRT4530_76814C.1
tatttttgaaaaggaaaaagggatttattgcgtcagcaactagggtttcggtggaccgggcgcacgggcgatggttcacgcgaacggacagccgagatcaacttgatccaaaacggacggccgagatccatcggtccacgaccggctcacgggagagggcgacgatgacgtcggcgatgacgtcaccaccggcggtggctcggacggctcggacggcgcacgctcgccggcgaacggcggcacttcggcacgaacggagagcaccaatgggtagcggacggcgcggcgaactcaccggtgaccaaaggagcggcggaggaggagatcgggtcgacggcggcgacggtgctccggcgatcttcggtgacggcgaagcggcggacgaggacggcgacgacttggtgatcccgacggtggacttcccgagcgacgacgacggctggaacggtggcggcgcgcggctggagcgacggcggcgacggcggctcgaggtctcacggcgctagggcgattccgacgacgagaggcgaaggcgagggtggcggcgggggctaggaggcagcggcgaaggcctacggctgccggcgacgagaaggaaaggtcgggcttcggaggaaagaggccgatccgaatcgaactcgattccacgaacttccaaaacgatttagccgatgtttccaaaagggaaaaggtagaggagatcccgaggatcatttcccctctatcaattcggccggaaacggaaaggatcgatgggacccacctgtcagcgacagcgagggcgcgcgcgcgggcggcggactgggccggctgggccgaggagagagagaagggttttgggccgactttcggcccaaagccaaaagaagactttttaaaacctttttcaatt

SEQ ID NO: 76860 - DNA, 861 bp, Oryza sativa
  Clone ID: PAT_MRT4530_76815C.1
atgacgtcggcgatgacgtcaccaccggcggtggctcggacggctcggacggcgcacgctcgccggcgaacggcggcacttcggcacgaacggagagcaccaatgggtagcggacggcgcggcgaactcaccggtgaccaaaggagcggcggaggaggaacggacggcaccggcggcgaggaggaaacggcggaggagatcgggtcgacggcggcgacggtgctccggcgatcttcggtgacggcgaagcggcggacgaggacggcgacgacttggtgatcccgacggtggacttcccgagcgacgacgacggctggaacggtggcggcgcgcggctggagcgacggcggcgacggcggctcgaggtctcacggcgctagggcgattccgacgacgagaggcgaaggcgagggtggcggcgggtagaggagacaccggggagccttttaaaggggctaggaggcagcggcgaaggcctacggctgccggcgacgagaaggaaaggtcgggcttcggaggaaagaggccgatccgaatcgaactcgattccacgaacttccaaaacgatttagccgatgtttccaaaagggaaaaggtagaggagatcccgaggatcatttcccctctatcaattcggccggaaacggaaaggatcgatcgaatttggaagggaacggcggcggcgcgaaactagggtttcgggcggcggccgaccggaggaagacgacgaccctgacaagcgggacccacctgtcagcgacagcgagggcgcgcgcgcgggcggcggactgggccggctgggccgaggagagagagaagggttttgggccgactttcggcccaaagccaaaagaagacttt

SEQ ID NO: 76861 - DNA, 357 bp, Oryza sativa
  Clone ID: PAT_MRT4530_76816C.1
atgtccgccatcgacccgctggatctgcagcttgtgctgcaattagatcctcaggccgtgcttgtcgatgagctcgcttcgttgccgatctggtggtctcgaggcccgatgccacaagatctggtagtcccatgttctgccacactcttgctcctccttatcatcgacccacccgcacccatctctgacttgtcatcgtccgacttcggccaactagatccactagtcgggtggcttgccagatctgacagccttcagcctcctcgttacccaacatggcagtggtggcagcaactgcacgaaacgcacgtgggaaaagaggcgacgataggggtgcgcataaacaacggtgcctag

SEQ ID NO: 76862 - DNA, 306 bp, Oryza sativa
  Clone ID: PAT_MRT4530_76817C.1
atggcggacggcggaggacacggagcggctgagtgtggcgggcggagcgggcggcggccgacctcaccctcgtgcctcttccggcggtcatggcggcggcggcgggtggagaaagaggagttgcagaggcggcaggagagaggagcggcagccggcgggaaagaggagcggaagcaggcagctgcgtcgccgacttctgaggagcagggccgttgcttgccgatctcaattccgaagaacgagaatgctgacgatgatggaacagagttgtcatgcctcatctgtttgataggctcggctgcttga

SEQ ID NO: 76863 - DNA, 693 bp, Oryza sativa
  Clone ID: PAT_MRT4530_76818C.1
atggctcttctcggcgtcagttatcctcgaggaaagcaggcgccacacacagcaagagataaggaggaaaaacgggcaagcccgccgcggcggtggcagagcaagcggcgacggacggcggcgcagggcaagggaagaaacaataacgtcaggcgctacgactcgttcaagacgtggtccgggaagcttgagcggcagctcgcccatctggctggcgccgggccggagttccccgaggaggaggaggacggttgcgacgccatcagcagccaccacaccaagtccatgcctcaggttgatcgcttcttcgccgcactggagtgccccgaactggacaaactccggtcatcggaggagctggtgcttccgttggacaaaacgtggccgtttctgctccggttcccggtgtcggcgttcgccatctacgcttgcaaggtggtcttcttcttcgaggccgtccttgagcggcaagggagttgggcggcaagcgggggaggaggtgggtgcgctcaccgcgaggagcggggcgatgtggtcgcggtggcagggatcccggcgagccgcgcagacgagggggagcggcgagccacgcagacaaggggtaggaggcgggggcgcagcggcgcgagggcggaggcggagtacatcgccggcctgcacgccatggcgatggcggcggcggcggcggcggcg

SEQ ID NO: 76864 - DNA, 569 bp, Oryza sativa
  Clone ID: PAT_MRT4530_76819C.1
acattcgcttgctttctctcccagagccgccgccgccgccattctcccctgcccctagctctcccctatctctcgccgtacgcactatcactcaaccatgagcgttgtgtaggacacttttgtgttcgaacgccatactgcacggacacatcgacgtggggacggtcatcgcgagccccatcgacatctactacgatattgtcaactccttccaagagaagtggctgttggtgtggtacctgaccactcccatgcagaacgtgcacaagggcgccgacacctactagtaccatgtgccctttcatcgaatcaccggccatttccactccttccagtacgtatacctcagctctgacgtacatcatgcactgtatggcttctatgacgacaagcttcccctcttgaacctctactcatgagcaacaattccaacattttcgtccacgagccaaaccccactccaagttcatgtatgaggataaccagctccatgaatttagctaccgagatggtgccatactcctaggggacgccctacattagttctacaacgacatcgatggatagct

SEQ ID NO: 76865 - DNA, 345 bp, Oryza sativa
  Clone ID: PAT_MRT4530_7681C.1
gggaaggggcaagggtccttttattccaaaaggcaaacaaaattttgaagccccccgaaaatgtttcccggaacaattaatcaaccaagtggggcatcatcaggggaatttttaccccaccgacatgggacgtttcactaatccgttgccaatcccttaggaacacgccaggctaaaaaaacccctgcaacttttcaaacgaaaaaataggccaagccaccccaaaatttaaaccaaattcaaaaacccttgtaagaacgcataaatagccgccctactacgggaacgagagagccaattagcatccggccggttataccccacacactgggggggaggacgggc

SEQ ID NO: 76866 - DNA, 307 bp, Oryza sativa
  Clone ID: PAT_MRT4530_76820C.1
ctgggcagcacaggcgattacttattgggcggcgtgcgggcagcggccaggcgacgacgtgcgggcggcggccaggcgcagctcctcctgccggcgagcaggcgtgcactctgcgcgggctaggcggcgggaggaggcgatggctacggcggctcgtcgcaggaggcgacgggggcaacccagccaggcaatggtggcggcggcagcgagcgggcggcggcgacaagcgggcgttggccatgcgcaccttctctcgctggtgagcaggcgcgcgctctgcgcgggctaggcggcgggaggaggcgat

SEQ ID NO: 76867 - DNA, 588 bp, Oryza sativa
  Clone ID: PAT_MRT4530_76821C.1
gcacgagggtgatgtataaaaaagatatacatgcatgggccatcctttttataatataactgttttcactttaatttatccttaatattaagtcttccggaatttttttggtcacttagatccattagtcaaaatatgttacctgaactttgtaagtgtaaggttgtatcgactattcaactatcaagtctaaagttataggttcatagccaacatgtgccctgaaagttatatgttaatatgtgatacggattgtttgagctgtgcgaaacatctgtagaatggaaactgtcaaggtacacgcatagctactataggattatgtgattttgaagttattaaaacattctctaccagatgaaattagtacctaaggttttccttcttgaattcataaatttgttgttaagtgtgagatcttattctggtagcagttaatctgaacagtttggttgaatgatgtttctggcctattaagatcaacaacacctttgagatttcagtagctttggaaatgcaagtgttaattccattgtttgtaaggtttagttataacttgatctggttcagctatatttgactgtagtc

SEQ ID NO: 76868 - DNA, 510 bp, Oryza sativa
  Clone ID: PAT_MRT4530_76822C.1
acttttattattcatagcataagttgcaccttgctattgaacaagtaaatcagtctcgataagcagggacgtcataagtggctgagatatactagatccgattagcaagttagaaatagcagaaaattagttcagtgagcacttaacctgcaattatacagcgagatattgatactttgatctggtcataaattcaatgtgcttctgttaattgttgaagttccaaaaatcatttattttctcacacaattacttcctgagagggtccttattaatttttaaagtttattatgaagtaaatttgttgtttccttttgtctctgcatgtcttattaacctaacagggcgatcgatgatgatatcagtggctatgattctaaagaagctagcatatgagcataatctatctgttctggtaattctactttagtctaatttgtgtgctaataattttcggcatttgcactgcacgctttgggttgagcatatctgcacaaggctttctaaaat

SEQ ID NO: 76869 - DNA, 770 bp, Oryza sativa
  Clone ID: PAT_MRT4530_76823C.1
cccggccggcagccggccggaggccggtctcgagtttttttttttttttttttttattgcgtctactgttaacaaatcatatctccaaatcctcattgtcgcacctctaaaagaagtaatatagagttagcagcccgatgaaaagtatttctgcatatacatccaccgtttaataccacattcacaaaaaagagtagcacctaacaagagaccgtccaacgtgcttttgctcatcacaaaacacttgacaccatattgccaaataacaatttactcataccatcagctcactcaaaacgtttactgggacccattgaatttcgccatcatctttgcaatgatggggcccaccttggggttggcttggtgcctcgcaaagctggcaggattgttcatcacatcttgaagagctgccataacctcagggtcaccaaatgctgccatcagatcagggtcattcagaattttactcatatcgacattcccaggaacacctccaggcatagcacccccagggaagccaccaggcatcccacctgggaaacctccaccaggcataccacctgggaaacctccaccaggcattcctcctgggaaacctccaccaggcatccctcctgggaagccccccctgggagatgcacctcccgatgagcgacttgatgattgctccttccgcttggccttgtcataagcagcctgtgcttctgcacgtcgatggaatcggtcacgctcagctctcttttcttccctctcttttcgcagccgtt

SEQ ID NO: 76870 - DNA, 184 bp, Oryza sativa
  Clone ID: PAT_MRT4530_76824C.1
aattagaagggctctgtaacagtgatggggagaaataatttacagacttcctacatactcataaaacacaagatttcaccaccaggttagtggcatacattatcctcccatcactagtcggctcggtgaaaagttcgaaacacatactgtgtaattgtaccatttatcttggactatatgtgtc

SEQ ID NO: 76871 - DNA, 222 bp, Oryza sativa
  Clone ID: PAT_MRT4530_76825C.1
atggcgcggctgcggcgactccgcttactcgcaatcgttcagctcgccgtggcgatctggctggcggccacgagtagctaccagtgcaagctcgacgccgtcccgccaccgccgccgccgccgaccgtgctggtggacggcggccctccaaaggcaaatcgccctccgccaccgtcgccgccggagggttgctccggccagcacttgcgcctacagccttag

SEQ ID NO: 76872 - DNA, 341 bp, Oryza sativa
  Clone ID: PAT_MRT4530_76826C.1
aaaaaatattggaatttttttttttatggaggaatgataaaaaagaaagaaaaaaagggaggaaaacaccatcggaagaaaggcaacaaagcaaagaagcaacaggggaagagaaaactagaggagcacgaacggcgggggcaaggacagcacgacaaggaaaggaaaaaaaaagcctgaatgatggagcaaacaaggaagaaaggaaaaaaacccacgaagaggccgtcggaagaaggtatgttgcagaagaaaggacataaccgccggcttcaccgggccgaacaaaaaaaccaaccgggggcaaggataaccggaacagcacaccattcaggaggaaa

SEQ ID NO: 76873 - DNA, 4725 bp, Oryza sativa
  Clone ID: PAT_MRT4530_76827C.1
atgacctcctggtcgcagcaggaggcggcggcgccgttgccgctgtgctgcgtggtcgccgtcgtgggcgtgcgcggcgccctcgccgccgacgccgagggcgcggcgctgctcgcgtcaaagcgcacgctgcgcggcggcgacacggccttgcctgactggaaacccgccgacgcttggccgtgccggtggacgggggtgaggtgcaatgccaatgggcgggtcaccgagctgagtctccagcacgttgacgtggtcggcggcgtgccggacggcctgcccgccgccatgggcaccacgctggagcggctagcggtcgccggcgccgagctgccggggcggatccgggcggagataggcaacctgcgggcgctgacccatctatacctcagcaacaagccgcaaaacttcgtcgtcctggacagcccgtgccataccgggagcaggcgcgagaccctgtacgtgatcttgaaccacctggagggcaccatcgcggacgccattgccaggctcaccgcgctccgcgagctcatcatcttcgacaaccagctcgacggcgccatcccggcgtccatcgggcagatggccagcctcgaggtgctccgcggcggcggcaacaagaacctccagggcgcgctcccgccggagatcggcaactgctccaagctcaccatgctcggcctcgccgagaccagcatctccggcccgctcccggcgaccctcggccagctcaagaacctcaacacgctcgccatctacacggcgctgctctccggcccaatcccgccggagctcggccggtgcaccagcctggagaacatctacctgtacgagaacgcgctgtccggctccatcccggcgcagctcggcggcctcgccaacctcaagaacctcctcctgtggcagaacaacctcgtcggcgtcatcccgccggagctcggcgcgtgcacgggcctcgccgtcgtcgacctgtccatgaacggcctcaccggccacatcccggcgtcgctcggcaacctctcgtcgctgcaggagctccagctcagcgtcaacaaggtgtccggccccatcccggccgagctgtcgcggtgcaccaacctcaccgacctcgagctcgacaacaaccagatctccggcgccataccggccgagctcggcaagctcacggcgctccgcatgctctacctctgggccaaccagctcaccggcaccatcccgccggagatcggcggctgcgccggcctcgagtcgctcgacctgtcgcagaacgcgctcaccgggcccatcccccgctccctcttccggctgccgcggctgtccaagctgctgctcatcgacaacaccctctccggcgagataccgccggagatcggcaactgcacgtcgctggtccggttcagggcgagcggcaaccacctcgccggcgacatacctcccgaggtcggtaagcttggcagcctcagcttcctcgacctcagcaccaacaggctctccggcgccatcccgccggagatcgccggctgccggaacctcacgttcgtcgacctccacggcaatgccatcgccggcgtgctgccgccgggacttttccagggcacgccgtcgctgcagtatcttgacctctcgtacaacgccatcggcggcgcgatcccggcgaacatcgggatgctcggcggcaactcgctcaccggcgcgattccggcgagcatcggcaagattcccgggctggagatcgctctcaacctcagctgcaacggcttgtccggcgcgatacccaaggggttcgccgggctggcgcggctcggcgtgctcgacgtgtcgcacaaccagctcaccggcgacctccagccgctgtccgcgctccagaacctcgtcgcgctcaacatctcgtacaacaacttcaccggccgcgcgccggagacggcgttcttcgcgaggctgccggcgagcgacgtggagggcaacccggggctgtgcctctcgcggtgccccggcgacgccagcgaccgggagcgcgcggcgcggcgcgccgcccgcgtcgcgaccgccgtgctcctctccgcgctcgtcgccctcctcgccgccgcggcgttcgtcctcttcggccggcgccggcagccgctgttcggccgcgggtcgacgagccccgccgacggcgacggcaaggacgccgacatgctgccgccgtgggacgtcacgctctaccagaagctggagatcagcgtgggcgacgtggcgcgcagcctcacgccggcgaacgtcatcggtcagggctggtccggggcggtgtaccgcgcgagcatcccgtccaccggcgtcgccatcgccgtcaagaagttccggtcctctgacgaggcgtccgtcgacgcgttcgcctgcgaggtcggcgtgctgccgcgcgtgcgccaccgcaacatcgtgcgcctcctcggctgggcggccaaccgccggacacgcctcctcttctacgactacctcccaaacggcaccctcggcggcctcctccacggcggcggcgccgccattggcgccgccgtggtggagtgggaggtgcggctctcgatcgccgtcggcgtggccgagggcctcgcctacctccaccacgactctgtgccggcgatcctccaccgcgacgtcaagtccgacaacatcctcctcggtgagcgctacgaggcgtgcctcgctgacttcggcctcgccagagtcgccgacgacggcgccaactcgtcgccgccgccgttcgccggatcgtacggatacatcgctcctgagtacgggtgtatgaccaagatcacgaccaagagcgacgtgtacagcttcggagtcgtgctactagagataatcaccggccgccgaccgatagaagcagctttcggcgagggccaaactgtggtgcaatgggtacgcgagcacctccaccggaaacgtgatcccgcggaggtgatcgactcgcggctacagggccgatcggatacccaagtccaagagatgttacaagctctcggaatcgccctactatgtgctagcacccgccccgaggaccggccgaccatgaaggatgtggcagcattgttacgtggccttcgacacgatgacagcgccgaggcccaaaaggccgggtctgggtcggccataaagtgggccgatccaagacagcccggctcaccaactaagccgatggcccaagcccaggcccattcccacaccagctcactggcctactcaacaaccgggagccccggcgagccgcccgcgagcacaccgccccctgcgcccaaagacccaaaccctaactcggcggccggcaaacgggctgctggcggcgggccggcaacaccctcgtggagttctccgaccaagacaacggcggcgcggaccgagcagtcctcctatatgggggacacagatgaaactgttgcttgtgagattaatcacactcaatctcaagacactgaaaccggagtgtcaactactggagtggtagatgcaagcaaggacaaggaggagcagcagcagtccaaggatggagagaaagttgatgaagaatccagaaaaagaaaaccaatggctctaagatctgatgtatgggaaagtttcagcaagggacatagaggggaggacattggaaaatcattagagaactgcttggctgagtggggcattgacaaggtttttacaataacagtagacaatgctagtgcaaacaataatgcaattaagtatatgagaagggtcttgaatgagtcaaaaggttgtgttgctgaaggagagtacattcatatgcgctgtgctgctcatattatcaacctaatagtaggtgatggcttgaaggaaattgagaagtaccaaaaagcatttgaaagatatagtgatgaagacccatactacaaattagaattagaaggagagaatggtccaggggtaccaacaagagcagattgggagaaggctaggaagatggctgattttcttgaacacttttatgacctcactctccgtgtttctgtacaaagtcgtacaacatctcacacttatttccatgagattgctgatgtattacttctgttgagagaatggtctcatagtgaagacaagttgagcaaggaaatgggtacaagaatgctaatgaagtactacaagtattggggagagaagtatggtgagaggcagggggacagagagaagagaggagagaaagataagggggatcaactactcaacttcactgtcttcttctgtgttgctattgatcctagatacaaactatcaaattgcattagaatgggaattaaggtgatgtttggggatacagtaggagaaaaacaacttaacagtgagggtggaagtggaactatcaaatctgaggtagacaagtatctatcagaagataatgagccggacacaccaaaatttgacattctaaagtggtggaaggccaattcaacaagattcccaatattatctcatttggcccgtgatcttttggcaattcctatcacctcagttgcctctgaatcagccttcagtgctggtgggcgaactctagatgactttaggacctcactaaccccaagaatggttgagcgtcttgtttgtgctaatgattggcttcgtggaggaaactatgttagtgttgaagaggacagcgaacaaatggctttgcttgaggaagaacttggtgacctatctatttccaaggaagatactccagctgcaactcagtaa

SEQ ID NO: 76874 - DNA, 2214 bp, Oryza sativa
  Clone ID: PAT_MRT4530_76828C.1
atgggggacacagatgaaactgttgcttgtgagattaatcacactcaatctcaagacactaaaaccggagtgtcaactactggagtggtagatgcaagcaaggacaaggaggagcagcagcagtccaaggatgaagagaaagctgatgaagaatccagaaaaagaaaaccaatggctctaagatctgatgtatgggaaagtttcagcaaggtcaaacttgctaatggggacgagagggccaagtgcaagtggtgtaccaagctatttcattgcggctcaagaacaaatggtacgtcatccttgaaagctcatctaaagatttgcaaaaagaatcctaacaaaccagtagttgataatcaaggaactttgcaactgacaccatgtgatggcaatagtactcttggtactgtgaccacttggaaatttgatccagataaacttagaaggtgttttgctgagatgataattgaagatgaacaaccatttgtcctatctgagcgttctggtcttaggaaatttatgactttagcatgtccacgatttgttctgccatctagaagaacaatcactagagcttgtgttaaagtatatgaagatgagaaagaaaagcttaagaaattttttaaggacaattgtgtaagagtttgcctcacaactgatacatggactgctaagaacagccaaaacttcatgtgtgttacagcccatttcattgacaatgagtggaacctacagaagaaaattattggtttttttttggttaagggacatagaggggaggacattggaaaatcattagagaactgcttggctgagtggggcattgacaaggtttttacaataacagtagacaatgctagtgcaaacaataatgcaattaagtatatgagaagggtcttgaatgagtcaaaaggttgtgttgctgaaggagagtacattcatatgcgctgtgctgctcatattatcaacctaatagtaggtgatggcttgaaggaaattggtacatcaattcaacgtgtccgtgctgctgttaagtttatcagatgtggaacatctaggttggtaaaatttaagaaatgtgctgagttagccaaggtacagagcaaagcatttctaaacttagatatttgcactagatggaactcaacctatcttatgttaaatgctgcagagaagtaccaaaaagcatttgaaagatatagtgatgaagacccatactacaaattagaattagaaggagagaatggtccaggggtaccaacaagagcagattgggagaaggctaggaagatggctgattttcttgaacacttttatgacctcactctccgtgtttctgtacaaagtcgtacaacatctcacacttatttccatgagattgctgatgtattacttctgttgagagaatggtctcatagtgaagacaagttgagcaaggaaatgggtacaagaatgctaatgaagtactacaagtattggggagagaagtatggtgagaggcaaggggacagagagaagagaggagagaaagataagggggatcaactactcaacttcactgtcttcttctgtgttgctattgatcctagatacaaactatcaaattgcattagaatgggaattaaggtgatgtttggggatacagtaggagaaaaagtatgggaaacagtgaatacctattttcgtgctttgtttgaagagtacaaggaaatgtataccccaaaagataaggcaccacaacctactgaatctgaatctacagctgaaaccagcaaaagagtgagttgtaggtggatgtcagtaattactcagcaacttaacagtgagggtggaagtggaactatcaaatctgaggtagacaagtatctatcagaagataatgagccggacacaccaaaatttgacattctaaagtggtggaaggccaattcaacaagattcccaatattatctcatttggcctgtgatcttttggcaattcctatcacctcagttgcctctgaatcagccttcagtgctggtgggcgaactctagatgactttaggacctcactaaccccaagaatggttgagcgtcttgtttgtgctaatgattggcttcgtggaggaaactatgttagtgttgaagaggacagcgaacaaatggctttgcttgaggaagaacttggtgacctatctatttccaaggaagatactccagctgcaactcagtaa

SEQ ID NO: 76875 - DNA, 1364 bp, Oryza sativa
  Clone ID: PAT_MRT4530_76829C.1
tttttttttttttttgaggaaatgtggcggggagaacgcatctccagtatcttccttgcattgctttttattggttgcttcaagggctagtactagtaaatcttcttttttttttattttgtagaatcaggcacgctcagtgcaatcaatatacacttttcttagtgggacgcatgatatacattactcctagttgacagagatggccacaaaaaagaagaaaacaaaatcagatgaaacaaatccaatgcaacaataccctagctaattagaggagtattagactatgattacaagggcctcgaaccagagcagttataacctcgggtcaaatttggctccttgcccttctgttaatgtgtcgtcatcagaaatatattccatttcgcatgttctctcaggtgcaaagcgcactggctccactcaaagctcagtgctgatgcagcaggctgaataccattgcttagatcgacgtcagctaagctatcaagaacacgcaccacctggctcatccggggtctcctagatgctgaatgtcgaatgcaagctgccgcagcttcgatcattcgaaacatttcagcttcattgaagttcttgtccagcctggagtcaatcagctccccaacgttgccagtctcaattgcttctgtgagcaatggcctagcccactcaacaaggctctcatcacccaatggttttgatgcgtcaacaggctttctaccggtaataagctctaagagaacaacgccaaaagagaatacatcagatctctcagtcaacttgccactcgaagcatactccggagccagataaccaaaagttcccatcacccgtgtagttacatgcgtgactgcatccatagctagtcttgcaaggccaaaatcagcaacctgggcttcaaagttattatccagtaaaatgttggaggatttaatatctcggtggataattcggggatggcaatcttcatgaagatatgctatccctcgagctgagccagctgcaattttaaccctagctgaccactccaaaaccggcattccacgtccatgaagatgatggtgcagtgtgtcattgggcacaaaatcatagacaagcaacctctggtcccccgaaatgcaatacccaacaagagaaactagatggcggtggtgcacacgactgattatctccacctcagcctggaactcacgttccccctgcccaccaccacctttcagtttcttaacggcaacctctcttccatcagccaagcaacccttgtaaacagacccaaacccaccttcccctagcaggttcttcgctgcaaaaccatttgtgatctggtgcaattcctcgtaagtgaagaatcgacaattgcccat

SEQ ID NO: 76876 - DNA, 1218 bp, Oryza sativa
  Clone ID: PAT_MRT4530_7682C.1
atggtgcccccaatcgccgggaacggccgcgccaagtccggccgccttcctttgccgccggccgccattcccgtcgccgttcccgctcctcccgtggccggctctctcccccatcctataaaatgggatcctcatccttcgttctatcgttttagccccttcccgagcctccccgtggtcgtatcacctctccccgccttctccttctccctctccgacgccggccggcctccagccacctctccctcctcaccggagcatcgtccggccgtgccgtcgcctccctcggctctgcaacaccgtccccttcaccggccttaccgtctcctcgccggaaactcgccggaacggtgcccccgccggcaaccagtggcattggtgccactgtactccctccagccggctgctgttcatcgccggtgcgccgatcgacgccgccgtctcctccttcgacaccgcggcatcgccttcttccccggcatcacctcctcctcgcccgaatttcgccggaacgccgtcgtctccgcgccggcctctccttcctcctcgtcgacatctcctccggcagcccccttccgccgcgcccgtgcatcagccggcgctgccatctctcccttgcgtggtggcgtagccctccacctcgtccactcctcggtttcgccggaacgccatcgccgcgaacctctacatccgcctcgccggagttgttcggccgcccgtccctccccgccgtgcaccggtcggccacacctccaccacctccggcatcgcagcggcaaggtcgtcctcggcatcgtttcccctccatccaaatccctccgcggtccatcatcgtcgtctccgatcgttctcgtcgtcgacgtcccgtcggtcgcccggctcgtcgtctcgcggcgccgcctccgtcatcgtcatcgcagcggcgtgtcccacgtcgtcctcgtctccgtgcagccgctgccggctgtcctcgtcgcctcctcgccggtcccggtcgtcgtcgtcgtcgtcgtcctctcgtcgttcccggtcgctgcagcccccgtcatcgtcttcgtcctcgcctccgcgtcgtcaatcctcgcgccggccgcgtctcgccttcgtccaaggatcgccgccgaagccgtcccctcgccgttcgtctccgttgtgcccgtctgtctccgccgcgcccgttcgtcgttgtcgttcccacgcctcgtcgcgtggtggtaa

SEQ ID NO: 76877 - DNA, 554 bp, Oryza sativa
  Clone ID: PAT_MRT4530_76830C.1
ggttccttcaagggctagtactagtaaatcttctgtctgtttgattttgtagaatcaggcacgctcagtgcaatcaatatacacttttcttagtgggacgcatgatatacattactcctagttgacagagatggccacaaaaaagaagaaaacaaaatcagatgaaacaaatccaatgcaacaataccctagctaattagaggagtattagactatgattacaagggcctcgaaccagaggcatcaacatctctactacgactatcccagctagattgggtgaaatcagttgtgaaatcttggctaccaaaagccatccgctgaaacagcctgatttctgccgtgtttgccacattgaacatttcgctcttaccaggctgaataccattgcttagatcgacgtcagctaagctatcaagaacacgcaccacctggctcatccggggtctcctagatgctgaatgtcgaatgcaagctgccgcagcttcgatcattcgaaacatttcagcttccatgaagttcttgtccagcctggatcaatcagcttccccacg

SEQ ID NO: 76878 - DNA, 734 bp, Oryza sativa
  Clone ID: PAT_MRT4530_76831C.1
atccgcgccgctgctgctgcccgccgctggccgtcgcggggccgagagctgaacacctccgtagggcggcggatccgacccctcctgagggcggcgccaccggatccgccgcctgccgctgccgcccaccgacgccatcgccgcgcatcgtagttgtcgccgcagtcgagcccgccgccgcagcccgtcgtcgtgacccggccacccgaaggccggcgccgccggattcgctcgtcgccgtcagccgcacgtcgtcgcctcgcgccgccgagcccctaccgtcgccgtcgcctcacgacgtcggatcctgcagctccgggaccgccgaccccggatccggccaccccgaggctggtgtcgccgtccgccgcacgccgtcgcctcgcgcagccaagccccagtcgtcaccatcgtctcacgacgtcagattgggccgctccggggccggcaccgtcgaatccgctcgccgccatccgtcgcacgccgtcgcctcgcgccgcggagcccacgacgtcggccaccccaaggctggtgtcgccatgccatccggcgcacgctgtcatgggaggaagggtggcggctgggagagtggtactgtgggagtggccggccggcggcaggggcaacatgctcatcggagattcggcgtgctgacagatccaccccatcggagaagcgtagatggcggcaccacggccggcgcgttcctggcgcgcttcaccggcaggcacaac

SEQ ID NO: 76879 - DNA, 2931 bp, Oryza sativa
  Clone ID: PAT_MRT4530_76832C.1
atgtcttccccgccgccgccgtcttcccgcgacgcgctgatcaatgacgtggtgaccgccatagctgatgtggtgcgtgccaactacacccctccagatggctccaatctcgacgagccggctcgtaccgtcgccgaacacgccgccacacgggcctccaccgccgcctgtgacaccctcacccggctccttcctccactgacgacgcccgacgacaccaactcctctgccgcacctctcctaccggcaacttcttccgctggacaagtgtcactggcgccctcgactgccgtagcaccgacggcggtctctctgcttcccaagctcacgtctctcctcgtgcagcttgccgtgcgcggtgctccgactccttccggcgcgctgtcttcggcactccacggcgcgccgccaccaccgcagccaccagccctcgacgacgagactgtctccacccttcatggccaagcagtctccgtcctcaatgtcaaggcattggtgcccatcacccttgaccttgccgccggcaattacactcgctggcgcggcctcttcctcgtcgtcctcggcaaactggatgcagatggactgcgtcgtcctcggctggccctacggatgatccccgctgaccttctccaagaagtcatgtcggccaccgcgacggcatactctgtttggcgcgatctcgcgcatcagttcctcgggaaccaggaacgacacgccatcaatctcaatgccgagttccgcaccttcgcgcaaggcgatctctccatctccgactattgccagcgcctcaagttgatggccgacatgctcggcgagcccgtccacgaccgcagtctcgtgctacaactcctcaccggtttgagccctaaatttggacatgtgcaatctcttctatccatgcagaagttgttcccctccttcctggatgctcgctctcagcttctactcgaggagatcactaagggcagcaagtcggcggaaccggccaccgcgttcgtcgtcagcaactccggctccgttcaacccgccagcggcaacaccagcaacaccggcaacgacgaatggtacatggattcaggtgcctcttcccacatgactcctcacaccggtacccttacccttgcacccacaacctctccctcttatattgttgttggaaacggctccttgcttcctattactgccaccggtagcgctcgcattaattatccacaccactcctttcttcttaacaatgtcttagtttctcctgacatcattaagaaccttatatctgctcgccgttttgttcgtgataactggtgctatgttgaacttgacccgtttggtctctctatgaaggattatccaaccaggaacgagatcatcaggtgcaatagctccggagacctgtatcccttcccagcaaatgctttttcctcggcggcctccgcccgcaccttcactgctacggagtccaccacggacctttggcatcgtcgtctagggcacattggtcatgacgctctcacctgcttgtcccaggcttcagtcataccaccacccaggggtgcttccccagtctgtcatgcttgccagcttggtcggcattgtgataatggctatgagtttgacaacctcactgcccgcaccttcttcctcaccaacggtgtacacatgcgaatgtcgtgcccccattcctcccctcagaacggcaaggccgcgcgcccatcgctggctgtgccgccttccaggacgcaccactcgctggcgcctcccatcggtgcccccacccgtgctcggagtgcatgggtcccgggcgccgtcataccgagccaactgggtgtctccctcgtcatcaacacgcatggcatgacgactcgcggcaaggatggcatacaactaccggtcatgcgctacaacctcaacgtcgccaccctctctccggtgccccgcacttatcgtgccgccctggccgatccgcactggtgttctgcgatggaagaggagtttgccgcgttgcaagcaaatcacacctgggacctggttcctcgtccctcaggttgcaatgtggtcatcggtaaatggatctttcggcacaagttccagtctgacggcagcttggataggtacaaggcacgctgggtcctccgtggttttactcagcgacccaagatcgattttgatgagaccttcagtccggttgtcaagccagctactgtccgcaccgttctcagtcttgctgtcactcggcaatggcttgttcatcagttggatgtcaagaatgctttcctgcatgctggtcttctccgttgggctatacatgctttacagtctaaattttccatgaaggatcttggtacactgcaccactttttgggcatcacagtcaccagtgacagctctggtcttctactgagtcagcgtcagtacaacattgagattctcgagcatgctggcatgtctgattgcaagccatgctccactcctgttgacaccaatgccaagctctcctccacatatggctcaccgcaggtctgtctccacatgcatgatcccagagattcgcatctcgctgctctcaagcgtatccttcggtacgtccgaggaacgcttgaccttggactacacattcggcgctctccttcgaccgacctagtggcttattctgatgctgattgggccggctgccctaacacacgcaagtccacctcgggatacgctgtgtttcttggtgacaacctggtctcctggtcttccaagcgtcagcacactttgtctcgttctagtgccaaagcggagtacagggctgtggctaatgctgttgcagaaacttattggctgcgccaattgctacatgagttacatacaccaccctccaaggctactttggtacactgcgacaacgtcagcgctgtctatctctccactaatccggttcagcattaa

SEQ ID NO: 76880 - DNA, 146 bp, Oryza sativa
  unsure (1)..(146): unsure at all n locations
  Clone ID: PAT_MRT4530_76833C.1
tagccaccgccctnnnnnnnntgggntaattgcaaaacagaccaaatgtgccaactttggcagattaaagcaattgcttatgagacaattcattcacaatagtcagtgcatatggaaccaaggtaaaggatcaataattgattcat

SEQ ID NO: 76881 - DNA, 287 bp, Oryza sativa
  Clone ID: PAT_MRT4530_76834C.1
tttcggaagaataaagaagcctcctgtggatagcttttttgagtcgaaaggcacaatcaatacgttgtatgttgacgacaagaggcacccacagcacattagaaagctatacttattcgaagaaactgacagaaagaatgcaataagcaagctaggtacaaaacacagagactgtgctttatgattcgaaagaaaaaaacaaagagtctgtattgctataccatattgaaaagctagatcgggctttcgcactaaagaatacagtcccaagatcagtgatccatata

SEQ ID NO: 76882 - DNA, 243 bp, Oryza sativa
  Clone ID: PAT_MRT4530_76835C.1
atggcgacagccccgtgcgtcaaggaagggcagcagcatggcggcagggagcgcaagggagggcgaggtggccgggcggtggtgaagaagacgagcccgcgccttgagggaggacatgagcgggtggtccgctgcggcgcgcgggtggtggaggatccggtgggcggtgaggcgtgcatcgggaggagggatgggtggattaggggtcgagcgcttttgcgagaaaaaatcaagcttcgttag

SEQ ID NO: 76883 - DNA, 565 bp, Oryza sativa
  Clone ID: PAT_MRT4530_76836C.1
aaaaaaaaaatggaacaaccccccatattaaaagggaaaaagggggccaaaaaaaaaaggggcccacaggttacaaaaaggggggggggaagcccattaacccccaaacataaaatcccccaaaggaaagggttgaaaaacccccccccccgggaacgggaaaaccccacccgggcaaaacaggggaaagcagaagttataaatcgggccttgacaaaaaaaaaaaaaagcccccaaaaaaaaaaaactcctttagaactgggaaccataatggccatccttattttggggggaccaagggccaaccccctgggagtcctttcccaacggggggaaacccccaggggcccaaaaaaaccaaccctttttaaggccctcacccaattaccaggggacaaaggcccccttggaaaacaagagggcaaacttgggggcgaggggggaaaacccccccccaaccctggggggggggggaaaaaatgcacacggccctttgaaccttgggagagggcccccttggggcacaaccctggggggggggagaattgatgccccacttaaaccc

SEQ ID NO: 76884 - DNA, 1126 bp, Oryza sativa
  Clone ID: PAT_MRT4530_76837C.1
aggtacattaaaaataggcttgcgcacatttaagcacaatacatcacagaagtcttttattcatatataatcatatataaaccacgtacgtatatagcgaatgtaatacaacacaaataaatgtatacgacactgacagaggtataacggggcactagtgtggtaaacccttggacctagtccaagcacatacacatgcacactatatatgtatagttatatagtgattgaaagaaatatcacccttaggtcttgttcggttcattcccaagagagagattagagagaattgaggggattaattccacacctcaataaatgtgaaattattctcctacaaatctcacttaacttcttgttgagggattaaacgaatagacctaggggtgaatttatcatgagcactgatccaaccatatatccaaggatatattcatatgtagataatatatatcatatgtggacataaactccgatagagtccacaagtgctcccgcgcgtccgaagaaaccaaccacactgccgctctgcagcgggaggctaaaagcagttccaccaccttgtccaaaattataagtggtgacattggtgacaattttaaggtttgtcacgacgttggtaaaagttccggagattcccttcacgaattcctgagatccaagtgtaatcgtagttggatttccaccgccaccaccccaaggacctgcaagatgttccttcccatctgtgccaatgtatgtaaaggcaatagcatcaatggctgcaccactacggattgtcacgcttttcaagctccttgggagtacagataggtctacacgacctcctccatttccaccccatgtcccgatcttaacaagttgtgtggtcattttaatttgtagcctctgtcctactatgtatctgtgactacttccgggctagcttaatcagcacagggtacttcaacaccaacaaaatacactcctcctgctctccacacatacacatcaattctttagtaaacttcactaaatttctaaactcatcattcattcttttcaagctccttgggagtacagataggtctacacgacctcctccatttccaccccatgtcccgatcttaacaagttgtgtgctcat

SEQ ID NO: 76885 - DNA, 399 bp, Oryza sativa
  Clone ID: PAT_MRT4530_76838C.1
atggctggcactggcagtggaacgggagcaaagcaaagctcttcttgggtggtgggatccgagaagcaagagcagaagcgctactgtgacaacgtcgcggcgcctgaggtcaatactcacacggagacagagaagacgatcggaagtgttcgacgaattggtgtgttagaagccatgtcgctcactcgctcgtgctcgacgaattggaggcacccgccgcggaatggaagggccggatgggtggtttcaccctttcggcgcgtagtggagcagcgtgtggggtggggggaagtgggacgcgcgtacgtggcgggcgcgggttgctcgccggcggggccaggagaaggggaaagcagcgacgacgacgccgacgccgaccagctgactgatgagagctag

SEQ ID NO: 76886 - DNA, 551 bp, Oryza sativa
  Clone ID: PAT_MRT4530_76839C.1
ttatttggcttctaacacaccaattcgtcgaacacttccgatcgtcttctctgtctccgtgtgagtattgacctcaggcgccgcgacgtctgcaagagtagtcagattcaggagatgctcgttgggtagagcggatcggagagtcactgtcacagtagcgcttctgctcttgcttctcggatcccaccacccaagaagagctttgctttgctcccgttccactgccagtgccagccatggcgccactcccaagctccagctcaacgcgggccacctctctcgtggcgatcccgggcgcctcctgcccccatggccaggcgcaacgcctgctcgccttccgttccccacgacgcgggtcacagtggcgcgggctttgcgtgtcccgggggcgccaaggtgcgaccgttgccatggcaatgacaggtcgagacgtcgtacctgcaacatgaaacgcgactactatcagtacctcgacactttaagactggagctgagaggaaggatgctgctgagaacaccatggtggcatacaaagccgctcatgatattgc

SEQ ID NO: 76887 - DNA, 6285 bp, Oryza sativa
  Clone ID: PAT_MRT4530_7683C.1
acggaatctacggatgggaagaatcctactcggacaagactgggtcgttgatgtatcgtatagggtctgatatctctgagttctacttggagacctccagatctgcgatataaaagggaccccccggggagggcttaaggcatcaaatctcagagccaacacagcccacacagcctacgaaatccttataccaacgtaccccaataccctctatatccggtctacaggtaccatccgtcgacagttgcgcgccaggtaggggcacttggtacttaaggttctactactatgtcatccagcttcgtcgacaacagcgtcaacaccaacctcagccaagtactccctgctttaacgatgctggtgtggaatcaagtcggcgaaatcgtcttcccggtttacaccacgacgccgatctcaaccgatcccccaatgaccggaaacgagaacgcagtggctacaaaccaacgagactccatgtcgaaaaatcctcccgctgagacggagaacggagcatcgacgacatccgagctcgagaaggattctgatgtggccaaaccttgtccttccgacataaaccgcgagccgacaaagatgacttccgaagccacaaggtcctgttgtcctatccacaaaaccaagaaacacactttgcaagcctgctgggttttcctcaatgtccgcgctgaaattcgcgcctgcaaagagcgtgggattcagcgtatttctccaattcgcgatgtctattatcctattcacaagataaagaatcacgacatctcaagctgcgaggtctttctcggcgccatgaaagctccgtctcctaagtcatacgtccccatcagggataacgacaagtaacaaggagcgactccaacttcagatcgattcgttggggtaatcgatatcgatcctcacgaaccatcagtcttacaccttctcgaagactatgggtcatcgacaacgagcgcgccgtgggaggtattggccattgatgacgttggcacgtcagcccatgccaacgcagaagcggggaatcaattgactacaccagcccagcacattagaaccgttcaagctatactgagggaaactccctacgatcccgttctgaacgatgacctcgagcattggatagaacgactacgggaatcagtgaccaacctcagcaacgcgttcgaagaagccgctaccgcagtgcacccggagcagccaccaactggcgatgccaatggtgaaaacccggaacggagggaataacctcaacgagctacccctccacctcgcggcactagcgatctccgagatcacatcaacagccgccgagaggcacaacgcacacgagacaatgtgaatcattctcggcgtcatgtctcttcacagcgccatgataacgaaaatcgagaagaccgctcaaacgacgaccgagaccaggactaccaccacgatcacaacggtcgcaaacgacgggtgccagacaatactggttgaggccgtcgccataacgacgacgatgacggagatcggcgccgagacaacagcgggagacgacgacaagattcccgagatccaggccgacatcctcgtaatcgtatgccggaaccaagtgacccatcgtcatcgtcatcatccttgtcctcctcatcgtcagacagacatccacgaaggacacacgaccgccgacaacccaccgcccccaacgctgggtgtagggctttcggtcgttccctgcgtgatgtccgatggactgagagattccgacctggagcaatagaaaagtatgatgggagcaccgacctagaggagttccttcaagtctactccacagtgctctacgctgctggagcagacgacaacgcgttggcgaattatttaccaactgcgttgaaaggttctgcacgttcatggctgatgcatcttcctccctactcaatctcttcgtgggcagacctgtggcaacagttcgtcgccaatttccaaggaacatacaagcgccacgcgatcgaagacgacctatacgcgttgacacagaactcgggtgaatcattgagggaatatgttcggcgcttcaacgagtgcagaaatacaatccccgaaatcaccgacgcttctgtaattcgcgccttcgattccggtgtcagagattgctatactacccaggagttggcgacaagacgcatcacaacctctcagagattgttcgagattgttcagcgatgcgcccacgcagatgatgcgctaagacgcaagaacgataagccgaagaccgggggagagaagaaaccagccacaaacgcatctgagtcaagcaagaagaaaaatcgcaaaaatgggaaaaggaaagctcaagcggaagtcctcgcagcggaatacgcgaaccctcctaagcgaccagacccacaaagtagcgacacaaggaaagcatggtgccccatacacaagacgaacagacattctctggaagattgccttgttttcagaaaatcgctcgagaagcacatcgcatttgaaaaaggcaagcgagtacgcgtggtcgagaagaatgaggaggcagttcctcacgaatcggattcagcatttccagactccgacttccacgtttcacacatcttcagaggctccacaacgacgatatccgatcatggtcgaacccactattcggaacatcaaggtagcgtgagtcctcattgacggtggcagctcaatcaatcttcttttcgccagcactttggacgcgatgggaattccgcaaagcgagttgacaccaaccgatcaacccttccatggaattactccccaatcatcgtctagaccattgggcaagattacgttgcttgtaactttcggccaagccaacaacctccgaacagagcagatcacctttgatgtcgctgaattcgatacagcttacaacgccatcatcgggagaactacgcttgcgaagttcatggccgcatctcactaagcgtatcaagtgctcaagatgccgggaccgaagggaacaatcactattcaagggaacgcaaaactggcggtgcagtgcaacaagcggagcctcgacatagtcgagcaaacgcccaacccacccgccacgactgagccacccaagaaagtgagcaagacaaacaagacgccgaaaccagatggcgccatcaagatcgttccactttccagtgccaaccccgacaagactgaactcgcgctcatcaccttcctccgcgataatgctgacgtgttcgcttgacagccgtccgacatgccgggggtccccagggaggtgattgagtacaaactcatggtgcgacccgatgccaagccagtaaagcaaagactgcggagatttgcaccagaccgaaaacaagccatacgagaagagctcgacaaacttctcaaagctggcttcatcagagaagtactttatccagagtggctatccaatccaaccatggtgtggaaggccaacggaaaatggagaatgtgcgtcgacttcaccgacctcaataaggcatgccccaaggatcacttccctctccctcgaatagaccaattggtggattcaacagccggttgcgagctgttgagcttcctcgacgcttactctggctaccaccaaatcagcatggcaaaagaggacgaagagaagacagcattcctcacgccgttcggggtattttgctatgttaagatgccgttcggactgataaccgcagggaataccttccagcgcacggtccagggcgcacttagcgaccagctcagcaataatgtcaaggcatatgtcgacgacatcgttgtcaagaccaagacaggcgactcattgattgacgatctgcgggaaacgttcaacaaccttcgacgatatcgcctcatgctcaatccagagaagtgcacgttcggagtaccgtcgggcaagctgctcggattccttgtttttggcagaggaatagaagcaaaccccgagaagatcaaggcaatcgagaacatgaagtcgcccacaagactcaaggaggtacaaaagctaaccggatgcatggcggcactgagcaggttcgtcgctaggatgggagaacgaggacaacctttcttcgctctgctgaagaaacaagacaaatttgtatggacacaggaagccgaagaggcattcgttgcactcaagcgctacctatcaaacccccctgtacttgttgctccccaacctaataaagaattattcctctatattgccgccacgccatattccgttagcaccgtcattgttgtcgagagagagaaagtacaacgaccagtctattacgtcagcgaagctctccacgacgcaaagacaagatacccacaaatccaaaagctcctttacgcggtcatcatgacatcaaggaaggtatgccactactttcaagcccacagagttacagttgtctcctctttctctctcgacgaagttgtgagaaacaaagacgttatcagccgcattgcgaaatgggtagtcgagctgagccagtttgatgtccactttgtgccacgaacagccatcaagtcccaggtactcgccgatttcgttgccgattggactatgcctgataacaaattaaacaaccaagtcgacaacgaaacatggacaatggctttcgatggcgcactcaacagccaaggagcaggggcaggattcatcttgacgtctccctccggagatcaattcaagcacgcaatccacctcaacttcagggcgaccaataacacagccgaatacaagggactactcgccgggataagagcagcagtcgcacttggggtcaagcgactaatcatcaaaggggactccgagctagtcgcgaaccaggtgcacaaagattataaatgctctaacccagagttatccaagtatctcgcagaagtcaggaagctagagaaaagattcgatgggatcgaagtccgacacatctaccgcaaagacaacatcgagccagatgacctagcacgacgagcgtctagacgagaaccgctcgagcccggcacttttctggatatcctgacgaagccatcagtgaaagaggttagcggcgaagttagcccggacacccccgacatcagctcggaggtcacaaaggcagaacgcgctgttgccgatatcgagaccacagacgactggcgcatcccactaatcaaattcatcatcagcaaggagttgccagaggacgatacagaggccgagaaaataacccgtaaagcaaagatctactgtatggtcggcaacgatctatacaagaaagcgccaaatggggtacctctcaaatgcgtctcgtccgacgacggcagacacctcctcctcgatatacatgaaggcatttgtgggtcacatgccgtcggtcggacattggtcaggaaagcttttcgacaaggtttttttctggccaaccgcccttaaaaatgcatgcgacatgtaaacacacaaagctacccgcgcaagcactccagactatccctctgacttggcagttctcgtgctgggggctagatatacttgggccattcccacgaggacagggcggctacaggttcttattcgtggctatcgacaagttcaccaaatggatcgaagtagtacccatgggggaaatcaaggccgacaacgccatcaaattcatcaaagggatattttgcacatacagactaccgcaccgcatcataaccgacaacggctcccagttcatcagcgccgatttccaggattactgcatcgggttgggggtcaaaatatgcttcgcctcggtctctcaccctccaagcaacggacaagtcgagagggcaaacggcatagtactacaagggataaaaaccctactatgggccgtacgcaccacaccgacaacgtctaacaaggaaacacccttcttcctcgtgtacggctctaaggccatgctccccggcgagctacgacattagagtacatgagtacagaagcactccgacgaggaccaggaggaacagcgagacatcgatgtaaatcttctcgaggagcatcgtgaacgagttgccgttcgagcagtcagctatcaacaggccctccgccgttaccacgagaagcgcatccgagcacgcatactttcgatcggcgactctgtcctccgacgggttcaaagccaagcagggcggaacaagctctcacccaattgggaaggaccttacacgatcacataagtcttgcagccaggcgcattcaaaattgcagacggcgaaggtcgtgagttagcaaattcttggaacattgaccaactacgtaaattctatgta

SEQ ID NO: 76888 - DNA, 1389 bp, Oryza sativa
  Clone ID: PAT_MRT4530_76840C.1
atgtcaatcgcgatgcacgctcgcgccgccgccgccgccgccgcctccatccatcggcaataccggagatgtaacccgtggagaccctgctggacgccggtggcggcgccgtcgtcttccggcgccgctcgtcgcggccatggagtctcgccatggtcgcttggcgtgtcgtcgtcgacgtcatcctcgtcaacgccaccacacggccgccggtgccatcgccgcggctactacaccggcgtcgctctgccggcgccggtgcgaggcatcttcgtcagctacgtcgactacgatcgcacgcacctgttcgcccacccgtccataacgccggcgtgcccggccatcgacggcgtcctcgacttcatgccggagcaccgatactccggggacgggtggtcagtcagccaccattgcaatggcctcctcctcttcagcaattgtagtcggtggctctgcgtctgcaacctggcgacgcagaggtgggagaagctcccggaccacgcggcggggatcgggagctcctacaagatctgtacctaccccgcgttcgatccggccatgtcgtcgtcgcactacgaggtgttggtgatccccagtgtgccggatccgaggtggatgatggctctctgcaaccaccgtggaagggcgaaggacatcgatgactcgtgccggttgatggaatggccaccgtcgccatggagggtggacgtgttctcgtcgaggaagagtactagggaagcagtaccatatctaggaagatcgccaaacggtttgtgctttggaataagtgattgtgatgctcaactatggatttggatccttagagaatcacatgggaagatggagtggatcttgaaataccatgatgacctcaagccgttcgccaaacaattattgtcctactacggttacaggagaaaagtattttgtggacaaccttggatcatagaagaagccaataataggaagcatcaaaacacacaaaaaaaacctgatccaaaagtaaattttgagtgggacttggacaatgacgactttatttctatcgatggggctgtcgagggagccgtcgatgaatattgttacacatttttcgacatgattggatttcatccctacaaggaggttatcttcttgggtgatattttaaccgtgtttgcctaccatttggacacctcaaagctgcagtatttgggccatacacgcccagaggattactgtcaaatgtacacgaatggtatatatgggagttttgtatacacaccttatgtgtcaggacatttttatgcagtgattactggggcaggagctcatcctcaacatttgcaccagatgctcaggaataatgcagctcatgcaattgatcaaccaaaagagcctgcagattag

SEQ ID NO: 76889 - DNA, 331 bp, Oryza sativa
  Clone ID: PAT_MRT4530_76841C.1
ccaatcttggaaataattgcaaagaggactgttcaaactgattcgatttaaaggaaacgcctttcgatttttagagctaggacccgccacagtcctactcttagcaattaacataactacgaattttgccaactctttttttaccataaaaagaactgaggcggaataaacactttgcacaatcttcgaacccattcctttggaaaacccgtgcatttctcttcaccggatcatttttactatcgggttaatcgtaccctggtatcttgacattacattcctgcccaatatattgtttggcttgcaaccctaaacttaaccacttgcaatg

SEQ ID NO: 76890 - DNA, 516 bp, Oryza sativa
  unsure (1)..(516): unsure at all n locations
  Clone ID: PAT_MRT4530_76842C.1
gcttcagtatggatatgattaacctgattcttgatacttgtattttgaaacccagtgttatgttaaatttacntccaatattggtcatttataaaagccggttgtctgaaaaaatgtaagtatgttggctttatgtatgccggttgtctccatttgacctccctttatagcttctgcctgattgtgacaccttttttagctgtacanagtagtgggaaacaccaagccaaccatgaatatgggcgaatgggccagctgatgagcagactgtggtattgtttgcttgctgctgcgtagcactcacagactaagcctctggtggcctagggtactatgccgtggtgaggagtgagccctagccncttatctgatccacgagcaccctgaacagactgtaggttaaggtgatgtcctccttttctagatcctcnaataataaatattttagngcccaatttgagtcatgtttttttttactgaaatctatattttttttaaaaaaaaaaaaaaaaaaaa

SEQ ID NO: 76891 - DNA, 2918 bp, Oryza sativa
  Clone ID: PAT_MRT4530_76843C.1
ctagccccccccgctccctccccgactcgtgccgcctacccgccagacgtgccagtcttcccaccccccgtcccccctgccccctagccgcaccccgtatggaggcgcaggcggacgccggcggcgacgacctcgccgccatgcgggagcagtgccggagcctggaggaggccatcggcttccgccgggagacgcagatgggcctcgtcgcatcgctccagcgcctcgtccccgacctcgtcccctccctcgaccgctcgctccgcatcatcgccgccttcaacgaccgccccttcgtccccaccccgaaccccgacggcggccacggtaagagccccgccgccctcaagccccaccaccgccgcgccctccctgacccggcgcggtccacccgccgcaagacctcgcccggatcctcccctgcctccgtcgccgctgcccccggcggcctcgacgccgtgcgcaccatggtcgccgtgtgcctcctggagctcgtccccttcgccgagatcgacgccgccgcgctcgcccgccgcatgcaggcggagagctcatccgccagcgaggccgagcggactgctctcgctgacctagccgccgaactcggcggctcggcggcctccgctgtagtcctcgccctccgccgcatagccgaggacaccggcggagtgcagatcgaggaggccatgattgggggcaagtcgatgacgatggtctgggccatcgaccggaacaagctcctcaaggagctgccagaatccgctactttgccgctactccaacctcctccagccccccagatgcccccctctgagaccgatgccggcagcgcaatgataccaagaacaccgcagcagcagcagccgcagccggatatgtggccgcattcgatgcctccgatattcccacggccaaggggcatgacgatgcaggggatgcagagggtgcccggcgtgccaccagggttgatgccgctgcagcggccattcatgggaccagctggagttatcacaatgggtgggggtgtggggcctagccctaaccagcagaagcagaagagcgaggaggacgaacttaaggatcttgagttgctgctgaacaaaaagacatatagagagaagcagaacaccaagaccggggaggaacttttagatctcattcaccggcccacggcgaaggagacggctgtggcagcgaagtctcacactgttagtcctgtagtagtaaatgagctggcagtggcggacctaggatttgaacccaggggactaaatgtaaagaccattgcatacaaggagatgggggacaccaggtccaaatcatccaaaatttacagcatgtttaaaacaaaaggtggttcccagctgaaggaatattgtaccaacttaactaaagaagattgccgacgccaaagtggatcttttgttgcctgtgataaggtccatttccgccgtattattgctcctcatactgatacaaacctaggagattgttcttttctcgacacttgccgtcacacaaagacctgcaagtatgtccactacgagcttgaccaaacaccagatatacctccaatgatggctggtgctcttgcacccccaaggcaaataaggctccagagagctgaatattgttcagaagtagagcttggagaagctcaatggataaactgtgacatccgaaacttcagaatggatatcttaggacagtttggagtaattatggccgatcccccttgggatattcatatggaattgccatatggcacaatggctgatgatgaaatgaggacccttaatgtccctgctttacaaactgatggattaattttcttatgggtcactggtcgtgcaatggaacttggtcgggagtgtttggagctctggggttacaaacgtgtggaggaaattatttgggtgaagaccaatcaacttcaacgtattattcgaactggacgcactggtcattggttgaatcatagtaaagagcattgccttgttggaataaaaggaaaccctttagtcaacaggaacattgacactgatgttattgttgctgaagtccgtgaaacaagcagaaaacctgatgagatgtaccccatgctagaaagaataagcccaaggacaaggaagctggaactgtttgcaagaatgcataatgcacatgctggatggctttctctgggtaaccagttaaatggagtaaggcttgttgatgaagggttgagagcacggtacaaggctgcctatcctgattcagaggaactcctagaaggcgcgcacacgggaagcccaatgcgaccacgaggaggcgaaggtgtggcagtgtcgcttcccggtgagacccacacaacggtggggtttcccggtagaattagggctccaaatccgatgggattgtcaggtgctattgggctgcaccttgggccgtgccagctattctccaagttgagcccaaggatgacaatttcccccgcggggccgggtcccctgcggggacccgaccctacgggggcaggggccatttctgacccgtggatcgtgaagaaggcgagactagtgaagaaggaggtggagcccatcttcagcgacagcgacgccatgaagaatgcccctaagaccaccactacatgcccaaggtgccaaaatggagaagcatactacaggcagatgcagattcgatcagctgatgagccaatgtctacattttacaagtgttgcagagaagaatgccaatttgattggagggaggactgaactttagtaatatttcttgtttaatgtgtgtggatatttttcctgctaaaactatgtaatcatatgaaaccttttgtaatcagctcatgccgcagcaaagagccaaagaaaacttacacatgggaaaccaacgtaccacaaaatatcgtgatattttggtct

SEQ ID NO: 76892 - DNA, 213 bp, Oryza sativa
  Clone ID: PAT_MRT4530_76844C.1
cccacgcgtccgtataagagtagaactgctcccttatacctccagttcattaatccttgtggagggaagtatgttctggatggttgaggggcccttctactataaggatccaaatcttactccccttgattgcctgggttctcctcttatttggtgccaccttaattgactttactggcccgcggttttacactctgttttagactggataaa

SEQ ID NO: 76893 - DNA, 3139 bp, Oryza sativa
  Clone ID: PAT_MRT4530_76845C.1
cacgcgcccctcgcatctttcgcgaaggcgattcaggcgagaagagagagagagagcgcgaggccggcggttctagaagcttccagacccttcggcgcgagcgagctcacctcccccgtaggagctgttcattagatctgaataagggggattgaagcagtgaggagaagatgagcgtggtgggctttgatctagggaatgagagctgcattgtggccgtcgcgcggcagcgcggcattgatgtggtcctcaacgaggagtcgaagcgggagactccggctattgtctgcttcggcgacaagcagcggttcatcgggacagcgggcgctgcttcctccacgatgaacccgaagaattctgtttctcagatcaagcggctcctcgggcgcaagtactctgatcctgagctccagcgtgatattgcggccttccccttccgtgtctcggaagggcctgatggatttcctcttgttcatgcccgttaccttggtgaagagcgggttttcactccgacgcagctcatggctatggtgctttctaatctgaagggtattgcagagagcaacctgaatactgctgttgttgactgctgcataggcattccggtgtacttcacagaccttcagcgcagagctgtgcttgatgctgccaccattgccggcctctgcccattgcggttgtttcatgagaccaccgcaacagcattggcatatggtatttacaagactgatcttccagagaatgatcaattaaatgttgcctttgtggatgttggacatgccagcatgcaagtctgcattgctggttacaagaagggacaactcaagatcttgtcgcatgcatatgaccggtcccttggtgggagggacttcgatgaagtcctgtttaagcactttgcagcgaaattcaaggatgagtacaagatagatgtttaccagaatgctcgtgcctgcattaggctccgtgtggcttgtgagaagctcaagaaggtgctgagtgctaaccctgagtcaccaatgcacattgaatgcttgatggatgagaaggatgtgagaggttttatcaagagggaagagtttgagaagattagtgcatcaatactggaacgtgttaaggggccactggagaaggctttagcagaagctggtttaacgacagagaatgtccattttgttgaagttgttggttcaggttctcgtgtcccggcaataattaagatactcacagatttctttgggaaagaaccaaggaggacaatgaatgcgagtgaatgtgttgccaggggatgtgcgctggagtgtgctatccttagtcccacttttaaagtgcgagagtttcaggttaatgatggtttccctttctcaattgcaatgtcatggaaaccagactctcagaatggtgataaccaacagactgttgtattccccaagggtaacccattgcccagcgttaaagcattgaccttctataggtccaatacatttcaagtagatgtcacgtatgttgatactggtgatttgcaaatatcaccaaagatcagcacttacacggttggtcctttcaatcccggcaaaggtgacaaagcgaaactgaaagtgaaagtccgccttaacatccatggggtggtcacagttgaatcagcaacaatgttggaggaggaggaagtggaagttccagtagcagctacaactgagcctccgaaagattctgccaagatggagacagatgatgcacctaatgaagctgcttctggaactgatgtaaacatgcaggaagccaaagcccctgcagatgctgctgccgatggtgctgaaaatggcgcaccaaattctgaggaaaaatcagtccctatggaaactgatgccaaggttgagccatcaaagaagaaagtaaagaaaactaatgttccagttgctgagttggtttatggtgccttggggactacagagttgcagaaggctgtggaaaaagagtatgaaatggctcttcaggacagggtgatggaagagacaaaagataagaagaatgccgtggagtcttatgtttatgacatgcgaaacaagctgtatgacaagtacaatgattttgtgactgctgaagacaaggaagcattcattgctaagcttcaagaggttgaggattggttgtacgaagatggtgaggatgagaccaaaggagtgtatgttgctaagcttgaagaacttaaaaaggtggggggtcccattgaggcaaggtacaaggaatggatggacagaggcccttccatcgaccaacttgcttactgtatcaacagtttcagagatgctgccttgtccaaagatccgaagtttgatcacattgagatggaggagaaacagaaggtgattaaccagtgttccgaagcagaagtctggctgagagagaaaatacagcagcaagatgctctgccgaagcatgctaaccctgtcctactctcttctgatttaaagaaaaaggccgaaacggttgacaggttctgcaaaccgataatgatgaagccgaaaccagctcctaagccacagacgcccccacaaacgccaccgaccgagaccccggctggcggagcccaaacaccagagcagcaacctcagggagctgaagcggctggcgaggccagcgagggcggcgccagcgaatctaccggcgagcaaatggagacggacaaaccggagggaactgaagctgcctaggctgcagctgcggaaacgtttttcagtttcctgcaagttgctgctgctcggtctgcattcgttatcagattccgacaccgaagttcagtagaggttcgctagggatggatttgtgattcaccatacttcgtgaggatcatctgcgtgaacgtacgtttaggtttatatcctactgtaccaatgtgttgttaaaatcggctttccctttttaatttttctgccaaggggttttctttcaattcgagatataagggcacgtttcagatttggtgtcctacggggtgggtgttatagcgggacttacaatggaactcaaatttttaagtccgatgtatcaactgattcttgttccatgggatttgcacgctcttctggacttacttttgcatgtgttaatgtgctggcctgggtttaatggcctgctagtgtgc

SEQ ID NO: 76894 - DNA, 443 bp, Oryza sativa
  Clone ID: PAT_MRT4530_76846C.1
cctgctcgcttggctgtacgccggccgcgtccgccatggggaattgcttcggctccgatgacggcgaggtggaggccgtcaaggtgatggcccgtcatgcgctgccacaagcggcaatggcgagaccggtcatggtcgcgatcgcgcagcccaatgcacgcgtcgcgatgagcccagggcggccaccaactggtaagttgccgagccaggccacagccacaagcaccggcggcgggcgatcggtggctggtggtggaggccggacgaacgccggcggcgacgccagcgcggaggggaggatcctggaggcgcccaaccttcggatcttcacgttcgccgagctcagggccgacacgaggaactttaaggcggacaccgttcttcgcgagggccggttctggcgggtgcacaaggtgtgggtggacgagaggaccatgagcccc

SEQ ID NO: 76895 - DNA, 418 bp, Oryza sativa
  Clone ID: PAT_MRT4530_76847C.1
ccacataaaccatgggataattaaccttcggactgactagcaattaagccacaaaacacagggcacatgttatcaaaagttcacatttaagtcctaaatttcaaacagagactggtccgatatattcttgccaagctaaaataaacgggcgccatttaaggccttgaaaaacataaacatgttttgtagcatgcatatatacccacatggccggataaataccctggttaaaagctccggtttttttttttgggggtatgcgtccacctggttattaggaacgggacaacaacacgtttaggccgatttcgaaaagccaaccctcattttgccgtaatcgaacacggtttggtaggcacccatgaaaacgtcccccaggatccaaagaggaccacggggaggagggatgtccatggct

SEQ ID NO: 76896 - DNA, 296 bp, Oryza sativa
  unsure (1)..(296): unsure at all n locations
  Clone ID: PAT_MRT4530_76848C.1
gccttaaaattaacccctcactaaaggggaataagnncgttgcggcccgctctgacatctttatatggttaacttggcgctgaagggccagattcgctatattgagtccaagtaaatacttaatcatgtattccctgtctcctgtgtgaaatagaaaaacgcgttcattacctcacatcctacgacccgcatgcactacactcgtcacagatcttgaggctgtcctagcttgagtcgagtctacacttgaccatctcatgagctactgtacctgactcgacctattcttcacgtac

SEQ ID NO: 76897 - DNA, 312 bp, Oryza sativa
  Clone ID: PAT_MRT4530_76849C.1
atgggtacaaccgcctacctcgtctcgccctccagccggatagctcgtcgctgggagcagccgcctccgcgtggaagagctgcgaccgccgacaccttcggggagcgggcgtcggctggccctcgacgcggcagccgtcgccgccagcacgccctcggccgccgccaccttgcgcacggcgcgcccgcggcggccgccaactcctcgccgcgcgcgccctcgccgccacctccccgccgtgcgcgcgacctcgccgccgactccgcgccgcgcgctcgccctcgccaccaccaccgctgccctgcgcgctag

SEQ ID NO: 76898 - DNA, 1220 bp, Oryza sativa
  Clone ID: PAT_MRT4530_7684C.1
atggaggagtacctggctaacatgaagaccctccgctcctacatgagcgatctggaggaggaagcgacgaagcggtcggcggaggagcagcggcagcgcactgccatcgacgcccacggcgccgacctcgcccaagtgagggcgcagacgaagcaggctagcgaggagtccgagcagctttcgaaggcgagggcggagctctgcgtagagatatccgagaagcagggcaggattgccacgctggagattgagtgcgccacgctgaagcagagacaagggaaaaattttgttgtcactaactttggcacacttctcacatatgctaatacttctacaacctttcacaatacccactactacattagtgagcttaccataaaccgttacgaggcatggagctcctccatcaggaaatcgcaagtacttcttcaaaactcaatgagaaaagattgttctacacaaagacaatagaaagcctgacggtcaaattacaagagcaacaggaatggcttggtgcatttaagcttaaggtacacaaagataatagaaagcctgacggtcaaattacaagacaaacagtactggcttggtgcggttaagctgaaggtgaatacaatttaaccagcaagtgaagagacccagagcaagcaaaaccttcaagtccagtcagttctaattgcatcaatctgtgtttctgagttagctaccatgaaaggacaaagccatggaatacttaactcatgtgggagactagatatgagtaagtaggtgatagagcaagagaaaaatgcaatttctggctttcttgctccactacaacagatggatatgaaatccttagaggaggaacacaaagctctacaagctgataaagctggagaaattgagtactttcagtctcttgaagaacgtataaatgaaatgaagggagtttctgatgcagtaaaatgccgttgcggattggagtacaaggtcgaactaggtggcgaagccatggatctaagctaacctgtaaaatgcttatatacatgttactgctttgggatagtttgacacttcatatcgagattatattgatgacgtctagtcgtctaccgtggaaagagatactaaattgcataagctagaaccttgtcatgaagttatccgagtagattatattcattggagagatgtaactggttgagataagctaaaatttaaaaaaaaaaaaaaaaaaa

SEQ ID NO: 76899 - DNA, 573 bp, Oryza sativa
  Clone ID: PAT_MRT4530_76850C.1
atggatggcgacatcggcaaggacgggccgacgacggtggcggcggcggctccccctctcttcctccccgctcctagatctggctgcaggagggggagcgacggcttcggcgtggacgaggcgacggcagcacggacgacgacggcggcacggacggggcaacggtggggcggacacagctcccctcccctcacttcccagatccggcccctacgaggagaggggagggcggtggcggcggcggtgttaacgaccaaatttggtaacctcagtatcggggatgaagatcagatcgaagaggaatccaagacggagactgttgtgaaaacagagcaagaatcggctgccatccaaatcggctatgataagatcggcagagtttgagtcggacggggttagccgatacaaccgattccaacaatacgactcggcgtacatcatcgagttaagttaatgtgcttcatggtaattgccatgcaaggatagattcacgttcaatacaatttcggcgcatcgccacccttttgctttagttttattttgacgagttcttgctttcgggtgtagctacat

SEQ ID NO: 76900 - DNA, 382 bp, Oryza sativa
  unsure (1)..(382): unsure at all n locations
  Clone ID: PAT_MRT4530_76851C.1
tcgcggngnnatgagttcagggacaggcagtgccaggggggaggtgcaagacagcccgctggacgcgtgccggcaggtgctcgaccggcagctcaccggccgggagaggttccagccgatgttccgccgcccgggcgcgctcggcctgcggatgcagtgctgncagcagctgcaggacgtgaggggggggggggggtgctcctccatccgccggatggtgaggagctacgaggagagcatgccgatgcccctggagcaagggtggtcgttgtngttgttggagtactacggaggagaggggtngttgtatgagtaggggtactaaggagaggggttgttggaggagggttattatggttaggatagtataagttggggatga

SEQ ID NO: 76901 - DNA, 1173 bp, Oryza sativa
  Clone ID: PAT_MRT4530_76852C.1
atggccggatccggccttgggggcgccggatccgccgcctctccccacctcgccgccgcctcggaccgtgccggtctcaatggctatgcgcactctagggacatttggagtaagaacagcttgatgggagagtgctgccctgttttcactggcttttggggggctatgctactttggaaggtgataagcactacaactatttgtattgatgactgcagccagcgagtcattggtgcggttaatggttttttggtgttcagcatcctagcatccttcacaactcttgtggtggtggcaagtggaaacctgcagtggagttctcttcttgaagcaaattttgctgctgccccacaaagtataccgataattgctctttcatttgtataccagggagacctatcaaaagtaaggaaggcaattgtagtaggtaccgccataccccttgctctgtttctcatatgggatgctgtaatcctggggacacttccaggccttgcaggggatggaaccattattgatccactagaacagcttcgatcaagtaatggaacagtggggcctattgttgaggcattctcatttcttgcaattggcacatcatacattggatttgttctaggactctcagacttcatagcagacttgcttaaactaccaagtggacagaacaaacctctgccgtaccttgtgactttgctcccaccgcttgttctgtcattgcttgatccagagatattcaggcattggacttcaggaacttggagtctagtactttttggagtttttccagcagctatgtcttggtcagagaggtactcagatgatctggaagctccagtaccaccaatagtcccgggaggaaaatttaccctctcatttgtcatggggggtgccttgctcgtaattttttcagagattttcaaggacataatgcagttgcaaggactacactgacacttagatctccaatatagatgcttcaacagattttcttttaaatgcaataccgctgaaagcctcgtaatattgtacatagaattgactggagccagtttttcttaatttaattctttcacagtttcatcaagttattctattgagacaggctgtagtatgaagctattttcttttattattttttgacgtgagttttcttttaaaaaaaaaaaaaaa

SEQ ID NO: 76902 - DNA, 593 bp, Oryza sativa
  Clone ID: PAT_MRT4530_76853C.1
accctccccccccccccccccccccccccccccccccccccccccccccccccccccccccccccccccccccccccccccctccttttttttatccccccggatttttcagtattaccttttaaaaggttaccaaaaaaggcggggggcccccagggggcaaaaatcccgcggttttcttttgttccccggcaaatttaacccccccccttttggctttggggggcatttcaaactttggggggtctttttaacaggggttttgccccaccgggtaaaaaaaggcctttcccctaccccccccggggggaaccccttttctggttaaaaaacccccgggggggggcaacaaaatttttttttttagaaaaaaaaaccggggcccttccccccaacgttttttttgggggccccctctgggcccataaggccccctgaagtaataggggcaatgtcccccacctggggggggggaagcccccccccagcccatgattcgatttccttgacccccacttggaggggggggggggggaccccacccttgggggggggggccgttcagctcaacaacatttttgccagaggggggg

SEQ ID NO: 76903 - DNA, 376 bp, Oryza sativa
  unsure (1)..(376): unsure at all n locations
  Clone ID: PAT_MRT4530_76854C.1
acaacctcggcatcccgcccctccaatgcccccgtccgcgaacatcgccgccgccgccaccgggccgcatcaccatgagcaangagctgtnggtacgggccggataaggtgaaattacctgggggcattctcggcgcagacnccgtcgtacctgaagggcganttcccgggcgantacaggtggggacacgggggggctctccgcggaaccngangcgttcgcgaagaanaaggcgctggaagtgatccacngncngtggggcgatnctccggcgcctngggtgcatcacccggaagtgctccaaaaaattgggtngcgcgtccacttncaagganccccttgtggttcaaaggncggggnccaaaatcttcctcc

SEQ ID NO: 76904 - DNA, 1289 bp, Oryza sativa
  Clone ID: PAT_MRT4530_76855C.1
atggccaggcgaggcggccgcggcgtcggagaccagcggagacagaagaaggggggagaagagaatcgcggagatagcatgagcagcggcggcgagctcgcgctgaggcaggagtacgtcatcggcgacgagatcgggcgcggccgcttcggcaccgtccgccgctgctacgccgtcgccacgggggaggcgttcgcggtcaagtccacgcccaaggcgccgctgcgggaggcggaggcggcggacgcgctcgacctcgcgctcgcggagcaggagcccaaggtgcacctcgtcgcgtcggcgccggggcccggggccagcccgcacgtcgtcgcgctccacgccgccttcgaggacgacgccgcggtgcacctcgtggtcgacctctgcgcgggcggggacctcctctccctcgtctcctcccgcggccgcctcccggagcacgaggccgcggacctcgtggcgcaactggcctccgcgctcgcgtcctgccaccgccgcggggtagcgcaccgcgacgtgaagcccgacaacctcctgttcgacggcggcggcgtgctcaagctcggcgacttcgggtcggcggggtggttcggggacgggaggccgatgacggggctggtcgggacgccctactacgtggcgccggaggtggtggccgggagggagtacggcgagaaggtggacgtgtggagcgccggggtggtgctctacatgatgctctccgggaccctgcccttctacggcgccaccgccgcggaggtcttccagtgcgtgctccgcggcaacctccgcttcccgccgcgcgcgttcgcctccgtctcgccggaggccaaggacctgatgcgccgcatgctctgcaaggacgtctccagaaggttctccgccgaccaagtcctgaggcatccttggatcgtgagccgtgggggagccgcggtgatgggctagttcgttcgatcgaggatgatgatgaactccatccatgtgtagatagcttttcttcaggcgaaggactcgtctgctagctgtgaattttggcttggattagtggcagggttcagtggtagtagcgtattattagtgtttgtgtccagtaggagttaggaccatgacgagctctggtgaattggctggaatttgggagctagctatatctttctacccgagtttgtccgatgtacatacagtgatcagttgatcaccttttggctgaactgaagaagagggtagtctctcttagtgcgtagcaggcttgttcagatgaaaaaaaaaaaaaaaaaaaaataaaa

SEQ ID NO: 76905 - DNA, 1974 bp, Oryza sativa
  Clone ID: PAT_MRT4530_76856C.1
atggcgatcaagggcggcggcgggtcggcggagaacagggggcggagcccgctcgccatggtggtcgccgtcggcctctgctgcttcttctacctgctcggcgcgtggcagcgcagcggctacggcaagggcgacagcatcgccatggccgtgaaccggcagacggcggcctgcggcggcgtggggctgagcttcgagacgcaccacggcggcgccggcgtggagaacgagaccatggcggcgccggcgccggagttcgcggcgtgcgcggcggcgatggcggaccacacgccgtgccacgaccaggagcgcgcgatgaggttcccgagggagaacatggtgtaccgggagcggcactgccccggcgacggcgagcggctgcggtgcctggtgccggcgccgccggggtacgtgacgccgttcccgtggccgcggagccgcgactacgtgccgttcgcgaacgcgccgtacaagagcctcaccgtggagaaggcggtgcagaactgggtgcgacacgagggccgcctcctccgcttccccggcggcggcacccagttccccggcggcgccgacaagtacatcgaccagctcgccaccgtcgtccccttcgccgacggctccgtccgcaccgtcctcgacaccggctgcggcgtggcgagcctgggcgcgtacctggacgcgaggggggtgatcgccatgtcgttcgcgccgcgggactcgcacgaggcgcaggtgcagttcgcgctggagcgcggcgtcccggcgttcatcggcgtcctcggctccatcaagctccccttccctccccgctccttcgacatggcgcactgctcccgctgcctcatcccctggtccgccaacggtgggatgtacatgatggagatcgaccgggtgctccgggcggatggctactgggtgctctccggcccgccgatcaactggcggaccaaccacaaggcgtgggagcgcacggaggcggacctcgctgccgagcagcagctgatcgaggagtacgccgcgatgctgtgctgggagaaactcgccgagatgggcgaggccgccgtgtggcgcaagcgccccgacgccgctgttgtgtcttgccccacggccacgccggcgccgccgaggacgtgcgacgccgccgccgccagccccgacgacgtctggtacaagaagatggagccgtgcatcacgccgccccaagcggccggcgaggtgatgctgcggccgttcccggagaggctgacggcggtgccaccgagggtggccgccggcgaggtgccggggctcaccggcgagtcgtacgcggaggagaacgcgcggtgggagaggcatgtggcggcgtacaggaaggtgaactaccggctcgacgccggccggtaccggaacatcatggatatgaatgccggcgtcggcgggttcgccgccgccgtcttctcgcccaagtcgtgggtcatgaacgtcgtccccaccgccgccgagctctccacccttggcgtcgtctacgagaggggcctcatcggcatcttccatgactggtgtgaggcattctccacttacccaagaacatatgacctcatacatggcaatggtgtcttcactctctacaaggacaaaaggtgcaagatggaggacatcctgctggagatggatcggatcctgcggccggagggcacggtgatcctccgggacgacattgaggtcctcctcaaggttcagaggatcgcgagcgggatgcggtggaagatgatcatggcgaaccacgaggacagcccccacataccggagaaggtgctctacgccgtcaagcggtactggaccgccgacgacaagagctcggagccggagccagagccggagaagatgaagaagaaggcggggagctcttcacaagagaggagagctccgaggaggaggaggagagtacagcaagttcttcagaagagaagggttcagaggagtaagaggtgctga

SEQ ID NO: 76906 - DNA, 486 bp, Oryza sativa
  Clone ID: PAT_MRT4530_76857C.1
atgtcccgggtcttccacccgtgcccctcaccagcgtcggcggctactggcggagcgcatgacgtgatggagtatggtagcctgcctcggcataccatgagcttctgccctgcctccctctccaggtggtttggcggcacggagcggatgaggttcgtgctcctcggcggcaaccacaacatggtggtcaccgctgaccagagtagccgcaccgtcctctatgacctcggcaagtacgccattcgcaccctgtctgccttcgtcttcccgacctatctcagggcttcggattcgcttgactccatcaccgccagcatctcggcgacgacctctacatccttcgatacaacccggtcgctggtggttgctaccatgggctcatctacggcggcgacgaggaatggcgctgttgtggtctctcgccgccttcctttcgacctgattcctacgctgtggtcggcgacacagacatattttttttcgtga

SEQ ID NO: 76907 - DNA, 489 bp, Oryza sativa
  Clone ID: PAT_MRT4530_76858C.1
atggaatccaagaggcgggcttttagaaggggtctttaccagagccttgatattagagggaggtggaaatcttgggaggaggcgcggcggactatccctccttgtgtgccggttgggcgcccaactaatcacaccgcttggaggaaaaaaccggctttcctcccccagtttgtgattgcgtgggtggcttcacacacagcccccaagttttgggtggttgtaagctcggacaccaggcctaccatggatgtcaggagtttactgaggtggcatggggcttggctgcaaccaaccaccatttctatgggtggtccgccaaatctttgccggtgggttgcgcttgcatcccagttgggtgtgaagatggaggtagggagtgttctcaagagggcaaaggttcaaacggctgttgagatattagtgaatggggagaacggtcaatgtgtgtacgagagaatgagaattctgaggatagaagctgaaaactgt

SEQ ID NO: 76908 - DNA, 172 bp, Oryza sativa
  Clone ID: PAT_MRT4530_76859C.1
gccggttcttgctccatccatctatccatccaaagagtggggaaccccacacctatttctttttttatggatgccaatctgatcattaacaaaagagaatttttgcactaagattggatttaattggaggggcttcataagttggggggagggaacttaaatagccttggtt

SEQ ID NO: 76909 - DNA, 5748 bp, Oryza sativa
  Clone ID: PAT_MRT4530_7685C.1
tcactgttcatcctggttcttgtcggaatgcttctgtactcgaatactctgatgtcgtagctcaccggggagcatggcttcagaaccgtacacgaggatgaatggtgtttccttattggacgttgtcggtgtggtgcgtacggcccatagtactgatgggagctcttcaacccattttttgtcgtgtaacatgagtctgtcgtagatgcgggtttttatcccttgtagtactatgccgtttgccccttcgacttgtccattgctttgagggtgagagaccgaggcgaagcatattttgactcctaagccgatgcagtaatcttggaagtcggcgctgatgaattgggagccgttgtcggttatgatgcggtgcggtagtccgtatctgcaaaatatccctttgataaacttgatggctttatcggccttgatttctccagtgggtgatgcttcgatccctttggtgaacttgtcgattgccacaaataggaatttgtagccgccttgtcctcgtgggaatggcccaagtatgtctagcccccagcacgagaacggccaagtcagagggattgtttgaagcgcttgtgcaggtagctttgtgtgtttgctgtgaaattgacaggcttcacatcgctggaccatgtcgcatgcatctttgagggctgttggccagaaaaatccttgtcgaaaggctttgccgaccaatgtccgtccggcggcgtgtgccccgcatatgccttcatgtatgtcgaggaggagttgtctgccgtcgtcggtagagacgcacttgagatgtatcccgtttggcgctcttttgtataaatcgttgccgatcatacagtagatttttgctttacgggttattttctcggcctctatgtcgtcttcgggtaactcctcgctattgatgaatttgattagcggggtgcaccagtcatccgttgtttcaatgtcagccacggtgcgttctgcctcgatgacctccgagctgatgtcgggggtgcttgggacgaattcgccgctgacttcttttacggagggtttcgtcaggtcgtcgagaaaggtgccgggctcgagcggttctcgtctcttctcgagcttcctgacttctgcaaggtacttggataactcggggttagagcatttgtagtctttgtgcacctggttcgcgactagctcagagttccctttgacgattagtcgcttggccccaagtgcggctgcggttcgtatcccggcgagtagtccttcgtattctgcagtgttgttggttgccctgaagttgaggtggattgcgtgtttgaattgatctccggatggagatgttaagataaatccagcccctgctccttggcttttgagtgcaccatcgaacgccattatccatgtcttattgtcgccttggttatctgacttgttatctagcatggtccaatcggccacgaaatcggcgagtacctgagatttaatggttgttcgcggcacgaagtggacatcaaattggcttagctcgactacccatttcacgatgcggccgacaacgtctttgtttctcacgacttcgccaagagggaaggaggaaacaattgtgactctgtgggcttgaaagtagtggcgtagcttccttgatgtcatgatgactgcgtagagcagtttttgaatctgtggatatcttgtctttgtgtcatggagagcttcgctgacgtaatagactggtcggtgtactttctctcgctcgacgacaatgacagtgctaacggagtgtggcgtagcggcaatataaagaaataattcttcattaggttggggagcaacaagtacaggtgggtttgataggtagcgcttgagtgcaataaatgcctcttcggcttcctgcgtccatacaaatttgtcttgtttcttcaacaaggcgaaaaaaggttgtcctcgttctcccatcctggcgacgaatctgcttaacgctgccatgcatccggttagcttctgtacttccttgagtcttgtgggcgacttcatgttcttgattgctttgatcttctcgggatttgcctctattcctttctctggattgagcatgagacgatatcgtcggacgttgtcgaacgtttcccggaggtcatcaatcaatgagttgcttgtcttggttttgacaacgatgtcgtcgacgtatgcttcgacattgttgccaagctgattgctaagtgcgccctggaccgtgcgttggaaagtattgccagctgttatcaatccgaagggcattttaacgtagcaaaatactccgaacggggtgatgaacgctgttttctcctcgtcctccttcgccatgctgatttggtggtagccagagtaagcgtcgaggaagcttaatagttcgcatccggctgttgaatccaccagttggtctattcgagggagagggaagtgatccatggggcacgccttgttgaggtctgtgaagtcgacgcacattctccatttaccattggctttccgcaccacaactggattggcaagccactctggatggagtacttccctgatgaagccagctttgagaagtttgtcgagctcttctcgtatggcttgttttcgatctggtgcaaatctccgcagtctttgcttgactggcttagcatcgggtcgcaccatgagtttgtgctcaatcacctccctggggacccccggcatgtcggacggttgccaagcgaacacgtcggcattgtcgcggaggaaggtgatgagcgcgagttctttcttgggtggctcaaacgtggcgggtggagtgggcgtttgctcgaccatgtcgaggcttcgcttgtcgcattgcaccgccagttttgcgttcccttgaatagtgattgttcccttcggtcccggcatcttgagcacttgatatgcgtagtgggatgcggccatgaacttcgcaagtgcagttctcccgctgatggcgttgtaagctgtatcgaattcagcgacatcgaaggtgatctgctctgttcggaagttgttggcttggccaaaggttacaggcaacgtaatcttgcccaaaggtctggatgatgattggggagtaatcccatggaaaggttgatcagttggcgtcaactcactttgtgggattcccattgcatccagagtgctggcaaaaaggaggttgatcgagctgcctccgtcaatgaggactcgtgctaccttgatgttccgaatagggggttcgaccacaatcggatatcgtcccgggataactgcggtcttgggatggtctacttccgagaactccatcttctggtcagaccactttatcctgggtgcagctccctgccatgtcgaacaaacttcacgctccactttcttgtattctcgcttggaggagtacgtcgtggaaccgccgaagatgtgcgaaacatggaggtcagagtctgggtatgcggagtccgtttcgtgaggaggcgactcctcgttcttctcgacaacgcgtactcgcttacctttttcaaacgccatgtgcttctcgagtgactttttgaaaacaaggcaatcctctagagaatgtctatctgttttgtgtatggggcaccatgatttctttgtgtcgctgccttgtgggtccgggcgcttgggagggttcgcgtactctactgcaaggacttccgcttgagctttccttttcccatttttgcggtttttcttcttgctcgactcagatgtgtctgcggctgactttttctctcccccagtcttcgacttatcgttcttgcgtcttagtgcgtcgtcgacgtggccgcatctttcaacgatctcgaatagactttgagtagttgtgatatgccttgttgccaactcctgggtagtgtagcgatctctgacgccagacttgaaggcgcaaattacagaagcgtcggtgatctcggggatggtattcctgcactcgttaaagcgccgaacgtattccctcaaagattcacctgagttctgtgttaacgtgtgaagatcgtcttcgatcgcgtggtgcttgtatgttccttggaagttggcgacaaactgctgccacaggtctgcccacgaagaaattgagtagggggggagatgcatcagccacgatcgtgcagatcccttcaacgcggttggtaaatagtttgccaacgcgttgtcatctgctctagcggcataaagcactgtcgagtagacttgaaggaattcttctgggtcggtgctcccatcatacttttcaatagctctgggtcgaaatctctcaggccatcggacatcacgtagggaacgaccgaaagccctgcacccagcgctcggagtggtgggttgtcggtggtcgcgtgaccttcgtggatgtcggtctgacgatgaagaggacgcggaggatgacgatgatgacgatgggtcgcttggttccggcgtgcgattacgagggtgacgacctggatctcgggaatcttgtcttcgtctctcgttgttgtctcgacgccgatctcctccatcttcatcgttacggcgacggccgtgactagtgttgtctggccctcgccgatcacgatcatcgtggtctcggttctcgtttgggcgacttcctcgatcatggcgttgtgaggagacatgatgccgagagcggttcgcttcatcccgtgtgcgtcgtgcttctcggcgcccgttgatttgatctcgaaggtcacccgtgccacgaggtgggggggtagctcgttgaggtgattctctatgttctggaatttcaccgttagcatcgccgatgggtgatcggttttgttgcgccgcggtggcagcttcttcgaacgcgttgctgaggttagccaccgatgcccgtagtcgttccgtccaacgctcgaggtcgttgttcagaacaggatcgtatggtgtttccctcaatatggcttgaacagccgtgccaacgtcatcgatggccaacacctcccgcgccacgtctgatgtcgatgacccatagtcttcgaggagatgtaaaacagatggttcttggggattgagatcgattaccccaacgaatcgatctggggccggagtcgctccttgttccctgtcgttatcccggacggggatgtatgacttagaagccggagttctcatggcgctgagtagaaccttgcaatttgagaggtcgtgattctttgtcttatgtataggacaatagacgctccgagttgaagaagtgcgttgaattccacgttctttgcaggcgcggatttcagcacaagcgttagcaaatgcccagcaatcttgaagagtatgtttcttctttttatggatagggcaccaagacttgatagtttcggaagtcatctttgctggcccgtggtttgtgtcggagggacaaggcctggccgcatcagaatccttcacgaacttggatgtagtcattaatccgctttccgtttcaacgggtggatttttcgacgtagaggcatcttggttcgtagccaccgcgttctcgtttctggtcattgggggaccggttgagattggcattgtggtgtaaaccgagtaaatgatttcaccgacttgagtccataccagcatgattgtgggaagaacttgatcggagctggtgttgatgttgttgtcgacgaagcttgatggcatagtagtagaaccttgaataccaagttcccctacctggcgcaccactgtcgacgggggatacccgtagaccggatatagagggtattggggtacgccggtataaggatctacgtaatacgacat

SEQ ID NO: 76910 - DNA, 396 bp, Oryza sativa
  Clone ID: PAT_MRT4530_76860C.1
atggccagccaatggcgcagcttccgctttaggtcgccgagaacaccgcgctacgtatatacacgccttcctcgccagctactccaggactctgcctccagtactgctcctgctaccctcgcctcctacgcctgccgttgccaccatagactagcgtcgaagcgtagcaagaggattgcggccaagcttgcgctcgccggcccgagtgacatgaccttatgtgcgcagcacaatttgatgcgcaagcttgggttggtgcctgagaagggtcatgtgttggccgaggctgttacggcttacaacgccctcttctcccagcccctccctctggatcacgccatagccctatcttcactcttccccagctccctgcctccgacgcaggctggagtgtag

SEQ ID NO: 76911 - DNA, 134 bp, Oryza sativa
  Clone ID: PAT_MRT4530_76861C.1
atgccgacggagtcacggactgaactcctggatagattgatggataaggtggacctggatgggctgaatctttacacaatgaaaacgctcatcgccgacaccatcaaccgtctcctattcgacttccttgacta

SEQ ID NO: 76912 - DNA, 481 bp, Oryza sativa
  Clone ID: PAT_MRT4530_76862C.1
gaatttttcaccggaatacaaaagttcaaaaagaaccaaaacctgatttttggacatattggagtgtattgggtgcgttcgttgcaaaaaatcactacgtatttcgcgcgtcgaactatggtcaattaatgccaatattggcacacgtgggtgcgaagtttttcaccggaataaaaaagttcaaaaagcaccaaaacaagatttttggacaaattggagtgtattgggtgtgttcgtggcaaaaaaaatcacttcgtgattcgcgcggcaaacttttgtcaattaatgccaatattggcacacatgggtgcgaagtttttcaccggaatgaaaaagttcaaaaagcaccaaaacaagatttttggacaaattggagtgtactgggtgtgttcgtggcaaaaaatcatttcgtgattcgcgcggcgaacttttgtcaattaatgccaatattggcacacgtgtgtgcgatggttttcaccgg

SEQ ID NO: 76913 - DNA, 324 bp, Oryza sativa
  unsure (1)..(324): unsure at all n locations
  Clone ID: PAT_MRT4530_76863C.1
attgtgaaacttggcaatgtaggtagctgtgtttatcccattttggtnagggtgtggctggcaatgtggttgtagaagagagcgttgaggccctagatgcatttntngttgtgtttacattagaaacatctcccctatgtggaaaaagcatcagttttacatgtnccgtatgaaaaatgttgtgttggatgtgttacttggtagactatacagatgagggaggacttaggactagtaggaaagagctatggttaggncacctcataaacaaatcaatagttttcagagttttagccattagttatagctgtcantgtttggata

SEQ ID NO: 76914 - DNA, 3315 bp, Oryza sativa
  Clone ID: PAT_MRT4530_76864C.1
atgccgccgcgctggcgcgccacggcgacgaggcttctcgtgctcctcgcgtgcgcgtgcgcggtgttcgtcccgcggtgccattgcgtcggcgaccagggcgaggcgctgctgcgatggaaggcgtcgctgctgaacgggacgggcggcggcggcggcgggctggactcgtggagggcgtcggacgcgagcccgtgccggtggctcggcgtgtcgtgcgacgcgcgcggcgacgtcgtggcggtgaccatcaagacggtcgaccttggcggggcgctgccggcggcgagcgtgctgccgctggcgaggtcgctgaagacgctggtgctctccggcaccaacctcaccggcgcgatcccgaaggagctcggcgacctcgccgagctgagcacgcttgacctcaccaagaaccagctcaccggcgctatcccggccgagctgtgccggctgaggaagctccagtcgctggcgctcaacagcaactcgctgcgcggcgccatccccgacgccattggcaacctcaccggcttgacgtcgctcacgctctacgacaacgagctgagcggcgccatcccggcgagcatcggcaacctcaagaagctccaggtgctccgcgccggcgggaaccaggcgctcaagggcccgctgccgccggagatcggcggttgcaccgacctcacaatgctcggactcgccgagaccggcatctccggcagcctcccggcgacgatcggcaacctcaagaagatccagaccatcgccatctacaccgccatgctcaccggctccatcccggagagcatcggcaactgcaccgagctcaccagcctctacctctaccagaacaccctctccggcgggatcccgccgcagctcggccagctcaagaagcttcagacggtgctcctatggcagaaccagctcgtcggcacgatcccgccggagatcggcaactgcaaggagctcgtgctcatcgacctgtccctgaacgagctcaccggcccgatcccgagaagcttcggcggcttgccgaacctgcagcagctgcagctcagcaccaacaagctcaccggcgtcatcccgccggagctctccaactgcacgtcgctgaccgacatcgaggtggacaacaaccagctcaccggcgcgatcggcgtcgacttcccgaggctgcgcaacctgacgctgttctacgcgtggcagaaccggctcaccggcggaattccggcgagcctcgcgcagtgcgagggcttgcagtcgctggacctctcgtacaacaacctcaccggcgccatcccgagggagctcttcgcgctgcagaatctcaccaagcttctcctgctcagcaacgacctcgccggtttcatcccgccggagatcggcaactgcacgaacctctaccggctccggctgaacggcaaccggctttccggcacgatcccggcggagatcggcaacctgaagaacctcaacttcctcgacctcggcggcaaccgcctcaccggcccgttgccggcggcgatgtcggggtgcgacaacctcgagttcatggacctgcactccaatgctctcaccggcacgttgcccggcgacctcccgcgaagtctccagttcgtcgacgtctccgacaaccggctcaccggagttcttggcgccggcattgggtcattgccggagctgacgaagctgaacctcgggaagaaccggatctccggtggcataccgccggagctcggctcttgcgagaagctccagctgctcgacctcggcgacaacgcgctctccggtggcatcccgccggagctcgggaagctccctttcttggagatttcgcttaacctcagctgcaaccgcctctccggcgagatcccgtcgcagttcgccgggctcgacaagctcggctgcctcgacgtctcgtacaaccagctctccggtagcctcgagccattggcaaggctggagaacctcgtcacgctcaacatctcctacaacgccttctccggcgagcttcccgacacggccttcttccagaagctacccatcaacgacatcgccggcaaccacctgctcgtcgtcggctccggcggcgacgaggccacccggcgggcggccatctcgtcgctgaagctagccatgacggtcctcgccgtggtcagcgcgcttctcctcctgtcggcgacgtacgtgctcgcccgctcgcgccgcagcgacagcagcggcgccatccacggcgccggcgaggcgtgggaggtgacgctgtaccagaagctggacttctccgtggacgaggtggtccggtcgctgacgtcggcgaacgtgatcggcacggggagctccggggtggtgtaccgcgtggggctccccagcggcgactccgtcgccgtgaagaagatgtggtcctccgacgaggccggcgcgttccggaacgagatcgcggcgctgggctcgatccgccaccggaacatcgtccggctgctcgggtggggcgcgaaccggagcaccaagctgctgttctacacctacctccccaacggcagcctcagcgggttcctccaccgcggcggcgtcaagggcgccgccgagtgggcgccgcgctacgacatcgcgctcggcgtcgcccacgccgtcgcctacctccaccacgactgcctcccggccatcctgcacggcgacatcaaggccatgaacgtcctgctcggcccgcgcaacgagccctacctcgccgacttcggcctcgcccgcgtcctctccggcgccgtcgactccggctccgccaaggttgactcgtccaagcctcgcatcgccggctcctacggctatatcgcaccagagtacgcgtcaatgcaaaggattagtgagaagagcgacgtgtacagcttcggcgtggttgtgctggagatcctgacggggagacacccgctggacccgacgctgccaggtgggacccacctggtgcagtgggtgcgggaccacctgcaggcgaagcgggccgtggcggagctcctcgacccgcggctgcgcgggaagccggaggcgcaggtgcaggagatgctgcaggtgttctccgtcgccgtgctctgcatcgcgcaccgcgccgacgaccggccggcgatgaaggacgtggtggcgctgctgaaggagatccggcggccggtcgagggcggcgccaccggcggcggcgaggggaaggagcagaatgccgccgccgccgccgccgcgcctccggcggccgagcgacggtcgccggcgaggagcacgctgccgaagggcggctcttctagctgctcgtttgccatgtcagattactcgagttga

SEQ ID NO: 76915 - DNA, 466 bp, Oryza sativa
  unsure (1)..(466): unsure at all n locations
  Clone ID: PAT_MRT4530_76865C.1
gatgatcacaaactaagctcgtactgtcacatctaagatacgaggtggtacgatgttggtttatttgggacaggtgggaggttggtaagtnggantattaantattgtaatattttgtaaagagaacttatgctctaagtaagaatattaaatgtgagtcatgagtcaacggggtcaagcccctacaaaagccaagaaccccaagcccttccagctgcagacttgcagtgcctcgntcagctcactgtaacaagatgggcggcgcttctcgacgtcgaagccgaagcccgccgccggaggagggcggcgagtccgcgtggtggccgtccactccaaggccaagtgggacgagctntgggacgccacaagacaccacaaagctggtggtgatagcttctcggcgtcgtggtgtggccgtcaagatgatgggccgttttcaaggngtggccgccgtttaccgngtggc

SEQ ID NO: 76916 - DNA, 1426 bp, Oryza sativa
  unsure (1)..(1426): unsure at all n locations
  Clone ID: PAT_MRT4530_76866C.1
tcaaaaagtgtaggccaaccttcttaacaaaaggccacatgtccaatcaaatgtgcaatttccttcattatcatatcttggcctagcaactgcagccaagaacataaccttgtcgattgcatttttattatgtactgtcctcaatggctttggttcatcagggcgtaggtagaacctcctgaccttgactgtggtattgaaccatttttcatccaagtgcactatgtttttcatgtcactaaaggttggatgattgggtaaagtatcattatctagcatagaaacacagaatcggacgtgaccttccttattttcatccttcaataagggctttattgtgttagactcttgacaaagcttgccatctttgaaactcctatgcatagtgcttttactaacatgcaactcagatgcaatatctctaatagtagtgcgtctgttcaaaggaattgttgggaccagagataagtccacttcgactcgatggcgtccacatttctcctttttagatgtaagatcaagaggaacaccttctgcatggcaatgttttgctttcctccaaatactctgaactaaactcttcttaatgttaaacaagcttgcaacaatggtggttgtgtcccttttaagttttaggttctcactgtctgaatcctctagttctactccataaccaatatccacatgattggcataaacggcaaagtcgtcatctggttgatactcataatcctcctcttcaacctgcatgttaacatcagaatgacgagtagcgtcaccatgatattcttggtcttgtggcgcttgttcttgctcttgttggacttcaccataagattcaaattctggttgatcttgataatcctcctcttcgacttgcatgttcagatcgaaatcatgcatgttcagatcgaaatcatgggcaatagtgacatgatattcctgtatttgttcttggtcgtgttcttcaccttcttcagcttggtgggattgttcttcatctggttgttttccatacttctcttcttcagcttgcaggttgagatcaagttggagggcagcattaccatattcttcgtcttgcacatcatcttgtcggagaccatgttcttcaccgcactcttcatcttcttgtagtgctaggttcagatctatgttcattgtggcctcgtgtatttgttgggttgtggatggatggtgttgagttctctcttgatggatgttgtggatggaggagagtgttttgatgcttaagtgtntagcgctagtgatttttgagcttggttttgatttatgtaagcaggcaagccatgtgatttggcacgccttcagctgtaatatttggcgcttagcggttcaaattttgttttgtctatcgcttgtgattattgagtagatttttaatgtgttcaaaaaaaaaaaaaaa

SEQ ID NO: 76917 - DNA, 291 bp, Oryza sativa
  Clone ID: PAT_MRT4530_76867C.1
atggtggcggaggcagcttcacagctttacgcaacagcttgttatggcgtcagcatggcagtggttagcttcttgcagcctgtcaacgatggagattatgatggccgccccgcgcctgaagctcaggcgacgcatgctaatctcgagccggatggtatcagtatcaggccaggcgagggtggatgggtctcaggtggcaaccaaacaacttgcaagttaatcccagggttgtctcaggccatgcaatttttcctcaaggaatcaaccaaaaagaccctaagacttcaatga

SEQ ID NO: 76918 - DNA, 381 bp, Oryza sativa
  unsure (1)..(381): unsure at all n locations
  Clone ID: PAT_MRT4530_76868C.1
gggcactaaggctgttcgtctagatcatacaagaacctgcatttctactggatacttggggctggacacgtgttggtacgcgtgcgtgagtcaggccctgccacttgcacgagccatgagtcaggtagccagtaacccaggtgcgtcctagccaggttagagtagtcgtcccaatcaggtnacagatagtacccaagacaaagagtagataaaccagaaggccngacaggagtagtaccgtcacgtcaagttagcagaatgacattgtaccgtttcttcaagaagagaatacagaaaaaacaagtgcacacttcaaggcaatgaaattgatgatatatatagagagcattttgtttgcgtcaaaaaaaaaaaaaaaaaaaa

SEQ ID NO: 76919 - DNA, 333 bp, Oryza sativa
  Clone ID: PAT_MRT4530_76869C.1
gatttataactattatcatatatcacaagcctacgactttgcgggaagtggctttacttctctttcatacggccaattgcatccatgccctaattttgaatgttaactgcatattttacccctactctttagggtttgcatttttgccacctcttttagaaaacgaacaccccgtttgccctcacttttgacacccgttagatgacacccatggctttgggttaaaaaaatacaaattgaaacagaaaaaggatttaatttactattgttcccttcagtgaatggataaagacctaagcacattccttttctgagctcagatgagttgaggcg

SEQ ID NO: 76920 - DNA, 900 bp, Oryza sativa
  Clone ID: PAT_MRT4530_7686C.1
atggacaaatcctttattgatactagcttcctgatgttcgatgcgaaaccacagtactgggtgaaggcgggcccggccgccactctcgctgacgggtgggacccacctgtcatcgcctacctcccgccgcgccgccgccgcgcccgtgccctagcgccgccgccgccgcagattgcgccgcatcccgccgtccccgcgcgcattaaagagaggggaattactccccgcgtttccctctcccgattccccctctttcccctctctctctccctcggatccgtttggaatcgttcccgcaaagttcgccggcgctttcaatggagccgagatctccgcgcgcggtttcctctctctccggccgcgctctccccctctcggcgctatataattgctccccgtgcctctctcctccgtttccgccgttcgccgcttgctctcgccgtcggtttcgtgcccgcgacgttctcctctccctccgccgtcgccgccgaactccgtttcgccgccgtcgtcgctccggtcctcctcccgactgggcgccacctccttcggcttcgccgagtggttgccgaccccgtccgccgctccgcttcgcccgccgaccgccggagcaccgtcgtcatcgtcatcccgagccgcgccgccgtcttcctccgctccgtccgccgtttccaccgccttcgccgtcttggggtgagccgaagaccgccgttcgccttccccctttcctcctctctctcgggtgccactccgccgcgccgttggtcgccggcggcgaccatcggggcgcgggtgcgcgccactcccgtcggccgcgccggcgaggccgccctcgggcgcgccctcgcggctgccaagtgggcccggccgtcagccgcccgcgcccgcgggtgcggctga

SEQ ID NO: 76921 - DNA, 2908 bp, Oryza sativa
  Clone ID: PAT_MRT4530_76870C.1
aaactcggcaccaccgtcgccgccgccgtcgtcgcctcgcctcgcctcctcctccctccctccctcgattcccaaaccaacctccccgccaccgaacggagcaaccaaccaccaccaccccatctccgccgccgccggtgaggtcgccgggggaacgacgcgcgcccgcacgcacgcccgaccgccggatcttgggaaggcgggggaggacatgtcgcaggcgtcgctgtcgccgtcgtcgtcgggggacgaggaggaggaggacgagggcgtcgaagggtaccgcaagggcgggtaccacgccgtccgccccggggaccagttcgccgccggccgctacgtcgcccagcggaagctcgggtgggggaacttctccaccgtctggctcgccttcgacgtccacacccagatgctggataaattcttttggcttgtcatggccggctcatttaagtgctgtgataagaaatttgtggctcttaagatccagaagagtgcaccagagtttgcgcaagctgcttttcatgaaattgagttcctttctgagatcaccaagagagatccatcaaactgtaaatgcattatccagctgatagatcattttaagcacgctgggccaaatgggcaacatatttgcctcgtttttgaattccttggagatagcttacttaagctagtacaatacaaccgttacaacggcattggatttggaccggtgagggaaatatgcagatcaattttgataggtcttgattacttgcatagagagcttgggatcatccattcagatttaaagcttgagaatattcttcttatctcaacaattgatccctcaaaggaccctatacgctctggacttaaacctaatcttgagaggcctgaagggaatcctaatggagaagttatgcttaacccgattgagaagaaattgaagatgagagcgaggagggtgctcgcaaagcttgctgagaaaaagaaatcagctgcagaatatgcacgtgcagaaaggagcttggatgggattgatatgacatgcaagattgtggactttggaaacgcttgttgggctgacaagcaatttacagattttattcagacaaggcagtaccgggcaccagaggtcattctaggttcaggatattcatttcctgttgacatgtggtcatttgcgtgtattgcttttgagcttgcaacaggggaaatgctatttacacccaaggaagggcaggggtatagtgaagatgaggatcacttggctttgatgatggaaatccttgggaagataccaaaaaagattgctaccatgggaacaaaatcaaaggagtattttgaccgtcatggagatctgaagcggataagaagattgaagttctcatctattgaacgtgtcctagttgacaaatacaaaatttctgaatccgatgcacgggaatttgccgagtttctttgccctttgtttgattttgccccagagaagcgtccaacagctgcacagtgcctacaacacaaatggcttcaatatagtgatggcaagaactatgggactctcaacattagtgatgtcaaaaatgctagtgttacatgcagccctggaacgactgccagcagtgattctaagagcattgatgtaacacgcaacattggagacaagcctgacagttatgccgagagagctgatgcaaagtgcaatactagcaaaaaaagcatcatcaacagtaattctgagaattctaatgtacaacccaatactgcaagtgttggcaatagaaattccaaaattgatgatgtaaattctaatactgggagcatcactaacaaggattccaaaaacactgttataaagcccagtattggaagcttcgtgaacagaaatgctgaaacagttgatgtaaaacccaacattggcagcataaccagcagaggtgacagtagtagtgacaccaagagcaacattggaagcgttgccagtaaagatgccaaaactattgatgcaaaacccagcaccagcagcatcaccagccaggatagtaagattggtgacggaaggagcaacattgatggcattgccaacagagatgccaagaccgctgatgtgaagcataacattcgaagcgttgttaacacttatttgaggaattttgatgtgaagcacaacactggaaacattgttgatggtggtgtcaagcactcagatttgaaaccaggcactgtaagtgctgccaatgtcgattccaagagtataagtgcaaagcccagcactggaagttttgagaacagtgatgccaagagtattagtgcaaagaccagcactggaagttttgacaacagtgatgccagaaatattatgaaggcaaacactggaattgttgctaacaatgatatcaaggatactgatgtacagactaataccgaaagtgttaccagcggcgacgacctaaacgacattgatagaaagccaaacattggacgtgttgctgcaagtatacagaggctggagagcagcataggcaaagtgcaaagtggaaaatatcggtgagaaaaataatccatcctagtgctgatccagttacctattttgatcggcttggatctgttttctttttgtggagaggcatattcaatttcattagatttgtgtcattgatttgattgctgaggttaataactaccctttgtgatggagccaatcttcaagatttgaggatttggcaaaagcaccagctgatgctttttacatatcttatatgttcctgctaactgtaaaaaagttttgtatttgcacacagaatacacatggaggtacatatttcttatttacctttgttaatgttcacagattttattgacattcaaggtacataaacattcttttgggctaaaaaaaaaaaaaaaaaaaaaaaaaaaaaaa

SEQ ID NO: 76922 - DNA, 551 bp, Oryza sativa
  Clone ID: PAT_MRT4530_76871C.1
aattaaattatcttttaatttctttaaatatcttttctttatttatttaattaccttttctttattttaaaataccatttttatttccaacctatagaaaccgacatcgttttctttcaaaatttaaatatcttttgacctattccctttgtctctcttccatgctctaattttgttttattttaccgtttatttatagtacttttccgtataggctttatttgccatcttttacgtatacgtacgttaggacaatacagaggattttgtcggcatcagagctgatgtgggatgcagccgactacgctgaaggcctctgaaaatttcaaggcgcaaggcaggaaacaattaaaattttgacccacatggaataatcaaccccatatttactttatgcctaaggttaatcatatgaataacatttgggtgggcttaaggtgatatttaatggttttaagccttgttatatgagattatggaaagatacagtggacatcattttatgtgatttattattcaaatatctttacaaacttaaaaaaaaaaaaaaa

SEQ ID NO: 76923 - DNA, 172 bp, Oryza sativa
  Clone ID: PAT_MRT4530_76872C.1
aatttcggcccacgcccacgcgtacgagtgaagcaagcgaagctcgaagagctatggctcccgtcgtggcagcggcggcggtcggcaagggcgtgggccgggaagaagaatggctgcgtcacccttggcatcaactgcgccaaagcccgtcgacgaacaagatcatgggaaa

SEQ ID NO: 76924 - DNA, 1407 bp, Oryza sativa
  Clone ID: PAT_MRT4530_76873C.1
atgtccatggcattactctcgctgtcgctggccgtggcgttcctggccgcagcgtcggctgcaggcgccaccggcgcgtcccggagcatgaggcggccggaggaagacctcgtggcggggttgcccgggcagccggatgtccggttcaggcactacgccggctacgtcggcgtcggcaacggcaaggcgctcttctactggttcttcgaggccgagaaggagccggagaagaaaccgctcttgctgtggctcaacggagctgtgaatctgctgttccttgaagcgcccgtcggcgtggggttctcctacacgaaccggacatctgatctccgacgcctcggcgatcgtgtgacggcgcaggactcgtacagcttcctcctaaactggctgaacaagttcccagagttcaagaatcgggacttctatattgccggagagagctatgctgggcactatgtcccacagctcgcagagctaatctacgacgggaacaaaggagccagcagagacagagtcatcaacatcaaaggtttcatgatcggcaacgcggtgctgaacgacgcgacggaccagatgggcatggtggagtacgcgtggagccacgccatcatctccgacgagctctactccgcggtgcgccgggagtgcgactcgttcaaggaggaggaggacggcggcaagccaagcaagggctgctccccggccgtccgcgccttcctcagggcctacgacgacatcgacatctacagcatctacaccccgacgtgcctctcctcctcctcctcctcccccgcgtccgcatcgccgcgccgctcgtctcccgggctcgtcgccgcgccccgcctcttctccaagcacgaggcgtggcgcaggatgcagcgcgtgccggcggggtacgacccgtgcacggaggagtacgtgaaggggtatttcaaccgcgaggacgtgcagcgcgcgctgcacgcgaacaggacgggcctgagctacccgtactccccctgcagtgaggccataagtaaatggaacgactcgccgtcgaccgtgctccccatcctgaagaagctcatgggcgccgggctgcgcatctgggtttacagcggtgacacggacgggagggtgccggtgacgtcgacgcggtacagcctgaacacgatgaagctgcggccgcggctgatgcggaagaccgccggcgatggcgccggcgaagagtcggagtggggcgggtggcgcgcgtggtacgacaggcagcaggtgggcgggtgggcggtggagtacgaggaaggcctgacgctggtgacggtgcgcggcgccgggcaccaggtgccgctcttcgcgccccggcggtcgctcgccatgctctaccacttcctccgcggcagctcgctgcccgcttcgcgctcccgctga

SEQ ID NO: 76925 - DNA, 417 bp, Oryza sativa
  Clone ID: PAT_MRT4530_76874C.1
atggagctggcgtccgggccgaagatgagccgcccgccgcacaggaatctctacacacaacaacaacaacaaatatatgggctccttttaatgtggaaacgcacgaattttgtccgaatcgttttgaaaacgtacgttcctgcccctccagacttggtaaggcggtgggtggtgacggcggtggcggtggcggcggcggcggaggtgggggaggacgcgtcggaggcgttgctgcgggcgagatgggtcttcttgaacggcaaccacctcaccttcaacatcccggtcggtgcgccggtgatccccgtggccgcgtccttaaagcatccagaattggacgccgttgtaaacaacgtccatacttggacgctgttggaaccaacgtccacctccctggtgcagccaagccacgaatag

SEQ ID NO: 76926 - DNA, 372 bp, Oryza sativa
  Clone ID: PAT_MRT4530_76875C.1
atggtgtacggctgtggtctgtggaacgagctagctgttaggcaagccttccagtcttccacggtggcccactccacacagggaccacataccagtcggaaaaaacagtgggacccacctgtctccacactctccgtatctccacggcgagttagtgcctcctcctctctccctcatgtcagcggcggacggcgaggccacgacagcgctcggcccttcgcttctctagagtgcgggtggacggcggggccaggggcgacgcatggccctccgcttctccagcgcgggcgccccatatcctcctcgcgcgatgttgtggcggtcggtagggccaagagcggcgccatcctcttcagcctcctacctcaatga

SEQ ID NO: 76927 - DNA, 1694 bp, Oryza sativa
  Clone ID: PAT_MRT4530_76876C.1
ctagatgagtgacgggagcacgccctcctcgcggaacatcgggaggaggtccgggaacgcggcgaggttgcggagcacgcccgcggccgcggcctgcgccgaggagagcggccagcccgccacgcgcggccacggccggccaagaaccagcacgtgggccgtggcgtccgaggacgcgaacgcggcgagcacggacacgaccttctcgcgtgacgccggcaggatctctcccgagtcaagcatcgcggccacggtggacaccgtgccgccgatggtgtggaggtgcccgaggttgttcgcggcgccgttcgcggcgacggacacgtgcgcggagagtgcggaggtgagggggcggaggaggagcggcgcggagtgcgggaatgcagggtgggagagcgacgccgagatggtcggcgtgttcccgcggtcatgacacgcgtgctgctcctctccttgccggccgccgccctcgcacgcgcgctgctcctctcctcccgccggctggcgcccgcgcacgcacgctgtcgctggaaaccgcaaataggctccaaatatcccaagctcagatattgtaaggtcctcaaagcaaacgccaccctggaccagatgagtaagagaagctcttggaaaaatcctttgcatcagtatgtaggctgcaagtgcctctccctgctccttctggagtctgaccagcgtttctcgcagatcataaccatatatgttgtttcctccgccttctcgctgaggtttcaggacaaacaagtcaggtttttctattgcagtcttcactatttcttcattatctaaactccataagcctgcaaagcatttccgtagcttggcaatgtcctccttgttgttaaggaatctttcaagaatattaggttttgctagttcttgctggatctttttcgttcccactaaatggtaggatattgaagggcactttatagcagatgactgctccatcaaaagcctggctctccattccgcttcagaaggataatcatttggagaatatccagctctcttgttattaaactcagtccaagccatgctcaatgcttcagcaaattgggtggcagcccagttctgaggaatccttttggaatcaaggcctaaaaccttgccatgtcgattaagtagggtcctagataaggagtcttgcaaaaactcgccatccaagctcacacgatccacaagatcattgaaaataggagccagttcacgtgcttgcttccaaaaagatgctggaaaacgtgttggaagtaacgcaaatggagcatgaaccagaccaacaccaggaatagttcctgatctcggttccgcgcggtcgccgacgacgagcccgtgcacggcgcaccagacggcggcctcctccgccatctcgtccaccaccgccgccatctcctcttccgccgccgccggcgcgacacccaggggcgcctcggcgctcatcgccctcgaggccaccgcgcggcggggggggagggccacgtgtctcgcggcggcggcgacgacgaggcgggggcgggcgggaggcgccggtgcctggaggcggcggctgccggagcagcagccatggtggtggtggtggtggggggtggtgacgtaggaggacattggcgatgaatttggagaattccgaggtggtctctgcaatttgtcccgtggaattgagttcgtggtggcgg

SEQ ID NO: 76928 - DNA, 225 bp, Oryza sativa
  Clone ID: PAT_MRT4530_76877C.1
atgtcggcaaagctcaacctcctcatcgtgccaaatcagaaagctgagaagcactccgttccagctccaccgggccaccacctcaccgtcgtgctccaacatgtggactccagtactcgagtcgatgacctcgacacgacctccctcctcatcttcgtggagcacatctctactcttgacctcctccttaccatcggagcatccgatgtgcagaggttccagtag

SEQ ID NO: 76929 - DNA, 172 bp, Oryza sativa
  Clone ID: PAT_MRT4530_76878C.1
tgaactggtccacgcggatgccttgtggagactatcccccacgatctcgaacgagtgcgtgccttcctctgactccgtggtgtgcctcgacgctgttagtcgatcgtcggccgcgcggcggtggttgcgggggaagatggtgagcgtcgccgccgaggaggaggagacgcct

SEQ ID NO: 76930 - DNA, 487 bp, Oryza sativa
  Clone ID: PAT_MRT4530_76879C.1
aacaaaacagctcccaaaacttttttatttggcgacataaaaaaacaaaaccgggggggttttgcagcctccgggggactaacgatgctttatgtttaaagagccctaccagtaaggggcccagaaaaaaaaaccgggatccaggcgcgccaaaaaaagcttatccaaaaaccagggggttacaacatggtcaataacaaacccgggggtccaaaaacattgggcagaatactggggttcgcccaaagggtcccatttttttttttttttttaccaggggctgaacatactggtggcaaccgggggggggagccatttgggggtttttgaccccggccccagggggccccctgctgaaattatgggggggtaaaaaaatccactgggatccttgggggagggggaaatctactaggggggttagggttattttgggggttactgcgtccatgaatacatcaaactcatccatggccctaaaaggagc

SEQ ID NO: 76931 - DNA, 346 bp, Oryza sativa
  Clone ID: PAT_MRT4530_7687C.1
ttttgtgttttttaggcagacggcgatatcatggtataataacaatttaattctttggcgcacgtatgtacgtacgaacgctcgtatacgctggcaagtatgtagaaccctagggtgcatgcgaatgggcatctgccccatgcatgcatgcaacaacacaaacgaaggaccaagctcacgccacgtatgcgccgtgcgcatgctagagcttggcggagccggtgtcggtgcaggcggaaaaccgccaggggcggaatatgcagctaggtggggagcacggccggcgccggcagacagcctgccatggcggggcacggggcagaccggcatagctgttgacgggtgc

SEQ ID NO: 76932 - DNA, 262 bp, Oryza sativa
  Clone ID: PAT_MRT4530_76880C.1
gcgtctcctcctcctcggcggcgacgctcaccatcttcccccgcaaccaccgccgcgcggccgacgatcgactctgctctcaacgcacccgaaatttgatccgagcctcccaacctgctctgatcgatcgattgttggaaatctcgcacgcggtgatggtgtacaataagaagaatacaacagcgtcgaggcacaccacggagtcagaggaaggcacgcactcgttcgagatcgtgggggatagtctccacaaggcatccgc

SEQ ID NO: 76933 - DNA, 3204 bp, Oryza sativa
  Clone ID: PAT_MRT4530_76881C.1
gtagcataatcatactgcatgtactcgaatttggatacagtttgtcatacacgatacaaaacatacagagacgagtgggtagcgacatgtcgaagccatcaccataatttaaatagctatattgccgggttctctcggccaagaacgccagcatcatctaaagagataaactaaggtttaagacgaatcctcgtcggaggaatcatcaccggatgtcacgccggactggtcgtccgattcatcgtcagaagaagcagccacggtgggcttcgcagacatcttgctcatcgccgccgtcttgcttgctctctgcgaacgagccgcggtcatcaccaccggagtggccgcaacacggctcaccgacgtcgcgtgcaagttatcctcctggccatctatgtcactgtcatcgctggaggatggcgaccgtctcgcccttctcctgctgggaggaggccggactgaccgtggtgctggcgttggtggcaccacagaattggtctccaacctgaagccagcatccaatcctagtttcttgaatatttcttcagcttcatcttgtggcaactcttcttccgggtgctcatcgagcgatctaagccgtgatgccatttgagacagctccttcataaggtccttatcggaagaagccgaagcagccaatgcattgatcaatcctctcatgcatttgattgccttctgttcggattgccggaatctcagaagcacagcaaccttgcacaatgccaaacaatatgctttcgcagctgcagtcttcttatccgggcaatttgctacctcaactgcaatacggatggcaagcccttcctcactaatgtcgaaattgttcaacatatctggtttagttgactggctttcaggactcgaactagcttgctccgtagtttcggtcgaaaagagtggagtttgtaccatttgaaccataaaacgagcagcttgggcagcatatttgcgcctttttgaaacagcatgtgcactacccccaacattaccatataaacctggccacatggctctcatgactggcacaaatgcactggagacacaccttttaagttctttagtttcctccatgaaatacaaactgacaagtcgagccaggattataggatgcaagtcagcagatatccttgcatagttctcgcttagaagaagaatttttgcaaaaccttcaccaagaatggttgggacattatcatgattatcaccttcaagattaaactcccaatcatctttaagaaacccagaaaatagaatatcaagaactccaatatttagatcgtcatcattcatattggagacgtctactgtagtaaattgggatttctcgttggtagcatcagatgactcaattccaatggtttggtctatttcttgtggaccatgccaagttacaagatcaatcaaggccttgcatgccatggcactaaccaggtcaggtccattgatgaatgataacctcaattgcttcaccaactctgcatttggtctgttctctagcaatccaaaaagacaaaggcatctcaaagcaaccctttgtacatcatcatgattctgctttgtcgcaggaagcaacaaagactgaagtaattccagaggttcaattgctttgccttgaaggctctgtagggatgaagcattctctaggagaaggcctgtcacagcgagacaatgcatccaatgcatgaagtcagcagttctctccctgcatggtcgagccagttcttcaacaacagtagcaaccaccatttcaaattcaccaacagaagcatgcactcttttagccaattctgctactgctttggcccactccttgtcccctccaaggctcacaccatctccaatagccatcttattcccatcttcatcaacttcatgttcaagaggcctggtcaaaagctcatgtagaaatgaacttgcaattttacggttcatggtatcagaaaagtcaagcatttcaccgagcaacaatagttgccgtgatgcaaagtgataatttggtccagcagaaaggtgcgcctttaccaaatcaacgtagtcagatattgtgctaggaagaacactgtctagaagatcatttttatcagaagcctcagaagcatatactgctgcttctgtgcctgtagttgttgcagcctccgagcctttgatctgagcttcagcttgcaaatgcttgcacataattttccagtagagagcaacctcagcatccataagctgaatattggaaaccttttctgcttcatcctcagtatttgcagtgaagtactgcctaatagtctgcccatcttgcacgcgcacagaaccatctttcataagcacccccattactgtttctccaacttcctcataagtctcaacatcaagaaacctgagaagggtgatgacatctccactacaatatttcataagccactcatccttcagcattttcaggcattcactattcactgatgcagacctatcagagagacctctgtgaagaagacttgtcctatcaagcgttgattcaatgacagtctccagtgtagcatttgaaggcggaagagacaaaataattgctttccggacctccacattttgttctttttcaaaggtctcaaggaaaagatcaacaatgtcactgtcctccccatcactcgcaaagcgagacaatgcacgcacagcgaaggcacgaattccagggattctatcctgaacgcgaaccttcatgccatcaataacttcatcccaaatctcatcactcacctcagcatcatccggcaagcgcattattatctcaaaaatgatctggcaggagcgcaagcgtgcgggacggtgcgtggcggcggagccagcgaggaggaacctgaggaacccctcgaggaacccgtcgccgccgccgcacccagccgccgcggaggaggccgaggcgaacgcggcggcgaagcgcgcgacgcgctcggcccccgcggatcgcttcgcgaggtcgaacagcggggtcagcgcggcgcagaaggccgggaggaaccggcccgcggcggcgggggacgaggagcggagcgccgcgagctccctgagcttccgcgggtgcacggcgagggaggcgcggcactcgtccagcacgcgcgccacctcccccgccagtcgcctcgtctccccggctccggcgggggctgcggcggagacggccgcggcgggcgccat

SEQ ID NO: 76934 - DNA, 1162 bp, Oryza sativa
  Clone ID: PAT_MRT4530_76882C.1
gggctgaggaattcggcacgaggcttgtaaagccctctccccctcggcgaaaccctagctcctctcctctcctcttcctcgtcctcgcagcacaaatgtccgaccgccgccacgaccgggagaagccccgcgaccgcgaccgggaacgcggccgagacggcgagcgcgaccgcgagctcgaccgcccccgcgaccgcgaccaccgtgaccgcgaccgggacaaggagagggatcgagatcgcgaccgcgaccgcgaacgccgccgtggggagcgtgaccggaagcgctcccgctctccctccgccgaccgctcccaccgccgccactcccactcccactcccaccgcggccgctcgtccccgtccccggacgccggccgccacaagcgccgccgcgacgggtcccccgccgccgccgccaccgaccacaaggacgacaagaagccggaggcccccgtggtgcccaagagcgccgccggggacggggtcgcgccgggcgacggggatgtggacgtggaggagctggagatgatgaagatgatggggatccccgtcggcttcgactccaccaaggggaagcacgtccccgacgccgacgtcagcggggtgcgcgtcgtcaccaagcggcagccgcggcagtacatgaaccgccgtggcgggttcaaccggccccttccaccggagcgcaaccgctgaggagaggaaggatgatgaagataattcctgatattgggttgcattggactactggaacatgttgctgtcttgctggacatagtaggcaatgaactgctactgagcatggatacagaattttggtggctcattttgaactatgggtttacaactttcccatgcttgtttctgcatataatttggtaattgggacgacaaactgaaacagcctttactttcagttgtagattctggaatgagtttattggtgatgggtgatggttacaaatttggtgggtgatggttgcaaatttggccgcagctttatactctgaacgtcttgctgagtactatcttgcatgcagcgttataattctgaatatgtcgttaaatttaactttcatatagctttggttaacggacgagttttgcctgtaactggtcaagagttggtttcccctgaattttactgtagttatatggttggc

SEQ ID NO: 76935 - DNA, 387 bp, Oryza sativa
  Clone ID: PAT_MRT4530_76883C.1
tttttgtttttttaattttttggtttcaacactcttttatcttttttttttttttaaaacgaataaaacccaaataacactttttttttacttaaacatttgatggcccaaaaaaaaacaggaacttttgagggaaacttaaacaactttcctaagggacccaaaacgcccaaaatatttcaataaaatcaccaatcctttatgcaacatttcttaacagaaaaccatacacagttttatatacctttttaaccacgctaacatgcataaaaatcgcactcctaactaccatctgaagggaacccccaaccaacttgaaaaaatgcatcaggaaccgtcattttgaacccggatatgtaacccggtgggagcttaaaccacgggaaa

SEQ ID NO: 76936 - DNA, 554 bp, Oryza sativa
  Clone ID: PAT_MRT4530_76884C.1
cccctgcgcataataggatattcgaaacccatgcactagcactcggtgtagccttcgcttcagacgggtgccgaaggctgctgtcatcagttgatcttcttttttcgaataatttccaagaattgcattgcacatcacctcaactgtatccagccactcttggcagggcttcttaaaatatttcttgaatctgaagtggtaaggaagccggacaagatccccttccttcttctgcccctttaactttggcattccccattttttcagagtagggaagactttgaatgctaagaattcttgaaccagatccctggtaccaatatgctctgcaatgattctgaattcatccattgcccgttgagtttgaccctctggtgtcatgttgcagtggggtcgggtttctccgaaagttagctcgagtggactctgcacaagcttctgcttgtcctcatcaaccttgacatagaaccattctgatttccagcctgccggcctttgcttcggtagctgattacaggaacctttgcggttttccggtgggcaaattgtagcaa

SEQ ID NO: 76937 - DNA, 541 bp, Oryza sativa
  Clone ID: PAT_MRT4530_76885C.1
ccggccgggaccttcaaacgtcgccgccgccgccgctgtcttcgtgctcgctttacttctccggaagattcagtcgctgttgagacgattgcttcatccagccgccgccatgcttaattgatatttctgcatgtggcactcatctgacgtccccactatggctcagtttcccaacaggattatccccgccaaggaccactcctcggaccagatccacgttgcgcatgtggatgataatgagctgcacaatggtcgcttcgccacctttgatgtctctgctgtcatccgtgttctgggtgatgctgcacagtgctctggatacgctgtcgctgaagagccaaggttgcaggacgatgaacagcatatcttgctactagttttatctgctagaactcgattcaatgtcgtgtatctctatgtacttgatgtactggctgtgcattcaccccgtactcttacaaatctcttgcggcgttgagcggtttatcctgataatgttacatgcatgctgaagctttattacatctgactcttgatgcaa

SEQ ID NO: 76938 - DNA, 318 bp, Oryza sativa
  Clone ID: PAT_MRT4530_76886C.1
cggttgtatggagcgctacagccaggaatccaccagtccgtgcagcatcataaagtacctagtataccagtggatccagcacgccatcgacactgtcctcgatatagaccgattctcggatggtatgaccatgctatatcgcgaagagaacgcgcaacgacagctgacactggcgaaactaccatagctgtgtgccaacctccagactgcactgcgggaactgagaaatacgaggaggcgatgaactaattttctgtgtactttctgacatgctgcgtaattctgtatgacgctaaaaacacatagctcaggtactct

SEQ ID NO: 76939 - DNA, 1359 bp, Oryza sativa
  unsure (1)..(1359): unsure at all n locations
  Clone ID: PAT_MRT4530_76887C.1
ccggaatacccccgncgaccacgcgtccggtttgtgtggggttttcacttgttcagtgttcagaagcataagcagtacgtgatcagaagcaaagctagcgtgcgtttgcaatggcggcagtggtgaccaacaggagggtgatcctgaagaggtacgtgacagggctcccatcggaggacgacatggaggtggtgacggcgaagacgacgctggccgtgccggctgggtcggaggcggtgatggtgaagaacctgtacgtctcgtgtgacccttacatgcgtggccggatgacccgtcacgaggtgcccagctacgttcccgactacgtaccaggagaggttatcactaattgtggcgtgatgaaggtggtatcatctgggcacccggatttcaaggatggagaccttgtttggggagtaaccggatgggaagaatacaccctggttaacaatcccaagccttatttgcataagatcaattaccctgaatttcctctatcttactacaccggtgttctaggaatagctgggcttactgcctatggtgggttctttgaggtccccaagcctaagaaaggcgactatgttttcgtctccgcggcatccggtgccgtggtcaagctgctcaaaactaagtttggctttcatgacgcgttcaactacaagaaggagctggacctggagggagcccttaaaaggtgcttcccggacggcatcgacatctactttgataacgtgggtggtgcaatgttggacgccgtgctgccgaacatgcgtatcggcggcaagataacgatatgtgggatgatctcgcaatataacctggagcggccagacggggtgcggaacctcttctacttattcgccaagagcctacggatggaggggttcctggtgagcaactacattgcaatataccaccggtatgagaaggagatggcaggatacctgagggaaggaaaggtggtgtatgtggaggacatcgttgaggggctcgaggcggcaccggcagctctcattgggctattcactggccgcaatgtcggcaagcagctggtcaccattgcacgggagtgatgtcgttggttgcattggtatgtactacctctgtcccgaaatattacaatttttagctacgaatctggacatataggtgaccagattcatagctaaaaattgctatattttgggacggaggtagtacgtactaaccatacttatttatgaaatctgaaatggatgtcttgtttgttttgtcgggttcagaaatatgagataaaatattgtgccgggctagcgaattctagaattgatcgattgaccctcaaaaaaaaaaaaaaaaaaaaaaaaaaaaaaaaaa

SEQ ID NO: 76940 - DNA, 432 bp, Oryza sativa
  Clone ID: PAT_MRT4530_76888C.1
atgggccggtggatgcaccgtgggcgcatgccaccagcgcaccaacatccatcgcgccaagccagcctcccgccgctggtcgtgcctcctcgcaccaagccggcctccaccgccacccggtcgcacctcctcgtgtcgtgccggcctccactgccactagacgtgcctctacgcgccgaacctcgacgctgcacaaaagcagcagaacactttttagctcacgtcgccctccccatgggcgacacgagaggtgatgccaccactgacttcctccttccctcctccttctctgcctcgccactgcctgagcgggtgccggcaaagccacgcggccgcaaggacgacgacggcagggctttgcccagcgtacgctcggacaacccggggagctggccgggctgcggcgttggcaatctgcgccgttccggctag

SEQ ID NO: 76941 - DNA, 697 bp, Oryza sativa
  Clone ID: PAT_MRT4530_76889C.1
cgggctgcaggaattcggcacgaggatcacatcgatccgtgtcgtccttcatccgacgattccgacggcgcttacagatggggacgacgagatcgatccctcttcccaatccccccttgcccttgcgttcgccgccgccttctccctcccctccgccgcctcctccaccaccatgtctccgcctttcccttcctggtccgtgctggacggcgacgcgagccgtgacgccgccgcctacgcagatcagagaccacccttgcggtgcctgcgcttggctaccaaaagccgtcacgcgtgggggttcgatgccttgggcgacaacgtccaagccggcttcgacgccgaatcgttggtgtggtgtctggatctggaagcgcgcatcgccgatgccccaaaactctcctctttctccctgagaggaggagagagcagcagtggagagagattgtttcccttcgtccacgccgtcgacaagaacattgtggttttcacatctgacctgcctcaagctcctcgcctacatcatctatgacacaattggcaaggtgctctccatgatcccttgtgaaccttcctgctgtgaggtcagccgtaccacacgacttctcatcgcgcgccggcaccccggctataatgaccagtcgtacgcactggttctcatggccaagatgcccaagttcgccggcgaggacgacgc

SEQ ID NO: 76942 - DNA, 208 bp, Oryza sativa
  Clone ID: PAT_MRT4530_7688C.1
gtgcatgcaaaagtcataactcttctatagggtcacctaaaatcaattaaccggccggggttgtacaacattgggaacaggaaaaccccggcggtacccaacacaaaccctttggagctcacactgcttctccttattggcggaacacctaaaaggcccctaccaaataaacagccgaatagtcgcgcatcctaaaaggagaagggga

SEQ ID NO: 76943 - DNA, 1429 bp, Oryza sativa
  Clone ID: PAT_MRT4530_76890C.1
gcccgggaacgcgctctctctctctcctccaccttgtcgtagagaggaggcggccatggaagctgccgcgatccatgcgcccaccaccaccacctcctccgactccggctcgtgcgtcaccaatggcacgcgagagaagcgcgagatctctaagcacaagcagctcaagcggaagaggagcacctctcctgctcctcctcccggctgcggcggcggccaaggacaggaagcggcggtggagactgacgctgacgctggcgccgccggccgtggtggcggcgccggcgaggaggagagcagcagctgcggtggcgctggcgccggcgagggcgagcgcaagaggggtgacgccggcaggcacccgtcgtaccgcggcgtgaggcggcggagctggggcaagtgggtgtcggagatccgcgagccgcgcaagaagtcgcgcatctggctcggcaccttcccgacggcggagatggccgcgcgcgcgcacgacgtggccgcgctcgccatcaagggccgcgccgcgcacctcaacttcccgagcctcgcccacacgctcccgcgcccggcctccacctcaccctccgacatccaggccgccgccgccctcgccgcagctgcagccgccaccgaccaatgcgagtcctcctcctctgccgtcgccgccgccaccgccaccgacgccgaggcggcggagtccacctcgtcggccgcggccagcccgtgcgccgccaccagcagcgtcgaggagaacgcgctgttcgacctgcccgaccttctcctcgacctgagcgacgggctctggtgctcacccgtctggacgacagcgccggccgatcagtacgacgccggcgacgacggcgacgacgccgcggcgccgctcctgtgggccgagcagtgctggatggacgccccagcggcgcccgtgcagcctgactaattaagccaatccacctgctccgactcgccggccggccattgcaccggttgggttggtcgcagcagtcaacctatcgacaccatgggcgtctttttcttttctctctgtttttttttcttttttggaggtgccttgcttcgtgtgcagtgaaacggcgccacgccgcgtttgcggtgggcgatcaggcgatgtgatttaattaattacggaggggaagtcgttttagcgcgaggtgaaacagcggattgcatcgatcggcggcaagaactgcctagacatttcattgatcaaattactaattactccccttcgtggttgtgtgtaaatcaattcggcaaacattttgggagagcctcgtgtaatttcgtctttttcttcttcttcttttttatttttacagtagtagcgtgcattgtaaattttagagatgtgctatatatgcctatggcctaaaaagtattcagagacgtgctatataaaaaaaaaaaaaaa

SEQ ID NO: 76944 - DNA, 275 bp, Oryza sativa
  Clone ID: PAT_MRT4530_76891C.1
aaaacagcagtatctatgtctttggcatattgcacatagcatttgttcatgagagcaacagccacaaactgaccacacacatgcccacaaatcaattcagcctgagtaatcttcagtctatctcctcctggacaatgccctctaccaaaaaacaaactcagcagaggccaggaaacactgatgatagatcaaagctagtacctgcaaaggccaatacactcgggaacaaaaactaacacaaccacccagatgctgacctcatgcatgaagccgtc

SEQ ID NO: 76945 - DNA, 177 bp, Oryza sativa
  Clone ID: PAT_MRT4530_76892C.1
atggagccaacccgctcctgcctccgctcccgctacgtccacaccagcagctgcagctgcagctacattgggcgcgggacgacgaaggtgggggcgcgcgtcgatggcgattggtggtggaacgggcggttccgggctattggggagacgtgcttcatcacagtggctgctttttag

SEQ ID NO: 76946 - DNA, 1084 bp, Oryza sativa
  unsure (1)..(1084): unsure at all n locations
  Clone ID: PAT_MRT4530_76893C.1
cgactccaaatcaactncgcancctccntgtggctctcttcccatcaccaatctccgncacaatccgntcacaagaacacgacgaattcgagcaggacaatctttggtttctggaaccaaccagtaatccatnctccncatcgatatatactccatacacgtccgggcaagnagaaaccaaaacggaaaagctctcggatttccccgtccccatctcgttctgttcccactagccatggctcatctggtatggatgctgggggagaacggagaggagaagagcttcgagaatcccaacgagttgctgccactctccagacttgaagagatcggtgtgttgtattggcacttggatcctaagaagtctgaaagcgaagaagagctcacaaaaatccgcagagaaagaggatacagctactttgatcgtactgagatatgccctgataaattggaaaattatgaggagaagctgaagagcttctattgtgagcacattcatgctgatgaagagatccggtactgcttggagggtagcggttactttgatgtccgtgacaaggatgacaaatggattcggatttggataaaagagggagacatgatcatcctgccagctgggatttatcatcggttcatcgtcgacagcaacaactatatcaagctcatgaggctcttcattggagaaccagtctggaccgcatacaaccggccacaggaagaccatcctgtgaggcaagagtatgtcaagaatgtgaagggggacaccggatttgctcttgccgcacattgagtttgctgaattgggggctcactatacaactgtcctatacatcacactactcatgaaatcatgaacccatgctgtttttatcatgaatcatgaaaacacatatgcagtacacttgaaactatcatatgtagtactactatccggctatcctacaaaaattttagtactacttgaaacattgcagtatacacagtgactggtcctgtacttttgtgcaatgtactaccccaaaaattgtttataacaagtcggttggataccctaatgaaaaaattgctttgtattccctttggg

SEQ ID NO: 76947 - DNA, 288 bp, Oryza sativa
  Clone ID: PAT_MRT4530_76894C.1
atgtacgctagtgatggggccactggtgagaacggatcgcgggaacacgtgaccgccatcgatgccgacattatgatgcaaggctgtcgtggtggtcgtatccatggttttgctcctcctcgtatcatgtctcacctgcacggagggaaggatgcactaccacaggaggcaccggagagcgccgcaccgcaagcaccaccacagggcgatgatgagtggcgacaaccacgtcgctacctgtcgcgttgcctcccgacttcaatggtggggaataatcggtcgagctga

SEQ ID NO: 76948 - DNA, 4646 bp, Oryza sativa
  Clone ID: PAT_MRT4530_76895C.1
ctgcaggaatcggcacgagggtctcatctgccatggccaccaccgcctccctccacctccacctccacctcctcctctcctcctcccgccgccgctgccgcctcctcgtcccccgtgcccacaccgattccatctccaccggccgacgccgcttcattgccgacaccgccaccgcctccgctgccgctgccgtgggtcccctcgtcctaccccggaccccgcttgcgcgtgccgaccagccgccgtcgctctccgagtgggagcgcgtcctcctccccatcgaccccggcgtcgtcctcctcgacatcgccttcgtccccgacgacccttcccacggttttcttcttgggacgagacagacgatattggaaacaaaaaatggaggaaacacatggttccctcgctccatcccgtccgccgaggatgaagatttcaactacaggttcaattctgtaagcttcatgggcaaagaaggatggattattggcaagcctgcaattttgttgcacacttctgatgctggagacagctgggaaagaatacccttgagtgcccagcttcctgggaacatggtttacataaaagctacaggtgagcaaagtgcagagatggtcaccgacgagggagcaatttatgttacttccaatcgagggtacaactggaaggccgctgtgcaagagactgtctcagccactcttaacagaacagtttcaagtggaattagcggagcgagttactacactggtactttcaacacagtgaaccggtcacctgatgggcgttatgttgctgtctccagccgtgggaacttctatctgacctgggaacctgggcagccattttggcagccacacaacagggcagtggcacgtagaatacagaatatgggatggagagcagatggtggcctttggcttctagtgcgcggtggtggactctttctgagtaaaggaagtggattccaattcttctatcgaggccttaatgacgctcatgctatatcttatcttcatccaccaaaccagataactgaagactttgaggaagcgtcagtgcaaagccgggggtttggaattcttgatgttggctaccgctcaaaggatgaagcatgggccgccggtggaagtggtgtcctgctaaaaacaacaaatggcgggaagacctgggtgcgcgacaaagctgctgataacatcgcagccaatctctactctgtaaatcagctcatacgtgtacaactcacgctgctccaaactatatctgtttctgctaatttagcggagctagttgatggcttgtatcccctttcttttctcaacgccattctcgtggctctccatctcatgccgtatgcacttgaagtgactgacagaaggccacagagcgtaccacacactcggtgtagcacattggtcgatcataacacaaacatcagcttttcaaagggccacctaatacacaagcctgagaacaggaacattacatttgcaactatttccattgggcacaactcggatcagaaattggtgccttttcttcctaacatattacaagatatcaacaagagaagctgtttcgcatcaggagctgctggcacagagatcattcagttcccacagccaataatactttactggttagactgtccaaatgaaaagaacatgcacgatcaagtcgatcattctaaaccattttccagtggaagtccaccaccaggaagcaccttaagacagcgtcagcataggagaaaaatcaaaaagtcattgacagcactccctcccagcaatgtgcttgtaaataattcttccagatctgttactgctcctgtaagatctgattctgatattctgcatgatgatgataagcctccaagaaagagccctaaaaagaaaggaaacaagaaagggaaacattacaggagagcagtctgcaaagggctcaatttgccatcagaaacccattgtgaagagaatattgatgctgcttctcctgttgaggtacttactgatctgctggctgataaattgtcagaaacctcatcctctgctagctcattggttaaggaagctcattttggtgaagagaatggcggggattctggatgtacaggttcatctaatagaactgtaggtgagatatttagctgcaaggatgttcattacttgaatgatgaatcaaacaattacgagagatcactatgtgcacgtgtttctaactctaatgatgcaatagcatattcattgtttaagaagttggaaagggacaacagtgtgaactgcagtgtcaatgatgaggtgagggattcatgccatccgataggggcccatttaagcataactcatgctgaagattcaaatgattcctttggatgcagctcatgctgctcaaagaatgttgctgatagcagtaatcatactgaaagagtcaagtgcagtagtgaagcctgcagcagcaagacttctcttccagttattcctgggaggagcagaacaagattaaaggaaatatctagctacagtttgactgcaactaatggagtaataggcactaataagaacaagcatagtggaaaatacagttcaacttctgtgtggcaaaaagtagaaaaacttaatgtggagaacacatctagagcaggatgtatggttgattcagctattcagaacaaggatgtactggaaaacattaacaaggttgcacaacataatctaacaaggtcaatgaaaataaatcagaggagaaaagcatgtaatcagcattcaccagacgagagaattgaaatggagcatgccaaagaaaatgatgcactaaactcatgtcaagcattttccagatataagtacaagaagcaaacatcaatactgtaccaacaaacaagtttatcttctgaccagggtacttctcagtcatcagggaactaccatgctcctaagaacggtattgtcatggtgccaaagaatcacttgcaacagaaagatggattgcctatgatgcaactagtatatgacaaggactccagtgttgatactggagtaggtagcaacggctcagctgatggagatgggagctcacaatctggttttgagaaagcagcgctagcatcttgcaacatgggttcttatttggtcccacaagacacatgcgaggaatgtacatcaaccatgcaagcggatcctcattattcctcaaccgaaaataaggccatatccacaaattcgaattccaggaacctatgtgctgatccttcccctgcagaaatggacgaaaggtgttatgtgaagttgacaatggagaatactcctcaagaatgccctaagttgtattctgctactggaaaacaatttctaactaattgtattcctatttctgctaatattggtgttgaaaccaatgtttctagtgttcttgcatcagctaacaatgaagtcaacaaattagctgctgagatatctgataaaccaaactcgtctggacatcttgatttgagatgtcaaccgcatactgatactggtactgatttcaacaagatgagagaagctgtttgtgatgcttacagggcccaacagagagtggaagacgtccaagttatcattggcaggcctcttgctgattttgaacaatttatttcctctgcttctccggttctgtactgtagcacttgccctgctgatagaaacttttgctcaccggaatgggtaagagatggcctgtgctttcatcagagtactgatatcactctaagtagaatttggcagtggtatgaagaaccttgctgctatggtctggaagtaaaggctcaagatttccgtaggtctaaaggcttgtggaatagtcctcatcagttcaccacctactttgtgccatatctatctgcggttcaattatttgggcaagctaagagagctagcactggaagagttgataaggaagcagctggtatggatgtcacatctaaaacatctccatgtccgagctctctcccaatcttaacgaaacttctgccacagcaattgcgtgaaacaattagctcatctgatttgtatactaaaggtgatcagcagtttggaaatggagagctcatatttgaattttttgaatctgaacaaccattttggcgacgacagttgtttgacaaggtaaaggagctgattagtggtgtgaagccatcaagctgccaaatatcaggagacccaaagaatttggagctcagcctgtgtgatctccatcctgcctcctggtattgtgttgcatggtatcccatataccgtatacctgacggtaaatttcaggcagcattcttaacataccattcacttgggcactggattgttcagggcgcatcagagcaagctgatgacagtcgtgttgttttgccagtcacaggtcttgagtcttacaatgacaagggggagtggtggtttgaggtgggcagatgcagtggtgaagaagatgcagcagagtcgagagaagaagagtcagtgtggagggaagcatccgaggtagtgaaagagagagtgcggacgctgaaggaagctgcaacggtgatgtccagggcaaaggtggtgatgtccaacagatcaaacagacatccagaccatgacttcttcttgtcccggcaactctatcaggagccaaggaagaaccactaa

SEQ ID NO: 76949 - DNA, 286 bp, Oryza sativa
  Clone ID: PAT_MRT4530_76896C.1
cctcgcggctgtcaaggaggatcgacgccggcagcgtgcgcaagtggatctggccgtcgtggcgatggttcctgtcctcctcgtcgccgatggcacccctgtgtgcatcctcacccggaccttctccgatgatctagccctcgagcttctgccgccgccgctaccagccgccggccccaagctccagccgcgtccctcggcctcccacacgagctcctcctcctctgagcagccaacacgcaggcctcaccggaagctttcttctctgtgtacaacaaaaggctga

SEQ ID NO: 76950 - DNA, 566 bp, Oryza sativa
  Clone ID: PAT_MRT4530_76897C.1
cccaaaaccaggtgtaagggggggtttttaataataaggcagggccggggttacataaataaaccacaaggcatttggattaaacggggggcatcatcccattgttttcaggggagggcttttttaaattccaggggaatttgccaccccccagctgggggtaacaaacaaaaacgggattggggggaaatttacccggggggggccctggtgtttaaaacaaggggggccccccccccgaggaccccggggggggtcacggcccaaataaaaagccggggggttcccccaacgggggggtaaccggggggagaccattcctccgggaagtaaatggggttgtaccccccaacttttgccccgcacttgtaaacaaatggggccccacccttcccggggcttttcctggcagagggataaaattggactgagaggccccctccaatcccgggggggttgggggttttgatttttttcccaccgttgcaaaaaatggcgaagggggatccccggggggaaatggacggaaggcctttggcccgggccgggcccaccagggggggggg

SEQ ID NO: 76951 - DNA, 365 bp, Oryza sativa
  Clone ID: PAT_MRT4530_76898C.1
aagcgtaaaatggagaaacaacactgggatttatatcaagcgcaggaaaatgagccacaaaatatgagccatggccaggcccaacaagcagcttgatacaaccaagtttagtgttaggttgctacggacgtaaaaccattcaaaatttaaaattcattgtcgggagaggacagatctaatattctttggggcaaaaaacaactgcagtgcttctgcaggcctagatgaggagggatcgcctagttggggctgcagatgggacggatcacggcaatcacacgggtgctgcattcgcattggttggcggaccaggacacatgctttagaaaggtgtagctaaaagcattgagggccttggcataaaa

SEQ ID NO: 76952 - DNA, 480 bp, Oryza sativa
  Clone ID: PAT_MRT4530_76899C.1
atggcctggtcggcgcgcgcaaggagaggagcagctggcggccgtcggcatctcagcgcgcgcaaggaggaggaggcggtggccaagaggagcggcggcggctctgggcaccaatcctatcccttccttcccctagatgctagtggcggaggaggggccgacggcggtggcggcgcagacagcaccggccgctcctctcccagatctggacggaagaggggagccggtcggcagtggcggcaaaggcagcgctctcctcgccctcgggcagcggcgccgggcggaggtggagagccgtcggctggagggggatgccgatgctggcgggcgataggatactggcggttctctcccccgcctgtgaaaagtgtttttggccgcctgctgcggcttctcaaggctcctgggctgtgggagatgtttcaaaaatgctttcactgccccgtcaacgccatcttccgattcaattgcttttgctag

SEQ ID NO: 76953 - DNA, 4807 bp, Oryza sativa
  Clone ID: PAT_MRT4530_7689C.1
aacagaatctcgtcctcgagattcggaagaactggcgaacagatgcggatgagctgacttcaattcatcttctcgttcccaagttgattcttcttccgaatgattactccattggactttacaaaaacggataactggattcctggttcttctctcatctatttccaaaatacggattggtctctcaacataggtcagatcctcttggacttctatttgttcaagattagcttcttcgataggtacccttaaacactttttcaactttgacacatggatcacattatgaacacctgccaaggattgaggtaactccaactgataagcaacctcacctctttgactgacaatcttataaggtcccacgaaacgtggtgccaattttcctttggtgtggaaacgatgaacccctcggagaggcgtgacacgaaggtacacatgatctccttcctcaaaacttaaatcactgcggcgattgtcggcataactcttatgacgagactgagctatacgcaatctttcttgaatgatctttaccttctcttctgcttccctcagaatatcagtcccgaaaacttgacgttctcccgtttgatcccacaaaagcggagtgcggcacttccgaccatacaacgcttcataaggagccatttgaagactagcttgataactgttgttgtacgagaattccgcgtaaggcagattcttatcccaacttccaccgaagtctaaagcacaagctcttaacatgtcttccaaaatctgatttaccctttcggtttgtccgtctatctgcggatgataagcggtactgaagttcaacttggaacccatctcttcctgaagcttcttccaaaactttgaagtaaactggctacctcgatcggatactattttcttaggaacgccatgcaaacacacaatccttgccatatacaattctgccaaacggcttccgaaatatgttgtcctcaccgggatgaaatgagccactttggtaagtctgtcgactatcacccaaatagagtcatggcccgatgacgttctgggtagaccagtgatgaaatccataccgatttcctcccacttccattctggtatcttcaaaggctgcaacaaacctgcgggtttctgatgttctgccttgactcgctgacaaacatcacacacagctacatactctgctatctcacacttcatacttcatacttgcccaccaaaatttttccttgagatcttggtacatcttggtactaccagggtaaatggagtataaagtgtcgtgagcttccttcagaattgcatctttcaactccttgttctctgggacacagattctctcacccaaccatacggttccttgctcatcttccaaatacccgatagcctttcctcttctcatattcttcttgatctcttgaatatcaggatcattgatttgagcttctctaacctggtcaatgagagtgggcttcgcttctaaagttgcaacaaaacctctactgacaattcccaaattcagtctttcaaattccttgcataattcccatggcaactgttgtccttccgtagcattgcaatagcctttcctgctgagagcatctgctacaacattagcctttccgtggtgattatgaattcccatgtcataatccttaatcaattccaaccatctccgttgtctcatgttcagattcggctgggtaaagatatacttcaaactcttgtgatccgtgtacacctctgtacgagtaccgaaaagataatgacgccaaatcttcaacgcatgaaccactgcagctaactcaagatcatgagtagggtagttctcatgcggacgtaactgacaagatgcataggaaaccaccttcccatcttgcatcagaacacaacctaacccaagcttagatgcgtcgcagtacacttggaaacccttcttaggatcaggcaaaatcaaaatgggtgctgatattaagcgacttttcagctcttgaaaactctgctcacattcttctgaccacttgtactttacgtctttctgaagcagtcgtgtcatgggcttaggaatcttggagaaattctctataaacctccggtaatagcctgcaagacccaggaaactacgaatctctgagactgtctttggttgtttccagttggttacggattccacattactaggatcaatggcaactcctccggctgagatgacgtgaccaagaaactttacttcggacaaccaaaattcacatttgctaaacttggcatacaattgatgctctcgtagcttctccaatgcaaggcgaagatgttcttcatgctcttctttggttcgggagtagataagaatgtcatcaataaagactaccacgaacttgtctaggtattccataaacaccttattcatcaagttcatgaagaaagcgggggcattggtaagtccaacagacataacagtacattcaaacaacccataccgagtggtaaaagccgtcttaggtatatcttcctctttgatcctcaactggtgataccttgatcgaagatcgatcttggagaaaacggtggcatctttaagctgatcaaacaagtcatcaattctaggcagagggtacttattcttgatagtcacatcatttagtgcacgatagtccacacacatcctctgggtatgatctttcttttccacaaaaatgaccggagctccccatggagacgagcttggtctgatgtatcctttctgaagcaaatcatctacttgcctcttgacctctgctaattcgttggctgccattctataaggtctcttatggattggagttgttcctggtaccagatctattctgaattctatatctctcttgggcggcataccaggtaaatcatccaggaacacatctgggtactcccgtactatgggaatctcttccaaagttatttggttcagacttgaccttaaaggcccgtaaggcaatgaatgaacagttacaacttgaccgtcattgctggtgagagttacttttctattggtacagtctatcacaccattatatttggctaaccagtccatccctaggatgacatcaaggtctttggattctaacagaataaggttggccagaaatggtacaccctgaatctctattctgacggaggggctacgttgcgatgagagtgcttggttactcggggtactaaccatcaaaggacgtctaagatcttctacctccatcccatgatttcccgcaaaactcatagataaaaaggaatgtgtagcaccagaatcgaaaagcactgttgcaggaactgagttaacagggaacgtacccaaaatcacatctggagcactttgagcttctgcagcagccacatgattgacatgagcctttgacgctggtgcggaggagttgttctgggcagggacaatcttcacgcggcggggcttcggacacttgtcagagtaatgtcctggttcaccacaattaaagcacactcctggcttgttcccttgctccctcttggcaggctgatgctgagttggagttgcaacaggacgtggagcttggctgcgattgttgttgctagcattgttgttgaataactgacgctgcggacgaacaacagacgaagaccctccttgtgacactgcctgaggtcccatagcaagacgcggcctctgactattcccctgctgagctttgaagtgagcaatccggtgtttcttcttctccatacggttgtacttgtcctcctggcgaatagccttatccaccaacttctggaaatcatgataatccccagtcattagtgggtaagaaagctcatcattcagtccttccaagaatttctcttggcgctcttcatcggtgcacacatcttccggagtatagcgaggcagacgattgaactcatccaagtatttagtgacaaagcgagatccctgagtgagcaccctgaactccttcttgagagacacaactcctgagggtatgtgcgttttccggaaagcagcggtgaactcaagccaagtgattggttcagcagtagtcctgttgaaacggaagtgatcccaccactcagaggcagggccatgaaggtgatgtgaagcaaaggagactttctcttgatcagtgcagttgacaaccggaggatccgctggggctggggcagcttctttttccaccacacgaaccttaggcgccaactggtagcgagggacaaaaagagctcccttccttgcggtaagacgaaccctggccttttgtggtggtgcttctcccttcaacgcggctagttccttctccaaacgatccaccttgtcctccagcttgcaaatcttaccacgattccggtcttcgcgatcttgagctgctaacacaatctcaacgcgggtctcatccatggcccacagcatctcaaccaaatgtctggtggtagcatcattctcaatccctgcaggttcaagatagctaccacggtcgtttccctggggttgacgaggatggtagcgatactcagtgtcggccaactgatcattgtagctttctcggagctctcctatggtgatccttgccacctcctgacaagcatgaatgtagcttccccctccagcctcgaacatcaccgatgggatatcttcacgattactgttcaaggtgactttgatacagcacttctcttcatcacgatcatgaggaatctgggcatacaaaggagcagtcccaaatcctatggcgaaggacatcgtacgcaactcctggacaaatccctcagtaccaaacaagtactcaggcttgtagcgcggcat

SEQ ID NO: 76954 - DNA, 252 bp, Oryza sativa
  unsure (1)..(252): unsure at all n locations
  Clone ID: PAT_MRT4530_768C.1
atgagggggatagtcgaactgaacatcaccgaaggaacagtcgcgcggaagaaaaggtcagtgaagaccagcggagtagagggcgaccaggggcggggggaagcggggaggncgacagaggcaagcgaggcggcgagggggggcaccgcgaagagagggacaggacgagagagggacgagggagagaggcgagcgagtggaaagacagagtcgtngcgcagtagaaggcaagggcagangatagaagtagag

SEQ ID NO: 76955 - DNA, 983 bp, Oryza sativa
  Clone ID: PAT_MRT4530_76900C.1
ccggccgggaaaaagcgcagacgatcgaaaatctcccgtcccgttccgctccagcgcctgcgccgatctccatctcgcgactcgcgagcagagcagggttggtaggggcgcccatctccatccggcgagcagagcagagcggaggaggtgcgccatcgtcccgctgcatcctgttttgagcctggatcttgccaaacaagtggttgatcttactgctttcggtggccgtgtctcctccacaggaaggaaggcaccggggatctagaggaggccatgggagaattctccaaggaatcttgcccttctgtgaagaacattttgcttctggattctgaagggaaacgtgttgccgtgaaatacttctcggatgattggtctagtaatgcgtcaaagttggcctttgaaaagtctgtctttactaaaactctgaagacaaatgcacgctcagaagctgagataacattgtttgatggctatattgtcgtttataagtttgtacaagaccttcatttttttgtcaccgctggtgatgatgagaatgagctcattatagcaaatgtactacagggcttctctgattctgttggtcttttactcaggggtgatgttgagaagaggactgcactcgagaatctggacttgatacttctctgcatcgatgaaattgtagatggcggcataattctggaaacagatgcaaataccattgccgggaaggttgcaaccaatgctgttgatggttctgcccccttctctgagcagacgatatctcaggctttagccactgctagggagcaccttgcaagatctctgctcaagtaaatcatttatcttttgactccttaaaacttctctgcgttgaggattgggcgagtgtacgttgaagcatgtaattgttaccttttactcataataaagtgtaattgtgacggaaaaaatagttgaatatgatataatacttgtactcagatttaaaaaaaaaa

SEQ ID NO: 76956 - DNA, 165 bp, Oryza sativa
  Clone ID: PAT_MRT4530_76901C.1
atgaaggaagtcattgaggctcttgagaagatcgagtcgattaagagcaagtggagggagcccaggaacagctcctcggaggacttaagtgctcttgagagctgtgaccacctctacacccacctcaaacataccacctcaaacatactgttggatacgcagtaa

SEQ ID NO: 76957 - DNA, 695 bp, Oryza sativa
  Clone ID: PAT_MRT4530_76902C.1
atggcgaggagccggttcttggcgacgccgaggctgctggcggcggttcttggcgccgccgtgctgcatggcgccggcggcgtggccgcggtggcgatggcgaggccgctgttggccggcagcggcggcgccgagccgccgagcgccgtgttggcggcggcgccagggccggcgggcgtggtggcggcggcgcagggtggcggcgtgatgaagcccgaccggtcgatcgccggcgccgacgtgatcctcgtcgggttcgccgccgccgtggtggtcgtcgtcttctggtacatcaggattaccaggaagaacagcagcagcggcggcggcggcggcggcggcggcggcgtcgaagcggcgaggaagcttgagatactcaaagaaccaccagctgtggtagtagaagtagcggcttagattcagaggatgagatgagatgagatgaaatcagatgaaatgtatagtttaatctggttgtgatgcgcatcaagaacagagataatgagtagattagatgcatagttgcatatttagtcgttgctggttaaaaaaagaagaagaggaagaggtgttgattagtctggtaaatctgctagctttgtgatgtacatgtctgtcagtgagaattgagaatgaaatgcagagaaaaaaaaggaacatcaactagtattgttctcggtcaaaaaaaaaaaaaa

SEQ ID NO: 76958 - DNA, 409 bp, Oryza sativa
  Clone ID: PAT_MRT4530_76903C.1
ggccgctcttgcaacatagattatagacaattttcctctttgagacagcagagagtgacttaaccctctcctggaaccaaaagacagcaccacaatatggacactcatgcgttggaggaccatagtatgaccggcctgggtaggacgctgtaagacacacattttaccattgtgagacagacatgtttttttcattaaacaaagcataggttgtttttcctatcgcaggatacgaacccttgagcgactggatgtattccctatctgttgctgatgaggcagtgcttggcctgctagcaaaagcagaaggagcgtgtggtggcggcaaaggaggcagctttgaccgcagtaaacaacggtgctgtctatgcagcttggataagccagctgaaaaatccataagggaacg

SEQ ID NO: 76959 - DNA, 360 bp, Oryza sativa
  Clone ID: PAT_MRT4530_76904C.1
atggcggcagagcgaggtgaggcgagcgtggcggcacgctcttcctcccgcccttgggcccggttctctgcgccggcgccggcgcatcgccggcggacgaggagaggcgtgagacggacggggagcgaggcgcggggagtccctgcgcgccatcggcaaccacatgcccacgacgaggaggaggagcccgcagtagcggcggtgtcccaccgcgtgtccccgtgcgccacagctgaggaggaggccgccgcccaccgcgcgtccccacgcgcccacgacgaggaggacgagcccatcgcccaccgcgcgtccccgcgtgcccgcatcaacgagtcactggagtcggagtcctccacctag

SEQ ID NO: 76960 - DNA, 476 bp, Oryza sativa
  Clone ID: PAT_MRT4530_76905C.1
acgccgtgatggtgccgtacccggcgcagggccacgttacgcccaatgctgacgctggctgagctgatctcctaccgtggttttgacgttaccttcggcaacaacgagatcaaccaccgaggactcctccgtgcacgcggagcccgggcgctggacggggggcacggataacgatacgccggcatggacgacgggctcccggcatacgacgccaacgccagccaggacaagccggccctctgtcactacgtacggaccacctgggttcccagggtcatgtcgctcgtagacaagctcgacgaccaggccgtcgccgccggcgacagggacggagcggcccggcacgggatctgcgtggtcgtcgacaggcacatggacgtcggcatgcacgccatgcgggagcttggacttcggtgtaccacgctctggaccggcagggcgtgcgggttcatgggctactaccactacaaacacct

SEQ ID NO: 76961 - DNA, 516 bp, Oryza sativa
  Clone ID: PAT_MRT4530_76906C.1
atgcgggaagagagggatagtgaagtccggagagccaaagttagccacgagttcctcgtcagatttgttagagtgttggggagggaggggaatagcttgggctatgcatccgggggaggaaccgggggaaagaggggagacaggagtggcaccgtcgtggggctcgtcgccgcccccggctccgcaggtcgccggcactaccgttgttccccgctcttccccgatgccaccatcaccaccacaggggaaagaggggagagaggagcagcgctagagaggggagaggccaccgacggagagagaggtagcgccgccacagctgcccgctaccctccagctccactcgactcgacgcctgagatggctgccgcgcttttcctcgtccttactcgatccaccgccaccagagaggagagggtaaggcaaggggggagggaagaagccgccgccggagatgggagaagccggcatggcgagaggagaggggcagcctcaaccgaggaggggtggatctag

SEQ ID NO: 76962 - DNA, 2646 bp, Oryza sativa
  Clone ID: PAT_MRT4530_76907C.1
atggccgtgctctcctcttcctcccatggcctcctccacccaccgctccgtctcctcgccgccgcctccgccagtagcggcagcagctactcgattccccatgcgcgcctccgcctcgccgtcactactccgtcgaggctaccttcccccatctcatcctcgcccgacccaccgcccgacgtcgcccacgacgaagacgaacaggaaggtcagcaccacaaggaggagcgggacgagcggtacgggttcgagatccaggtgcgcaagctgcccaagcgcaaccgccgcctcgtccgcgcccgggtccgcgtcgacgccccgctcgacgccgtctgggccacgctcaccgactacgagggcctcgccggcttcatccccggcctctccgagtgccgcctcctcgaccagtccgactgcttcgcccgcctctaccaggtgggtgagcaggatctcgcgctgggtttcaagttcaacgccaggggcaccatcgactgctacgagggcgaattgcagctgctgcccgccggagcgcggaggagggagatcgccttcaacatgatcgacggcgacttcaaggtcttcgagggcaactggtccgtccaggaggaggttgatggtggggaaatatcagcggatcaggaatttcagactatactttcttatgtggtggaactggagccgaagctctgggttccagtgaggctactggaagggaggatttgtaatgagatcaagaccaaccttttttcaatcagagaagaagctcagaggatccagagattgcaagataaggcttcatcccaatattacacgtccttgattctcaagaatacacttcagaaaggtagcatagcagtgctcactgctcagtgggagggagcatctcgccgtttcaatcggatcgggctccacaaatccaatcccgaattgaatgatgaaatgcgcggcttcctccgccacgccgagtcgcgaaccccgcgggccttcgtccaactcctcgccgcccagccgccgcgcccctccgccgccgccgccgaccagtgccatgccgccgccaccaaactcggtttctccgcctccaaccccttcgccaacaccgcgctcctcgccttctactgccgatcccgccgcctccgtgaggcacagcacctgttcgaccaaatgcccctaaggaccgccgtcacctggaacacgctcatctacggccacgcgcagtcgaccgcgcccgacctcgccgtcgcggccttcgcgcgcatggtgcgcgccggcgtctcccccaccgcgtcgtccgtgtccagcgtcctggtcgcctgcgtcaggctggagaatgccggtgctggagcaatgctgcactccgttggcctcaggtgtggcttctttgcttctgtcgtcgtcggcactgccttggtggacatgtacgccaaatgccgtcgtttgggcgcggcgcagcaggtgtttggggagatggaagagaagaacgtggccactttcacggcgctcgtgacagggttcgttctaagcagaaggcctcatgacgccgtgctgttggtcagggagatggaacgctctggtgtggcaccaaacttgatgacgtacagcagccttctcagctcattcgcgagcccggaggacatagatcatgggaagcaagttcattgcgcagtgcttaagaagggcttggagcacgatccgtttgttctgtctgctcttgtgacaatgtactccaagtgcggcatttgggaagattttgtcaaggtgcagatgtctgtttcatgtcaagatcaggtatcattcaattccgtcatttttgggctctcctgtctgggaagaggtaaagaggcgtttcaacacttcttggaaatgagaaggcacggcactgatatggatgtgttcacctttgccagcatattgaaggctataggtagctcatcctcgttgctagagggtaggcaggttcatactcttattctgaagagtggatatgaacatggccgtgctctcctcttcctcccatggcctcctccacccaccgctccgtctcctcgccgccgcactccgccagtagcggcagcagctactcgattccccatgcgcgcctccgcctcgccgtcactatttggtcgacactgccttgccacatctcaagctcgcacgacccaacgaccgacgccgctccctccgaagacaaaccgcagaaccatcaccacaaggatcagggggaccagcggtatgggattgggatccagatggcccaggtaccccagcgcaaccgacgactcatccgcgcctgggcccgcgtcgacggcccgctctgctccttctggtccacgttctgcgactacgagcgcggcgcctgcgtcatcccaggccactccgagtgcggcctcctagactagtgcatcggcttagcccgcacctaccagttcggggagcagtatttcgaacctggttgccacttccatggtggcgagccctatcgtctggttagagggtaaattgtagtggcttcctgtccgatcgtagaaggcggagattgcctgtaacaagagggatgacgatgttaaggtcagagagaacaactcaaacaaagaaatagtgaaggagccatcgtgaagttgtattgaggaccagatgcaacatagataa

SEQ ID NO: 76963 - DNA, 293 bp, Oryza sativa
  Clone ID: PAT_MRT4530_76908C.1
agggcaaaggttaccttttttatttttcaacagatcatttgacaggggggaacaaacaacatattcttccttgtacatgcccagccttgtagtacttgacaatctgcagggttttggactttttacagaggccctcactttagtttgtagcttccaaatggggttttattgagcactagccccttaattttggtggggccttcccttcttaaacctctgtttgaacttcttctttttgtcaactgactcccccaccactgctttcttttttttgggcatcggttcctttggtt

SEQ ID NO: 76964 - DNA, 330 bp, Oryza sativa
  Clone ID: PAT_MRT4530_76909C.1
tggtttttttaattttttttgtttttttttttttttttttttttttttttttttggaaacaactttaaaatttttgacccaaaacaggaaattttttacaagcagggattgaaaccaaaacacccatttccgcaattggttttttttagctaaaaaaagggctgacatattggacaacccggaaatccaaatgaaacaaacctttccggtttgaaaaggcaaaccgggggatgagcaaaaaaaagctcccaaaaaaatttttgttcccaaactgactttggttccctaaaaaatttcggcgacaatttaatttgtccatgagggaaaccc

SEQ ID NO: 76965 - DNA, 1032 bp, Oryza sativa
  Clone ID: PAT_MRT4530_7690C.1
atggagctctcgggctggaagccggcggtagatcaagccgtggcggacctgcggaccaaggtgggggaactacggcaacaagtagagcagatggcgcgaacaccaacgaccatcaccaagccctcggatctgcctcccctgcttccgacgccgtcgaaactgcaagttccggcgctaaaggaggaggaacctgctccgatggagggggaatcatctcacggcccgaatggccaccgcgtcgctacgattccacgtgggaaggctattggagaggagtcctctccaaagtctcctccggccaagggggtcatgggaattggttccatggggactaccaatgcccatattgagatgatgagttgggaagagtttgttgatgctgtttgtgctaagtttggtagagaggagtttcagggtgtggtccgacagttcaacaaacttagacaaacggggtcggtaaccagctatgctaagaggatgaagtggccaaaattgttcggagggaacctcgacgggtggaatttcctgctaacaaccgtgggggaattcggcctggatgagctgtacctattggagctggacgctaaaggcttgtatcatacttgtggtgagcgttggagccacgagcacaaatgtggtcctactgttcaattgcatgtggtggaagagctgcttgatctcttggagaattttgacgaaaatcagacagctacagtatctgatgaaattgagtctgaagaaactgaagtgaatggcgaagtctgtcagatttccaaagaggccatgttggaaactgaaacttctgggactttgagattgcaggtcgccgagtgtatcgcaagggagccggagcggtggaacaagtcaaggttcgctggcagggacaaacgtcggcggaggctacctgggaagatgcagctgctcttcgtcttcgtttccccgctgcaccggcttggggtcaagccgtttccaaaggagggggaaatgttacggacactgctcctggtccagcaactgaaggcaatcccgtga

SEQ ID NO: 76966 - DNA, 4311 bp, Oryza sativa
  Clone ID: PAT_MRT4530_76910C.1
atggccgagaaaccgccaccgtcaccgtcctcggctagagaacctgattctgtcaaagctaagatccttaagttgggtctgtctgaggttgatgagagcaacattatgcccatcactctggataaattgacacctgaacagcataaggatcttgaagcaatgatgcagcaagcaaagaaccaatttttgagttcatttacacagacccgcaagggaacgttggttcagaagtataaattaatggtggttgcggatgttcctgggacaggttcttccaaagatggtgaactaaaacaggctccagatggtatggctcagccaggtgatcaaggtgttgcaaatggttctcaaggaaatcaaggcgatggttttcaagaagttcaaggtcttggttctcaaggtgataattcccaaggattacaaggtggaaatcttagtcagaatggcaatgcagcacatgagcttttcaataacttccaagatcgggttgactatgccgtgcacaatgctttgatcaatcagtctggggtgttagtcaataccttgtcaaacatgatgaaatcaatggttgatggttcaatggctgaatatcaggctacaggcccagtttatttgcaaggaggtgtctttccagattatcggcctctgatcaccaatactcagccatctgttcaaacagttcctcccaatgcgccatcagctcagccgacggcaccggtatcggctcccgcacttgctgcgtctacgtcggcaccaggccaactagttagtcctcggttgttgatgagagaacaaccacagcatagggggcaggatgtgaatcggctacgcaagatcagtccagcagcagccgattcagcaaacaccgccaaggcagcagtttgtgcaaccagcttagcaaacacccccaatccaacaggttgtgcaaccaattcaacagacgccaccaagacggcaggttttgcagtcgattcagcaaatgccattaacgcaacagccgaactaccagaattatcaggggggcaatttgaattaccaatatcaacctccttcgccgcaagctcaatatcagcaggggggcccactcaatctcagtttgttcttcagtacaatcaattcgagcccaagcaacaacagtcgcaaggagcaactcagcaacgaccgtgggctgatgtgattaccgatgtgatgagggaacagttcgggcttaagccgaaagatgctggaaacttgtatcggcaaccttaccctgagtggtttgagagagttcctcttcctaataggttcaaagttctagatttttcaaaattctcagggcaagatggtgtgtcaacttatgagcacattagccgatttttagctcaatgtggtgaagcatcggctgtggatgccttgagagttaggttgttccggttgtccttgtctggatcggcttttacttggttttcttctgtgccatatggatcaatcaacacttgggccgatttggagaagcaatttcacagctatttctacagtggggttcatgagatgaaattgtccgatttaacagcaatcaagcaaaggcatgatgaacctatgcatgagtatatccaaaggttcagagagatgaggaataagtgctatagtttgaatttgactgatgcccagttagccgttttggcttttcagggtatgattgctccgatcagggaaatattctcatctgaggactttgatagcttgtcacatcttatacaaaaggtaaccctgcacgagcagaggtctgcagaagccaggaagaaccctaaaagggttaatcatgtttgtccttacatatatggatcggataatgatgatgatgactgtgaaatagctgcagctgaatggggggtaaagaattctagaaaagaggagaggcaacaaattctagtagccattgaaggaggcaagatcaaatttgatgattccaagaggccgatgaaggttgatggtaatccttttcctgtaaacatggtgcacacagctggccgaacagctaatggaggacgtacaagaggttttcaggtgaattcggctaagattataaacaagtatcaaaggaagtacgacaagcaacaggagaggcgttatgaagaagataatggtggttttgatcctcattggggttgtgagttatttaggttctgctataatgagggtatgaggctgccatctatcgaggattgtcctgggtgcagtaatgttgcagggagatcaagccgatcgtatgatggaggcaatcggctgaagcaaacaagagttcctattcatcaaaggttgggcccggtgaaccaagactatagccaaaaggatgatggagacaggaagattcagtggtgtccttctgccgaattcgagatcaaacaaaccgatgttgacaaagtagaagaagaatcggctaagttggttctatcaccagaacaagcaatctttgagaagcctgaggggacagaaaatcggcatgctaaaccattgtatataaatggctatgtcaatgggaagccgatgtctaagatgatgatcgatggtggggctgcaaagttgggcagaaacgctgaagatctcatcaagacaaacatggtgctcaaagactttggtggcaatccatcggaaaccaagggtgttctaaatgttgagctgacagtcggcagcacaaccatccctactaccttttttgtcatcgatcggaagggttcttacaacttgttgcttggggttagaccgcaccagcagcctccgagaagatgcaaagccgatatgctcgaacctgtgaaggcggagattaagcgtttatatgatgctggttttattcgtccttgccgatatgctgagtgggtttctagcatagttcatgttatcaagaagaacggcaatgtgagggtgtgcattgattttagagatttgaataaagctaccccaaaggacgagtatccaatgccagtagccgatcagttggttgatgctgcttcaggacataagatattgagttttatggatggaaatgtgggatataatcagatctttatggctaaggaagatatttataagacggcttttagatgtcctggtgcaatcggcttatttgaatgggtagtaatgacttttggattaaaaagtgctggagccacatatcaaagggccatgaactatatttatcatgatctgatcggctggttggtcgaagtctatattgatgatgtgttcttgggatttcttgttcatgagaggggaattgaaataactcaaagaagtgtcaatgcgatcaagaagattaagcctacagagaacaagacaaaattgcaggagatgatcggcaagattaattttgttagaaggtttatttctaatttgtccggaagagcaccggcgtcggctatgaatcctattattaaaccatggccatttcgaggttggggaattgatatgatcggcatgattaatccaccgtcaagtaaagggcataagtttatattggtggcgaccgattattttaccaagtggatagaggcgattcctttgaagaaggttgattctggggatgctatacaatttgttcaagaacatataatctatcgatttggtattcctcaaaccattacaaccgatcaaggttcaatcttcgtgtccgatgagtttgttcagtttgccgatagcatgggtatcaaattgttgaattcttcaccatattatacacaagctaatgggcaggccgaggcatctagcaaaagcatgatcaagttgattaagaggaaaatttctgattatcctcggcattggcatactcgtttagccgaagcattgtggtcttatcggatggcttgtcatggatcgattcaagttcctccttataagcttgtttatgggcatgcggctgtattaccatgggaagttaaaatcggttcgagaagaatagaattgcaagatggtttgacagccgatgagtattataaccttatggccgatgagagggaggacttagttcagtcgcgtttgcgagcccttgcaaaagttaccaaagataaggaacgagttgctcgacactataacaagcaagtggtacccaagactttttcggaaggtgaacttgtatggaagttgattttgccgattggaactcgggataacaaattcggcaaatggtcaccgaattgggaacgaccgttccaaatctataaggttgtgtctaagggggcatatatgttgcaagggcttcatggcgaagtctatggacgagcgctcaatggtaagtacttgcagaaatattacccaagtgtttgggttaatgcatga

SEQ ID NO: 76967 - DNA, 423 bp, Oryza sativa
  Clone ID: PAT_MRT4530_76911C.1
ggggaaagggttttttttattccaccccaaaaaattcccccccaaacggaaaaaaggggggggggccaaattaaaaaattggaaagggcttttcaggggaaaaaccaccggtcaaaagggggtttgggggggaaaaaaacaaaaaagggcccccatgatccccaatttcccgcccaaattccattgggattatttggggcaaaaaaaaggctttaaaaaaaaaaaaacgggggggaaccttatggggggggggggaacattttggggggggggaaggggggccaaaagggtcccttaccctttgggaaaaaggggaaccgggggttgagcccctatggcaccggggtcttttggggggaaaaccacctccctttccctatccggtggggaggggaccctcaaagacccaaaacttttttttgt

SEQ ID NO: 76968 - DNA, 2781 bp, Oryza sativa
  Clone ID: PAT_MRT4530_76912C.1
atggcgacggcgaagaggaccttgcgtgtcacctgctcgatcaatttcctggcccaaactagtttgatgtgtggtttagttgcagagttccctgcaaaaggatacgtggaattgcttgaaacttcatttagatatcgcttttcctgcttgggactgattcaattgtggggatctgcggatgttctgaacatttgtaagatgagaaggttctttttctttggatcatccaccgcaagcactgggaatggtggtaaaacaccaagtgacgatgatagcaggattaagaagaaggcattggacggaggtgacagcaatggcagctccagttccgcttccaattcccctgtcacaaaagtgtgtagatcaaagagccggcgtcgaaatctgaacaatgaggaaccatctaatccgaagcagctcaggaggtctatgtccttctcatcaccagccggcaacagtttcttgaaggatcggagcttcagcttctcgggtgatgtcccatcttctctgtttaatgaatctgatgcacccgatcatgttgctaagtcaacaagactaaccaatttattgaacaagaatgaagttctagatcgatacattgatggagagcaggaagccaccatccttggtgagagacagaagcaaaactctcccaccagatctgcggtttcgaatttgggaaggccgcctcgaccgcagtctacagtaccatctttgccaagactaacaaaagagatccttgagacttacccatatgaggatgtaaaggatgaacatctccaccaactagctcaagaggatacaagagacacatgcaagattacaacactgtgcaatgcaagtagaaaccatgcaggtctgctagatgcttctgagagattttcacatttagaagattacaaatcggaaagtgttacttctgttgaagatatctatgaggatttgcaagactttaatcatccctccatcgatcctacttcagaggatgtagaaactgatgacaagttgctccaaagggcaaaagaggttgaggcaaagttcatggtctcttctgaaaaaaaatatgagcttaacatgtccaaaaacaagaggctaagcgcaaatgacatgttccagatgatccaatgtttgactgaagataggaaacaactagcatatgaattgtcttcacagatcaaggcacgccttacagaaaggtttgctgccaaagagcaatgcaaaaatttgaagaaagagttggacatcagaactagaaggctagagaaggaaaagatggaagtgcaaactactttggagaaagagatggatagaagatcagacgattggtcaatcagactatcaagatttcagtgcgaggaagagagattacgtgatcgggtgagagaacttgcagagcagaatgtctcctttcagcgagaggttacttttcttgaagcagaaaaggttgatgcttctaataaggttgcttgtttggaaatgggaaacaaaaaactaattgatgagctagagaaagtcagaaacaattgtgacaatctccagaattcatctgtagagttacatgattgttttactaaggctgtggaggaaaaagatcatctcaggaaattcttggaagataaggatggtgagaacaaagcattgcataaagtgatttcaaggctacaaaccatatgcaatgaacaagaaagaacaatcagtggcttaagacagggatacagtactgaattagataagaaatctgttgagtgcagtgacaagataaagaagagaatgcaaatggaacttattagactgacaggagttgagcagaagttaagaggtgaagttcaatcttgtcatcttgaatcagagtccctaaggcaagagaacattgcacttttaaatcgtatacaaagtactggaaatggaccgcgcttgtcctcaattcgtcttgaccaggagctactagccagagtggataacttgcagatacatggcttgtcattgcttgataagactagccaactgtgcatcaaattgttggaactaatgaaatgcaaaaggcatgaaaatgaagctggcaatggcatagctgcattaactgtcactgactacactttggagttccagagcatcaaaggacgaatccagagtctgaagcaaagtttggggattattagttctgtcctcactgaaaaggaaaatataaagggaagttctggagagactgtagttggatctagtccttccagggagcacacagatgagttacctctggatattcctgaactcaagctgaaagaagaggctatactcaatagagtgctaaaggaggctctcctttcaaaggaacttgatgttgaacaattagagtcagatctggcatcttcacttcgtatacaggatgtcatgagaaatgagatccagagagttcaggacgaactatcttgcatgaaccacaaggctaagcacttggagcttcagggcttgaagaaagatgagatcattagtcaggtccagctggatttccaggaatctgcaaaggagattagtgcccttagaggaacgctgaaaacagtaactgatgagagggaccttttatggcaggaagcaaagcagctgagaaaaaccatcagcatcatgcaaaatgagactgcctcactaaagaagaaaattgaagcccttgaggaagacatacttgttaaggagggtcagatatcaatactacaagataacatcaagaatcctcaacttgacttcatctgcagtcctagatcagtgaaggagtttggcctggagtga

SEQ ID NO: 76969 - DNA, 5139 bp, Oryza sativa
  Clone ID: PAT_MRT4530_76913C.1
atgtcgtcctccgctagcccatctgctgcaccgtcaaccgagtatgctgagcatctctccaatctggttgcaattcccagcctgttgcatgaaaattactactttctcggcccagtcggtaaccctgatcccaccaagttcatcattggtgaaaccaataggattcctttcagattaaccaacccagatctagggccgatgaccccaactctagtagatatcatcataatcaccggtctggatgtcacttcatcggctaaccccatgagtttgaacacgaagaaccaatatgagttcaagaccaagagcataggcggctggttaggctatgtggcagcatatatgggccaaggatctgtcactcctccagaacatgtagcctttctgctgatgtggctagagaaattcctcttttgtggatcaagctgtggctttacaaccaactggcagttcgtagccgaatccttggaaacaaaaagacaatttcctttgggcaaaatcctcctcggctacttgtaccaaatgttaaacaatgcatcggctaagttagccgtcggctcagtaatcggagtaggtggaccgtggtggctattacaatcttggctgaatttagtagtcatgaagtttgtcaatcggccgtctgtaacagaagccgaattctcaagactagagccgattgtagacaatgatggagaagaacgcactcatcgcagatgcacatcctatggagaatatgcctccacaccaaccgatgcagaagcaaaactatcggctgagctgctcaaggactggttttgcagcttttacgagggtttccaaaaagacactcgagtttggttcctctatgaagattcagcacttctggagaacccattggactttagatttgaagatatcaaccatgaaagatatcagaaacctagagaaatcttttcagctgcaatcagtccatgcatccttccagttggcattcatcaaggaagaaatatccaagtttcttatgagttctatcatccaatgagctcagccaggcaactaggaatgggccaactcccaatcggcttattctttgctgacaagatccagtaccgaggggaaatttcatcaaccttaatgatggatcgggtgcttaatctccaaggaccccctctaggcagcattgacaatatagagctggcaaccttcaggagcaaagcattcgacagatggtggggcgaatggaaactgcacctattccaccaatcgacttctatgtacatgacagacctctttccagatgttgtccctcagacaacagagttctctcctcctcgccagagcaacagtggcagaaatattgaatatgctccgggactaattcctaacgggggtggaccatctcctcctgtcattggctttaatgcccccaagacttcaactcttcttcaagggctcatcagagaaccagccgatgccggcaagaagagaaaaaccagatcatcggctgcagatacttcagccccagctcccaaaaaacaaaccaagccaaagaagatcaagctagttgatgatctgcctgccctagatccatccatcgaacaagctctggatgaagaagacatcgaagatgatgatcaagccgcagccgaaactcgcaagggaacgcttgttcagaaatacaagatgaaagtagttcctgatgaccctgagaccagttcttctaaggagggagaaaagaaaaaagttctagatggctcggctcagccgagtgacaaaggtgctacagatggatcggctcaggagaatcagggtgatcactctcaaggggtacatggggttcaaggtgatggtacccatgggccacaaggaggaaatcttaatcaagattgtgatgcagcacaggattttttcaataatttccaggaccgggttgactatgccgtgcacaatgccttgatcaatcagtctggggtgttagtcaataccttgtcaaacatgatgaaatcaatagccgatggttcgatagttgaacatcaggctgcaggcccggtttatttgcaaggagctcagccgacggtgccggtatcgacttccccacctgctccagcaacgtcgacaccaggccagctggttaaccctcggctgttgatgagagagcagccacagcatagtgggcagattgcgaatcggctgacgcaagatcaggttgtacaaccaatccagcaacaagtcgtgcagtcagttcaacaaacgccaccaaggcagcaggctttgcggccaattcagcagacgccattaagacagcaagtcgttcagccgattcagcagcaaggctcaatgaatgcatcggctgggtttgcgacacctggtggtcagcctgtgcagcaagttttaaatcaagttgtcccagaacacttggttcaccacgtacagccagatggcacagtgatgcctcaagttattcctgagcatctgggagcagctcagcaacgaccgtgggtcgatgtgattgctgacgtgatgagggagcaatttgggcttaaaccaaaagatactagaagcttgtatcggcaaccttaccctgagtggtttgagagagttcctcttcccaatcggttcaaggttccagacttctccaaattttcgggacaagatggtgtgtcaacttatgagcacattagccgacttttagctcagtgtggtgaagcatcggctgtggacgctctgagggttaggttgttccggttgtccttgtcgggatcagcttttacttggttttcttctttgccatatgggtcgatcaatagttgggccgatttagagaagcaatttcacagctatttctacagtggggttcatgagatgaaattgtctgacttgacaacgattaagcaacggcatgatgaacctgtgcacgagtatattcagagattcagggagatgaggaacaagtgcttcagcttgagtttgactgacgcccagttagccgatctggcctttcagggtatgattgctccgattagggagaaattctcatatgaagactttgataacttgtcaaatctgatacagaaggtaaccttgctcgagcataggtctgcagaagctaggaagaactttaagaaggttaatcatgtttgtccttacatgtatgggtcggatgatgatgatgatgactctgaaatagctgcagcggaatgggtagggagtaaaaaggtcataccgtgccagtgggtaaagagttctggaaaagaggagaagtacaattttgatattactaaagctgacaagatttttgatctgctactccgagagaagcaaattcaactccctgctggtcatacgattccatcggctgaggaattaggcaaaaagaggtattgcaaatggcacaattctggatctcattctactaacgattgcaaggttttcagacagcagattcaggcagtctttgaaaagcctgaagggacagaaaatcggcattttaaaccattgtatataaacggctatgtcaatgggaagccgatgtctaagatgatggttgatggtggggccgcggtaaatttgatgccttatgctacgttcaggaagttgggtagaaatgccgaggatctcatcaagacaaacatggtgctcaaagactttggtggcaatccatcggaaaccaaaggtgttctaaatgtggagctgacagtcggcatggcaaggcgacaagatagagatcgtgccagccaacagatggagaacccaagctattattttgagggcgtcgtggagggttcaaacatctacaccaaggacacggtagatgatctcgatgacaagcaaggtcaaggttttatgtcggccgatgatttggaagaaatagatataggtccaggcgatcggcggaggccgacatttattagtaagaacttatctccagagtttagaaccaagctgatagagctcttgaaagagtttagagattccttcgcttgggagtattatgagatgccagggctcagccgatcaatcgttgaacatcagctacctattaaaccaggggttaggccgcaccagcagcccccgaggagatgcaaagccgatatgctcgaacccgtcaaggctgagatcgaacgtttatatgatactggttttattcgtccttgccgatatgctgaatgggtttctagtatagttccggtcatcaagaagaacggcaaggtgagggtatgcattgattttagagatttgaataaagctaccccaaaggaagaatatccaatgccagtggccgatcagttggttgatgctgcttcaggacataagatattaagttttatggatggaaatgcaggatataatcagatctttatggctgaggaagatattcataaaacggcttttagatgtcctggtgctattggcttgtttgaatgggtagtaatgacttttggattaaaaagtgctggagccacgtatcaaagggccatgaattacatttatcatgatcagatcggctggctggttgaggtctatattgatgatgtggttgttaaatctaaggaaatagaggatcacatagccgatttgagaaaagttttcgagaggaccagtacgtatggcttgaagatgaatctgacgaagttaaggcattatttactatccaatgaatgcactgttatatgcaaggccgatgttgtcaagtatatgttatcggctcctattttgaaaggaagggttggaaagtggatattttccttgacggaatttgatcttcgcatcgacttagttataatttcccctcggggggcatgctttgagttcgcttatactattaaaccttatgcgactaataatcaagctaagtatgaggcggttctcaaggggttgcagttactcaaggaagttgaagccgatgctatcgaaatcatgggggattctttgttggtaatcagtcaattggctagagaatatgagtgcaagaatgacacgttaatggtttataatgagaaatgccaagaactgatgaaggaatttcggctggtaacgttgaagcatgtatctcgagagcagaatattaaagctaatgatttagcccaaggggcatcgggatataagccgatgatcaaggatgttaaggttgaagttgctgccataacagccgatgattag

SEQ ID NO: 76970 - DNA, 1899 bp, Oryza sativa
  Clone ID: PAT_MRT4530_76914C.1
atggccgagaaaccgccaccgtcaccgtcctcggctagagaacctgattctgtcaaagctaagatccttaagttgggtctgtctgaggttgatgagagcaacattatgcccatcactctggataaattgacacctgaacagcataaggatcttgaagcaatgatgcagcaagcaaagaaccaatttttgagttcatttacacagacccgcaagggaacgttggttcagaagtataaattaatggtggttgcggatgttcctgggacaggttcttccaaagatggtgaactaaaacaggctccagatggtatggctcagccaggtgatcaaggtgttgcaaatggttctcaaggaaatcaaggcgatggttttcaagaagttcaaggtcttggttctcaaggtgataattcccaaggattacaaggtggaaatcttagtcagaatggcaatgcagcacatgagcttttcaataacttccaagatcgggttgactatgccgtgcacaatgctttgatcaatcagtctggggtgttagtcaataccttgtcaaacatgatgaaatcaatggttgatggttcaatggctgaatatcaggctacaggcccagtttatttgcaaggaggtgtctttccagattatcggcctctgatcaccaatactcagccatctgttcaaacagttcctcccaatgcgccatcagctcagccgacggcaccggtatcggctcccgcacttgctgcgtctacgtcggcaccaggccaactagttagtcctcggttgttgatgagagaacaaccacagcatagggggcaggatgtgaatcggctacgcaagatcagtccagcagcagccgattcagcaaacaccgccaaggcagcagtttgtgcaaccagcttagcaaacacccccaatccaacaggttgtgcaaccaattcaacagacgccaccaagacggcaggttttgcagtcgattcagcaaatgccattaacgcaacagccgaactaccagaattatcaggggggcaatttgaattaccaatatcaacctccttcgccgcaagctcaatatcagcaggggggcccactcaatctcagtttgttcttcagtacaatcaattcgagcccaagcaacaacagtcgcaaggagcaactcagcaacgaccgtgggctgatgtgattaccgatgtgatgagggaacagttcgggcttaagccgaaagatgctggaaacttgtatcggcaaccttaccctgagtggtttgagagagttcctcttcctaataggttcaaagttctagatttttcaaaattctcagggcaagatggtgtgtcaacttatgagcacattagccgatttttagctcaatgtggtgaagcatcggctgtggatgccttgagagttaggttgttccggttgtccttgtctggatcggcttttacttggttttcttctgtgccatatggatcaatcaacacttgggccgatttggagaagcaatttcacagctatttctacagtggggttcatgagatgaaattgtccgatttaacagcaatcaagcaaaggcatgatgaacctatgcatgagtatatccaaaggttcagagagatgaggaataagtgctatagtttgaatttgactgatgcccagttagccgttttggcttttcagggtatgattgctccgatcagggaaatattctcatctgaggactttgatagcttgtcacatcttatacaaaaggtaaccctgcacgagcagaggtctgcagaagccaggaagaaccctaaaagggttaatcatgtttgtccttacatatatggatcggataatgatgatgatgactgtgaaatagctgcagctgaatgggtaagaagtaaaaaggttataccatgctag

SEQ ID NO: 76971 - DNA, 3375 bp, Oryza sativa
  Clone ID: PAT_MRT4530_76915C.1
atgtctacagtccatgatgaagaccactctatttcatcatctcaatttgatgaaatggatgaaagtaatagcacaatcccagttccgtcagaatccagcaccgacgagaagccatttccattcctcgggctgctttgctacgccgatgcggtagactggctcctcatggccctgggaactgttggatctataattcatggcatggcattccccgtcggatatctccttcttgggaaagcacttgatgcttatggaaccaacataaatgatcaggagggcatggtccatgcattgtataaggtggttccgtttgtgtggtacatggcagcagctactcttcctgctggaatggtcgagatctcatgctggatatactcaagtgaaagacaattagcacgcatgcggctagcatttctgagatcagtacttaatcaagaggttggggccttcgacactgacttgaccactgcaaaaatcatcaccggagtaaccaaccacatgagtgtcatacaagatgcaattggtgagaagtcgccattgctctcctttctggtcattcctctgatcctcgtcattggagcaacatacacgaaacagatgaatggcatatcgttatctcgtaatgctatagtctcagaagcaacatctattgtagaacagactttgtcgcatattaagactgttttctcctttgttggggagaaacgggccatgagatcctttgtccggtgcatggataatcagtacaaactaagtaagaaggaggcagtgataaaagggataggactgggattgttccaagctgtgaccttctgttcatgggcactgatggtttggattggggcagtcgcagtaaccagccgaaaggcaacaggaggtggcacgatagctgccatcatgagcatcctcttcggagcaatatcaattacttatgctgcaccagaccttcagacctttaatcaagcaaaagctgcaggaaaagaagtattcaaggttatcaaaagaaagccatccattagttatgagaaacatggatcagtgctaggaaaggttcatggggagataaaattccgtagggtgcatttcgcctatccatccaggcaggataagccaattctccaaggattctcattatccatccccgcaggcaaagtcgttgcacttgtaggaagcagtggctgtgggaagagcactgtgatctcactactccaaaggttctatgatccaacctcaggtagcattttaattgatggtcacagtatcaagaaacttgatctggaatccctccgaagaaacattgcttcagtctcccaggagccatcgctattttcaggcactatcaaggacaacttgaggattggtaaaatggatgcaaatgacgacgagataaccaaagcagcaagaacagctaatgtccattcatttatatccaaacttccaaatgaatacttaacagaggtaggagaaaggggagtgcagttgtcgggaggtcagaaacaacgaatagctattgcaagggcaatgctcaaggatccaccaatcctgcttctggatgaagcaacaagtgcccttgattcagagtcagaaaagctagttcaggatgcgcttgagaaggccatgagtgggaggactgtcatattgatagcacacagaatgtctacaattgtaaatgccgacacaattgttgtcgtggagaatggaaaggtagctcaaactggaactcatcaagagttgattgagaaaagcacattctactcaaatgtatgcagcatgcaaaatattgagaaggaagctggaacgagggtcgcaagctcttctgataatgtcatagaagatgaaattgatgaagtgtacgacaggcagctctctccaaagcagggacaacagaacaaattggaacaactaaactctaagcaaccaaagcaagagaaagacgacattgcaaagatactattagggtcatcatcagcagctatatctgggatctcaaagcccttgtttggttacttcatcatgacaattggtgtggcatattatgatctagatgcaaaaaggaaagtcagcaagtattctttgattttcttcacagctggggtgatcacgcttgccagtaacatcttccaacactatatttatggtgttgttggagaaaaggcaatgaaaatcctcagggaggccatcttttcatctgttctccgaaatgagcttggctggtttgaaaagccaaaaaatggtgtaggctttcttacctcacgcatcgtgagcgacacatcgacagtcaagaccattatatctgatagaatggcagtcattgtgcaatgcatctcttcaattctgatagcaacagtagtaagcatgtatgtcaattggaggatgggtttagtatcatgggcagtcatgccatgccatttcatcggtggccttattcaggccaaggcagccaaagggttctatggtgactctgctattgctcaccaggaacttgtctcccttgcttcagaggcagctagcaacatcagaactgtggcatcctttgtatatgaggatgaaataatcaagaaagcagaattgtcgctgcaagaacccatgcgagttaccaagatcgagagcatgaagtacggcgtagtccaagggatctcactctgcctttggaatattgcacatgcagtggcgctttggtacaccacagttctggttcagaggaagcaggcttcatttgagaacagcataagatcataccagatattctcactcacagtgccttccataacagagctatggactctgatccccatggtcatgtcagccattgcagtactcaatcctgcatttgaaatgcttgatagggacacacagattgtgccagacagaccagaaaatccaagtgatggctggctcatgggaagaactgagtttcaagatgtgagcttcaactatccatctagaccagaggtgaccattcttgatggcttcagtctagtcattgagcctggccaaagagtagcattggttggtccaagcggcgcgggaaaatcctctgtcctggcactactattgagattctatgatcctcagagagggagagtactaattgacaacaagaacataaaagactacaatctcaggtggctcaggaaacagattgggctagtccaacaagaaccaatcttgttcaattcatccatcagagataacattagctacggaagcgaagagacttcagagactgaaataattcaggctgcaatggaggcgaacattcacgaattcatcagcagcctaccaaaagggtatgacccggttgttggggagaaaggaagccagctttcaggagggcagaaacagcggatagctattgccaagaactcttcttaa

SEQ ID NO: 76972 - DNA, 219 bp, Oryza sativa
  Clone ID: PAT_MRT4530_76916C.1
atggcgtctgctgaattggccgcaaagcctgctgccttggtggcgtttgttgaactgactgcacgacttgttgctggattggttgtacaacctgttggatcgggggtgtctgttgaatcagctactgctggattggatcaacaccgagggttaaccagctggcctggtgtcgacgttgctggagcaggtggggaagtcgataccggcaccgtcggctga

SEQ ID NO: 76973 - DNA, 5807 bp, Oryza sativa
  Clone ID: PAT_MRT4530_76917C.1
atcaaggtgttgcagatggttctcaaggagatcaaggtgatggttctcaagaagttcaaggtcttgatgataattcccaaggattacaaggtggaaatcttaatcaggatggtaatgcagcacatgagtttttcaataacttccaagatcgggttgactatgccgtgtataatgctttgatcaaccaatctggggtattaattaataccttgtcaaacatgatgaagtcaatggttgatggttcaatggccgagtataaagctacgggaccggtttacctaccaggaggagtattcccgaattatcggacattaatcaccgataaacagccagtcatccagtcagcccttcttagtgcgtcaccggctcagccgacggcaccagcattggctcccgtacctgctgcgccgcctttggctccaggccaattagtcaatccccaattgttggtaagagagcaaccacaacatgctggacaaaatgtgactcggctaacgcaagaccaaggctcaatgaatgcatcggctgggtttgcaacacctggtggtcagcctgtgcagcatgctacaaatcaggttgtcccagagcacttggttcatcatgtacaaccagatggcacggtgatacctcaagttattcccgagcatttggtgctcaatattcagccagatcttcagaattaccaagggggcaatttgaattatcagtatcagccgcaatcaccgcatgttcaataccaacaggcaggatcggctcagccccagtttgttcctcaatacaatcagtttgagcccataccacaacaacctcagggaacacctcagcagcgaccatgggccgatttaattgcggatgtcatgaaggagcattttgggcttaggccaaaggaggctggaaatttgtaccgacaaccttatcctgaatggtttgaaagagttcctctacctaatcggtttaaggtaccagatttttcaaagttttcaggtgggatttatgagatgaaattgtccgatctcacgtcgatcaagcaaaagcatgatgagccggtacatgaatatattcagagattcaggagatgaggaataagtgttacagcttgagtttgactaatgcccagttagccgatttggcttttcaagggatgattgctccgatcagggagaagttctcatctgaagactttgaaagcttgtcgcatcttacacagaaggtagctttgcatgaacaaaggtttgcggaggctagaaagaattctagaaaggtgaatcatgtctgcccttacatgtatggatcggatgatgaggatgatgattctgaaatagctacagccgagtgggttaggagcaaaaaggttataccatgacaatgggcaaagaactcagggaaagaggaaaggtatggctttgacataaccaaggctgataaaatatttgacttgcttcttcgagaaaaacagattcaacttcctgccggcagctattgagggaggtaaaatcaagtttgatgattctaaaaggccgatgaaaaagaggtatagtaaacagcaggagaggtatcatgaagaagatggtgatggctttgatcctcattggggttgcgagttctttagattttgttggaatgagggtatgaggctgccatctattgaagattgtcctgggtgcggtgatgttgcagaaagttcaagccgatcatataatagaggcaatcggctaaggcaaacgagagttcctgttcatcaacgattgggtccaataaaccaagatcgtggccaggaggacgatgaaaacaggaaaactcaatggtgtccttctggtattttcacaaagaatcagaaatgaagggttcaaaggttgagaagtagagaacgcttttaggaggtcgagcaggaaatcagtcatcggctgaagaaggcaaagccgagacaggagtggcgagttaagagtcaagctcctggagccgatgatgttgcggccgatgaggcaaaaaggttggcaaaagggaaaaatgttgtaacggcgtcagttaacatggttttcatcttgctagccgaattcgggatcgaccgagccgatgtcgatgaggtggaagaggagtcggctaagttggttctatcaccagaacagacagtcttcgaaaagcctgaggggacagagaattggcatcttaaaccattgtatataaacggctatgtcaatggaaagccgatgtctaagatgatggtcgatggtggggctgcggtaaatttgatgccttatgccacgttcaggaagttgggtacaaatgccgatgacctcattaagacgaacatggtgctcaaagactttggcggcaatccatcagagaccaaaggtgttctaaatgtggaactgacagtcggcagtaagactattcctaccacgttttttgtcatcgatggaaagggttcttacagcttgtttcttggaagggattggattcatgccaattgttgtattccttcaaccatgcatcaatgcttgattcaatggcaaggcgacatgatagagatcgtaccagccgacaggtcagtcaatgttgccagtgccgatttggctctctgggaaatggatggccttgatttttttatctggaaaaggtgtcgtggagggtccaaacgtctacaccaaggacacaatagatgatctcgatgacaagcaaggtcagggttttatgtcggccgatgatttggaagaaatagatataggtccaggcgatcggccaaggccgacatttattagtaagaatttatccacagaatttagaaccaagttgatagagctcttaaaagaatttagagattgctttgcttgggagtattatgagatgccaggactcagccgatcgattgttgaacatcggctacctatcaaaccaggggttagaccacaccagcaaccaccgagaagatgcaaagccgatatgctcgaacctgtcaaggctgagattaaacgtttatatgatgctagttttattcgtccttgtcgatatgctgagtgggtttctagcatagttcctgttatcaagaagaatgccaaggtgagagtgtgcattgattttagagatttgaataaagctaccccaaaggacgaatatccaatgccagtagccgatcaactggttgatgctgcttcagggcacaaaattttgagttttatggatagaaacgcgggatacaatcaaatttttatggccgaagaagacattcataagacggcttttaggtgtcctggtgcaatcggcttgtttgagtgggttgtgatgactttcggcttaaaaagtgctggagcaacatatcaaagagctatgaattatatataccatgatttaatcggctggttggttgaggtctatattgatgatgtggttgtcaagtctaaagagatagaggaccacataaccgatttgaggaaagtttttgagagaaccaggaaatatggcttgaagatgaatccgacaaagtgtgcttttggtgtgtcggctgccagttcttaggatttcttgttcatgagagggggattgaaattactcaaagaagtatcaatgcgatcaagaagattaagcctacggagaacaaaacagaattgcaggagatgatcggcaagattaattctattagaagatttatttctaatttgtctggaaggttagagccttttacgccattattgagattgaaggccgatcagcagtttacttggggcagcgcaacagaaagctttggataatatcaagggatacttgagttctccttcagttttgattcctccacagaaagggataccttttcggttatatttgtcggccgagactagagattcccctgtggagaagttattatgcctatgtttatatttttcatgcacaaggttgaggcattatttattgtctaataaatgtactatcatatgcaaagccgatgttgtcaagtacatgttatcggctccaattttgaaaggaagggttggaaagtggatattttccttaactgagtttgatcttcggtatgagtcaccgaaggcgattaaagggcaagctatagccgattttattgttgatcatcgtgatgattcaatcggctcggttgagattgtgccatggactttattttttgatgggtcagtttgtactcatggttgtggtatcggcttagtaataatttcccctcggggggcatgatttgagtttgcttatactattaaaccttatgcgactaataatcaagctgggtatgaggcagttctcaaagggttgcagttactcaaggaagttgaggccgatgctatcgaaatcatgggggattatttgttggtgatcagtcaattggcaggagaatatgagtgcaagaatgacacgttaagggtctataatgagaagtgacaagaactgatgaaggaatttcggctagtaactttgaagcatgtatctcgagagcagaatattgaagctaatgatttagcctaaggggcatcgggatataagccgatgatcaaagatgttcagattgaggttgctaccgtaacagctgatgattggagatatgatgtctattggtatttacaggatccatctcaatcgccttctcggaagttaagatataaagcgttgaagtatacattgttggacaatgagctttattatcggacgatcgatggagtgttgcttaaatgtttgagtgccgatcaggcaaaagttgcaatcggtgaggttcatgaaggggtatgtggcactcatcaatcggcgcataaaatgaagtggttacttcgacatgctggatatttttggccgacgatgttggaggattgctttagatattataaaggttgtcaagactgtcagaaatttggagcgatccagagagcgccgacatcggctatgaatcctattattaaaccatggccgtttagaggttggggaattgatatgatcggcatgattaatccactgtccagcaaaggacataagtttatattggtggcaaccgattattttaccaagtgggtagaagcgatccctttgaagaaggttgattctggggatgctattcaatttgttcaagaacatattatctatagatttggtattcctcaaactattacaaccgatcaaggttcaatcttcgtgtccgatgaatttgtttagtttgccgatagtatgggtatcaaattgttgaattcttcaccatattatgcacaagctaacgtgcaggccgaggcatctaacaaaagcttgatcaagttgattaaaaggaaaatttctgattatcctcggcaatggcatactcgtttagccgaagcttgtggtcttatcggatggcttgtcatggatcaatccaagttcctccttataagcttgtttatgggcgtgaagctattttgccatgggaagttagagttggctcacgacgagtagagttgcaagatggtttgacagccgatgagtattataaccttatggccgatgaaagggaggacttggttcaatcacgtttgcgagctcttgctaaggtaactaaagataaagaacaagttgctcggtactataataagaaagtggtacccaagactttttcggaaggtgaacttgtatggaagttgattttgccgattggaactcgggataacaaattcggcaagtggtcaccgaattgggagggaccgttccaaatctataaggttgtgtctaaaggggcatatatgttgcaagggcttgatggagaagtttatggacgagcactcaatggcaagtacttgaagaaatattacccaagtgtttgggttaatgcatga

SEQ ID NO: 76974 - DNA, 444 bp, Oryza sativa
  unsure (1)..(444): unsure at all n locations
  Clone ID: PAT_MRT4530_76918C.1
acgcgctgcctctggtgcttggcctcgggggaactccctaggcctggtacggtcaccctggactagcagtcggtgtgggtatatatgtagcctagttcgcatcgggcggaagctgggaagggaagatctagttcgcctcggagccggaatcgaatcctaccttcttttcctcttctcctctccatcatgantgtatgaacaatacgcgcagcgcttgtgcggtaaggcccgacgccgttcacaagcttaacattggaattggattttattaacgaccatgaagaacaagaaggggagatgncgctggggctcttgatcggctaggccagcttatatggtgccggatcggttctctgcatctattctcctatgataacacttcttctgcgcgtcagatctgccacaaacctcgagccctctgatcccgtgcaacacgaccactta

SEQ ID NO: 76975 - DNA, 492 bp, Oryza sativa
  Clone ID: PAT_MRT4530_76919C.1
atggacccatggtacatccggaagagcatcgcgccgctgctcttggcgaagcactcgagccggacctcctcgtccgccgtcaatggcggcagtatctcctccggcgccgccgactccaccacccttgccaggtccaccacggcgcggcgcatccacctcacaacgccgtcatgcttcgacaacaacgacgacagcggccgcctcgccgtgctgtcgtccttcgacgacaacgatcgatatctcgtggcgcctcgccacggccaggctaagcgtcccgtccggcgacgacacgagaagcatctcgacgctcgtcttggcgacgcgtccgagtccaaaccgccccaacccattagtctcgtcaaaccatttccatccaatcaaagccagcccaaacttgaaaccaatccattttacccacttcaacccaacccattagcaggcttagcaataagcactccattgatcatcgatcctactactaggtacagctag

SEQ ID NO: 76976 - DNA, 1113 bp, Oryza sativa
  Clone ID: PAT_MRT4530_7691C.1
atgggcctctcgcgtcggttcctgaatctaatcgtggacaaccgcttcccaggcgctgtatcgctgctctcgatcgacttgaggcgccacaagctgttcaacacaacaacacctgctgatctgccattgatcaacagatctgtatctgaatcagaacggccgccatgtgtagccaatgctaacaatcatcagaagaagaggaagaagaagacagtaaagatgaggatgcttcatcttcccgcgccaaccatcgaccttgaagcctcatctaggggctatagctggaacatcaagtgctcaccgctcacagatcgcaagctgctctgcacggacaactatggccgccatgtcctcttcaactccgaggcgcgccaagtggaggacttgcccttcctcaacgagcccaagaattcgaccttctccatcttcatccctggtgcggctactgacaccaatggctgtgacgacaatggtggtggcggcagcagcatctacatcatggagcgttgtcccagccatgaacaagaacagcggttgctgagcgtgaaacacacctggatcagagttggggattggacactacccttcacaggcaaggttgagcatgtgccagagctgaagttgtggtttggcatttgcaccaatgactggaaattgggagctattgacctctccactattatctccacagccaccatggaggacttccagccacagctagtaggcacttggaaggagcttgaggcacctcaacactggagtgagatgcgttgtcctcagcttgccaacctgggctcaggcaggttctgcatcgcaaggttcttccacacttggactactcccatggaaccgaactcatttggttatgattcaattaaggtgcactctttttctgattttgattctgattctgattcaattgagtttgaggagcactcttttactgtcttgaccggtacggatgtagtgccgtgcgtccatgatggcaatgggactggcaatggcaattacgccaatggcagcaatgggaaagtggaactccgaatgatcaagcacaactcgaaaagccacatatcttatggcatagatggtacaattaggctagtgttctga

SEQ ID NO: 76977 - DNA, 360 bp, Oryza sativa
  Clone ID: PAT_MRT4530_76920C.1
atggcggccatggcagctgtggcagacgaggcggacgcacgcgacggcgagtcggcaactgctgtgccacgacgatggctgcggaggacggggcgatggtcacagcggacgccgccgccgccgacggtcgcagcgaatgaggcggacgccggtgatgacgccaaccttggcggaggaggcggacgcacacaacggttacaacggcagtggacgacgacgatgggcacggtggcgattgcgacgaacttagacacggatgatcggtacaaggggccccagaaccttgggcggagcgtgcagctgggcgacaaattagtcgcccgctcgcgctcgcgcttgacccctctctcctccacgtaa

SEQ ID NO: 76978 - DNA, 299 bp, Oryza sativa
  Clone ID: PAT_MRT4530_76921C.1
aaaaatattaaggggggacatggctacaactgttgaaaaccaccgccctgctaaggtgctttttatgggatggtaactttgaaggggctaattaacaaatacaatcacttgtttgaagcaaatgatctgcaaactgaatcatgtcctcctgaaaaaataaaagggataaaaatgtccagttggtttcgaccctttttttatttattccaccctgtaatttaaacgggaaacacatttctccaaatccaaatttggaattaaggtaccgaacaatgaactgagaaaagtaaaatcgatca

SEQ ID NO: 76979 - DNA, 215 bp, Oryza sativa
  Clone ID: PAT_MRT4530_76922C.1
cccccaccccattagccgccccccgtgcacgtgaaggtctacatgccgcgtgtgcaccgtgccacctcgctcatcgaagggtaccgccgccccactactgcagccttgcagcctctcctaaacctcgcaccgccctactgccgctgagaaggccgaagagagtagagataggagcgaaaaccaagggaatcgttttacatggttttaatatttga

SEQ ID NO: 76980 - DNA, 282 bp, Oryza sativa
  Clone ID: PAT_MRT4530_76923C.1
atgacggttgtggaaggggaattgtccgaagtaccctctaaccgtcattggggtgcaatcttggacgtccatgccaaaccctggcctcaacggtggagatgggggttcggccgaaccatgggctggcccaaaccagcccatcttcggctggctacctcctctattgcttcacttcgtagacttgtgaattttggcctgattcatcgtgtcaagtctgcgtttttggcccattcatacacaagtctggttctcgacatcgtccgattgatttatcgtctatgt

SEQ ID NO: 76981 - DNA, 3387 bp, Oryza sativa
  Clone ID: PAT_MRT4530_76924C.1
atgtctaaactggcgctcctcctccgaggagctgcaatgatcttgtggctactcatctcgcagacaccatctacctgttgtgttcatgcgagatgcgtcaccggcgagcgtgatgcgctgctctccttcaaggcaagccttctggacccttctggcaggctgtcgtcatggcagggtgacgactgctgccagtggaagggagtccggtgcagcaacagaactggcaatatcgttgcgcttaacctccgcaacactaataatttctggtacgatttctatgatgctgatgggttgaacctattgagaggcggtgacttgagcctattgggaggtgaattgagctcctctttgattgctttacatcatctgaggcatctcgatctgagttgcaatttcttcaacggaacgagcatacctgttttcatgggctctttcaagaacttgagatatctcaacctctcctgggcaggtttcggtgggaaaataccttcgcaaattggtaatatttccagcttacaataccttgatgttagctcgaattatttcttccatgaacagaacacgtttttcatgtcttcaactgatctttcttggttgccacgtctcacctttttgaggcatgttgacatgactgacgttgacctcagttccgtgagggattgggttcacatggtgaacatgcttcctgctcttcaagttcttcgtttgtccgagtgtggccttaaccatactgtatctaaactatcccattcaaacctcacaaatcttgaggtccttgatctatcattcaatcaatttagctacacgccactccgacacaactggttttgggatctcactagcctcgaggagctttatctctcagaatatgcatggtttgcacctgcagaacctatccctgatagattgggtaacatgtctgccctacgtgtcttagatctaagttacagttctattgttggtttgtttccgaagaccttagagaatatgtgtaatttgcaagtattgctaatggatggcaacaatattgatgcggacttaagggaattcatggaacggttgccaatgtgctcgttgaattctttggaagagttgaatttagaatacacaaatatgagtggaacattcccaacgttcattcacaaaatgagcaatctcagcgttcttctattgtttggaaacaagttggttggcgagctacctgctggtgtcggagcgctgggtaatttgaaaatattggctcttagcaacaataacttcagaggtctagtgccgcttgaaacagtaagtagtttggatactttgtatcttaacaacaacaagttcaacggttttgtgcctcttgaagttggagcagtaagtaacttgaaaaagttgtttcttgcgtacaatactttcagcggccctgcaccatcatggattggaacactaggtaatttgacaatattggatcttagctacaataacctcagtggtccagtaccgcttgagattggagctgtaaatttgaaaattttgtatcttaacaacaataagttcagcggttttgtgcctcttggaattggagcagtaagtcatttgaaagtgttgtatcttagctacaataatttcagcggccctgcaccatcgtgggttggagcattaggtaatttacaaattttggatctttcccacaatagcttcagtggacctgtaccaccagggattggatcactcagtaatttgacaacattggatcttagctataacaggttccaaggcgtaatctctaaggatcatgttgaacatttatctcgtctgaagtatctggatttgtcagacaacttcttgaaaatagatatacatacaaattcttctccgccattcaaactaagaaacgcagctttccgatcatgtcagctggggccgcgctttccattgtggcttagatggcagactgacattgatgttcttgttcttgaaaatacaaaattggatgatgttattccggattggttctgggtgacattttcccgagcttcattcttgcaagcatcaggaaataagttgcatggctcattaccgccaagtctagaacacatctcagttggtcgcatatatctcggttccaacttgttgacaggtcaagttcctcaactccctataagtatgactcgcttgaatttgtcttcaaactttttgtcagggccattgccatctctcaaagctccactgctggaggagctgttgcttgccaataataatattacaggcagcatcccaccatccatgtgccaattgactggtttgaaacgtttggacctgtcaggaaacaaaataacaggagatcttgaacaaatgcaatgctggaaacagtcagatatgaccaatacaaactctgcagataaatttggttctagtatgctcagtcttgccttgaaccacaatgaactttcaggtatatttcctcaatttcttcaaaatgcctcacaattattgttcctggatctttcacacaacaggttttttggaagtttgccaaagtggttaccagaaagaatgccaaacttgcaaatcttgaggttgcggtcaaatattttccatggccatattcccaagaacattatttaccttggtaaacttcattttctggacatagcacacaacaacatatcaggatccataccagactccttagcaaacttcaaagcaatgactgttatagctcagaatagtgaggactatatttttgaagagagcataccagtaatcacgaaagatcaacagcgtgactacacctttgaaatctacaatcaggtggttaatcttgatttttcatgtaacaagttaacagggcatattccagaagaaatacatttacttattggacttaccaatttaaatttatcaagtaatcagttcagtggaacaatccatgatcaaattggtgatttgaagcagttggaatcccttgacttgtcctacaatgaattatctggtgaaatccccccaagtttgtcagctctaacttctctaagccacttgaacctatcatacaacaatttatcaggcacaataccatcaggatcacagctacaagcactcgatgaccagatttatatatatgttggaaatcctggtctttgtgggcctcctctcttgaagaactgttcaactaatggtacacaacaaagtttctatgaagatagaagccatatgagatctctctacctcgggatgagcataggatttgtgattggtctatggactgtgttttgcaccatgatgatgaagagaacctggatgatggcttactttcggatcattgacaatttatatgataaggcctatgtacaagtggctataagctggagtcgcttgatgcggaaaaaccaagatgcagcgtga

SEQ ID NO: 76982 - DNA, 366 bp, Oryza sativa
  Clone ID: PAT_MRT4530_76925C.1
atggaggggaggcagcggccacatcctcccatccaccagatctgcgcgaaagggaaggtggtgggaggggatgcagtggcctccgtgatgacggcggcggatcaggcggaggcaatggcatcggcggcttccactggcgatggcgggctttcctttgccagatccaacgagagaggagcagtggtagcaccgacgctcttccctccaccagattcggcaagcgggaaggccgcgggctcccctcctccagatctggtcaggggaggcggcgggttagccgaggcccaacaaattaaggttgcccggaccccaacagttcataggcacacctactcggggaaaggcccaatcaccctaaaagactag

SEQ ID NO: 76983 - DNA, 276 bp, Oryza sativa
  Clone ID: PAT_MRT4530_76926C.1
atggtgcagcgggagctcagcagggcacgaactggggacgacgtggccctcttcgtcgagctgccgctgctgtggtccttggcggcgcgaagcagcgaagacaacgaggccgccgccgctgccccgtcgagctcaccagatccggccttgggttcgctggatctggcgagcaacaccattttgggggtgacgcacctgctcagggtgatggcctcgctagcggccgccgcttcgcacaggatgtggggccgttgcatggggctacttcctctctaa

SEQ ID NO: 76984 - DNA, 218 bp, Oryza sativa
  Clone ID: PAT_MRT4530_76927C.1
caacagggaaagatagcaagcccgggccactcgacggcatccatgatggtatgctcttcgtagcaacagggaatgatccgcgcattgtacaaaaggcttcagctcgtaaaagccttaagaactggaaaagtagggagggcgttgcagtggcaatcgcacatcccacactagttgagtggagcgaacagctagcgatcgagcagcagagaggtggctga

SEQ ID NO: 76985 - DNA, 373 bp, Oryza sativa
  Clone ID: PAT_MRT4530_76928C.1
gcgcgcacgcgtccgatctctcctcaccttggcgcgccaacggttggttacgaacgaggacgagctgagcctgagacgcgcgctgtcccgtgggcacagccgcacaggtgctcttgcatggctgctgctgctgctgctgcgtcgtccgcgaagcgcgcgctcctcccgtgggcacgcgacgcccaccacgcgctggccagggccctgcagggatgcggcggcggcggcggcctcggtctccgcggggcgctcccgacggccggaggcaggtggtctctgctccagtgcccggtgaggtcgtcgctgccgcagctcgactccgccgacaggtccgatgaggaaagcggcggcgaaatcgactgggacaacctgg

SEQ ID NO: 76986 - DNA, 113 bp, Oryza sativa
  unsure (1)..(113): unsure at all n locations
  Clone ID: PAT_MRT4530_76929C.1
atnactatntnnaatnaacataagcaattagcaacagctacagatgtctggccgattgcgtgggagttggggccagcagcggatgacctcgaactggaggcgggggtgctcgg

SEQ ID NO: 76987 - DNA, 761 bp, Oryza sativa
  Clone ID: PAT_MRT4530_7692C.1
tggcaggcacaggaagagaaaaatcaagcagtgagaggggtattaatttgagaatttttcttgagatccctgtcacgcccagaaattcccaaatagaattcccagcagaatgtgcattaaaacccccatccaggactggccggggtacacaaacaacaaagttgacatacagatccacgtcagatagaggctgtgataggacccttcgcataaccccctctaaccaagcacaccacacctcaggtttcacaacccccactcctcgcaaggcagcgggcagtcccctcttgtgcctaggtgaatccggaagccgcataggccgtcgtagggcccatccaaactccatcacgcccacccttgcctggatgcgtcggctagaggaaagctacactacaagcccagccgttgcccacgctggcttgtggaaatggacctcgctgacgtcagcaagggggagaggcggcgccggcaagcgggccccaccggtcagcgacacaagggggggcggttcaccgtggaccgggaccacgcgggtggtccaccgccggtccacgggaccgacggcccagatcgccctcggggtcgatcggacgggcggtggcgacccggctcggctcaagaccggccaagcggccacggcgacggcgacggcgcgcgcacacgcgttgccggcgacggcaaccggcgacggagacggcggcgcaaaggcggcgccgacgggcggtggtgctaaagcgacggctaacgggcggcggcgctaa

SEQ ID NO: 76988 - DNA, 459 bp, Oryza sativa
  Clone ID: PAT_MRT4530_76930C.1
gccacacgggcactcccacggctgcagagccggccaggcccccggtgcactcagtgaggccatcctagacctacaggctaatcttcagggccccaatcaggagaggaaacatcattgttgtcatgagcaatagatacactccagccggagaacctatcaccaccaacaagaggcacagtgtctgcaagatctgaagctcatgtgaggatgctcttgaggagccctctctcggaaaagcgtactactacaccctcctacagacggacattaactggaccctcggctgtcatgttaattagctgacgtggtgatcaaggaccatactaatgatgtgttgaacgatccacgacttttatatcgtgcacatggtaaccttcgactacaaggattgcctttacgcctgaataaacacgaatgaagccaacgttgagggactgccatgacatatatagatccaag

SEQ ID NO: 76989 - DNA, 1444 bp, Oryza sativa
  Clone ID: PAT_MRT4530_76931C.1
ttggtttttcccaggttttttttataaaattatatagcaaatgttcccaattatgtttctgaattgtccttccaataaaaatttcaagtgttgcagtccttcccaaatcaaataagtttacaagatcccaatcagagacgtattttcatatacatcagtcatgtttgcacaaaattatttcaccccatgtaactaaacagtggcaattagcagatcatcgagacctctcttacaagcagcaactcatctattatttgtcaagacaaagccaagctcataatccacatcaggttatcctccagatatcatcgaacatttggtgtaaacaatatgatcctccagatatcatcgaacacttggtgtaacacaatatgatactccagccatgctccgtagtcctccagaaacaaccaggttcaatagtccagtgaaaaaaaaaaataaagaacagggccagcagaagaatctgaacattgctccgtagtcctccagaaacaaccaggttcaatagtccagtgaaaaaaaaaaataaagaacagggcagagaagaatctgaacatggtactctcaatgcaaccacattctaccatccatgcaacctggtcctccagaaacaaccaagctcaatagtccaatgaataatataaagaactgggccttcagaagaatctgaacatggtattctctaatcaaccttagacaatctgttcagaataaaacatctcgatatacaatgttctttgtgctttttccagtggggtcaatgtctatccttggattggccaaaaaactgagtgtccccctcgagatacccctagagagtgcaacgtagagttgatcatgagagaaaccaggttcagggtcaaaggtaaccacatttgggattgcctgtccgtgatctttgttgatcgccgtcataaaaaagacaaatacgacacaggccgcccaacagcaccaaaccggcttgatatggctatttaccctgtcttttcagaaaattgcagtgcagggtttcgtgcattttccatttcagtaagaaaggaactgttatttttcgactaaataaaaaagataagagaccaggcatggttgaatttgctctctgtaagataatctgcaagatattcaacatgacaactataatgttagtatgtatgaaactgcagcaccaatcacgtaatatatagcctgcaattatccacaaaggtaaagaagaaccgaataacataactaaaaggagatgcataccattaagcttgaataagaaaattcagctagagaactaatggggaaaattcacaaagaggaagaaacggggattgaaaagagtcgtatttgagttgaatcaggtatcaccaacataagagagggtggcccccggctggcgggcctagctgctcctcgcccatcaacttcactatagaacaaataatggttttaagct

SEQ ID NO: 76990 - DNA, 1083 bp, Oryza sativa
  Clone ID: PAT_MRT4530_76932C.1
atggccgcgacgatggcgatcatcactccttgcggggcggaggacggcggcggcggagatctaggcgacggccgcgacgacggcggcgaaggagtggcggcgccgcggccaccaccggggggtgacggggtgaagattggaagagacggtggtgctactgacggcgacggcgagggagacggttcgcgggaagctggagatggcgctggcggcgatcgagctggtgggagcggggttggtggtggcttcgtcgtcggcgccggtgcagcctccggtggttgggaaggcaccgttggaggcggcgctggagaaggcggtgacgtcgctggtggtagtggattcgccggagaaggaggtgacgtcgttggcggtagtggattcgccggggaaggtggtgacgtcgtcggcggcaatggattcgccggagaaggtggtgacgtcgtcggcggcagtggattcgccggagaaggtggtgacgtcgcaggcggcagtgggttcgccggagaaggtggtgacgtcgcaggcggcagtggatttgccggagaaggtggtgacaccggggaaggtggtgacgttattggcggcagtgggttcaccggagaaggcggcggggacggcgatggcggtggtggattcaccggtgaaggcggggacggcgtcggtggtagcaccggcatcaccggagtaggcggcggcggcggcggtattagtggtggagatggcgacggcggctgcatcaccggaggaggaggaggcgacgaaggcggtacaggtttcactggcttcgacggcatcaccggtggaggaggaggaggcgacggagttggccgcggcgccaccggtggagcaggaggaggaggaggagacgctgccggtggcgagggaggcggagcagccggcggcggacgagatggcatcacaggtggtggtggtggcggcgggtcgggtgcaccaagagacggaggcaacggcggtgcaggagcaggagtgctagcattaggcggcggcggcggcggcgcggacatgggcgggtgcaaccgcaaagcagcggcggcgggggagaagaggagatcgcggagataa

SEQ ID NO: 76991 - DNA, 570 bp, Oryza sativa
  Clone ID: PAT_MRT4530_76933C.1
atggaggacgagaaaggggaaggacgcactcgtgcacagcctgccgatattattgaagaaattgatttattactaagtactggtctagtagaactctatagaagggggagagggacggccggactgagggagagccagagaggtagttcactagcgctcaccggagtccggagtccggagggggagggccgctggggccggcgcagagggcgggaggccggagtgccggacgcggcggggcggcgtcgggcgagaccacgggaggccgcgcgaggcggggccgcgggaaggcggcgccaaggcgggcaggcccaggccggggggcagccgcgcggggtgtcctccggcgtgcggcgtcggaccgtcggtggctcggtgcgtgcgggagtgcgccgtgtgggcggtgcggcgtgggactgggagaatagccagctaggggaggtggcggcgttcgacggtgtctccgtcatggaggagaagcgtcgccgtcgcggaagaggagcgattggcagtagccactggctcggggaggtggcagcgtttggtgtcatcgccatcacagctgaatga

SEQ ID NO: 76992 - DNA, 339 bp, Oryza sativa
  Clone ID: PAT_MRT4530_76934C.1
atggcgaggggggttttgccggcgggccacgccagctgcgggataactggctctgtgcatggagagaatgtactccttgataagctcatccatattagaggtggagctactatgagcgaagtcgtacttgacgctagcggtagtggaggcgatgagggaggcaaaccttcctccctacgtaaacgaggcgcaggtcgcggctgtcctcgtggtcggcaagaggtgggcgagcacggtgcccttcatatcattcaacgccgagtatatgccgagtgcatcaatacggttcttgagtcggtgactctcacaaagaagtggatcctccgaggcaacatgtag

SEQ ID NO: 76993 - DNA, 333 bp, Oryza sativa
  Clone ID: PAT_MRT4530_76935C.1
atggaggagagcagcagcttcttggcgccgacggagcggagatggcgatctggcggagcggtgccgggagatgacgccggagcggaggacgagcgggaggccgggagccagtggagctgcagccgcttgcagccaggtcgaagtggcgagcagcagcaacttcttggcgccgatgaagaggagatcgtgatctggcggaggcgcggagcacgccgggagatgacgctgaagcggaggacgagcgggagccgcagcagcgaccccgtcggtggcaatggtggcagcggcggcggaggaggaggagcggaggacccgaggaggaggatgagttag

SEQ ID NO: 76994 - DNA, 1290 bp, Oryza sativa
  Clone ID: PAT_MRT4530_76936C.1
gagaaggtatgtaaatcttggtacaggtaacaaaatttttaggtactttctcaagtagaaagtaccgtaaaatttctttagaaatattatataggatgggggatgaatgcattgtaaaagtcaaactattgcaagacgtagataatgaagagaaaagatacgataaaacattctgtgaccttgttgatgcgctgcattgtaatcagaatgatttggtggttgttctgcttcttgcattggtacaaatggttccccatgaacaccatcactgacagataggtcattctcagagtcagcaagcaaaggatttgatccgccacctcctggaactggaatacgtgcagcagtgttgcagttttcaagtgaaggacatgtttgagagacgtgagtaagcccggggataaaattattgacttgatatgctgcattgtgattagaaggatttggcggtggtgctgcgtcttgcattgacaaagataggtcttcagaaacatttctattaggggaaattttagtaggggcgccattttcattcattatgtagtcaaatggaatgctctctaatgcattgtatgcttcctttctctgactatctactatggccttttgatatcgattgaaattctcctttgcagtgtacttgccattaaattctgctcccacaatatcatgtacgcaattgaagaagatcacatcattaatttggttacctacaaccttgtatgctttcaggtaatgattttctttgagatcacactccctggcatgctcgataatggttttccagtctttatgatcttcctttatacgcttgtttcggtttgtttgcacaacgacaggacccatgaatgcttcttgaacccgatggcctccagtggcctcgttcctattaactcttgctgcaatggtgaaggttcttctcaagctcccttccctaaactggattccagggaaggagcaagttccctcgacaagcctgcgagcaacaactcctttcaatacagaaatatgtccatctcgggtcttcacttccttttcgtccaactgctccgtggtgcagttaccaacgacgtcgcaagcgaaatcgtcccgtagaaccaaaagctcgatttttgctgaagagagtggaccggatttgatcacatttccatcggagttgatcatccgaacctccagttttatttgacagccggtgaaaaggggactctccaggttggaagtaaattggagacggtagtcgtctgaagccattgtcttgaaagatctgaactagtatgtatgaatcgtcct

SEQ ID NO: 76995 - DNA, 309 bp, Oryza sativa
  Clone ID: PAT_MRT4530_76937C.1
atggcgagggccggatccggagggatccatggcggcgtggtggggcgggggggaggggatctagggttttgcgaggtggctagggtttgggaggaggcatcggctggagaggaggaagacgacggcgacgcggaggaggcggagcggagcgcgacggggagatctggagcggagtcagggtggggcgaagcgacgaagtggaaaatgggaaaccagaagcacacactcactggcatgtgggccagtggtcaatggtcatcgggacccacctgtcggtcccagagagcaatgaggcttgaccttaagtag

SEQ ID NO: 76996 - DNA, 171 bp, Oryza sativa
  Clone ID: PAT_MRT4530_76938C.1
gcacgaggcaacggaagcccttttttcgaacgggatgataccggttaggtattaggtattatgcgtttctaccacgtatcaggtgatacttgcaaggtatcagatgatatctatcaggtaccatgtgattcttatcacgtagagggtgatacttgcgaggtatcaggttct

SEQ ID NO: 76997 - DNA, 363 bp, Oryza sativa
  Clone ID: PAT_MRT4530_76939C.1
atggaggacgtgccggagggggatcgggaggagcggcgttgggaggagcctgcggtacaggagtcagggaatactcctgagacaactgaatgcttcttcaagccaataggacgtcgctgtcgagcggtcactggtggcggcggcctccggcgcaaggaggcaaatgacagcggtgcgccgcctgcggtgacgcgcagcaactatctggggtggaagcggacggcggaggcgatgagagcaggttccgccactggattggaggaggagggcagcggcagcggacgggaggatgctggacgtcgttcaatacagcatctaggtctggacattattacgaagagcgtccattcctggacgctatag

SEQ ID NO: 76998 - DNA, 4713 bp, Oryza sativa
  Clone ID: PAT_MRT4530_7693C.1
tatcactcgagagcacaactgaaatcgcaagagatagagcatcagctgtcggagttggtcgcagtggtgatcgcgattcagaagcaaaataccgcgatccaaacttcggtgggttccctggaagagatcaaaccgctggtgatggagctctcgggctggaagccggcggtagatcaagccgtggcggacctgcggaccaaggtgggggaactacggcaacaagtagagcagatggcgcgaacaccaacggggaatcatctcacggcccgaatggccaccgcgtcgctacgattccacgtgggaaggctattggagaggagtcctctccaaagtctcctccggccaagggtacatgttcacctcaattcacccatcggtttccttgggaaacgggagagtgttcaagtaggggtcatgggaattggttccatgggggtaacgcccgtgtagattgtcctcaatttgatgggggaaatcctaaggcctggaagatgaaatgcaaaacatatttccgggttagtggaaccagtcctgaagtctgggtgggagtagcagccttgcagttttctgggggagctttagtttggttgcagactaccaatgcccatattgagatgatgagttgggaagagtttgttgatgctgtttgtgctaagtttggtagagaggagtttcagggtgtggtccgacagttcaacaaacttagacaaacggggtcggtaaccagctatgctaagaggtttaacgatctgatgcaccagcttcatgtccaccatccctcttggaacccagaattttttgttactcaatttttagaagggttgaaacctgaaattagagctgctgtgctgttacatcgtccttcggatatggatactgctgtcgacctttcttgcttacaggatgaagtggccaaaattgttcggagggaacctcgacgggtggaatttcctgctaacaaccgtgggggaattcggcctggatgagctgtacctattggagctggacgtgttttgggaggcacaggagtatctggagaagacagaaatctaccaatggaagatcgagtggctgcattacgggcttatcgtaaggctaaaggcttgtatcatacttgtggtgagcgttggagccacgagcacaaatgtggtcctactgttcaattgcatgtggtggaagagctgcttgatctcttggagaattttgacgaaaatcagacagctacagtatctgatgaaattgagtctgaagaaactgaagtgaatggcgaagtctgtcagatttccaaagaggccatgttggaaactgaaacttctgggactttgagattgcagggtttaatgcaacaccatcagattatgttgcttgtggattcgggtagtactcatagctttgtatctgctgctttggatgataaattggggggtaaacaacgggctgtgccggccatcaaagtaagaattgctgatgggggaatcctgcattgtaacaaggagatagtggactgtctttggttggttcaaggggaatcattcttaaccagcttgaaagtgttaccattgggcaattatgatgtgattcttggaatggactggcttgagcagcatagtcctatgaaagttgattggcgagccaaaactttacagtttcattacaatcagaaggagatttgcttgaagggggtgacagccaatactcaaacttgcaagactctgtcagctactcaagtgcaagggctggttcaccgaagtgctgtgctgcaagtggttgaactctgttctgttgagctagctatcaaagactcagacattcctgctgaagtctctcagttactactggaatttgctccaatttttgaggaacctaaggggcttcctccaattcgggctttcgatcattctattcccctattgcccgaagccaaacctgtgaatttgtgtcgttatcgttacaatctagcacagaaggacgagattgaacgacaggtggctgaaatgcttcaacaaggggtgatacaacctagtgtaagccctttttcttctccagtgttgctagtgcaaaagaaggacctcacttggcggttttgcattgactaccgacatctgaacgccatcactgttaaaaatcgttacccactgcccattgttgatgaactcttggatgagctcgctggatcgagtcttttcaccagtttggacttgcgagcaggctaccatcagattcggatgcgtcctgaagacgagcacaagaccgctttcaaaacacacaatggacattatgagtttcgtgtcatgtctttcggtttgatcggggcacttgcaacttttcaaggcattatgaatcagatcttttggctccacttctcaggaagggtgttttggtttttatagatgacatcttaatctacagtcgaactttacaggagcatttgattctccttcgccaagtgttacagttactttctgaacatcagctcaaggtgaaaagatctaagtgttcttttgctcgttccagtttgacatatcttggacatgtgatcagtgcgtcgggggtggctaccgatcccaaaaacatcaaggcagtacaagcttgggcaattccggttaatgtcaaggaagtacaagggtttctgggtctagtaggatactaccggaagtttgttcgttcctttggcattatcagtcgtccactcactaacctcttaaagaagaatgtggtttttgtatggaccagcgaacaccatacggcttttgatgctctcaaagcagctcttactttagctccggtgttagttttgccggattttaccaaggtctttgaaattgagaccgacgcatccgacaaaggagtgggagctgtactcatgcaaggaggacatcctctggcttttctcagcaaatcgcttggaccacggaatcgaggtctttccacctatgagaaggaatgcttggctattttattagcagtggaccattggtgatcgtacttgcaattcggagagtttatcattcgcaccaatcagaggagtttgattcacttagacgatcagaggctggttaccccttggcagcaacgagctctcactaaacttcttggtttgcaatacaagttggtgtataaaaagggtcttgaaaataaggccgcagatgccttgtctcgctgtcatactgaggaagtgtttcagttgagcgttgtttcttccaatgttccagtatggttggccaaggtgcaaactggatatgattaggatgcagctactactaatcttatggctcaggtgctgttatctcctcattcatttccggattactctatgaagaatggaattttgtactaccgtggcctcatttggctaggcaacaatcagcaattgcagtcaaaagttataatagctctgcattgttcggctattgggggacattcgggaattcatgtcacaatttgtcgagtacgcaacctctttgcttggcctgggctgcgcaaagcaatgcgtgcttttatagcagattgctcagtttgtaagcaggcaaaatctgaacgcgtgcgttaccctggcctccttcaacctttactggttcctgagcacgcttggcaaaatgtttcattggatttcattgaaggattgcctcattcttctggtttcgattgcatactggtggtggtggataagttcagtaagtatgctcattttgtggctttggcgcatcctttcactgcttttgatgtcgcattagcctacttgaacaacatttacaagctccatggtcttccccatcatcttatttctgattgagatcgtattttcaccagtgccttgtggaaggagttgtttctgttagccgatacataattgcagatgagctcggcctatcaccctcaggcggacgggcagacggaacgagtaaatcagtgtctggagacctttttgcgctgcttcattcatgcctgtctgaagaaatggtttcattggctagcgcttgctgaattctggtataatactgcttatcactcggctttggacatatcgccgtttaaggtactctatggtcatcctcctcgtcattttggcgtgttggacatctctgccagtgctgtacccgacctggaggaatggttgaaagagcgtgctgtgatcaccagattgcttcgacagcatcttcttcgtgcctagcagcgtatgaagttttaggctgataagaaacgatctgagcgtgtttttgctgtaggggactggttttttctgaaggcacgaccatatgctcagcactctctgactggtcacaccaatcataagctggttttccattatttcggaccttttcaggtattggagcaagtggggaaggtggcgtatcgcctgcaacttctagcgagttgttccatacatccggtggttcatgtctcgcagctgcgccacacttcttccccaagttcaagcgatgagatccaagttcctgtgacattgccggctgatgaggaagctgttcctgtccatgtgctcagtcgccgagtgtatcgcaagggagccggagcggtggaacaagtcaaggttcgctggcagggacaaacgtcggcggaggctacctgggaagatgcagctgctcttcgtcttcgtttccccgctgcaccggcttggggtcaagccgtttccaaaggagggggaaatgttacggacactgctcctggtccagcaactgaaggcaatcccgtgaa

SEQ ID NO: 76999 - DNA, 472 bp, Oryza sativa
  Clone ID: PAT_MRT4530_76940C.1
cggacgcgtgggcgaggccactggaggccatcgggttcaagaagcattcatgggtcctgtcgttgtgcaaacaaaccgaaacaagccaaatgcaaaaagtaacgccccaaaattcgatgatgagatatatagactgaagaaaattgcaaagaaaggaatatactacccgaagctccgatcatagaacatcacgactgtcgggcattttctaagggcttacaacaaaaatcctgaagagctcaatgatttactaggtataaaggaagatcataaagactggaaaaccattatcgagcatgccagggagtgtgatctcaaagaaaatcattacctgaaagcatacaaggttgtaggtaaccaaattaatgatgtgatcttcttcaattgcgtacatgatattgtgggagcagaatttaatggcaagtacactgcaaaggagaatttcaatcgatatcaaaaggccatagtagat

SEQ ID NO: 77000 - DNA, 601 bp, Oryza sativa
  Clone ID: PAT_MRT4530_76941C.1
tttgtttttttttttgtttttttttttttttttttttttttttcacccaactagcacgaggtacctgaaatatgaaaggaaatgcccaggttgttacaacaaatagttagctggtagggataaccgaaaatacaaggggttaaacacatacatgatgctgaacatagctcccagaacctttaacccatgacctaaaaatttttcttcttaataagattaaaaagaaaaaaccgttaaaatgagcccacatttatctcatggttatataacatgggttacattgagaggacttttttaataagggcacacagttccagtaacgttagggctaactctccagcagaaaagaactcagcccatcgctccttataggcttatgtacataacaccagtaaagccatcatggtttgagtcagcaccataagtcgtttaagtcccatgcacatagaacaaaccattacgcgatcccatccaagccccccaattgtgatttacaccgaacagcgaaaaattgggcaagtcgcagccgttttttggccaacaaagtgccgggaatagtaaaccacccaccctttgggcaaaaatttggtcgcccgttttt

SEQ ID NO: 77001 - DNA, 1248 bp, Oryza sativa
  Clone ID: PAT_MRT4530_76942C.1
gctgcaggaattcggcacgaggggtgatcggcaacctgtgtattcatttctgggattgactcctactttaaaggcttcacttcgcctcatttttttcctgactgttcaatacttgtgaatggagtacggtaatttgcgacgtcaagcagcttccttgaaaaagagcctcttcgatcaggcttgtgctctgttcatctcaaatttcaagcattatagttgaggcatatctgagactctgcaaatatatccatcagtccttttgctatatcttcttctgctatttatcattcagcaagacatagaatacagtgttttgatggacatcaccttacagtcatgccattttaattgccataccatggattgacactattgcacacagataatgaaaacaaagctaaggagaatcagattgaagcacattatattaatataaatgggttacttggatgagcaattttgtcaggttgaggatttgcaggatgaagcaaatccaaattttgcagaggaggttgtttccttgtttcttaaggattcaaccagggtaatgttgaattttgagcaagctattgagaagcatccgaaagacttcgccagttgggacacacagatgcagcaattgaaaggcagctgttctagaaaaacattgcttggagaaggagagccacacatcgcaagcattggtgcctccagggtgaagaatgaatgcacttcattcaggaatttctgtggagaagaaaacgccgaagggcatgcagccacagcggctgtggcaattgaaaaaggcagccggatgcagctggtttcgcctgccggagctcaagtggctgtggcaaccaaagcatctaatcgacctgtgcagtacggaaaaaccaacaaattgcacgagatccttccagaaagtgaagagggagcatgccgtcctcaggcagaagtgggagtcctacttccagctgttgcgacaagctggtcctgctgggaccgcgactaggcctgcgggcaagtaagctataagcagccggctattgaattggtctcgggctgctgctgccgtggatgcgactaggctggtacacaagagcagcctgccgttgttctagtatgccactacggtgaaaacccgtatatagacgtgctacgacttatgagttgtgacatgcatgtctgcttgtttatgacaacaataaaaccgatcaagattactacatcatcaagaaaaaaaaaaaaaaactcgagactagttctctc

SEQ ID NO: 77002 - DNA, 668 bp, Oryza sativa
  Clone ID: PAT_MRT4530_76943C.1
gcacgaggtctgcgtcttccgcgccgcgccccgccgcgagttcgaacagaatgacgaagtcttcaccactgacacttatccctgaaacttgcagagacaatcttgcggtgtatgcaagagattatcaggctaatttcatactgggatattgctcaatatacatctttatgcaaacatttatgatccctggaacaatattcatgtctttacttgctggagctctttttggggtggttaaaggtggtattttggtcgtattcactgcaacagcaggtgcttcgtcttgctactttgtctccaagttgattgggaggccattgattagctggttgtggcctgaaaaactgaggtatttccagtcagagattgccaaaaggaaagaaaagctattgaattacatgctttttcttagaattacaccaactttacccaacacattcataaacatggcgtcacctattgttgacatacctttccacattttctttgctgcaacactaattggtctcatcccagcatcttatatcactgtaaaggctggtagggcactaggcgatctaagatcacttagggaactgtatgactcaaaaacactagtaattctattcctcattggaactgttgctgttgctccaacgattctgaaaaggaagagaatatacgaatga

SEQ ID NO: 77003 - DNA, 663 bp, Oryza sativa
  unsure (1)..(663): unsure at all n locations
  Clone ID: PAT_MRT4530_76944C.1
gaactagtggatccccgggctgcaggatcgcacgaggggagaagggcagagatgtgtagaagacaatggtggagaantggaaaatttggaggaggatgtgctttcttttggaggtattttacttgaagtacttatggggccaaaacgtcataggaaagatctctctgtgctaagtgagctggttctgtcaatatcaaaacaggaagagcgcgagcaagttcttgatccgattgtgctgagcacctcttcgcaagattctttgtcgatggtgatttccattactgtcaaatgtttatcagttgaatcttcagccaggccttcgatcgaagaggttctctggaatctgcagtacgctgcacaagtccaggcaatatctgatggggaccagagatcagaagtttcctcgcagaaacctgttaggctaactgaacataaaacaccttggaggttattgtccatatctgggaaaagacggcgccgcacgtgcaagctaatttgatcttggtgtgcagaagagaatgaccaaactgactgatctcttcctgggagtaatcctgcatttgctgctacttcaacagcatttctgacacatcaagaagttaattaacatgtcaaatgctgtatgctaaacacagatatggtcacgttacgtcctgtaaagag

SEQ ID NO: 77004 - DNA, 663 bp, Oryza sativa
  Clone ID: PAT_MRT4530_76945C.1
atggatgcgggcggatgcagtaggaggaacgacggcgccctgctaggtgggtgtctaattttggccgttgatcgagtggcgagcattggggtggaggagctcgtcggcgcaagcagaggagaggcgaaggcgggtcgcggacgagcggcgacggtcgcaaaggtggcggcaggggcggacgagcggcagcggtctttcacggaggcggaggcggttgcggacaaggtggcggccgggcgcggaggtggagatggtcgcggacgaggcggtggccaggcacggaggcggaggcggtcgcggacaaggcggcgcctggtcccggaggcgacgcggtcgcggaggcgaggcgaggcacggacaagcggcggcgatcagtcgcggaggtggaggtggaggcggttgcagacgaggcgccggctaggcgcggaggcagcggtggtcgcggacgaggtggcacccagtcctagaggtagaggcggtcgcagaggcgaggcgaggcgtggacgagcggtgacggttcggttgcggaggtggaggcggttgcggatgaggcggtggctaggcgcggtagcggtggccgggtgcggaggcggccgcggtcgcggacaagcagcatcaatcgtggatgagctgatgccgtgcactcgtcccaggtgggactag

SEQ ID NO: 77005 - DNA, 2780 bp, Oryza sativa
  Clone ID: PAT_MRT4530_76946C.1
ctgctgatttttcagacagcagcttcgtaccgcctttgatatacgcgatgatgggaagttccagggatatagccattggtccagtggccgtcgtttcgctgctgcttggcactctcctccagaatgagtttgatcccaagaagaatcaggaagagtacacccggctggccttcactgcaacgttcttcgctggggtcacccaggcagcgctcggattcctcactggagtggatgcatgcgttgatgcatgcaggtgctttggcagtactgctggattgaattaatggatcaagactgaatttatctataggttcgccttcagcaccttgccggtgaataacgccggcaatgccgcgagccgtgtccgacgggggcgaggccatcgacgccgacatcgccagccggacgtcatcgcacagccacatggacggcggccatcatcatcatcatcacggccacaaggtcgagttcccaccgaagaagaagctcatcgacgagttcaccgacgccgtgaaggagacgttcttcgccgacgacccgttgcggcagtacaaggaccagccgatgtcaaagaaggtgttgatcagcctgcaaaacttcttcccggtgctggactggggccggcactacaccttccgcaagttcaggggcgacctcgtctccggcctcaccattgccagcctctgcataccccaggacatcggttatgcgaagcttgctggcctattaccaaattatggactgtacagcagcttcgtaccgcctttgatatacgcgatgatgggaagttccagggatatagccattggtccagtggccgtcgtttcgctgctgcttggcactctcctccagaatgagtttgatcccaagaagaatcaggaagagtacacccggctggccttcactgcaacgttcttcgctggggtcacccaggcagtgctcggattcctcaggctagggtttatcatagagttcttgtcccatgctgccatcgttggattcatggcgggagcggccatcaccattgcccttcagcagcttaaaggcttccttggaattgcaaacttcaccaagaagactgacatcatctcggtcatgaaatcagtctggggaaatgttcaccatgggtggaactggcagacgatattgatcggagcatccttcctggcattcctcctggttgcaaaatacattgcaaagaagaataagaaactcttttgggtggctgcaattgcaccactcacttcggtgatcatatccaccctttttgtctatatcactcgagcagacaagcatggtgtcgtgattgtcaagtacataaagaaaggcatcaatccaccttcagctagtctcatatacttcagtggcccaaacctgatgaaaggattcagaataggagtaatagctggcatgataggcctaacagaagcaattgcaataggaagaacattcgctggcctgaaggactacaagattgacggaaacaaggaaatggttgctctaggaacaatgaacattgttggttcaatgacttcttgctacgtagctacaggttctttctcgcggtcagcagtcaattacatggctggctgccaaacagcggtatccaatattgttatgtcaattgtagtactgctcacactggagctgattactccattgttcaagtatacgcccaatgccatcctttcttccatcatcatatcagcagtgcttggcttagtcgactaccacacagcataccttatctggaaggttgataaacttgactttctggcatgcttaggagcattctttggcgtcatattttcatcagtggagtatggtctgctaattgcggttgcgatctcactcgctaaaattcttctacaagttacacgacccagaacagttttgcttggtaaccttccaagaacaacattatataggaatatcgaccagtatccagaagctaccttggtaccaggagtggtaatagttagggtggactcagctatctacttcacaaactcgaactatgttaaagacagaatcctgaggtggctgagggacgaggaagaacgtcagcaggaacagaagctacagaaaactgagtttctgattgttgagctatctccggtaattgacattgatacaagtggaatccatgccttggaggatctatttagagcacttgaaaagcgcaaaatccagctgattctagccaatccggggccagctgtgatcctgaagctccgatcagcgaaattcacggatctcatcggtgaagacaagatattcctgactgtcggggacgcagtgaagaaatttgctcctaaggcagtagagaatgtctgaaaaaacaggcatagtacagagaagttattgtcattcttttgcaagctccatgtttgcaggtgtgatttatagagcagagcagcccaggaagtgcataacatagtttttcaaaaaggtaaaataaaggtggtgtgccggagttggagcgcatcaggtttgcaaaatatggttggagaaaaaagcagatggtgcccgttgcatatctacttcagtggctgtgaattgtgattagtatgttggcaagcactttgggtgaaagtttgatggataagataagaaaagatagtcatttgcttaagctgtcagtgtgtatctccatctggttgtaattaccccctttctttctacttgatcaagcgtacaaattacaatgaggttttactttttgacgaccaatgttgtctatagcgtccatccaatatacatgctttcagaaaacaaaa

SEQ ID NO: 77006 - DNA, 1737 bp, Oryza sativa
  Clone ID: PAT_MRT4530_76947C.1
catggcgcaggacgacgccccggactccaccacctcctcctcatccgcctcatccgcctccgcccccgccccctccgccgcccgcctcaacgccgccgccccggagttcacccctcgatccgccgcccaccaccaccaccaccacgccaaccctcgccgccagcaccgcgggggcgggggtggggcctaccaccaccaccagcagcactaccagccgcaccaccaccaccagcaccaccagcactggcaacactacggggaggatgagggggacgccgcggcggccggggcggtgggagaaggagggatcccggaggatgtggctcgtcgggtcgtcaagcaggtggaattttacttcagtgatgtcaatctggctacaacagaacatttgatgaaattcatgattagagatccagagggatttgtgccaatgtctgtagttgcatcttttaggaagatccgggagttagttagtgagagatccgcattggctgcagtattgcggacgtcagcagagctggttgtttcagatgatggaaaaagggttagacgtcgagtgctctttactgaggcggatgctgaagaagttcagtcacgcattgttgttgctgaaaatttgcgtgaagagcaccgctatccaaatcttatgaagattttctcagcttttgggagtgtgaaatcaattcgtacttgctatccacaaggtgggattgatggtgctggaacttctactggcaaagcatcaaagattgagatgttgtttgctaataagtgttttaaaaaaaagttctacaaggctgcttacaaggttgcatacatacaaggtacaggtgccctaaccttgtaccgtgtgcatgcttttgtggagtatgaaactgttgaagatgctgaaaaggcagtttctgaattcagtagtgggagaagctggagagatgggattagagtccgctcactgcttggttgcctgaaacaagccatgggtcaaggaagaagaggtggagatgaggtggatgctgcagacgaagatgaccctgaaacaactgaccatccacaagactacgaaacagaggatgcttcccagatttcagaagcacatcttgatcatcaggctgatgatggctaccatgacaaaggcgggatgaggcacggaagaggaagaggacgtggtggaagagggcgtgcccgtggtcagtactatggccatagccgggatgccaatcatccaattggcactcctccatcgaatcacagtgctcttgctgatcatccttcaaagccaccccctggtcctcgtatgccagatggcacaagaggatttaccatggggcgaggaaagccactcaatcctaccaatgctgtttaatggcagtggccatgccggtggcagcctgttgccctgttccctcttgcaaatctgatacttgcctcaggttccaaaccgatgaacgccgattaccgttgatactatagttagatacaacatgtgttggttcgttttggtgcaagattctgcagagaaaagttttacctggtacatgcatgtatactggtacagcagtggtgctggcaatgtgaacatgtcttttgatatctggatgctagttaatttagcaaaatatgtagatatagatgaaaaatgaggtgtctgatcaatgatcatttgcagcgggataattctgctccacaaatccaagatacccaacagctgtttaaaagccttcaacttggaaggcatgc

SEQ ID NO: 77007 - DNA, 234 bp, Oryza sativa
  Clone ID: PAT_MRT4530_76948C.1
atgggataccggagcggaacaaaggacttaagctacaatttcacaaccgattgggatgacctagggactcctgaaactagagaccaagcgccggtcctccgcagccatagctttcactacttccgcccagggccgttgttggaggttgaagacccggacggaaattgtcgtgcatccggcaaggatggagccgactgcccgagtgcccgtctggatcctgatcgcaacggctga

SEQ ID NO: 77008 - DNA, 557 bp, Oryza sativa
  Clone ID: PAT_MRT4530_76949C.1
gcgctcggattcctcaggtgagtggctaccatagagtgagattgtcctctgctgcaggctagggtttatcatagagttcttgtcccatgctgccatcgttggattcatggcgggagcggccatcaccattgcccttcagcagcttaaaggcttccttggaattgcaaacttcaccaagaagactgacatcatctcggtcatgaaatcagtctggggaaatgttcaccatggggtaggacaaaataatatcattcctttaagaacttattgcttcttcatcattctttgatggaaaccagtattgggtacaactgatgctagcttggttgctgctgcagtggaactggcagacgatattgatcggagcatccttcctggcattcctcagctgattctagccaatccggggccagctgtgatcctgaagctccgatcagcgaaattcacggatctcatcggtgaagacaagatattcctgactgtcggggacgcagtgaagaaatttgctcctaaggcagtggagaatgtctgaagaaacaggcatagtacagagaaga

SEQ ID NO: 77009 - DNA, 6717 bp, Oryza sativa
  Clone ID: PAT_MRT4530_7694C.1
tacatagaatttacgtagttggtcaatgttccaagaatttgccaactcgcgaccatcaccgtctgcaattttaaatgcgcctggtcgcaagacttgtgtgatcgtgtaagatccttcccatttgggtgagagcttgtttcgccctgcttggctttgaacccgtcggaggaagtagtcgccgatcgtaagcatgcgtgctcggatgcgcttctcgtggtaacggcggagggcctgttggtaattggctgctcggacggcaactcgttcgcgatgttcctcgagtagattcacatcgacgtttcactactcctcctgatcctcgtcggaatacttctgtactcgtgtactctgatgtcatagctcgctagggagcatggcctcggaaccgtacatgaggaagaagggtgtttccttgttagatgttgtcggtgtggtgcgtacggcccatagtagggttttgatcccttgtagtactatgccgtttgccctctcgacttgtccgttgctttgagggtgagagatcgaggcgaagcatatcttgattcccagcccgatgcagtaatcctggaaatcggtgctgatgaactgggagccgttgtcggttatgatgcggtgcgatagtccgtatctgcaaaatatccccttgatgaatttgatggcgttgtcggccttgatttcccccgtgggtactgcttcgatctacttagtgaatttgtcgatcgccacgaataggaacctgtaaccgccctgtcctcgtgggaatggcccgagtatatctagcgcccagcacgagaatggccaagtaagagggatagtctggagcacttgcgcgggtagctttgtgtgtttacatgtcgcatgcatctttgagggcgattggccagaaaaacccttgtcgaaaagctttcccgaccaatgtccgaccggcggcatgtgacccatagatgccttcatgtatatcaaggaagaggtgtctgccgtcgtcggacgagacgcatttgagaagtaccccgtttggcgcttttttgtatagatcgttgctgaccacactttagatttttgctttacgggttattttctcggcctctgtatcgtcctcgggcaactcctcgctgttgatgaatttcataagtgggatgtgccagtcatctgtgatctcgatatcggcaacggcgcgttctgcctttgtggcctccgcgccaatgtctggggcggccgggctaacttcgccgctaacctcttttactgatggcttcgtcaggatgtccagaaaagtgtcgggctcgagcagttctcgtctaggcgcacgtcatgctaggtcatctggctcgatgttgtccttgcggtaaacgtgtcgaaccttgatcccatcgaaccttttctctagtttcctgacttctgcgagatacttggataactcggggttagagcatttataatctttgtgcacctgattcacgactagctcggagtctccttttacgattagtcgtttgaccccaagtgcggctgcagctcttatcccggcgagtaatccctcgtattcggctgtgttattggtcgccctgaagttgaggtggattgcgtgcttgaattgatctccggaaggagacgtcaagataaaccctgcccctgctccttggctgttgagtgcaccattgaacgccattgtccacgtttcgttgtcgacttggttgtctgatttgtcatcaggcatagtccaatcggctacgaagtcggcgagtacctgggacttgatggctgttcgtggtataaagtggacatcaaactggctcagctcgactacccatttcgcaatgcggccgacaacgtttttgtttctcacaacttcaccgagcgggaaggaggagccaactgtgactctgtgggcttgaaagtagtggcgtagcttccttgatgtcatgatgaccacgtaaagcagcttttggatctgtggatatcttgtctttgcgtcgtggagagcttcgctgacgtaatagactggtcgttgtactttctctctctcgacaacaatgacggtgctaacggaatatggcgtggcggcaatatagaggaataattcatcattaggttggggagcaacaagtacaggggggtttgataggtagcgcttgagtgcaatgaatgcctcttcggcttcctgtgtccatacaaatttgtcttgtttcttcagcagagcgaagaagggttgccctcgttctcccatcctagcgacgaacctgttcagtgctgccatgcatccggttagcttttgtatttccttgagtcttgtgggcgacttcatgttctcgattgccttgatcttctcgggatttgcttctattcctctgccggagacaaggaatccgagcagcttgcccgatggtactccgaacgtgcacttctctagattgagcatgaggcgatatcgtcggaggttgttgaacgtttcctgcagatcgtcaatcaatgagtcgcttgtcttggtcttgacaacgatgtcgtcgacgtatgcctcgacattgttgccgagctggtcgctaagtgcgccctgaaccgtgcgctggaaagtattccctgcggttatcagtccgaatggcatcttaacatagcaaaataccccgaatggcatgatgaatgttgtcttctctttgtcttcttttgccatgctgatttggtggtagccaaagtaagcgtcgagaaagctcaacagctcacagccggctgttgagtccaccagctgatctattcgaggaagagggaagtgatccttgggacatgccttgttgaggtcggtgaagtcgacgcacattctccatttcccgttggcctttcgcaccatgactggattggctagccactctggatgtagtacttctctgatgaagccaggcttgagaagtttgtcgagctcttctcgtatggcttgttttcggtctggtgcaaatctccgcagtctttgctttactggcttggcatcgggtcgcacgatgagtttgtgctcaatcacctccctggggacccccagcatgtcggacggctgccaagcgaacacgtcagcattgtcgcggaggaaggtgatgagcgcgagttcggtcttgtcgggattggcactggagagtggaacgatcttgattgcgccgtccggtttcggcgtcttgtttgtcttgctcactttcttgggtggcttggtcgtggcgggtgggctgggcgtttgctcgaccatgtcgaggctccgtttgtcgcattgcaccgccagctttgcattcccttaaatagtgattattcccttcggtcccggcatcttgagcacttgatacgcgtagtgagatgcggccataaacttcgcaagtgcagttctcccaatgatggcgttataagctgtatcgaattcagcgacatcaaaggtgatctgctctattcggaagttgttagcttggccgaaagtcacaggcaacgtaatcttgcccaatggtttggacgatgactggggagtaattccatgaaagggttaatcggttggtgtcaattcgctttgcggaattcccatcgcgtccaaagtgccggcgaaaagaaggttgattgagctgccaccatcgatgagaacccgcgtgaccttgatgttccgaatagtgggttcgaccacgatcggatatcgtcgttgtggaacctccgaagatgtgtgaaacgtggaggtcagagtctggatatgctgagtccgactccttgggagccgcttccgcatccttttcgaccacgcgtactcgcttgcctttttcaaatgcaatgtgcttctcgagcgactttttgaaaacaaggcaatcttccaaagaatgtctgtccgttttgtgtatggggcaccatgctttctttgcgtcgctaccttgtgggtctgggcgcttgggagggttcgcgtattctgctgcgaggacttccgcttgagctttccttttcccatttttgcgatttttcttcttgcttgactcaggtgcgtccgtggctagtttcttctctcccccggtcttcggcttatcgttcttgcgtcttagcgcatcatctgcgtgggcgcatcgctcaacaatttcgaacaatctctgagtagttgtgatgcgtcttgttgccaactcctgagtagtatagcgatctctgacgcaggacttgaaggcgcgaattatagaagtgtcggtgatttcggggattgtatttctgcactcgttgaagcgccgaacatattccctcaaggattcactcgagttctgtgttaacgcgtgtaggtcgtcttcgatcgcgtggcgcttgtaggttccttagaagttggcgacgaactgctgccacaggtctgcccacgaagagatcgagtagggcgggagatgcatcagccatgaacgtgcagagccatttaacgcggttggcaaataatttgctaatgcattgtcgtctgctccggcaacgtagagtactgtggagtagacttgaaggaactcttctgggtcggtgctcccatcgtacttctctattgctccaggtcggaatctctcaggccatcggacatcatgcagggaacgactgaaagctctacacccagcgctgggggcggtgggttatcggcgatcgtgtgtccttcatggatgtctatctgatgatgaggaagacgaggataatgacgatgacgatgggtcgcttggttccagtgtacgattacgaggttgtcggcctggctctcgagaatcctgtcgccgtctcccgctgttgtctcggcgccggtctccatcatcgtcgtcattatggcgacgtcctcgaccagtatcgcctggcacccgctgttcgcgatcgttgtgatcgtggcggttatcacggtctcagtcttcgtttgaacggtctcctcgatctttgttatcatgacgccgtgaagagacatgacgccgggaacggttctcgttgtcttgtgtgcgtcgtgcctctcggctgccgttgaggtgatcacggagatcgccggtgccgcgaggtggaggggtggctcgttgaggcgattccctccgttcagggttttcaccattggcatcgccagttggtggctgctctgggtgcgctgcggcagcggcctcttcgaacgcgttgctgaggttggtcactgattcccgtagtcgttctgtccaacgcgcgagatcatcgttcagaacgggatcgtagggggtttccctcagtatagcgttgacggctctgatgtgttgggccggagtggctacttgattctccgcttctgcattggtgcgctgtgacgtgccgacatcatcaatagccaatatctcccgtggcacgctcgttgtcgatgatccatagtcttcgaggaggtgcaagactgatggttcgtggggatcgatgtcgattaccccaacaaatcgatccgaagttggcgtcgctcctcattccttgtctttatccctgatgaggatgtgtgactgttggaccttaggagatggcgccttcatggcgctgagaaagaccttgcagcttgagaggtcgtgattctttgtcttgtgaataggagaatagacatcacgagttggagaaatacgctgaattccacgctctttgcaggagcgaatttcagcgcggacgttgagaaaaacccagcaggcttgcaaagtgtgtttcctggttttgtggataggacaccaggaccttgtcgctttggaagtcatcctcgtcggctcgtggttcttgtcggagtgacaagctttggtcgccttggaatccttctcgagctcagatgtcgttcatgttccgttctctgcctcggcgggaggatttttcgacatggagtcgtcttggtttgtatccactgcgttctcgtttccggtcactgatggaccggctgagatcggcatcgtggtgtaaaccgggaagacgattttgccgacttgagtctacaccagcattgttgaagcagggaatacttggttgaggttggtgttgacgctgttgtcgacgaagctggatgacatagtagtagaaccttgagcaccaagtgcccctacctggcgcgccactatcgacgggtgatacccatagaccggatatagagggtattggagtacgttgttacaagggtccatagatctgtgggggttgtgttggctttgagatttgatgccttaggtcctccctggggggtcccttttatatcgcaggtcaggcggtttccaagtagaactcggagacatcaaaccctacacgatacattgacgacccagtcttgtccgagtaggattcttcccatccgtagattccgtgaaggatttccttggaatacgaaggaagtatccgtatgcgcgtgggtataccatactgatatgtgacgtatatcgaagtgtaaagggtatgcctaaccataaccctgacagtagccctcgacatctgcttaaaatgagctcgcgtaaccattcgcgacttcgggtgtcgagactgttgtcgttcccggtgcgaggaccgcggagacaggccgtagtcgagcacgccatttgaagcccaatggtcacgagcgaattttaaactaggccctttcttcggcgatcttcgatcagcgatggacctcggcaaatcatcttccaccagtgcgttgctgaagaagcttctggaagacggcgcccttcccggtcgtggaaccatggagagggaagcaggaggtactaatccccagcccgtcttaggtcgcat

SEQ ID NO: 77010 - DNA, 414 bp, Oryza sativa
  Clone ID: PAT_MRT4530_76950C.1
gtgaactcgtcgatgagcttcttcttcggtgggaactcgaccttgtggccgtgatggggatgatgatggccgccgtccatgtggctgtgcgatgacgtccggctggcgatgtcggcgtcgatggcctcgcccccgtcggacacggctcgcggcattgccggcgttattcaccggcaaggtgctgaaggcgaacctatctgcacatgaagcgcagtactgaagcaggtaagcacaaacacatcaaccttattacgatgaactaattatttacagataaattcagtcttgatccattaattcaatccagcagtactgccaaagcacctgcatgcatcaacgcatgcatggtcgacagtgaagaaaaaaaaaaacttttgcagtacggagaaccaaaatatctgaaacatttgcatt

SEQ ID NO: 77011 - DNA, 504 bp, Oryza sativa
  unsure (1)..(504): unsure at all n locations
  Clone ID: PAT_MRT4530_76951C.1
cccacgcgtccgcccacgcgtccggtagctttagttaggctctccttccggttcatccagatcaaggaggaggagagcgcggcggcgatcgatggcggcggccacagtaagcaacaagagggtgatcctaaaacgatacgtgactgggcttctctcggaggatgatatggaggtggtgacggtggaggcgccgccgctggatgtgccaacggggtcgaagggggtggtggtgaagaatctgtatgtttcgtgtgacccttacatgcgcaatcggatgacccaccacgagttgcccagctacatcccggattttgtcccaggggaggtagtagctttcaatgtcacagagctccatttttttttaattaatagtaatatcatgatcttctcatcataagtttggatgcttttatctatttattattagntatatcatatcattactactgatggtcacaaattattcctctctgtcttttttttccaaattgcgtattgaaaatt

SEQ ID NO: 77012 - DNA, 4390 bp, Oryza sativa
  Clone ID: PAT_MRT4530_76952C.1
ttgttttttttttttcgaaaagagaggtttctttcttgtgttcattgcttttttatgctcaatgctgtctgttttatcagaaactaacagatgaatataatatttttgctgcttcttgttagtagtactagtacatacatatagatttcttccctgcgttgtaaatgcaaatgtttcagatattttggttctccgtactgcaaaagttttttttttcttcactgtcgaccatgcatgcgttgatgcatgcaggtgctttggcagtactgctggattgaattaatggatcaagactgaatttatctgtaaataattagttcatcgtaataaggttgatgtgtttgtgcttacctgcttcagtactgcgcttcatgtgcagataggttcgccttcagcaccttgccggtgaataacgccggcaatgccgcgagccgtgtccgacggtgccgacaacctcgacgccgacatggacaacggcgccgcgcagcagcagcacgacggctacaatgtcggcgcgccgccgaagaagaacctcctggcggagttcgccggcacggtgaaggagacgttcttctccgacgagccgatgcggcggtacaaggaccagccgaggtccaggaagctatggctcgccttgcagcacgtcttcccggtgttcgaatggggcagacaatacaccctcgccaagttcaagggcgacctcattgccggcctcacccttgccagcctcgtcatacctcaggacatcggctacgcgaagcttgctaacctgccaccagagattgggctgcacagtagcttcgtcccgccattgatatacgctctgatgggcacctcaagggagctagcaatgggtccagtggccgtcatctcactgctgcttggtactctcctccaggaggagattgactcaaagaagaacccgctagattacagacggctcgccttcacagcgaccttctttgcaggagtcacacaggcggcgctgggtttctgcaggctagggttcatcatagcgttcctgtctcatgctgccatcatcggattcatggccggcgccgccatcaccattgctcttcagcagcttaaaggcttccttggaattgcaaacttcaccaagaagactgacatcatctcggtcatgaaatcagtctggggaaatgttcaccatggggcaatggaactggcagacaatattgatcggagcatcatttttggcattcctcctggttgccaaggcaagaagaacaagaagctcttctgggtcccagcaattgcaccactcatttcggtgatcatttcaactttgttcgtctacatcactcgtgctgacaaacaaggcgtcgcaatcgtaaaaaacgtcaagaaaggcatcaatccaccttcagctagcctgatatttttcactggcccatacttgctcaaaggattcaaaattggagtagtagctggaatgataagccttacggaagcgattgcagttggaagaacatttgctggattgaacgattaccagatagatgggaacaaagaaatgttggctctaggaaccatgaatgtggtcggttcaatgacgtcttgctatatagccacaggtggttttgcacgatcagcagtcaattgcatggctggaggtaaaacaccaatgtccaatattgttatgtcaactgtagtattgcttgcactcctgtggatcactccattgttcaagtacacgcccaatgccaccatttcttccatcatcatatcagcagtgcttggcctatttgactttgaatcagcctaccttatctggaaggttgataagttggacttcatggcgtgcttgggggcattccttggagtaatattttcatctgtggagtatggcttgctcattgcggttgtaatatcactaatcaaagttctgctccatgtaacacggccaaggacagctttacttggcaaccttccaagaacgattatctatagaaatgttgaacaatatccagaagctaccaaggtgccagggatgctaattgtaagagtggactcagcaatatacttcacaaactccaattatgttaaagaaagaatgctgagatggctgagagatgaggaagaacatcaaaaggaacagaagttaccaaaaattgagtttctgattgttgacctatctcctgtaaatgatattgacacaagtggaatccatgccttcaaagagttgttgaggacacttgaaaagcgccagattcagctgattttcgccaatcctggggcggctgtgatccaaaagctccggtcagcaaaattcacagagctcattggtgaagaaaagatatgcctgacagttggtgacgccgtaaagaaatttgctccccagttgactgagaatgtctgaactctgaagaaggtgcaacaagttatattcaagaggtgtcattcttttagaaactcagtgttagcaagtgcactttcatagtgcaaagcggcactggagtaaataacgtagttggggagggagatggtaaataaagtagtgtgctggacctgaagcccaccagatttgccaggtgtagttgagaggaaccggtgggaggatcacgggaggggagcccggcgcagaggaccaaccgcacgggaggacgccgtgggcgcgcgacggcgcctgatccccactgccgcagccggcgcccctgcggcgagcgcgcggcgtccgccgtccacagttgagggagacctcggggtcgggggccaggttccctttcgtgcgagcagcgaaggcaacgcaggtcggtgagaatccccacgcaggccgtaactgggtgtagtcaatctgaaacaccggcaatgaagattgcactgattcacttggcgccaaagccttcttaagttgagaaacatgaatcactggatgaatcagacttgttgcaggtaatgccaacttgtaagccacttcacccacacgagccaggatctgaaatggaccataaaaacgaaatgctaacttgcgatttgctcttgtgaccacagattgttggacaaacggctgcaacttcaaataaacccagtcaccaactgcaaatgaacgctcaaaacggtgcttatccgcttgaaatttcatacgagcttgagctctcaacaaatggtctctaatcagactctgcatctgttcacgttcatccaggtcagtagcatagccatcaatcacctccttaatccaatctggaacaatagaagaaactgccgataattccagcactgagtccgctcgtagatccaacttagtgaaccagtgagcgccagacaactcatctagtaactcatcgatgactggtaagggatatttattcttgatagtaatggcattgagatgtcggtaatcaacacaaaagcgccacgttccatctttcttcttcaccaacaagaccaatatcatatcataactgcccaaatccaagaccttaaaagttgtgcagaaaacccatccttgagtcatccaatcacagtttggtactgaagcaacacaattcagaatagtgccattggcaaccttcacccgagtagctgcaactaatggagtgactccagtaagtttctgtgcaatagtttcagacccatgtatagcctgcacagaaattgctatcaagtctggattgtcatattcttccaattgttctaactgctcttgatcaggaatgtcatcacaacccaaggtattgatcaactcctcatgttgatccctatcaaacttgttcgacatagctacacaaaaattctcccatataggaaatctaacatgagccttagttgatcttaaccacgaagccttgaccggagtcgggcctagggtgttagccatccccagaacccttccccagtgttcatgaaattgcagtcggccacaggcccctttgcttccgccttccgccgcggccacctggaatgatgtcggcggcgtgggcagcaacggcgccttcctttcctcgtccgtcaacggaactcgaggggacgacgccgttggggaagcttgcttcgccttggctgcgagatccaattgttgacgaagatcactgacttcctctcgcagctcctgtaccgccttcctttcctcgtccgtcaacggaactcgaggggaagacgacagtggagaagcttgcttcgccttgactgtgagatccaattgttgacgaagatcgccgacttcctctcgcagttcctgtaccgctgcttccacttgaggcctccagctattcaccccttgttccatcttgacgacggctgcttgagtctcaccttgagcttgattcaacgtcaccagggactcctgaatctccagcaacaccttgccgaatcgatgttctgcttctccatcgcctctacttgaagctgcaatcgggaggtatagcat

SEQ ID NO: 77013 - DNA, 244 bp, Oryza sativa
  Clone ID: PAT_MRT4530_76953C.1
ataccctacaacctccgccctttttttttatttttaaaacccacagcggtcctgtattacattaaaatagccctcacccaacaccatataatcgtaacacataccacttttacatctaaccaaaaagaaatcagctctaacaaaaacaaactcacatcactctcacataaaataaaaacactaccaacaaacattctactcactcaacaatcacttacacatcatcccattaaacatgaacaat

SEQ ID NO: 77014 - DNA, 1888 bp, Oryza sativa
  Clone ID: PAT_MRT4530_76954C.1
ggaacaagcaagcatcaagtatacgcttttgttgtaaggaaattaggcctacagtactgaatacattgtccttttggagatgaatcatgaaccttgtttcctatatagagtatactatatagcatggcaacctgaccatactaaaagaaaaactatacggtgtactttctgtttcccgttgcagtaaatttctgagaaactaaatgggttgggcaaagccatggacatggcaattgcaaatttctgctctacaaaatctcttttctacctgtagcagaaaaatggatttgagaagtacaaagatccccaaccaatgctcttctcacctttgagaagtgtccaaggggatggggcctgttatatctatattgctccttaatactctacatgccctagagctcagaggatcaaataaaagagctcatagaatcatacgttacagtgtttgttgggttatctgtacattgatgaagttgtgagactttgtatgctccaccccgacaagtttctgaaagaggagggttggcatatgaccctagcaccccttgaatgataatcttgtaggttgcctccgtgaagtggagaccatcccatgaagtgtactttgatgggtcagagcagaccacagacccagggtgcccgcacaatattgacggagaacaattgtatggagcatcacttccacaacacgagttcagcgggacagtgaaaccaaactggagtggggcaaggaatatattcaatgcagcaccataataatcagcataaatgatggatacatcggggtaaagattcctgagcttctccagctcctcctgaagcaatcgattatggtactcggtgaattcatttaaccatttaatgcaccctgttttctcatcatagtagtcttccttttggcttggaaagattgagagatacaatggtacacagcctattggaaagtttcctggaacaactagtttctttgctccaaggtttatgagctccgtgatagctgaggttatggtaccgacaaccttaggaacaagctcgtgtagctcatctagagatttccccctgacaattagatggttgtaatcatttccgcctacctctcccacaaggaaaagtgacttggtcatgatatcattgagttcggactctgacgaggagacagtagtgagtagcttcttgaaccactgcatctgctcatcgagggagtgcggcgtccatgtcggctccacgccgcggtcccggaagaatgatccgttgagggcggtggcgccgccgaccgcgaaatttgcgccttgccggaagtcgccgccagccaggtacggcggcacgaacggcagaccaaatgcttccgcgaagaagtcgaggaggttgcggccgtcggagtagcggccggaggggcggccgaagaaggtctggccgtaggggaggctgcgggcggggtccgggaagtcctccggcacggagagcaggaagttgccggtgtccgtcagcgagtccccgaagctgaatatcctctcgaagcacacccccacccctcctcctcctcccccctcccccttcccctccgccgccacgccaacgaggacgaacgccgccaccgccaccgccaccgccacgacgacgatccgcgcgtcccccgcgaatgccatcgccagccacccaaactcaccgaccaaaccgagcaccacaatccgcagaagaagaagacgacgacgacgaagaacacggcggcggcggccgagggctttctctctctagaggtggaggtggaggaggaggggggtggccgccgttgacaccgcgtgccggaggcctgcggcccggagaagcagaggtggtcgcggttttaaagcggatccggacgcctcgtgccgaattcctgcagcccggg

SEQ ID NO: 77015 - DNA, 255 bp, Oryza sativa
  Clone ID: PAT_MRT4530_76955C.1
aataagattatagaatgcaaatggcagttaaatacgacaaagaaaagcattatcgcaagcggccgaaaagggtcttcgcaggcggggcggccgtccgcctgtaagccaacgattgtgaagatcgccgatcttcgcaggcggggcggccgtccgcttgcgaagattattttcgcaggcggacgttggctagtccggtccgcctgcgaaaataggaatcgtccgcttgcaaaaaaaaaaaacttccacctacgaaga

SEQ ID NO: 77016 - DNA, 208 bp, Oryza sativa
  unsure (1)..(208): unsure at all n locations
  Clone ID: PAT_MRT4530_76956C.1
ttggatgtcgccacctnccaagaggactgcgcccagatcggggtcgggcaccctgcactgcccctcggtgtttgatgcagacattaagagtgtttggttggtatgtttactatgtcaccccactagtgatttgatccctgtactcttgtgtattctcaattactggcatttcagactgagatgaatccaaaaaaaaaaaaaaaaaaaa

SEQ ID NO: 77017 - DNA, 1784 bp, Oryza sativa
  Clone ID: PAT_MRT4530_76957C.1
gaccaccagggagcatgagatcgtggcgagtaaatttgacggggagtacgagagtagtagcctgtctcctggtcgaccaggagacccccatgaccaacccaggaggaggagcaacgttttgcgcgatagccaggtgaccaggcgttggccgtacgcagctcgccatcgtcgccctttaaagtgcgccattgccgctccggtcgcggcccctccctttcccaaaagcaaacaagggataggtttgccgttcagcccccacccagagccagcggactgcacctcgcagtccggcatggctggacagatgctaccgccgattgcgcttgttgctgtggccatctgtatcaccgcggcggcggcggcgaaggtgccggcgatatacgtgttcggcgactccacggccgatgtcggcaacaacaactacctgaccggcgccgccgtgccgcgggcaaacttcccgcacaacggcattgacttccccacgtcgcggcccaccggccggttcagcaacgggtacaacggcgtcgacttcttggctcttaacatgggattcaggcgcagccccccaccgttcctcgccgtggctaacaaaaccagcaacccattgttcagggggctccagggaacaaactttgcctctgcaggatcaggcattctcgactcaacaggtcaatccatcatcccaatgagcaagcaagtgcagcaattcgccgccgtgcaacgcaacatctcagcacgcatcagccagcaagccgctgacaccgtgctgtcgagatccctgttcctgatcagcaccggcggcaacgacatcttcgccttcttctccgcgaacagcacgccgtcgtccgcggagatgcagcggttcgtcaccaatctcgtatcgctctacacaaatcatgtcaaggatctgtacgttctcggggcgaggaagttcgccgtgatcgacgtcccgccgatcgggtgctgcccctacccgagaagcctgcaaccgctgggcgcttgcatcgacgtcctcaacgagctggcccgtgggttgaacaagggagtcaaggacgccatgcacggcctcagcgtgagcttcagcggcttcaagtactccatcgggagctcccatgccgtggtgcaaagcatcatgaagcatccccaacgactcggattcaaggaggtcacgacggcttgctgcggctccggcaagttcaacggcgagtccgggtgcacgccgaacgccacgctgtgcgacaaccggcacgactacctcttctgggacctgctgcacccgacgcacgccacgtccaagatcgccgccgcggccatatacaacggctcggtccgcttcgctgcgccgataaatttcaggcagctggtggatgaccagcactagctagagcgtggcagtgtcaccgtgtaacgtagtactactaattgttgtacgtcgccgactatgtgtctgtttgtctggtgatattggtgcgtaggatatgctgggctgtgttcatcagtggcttgtgctttaggcggtggtgtagtttggatacacataccaaaatgtcatctccgttattattgttgccccccctttatcgggccattttacgccggggggggtgtggtttccccccaggggaccgcttaattttccctcctcgggggggggcccggcccccaattccccctataggggttggacaacgcgcccctcatttgccccggttataacaaaatgggggtgggaaatacggggtggaaccaaattatattggttggcggaaaccccacaatttttt

SEQ ID NO: 77018 - DNA, 354 bp, Oryza sativa
  Clone ID: PAT_MRT4530_76958C.1
aaacaacaaaagaggaacatccggccctcattttatttctttttatttacatttacacaaacattgggaggggggggccaaacatgatactggtaggttggcctagcaaacattggtaattaattaagcaaaggcctaattaattaattaatcactaaggaaaaaataaatctaaaccatgccccccccaaacatgagggaggcaaaggaaccggccgtgtgctgaaggttgcaccggccgaaatccgttagggcgcttgccatcccgggaaacgggggggggtagaaccccggggccgggtggtgggagaaaatcccggagacccgggtgttctttttggggaacacgccggg

SEQ ID NO: 77019 - DNA, 354 bp, Oryza sativa
  Clone ID: PAT_MRT4530_76959C.1
aagggggccgccttttttttttttttttttgttttaaggacatgggaaagaactgtctatcaccctgtgttttctctgcgtgtatgtctcgtctatacatgtataacactctcttctcgttcgaatacgagaacctggagactaccatctgtttacataagagaaggtattataacattatcagactgaccttgattctgcttgtccaatccgaccaagtgagcatcttggttagattttcttcagcttaattggcgcaccctgctgcgggtggagagttattacagtgaatggtgcgtggatgtactatggagaaagctcagaggataaccggtgaaggattcgccagatagc

SEQ ID NO: 77020 - DNA, 480 bp, Oryza sativa
  Clone ID: PAT_MRT4530_7695C.1
gtcaaatacggccacctggttcgctacaacccaagcccaccgccgctgcgaagctgccggtcgccgacgaacagctcgccggagaggctgctttcccggagctttgagcttcttggactagctctgctcggattcttgcttggttgggattatcaggacatgatggcagctgttgaaaattgatgacatgcttatgtggatattcacaagtgaaactgtatttgttgaactgcagaattaaggccatcatagtagttttagatttcggtaatgggttgtttttgtatatttggcaagagaagggcaacccgacagcaaagttctcagcataatgatgacccctctggtgatatgaatataacaaaattcacttacaaggagctttcaagggttactgaaaattttagcccgtctaataagattggtgagggaggtttggatctgtgtataaggaaagctaaggaatggaaagcttgttgc

SEQ ID NO: 77021 - DNA, 934 bp, Oryza sativa
  unsure (1)..(934): unsure at all n locations
  Clone ID: PAT_MRT4530_76960C.1
gacgaggcctgctgcgtgccctcctcatcgtcctctgctcgctgctcctcgctttccccaccaccaccaatccgcaaaaccctactctcctcgggggctctcctcctcctcctcctctgcgccgccatttcgccatgagtcgtcaacctgaggtgctgtgggctcaacgctctgagaagatttacttgactatttcactgccagatgctaaagatgtagtgctgaagactgaacctcagggcctctttagcttcttagctgttgctaatggggaaccatttagcttcactttggagctgtttgattctgtactgncagagggaagtaaaactaagacaaagatgggtttgcggaaacataatgctgttcgatccagaaagaaaagaaaggttggtggaagcgtttgctgaagtcagaagaaaagcatccatatatcaaagttgactggaacaaatggtgcgatgaggatgaagagtctgatgcaccactggattcagatgatgcctttgatgagggaaatgtacagagacgaaactgatgatgatgatgatggaatgctttatctccctgaccttgaaaaagctaagaggccagtgattagccagcttcgatgaatgcagtagactttctgtagcaagtgactgttgacgccacaaagtagacttgtcattgcttagtcggtagtttcgcaaacatctgcagctagcaccagagtaccagactattggcatggttctgatatgcttgcgatgtcgtttttatcagactgattactctttggtgaccactgatccagcgtttagggtatgtattgttttgttaccactaatgaatgacctaaggctagtatgactgactttgcagcagctaggatgttattatgcttttatggattctgagcaccttctctcagatttgaaaaaaaaaaaaaaaa

SEQ ID NO: 77022 - DNA, 682 bp, Oryza sativa
  Clone ID: PAT_MRT4530_76961C.1
tcacgatgccaacaaggcctcggagttggcacgcagctgctccttctccagcacaaacatcttcagccgcggcagcttcttgccggccttgttcggccgcggggccgccatgtttgccggggtcggggccgggcgcggcgcgggcagcttgacgtccttgacggcgacgcgcacggtccggaaggggtcgtcgcgcgggaagttgccgttgtagatgacctcgaggtgtccgtcgtcggcgtcggcgtcggagacgacgaccgcgccgagccacatgacgaggcgcagcgccgtggtccctagcctccccaccggcgtgcggacgcgcacctcgtcgcccttcttgaaggaacatcttgttgatgggcgatcctgatcctgacggcttcttggagactactctcccctgcgcctcgacggcgagctcactgcggcggtggatgatcgggcgcgaggagcggggactcgagcggcggggaagcgccattgacgacgagagcgctgctgggagtgcgaggattggcggaaggaattgctggtgaatgcggaggcggccgcgcatggatttatagccagccgagtccgagttggaattgaagtcggtgtccgagttcaagtcggctattagcttggctgtgattaactgatccagtattctacttggacaatctctgcgcggcat

SEQ ID NO: 77023 - DNA, 483 bp, Oryza sativa
  Clone ID: PAT_MRT4530_76962C.1
tcacagtgccaacaaagcctcagagttggcccgcagttgcttcttctccagcatctgcatcttcagccgcggcagcgacttgccggccgtggtcggccgcggggccaccatgtttgccggggtcggggccgggcggggcgcgggcagcttgacgtccttgacggcgacgagcacggtccggaagggatcgtcgcgcgggaagttgccgttgtagatgacctcgaggtgtccatcgacggcgtcggagacgacgaccgcgccgagccacatgacgaggcgcagcgccgtggtccctagcctccccaccggcgtgcggacgcgcacctcgtcgcccttctggaaggacactgctggcgcggccggcgcggatgacatcttgttgacgggcggcgatcctcctgacggcttcttccccttggcgtcgacggcgcggtggatgatcgggcgcgaggagcggggactcgagcggcggggaagcgccat

SEQ ID NO: 77024 - DNA, 1413 bp, Oryza sativa
  Clone ID: PAT_MRT4530_76963C.1
atggagagaattgatgaagagacctatcgaggtggtgcaagaggtggaggtcaaggttcgtttgcggcaggcggaaggggtggtttccagggctttaatcacggctatgcaaccggtggtggctggtcatatggagtcggcgatcgtggtagatcgatggtggcagaggcaacaaagatcgtggcttctacgacggtcgccatggaggtgggagatacggtggcaacttccaggggaattggcaaggcggtagaacggtcagcgctttccgatgttcacaggcaacatgccgccggaataggcagcatggctggcaacattgccggcggcatggcaagcatgggtggaggcatggtcagtggcgtggcgggcatggctggcggcaatgtggatggagggatgggatcgcaaggtgcagcaggtatgggcataataggtaatggggcagctgctgtcgtggcccaactgaggtctttgacagtggtggcgcatggaggttcaacacctatggttctaactgggattgagacaggaaagaagacaggtttgatagaggtccatgcaggaggtgtgacgagttcaggacagccgggagtgatgccagaagcgattgtgtcgcatggtggatcaatggctcagtgtcctgtttttaaatcagcaaacaagcacatggcgtctttgtgtggttatgcggtggatggcttgggattctattatatccctcttcctgcaggtcagaaggtgaagcatgagtctaatgtagctttgatacatattacaaaaggggttctaacagtgatgaatgtgacatcggagttagataggttgattccaagtaaatggaaatgggaggtttatgataatggtaacaatacttttagaactatctttccttctaaggtggaattgcagagaatggtagaatgggggcaagtgaatactaagtttgtgaaagctaagatggaaatgaaggagagagatgttgggaatgagataaaatatgctattccaaagatagtggatatgaagttgaccaagagatatgatgcagcccatttgcaagttctggttctagatcattctttaattcctgaatctgttgatgtgataattggagatttcttatacgaacttcaatttaaagttgggcctaagaatgatgatgaaccggtgcctatggagatggataattttgatggtcctaatgatgacacaaagaaagagggggatgatttggatggaaagaatgatatgggactgacggtttctgatgagtatgatggacttagaaaacacaatgatggtggagactggccagcaaccttcggcacttgtgctagcgacggttccgtaggtagtgggcaaatgattcggagcaggattctcttgagatggcagataagcttaaggtga

SEQ ID NO: 77025 - DNA, 1311 bp, Oryza sativa
  Clone ID: PAT_MRT4530_76964C.1
atgccgccccggattaggagggcgccggcgaggcgagcggcgccggaggaagtgcccgaccgcgtcagcgctctgccggacgaggcgctccacgccgtgctatcgctgctcccggcgcacgacgcggtgcggacgtgcgtgctcgcccggcgctggcgccacctctgggagcacgcgccggcgctccgcgtcaccgacgtcgaggggtggaatccgcggctgcggggcgacggcctcggcaggttcatccgcttcgtggacggcctcttcgtcagccgccgccgccgcgacgcgcctctggagctgtgcgacctggacttcgatttcccggaggacaaggggaaggattggcatgtcaaccgctggatcatgctagccctgttgcgccaccatgcccgggtgctacggatctctttgcccgcgtacatcacgctgcctgatgtgcctctcatctctcagcgcctcaccaggttagagcttgatggtgttcttggcaacgataacattcttgatttctcctgctgcccggcgctgattgctctgaagatgaagtgctgccgtatcaatgccgagaagatgtcatctccatccgttaaaatcttgagccttgcctcctgtgaattttatccagctacccgtactcagatgtcttttccaagtgttgtttcattggagctagatggatgttctggtagcgttcctttccttgaaagcatgccatccttggtagctgcaattgttatatttgatgacgattatgcagacagatgtgacaatagtgtccttggtgactgtggcgacgattcttgcgttgattgctgcaattattctgaccgcagcaaatgcgtttgtctcaatggtttattggaagctacacacttggagttgtcagctgaacctgcaatgtatgttttcaggagggatttaaatttgctcttggcatgtcatacatttgccaagttgaagactttggcacttggtgaatggtgcatgactcatgacctcagtgcattgattcggtttctacagcaatcaccaattttggagaagcttactattaaaatcccagaggaacccaaatgttctatggatgcaggacaacaaaagataccagaagagccgtttgtatccaaccatcttaagattgttgaaattaaatgcaaaggcaaagaggtcatgtgggtttgcaaattcttgaagaccctgggtacctttggcatacccctcgagaaaattaacatcaaactgactagtgaacactgtcgatctgaatgttttaattttgtctgtactggtttcagctgctcctag

SEQ ID NO: 77026 - DNA, 465 bp, Oryza sativa
  Clone ID: PAT_MRT4530_76965C.1
tcacaatgccaagaacgcctcggagttggcccgcagctgctccttctccagcatctgcatcttcagccgcggcagcgacttcccggccgtggtcggccgcggggccgccatgtttgccggggtcggggccgggcgcggccccggcagcttgacgtccttgacggcgacgcgcacggcccggaaggggtcgtcgcgcgggaagttgccgttgtagatgacctcgaggtgtccgttgtcgtcggcggcgtcggcgtcggagacgacgaccgcgccgagccacatgacgaggcgcagcgtcgttgtgcctagcctccccaacggcgtgcggacgcgcacctcgtcgcccttcttgaaggacatctcgttgaccggcgatcgtcctgacggcttcttccccttggcgtcgacggcgcggtggatgatcgggcgcgaggagcggggactcgagcggcggggaagcgccat

SEQ ID NO: 77027 - DNA, 682 bp, Oryza sativa
  Clone ID: PAT_MRT4530_76966C.1
tcacgatgcaaagagggcctcggatttggcccgcagctgctccttctccagcacaaacatcttcagccgcggcagattcttgccggccgtggtcggccgcggggccgccatgttagccggggtcggggccgggcgcggcgcgggcagcttgacgtcctttacggcgacgcgcacggtccggaatgggtcgtcgcgcgggaagttgccgttgtagatgacctcgaggtgtccgtcgtcggcgtcggagtcggagacgacgaccgcgccgagccacatgacgaggcgcagcgccgtggtgcctagcctccccaccggcgtgcggacgcgcacctcgtcgcccttcttgaaggacacgggcgtcgccgtcgacggcgcggatgacatcttcttgacgggcgaccctgctgatggcttcttggagactactctccccttggcgtcgacggcgcggtggatgatcgggcgcgaggagcggggactcgagcgacggggaagcgccatggacgacgagctagcgctgctgcgaggatgggtggaaggaattgtggtgaatgcggagacggtgaggggcggcgcgctaggatttatcggcagccgaagcggagtccgagttgaaatcggtgaaggaagcaagtcggagacggagttcgagttgaagtcggtgcttagaggctgtgattaa

SEQ ID NO: 77028 - DNA, 504 bp, Oryza sativa
  unsure (1)..(504): unsure at all n locations
  Clone ID: PAT_MRT4530_76967C.1
ngagctactcgccaagcggagaaagaaaaggagaggagaggaacagtgcaaacgttccccccgtggccccaacctcggtcgttgcccaatggcgaatgattcctcctccttccctcgcagcctccttatcccgctcgccgccggcggctgctccgacgatgacgacggctacgacgagggcccgtcggacaccgtctccttcccctccttctggccgccgttcccggccatcttgtctgattccgactccgacgtcgccttgttccctcttcctcctccccacgtggaccactgccctgcgccgcagggcgccgcgtcggcgttcttcgggctcggtttccgtgaggaggatgaccacgatggcggcgagtgggcgccgccgggcgaggtggagttgcctctctgttgggattgcctgcagctggaggagcccgaccaccagaggtgggacatcggcgtgaacggcggcggcggctacgagtgggagcaggtcggcatcagggt

SEQ ID NO: 77029 - DNA, 821 bp, Oryza sativa
  Clone ID: PAT_MRT4530_76968C.1
agtggcgcccccgggcccgaggaaaattcaccggtgaaaaggttcagcactgtgcaatggcggcttccgtaggactgaaccctgaagctttcttcttcagcaactcctactcctactcctcatcccctttcatggccagctacacgccggagttctcggccgccgctatcgacgccaacttattctccggcgagctcgatttcgactgctctctcccagctccggcccaggagtacccggaaaatgaaaacactatgatgaggtacgagagcgaggagaagatgagggcgagggtgaacgggaggatcgggttcaggacgaggtcggaggtggagattcttgatgatggcttcaagtggaggaagtacggcaagaaagctgtcaagaacagcccaaatccaagaaactactaccggtgctcgacggaggggtgcaacgtgaagaagcgagtggagagagaccgggaggaccaccgctacgtcatcaccacctacgacggcgtccacaaccacgcgagccccgccgccgccgccgcggcgctgcagtacgccgccgccgccggcgactactacagcccgccgctcagcagcgccggctcgccgccggccgcctattcggcaggcggctcgctgctcttctgaggctgatgagtttgtctagtactagacacgcccgggagctctagctaggatagaaaactagagaaagtttaattatacctgaattttaattaatcacctcacaaaactctgatgtatcatattatatcgtgatagtgactgcttgttaatttaattttggcgatcgatgtgatcttcggt

SEQ ID NO: 77030 - DNA, 210 bp, Oryza sativa
  Clone ID: PAT_MRT4530_76969C.1
atgggtcatacctacctccactccgctggaaggagcgagctgcatgtctgcccttcttcatgcaacgacttccttgcaatggttgcgatgaagcctggaatatatctgaccgggaccgacgtgtcgtctccaggagccggcacgccgtctccggttagggacgagcgccaagaggctctcatccagatgacgggacggggcaaggagtga

SEQ ID NO: 77031 - DNA, 1327 bp, Oryza sativa
  unsure (1)..(1327): unsure at all n locations
  Clone ID: PAT_MRT4530_7696C.1
atggcgagttcacccaacctccttggaggcgaggaaggcgaaccaggacgcgacgatgtcaggatccacggaggccaggggtcacgaggaggtccggcggcgacgcgggagaacgacacggcgttggcggcaggagcgctcctcgtcttcgcccgtggcgtcgacgcggaccccgcgcggtggctcgtggaggagttcggggccgcggcgccacccgtctccgatgagctggagctcgcgcggcgcggtgccgagagctgcacgaccgcgtcgtggcaccccttccctgccgtgccgtggcagctcgtgctgcgatccctccttcgcatgaccgggcatccgccgttggcgacggcagccttggcatgcgacaaaagagggagtgcgtggcggccgtggcgaacacgccggacggcgcaaagacgaaccgcggggcgcccgcctcggcggcgagcgactgcgtccactgaagaaatccgacagcacggccaccaccctgccgttgccgccggagcgcgcccgcacacgtggagtgcggcgggcatgtggagggcggcggtggcgaggtggagcagaggctgcatgtggcctcgcgctgggtacgggatgagctgcatgagcaggacgtgcggcgccggcgcgacgagcaaggcgggcgtggaggaattcgtgtgctgcgccactgtgcatggcgtcgggccgtccattggattgttcgactctatcagggatggtggaggagtggtgggggccggcgccggcgctggagccggagccaatgcgcaggcgcgacgggtgtcgccgctgccgatgccgctcccaggctcctcctcacaacgccgaagccacgggatgacgctggatgagatcgattcgatccgcgccggctgccgcctaaccctaaccatcgccgctccgatccttccctcccccgccgccgccacagacgattctgacggcccgccttcgcgcgcgacgccgccggcgcccctccccgccaactcccctcctcccctcatccaaatcgactccgccggcacgaaagcgcccctcctcctcgaccgcgttccgacactgccggtgccccctcgctccgaccgcgttgcgccgccgtcgaatcccgtctccattgtcaaattgattgcacactaattttgaaatatgggagcacatcagaaggttctnattatgacagcggatggtacacagatgcaatcgtaaaccttctgtctatatagtcaataaaacagttttactggatccttgaatttgctgttntgcaacgtggagtgtatatngcatactttaggaatcattggttgtcaat

SEQ ID NO: 77032 - DNA, 3187 bp, Oryza sativa
  Clone ID: PAT_MRT4530_76970C.1
atgggcggcgcggcggcggcggcggcggtgttggtggtgctgtggctggcggtggcggcggcgggggcgggggcgggggagcggccgagcgaggtgtcaatcggcgcgctctacacctacgactcggtgattgggcgcgcggcggggctcgccatcgagctcgccgtcggcgacgtcaacgccgaccggaccgtgctggccgggaccacgctcagcctcatctcccaggacaccaactgcagcgggtttcttggaacaatcgaagcattgcagttaatggagaaaaacgtggttgctgtcattggtccacaatcctctggaataggccatgttatttcacatgttgttaatgagctacatgttcctcttttatcgttcgcagcaactgatccaacactttctgcatcagagtatccgtactttttaaggagtaccatgagtgactacttccaaatgcatgccgttgctagcatcgttgactactatcaatggaaagaggtcactgctatttttgttgatgatgattatgggagaggtgcggtggcagcccttagtgatgcgcttgcattaagtcgggcaagaatttcatacaaagcagcggttcctccaaattcaaatgcagctacaatcaatgatgtactgtttagagcaaacatgatggaatcaagagtgtttgttgtgcacgtcaatcctgacgcagggatgagaatattttctatagctaacaagctccggatgatggacagtggctatgtctggatagtaaccgattggctagctgctgtcatggactcctccatgtctggagatcttaaaaccatgagctatatgcaaggattaattgttcttcgtcagcacttccctgattctgaaaccaagagggagttcatatctaaatggaacaatgtagctcgtaataggagcattgcttctggcttgaactcatatggtttttatgcttatgactcggtttggattgttgcccgtgctatcgatcaacttctcgataatggggaggagataaatttctctgcagatccaaggttgcatgattcaatgaacagcacactgcgtctctcagccctcaagttatttgatagtggtgagcagttgctacagcaacttctcctcacaaactttacaggcctaacaggccagctccagtttgattcagaccgcaatttggtacgcccagcatatgatatccttaatatcggtggttctgtgccccatttgattggctattggtctaattattctggactttctgttgctgctcctgaaattctatatgagaagcaaccaaatacatctacgagtgcgcagcggcttaaaaatgtggtatggccgggtcactctgcttctaagcctaagggctgggtttttccaaacaatgggcagcctctgagagttggtgttccaaataaaccaagctttaaggagttaatgtcacgtgatactggccctgataatgtgactgggtactgcattgagatattcaacgcagcaattaaacttctcccgtatccagttccttgccaattcatagtaattggggatggtttaaagaatcctaactatgatgacattattaacatggttgctgccaattcccttgatgctgctgtaggcgactttgctattgtgagaaacaggacaaagattgcagaattctcacagccttatattgagtcagggcttgtgatagtagtgccggtgaaagaagcaagttcaagtgcctgggctttccttaaacccttcacattagaaatgtggtgtgtaacaggtgttctttttatttttgtcggaatagttgtttggattcttgaacatcggaccaatgaggagtttcgaggctctccaagacggcagatgataacaatattttggtttagtttctcaacaatgttttttgcacacagacagaacactgtaagtgcgcttgggcggtttgtgctgatcatatggctgtttgtcgtgctgatcatcaattcaagttatactgctagtctgacgtcgattctcacagtccaacagcttgcaactggaataactgggcttgacagtttgctttcaagtgctttacctattggataccaggctggaaagtttactagaaattacctgattgaagagctcaatgttcctgaatctcacttggtaccgctaaacacaatcgacgagtacgctgatgcccttaatcgtggacccaaagatggtggtgttgctgcaattgttgatgagatgccatatatcgagatcttcctgtcataccattgtaacttcagaattgtaggacaggaattcacaaaggaaggatggggattcgcattccagagagattctcctcttgctgcagacatgtcaactgcaatccttcaactttcagagagtggccagctacaaagaatacatgacgagtggttctcgcggtcgagctgcagctctgatgacagtgaaatgggagcaaccaggctcggcctcagaagtttttggggcctctttcttatgtgcgctctgatatgcgtattcgctctcgtgatgttctttgcaagagtctgctggcaatattccaagtactcaggttctgaagaacctgatgagcccaaagacgatagtgctggcaccgccgagattgcagctgaagccgttgctgaaatgcagcggaggaggccaaagcgtcttggtagcttcaaagaactcatgcagtttgttgataaaaaggaagaagaagtcaggaaatcgatgaagcggagaccaagtgagaaagataatcagggtgttggttcttcagatgcgcagtcagtggcttaaccgtagaagattctttcaggttcagtccttccttcgttctgcacatcccaaaaatgaaaaacatactaaagtagataacagcagtatacttgtagaatctagaaatccattttttttcaggattactcgaattatgtctgatatatactcttaatatgttcagcaattttcccatttttttcccatttgggaatgccatgaactgtgaaaagtgtatctgtttaggtgcttctctgaagcacatgtatgacttctcttttgctttattttttttatctttgaaaccatgaatttgtggattactgaattgcctcgctggcattggatatttgtgatccaaagtaagaaaaaaaaaaaaaaaaaaaaaaagaag

SEQ ID NO: 77033 - DNA, 861 bp, Oryza sativa
  unsure (1)..(861): unsure at all n locations
  Clone ID: PAT_MRT4530_76971C.1
atgggcgcgcgncgcggggcggggctcgaggcggtggcggcacgcgcggcgcgncagtgggatggcgacggcgacggcgtagcagcggcgattggacggcgacgcagcgacgggatggcgcggcgctgcgcggggctcggcgcgcggcgatgggacgggcgcgcagcggggcaggggcgtggggcgcgaggtgacgcgacagcgcgcggcgcggcagcggcaatggcgacggcgcacggcggcaggcggcgatggcgacgcgacgggcggcggcggcgcggggcgcacggccggctagggcnccgtggtgggagaggagggggagggctagggagaaaagagaactctcgtcagtcgtcactagtcagcagccttaatgtgaaaggacaacacacgacacgctttcagagagaaaaagaatcgggcgcacattctgcttatccctggaagttcatgtgggaggggagcgattgtgtgggggcagatggcaggcgatcccgagaagttcgcatgggaagggaaccgaaaattctaatgggtgcacggtcgtgcgtgacccaatccgcgtgttgcacattgtccgacttcatcctctgcctctactttttaattgcaaagagaggtgatccattagggcttgtgctttcccgtggtgccgccgctgcctttcccatggaaacaacccctacctcctccgctgctactcccaccatgactacaggagatggagactctcctccagccaaggcccttgccgaagactatggattgtactggacagtgcagcagaagattgatgaccttttgcagcgatctgagcgcaatatcatgccaaagcaccctgaattcgctacctactag

SEQ ID NO: 77034 - DNA, 542 bp, Oryza sativa
  Clone ID: PAT_MRT4530_76972C.1
gacagcgctcgtacaaactagttacgccggccggagtggaggaaatcgcccggcacggttcgggatgacgatgaaggcggtgctccggcggtcggcgggcgaagcggagcgtcggacggggtcggcaacctctcggcgaagccgatggaggtggcgccgagtcgggaagaggtcccggagccacgacggcggcgaaacggagctcggcggcgacggcggagagagaggagcacggcgcgggcacgaaaccgacggcgagagcgagcggcgagcggcggaaacggaagagcggagcacgagggacgattttatagcgtcggaagggagggaaggcggccggggaggaaggaaaccggccgcggagttctcaggttccatagatgcgccggcgacgattacgggaaggaaatcggacgaatccgagggtagagagagaggggaaaacgggggaaacgggagagggaatcacggggaatgattcccccctcattaaggcgcgcggggaaggcgggatgcggcggaatccgcggcggcggcggcgc

SEQ ID NO: 77035 - DNA, 1542 bp, Oryza sativa
  Clone ID: PAT_MRT4530_76973C.1
cccgggcgtccaggtcggctcccgcgtcccccactgctctgcttctcctcttcttttcttggcttgtgctctgttttaatttctttgcaatgatggggaggcagagctcgtcggcggcgaggagggtggtggtggtggtgtgcgcggcgatggtggtggcggcggcggcggcgcagaagtacaatgcggtgtacaacttcggggactcgatcacggacaccggcaacctgtgcaccaatggcaggccgtcgcagatcaccttcacccagcctccctacggcgagacctacttcggctcccctacctgccgctgctgcgacggccgcgtcgtcgtcgacttcctcgcgagtaagttcgggctgccgttcctgccgccgtcgaagtcgacgagcgccgacttcaagaagggagcgaacatggcgatcaccggagccaccgccatggacgccaacttctttccgctccctcggcctctccgacaagatctggaaccaacggccccatcagctttcaaatccagtggttccagcaaatctcctcctccgtctgcggccagaattgcaagagctacctggcgaactcgctgttcgtgttcggggagttcggcggcaacgactacaatgcgatgctgttcggagggtacagcgcggaccaggcgagcacgtacacgtcgcagatcgtggacaccatctccaacggcgtcgagaagctcatcgccatgggcgccgtcgacgtcgtcgtccccggcgtgctccccatcggctgcttccccatctacctcaccatctacggcacctcctccagctccgactacgacagcctcggctgcctcaagaagttcaacgacctctccaccaaccacaacaatcagctcaagaccaagatctccgcgctccaatccaagtacaagtccgcccgcatcatgtacgccgacttctactccggcgtctacgacatggtccgcaaccccggcaactacggatttagcacggtgttcgagacgtgctgcgggtcaggcggcggcaagttcaactacaacaacaacgcgaggtgtgggatgtcaggcgcatcagcgtgctccaacccggcgtcgcatcttagctgggacggcatccacctcaccgaggcagcttacaagcagatcactgacggctggctcaacggcccgtactgtagcccggccatcctccacagctaaggcaaaatgactggaaagaacgagccattagttaatttattactttattattaaggctggtgtttattaattaagcgggaattaattaaaggggaattgtttgggttcttgatttttatttgggtggcatatatggtgggtggtgtgacggtgaaatggtttacttgcgttgccaaaaaagcaaagaaagcgatggcatctgtagaataaatgttggttactgttgtaatttgataattgtttctcttccagaatcaaatgaatcatcaatggtattatactcagttaaaaaaaaaaaaaaaaaaaaaaaaaaaaaaaaaaaaaaaaaaaaaaaaaaaaaaaaa

SEQ ID NO: 77036 - DNA, 1651 bp, Oryza sativa
  Clone ID: PAT_MRT4530_76974C.1
ctgcacccacgttgcatccgcccctgcatccacgaatctcactcttcaaagacatagaatatgaaaaaaaaaactcactgcaagattctgatccaataccaaggaacatcgaaaacatattggctgaacgaattttgcatgtgttcaaaataccggaaagattttgtgaggagtatgaacagatggtgagaaatttttggtagggacatgataaaggagaacggaaggtacactcgattggttgggaaaagttaatgagtcccaaactattccgaggacttggttttcgggacattagatgctttaaccaagccttactagcaacgcaggcatggagactgttcgataatccagataatttatgtgcttgggtgctaaaggtgaagtactatccaaatggatcactaattgacacggccttcccttcaagttcatcgccgacttggaagggcatcgagtatggactagagttgttgaagaaagacttgatatggatagttggagatgggcaccaaattaaaatctagaggagtcaatgggttgcacatagggaaaacccagtgattctgtagaagaaggcctggaatcgtctcacgtatgtacatgagctcatgttgccggaaaccaaaacgtggaatcagcctttaatcagacatgtagtccaggaaaatgatgcatccgaaattctgaagatcaaaatacctggaagggagatgtcggactttccagcatggcatcttgagaagacaggaattttcactgtcaggagcgcctataggttagcatggaatcaatcagggaaggctcgtgtggaatcttcatctagcacggcgacaaatggtgaaaggaagctttggaagaatatatggcaaacaaatgctcaaccaaaagtgagaatttttgcatggaagctagccaggacagattgcccacttggggaaataagagaaagagaaagatagaacagagtggcatatgcccgatctgcgggatggctgaagagaacgggtttcatgtacggtggagtgcactctagctagaggtttacgggaggcaatgagaacacattggctattgccggttgaaacgagttttgcatatacagggccggactggctgttagtgctgctggatagttcgcagtgttcagaaaaggcacatgttatgtatttactctggagagtttggcacctgcgaaacaacatgatccatggcaaaggaagtgcatcaattgctgatttggtcagtttcttggttagctatgaaggccaactgttgccaatccgacaacaagaagatgaccacaaaggaaagggccctatatacatggaaccgaaccagatatctctctctcttgagggactcagagcggcgactgacttgattcacatgcccattgtgttggagatggacaatgcagaaattgttagagatttaataagagaggaacagctgaaatcggcctgggcgacgacgattgaagagattaaaggagtgatgcaaagtgcaagacttgattcatatgcccatataaagagagaagcaaatagggtagcacatgttttagcacaaatgacaatgagttgtaggtcctacgcggagtggaggttgtgtgctcccgcaagaattctagacttattaaatcaggagt

SEQ ID NO: 77037 - DNA, 273 bp, Oryza sativa
  Clone ID: PAT_MRT4530_76975C.1
atggtgaaggcgtcggctgctcgaagatggaggatgcggcgaggaccaatgctcaaaggaggaggcggacgctgtggcagttgcctctcggggatggaggcggctagctcttggagcggcggccagatcttgcccttcctcgtcatgcctgcagccacaccggtgctcgaggacgagacatatgacgactgctcgccggatcgagccagaggggaaggagggatcacaggaggcccaagaagaacgacggccggcggtcggagacgcatctag

SEQ ID NO: 77038 - DNA, 904 bp, Oryza sativa
  Clone ID: PAT_MRT4530_76976C.1
cccgatttcacgatttctcccgagaccaccgatagcaaccgctcggtcgcggggcggagaagtcgccagagaaaatgacggcgccggtgaccaccaccacctcctccctcctcctcctccaccaccctgccgccgccatccgttcccttccctcgccacctcgtcccagtgctgtggcccgtcccggccgcagccggcgtcgtgccctcctccggtgttccgcggtgtccgagctcgcgcccaccgcatcagccggctacgggccccttacggcgcgcggctcctgggcggcggcgcctttgcatatgtgaggtcggggagtaaaggctccatctttggaggactgtccggatccgcgcttatgggcattgcttattatctgatgcaatcacctgaaacaaaggcgttaggtgacgctgttggatttggatctgcctttctgtttgccagtgtttttggtataaggctgtacaatacccggaaactggtgccctctggtcttcttctagttctttcgcttggtgccttgggtgtcttttattctgcttatatgcaagacaaggtgtgaacaaattcgatttggcagtcgaagaattttgtactagctgaaccttcattgaaggctgtctttattaaatgtaaaattttgaaccaaaaaaaaaaaaaaaatcctctgttttagtcacaacatcatttagtgttgtccatgtcttgccaacgataagcttgagcaagtttcagccatcactgtgctgattgaaaatgttgctcctggactggactaaatatgtctgacgttgaacatgttaagttctcggcctgtacttgcctaggcagtcggcacattgtacagattttgaaaaaaaaaaaaaaaaaaaaaaaaaaaaaaaaaaaaaaaaaaaaa

SEQ ID NO: 77039 - DNA, 6289 bp, Oryza sativa
  Clone ID: PAT_MRT4530_76977C.1
atggtggtttcccccaccatctgcaacgtgaagttggggcgtgtcctcatagatgggggagcggccctcaacatcatttcccccgcggcttttgatgccatcaaggccccggggatggtgctccagccgtcccaaccgattatcggtgtgacgccggggcacacatggccgttgggtcacatcgacctaccggtcacctttggtggatcagccaacttccgcacggagcgggtgaacttcgatgtggcggacctcagtctgccctacaacgcggtcctggggaggcccgcgttggtgaagttcatggcggctatccactacgcctacctccagatgaagatgtcgggccccggtggccccatctctgtccatggcgacctgaaagtcgcgctcgcttgcatggagcagcgcgcggaccacctcgctgctgcgtccaagcccgagggtggtgacgagaggcttggcacctccgcccccaccgccccggggcagcggattgtcacatgcgccgaggtcccggaagacgcgctcgtctccttcctgcgggcaaacgctgacgtcttcgcatggagaccggcggatatgcccggggtccccagggaggtgattgagcaccgtctcgccgtgcggccgggcgcaaggccggtccggcagaaagtgcggcggcaggccccggaacgtcaagccttcatccgcgaggaggtggcgagacttctggaggccggattcatccgtgaagtcatccatccggagtggctggcgaacccggtggtcgttccaaaggcgaacggcaagcttcggatgtgcatcgactacaccgaccttaacaaggcatgtcctaaggacccttaccccctgcctcgcatagatcagattgtcgactccaccgcggggtgcgaccttttgtgttttctagatgcatactctggttaccatcagattcgcatggctagggaggatgaggaaaaaactgcgttcattacccccgtaggaacctattgttatacatcaatgcccttcgggttaaagaatgcaggtcctacttttcaacgtactactcgaatttctttgggtagccaaatagggcgtaatgttgaggcttatgtcgatgacttggttgtaaagacgcgcaaccaagagactttactcttagatctagcggaaacttttgaaaatctccgctccgcccgcataaaactgaaccccgataagtgcgtgtttggtgtacctgcgggcaagcttctcgggttcttggtctctgcccgaggcatcgaggccaaccccgagaagatacaagctatagagcggatgcgcccccccagcaaacttagggatgtgcaatgcgtcaccggttgcattgccgccctaagtcgtttcatatcgaggctgggagagaaggcgctacccttatttaagctcctcaagcgctcggggccgtttacttggacggaggaagctgaacgtgccctcactcagttgaagacatatctcagctctcccccagttctagtcgccccggggccaaatgagcccctactactctacttagcggcgaccccccaaggaggagaagcccccgagtcgaacggtggcctaaggcccctgacgaccggagtcggccctctgcccgcttgtcagacggtgctgggtgcccccgaccctcaggaaggccccgaggccactgcgggaaggccgcacctatcgccctttggccccgaggctaaccctgtgctgactcgacccgggagaaagcagggagaagaggcccccgagccgaacggaggcctgaggcccctgacgaccggagtaggccctttgcccgcttgtctgacgacgccaggagcccccgacccccaggacggccccgaggccactgtgggaaggccgctcttgtcatcctccgaccccgaggtcatcggcacagaagacgagtgcgccccgagaggccacttggacgaagaacgccccggggatgcggcccctagcgaagaggatcggccccgccgaaaggtgcagcggcttgtctactttgttagtgaggccctccgggacgccaagacccgataccctcaggcccagaagatgctttacgctattctgatggcctcgaggaaactgcgccattatttccaggcgcatcgggtcactgtggttacgtcttaccccctcggtcaaatcttgcataatcgagaaggtacaggacgagtggtaaaatgggcaatcgagctttctgagttcgatctgcactttgaaccacgccacgctatcaagagccaggccctcgccgattttgtggcagagtggaccccggctccagagaccgtctcaatccctgaggccagcacggacccctctcagctgcctcacaccgcccactgggtgatgcagttcgacggttctctgtctctccagggcgccggtgcaggggtcatgttgacctctccgaacggagacgtcctcagatacttggtccgtctcgactttcgagcgactaataatatagcagagtacgagggactccttgccggactcagagtggcagctggactggggatccgccgcctcttggtgttaggcgactcccagctggtcgttaaccaggtctgtaaggagtaccggtgctctgacccacagatggacgcttacgtacgccaagtgcggcgtatggagcgccattttgacgggatagagcttcggcatatacccagacgggataacatggttgccgatgaactctcacggctcgcgtcctcgcgagcccagaccccaccgggcgcctttgaagaaaggcttacccagccgtcggcgcgacccgaccccttaggggagacggatgcgcctgaccggcccccgaggcccgtcggagtccaggcctcgggacccgaagggagcgctccaagctcccttagattgattgcttggatctctgagatccaagcatacctcacagataagactctacctgaggaccgtgaagggagtgaacgcgtccaacgcatttccaaacgctacgtgctggtagaagggaccctctatcggcgcgcggctaatggaatcctcctgaaatgcattcctcaggaacaaggcgttgagcttcttgccgatatccatgaaggcgagtgcggagcccattccgcctcgcgcaccttggttggcaaggcctttcgtcaagggttctattggccgacagctctcaatgatgcagttgatctggtccggcgatgcagagcgtgtcagtttcacgccaagcaaatccatcagccggcccaggccctgcagatcataccactttcgtggccatttgctgtctgggggctcgatatcctgggaccgtttaagcgggccccgggcgggtttgagtatctgtatgtcgcgatcgacaaattcactaagtggcccgaggcttatccggtcgtcaagatcgataagcactctgcacttaaattcattaagggcatcacggcccgttttggagtgcctaaccgtattattacggataatggcacccaattcactagtgaactcttcggcgactactgcgaagacatgggcatcaagctctgcttcgcctcacctgcccaccccagaagcaatggccaagtggagcgtgccaatgcagaaatcctcaaaggccttaaaaccaagaccttcaatattctcaagaagcatggcgattcatggatcgaggagttgccagcagtgctctgggcaaaccgaactacaccaagccgagcaaccggggaaacgcctttcttcctcgtctacggcgcggaagcggttctcccatccgagctcaccctgaggtctcctcgggctaccatgtattgcgaggctgatcaagatcagcttcgcagagatgacctcgactacttggaagagcgaaggcggcgcgcggccctccgagccgcgcgctaccagcagagcctgcggcgctaccatcagcgtcacgtccgggcccgatcactctgcgtcaacgacctcgtcctacgccgcgtccaaacgcgtgctggattgagcaagctttcaccaatgtgggagggtccgtatcgagtggtcggcgtcccccggccgggctccatacggctggccacgggcgacggcactgagctgcctaacccgtggaacatcgaacaccttcgtcgcttctacccctgaggggggggggtcggctaaaatcgccaaacggggcccagaaccgagccgtgccccgaggcgtggtgaactccgggggggaatcggcaaaaacccacaatcaggtcacccataaccctcggtcaccacgttcccggcctggccagtctcgacatgtggatctccccaggcactagccccgacccgcgccttttgaggactgggacccgggtcgccggcctcgtcgtcactgttgtctgcaccaccggcattgccctcctcgtcggagttgggggcgaacgcgagccgaggggccgagccctcgaagctgtcgacgatatggtcggcggtatcccggacctgcgcgcgcgcgtggtcctcggtcccaggagggaactcatccagcgccatccatggagagaaattggggtccctggcctggtaactcgctaggacgagctccaccgctccttgggcgaggtccctcgaggatgacttaattgtcttctcgagctcctcgtggagccgttggagagccccggccatcttcgagaggcgctgggcgagacctccctggttggcggcgtactttacggtccgccctctccagaggcccacttgccgaccggcgcaatctaggcgggagacggcgtcccaaagcatgccgggcccaacctcgcctgccaagcggagggcttcgacctccccggcggacgagtccagcgtgccctgcagatcggcgatggtgcgttcggcagctgcgaggcgggcggctaagtcgctttcgcccgcggccgccccgccgctgcgcgccctcgcgtccaactccttcgcccgcgcctcgagctcagcggcccgttggttcagtgcggccctctcggcgcgggcaccttccagattacggcgcacctgctcctcctgcgctgcctcgcggagggacaggctgtccgccagctgttgcgccgcggcctcggccccctcgagagctcgctcccgctcggtgagcgcgtcctcgcggaggcggagcgtgaactcttcttcggcgcaggcagcctcgtgcgccgccagcgttgcttcccggatggtgacggcggcctcgcggtccgccagatccctctccacgacgcaggcgcgctcttccagcgccatggcgcgcgcctcaagggcctcttcgcgccgccgggacgtcgcttcggtctccgccgcccgctgttctcgggcagcggcagcgtcaagcaccccctgggcggcgtcgagcttcttccctagctccgcctcccagttcccgtattgaaggcggagggtgtcctgcgcctcgttcatcacggtggtggcaatgagggcagcctcccgctcctcctccacttccttggcgatctccgccagcaccttcttacgggtttcaagctccgagacatgccggcggtgagccttacggcccacctccaccatggcctccaccgagcgtcgcccctcttcgacacgcgtccacgcggcgtcgagctccgcccgctctgcctgcagggcctccacctgggcacttaacccatccaacatcgtggtgtttgcggcggccaaggcctgcagaaggggctctgtgttcagtggggcgatagaaggcgtggggaagagccgccttggagaggatgccacgcggctcgggccgccgatggaagtgccggactcggggatgtctctcggacccggttggtcctgagcgtcgcccgagggagtgggcccaagcgacgcgcccgcagcctcgtcgccagctgccccggaagttgtcgcctgagcgtcgcccgagggagtgggcccaagcgacgcgcccgcggcctcgtcgcgagatgcctcggaagtcgccatcacctcgtcctggcgaaatccggcttcctcccgagcggcttcctcggcctggcgggctcggggggcctcctcccgaacggcttcctcggcctggcaggcccgggcggcctcctcccgagcgatttcctcggcctggcgagcccgggcggcctcctgggcggcctcctcggcttcccgtaggcgatccgcggcctctcgccggtcagattcccgcctgcgggcctctgcggccgccggatcctcggtctcagactggccggacttggaatggcgggagggacgcgacgggatctcg

SEQ ID NO: 77040 - DNA, 6222 bp, Oryza sativa
  Clone ID: PAT_MRT4530_76978C.1
atggccgagcaagcaaaggtgcacgacctctctccgagtgtgagcggcgacgacggggagccaaacccacgccgtcgagctcgtactcccccacctcctcctcgccaaagtcctaagcagggggaggcgctcgaaagggtcgaaagatccgcggcttcaccgatcgcgggcgatggaggagaacggcgagatggggagcgtcgcctcctcgtctacggcgacggcagcacgccccagggcgcgctccaagctgcgggcgtgctcttacgccacccgcctgtcgtccctgacccggaatctccagcccaacgatggctggacgacgtggccaaattggtcatgacggcgcggcagcgcctagatgctggtgggcggtcctccgccaccaagacctctggtgctgctaccactggctccgcgtcgtcaagacgaagggcacgacgagcagcagccgctgttcgccgttcggtagccactccctcatcgactccttcgacccgagaagatctgcgtagggagcagggcgcccgcgccagcctcgagcgccggcgtaatgaccgaagtgctgcccacgcaatggaaggcgcttcctcgtccagagtgtcacctcgacacggacgtgggaatcagccctccgtgcccccggttggtggtgttggctgtagagccttcgtggcgagtcttcggaatgtccgttggcccccaaggttccggcccaccatcgccgaaaaatatgatggcagcgtcaaccccgccgagtttctccaggtctacacaaccgggattgaggccgccgggggtgacgacagggtcatggcgaatttctttcccatggccctgaaggggcaagcacggggttggctaatgaacttgccacccgcgtctgtccactcctgggaggatttgtgccagcagttcaccatgaacttccaaggcacgtatccgcgccccggtgaggaagcggacttgcacgctgtacagcgaagggacgatgagtcgcttcgatcgtacattcagcggttttgtcaagtccgcaataccataccatgcatccctgcacacgcagtaatctacgcgttcaggggggcttcggccgcccccggatccgccgctcagtcagggcggcgtgacaggaggaggaagaagaggtcagtccgttccgacgacgagggtcatgtcctcgccgtcgagggcgcttcacgggccacccgaaaggggaggcctgcgagcgacaaaaagaaggaggccagcgttcccagcagggagcgccctaccggcaagtggtgcaccgtccacaacacctccctccatgaccttgcggactgtcgcgcagtcaaaagcttggctgagcggacaaggaagtgggaggaggagaggaggcaggagcgccgggaaggtaagtccccggcggttccttccggccgtcggcgaagtgaggccaagcagaaggcccccgccgaggacatcgatgatggcgataatgacctaggtttccaagaacctggggccaccattgccactgtcgatgggggagcgtgtgctcacgtctctcgccggagcctcaaggccatgaagcgagagcttctggccgcggcccctactcatgaggcgacgcgccgggcgcggtggtcggaggttgccctcactttcgaccagaccgaccacccaccgtgcgtcgcccggggagggcagattgcgatggtggtttcccccaccatctgcaacgtgaagttggggcgtgtcctcatagatgggggagcggccctcaacatcatttcccccgcggcttttgatgccatcaaggccccggggatggtgctccagccgtcccaaccgattatcggtgtgacgccggggcacacatggccgttgggtcacatcgacctaccggtcacctttggtggatcagccaacttccgcacggagcgggtgaacttcgatgtggcggacctcagtctgccctacaacgcggtcctggggaggcccgcgttggtgaagttcatggcggcggtccactacgcctacctccagatgaagatgccgggccccggtggccccatctctgtccatggcgacctgaaagtcgcgctcgcttgcatggagcagcgcgcggaccacctcgctgctgcgtccaagcccgagggtggtgacgagaggcttggcacctccgcccccaccgccccgaggcagcggattgtcacatgcgccgaggtcccggaagacgcgctcgtctccttcctgcgggcaaacgctgacgtcttcgcatggagaccggcggatatgcccggggtccccagggaggtgattgagcaccgtctcgccgtgcggccgggcgcaaggccggtccggcagaaagtgcggcggcaggccccggaacgtcaagccttcatccgcgaggaggtggcaagacttctggaggccggattcatccgtgaagtcatccatccggagtggctggcgaacccggtggtcgttccaaaggcgaacggcaagcttcggatgtgcatcgactacaccgaccttaacaaggcatgtcctaaggacccttaccccctgcctcgcatagatcagattgtcgactccaccgcggggtgcgaccttttgtgttttctagatgcatactctggttaccatcagattcgcatggctagggaggatgagaaaaaaactgcgttcattacccccgtaggaacctattgttatacatcaatgcccttcgggttaaagaatgcaggtcctacttttcaacgtactactcgaatttctttgggtagccaaatagggcgtaatgttgaggcttatgtcgatgacttggttgtaaagacgcgcaaccaagagactttactcttagatctagcggaaacttttgaaaatctccgctccgcccgcataaaactgaaccccgataaatgcgtgtttggtgtacctgcgggcaagcttctcgggttcttggtctctgcccgaggcatcgaggccaaccccgagaagatacgagctatagagcggatgcgcccccccagcaaacttagggatgtgcaatgcgtcaccggttgcattgccgccctaagtcgtttcatatcgaggctgggagagaaggcgctacccttatttaagctcctcaagcgctcggggccgtttacttggacggaggaagctgaaagtgccctcactcagttgaagacatatctcagctctcccccagttctagtcgccccggggccaaatgagcccctactactctacttagcggcgaccccccaagtagttagtgcagcgttggttgtggagcgcgatgaagacaatcctcatttcgcgcacccccgccctgtgctgacttggcccgggagcgagcagggaggagaagcccccgagtcgaacggtggcctaaggcccctgacgaccggagtcggccctctgcccgcttgtcagacggtgcttgtcgcgaccgggaaaatttgccttttcccgaacgctagtgtattaatccccgtcccaggaagagccgggactgagccacaaactaagccttacccactagacatgtggaagtacggtagtgctttgcaacagaggcccgagcttaatccttatagtggccggggtgctacttcccacaactggcatgcacccaaaccccaccgaaaacagggtgaacaaggtaataataacaataacaataatagtatggtcataacaaaggacgtgacagtgctgggtgcccccgaccctcaggaaggccccgaggccactgcgggaaggccgcacctatcgccgtttggccccgaggctaaccctgtgctgactcgacccgggagaaagcagggagaagaggcccccgagccgaacggaggcctaaggcccctgacgaccagagttggccctttgcccgcttgtccgacgacgccaggagcccccgacccccaggacggccccgaggccactgtgggaaggccgctcctgtcatcctccgaccccgaggtcatcggcacagaagacgagtgcgccccgagaggccacttggacgaagaacgccccggggatgcggcccctagcgaagaggatcggccccgccgaaaggtgcagcggcctgtctactttgttagtgaggccctccgggacgccaagacccgataccctcaggcccagaagatgctttacgctattctgatggcctcgaggaaactgcgccattatttccaggcgcatcgggtcactgtggttacgtcttaccccctcggtcaaatcttgcataatcgagagggtacaggacgagtggtaaaatgggcaatcgagctttctgagttcgatctgcactttgaaccacgccacgctatcaagagccaggccctcgccgattttgtggcagagtggaccccggctccagagaccgtctcaatccccgatgccagcacggacccctctcagctgcctcacaccgcccactgggtgatgcagttcgacggttctctgtctctccagggcgccggtgcgggggtcacgttgacctctccgaacggagacgtcctcagatacttggtccgtctcgactttcgagcgactaataatatggcagagtacgagggactccttgccggactcagagtggcagctggactggggatccgccgcctcttggtgttaggcgactcccagctggtcgttaaccaggtctgtaaggagtaccggtgctctgacccacagatggacgcttacgtacgccaagtgcggcgtatggagcgccattttgacgggatagagcttcggcatgtacccagacgggataacatggttgccgacgaactctcacggctcgcgtcctcgcgagcccagaccccaccgggcgcctttgaagaaaggcttacccagccgtcggcgcgacccgaccccttaggggagacggatgcgcctgaccggcccccgaggcccgtcggagtccaggcctcgggacccgaagggagcgctccaagctcccttagattgattgcttggatctctgagatccaagcatacctcacagataagactctacctgaggaccgtgaagggagtgaacgcgtccaacgcatttccaaacgctacgtgctggtagaagggaccctctatcggcgcgcggctaatggaatcctcctgaagtgcattcctcaggaacaaggcgttgagcttcttgccgacatccatgaaggcgagtgcggagcccattccgcctcgcgcaccttggttggcaaggcctttcgtcaagggttctattggccgacagctctcaatgatgcagttgatctggtccggcgatgcagagcgtgtcagtttcacgccaagcaaatccatcagccggcccaggccctgcagatcataccactttcgtggccatttgctgtctgggggctcgatatcctgggaccgtttaagcgggccccgggcgggtttgagtatctgtatgtcgcgatcgacaagttcactaagtggcccgaggcttatccggtcgtcaagatcgataagcactctgcacttaaattcattaagggcatcacggcccgttttggagtgcctaaccgtattattacggataatggcacccaattcactagtgaactcttcggcgactactgcgaagacatgggcatcaagctctgcttcgcctcacctgcccaccccagaagcaatggccaagtggagcgcgccaatgcagaaatcctcaaaggccttaaaaccaagaccttcaatattctcaagaagcatggcgattcgtggatcgaggagttgccagcggtgctctgggcaaaccgaaccacaccaagccgagcaaccggggaaacgcctttcttcctcgtctacggcgcagaagcggttctcccatccgagctcaccctgaggtctcctcgggccaccatgtactgcgaaactgatcaagatcagcttcgcagagatgacctcgactacttggaagagcgaaggaggcgcgcggccctccgagccgcgcgctaccagcagagcctgcggcgctaccatcagcgccacgtccgggcccgatcactctgcgtcgacgacctcgtcttacgccgcgtccaaacgcgtgctggattgagcaagctctcaccaatgtgggagggtccgtatcgagtgatcggtgtcccccggccgggctccatacggctggccacgggcgacggcacggagctgcctaacccgtggaatatcgaacaccttcgtcgcttctacccctga

SEQ ID NO: 77041 - DNA, 516 bp, Oryza sativa
  Clone ID: PAT_MRT4530_76979C.1
atgcctctaggtggggatcgattaagaaccgtgatgcgacgacatgctatggtgcttgcctccggcagccacaacgctcatcatgcgacgacgagatgcgacgaaaaggatggagacaacagcctccactggagtgtgcatgtggcggccgagaaagtcgaggaggagccgcctccgctgctcaccgcccccaagccgcctacggagctcgagctcctccgccccgccactatcgtcctcttcacgcgccagtggaggccaagaagagcgccgtgccgcttcgcgccgccgccgtcgccaccgctccagccgtgcgccgccgtcgctccggtcgtcgtcactgctcggggaggtcaccgtcgtggtcgccaagctgccgccgtcctcgtccgccccttcgccgtcgctgtcaaccgccggaataccgccgccgtcgttaagccgaaggtgtcctccgtttgcgccgccgcgccgtcgatcgccggcgagcacgcgaagccgagccgtcgccggtga

SEQ ID NO: 77042 - DNA, 1086 bp, Oryza sativa
  Clone ID: PAT_MRT4530_7697C.1
aaatgattttataaaaagaaaaaccctaaaatccctccttctctctgatgggccgaattcggcccatctccctctctctcctctccccgcggaccattcggcctccctccccgcgggcgcgccgctgacgggcgggcccgcccgccaccctcgctgacgggtggggcccacccgtcatccctgacctcccgccgctcccgccgcctcgcccgtgccctagcgccgccgctgccgcgaatcccgccgcctcccgtcgtccccgcgtgcaataaagtggggggaaatattccccgtgatcccgtcttcctttccccccatttttccctctctctctcgcattcaaacggacggatttgcccccgcaaatctcgccggcgccattgatggcggccggacctcccgcgcctattccttcccctccggccgccctctcccccttccaaccctatataaaccctccccgtgcctcctccgtccgtttccgcctctcgccgcccttcctcctcgccggattcgagctcgcgacgtcgccctctctctccaccgttgccgccgagctccggtccgccgccgtcgccgccccggaccgtctcccgccccggcgtctcctcctccggcttcgccgcaccgccggcgaccccgtccaccccctcgccgagtccgccaaccgccggaacgccgaccctgtcgacccgagccgcgccggcgccttcctccgctccggccgcctttttcgtcgtcgccgtcgacctagggtgagccgtggaccgccgcctcttttcccccattccttcccctctctcggccgccgctccgccgtgcctatggccgccgccggtgaccatcggggcgcgggcgcgccgccacccgccggccgcgccgccgtggccgccttcgggcgcaccgagcggctgacgcgtggggcccacggcgccggccggtgcgagcccaggtgcgcccggtccaccgtggaccgtgaggctgccgcgtgggccccactcccgtggacccggtccgcgcgccccttattatttccttgttcaccctagaataaacaaaaccccaactagtggacactctactcat

SEQ ID NO: 77043 - DNA, 322 bp, Oryza sativa
  Clone ID: PAT_MRT4530_76980C.1
catgcgcaatgatgtcgagcttcagagtgtgcggcagtcgtcgccgcagatgatcaagcatccttggctcatcgccagcacgcaagtctggcaagccttaggcgagcagtcgacgactcactgcggcgcgcacgccggggcgacggtgtcggtgtactcacacgaatgggcgcatgactcgactacagctgtcagcaaaacatattcgccgtcgacgagccgacggcggaggaggagaggacaaccagcaccacgcaagccatggtggagacggggacggccgccgtatgagatcgaggctacgccggtggacatcttgtga

SEQ ID NO: 77044 - DNA, 5745 bp, Oryza sativa
  Clone ID: PAT_MRT4530_76981C.1
atgacggcacagcagcgcctgggtgctggtggacggtcctccaccaccaggacctccggcgccgctaccactggctccgtgtcgtcaaggcggagggcgcggcgagcggcggctgttgcacgccattcggctgctactccctcgtcggcgcctccgactcgggaggatcagcggggagagccggatgcccgcctcgacatcgagcgccggcgtaatgatcggcgtgctccccacgcgacggagggcgcctcttcgtccagagtgtcacctcgacatggacgcgaggaccagccctccgtgcccccggctggtggtgtcggctgtagagcctttgtggcgagtcttcggaatgtccgttggcccccaaggttcctgcccaccatcactgagaagtatgacgggagcgtcaaccccaccgagtttttccaggtctatacgactgggattgaggccgctgggggtgatgacagggtcatggcgaatttctttcccatggccctgaagggacaggcgcggggttggctaatgaacctgccacccgcatcggtccactcctgggaggatttgtgccaacagttcaccatgaactttcaaggcacatatccgcgcccaggcgaagaagcggacttgcacgcagtacagcgaggggatgatgagtcacttcgctcgtacattcagcggttttgccaagtccgcaacactataccatgcatccctgcacacgcggtgatctacgcgttcagggggggtgtgcggcacaaccgcatgctcgaaaagatcgcctctaaagagccccagactaccacggagctttttcagctcgcggaccgagtggctcgtaaggaggaagcgtggacctggaacccctccggttccggagtggcagcttcggccgcccccggatccgccgctcagacagggcagcgtgacaggaggaggaagaagaggtcggtccattccggcgacgagggtcatgtcctcgccgtcgagggcgctccgcgggccacccgaaaggggaggcctgcgagcgacaaaaagaaaaaggccggcgctcccagcagggagcgcccagccggcaagtggtgcaccgtccacaacacctccctccacgaccttgcggactgtcgcgccgtcaaaagcttggctgagcggacaagaaagtgggaggaggagaggaggcaggagcgccgggaaggcaagtccccggcggttccttccggcaatcggcgaagtgaggccaagcagaaggcccccgccgaggacatcgatgatggcgatgatgacctaggtttccaagaacctggggccaccattgccaccgtcgatgggggagcgtgtgctcacgtttctcgccggagcttcaaggctatgaagcgagagcttctggccgcggcccctactcatgaggcgacgcgtcgggcgcggtggtcggaggttaccctcacctttgaccagaccgaccacccaccgtgcattgcccggggagggcagattgcgatggtggtttcccccaccatttgcaacgtgaagttggggcgtgtcctcatagatggaggagcggccctcaacatcctttcccccgcggcctttgatgccatcaaggccccggggatggtgctccggccgtcccaaccgattatcggtgtgacgccggggcacacgtggccgttaggtcacatcgacctaccggtcaccttcggtggatccgccaacttccgcacggagcgggtgaacttcgatgtggcggacctcagtctgccctacaacgcggtcctggggaggcccgcgttggtgaagttcatggcggcggtccactacgcctacctacagatgaagatgccgggccccggtggccccatctctgtccatggcgacctcaaagtcgcgctcgtttgtctggagcagcgcgcggaccacctcgctactgcgtccaagcccgagggtggtgacgagaggcttggcacctccgcccccaccgccccgaggcagcggattgccacatgcgacgaggtcccggaagacgcgctcgtctccttcctgcgggcaaacgctgacgtcttcgcatggagaccggctgacatgcccggggtccccagggaggtgattgagcaccgtctcgccgtgcggccgggcgcaaggccggtccggcagaaagtgcggcggcaggccccggaacgtcaagccttcatccgcgaggaggtggcgagacttctggaggccggattcatccgtgaggtcatccatccggagtggctggcgaacccggtggtcgttcccaaggcgaacggcaagcttcggatgtgcatcgactacaccgaccttaacaaggcatgtcctaaggacccttaccccctgcctcgcatagatcagattgtcgactccactgcggggtgcgaccttttgtgttttctagatgcatactctggttaccatcagattcgcatggctagggaggatgaggaaaaaactgcgttcattacccccgtaggaacctattgttatacatcaatgccctttgggttaaagaatgcaggtcctacttttcaacgtactactcgaatttctttgggtagccaaataggacgtaatgttgaggcttatgtcgatgacttggttgtaaaaacgcgcaaccaagagactttactctcagatctagcggaaacttttgagagtctccgctccgcccgcataaaactaaaccccgataagtgcgtgttcggtgtacccgcgggcaagcttctcgggttcttggtatctgcccgaggcatcgaggctaaccccgagaagatacgagctatagagcggatgtgcccccccagtaaacttagggatgtgcaatgtgtcaccggttgcatggccgccctaagtcggttcatatcgaggctgggagagaaggcgctacccttatttaagctcctcaagcgctctgggccgtttacttggacggaggaagctgaacgtgccctcactcagttgaaggcatatctcagctctcctccggttctagtcgccccggagccaaatgagcccctgctactctacttagcagcgaccccccaagtagttagtgcagcgttggttgtggagcgcgatgaggacaaccctcattccgcgcacccccaccctgtgctgacttggcccgggagcaagcagggaggagaggcccccgagccgaacggtggcctaaggcccctgacgaccggagtcggccctctgcccgctcgtcagacggtgctgggcgcccccgaccctcaggaaggccccgaggccactgcgggaaggccgcacctatcgccctttgaccccgaggctaaccctgtgcggactcgacccgggagagagcagggagaagaggcccccgagccgaacggtggcctaacgcccctgacgaccggagttggcccttcgcccgcttgtccgacgacgccaggagcccccgacccccaggacggccccgaggccactgtgggaaggccgcccctgtcatcctccgaccccgaggtcatcggcacagaaaacgagtgcgccccgagaggccacttggacgaagagcgccccggggatacggcccctagcgaagaggatcggccccgccgaaaggtgcagcggcctgtctactttgttagcgaggccctccgggacgccaagacccgataccctcaggcccagaaaatgctttacgctgttctgatggcctcgaggaaactgcgccattattttcaagcgcatcgggttatggtggttacgtcttacccactcggccaaatcttgcataatcgagagggtacaggacgggtggtaaaatgggcaatcgaactttctgagttcgatttgcactttgaaccacgccacgctatcaagagccaggccctcgccgattttgtggcagagtggaccccggctccagagcctgtctcactccccgaggtcagctcggacccctcgcagccgccacacaccggccactgggtgatgcagtttgacggctccctgtctcttcaaggcaccggtgcgggggtcacgttgacctccccgaccggagacgtcctgagatacctggtccgcctcgactttcgagcgaccaataatatggcagagtacgagggactccttgccggactcagggtggcagccggactggggatccgccgcctcctggtgttaggcgactcccagctagtcgttaaccaagtctgtatggagtaccggtgctctgacccgcagatggacgcttacgtacgccaagtgcggcgtatggagcgccattttgacgggatagagcttcggcatgtgcccagacgggataacatgattgccgacgaactctcacggctcgcgtcctcgcgagcccagaccccaccgggcgcctttgaagaaaggcttacccagccgtcggcgcgacccgaccccctagggaagacggatgtgcctgaccggcccccgaggcccgtcggagcccaggcctcgggacccgaggggagcgcttctagctcccttagattgattgcttggatctctgagatccaagcatacctcacagataagactctacctgaggaccgcgaagggagtgaacgcgtccaacgcatttccaaacgctacgtgctggtagaagggatcctctatcggcgcgcggctaacggaatcctcctgaaatgcattcctcaggaacaaggcgttgagcttcttgccgatatccatgaaggcgagtgcggagcccattccgcctcgcgcaccttggttggcaaggcctttcgtcaaggattctattggccgacagctctcaatgacgcggtcgacctggtccggcgatgcagggcgtgtcagttccacgccaagcaaatccatcagccggcccaggccctgcagatcataccactttcatggccatttgctgtctgggggctcgatatcctgggaccgtttaggcgggccccgggcgggtttgagtacctgtatgtcgcgatcgacaagttcactaagtggcccgaggcttatccggtcatcaagatcgataagcactccgcacttaaattcattaagggcatcacggcccggtttggagtgcctaaccgtattattacggataacggcacccaattcactggtgaactcttcggcgactactgcgaagacatgggcatcaagctctgcttcgcctcacctgcccaccccagaagcaatggtcaagtggagcgcgccaatgcagaaatcctcagaggccttaaaaccaagaccttcaatatcctcaagaagcacggcgattcatggatcgaggagttgccagcggtgctctgggcgaaccgaaccacaccaagccgagcaaccggggaaacgcctttcttcctcgtctacggcgcagaagcggttctcccatctgagctcaccctgaggtctcctcgggccaccatgtactgcgaggctgatcaagatcagcttcgtagagatgacctcgactacttggaagagcgaaggcggcgcgcggccctccgagccgcgcgctaccagcagagcctgcggcgctaccatcagcgccaagtccgggcccgatcactctgcgtcgacgaccttgtcctacgccgcgtccaaacgcgtgctggattgagcaagctctcaccaatgtgggagggtccgtatcgagtgatcggtgtccctcggccgggttccgtgcggctggccacgggcgacggcactgagctgcctaacccgtggaacatcgaacaccttcgtcgcttctacccctga

SEQ ID NO: 77045 - DNA, 875 bp, Oryza sativa
  Clone ID: PAT_MRT4530_76982C.1
ttatttttgaaaagaaaaagggatttattgcgtcagtaggtcgggtttacggtggaccgggtgcacggcgacggttcacggaaacggacggccgagatctatccatccaaaacggacggctgagatcggccggtccacgaccggaccacggcggatggcaacgatgacgacggcgatgacgtcatcaccggcgacggctcggcttcgcgtgctcgccggcgatcgacggcgcggcggcgcaaacggaggacacctacgcgttgcggacgacacgacgaactcaccggtgaccaaaatagcgacggaggagaccttcggcttaacgacggcggcggtattccggcggttgacagcgacggcgaaggggcggacgaggacggcggcagcttggcgaccacgacggtgacctccccgagcagtgacgacgaccggagcgacggcggcgcacggctggagcggtggcgacggcggcggcgcgaagcggcacggcgctagagctctaccggcgacgagagactaaggcgagggtggcagcgggggctagggagcggcggcgaaggcccacggcgaccggcgacgggaaggaaagtttagggttcggaggagagagatcgatccgaattgaactcaaatccggcgatttccaaagcgatttagacgatgtttccaaaagggaaaaggtagagtggatcacggggatcctttcccctcaatcaattcgaccggagacagaaaggggcggtgggacccacatgtcagcggcggtcgcacgcgcgcgagcgggcgggcgctcggcttgggccgacttgggccgagcgagagagagagatctttgggcccaaagccaaaagagaattttaaaaacctttttccat

SEQ ID NO: 77046 - DNA, 6084 bp, Oryza sativa
  Clone ID: PAT_MRT4530_76983C.1
atggccgagcaagcaaaggtgcacgacctctctccgagtgtgagcggcgacgacggggagccaaacccacgccgtcgagctcgtactcccccacctcctccacaccaaaatcctaagcagggggaggcgctcgagagggtcgaaaaatccgcagcatcgccagtcgcgggtgatgcaggagaacggcgagatggggagcgtcgcctcctcgtctacggcgacggcagcacgcctcagggcgcgcttcaggctgttggcgcgctcctacgtcacccgcccgtcgtccctgacccggagtctccagcccagcgatggctggacgacgtggccaacttggtcatgacggcacagcagcgcctgggtgctggtggacggtccgccaccaccaagacctccggcgccgccactaccggctccgtgtcatcaaggcggagggcgcggcgagcggcggctgttgcacgccattcggctgccactccctcgtcggcacctccgactcgggaggatcagcatggagagccggatgcccgcctcgacatcgagcgccggcgtaatagccggcgtactccccgcgcaacggagggcgcctcttcgtccagagtgtcacctcgacatggacgtgaggaccagccctccgtgcccccggctggtggtgtcggctgtagagcctttgtggcgagtcttcggaatgtccgttggcccccaaggttccggcccaccatcaccgagaagtatgatgggagtgtcaaccccaccgagtttctccaggtctatacgaccgggattgaggccgctgggggtgacgacagagtcatggcgaatttctttcccatggccctgaagggacaggcgcggggttggctaatgaacctgccacctgcgtcggtccactcttgggaggatttatgccaacagttcactatgaactttcaaggcacttatccgcgcccaggcgaagaagcggacttgcacgcggtacagcgaggggatgatgagtcacttcgctcgtacattcagcggttttgccaagtccgcaataccataccatgcatccctgcacacgcggtgatctacgcgttcagggggggtgtgcggcacaaccgcatgctcgaaaagatcgcttccaaagagccccagactaccgcggagctttttcagctcgcagaccgagtggctcgtaaggaggaagcatggacctggaacccctccggttccggagtggcagcttcggccgcccccggatccgccgctcagacagggcggcgtgacaggaggaggaagaagaggtcggtccattccggcgacgagggtcatgtcctcgccgtcgagggcgctccgcgggccacccgaaaggggaggcctgcgagcgacaaaaagaaagaggctggtactcccaccagggagcgcccagccggcaagtggtgctccgtccacaacacctccctccacgatctcgcggactgtcgcgcggtcaaaaacttggctgagcgaacgaggaagtgggaggaggacaggaggaaggaacgccgtgagggcaagtcgccggcaactccctccggtaaacggcgaagtgaggccaaacagaaggcccccgctgttgacatcgatgacggtgatgatgacctaggtttccaagaacctggggccaccattgccactgtcgatgggggagcgtgtgctcacgtctctcgccggagcctcaaggccatgaagcgagagcttctggccgcggcccctactcatgaggcgacgcgccgggcgcggtggtcggaggttgccctcactttcgaccagaccgaccacccaccgtgcgtcgcccggggagggcagattgcgatggtggtttcccccaccatctgcaacgtgaagttggggcgtgtcctcatagatgggggagcggccctcaacatcatttcccccgcggcttttgatgccatcaaggccccggggatggtgctccagccgtcccaaccgattatcggtgtgacgccggggcacacatggccgttgggtcacatcgacctaccggtcacctttggtggatcagccaacttccgcacggagcgggtgaacttcgatgtggcggacctcagtctgccctacaacgcggtcctggggaggcccgcgttggtgaagttcatggcggcggtccactacgcctacctccagatgaagatgccgggccccggtggccccatctctgtccatggcgacctgaaagtcgcgctcgcttgcatggagcagcgcgcggaccacctcgctgctgcgtccaagcccgagggtggtgacgagaggcttggcacctccgcccccaccgccccgaggcagcggattgtcacatgcgccgaggtcccggaagacgcgctcgtctccttcctgcgggcaaacgctgacgtcttcgcatggagaccggcggatatgcccggggtccccagggaggtgattgagcaccgtctcgccgtgcggccgggcgcaaggccggtccggcagaaagtgcggcggcaggccccggaacgtcaagccttcatccgcgaggaggtggcaagacttctggaggccggattcatccgtgaagtcatccatccggagtggctggcgaacccggtggtcgttccaaaggcgaacggcaagcttcggatgtgcatcgactacaccgaccttaacaaggcatgtcctaaggacccttaccccctgcctcgcatagatcagattgtcgactccaccgcggggtgcgaccttttgtgttttctagatgcatactctggttaccatcagattcgcatggctagggaggatgaggaaaaaactgcgttcattacccccgtaggaacctattgttatacatcaatgcccttcgggttaaagaatgcaggtcctacttttcaacgtactactcgaatttctttgggtagccaaatagggcgtaatgttgaggcttatgtcgatgacttggttgtaaagacgcgcaaccaagagactttactctcagatctagcggaaacttttgaaaatctccgctccgcccgcataaaactgaaccccgataagtgcgtgtttggtgtacctgcgggcaagcttctcgggttcttggtctctgcccgaggcatcgaggccaaccccgagaagatacgagctatagagcggatgcgcccccccagcaaacttagggatgtgcaatgcgtcaccggttgcattgccgccctaagtcgtttcatatcgaggctgggagagaaggcgctacccttatttaagctcctcaagcgctcggggccgtttacttggacggaggaagctgaacgtgccctcactcagttgaagacatatctcagctctcccccagttctagtcgccccggggccaaatgagcccctactactctacttagcggcgaccccccaagtagttagtgcagcgttggttgtggagcgcgatgaagacaatcctcatttcgcgcacccccgccctgtgctgacttggcccgggagcgagcagggaggagaagcccccgagtcgaacggtggcctaaggcccctgacgaccggagtcggccctctgcccgcttgtcagacggtgctgggtgcccccgaccctcaggaaggccccgaggccactgcgggaaggccgcacctatcgccctttggccccgaggctaaccctgtgctgactcgacccgggagaaagcagggagaagaggcccccgagccgaacggaggcctgaggcccctgacgaccggagtaggccctttgcccgcttgtccgacgacgccaggagcccccgacccccaggacggccccgaggccactgtgggaaggccgctcctgtcatcctccgaccccgaggtcatcggcacagaagacgagtgcgccccgagaggccacttggacgaagaacgccccggggatgcggcccctagcgaagaggatcggccccgccgaaaggtgcagcggcctgtctactttgttagtgaggccctccgggacgccaagacccgataccctcaggcccagaagatgctttacgctattctgatggcctcgaggaaactgcgccattatttccaggcgcatcgggtcactgtggttacgtcttaccccctcggtcaaatcttgcataatcgagagggtacaggacgagtggtaaaatgggcaatcgagctttctgagttcgatctgcactttgaaccacgccacgctatcaagagccaggccctcgccgattttgtggcagagtggaccccggctccagagaccgtctcaatccccgaggccagcacggacccctctcagctgcctcacaccgcccactgggtgatgcagttcgacggttctctgtctctccagggcgccggtgcgggggtcatgttgacctctccgaacggagacgtcctcagatacttggtccgtctcgactttcgagcgactaataatatggcagagtacgagggactccttgccggactcagagtggcagctggactggggatccgccgcctcttggtgttaggcgactcccagctggtcgttaaccaggtctgtaaggagtaccggtgctctgacccacagatggacgcttacgtacgccaagtgcggcgtatggagcgccattttgacgggatagagcttcggcatgtacccagacgggataacatggttgccgacgaactctcacggctcgcgtcctcgcgagcccagaccccaccgggcgcctttgaagaaaggcttacccagccgtcggcgcgacccgaccccttaggggagacggatgcgcctgaccggcccccgaggcccgtcggagtccaggcctcgggacccgaagggagcgctccaagctcccttagattgattgcttggatctctgagatccaagcatacctcacagataagactctacctgaggaccgtgaagggagtgaacgcgtccaacgcatttccaaacgctacgtgctggtagaagggaccctctatcggcgcgcggctaatggaatcctcctgaagtgcattcctcaggaacaaggcgttgagcttcttgccgacatccatgaaggcgagtgcggagcccattccgcctcgcgcaccttggttggcaaggcctttcgtcaagggttctattggccgacagctctcaatgatgcagttgatctggtccggcgatgcagagcgtgtcagtttcacgccaagcaaatccatcagccggcccaggccctgcagatcataccactttcgtggccatttgctgtctgggggctcgatatcctgggaccgtttaagcgggccccgggcgggtttgagtatctgtatgtcgcgatcgacaagttcactaagtggcccgaggcttatccggtcgtcaagatcgataagcactctgcacttaaattcattaagggcatcacggcccgttttggagtgcctaaccgtattattacggataatggcacccaattcactagtgaactcttcggcgactactgcgaagacatgggcatcaagctctgcttcgcctcacctgcccaccccagaagcaatggccaagtggagcgcgccaatgcagaaatcctcaaaggccttaaaaccaagaccttcaatattctcaagaagcatggcgattcgtggatcgaggagttgccagcggtgctctgggcaaaccgaaccacaccaagccgagcaaccggggaaacgcctttcttcctcgtctacggcgcagaagcggttctcccatccgagctcaccctgaggtctcctcgggccaccatgtactgcgaagctgatcaagatcagcttcgcagagatgacctcgactacttggaagagcgaaggaggcgcgcggccctccgagccgcgcgctaccagcagagcctgcggcgctaccatcagcgccacgtccgggcccgatcactctgcgtcgacgacctcgtcttacgccgcgtccaaacgcgtgctggattgagcaagctctcaccaatgtgggagggtccgtatcgagtgatcggtgtcccccggccgggctccatacggctggccacgggcgacggcacggagctgcctaacccgtggaatatcgaacaccttcgtcgcttctacccctga

SEQ ID NO: 77047 - DNA, 196 bp, Oryza sativa
  Clone ID: PAT_MRT4530_76984C.1
tctcgatctataactagacccaactctttggctagtcacattagttattaacagagagcttctgatgcccacctagtgggtttaccaccttctcctatacagagcaaaattaaaacttggcatggtcatagacataattgcaagctgtaagacagtctgattcaatcacaataacgcacatgataccagcgctact

SEQ ID NO: 77048 - DNA, 237 bp, Oryza sativa
  Clone ID: PAT_MRT4530_76985C.1
gccgggtcggcggcggctagcgcgggcgccgggaagatgacggcgccggcgccgggggtgtagaaggaggcgatggacatgcggttgaccgccgggcgcgtgaggacgcggcgcatgacgctcttgtaacctgccgttggcagagcaccgtgcagctgggtccccgatgctctggcgaccaatggccggggcggcattgggcggacaccgtgcacgccactgccccgtcccttgaga

SEQ ID NO: 77049 - DNA, 227 bp, Oryza sativa
  Clone ID: PAT_MRT4530_76986C.1
actggcgtgcccacatcggtgagcatttccacacccgtgccggtggtgattctggtactggaattggtgacccgtgtatgagtgtagtgtatcaggagaccccaaaaaaagtgcatagcatgcatcgtggtggtggacaccagtgtggaaaccatgtcggggtgggataccaatgtctggaatgaaaaataggtgcatagcacatttaaaaaaaaaaaaaaaaaaaa

SEQ ID NO: 77050 - DNA, 3207 bp, Oryza sativa
  Clone ID: PAT_MRT4530_76987C.1
atggctgagatttgcttagaaaaactaaaggagaaattacttcccaattacctgcccctaccaaggctagcgatccatgacacggtggcccgagcagaggcccaagtcaggacacgggtgggcaaaaagcttccaaagcccaacaagcagagcgttcgattggacccgcctcggcctgtaggcatactcaggcccatcgaagccgatggatttatgcctaatccgtatatagggaaaatccagatttggaaccaggaaaacataattttgggtcaatgtggaaaaacacgagttggtgcaaatgtttcctcttttgtgggtgcaaacagagatagatgcaaggaacggggggcatatgctccaatgtcaactggttttgcggcacaagccaagttggatcagttggagccatcatgtgcaaatgctattgttcagtacgccaacatatcaaagccaagttggatcagttggtatgcattttcagcccgggatgaggcaatacaagccttgattaatgaggcgaagtcatactacatgaggttccccccaatacaacacctccagcagctacccttactgcagtcaccttcaacgcggtatgattatgaatccccatcgctctatttggagcctcagtttcagtctttgaacattccaggtgatggcttgccaagggattatctaaatgcacaagttaatgttctcgggtctgatgtccatgagatgcacaatcagaggcaatctcatcctcgtggccgacatagggatttctttggtgaaggttccgattttacgatttatattaccatcaactttgatggcggcagattaactaaggaaaatatttgggactacttcaagaagttcgggcctgtgatcaatgtctaccttagctgtaagccagggaatgaaaagtacactttcggttttgtgacatttgaaaatgctgatacggtgagccttctcttatcaaagagcacacctcatttcatctttggagtaaaagttagagtcaagcgttacctggaatggaccaaacaagagcaaaggaagcttcctcaagaaaacgaccattttgacaatgttgcacacaggacatcatgtgccaatgccttcgatggcatgccaagggattacctaaatgcacaagttctcgggtctggtgtccctgagttgcacaatcagaggctatctcatcctcgtggctcacagagggatttctttggtcacaatcagaggcaatcccatcctcatggctcacagagggatttcttcggtcaaagtaccgagtttacgatttatattaccatcgctaagaacatattgacttggaaaaatattcgggactacttcaagcagcttcctcagagaaacgaccgttttgacaatgttgcacacaggacatcatgtgacaatgccattgagggtcactctggacaaaaaatgccgaatttcattgaactttcccaggagacactgacacatcaatttggagattttgattcacctctaacacataacctctctgagaagaaaacagaatctccagaagatgatcatgcgacaaaagagtctaatgtggatgaatcttcagaattctcagctatattaaacagtcttatttcaacctgtcctggatcaaagtacttttcaattgagtttcatcatggggggtttttctgtggtatgggagtgaaccgcacatatatggatggcaaagtagactggtttgacaatattgattctcgagattggggtagatgtctacatttagcagactttgttgccatgcttggatatgactctgatggaaagttgaaaacttattggttattgcctggaaagaacatgtctgatggattgaggatcatagacagtgaagttgagatcaatgtcatgaaatcagtgtcaaataaaatcaagaattttgtcatctattttgatcatactaatcatgtctcaggaagaaatatagatgacattgttctgagcccagaagctgagttgccagaggtgttcaaccctagtagacagtgccagcagacagaggaggcagaaagcgaggatagaaaccctaggaatgcacctgatggacatgtagtgcatgaagaattggatgttgatgacagtgagtctgattctgattttgttgatagtgattatgagtgggaggatgatgatgatgacctctttgaggaaaatgtggatggtgatgtggaagagggggataggaagaaattcaaccataagaaggctgcaggtagtgtgttgaagggcaagaaagttgtggcagatttgtcagaaggtgacacaagtgatgatgaacaactgcacttgccaagtgatgatgatgatgatgagttcaacttgaagtttaagtcttttaatcctgaagacattaacaacccaatcttcaaagtaggcatggtattctcttcagttgaattagttagaaaggctatctctgaatatagcatgaagaacagggtggacataaagatgcccaggaatgatagaactaggatcaaggcacattgtgcagaaggatgcccctggaacttttatgcttcaatggacagcagggcaaaggccttcattgttaagacatatgagccccatcacaaatgcaagaaggagtggattctaaaaaggtgtactgcaaaatggttagctgaaaagtacactgagtcatttagggctgatgggaagatgaccattcctagctttgcaaagacagtacaaaaagagtggaacttgactccttcaagaagcaagcttgcaagagctaggaggctggccctaaaagagatatatggtgatgaaatagcccaatacaacttgttgtgggattatggcaatgaactaaggaggtccaatcctgggagttctttctatcttaggttagatgagggcaaatttagtagcttgtacttctcactagatgtatgcaagagaggattcctcagtggttgcaggccaatcatttgtctggatggttgccacatcaagaccaaatttggaggtcaattgttgacagcagttggaattgatcccaatgactgcatataccccattgcaatggctgtggtagaagttgagtctttcagcacatggacatggtttcttgataccttgaagactgaacttgggatagtgaacacctctccatggaccattatgacagacaaacaaaaggtaaccatttga

SEQ ID NO: 77051 - DNA, 441 bp, Oryza sativa
  unsure (1)..(441): unsure at all n locations
  Clone ID: PAT_MRT4530_76988C.1
ttgagccgcacncancctccacnaccagtgcgccgggacntcccgtgcatgacaggtgatagctagcngcatgnattgacaggggagtatctgtattantgtatatgtattgagnaaacacatangcacccgatcncctgcctgcctgccntntcgcggctgaggaaaccctggtagttagccgtcgcctggcagatgtactggacgagtgcatcgaccggtcgtttgtccgatgtggtgtatcacacancacgnctctagtagctatggatatctctctccgtcgcaagtcctgatgatatatcgctcgtaacnagcggaatacacgcaactttaaagacctttgctgtgcgatctactgtgttatatataggtacccttccccactgattgatcaacggtcnccatctccatcgacatctatcaatcgacccagggggg

SEQ ID NO: 77052 - DNA, 210 bp, Oryza sativa
  Clone ID: PAT_MRT4530_76989C.1
atggagcggggcaggccctgcgacggcctctgtcgcttccggattcacctaggcacgagaggggactgcccactgccttgcgcggagtggggcaaccacatagtggacgatgtccgtgagatgccgatcgtcgaaggcaccggcgcctttcgctttgctcgaggatatgtgcaggcacacacctatgtaggatcaaatcacaagaactaa

SEQ ID NO: 77053 - DNA, 476 bp, Oryza sativa
  Clone ID: PAT_MRT4530_7698C.1
agcttgcttcagctgccaggctcgccccctggagggctcaatgcacatatgaaccctatcagtgctgatggtagatatcttatgaggacttgcttaacacatctacggatacatgacagaagggtatctccatccgtcattatgcccagctttacacgaggccgcgaacctcattggcttggcacggaatatacacacactgcgaagatttctgtgggcgcaaggacaatagtatgtaaaggttctgcaccgtgcttgtctacattggcaaactccgcggacagaagcctaacataggagcacgatgcgttgaggttgagcgtctgacgaagactgggttgcatatccctatggggcttatcatgatgtatgtgaatggactaacgatgaagctaacaccagggacaatagcatgctattggaggccctgtgggagacgacaaaactactatggcaactttaattaaacagctgta

SEQ ID NO: 77054 - DNA, 470 bp, Oryza sativa
  unsure (1)..(470): unsure at all n locations
  Clone ID: PAT_MRT4530_76990C.1
ccaccccggcataaccgcctcgacccacgccgccgatttgtttacatagaactcctcccgncaagctgccgtcgtttatttaaaacaagccgcgctttaaacaccatcccgaaggacgagggtgaccgacaagcggctcttccatcaacaagtttgaaggatatgacaactagtagcacagagaatacaccactttcccctgacaagaaagctgaagctgtcttactatcagcagagaagcagctcaagtcagatcgcaaaaagagtctaatggcttgagaacaaagagaagaagttcaaagatttactcgcaacctgggaacctccgtcaatggaaacggatgatattgatctcctgggaccagatattggctgcaagatagtacgatgaaaccctaatgcttgcattgccaactgcagaaaaaactgtcgacccacttactcactaatgaccacagccagttctcatt

SEQ ID NO: 77055 - DNA, 4797 bp, Oryza sativa
  Clone ID: PAT_MRT4530_76991C.1
atgacattactaacccggatcatccagcccgtggggatcagccacgtcgggagacctccaagctttcatgacaaggcatttcgaaagccgacacagatttaccatatgccgacgagaggggtcccagaccaacaacaggctcaagatgttcaagggtggcttgccttgctcgagatctggagcttgatcctcgaaatcctcgcactgcgggtcttcgggctctgaaaccaggggaacttgctcttctggaattcgaagacatttctttaactgggatacgtggaacacgttgtgcacatctgcgagaccttcaggtagctcaagctgataagccacttcgccacgtctggcggttatgaggtaggggccgatgtagcggggtgctaacttgccggacatcccaaaccttctcataccatggaggggtgatactcgcaggtatacatgatctcctttttcgaactcaaggtcacgtctccgattgtcagcgtaattcttttggcggttctgcgctgtcttcaaacgttctcggatcagcttaacttgttcttctgctgacttgagtatgtcaggaccgaatactagcgcttcgcccacctcattccagcacaagggagtgcggcactttcttccgaacattgcctcattcggcgacatctgaatgctggcctgatagctgttgttgtatgagaactcggcatacggcaaacaacgatcccaagtgccttcgaaatccagggcacacgcacgtagcatgtcttctaggatttggtttaccctttcggtctgaccatcggtctgcggatggtaggctgtactaaaatttagatcagttccgagagcttcatgcaactgcttccagaaccttgaggtgaactgagtgcctcggtctgacacgatcttcttgggacagccaaatctacatacgacatgggtcatgtagagttctgctagtttctttccatcataggtggttttcactagcacgaaatgagctgatttcgtgaggcgatccacgattacccaaatggagtcgtacccgctaggggttcttggcaaaccggtgatgaaatccattccgatctcttcccatttccactcgggaatcggtaggggttgcagcagaccagctggcctctgatgctctgccttgactctttggcaaatgtcacacaaggctacgtattctgcgacatctcgcttcattccagcccaccagaagtatgccttgatatcttggtacatcttcgtacttcctggatgaatggagtaggcggactcatgagcttcttttaggatgagatctcttaactccttcttggccggtacatagatgcgtggaccgcaccaaactgtgccttgatcgtctatggaaaaattggtgtctttcttctcctgtattctttttattaactcttttatcccttcgtcgtctttctgtgcctcccggatttgcgactctagggtaggctgtactgtcaagctggcagggacacctgactgtaccatggtcagccttaacttctccaattctctgcacaggtgatcttggtcgggccgtatttgagctacgttgcaataggccttgcgacttagcgcatcagcgaccacgttggctttaccaggatgatagtggattccaaggtcgtaatccttgattagttccaaccatcttctctgtctcatatttaactcggtctgtgtgaagatatacttaagacttttgtgatcggtgtatacttcacatctgttcccgattaaatagtgcctccagatcttaagagcatgaaccacggctgccaactcgagatcatgggtgggataattgacttcatgaggcctgagctgcctggatgcataggccacaacctttcgttcttgcattaggacacatcctaagccttgtcttgatgcgtcacagaagatctcgaaatcttttcggatatctggcaaggtaagaactggggcagtggtcaaccttttcttcatttcttgaaagctgtcttcacaggctgcagaccattgaaatttcttttccttctttaacagctcagtcataggtctggctagcttagagaatcctttaatgaatcttcgataatatcccgctaagccaaggaagctgcgaatctctgacacattcttggggtatatcaggatgtcatcgatgaacaccacgacaaatgtgaactcgtatagaccataacgcgttgagaaagcggtcttcggaatatcttcagatctgattttcagttggtggtaacctgacctcaagtcaatttttgagaaaactcttgctcctttgagttgatcgaataaatcgtcaatccgtggcaacgggtacttgttctttatagttacttcattcagggctctatagtcgattaccattctctcagagccatcctttttcttaaccagaagcactggggctccccaaggggatgagctaggtcgcacataacctttactctccaattcttcgatttgtcttttaacttctgctaactcattagctgccattcggtagggtctctttgcaattggggcagtgcctagtgccagttctatggcgaactcgatctctcggtctggtggcattcttgttaattcttccggaaatacgtcggggtatgcacagactatgggcaccgactccaaggaggtgacttgtaaacaggttagaatagaccggcttgcggtaggggtgttaggggtaaagcggatttgctttcctccaggtcccatcacaacgtctggagcatcctgagcggtttcagcttgaatgtgattcacacggcctcgaccaaagttgttggaagcacgtgaaccttgtccacttgcctgagagctaggacgagactgagctgccgctggagtaggagttctggcagtgctgccattagcatgtcctgagttggtgttggtaggattctgaggacactgtctagcatagtgacccatctggttgcaccggaaacactgaactgctgacggtccctgtggtgacttgaaagaggtaacactgtttggcgcagtgttgccactaggggcacgctgctgtggcggaggtgccggacggttcatctgagggcgaggggcgtagcctggctggcggttagcctgagtgaccgactggtggtattgcatgggttgaccgtagcgagggcgaggtgcgcctcgggaagaatttccctgatggttagacttgcgtttcttgtattcttcggtagcctcttttctggcatcctcaagtagaagtgccttgttgatcatatgttgaaaagtggggaagtcatgcgcaagcaactggagtctcattccaactgcgatccctttcaagaatttcctaatcttcttcttgtctgtgtccacttcctcaggggcgtaccgagccaacttattgaactgacttaggtactcattgacactgctgttgccttgcttaagtctgttgaattcttctttcttcatgtcaatagtgctttcaggcacatgagctgcacggaaagccgtagcaaactcatcccaagcaatgttagtgggttcaaggtgtgcattgcagtaattctcccaccaatctgcggcaggtcctcttaactggtgagaggcgtagagcgtcttctcaaccggagtacactgcactaagttgagttttctatcaacatctttcaaccaatcgtcagcctcgacgggctcgacggtctgagagaactctggcggacgagacctcagaaagtctgtcagcttggatctgttgttgcccatgtgagggtggccatttccatgcgcattatgctgaaaactggctatggctgtggttagtccttgcaagatttgtgtctgaactgccattaagtgttgcatgttgttttccacatgaggtggggaagggaggcgttcttctccagaattgtgactggcagtgtggtgagagcggtgagactgttccatctctgcatcacgggaaactgtgcgatgcgagcggctgctgcggcggggttgctcaacctctgcgttgcgggaaacagtacggtgcgaacggttgctgtggtgagactgctcattagctgattcatgatttgcttctggttcgactctaccatcttcaaaaccaaagcgggctggcgcacgagctgtacggcgggggcggctagccatcgctagcggtgggggagctgggtagtggaaacggaacacggtggaagaaccaacaacacgcttccgcgcagtgcggataaagcgtgggccacggcgggaggaagcaactggggtgtgtccgggggtgtaggaagggctaactgggtgtgggtagggggagtacactggtgagtacggcgcacgcgagctgggggagcgcgggccactgggagtgcgggcagagccgcgggagctgtgggaggacaggtggctggcgtggcagaggcggcctgagtcccaagagatagtgtcaactgaggtgacaccctcctcggccagacaggcctccaaggcggcgtagcggcgggcaagggagcggtaagcctcaaggagtaggtcgtgctgagtggcctgagcctccgaaagctcaaccatgcgagtcagcactggctgagactcgctgtacggacaagggtacctggcgtctccacgggggtaaaggtacacagagagctcacagtgagggggaacacggtccacggagtaccccgtgtactcgggacacgagaagccaaggaaacgggcgaggtcacgaagctgagcgacgtggtgaccctcaccaaaaccgtgggaactgaagctggcgttcactgccat

SEQ ID NO: 77056 - DNA, 922 bp, Oryza sativa
  Clone ID: PAT_MRT4530_76992C.1
cgcgcgcccccgccccccgccgactcaggcaccaccatctcgcatcatttgttggggctccctggaaagagcggcatctcgccctgcgttgcgagatccccgtgaaaccgtcgcggccgggcggtggtaatcgtggcaaggacggatgcagcacaaatggaaggtcgtggagggcggcgccggtgccggtgccggcggcggcgggggagatcagcgccggcggtgcgtgacggcgtcgttgtccatgctgatcgcggccaccctggcgtttcttgcctacgtcgccttcttcccgtatgacggcgcgggcgggctgtaccggtggtggagatgcgagggttgcggcgacgcggcgggcgggttcgccttcgacgaggcgggcatggcgcaaggacctcacggctggtggcgcccgccgccgctcgccgacgacgctgtcgcacatcgtgttcggcgtcggcgcctcggcgcggacgtgggacaagcggcgcgggtacgcggagctgtggtggcgccccggggagatgcgcggccacgtctggctcgacgagcagccggtggggccctggccggcggcgacgtgcccgccgtaccgcgtctcggcggacgcgtcccggttcggggaccgggcgtcggcgtcccggatggccaggatcgtggccggactcgttcttagccgtcacggcggagatggcgaacggcaccaccgattctcccgaggcgcggtggttcgtgatgggtgacgacgacacggtgttcttcccggacaacctggtggccgtgctgaacaagtacgaccacgaggagatgtactacgtcggggcgccgtcggagagcgtggagcaggacgtgatgcactcgtacggcatggcgttcggcggcggcgggttcgccgtcagctacccggccgccgccgagctcg

SEQ ID NO: 77057 - DNA, 4638 bp, Oryza sativa
  Clone ID: PAT_MRT4530_76993C.1
atggcagtgaacgccagcttcagttcccacggtttcggtgagggtcaccacgtcgctcagcttcgtgacctcgcccgtttccttggcttctcgtgtcccgagtacacggggtactccgtggaccgtgttccccctcactgtgagctctctgtgtacctttaccctcgtggaggtatacacggagctggccttcgcccacaccacttcaccgtggccaggcccactctccagatcgcgtaccaggacctctcctggactgcgcttcgtcgcttggcccacgactacagccaccgtctcggaggctccgccttccggcagcttccacgccttccttctggccacgcagacgccaggtacccttgtccgtacagcgagtctcagccagtgctgactcgcatggttgagctttcggaggctcaggccactcagcacgacctactccttgaggcttaccgctcccttgcccgtcgctacgccgctttggaggcccgtctggccgaggagggtgtcacctcagttgacactatctcttgggactcaggtcgcctctgccgcgccagccacctgtcctcccacagctccagcggctctgcccgcactcccagtggcccgcgctcccccagctcgcgtgcgccgtactcaccagtgtactccccctacccacacccagttagcccctcctacacccccggacacaccccagttgcttcctcccgccgtggcccacgctttatccgcactgcgcggaagcgtgttgttggttcttccaccgtgttccgtttccactacccagctcccccaccgccagcgccccgtgctgctgccggccctcgacagctaagaggacctgctgtagattggtgggagaattactgcaatgcacaccctgaacccactaacattgcttgggatgagtttgctacggctttccgtgcagctcatgtgcctgaaagcaccattgacatgaagaaagaggaattcaacagacttaagcaaggcaacagcaatgtcaatgagtacctaagtatgttcaacaagttggctcggtacgctccggaagaagtggacacagacaaaaagaagatcaggaagttcttgaagggaatcgcagtcggaatgagactccagttgcttgctcctgacttccccacctttcaacatatgatcaacaaggcacttctacttgaggatgccagaaaagaggctaccaaagaatacaagaaacgcaagtctaaccatcagggaaattcttcccgaggcgcacctcgccctcgctacggtcaacccatgcaataccaccagtcggtcactcaggctaaccgccagccaggctacacccctcgtcctcagatgaaccgtccggcacctcagccacagcagcgtgcccctagtggcaatcctgcgccaaacagtgttacctctttcaagtcaccgcagggaccgtcagcagttcagtgtttccggtgcaaccagatgggtcactatgccagacagtgcccccagaatcctatcaacaccaactcagggcatgctaatggcagcactgccaggacttctactccagcggcagctcagtctcgtcctagctctcaggcaagtggacaaggttcacgtgcttccaacaactttggtcgaggtcgggtgaaccacattcaagctgaaaccgctcaggatgctccagacgttgtgatgggtatgttctttgtcaactccatacccacaatagttctgtttgattcgggagcttcccattccttcatatcacaagcttttgtaaaaagaaatggttggaaaacccaaaatttgcgtgtgccaatgatagtacattcccctggaaggaatataagggcaactcaaatatgcccggaagttaaccttagaattgaggaggttgacttcctagccaaaccaatagtcctagactcgcaaagcttggacatcatcctagggatggattggttggctaagcacaaaggacagatagattgtgccgaaaaatccatcaccttgcaaggacctggaggaaagcaagtccgctttacctctaacacccctaccgcaagtcggtctattctaacctgcttacaagtcaccaccttggagtcggtgcctatagtctgtgaatatcccgacgtatttccggaagaattaacgggtatgccaccagacagagaggttgagtttgccatagaactggcgccaggcaccgcaccaatcgcaaaaagaccctaccgaatggcagctaatgagttagcagaagttaaaagacaaaccgaagaattggagagtaagggttattttgtcgtggtgttcatcgacaacatcctgatatactccaagaatgaggaagaacatgctgaacacctgaggatgataattgaaaagctcagggatcatcaactatacgctaaattcttgaaatgcgaattctggttagatcgagtagcatttcttggacacgtgatctcctccaacggtgtcgaagtagatcccagcaaggttgaagctgtacttgcttggaacccgcccaagaatgtgtcagaaattcgcagcttccttggcttagctggatattatcgaagattcattgaaggattctctaagctagccagacctatgaccgagctgttaaagaaggaaaagaaatttcaatggactgcagcctgtgaagacagctttcaagaaatgaagaaaaggttgaccactgccccagttctcaccttgccagatatccaaaaagatttcgaaatcttctgtgatgcatcaagacaaggcttaggatgtgtcctaatgcaagaacgaaaggttgtggcctacgcatccaggcagctcaggcctcatgaagtcaattatcccacccatgatctcgagttggcagctgtggttcatgctcttaagatctggagacactatttaatcgggaacagatgtgaagtatacaccgatcacaaaagtcttaagtacatctttactcagaccgagttaaatatgaggcagagaagatggttggaactaatcaaggattacgatcttggaattcattaccaccccggtaaagctaacgtggtcgctgatgcgctaagtcgcaaggcctattgcaatatagctcaaatacggcctgaccaagatcgcctgtgcagagaaatggagaagttgaggctgaccgtggtacagtcaggtgtccctgccagcttgacagtacagcctaccctagagtcgcaaatccgggaagctcagaaagatgacgaagggataagagagttaataaaaagaatacaggagaagaaagacaccaatttctccatagacgatcaaggcacagtttggtgcggtccccgcatctgtgtaccggccaagaaggagttaagagatctcatcctaaaggaagctcatgagtccgcctactccattcatctaggaagtacgaagatgtaccaagatatcaaggcatacttctggtgggctggaatgaagcgagatgtcgcagaatacgtagccttgtgcgacatttgccaaagagtcaaggcagaacatcagaggccagctggtctgctgcaacccctaccgattcccgagtggaaatgggaagagatcggaatggattttatcaccggtttgccaagaacccctagcgggtacgactccatctgggtaatcgtggaccgactcacgaaatcagctcatttcgtgccagtgaaaaccacctttgatgggaagaaactagtagaactctacatgacccatgtcgtatgtagatttggctgtcccaagaagattgtatcagatcgaggcactcagtttacctcaaggttctggaagcagttgcatgaagcccttggaaccgatctgaattttagtacggcctaccatccgcagaccgatggacagacagaaagggtaaaccaaatcctagaagacatgctacgtgcgtgtgccctggatttcgaaggcacttgggatcgttgtttgccgtatgctgagttctcgtacaacaacagttatcaggccagcattcagatgtcgccgaatgaggcaatgttcggaagaaagtgccgcactcccttgtgctggaatgaggtgggcgaagcgctggtattcggtcctgacatactgaaggcagcagaagaacaagttaagctgatccgagaacgtttgaagacagcacagaaccgtcagaagaattacgctgacaatcggaggcgtgaccttgagttcaaaaagggagatcatgtgtacctgcgggtatcacccctccgtggtatgagaaggtttgggatgtccggcaagttagcaccccgctacatcggcccctacctcataaccgccagatgtggcgaagtggcttatcagcttgagttacctgaaggtctcgcagatgtgcacaacgtgttccacgtatcccagttaaagaaatgtcttcgagttccagaagaacaagttcccctgggtaatatcaagctggaaaagaatctgacctacaaggaaagaccgatcaaggttcttgaagaggcagaacgtcagactcgaaggaagaccaccaagttctacaaggtccaatggagcaaccattctgaagataaggcaacctgggagcgagaagatcttctccgcgccgagttcccggagctgctcaattag

SEQ ID NO: 77058 - DNA, 5331 bp, Oryza sativa
  Clone ID: PAT_MRT4530_76994C.1
atggcagtgaacgccagcttcagttcccacggttttggtgagggtcaccacgtcgcccagcttcgtgacctcgcccgtttccttggcttctcgtgtcccgagtacacggggtactccgtggaccgtgttccccctcactgtgagctctctgtgtacctttacccccgtggaggtatacacggagctggccttcgcccccaccacttcactgtggccaggcccaccctccagatcgcgtaccaggacctctcctggactgcgcttcgtcgcctggcccacgactacagccaccgtctcggaggctccgccttccggcagcttccacgtcttccttctggccactcagacgccaggtacccttgtccgtacagcgagtctcagccagtgctgactcgcatggtcgagctttcggaggctcaggccactcagcacgacctactccttgaggcttaccgctcccttgctcgccgctacgccgctttggaggcccgtctggccgaggagggtgtcacctcagttgacactatctcttgggactcaggccgtctctgccacgccagccacctgtcctcccacagctcccgcggctctgctcgcactcccagtggcccgcgctcccccagctcgcgtgcgccgtactcaccagtgtactccccctacccacacccagttagcccttcctacacccccggacacactccagtcgcttcctcccgccgtggcccacgctttatccgcactgcgcggaagcgtgttgttgaggttgagcaacctcgccgcagcagccgctcgcatcgcacagtttcccgtgaagcagagttggagcagtctcaccgccctcaccgcactgccagtcacaattctggagaagaacgcctcccttccccacctcatgtggaaaacaacatgcaacacataatggcagttcagacacaaatcttgcaaggtctaaccacagccatagccagctttcagcataatgcgcatggaaatggccaccctcacatgggcaacaatagatccaagctgacagactttctgaggtcacgtccaccagagttctctcagaccgtcgagcccgtcgaggctgacgattggttgaaagatgttgataggaaactcaacttagtgcagtgtactcctgttgagaagacgctctacgcctctcaccagctaagaggacctgccgcagattggtgggagaattactgcaatgcacaccctgaacccactaacattgcttgggatgagttcgctacggctttccgtgcagctcatgtgcctgaaagcactattgacatgaagaaagaagaatttaacagacttaagcaaggccacagcagtgtcaatgagtacctgagtcagttcaacaagttggctcggtacgcccctgaggaagtagacaccgataagaaaaagatcaggaaattcttgaaagaaatcgcagttggaatgagactccagttgcttgctcatgacttccccacttttcaacatatgatcaataaagcacttctacttgaggatgccagaaaagaggccaccgaagaatacaagaaacgcaagtctaaccatcagggaaattcttcccgaggcgcacctcgccctcgctacggtcaacccatgcaataccatcagtcggtcactcaggctaaccgccagccaggctacgcccctcgtcctcagataaaccgtccggcacctcagccacagaagcatgcccctagtggcaacactgcgccaaacagtgttacctccttcaagtcaccacaaggaccgtcagcagttcagtgtttccggtgcaaccagatgggtcactatgctagacagtgtcctcagaatcctaccaacaccaactcagggcatgctaatggcagcaccgcccgaactcctactccagcggcagctcagtctcgtcctagctctcaggcaagtggacaaggttctcgtgcttccaaccactttggtcgaggacgtgtgaatcacattcaagctgaaaccgctcaggatgctccggacgttgtgatgggtatgttctctgtcaactccgtacccgcaatagttctgtttgatttgggagcttcccattctttcatatcgcaagcttttgtgaaaagaaatggttggaaaacccaaaatttgcgtgtaccaatgatagtacattcccctggaaggaatataagggcaactcaaatatgcccggaagttaaccttagaattgaggaagttgacttcctagccaaaccgatagtcctagactcgcaaagcttggacatcatccttgggatggattggttggctaagcacaaaggacagatagattgtgccgaaaagtccatcaccttgcaaggacctggaggaaagcaagtccgctttacccctaacacccctaccgcaagtcggtctatcctaacctgtttgcaagtcacctccttggagtcggtgcccatagtctgtgaatatcccgacgtatttccggaagaattaacaagaatgccaccagaccgagagatcgagttcgccatagaactggcaccaggcacagctccaattgcaaaaagaccctaccgaatggccgctaatgagttagcagaagttaaaagacaaatcgaagaactggaaagtaaaggttatgtgcgacctagctcatccccttggggagccccagtgcttctggttaagaaaaaggatggctatgagagaatggtaattgactatagagccctgaatgaagtaactataaagaacaagtacccgttgcctcggattgacgacttattcgatcaacttaaaggagcaagagtcttctcaaaaattgacttgaggtcaggttaccaccaactgaaaatcagatctgaagatattccgaagaccgctttctcgacgcgatatggtctatatgagttcacagtaatgtccttcggactcaccaatgctccagcattcttcatgaacttaatgaacaaaatctttatggaatacctggaccagtttgtcgtggtattcatcgatgacatcctgatatactctaagaacgaggaagaacatgctgaacacctgaggctgataatggaaaagctcagagatcatcaactattcgctaaattctcgagatgcgaattctggttggaccgagtagcatttcttggacacgtgatctcctccaacggtgtcgaagtagatcccagcaaggttgaagctgtacttgcttggaacccgcccaagaatgtgtcagagattcgcagcttccttggcttagctggatattatcgaagattcattgaaggattctctaagctagccagacctatgaccgagctgttaaagaaggaaaagaaatttcaatggtctacagcctgtgaagacagctttcaagaaatgaagaaaagattgaccactgccccagttctcaccttgccagatatccgaaaagatttcgagatcttctgtgacgcatcaagacagggcttaggatgtgtcctaatgcaagaacgaaaggttgtggcctatgcatccaggcagctcaggcctcatgaagtcaattatcccacccatgatctcgagttggcagccgtgattcatgctcttaagatctggaggcactacttaatagggaacagatgtgaagtatacaccgatcacaaaagtcttaaatatatcttcacacagaccgagttaaatatgaggcagagaagatggttggaactaatcaaggattacgatcttggaatccactatcatcctggtaaagccaacgtggtcgctgatgcgctaagtcgcaaggcctattgcaatgtagctcaaatacggcctgaccaagatcatctgtgcagagaattggagaagttaaggctgaccgtggtacagtcaggtgtccctgccagcttgacagtacagcctaccctagagtcgcaaatccgggaggcacagaaagacgacgaaggggtaaaagaattaataaagagaatacaggagaagaaagacaccaatttctccatagacgatcaaggcacagtttggtgcggttcacgcatctgtgtaccggccaagaaggagttaagagatctcatcctaagggaagctcatgagtccgcctactccattcatccaggaagtacgaagatgtaccaagatatcaaggcatacttttggtgggctggaatgaagcgagatgtcgcagaatacgtagccttgtgtgacatttgccaaagagtcaaggcagagcatcagaggccagctggtctgttgcaacccctaccgattcccgggtggaagtgggaagagatcggaatggatttcatcaccggtttgccaagaacccccagcgggtacgactccatttgggtaatcgtggaccgactcacgaaatcagctcatttcgtgccagtgaaaaccacctatgatggaaagaaactagcagaactctacatgacccatgtcgtatgtagatttggctgccccaagaaaattgtgtcagaccgaggcactcagttcacctcaaggttctggaagcagctgcatgaagccctcggaactgatctgaattttagtacagcctaccacccgcagaccgatggtcagaccgaaagggtaaaccaaatcctagaagacatgctacgtgcgtgtgccttggatttcgaaggcacttgggatcgttgtttgccatatgccgagttctcatacaacaacagttatcaggccagcattcagatgtcaccgaatgaggcaatgttcggaagaaagtgccgcacccccttgtgctggaatgaggtgggcgaagcactggtattcggtcctgacatactcaagtcagcagaagaacaagttaagctgatccgagaacgtttgaagacagcgcagaaccgccaaaagaattacgctgacaatcggagacgtgaccttgagttcgaaaaaggagatcatgtgtacctgcgggtatcaccactccgtggtatgagaaggtttgggatgtccggcaagttagcaccccgctacatcggcccctacctcataaccgccagacgtggcgaagtggcttatcagcttgagctacctgaaggtctcgcagatgtgcacaacgtgttccacgtatcccagttaaagaaatgtcttcgagttccagaagagcaagttcccctgggtaatatcgagctggaaaagaatctgacctacaaggaaagaccgatcaaggttcttgaaaaagcagaacgtcagactcgaaggaagacaatcaagttctacaaagtccaatggagcaatcattctgaagatgaagcaacctgggaacgagaagatcttctccgcgccgagttttcggagctgctcccttag

SEQ ID NO: 77059 - DNA, 453 bp, Oryza sativa
  Clone ID: PAT_MRT4530_76995C.1
ctgcaactgtattatgagtcctatggtgttgtttactagtagtaaaataaagagtaaagttcattaccggtctctaaacttgtaccgctgtgtcattccggtctctaaactcgtaaatcgaccgttcaggtcctcaaacttgttcgactgtgttatcccggtccctaaacttgcttatcactcatttaggtcctccaacttgttcagatgtgtcaccccggtccctaaatttggatttgaatatcatctgggttaaataggacgggaccggggtgacacaactgaacaagttggatgacctaaacgagtgatctgcaagtttagaaccgggatgacacagtcgaataagtttgtggatctgaacggtcgatttacgagtttagggatcaggatgacacagcggtacaaatttagggaccggtgatggattttaaataaatacaaaccgttgat

SEQ ID NO: 77060 - DNA, 382 bp, Oryza sativa
  Clone ID: PAT_MRT4530_76996C.1
gtgttccgtttccactacccagctcccccaccgccagcggcccgtgctgctgccggccctcgacaggttccgccggtcccttcgcgtcagccgatcgacgtttcttcgactgaggagccgactacaggaggcagccaggccgacgaggaccgtccccgccgtgcagctcgtgcaccagcccgctttggttttgaggatggtagagttgagccagaagaaaatcatgaatcagctaatgagcagtctcaccacagcaaccgttcgcaccgtactgtttcccgcaacgcagaggttgagcaaccccgccgcagcaaccgctcgcatcgcacagttttccgtaatgcagagatggaacagtctcaccgctctcaccgcactgcca

SEQ ID NO: 77061 - DNA, 506 bp, Oryza sativa
  Clone ID: PAT_MRT4530_76997C.1
ttggatgaattgatcgtgtgttaaattatgcttaggagcaatttatagcttttgttgagttgtgtgtgcttcctctatgaaaaagttatgatgcacgtttagataaataccggaaaaggagaacactgaaaaagatagatggtaaaagatgaactcgtgtcatctattatggaatgttgtcacgcccagaactagtaccgaccggaactagcccgtgacgctccaaattaacctattaatcgataccagtcccaggaaacatagagtaggagtacaatcaagtcgggctgcggacagatcccgagctcacaactgcattacaaaagggaagcggaagccaggacttggaccaaacaacacaggcgcgacttgggaactaggccgaaaccctaaaactcatcgtagccggcttgctcctggaagaactcctcgtcagcgggatccgcttcatcttcttcagcaactgggggggagattatttatatagagcaagggtgagtacggga

SEQ ID NO: 77062 - DNA, 2010 bp, Oryza sativa
  Clone ID: PAT_MRT4530_76998C.1
atgggtcactatgccagagagtgccctcagaatcctaccaacaccaactccgggcatgctaatggcagcactgccagaactcctactccagcggcagctcagtctcgtcctagctctcaggcaagtggacaaggttctcgtgcttccaacagctttggtcgaggccgagtgaaccacattcaagctgagaccgctcaggatgctccagacattgtgatgggttaccaccaactggaaatcagatctgaagatatcccgaagaccactttctcaacgcgttatggtctatatgagttcacagtgatgtccttcggactcaccaatgctccagcattcttcatgaacttaatgaacaaaatcttcatggaatacctggaccaatttgtcgtggtgttcatcgatgacatcctgatatactccaagaatgaggaagaacatgctgaacacctgaggctgataatggaaaagctcagggatcatcaactactcgctaaattctcaaaatgcgaattctggttagaccgagtagcatttcttggacacatgatctcctccaacggtgtcgaagtagatcccagcaaggttaaggctgtacttgcttggaacccgcccaagaatgtgtcagagatccgcagcttccttggcttagctggatattatcgaagattcattgaaggattctctaagctagccagacctatgaccgagctattaaagaaggaaaagaaatttcaatggtctgcagcatgtgaaggcagctttcaagaaatgaagaaaaggttgaccactgccccagttctcaccttgccagatatccgaaaagattttgagatcttctgtgatgcatcaagacaaggcttaggatgtgtcctaatgcaagaacgaaaggttgtggcctatgcatccaggcagctcaggcctcatgaagtcaactatcccacccatgatctcgagttggcagccgtggttcatgctcttaagatctggaggcactatttaatcgggaacagatgtgaagtatacaccgatcacaaaagtcttaagtacatcttcactcagactgagttaaatatgaggcagagaagatggttggaactaatcaaggattacgatcttggaattcattatcaccccggtaaagccaacgtggtcgctgatgcgctaagtcgcaaggcctattgcaatgtagctcaaatacggcctgaccaagatcgcctgtgcagagaattggagaagttgaggctgaccgtggagaagaaagacaccaatttctccatagacgatcaaggcacagtttggtgcggtccacgcatctgtgtaccggccaagaaggaattaagagatctcatcctaaaggaagctcatgagtccgcctactccattcatccaggaagtacgaagatgtaccaagatatcaaggcatacttctggtgggctggaatgaagcgagatgtcacagaatacgtagccttgtgtgacatttgccaaagagtcaaggcagagcatcagaggccagctggtctgctacagcccctaccaattcccgagtggaaatgggaagaaatcggaatggatctcatcaccggtttgccaagaacccctagcgggtacgactccatctggatgtcgccgaatgaggcaatgttcggaagaaagtgccacacccccttgtgctggaatgaggtaggcgaagcgctggtattcggtcctgacatactcaaggcagcaaaagaacaagttaagctgatccgagaacgtttaaagacagcacagaaccgccaaaagaattacgctgacaatcggaggcgtgaccttgagttcggaaaaggagatcatgtgtacctgcgggtatcacctctccgtggtatgaggaggtttgggatgtccggcaagttagcaccccgctacatcggcccctacctcataaccgccagacgtggcgaagtggcttatcagcttgagttacctgaaggtctcgcagatgtgcacaccgtgttccacgtgtcttag

SEQ ID NO: 77063 - DNA, 1455 bp, Oryza sativa
  Clone ID: PAT_MRT4530_76999C.1
atggtaatcgactatagagccctgaatgaagtaactataaagaacaagtacccgttgccacggattgacgatttgttcgatcaacttaaaggagcaagagttttctctaaaattgacttgagatcaggttaccaccaactaaaaatcagatctgaagatatcccgaagaccgctttctcaacgcgttatggtctatatgagttcacagtgatgtcctttggactcaccaatgccccagcgttcttcatgaacttaatgaacaaaatctttatggattacttggaccagtttgtcatggtgttcatcgatgacatcctgatatactccaagaacgaggaagaacatgccgaacacctgaggctgataatggaaaagctcagagatcatcaactattcgctaaattctcgaaatgcgaattctggttagaccgagtagcatttcttggacacgtgatctcctccaacggtgtcgaagtagatcccagcaaggttgaagctgtacttgcttggaacccgcccaagaatgtgtcagagattcgcagcttccttggcttagctggatattatcgaagattcattgaaggattctccaagctagccagacctatgaccgagctgttaaagaaggaaaagaaatttcaatggtctacagcctgtgaagacagctttcaagaaatgaagaaaaggttgaccactgccccagttctcaccttgccagatatccgaaaagatttcgagatcttctgtgatgcatcaagacaaggcttaggatgtgtcctaatgcaagaacgaaaggttgtggcctatgcatcccggcagctcaggcctcatgaagtcaattatcccacccatgatctcgagttggcagccgtggttcatgctcttaagatctggaggcactatttaatcgggaacagatgtgaagtatacaccgatcacaaaagtcttaagtacatcttcactcagaccgagttaaatatgaggcagagaagatggctggaactaatcaagaattacgatcttggaatccagtaccaccccgaacatcagaggccagctggtctgctgcaacccctaccgattcccgagtggaaatgggaagagatcggaatggatttcatcaccggtttgccaagaacccctagcgggtttgggatgtccggcaagttagcaccccgctacatcggcccctacctcataactaccagacgtggcgaagtggcttatcagcttgagttacctaaagaagagcaagtccccctgggtaatatcgagctggaaaagaatctgacctacaaggaaagaccgatcaaggttcttgaagaggcagaacgtcagactcgaaggaagaccatcaagttctacaaagtccaatggagcaaccattctgaagatgaggcaacctgggagcgagaagatcttctccgcgccgagttcccggagctgctcccttag

SEQ ID NO: 77064 - DNA, 186 bp, Oryza sativa
  Clone ID: PAT_MRT4530_7699C.1
gcgggcggcggtgagtcatcgtctctctcaccgcgtcccgacactttcgcgtctctctctctctcagcagacgaaggagtacgaatgtggcctcgacccggtggctcctaccgtaggtgtacccgctagcactgtccgtgcgcgagcacggcggcatatgcgaattccaggtcttccgcaacatca

SEQ ID NO: 77065 - DNA, 687 bp, Oryza sativa
  Clone ID: PAT_MRT4530_769C.1
atggcggatggaaccacgatggagctcaacatcacgccggcgaacatgttgccgtcgaggaatatctcagccaaggcgttgcagttggcgctcctctcatcgtctcccgcgcccgcgcggatgctctccgcggcagcgtccgacgccctcgtcgagatcaagccaggcgagataagcatggtctccggcatccccaaggagcacctccgccgcaagagcctggaggtgtcggaacttgggaggaatgtgctggtccgcgcacgcccacgtcaatcggctaggagctcactgcggaacacgttgttcgcgagtgcgaggcctcgcaacgacgtcatgttgaagaaactcggcaggatctctccggtgaggctgttctgcgacaaggctaacatgcggagcgctgggaggcgtggcaagccgtcggggatggaactttccagaaggttctggtcgaactcgagctgcacgatcttcgtgaggttcgccagcgatggcgggatgtggccggagatcgagttgtggctgagccggagcaccatgagattcggcaacgcgtcgagccaccgtggaacgccgccgacaatcgaggttgttgttgttgaggctgagataccacatccgccggagccagccgaggccatcggggatgctcccggagaaggcgttggaggtgaggttgatgagtag

SEQ ID NO: 77066 - DNA, 1352 bp, Oryza sativa
  Clone ID: PAT_MRT4530_76C.1
gccgaccaaagcacgcgagaattcaaatcgacgaacacatggcggccatggccatggaccacgaccacgaccacgcctcgtcgccggcgccgcccgcgaggctccccgcgccgccgtaccaccactccccttctgctgctgctgctgcggcggtggaggaggtcgcgacgccgccgcggaagtccgcggcgggggcgggggcgcagaggtcgtcgcccatgccgtcgccgctgcagctgtcggggtgctcgctgcaggagctcctcctgatgtccccgccgcccgggtcggcgcgccgcaactggtcgcggcatcgcggggctgggttggacgagagcctggagatggtggcggcgccggcggcggggacgccgccgaggcggaggcggcgcgtggccgcggagcagtgcgcggcgcccgcggtggcgtcgccgaggaacgggcggagggcgaggcggaggctggagaaggagatcgaggtggaggacgacgccgcgcggagggcacgcaggaggaagtccacccgggcggcggcgaccaaggccgcgcctgcggccgcggacaaggtggcaacggcggcggcggataaggaggatacgagcatggcgttggtgctggctagcaccgatgcgatacgaggtgctgatgccctcgagcagtctgggtgggaagatctctgggaaaggatcgtcgacttggtgatgtggaagaatgtggcgaaatcggcactctggtttgggttgggatccatgttcttcttctcctgctccttttcaagggagatcaccttcagcccaatctcggcgctttgtcacttgggtgtgatggtcttgggcttagccttcttcaaagattccattcctcagagcaggcagcaggtagagaggggaaggagcttcagattgactgaagatgatgtgcttcgtgctgcacgagccgtgttgccagttgcaaactccatgatatcaactgcacaagtgatcttctctggtgaaccatcgatgactctcaaaggtttttcaccagctttacactcccaaagctttatagctgctattcaagccaaattcataagagagggcgctaggctaaatttcctcctctttttagttgaaattttgagagatcgggctctagaagcatggaagtcttgtccccgcaagaaactcgttgcgggtacagcagtgacaatgtgctggaacatgttcagtgtgaagacccgcatcattgcagctttcatttcggtagtaatcctgcggtataatcagaagtatcgcaaggctgtggtgaatgcaggagctgaaagctgtcaagatgaacaagagcagaaaatggagatagaagaatcataa

SEQ ID NO: 77067 - DNA, 163 bp, Oryza sativa
  Clone ID: PAT_MRT4530_77000C.1
accgtaccggctacacaattcccgacacgacccacctacgacctactcctcatttaacaagtccaccgacaacgaatggtttgggatgtcacccgctaataccgacagaacctgctgcgatgccacttgctggtacaattacaaattccgttggtactatgtt

SEQ ID NO: 77068 - DNA, 3969 bp, Oryza sativa
  Clone ID: PAT_MRT4530_77001C.1
atggctagccgcccccgccgtgctgctcatgcaccagcccgcttcggttttgagcaaggtagagttgagccagaagcaaatcatgagtcagctaatgagcagtctcaccacagcaaccgttcgcaccatactgtttcccgcaatgcagaaattgagcaaccccaccgcagcaatcgctcgcatcacacagcttcccgtaatgcagaagtggaacagtctcaccgctctcatcgcactgccagtcacaattctggagaagaacgcctcccttccccacctcatgtggaaaacaatatgcagcacttaatggcagttcagacacaaatcgtgcaaggattagccgcagccatagccggctttcagcataatgcgcatggaaatggccaccctcacaggggcaacaatagatccaagctgacagactttctgaggtctcgtccgccagagttctctcagaccgtcaagcccgccgaggctgacgattggctgaaagatgttgatagaaaactcaacttagtgcagtgtactcctgttgagaagacgctctacgcctctcaccagctaagaggacctgctgcagattggtgggagaattactgcaatgcacaccctgaacccactaacattgcttgggatgagtttgttatggctttccatgcagctcatgtgcctaaaagcaccattgatatgaagaaagaggaatttaacaggcttaagcaaggcaacaacagtgtcaatgagtacctaagtcagttcaacaagttggctcgtgttacctctttcaagtcaccgctaggaccgtcagcagttcagtgtttccggtgcaaccagatgggtcactatgccagacagtgccctcagaatcctaccaacaccaactcagggcatgctaatggcagcactgccagaactcctactccagcggcagctcagtctcgtcctagctctcaggcaagtggacaaggttctcgggcttccaacaactttggtcgaggccgggtgaaccacattcaagctgagaccgctcaggatgctccagacgttgtgatgggtatgttctctgtcaactccgtacccgcaatagttctgtttgattcaggagcttcccattctttcatatcacaagcttttgtgaaaagaaatggttggaaaacccaaaatttacgtgtaccaatgatagtacattcccctgggaggaatataagggcaactcaaatatacccggaagttaaccttagaattgaggaagttgacttcctagccaaaccgatagtcctagactcgcaaagcttggacatcatcctagggatggattggttggctaagcacaaaggacagatagattgtgccgaaaagtccatcaccttgcaaggacctggaggaaagcaagtccgctttacctctaacacccctaccgcaagtcggtctatcctaacctatttacaagtcacctccttggagtcggtgcccatagtctgtgaatatcccgacgtatttccagaagaattaacgagtatgccatcagaccgagagattgagttcgccatagaactggcaccaggcaccgcaccaattgcaaaaagaccctaccgaatggcagctaatgagttagcagaagttaaaagacaaatcgaagaattggagagtaaaggttaccaccaattgaaaatcagatctgaagatatcccgaagaccgctttctcaacgcgttatggtctatatgagttcacagtgatgtccttcggactcaccaatgctccagcattcttcatgaacttaatgaacaaaatcttcatggaatacctggaccagtttgtcgtggtgttcatcgatgacatcctgatatactccaagaatgaggaagaacatgctgaacacctgatgctgataatagaaaagctcagggatcatcaactattcgctaaattctcgaaatgcgaattctggttagaccgagtagcatttcttggacacgtgatctcctccaacggtgtcgaagtagatcccagcaaggttgaggctgtacttgcttggaacccgcccaagaatgtgtcagagatccgcagcttccttggcttagctggatattatcgaagattcattgaaggattctctaagctagccagacctatgaccgagctgttaaagaaggaaaagaaatttcagtggtctacagcctgtgaagacagctttcaagaaatgaagaaaagacaaggcttaggatgtgtcctaatgcaagaacgaaaggttgtggcctatgcatccaggcagctcaggcctcatgaagtcaactatcccacccatgatctcgagttggcagccgtggttcatgctcttaagatctggaggcactatttaatcgggagtagatgtgaagtatacacagatcacaaaagtcttaagtacatcttcactcagaccgagttaaatatgaggcagagaagatggttggaactaatcaaggattacgatcttggaattcattaccaccccggtaaagctaatgtggtcgctgatgcgctaagtcgcaagacctattgcaatgtagctcaaatatggcctgaccaagatcacctgtgcagagaattggagaagttaaggctgaccgtggagaacaagggcaccgatttctccatagatgatcaaggcacagtttggtgcggtccacgcatctgtgtaccggccaagaaggagttaagagatctcattctaaaggaagctcatgagtccgcctactccattcatccaggaagtacgaagatgtaccaggatatcaaggcatacttctggtgggctggaatgaagcgagatgtcgcagaatacatagccctgtgtgacatttgccaaagagtcaaggcagagcatcagaggccagctggtctgctgcaacccctaccgattcccgagtggaaatgggaagagatcggaatggattttatcaccggtttgccaagaacccctagtgggtacgactccatctgggtaatcgtggatcgactcacgaaatcagctcatttcgtgccagtgaaaaccacctttgatggaaagaaactagcagaactgtacatgacccatgtcgtatgtagatttggctgtcccaagaagattgtgtcagaccgaggcactcagttcacctcaaggttctggaagcagttgcatgaagctctcggaaccgatctaaattttagtacagcttaccatccgcagaccgatggtcagacagaaagggtaaaccaaatcctagaagatatgctacgtgcgtgtgccctagatttcgaaggcacttgggatcgttgtttgccgtatactgagttctcatacaacaacagttatcaggccagcattcagatgtcgccgaatgaggcaatgttcggaagaaagtgccgcactcccttgtgctggaatgaggtgggcgaagcgctggtattcggtcctgacatgctcaaggcagcagaagaacaagttaagctgatccgagaacgtttaaagacatcgcagaactgtcagaagaattacgctgacaatcggaggcgtgaccttgagttcgaaaaaggagatcatgtgtacctgcgggtatcacctctccgtggtatgaggaggtttgggatgtccggcaagttagcaccccgctacatcggcccctacctcataaccgctagacgtggcgaagtggcttatcagcttgagttacctgaaggtctcgcagatgtgcacaacgtgttccacgtgtctcagttgaagaagtgtctccgtgttccagaagaacaagtccccctgggtaatattgagctggaaaagaacctggcctacaaggaaaggccgatcaaggttcttgaagaggcagaacgtcagacccgaaggaagaccatcaagttcgacaaggtccaatggagcaatcattctgaagatgaggcaacctgggaacgagaagatcttctccgcgccgagttcccggagctactcccttag

SEQ ID NO: 77069 - DNA, 1401 bp, Oryza sativa
  Clone ID: PAT_MRT4530_77002C.1
atggtgccagttgggaaatccggcaccgatgggggttacccaaccagcaccaatagcccattctttagtagtgcgaatatcaccatcaatactggcgttgatcccaacgaggaggttgcaccgccggtggtcgtccggccatcggagccggccacatcgacggccgacaagatccttctgtcaactttggacaagcctgttgccacgataccagtgaccgtgctacttgcgttcgaccaccccatccatgacgccaccgcggagaccatcaagacggctctcgctcaatcactcgtccactactatcctatcgccggccgcatttcctgcgacaatgacgacggcggccatttctacatcgactgcaccggcgaggatctcggggtcacgttcgtggccgcgtccgccaactgcaccatggaggagctcatgtgtctcgtcgacgaccaggctcccgacgacgagacagcggtggtgcagcagctcgccttcaactgcacgcccgacgaccttcatcaccgtctgctgtgggtgcaggtcaccactctcaactgtggaggcttcgtcgtcggggtgacatggagccatggcgtggctgacggtcccggcatagcacagttcatacaagccgtcggcgagctcgcccgtggcctgccatcgccgtccgtcgtcccggtcaggttggacgacaagatcgcaacccaagccgtacctcccttcaccatggccgttcatcgcttcatatccggcctcaagccagtatcaaacctcgacgtacgcaacgtcaccgtctcatctagccttatcaaccacatcatcgtcggagctcgtcgtcgtgccaccgtgttcgaggcggtcgccgccgtgctctggcagtgccgtacacgggtggtgatgacggatcctgaggcccccgccgtgctgctcttcgcggtgaacgcacgcaagtacctcggcgccaaggacggctactacggatgctgcaccgccatgcacatggccgtgtccaagtccggcacggtggccaacggcgacatcatgaagttggtcggcatcatacgccgcgccaaggagcagataccggagcagctgaaggcagacgacggcgagatgatgctacggacgatggtaggggagaagcaggtgaatggatacgagagcctgctctacttgacatcctggcgaaacatcgggttcgaggacgtcgatttcggcagcgggaagacggcgagggtgatgacctacccgccgaggatgctgtccatgatgcccaggattgcgcccatctgcttcatgctcaaggccacagaggaaggggtcagggtcatgtcagactgtgttacggctgaccacgccgatgccttctatcaagaaatagccaagctcaaagccaccacctga

SEQ ID NO: 77070 - DNA, 3414 bp, Oryza sativa
  Clone ID: PAT_MRT4530_77003C.1
atggcagtgaacgccagcttcagttcccacggtttcggtgagggtcaccacgtcgctcagcttcgtgacctcgcccgcttccttggcttctcgtgtcccgagtacacggggtactccgtggaccgtgttccccctcgctgtgagctctctgtgtacctttaccctcgtggaggtatacacggagctggccttcgcccacaccacttctctgtggccaggcccactctccagatcgcgtaccaggacctctcctggactgcgcttcgtcgcctggcccacgactacagccaccatctcgggggctctgccttccggcagcttccacgccttccttctggccacgcagacgccagatggctagccgcccccgccgtgcagctcgtgcaccagcccgcttcggttttgaagaagctaagaggacctgctgcagattggtgggagaattactgcaatgcacaccctgaacccactaacattgcttgggatgagtttgctacggctttccgtgcagctcatgtgcctgaaagcactattgacatgaagaaagaggaattcaacagacttaagcaaggcaacagcagtgtcaatgagtacctaagtatgttcaacaagttggctcggtacgcccctgaggaagtggacacagacaagaagaagatcaggaaattcttgaaagggatcgcagttggaatgagactccagttgcttgctcatgacttccccacttttcaacatatgatcaacaaggcacttctacttgaagatgccagaaaagaggctaccgaagaatacaagaaacgcaatgttacctctttcaagtcaccgcagggaccgtcagcagttcagtgtttccggtgcaaccagatgggtcactatgccagacagtgccctcagaatcctaccaacaccaactcagggcatgctaatggcagcactgccagaactcctactccagcggcagctcagtcttgtcctagctctcaggcaagtggacaaggttctcgtgcttccaacaaccttggtcgaggccgggtgaaccacattcaagccgagaccgctcaggatgctccagacgttgtgatggtgcttctggttaagaaaaaggatggctctaagagaatggtaatcgactatagagccctgaatgaagtaactataaagaacaagtacccgttgccacagattgacgatttattcgatcaacttaaaggagcaagagttttctcaaaaattgacttgagatcaggttaccaccaactgaaaatcagatctgaagatatcccgaagaccgctttctcaacgcgctatggtctatatgagttcacagtgatgtccttcggactcaccaatgctccagcgttcttcatgaacttaatgaacaaaatcttcatggaatacctggaccagtttgtcgtggtgttcatcgatgacatcctgatatactccaagaatgaggaagaacatgctgaacacctgaggctgataatggaaaagctcagagatcatcaactattcgctaaattctcgaaatgcgaattctggttagaccgagtagcatttcttggacacgtgatctcctccaatggtgtcgaggtagatcccagcaaggttgaagctgtacttgcttggaacccgcccaagaatgtgtcagagattcgcagcttccttggcttagctggatattatcgaagattcattgaaggattctctaagctagccagacctatgaccgagctgttaaagaaagaaaagaaatttcaatggtctgcagcctgtgaagacagctttcaagagatgaagaaaaggcagctcaggcctcatgaagtcaattatcccacccatgatctcgagttggcagccgtggttcatgctcttaagatctggaggcactatttaatcgggaacagatgtgaagtatacaccgatcacaaaagtcttaagtacatcttcactcagaccgagttaaatatgaggcagagaagatggttggaactaatcaaggattacaatcttggaattcattaccaccccggtaaagctaatgtggtcgctgatgcgctaagtcgcaaggcctattgcaatgtagctcgaatacggcctgaccaagatcgcctgtgcagagaattggagaagttaaggctgaccgtggtacagtcaggtgtccctgccagcttgacagtgcagcctaccctagaatcgcaagtccgggaggctcagaaagatgacgaagggataaaagagttaataaaaagaatacaggagaagaaagacaccgatttctccatagacgaccaaggcacagtttggtgcggtccacgcatctgtgtaccggccaagaaggagttaagagatctcatcctaaaggaagctcatgagtccgcctactccattcatccaggaagtacgaagatgtaccaagatatcaaggcatacttctggtgggctggaatgaagcgagatgtcgcagaatacgtagccttgtgtgacatttgccaaagagtcaaggcagagcatcagaggccagctggtctgttgcaacccctaccaattcccgagtggaaatgggaagagatcggaatggatttcatcaccggtttgccaagaacccctagcgggtacgactccatttgggtaatcgtggaccgactcacgaaatcagctcatttcgtgccagtgaaaaccacctttgatggaaagaaactagcagaactctacatgacccatgtcgtatgtagatttggctgtcccaagaagattgtgtcagaccgaggcactcagttcacctcaaggttctggaagcagttgcatgaagccctcggaaccgatctaaattttagtacggcctaccatccgcagaccgatgcgctggtattcggtcctgacatactcaaggcagcagaagaacaagttaagctaatccgagaacgtttaaagacagcgcagaaccgtcagaagaattacgctgacaatcggaggcgtgaccttgagttcgaaaaaggagatcatgtgtacctgcgggtatcacccctccgtggtatgaggaggtttgggatgtccggcaagttagcaccccgctacatcggcccctacctcataaccgccagacgtggcgaagtggcttatcagcttgagttacctgaaggtctcgcagatgtgcacaacgtgttccacgtatcccagttaaagaaatgtcttcgagttccagaagagcaagtccccctgggtagtatcgagctggaaaagaatctgacctacaaggaaagaccgatcaaggttcttgaagaggcagaacgtcagactcaaaggaagaccatcaagttctacaaagtccaatggagcaaccattctgaagatgaggcaacctgggagcgagaagatcttctccgcgccgagttcccggagctgctcccttag

SEQ ID NO: 77071 - DNA, 1289 bp, Oryza sativa
  Clone ID: PAT_MRT4530_77004C.1
atggagacgcccctctccagcaggaggatcacccgctccatggccaaggcctccgccgccgcccccgacgccacgtccacggcccacccgccgcgccccgccctgcacgacatcaccaacgactcccccatcgtcggcctcgcctcctcgggcctccgcacgccggcctccaccgccgccaaggcccgccccaccagggcctcccgccgcacccccggatccggcgaggcactcctccgcggccaggtcaagacgctcctccagaaggtccaccacgacgcctcctcctcctcctcctgcgccgcagccgctcctccctcccccaacatcctccgcatccacgcgcccatcggtctcgccaggtcgcccgcccacctcctcgcccccacgccggccaacacgccgcacctcaccgccgccgcccctcacgccttcaccatgacggtgccatgcgtcctcgaggaggagttgctttccaagctgcaggtcattgcagatgccctgccgccacctccagctcaggcggaggagaaccaccttggagagtgcaaccgtgcactggtgttcgacgactcccccgggaaatcggacctgtccaatgctgcctcggtgctctcgtcgtcgtccctctcgttccaggacagcagcagcaccgacagatcaccggacgacgacagctcatcggcttggtcaatccaggtcaatgccagctccgagaagggcgacgaggacacgttcactgatcaagacccagaggaggaggaggaggagtggctaacagaagatgatgatgatgatgagtgctttgatgatctgtgtgaggggatgagcaagatgtctgtgtttgacgatgaggaggaggaggacaagaaggctgggctgcctgcgtttcaggggaagcacaccaggttcatctacgacagcgacggcgagatggagagggaggacgtggcgcatgtgccggtggagaactgcaccatggttctgaggggcctgccggtgccggaggggaagcatctccgcttccacgaggtggaggaggatgaggaatagaatgacattgctaccagtgatacacttcgcatccaagcaacaaaaacaacattgctactatagtagcttcttctttttcttttcatctggacagacacattgattcagtctactgcaatataatgccttctgtgtttcgcttcaaaaaaaaaaaaaaaagaatgccttttgaatgttacaactgaataatgcatgcaatgcaaatatgcatgttccaaaaaaaaaaaaaaaaaaaa

SEQ ID NO: 77072 - DNA, 375 bp, Oryza sativa
  Clone ID: PAT_MRT4530_77005C.1
gagcaggcataaatttgactccacaattttgttttttccctataaattttttttttttcctcccaatcgacaaaatttttggaaagagagaaaaacacacccaattgccaaaaaaaattggtcaattgcggctaaattaatcacaaaatcgagttatttgtctttttttttcccaaaaaaaggggggagaaaagccaaaaaaccaacaaccgtggtgaaggaaaaaaaaaaaagggcgggggggggggccccctccccggggggaaacaccttctgtccttttgttgggaggggctcctccaaaaacccccccctaaaaaactcccccacacctccttttccatgtaaaccaggggttcggccttgggcgtggcc

SEQ ID NO: 77073 - DNA, 771 bp, Oryza sativa
  Clone ID: PAT_MRT4530_77006C.1
ggactcttggttttctgttatgtatattctttggtcttgcacttgcactggtgtcaagtggcattctccctgcattcacggaggatattgctcggtctgtaaatgttgtgcatgttgttgacactacaacggtgaatagtggtaatacagaaccatcatcatatgttactctgttctccaatacacctggaaagttgacaaaggaattagtagaccttagagatgaagaattttcttgtgggaggaatagggctattgattttgttacatttaccatgaaatatggctgtttgagttacgaagggaccaatactggatggagcaaatcagaagtgccagtgctcagtttgaaaagtgattctgttaccaatgatgctcgacaaacaataatatcagttgatactaagtcatctacgcgttggtcactggcaatcaataaacaagaaattgatgacttcacagttcatgtggattcggagaacttggttccactgggtaataagagcgagatcgatgggtggcatacaatccagcttgctggtggtaaggactcaccaacaaaatttcagctaacccttttctgggcaagtaattccaaggatgcattcccaatgcaagtcgaatcagaagatcattctttcttactaaaactaagaacggatgtgaatagagttacaccgctggttggcagggttctcgagaagcttccaagatggtgtgcaccctttggcaagtctacttctccttatacattggctttcttgaccgctc

SEQ ID NO: 77074 - DNA, 801 bp, Oryza sativa
  Clone ID: PAT_MRT4530_77007C.1
gcgaagaactcgcctctgaagaacgcgctgctctccgacgtatgcatcggcacgtcgtcggcgccgacgtacctccccgcgcactgcttccggacacacgacggcgccagcggcgaaacgcgcgagtacaacctcatcgacggcggtgtcgccgccaacaaccctgtacaaaaacagttcgactccaccagatttacagttcacatccaaccagatgcttacgatggtggccatgacaatgatcacggaggagatcatggcgaaggagaaggcggcggcgctgtacctgctgaagccgccgccggagaggaggaggagcacggccggttcctggtgctgtccatcggcaccggcctgacctccgacgagggcctctacacggcggagaagtgctcccggtggggggcgctctcgtggctgcgccacggcgggatggcccccatcatcgacatcttcatggcggcgagttccgacctcgtcgacatccacgtcgccgtcaagttccagctgctccacagcgagcggaactacctccgcgtgcaggccaactcgctgcgcggtgcggcggcggcggtggacgcggcgacgcgggagaacatggggagcctcgtcggcgtcggcgagcggttgctggcgcacggggtgtcgagggtgaacgtggagaccgggaggtacgaggaggtgcccggcgaggggagcaacgccgacgcgcttgctcggatcgccgggaatctctccgaggagaggacggcgaggatcaagcggcggaacactgtgcaggctggtgtgactgggttttag

SEQ ID NO: 77075 - DNA, 344 bp, Oryza sativa
  Clone ID: PAT_MRT4530_77008C.1
gggaacgagggaaccccccccaaacaaaaaatattagggccccccaaaaaaaaggggcccaggtacgggcacggacacacacaactggggggaaccccaaaaacaaacgggcggacaaacaaggggggaaaaaaacaaagacccaaggggggggtcgatcccaacaaaaaggggccccccaccgattagtttacaaaccgggcgatcttaaaaaacggccccaaattttttttacaaggaacaaaaatggatggatatggggcccactagctaggcgagcttaactaggggtgacaaacccggagttttttttgacccccccctgggccccggtgagggggccc

SEQ ID NO: 77076 - DNA, 332 bp, Oryza sativa
  unsure (1)..(332): unsure at all n locations
  Clone ID: PAT_MRT4530_77009C.1
gcttatgtggcccacggatgtaggaataactctgttatgtgtgtgatggtgcccccgtgggtgacccactgatatnnatnncactctgncggggattgtgcttcgcctgtgcttgaatggtgtggttggagggtttgattgcatttgactgtcatgagtgtgctgaggtgagctggcctggtgggatatgcgccccttgtttaagtttnaagtttgctatcatgatggtgtgcatggctgcgtgggtggacctggctaatatgctgagtcctcttatgggtanccaaactcagaaatctgttgcctaggnccaaaaaaaaaaaaaaaaaaaa

SEQ ID NO: 77077 - DNA, 966 bp, Oryza sativa
  Clone ID: PAT_MRT4530_7700C.1
atgcagggaatcatcaaagaagagctgaagtgggctgacgtcatcaattgggctccggcggcgaatctctacggaggaggggtggacgaggtggacctcggccgcgcgaacccaacggcggcgacggcacgggagctcgctacccgggaggggaaaaagcgaaaggaggaggaggaaagggagctttgctccttccggtttgggaggaaagggatgagaacgagccgcgcctcacggttttggatgcatgcggcatggggcgccgggcccgagaggatgacgccggcgatgactgcaaaaggacggggacggtttgaaggcaagcgcggacacggtggtcgtcggggcaggcgacgaccgagggtggcgatggcggcacccaggcggtcggccactcgcacgggcgcgcgggaatcgaaggaggcggccggaattttgggcgacttgggtcagaagttcgagaaagaaaacaggggcgccgtgacgagcgacggcggcgcgggagcaagctctccgggagcggccgggaaaggggaagaagaggtgcccggagctcctcgtcacacgtccatgcacgcaccggcctccctggcacgggaagtcggttttgggggaggaaaccgacttaggtggtcaagggagctcggctggcagtcgtgctcggagctagcggccaagcggcggcagtggaggtggagcgagtggcagggcggcatgggctgctgcgcggcgcaggcagccagggctaacgtggcggcgaccgagcaggagggagaggagctctgcctccattgtttggaaggacgcgacttggagcagcggacagggggtgacgccggtggtgaccacggaggtctctgcctcccggttttggatgctagcggcgtgcagcggcagagcggcagcgcgcgaaattggtccatccaaaatagagggatgcaaaatagacttcttccaagaaattga

SEQ ID NO: 77078 - DNA, 1170 bp, Oryza sativa
  Clone ID: PAT_MRT4530_77010C.1
gtgtactatcactatcatccttgcacaaaaccatttcttacacaactgatagttgaaggaagaaattaaaaaaaaaaaagggagcccaaaagaagaaaaaaaaggccaaaactacaaaacaaaacaaaaaagcaagctcttgcttgctgctattgctgctctgcatcgtcagtagacgctgcctctgctgatcatttcgttgtagtgcttgagcgactcctgccgctgcagccgcatctccatgttgaacttgttgatgaacgcctccaccctccggttcagctcgtcctgccccagcgacggctcccgccgcactttcttccctcctcctcctcctccggcggcctcgttgaacgtctccgccttccgcatcgccgtcgccggcggtggcgcgtcctcgccacctccgctgccggactggcggcggccgggccgggtctcccaggtgtccgacttcttgagatgccgcgccagcggcggcgcccgcccctccgtgatggccttccacgtgctctccagcgtctgctccttccgcggccgcgacacccccagcgccctgctgctcccttctgggctcgccttgaccggcttccggccgaatcgagtggacaccagtggcttctccctcgagttcgtcaggtccgcgaagggggacaacgcctcatgctctgcctccgcctcggcggtgctcctccgccgtggcgtccatgccgacctcgagatcgtgaagttctcctccgcttcctccgcctccggcgccgtcttcaccacctccggcaccgtcacctccacgggaatgggctcgggagccatcgcctccggcaccggcacaacgggcacctccatcggcatcgtcaccgccggcgcgggcaccgccaccaccgggactggaaccggaaccggagccggccgcaccaacgacgcgtcggcggaggcggcctgcgggcggttaggctggaaccgcgacgacgccgcgatggacaggatgatggcgttgatgacgaggtacaggtacggcggcgtcagccacgtggccgccgccgcctgcgcccgcggcagctcgtccgccacgaaccccgccgcagccggcgccgccatcctcaccccgaacgccaccagcaccgccgccgccgccgccgtcgccgccttcaccgtccgcgcacgccccat

SEQ ID NO: 77079 - DNA, 469 bp, Oryza sativa
  Clone ID: PAT_MRT4530_77011C.1
tttttgggtttttttttttttgttggggatgattcttttttcactaccgtaaattaaagttcacttggccctacttgtcaaccacaatgccattacaggattgaacacgacaggctaaaaatgtaccttcagaccatgcgtaaaggttgagaaaacgtttctcaattgaactggggcatctatggcggccccaaaagaaaaaaagttaaaaccaccggcgacgtaattacagttcataattggaatcgggggaagggatcgagaactaccgttttcatggaatgaggctagacatgacaggggtcatatttctcccatgttcgggaaaacttcgtgaacttgtgcaaaccccaatcagcttaaagttggggatgagactacatggggcgacattgcacaaccaacatggacaaatttggaacggtcgccgttaacatggaaactttttccttttcgggcttaaaggtct

SEQ ID NO: 77080 - DNA, 3173 bp, Oryza sativa
  Clone ID: PAT_MRT4530_77012C.1
atgtcgacgggcgggaacggcggcggcgtcggcgtgcggcggcggaggtggaacctgtactggtgctacgtgtgccgccgggcgctgcgggtggtggtgccttcggcgacgtccgacgtctactgcccgcgctgcttcggccgcttcctccacgagatcgacctgccggtgccgcgcgtgagcccgccggcggaggaccagttcttccagccgccgttcttgccgtacgacggcccacgccgctgggtcctctacactggcggcggcggcggcggggactacggcggcgctgatgtaacggcgcgccgccgccgcttgccgtcgccaccgccggcgccgggaacgcggcgccaggacggtgcaggcgatggcgatccacctccaccggcgccggccatcgatccgggggagtacttcgccgggcccgacctgaacgcgctgatcgacgcgctcacgcaggacgaccgccccgggccgccgccggcgccggagtcggccatcgagtccctccccacggtgcacatctcgccggaccatctccccgccgacggcggctcggagtgccccgtctgcaaggaggagttcgagctcggggaggccgcgcgcgagctgccgtgcaagcacgcgtaccactcagactgcatcgtgccatggctccggctgcacaactcctgccccgtctgccggcaggaggtgccgccgccgccggagccggacggtgaatctccgggcatcgacggcggctgtgacgacggtgtcggaggaggtggagagccggctgagccgccacggccggccatggccggctgggaccctattgcgctgctggcgattgcactacggccggacttgaatggttgggagaacagccatggccggagcgagagtgaagcggatgacgatgaggtcgccggcggcggcgtcagcccacacttattaaagcggacaacgactttgacattctgggttttgcacccaccaataattactggagttcatgcactcaccaaaccggcacttgacgaacgatgccggtggaatcggttcggattcttcctttttgacgaaaagatcgggatgatcgcacgcgataccgttctgcgtttcgccgtgcgattgttcgtcgtgatcgtcgtctcgtctcgttcttcctcggccgacgacggcggcggcgacggcggcgtcgacttcatctaccaaggtttccagcacgcggcgaacctgaccatggacgggtcggcgaaggtgctgcacggcggcgcgctccagctcaccaacgacagcaaccgcctcgtcggccacgcgttccacgccgcgccggtgcggtttctcgacgacggcgccggcggcggcgggggaggagtggtgtcgtcgttcagcacggcgttcgtcctcgacatcgtcaccgtcgggagcggcggcggccacggcctcgcgttcgtgatctacctcggcgtcctcgggccccgcaccaacgggaacgcgtccgaccacgtcttcgccgtcgagttcgacacggtgatggacctcgagatgaacgacaccaacggcaaccacgtcggcgtcgacgtgaacagcctcgtgtcggtcgtgtcggagccggtggcgtactacgccggcgacgggagcaccaaggtgcccgtgcagctggagagcgcgcagcaaatccaggcgtggatagactacgacggcggcagcagcatcctcaacgtcaccgtcgcgccggcgacggtgacggagcggcctcgccggccgctcatctccacgaagctcgacctcctgccgatcttcaaggagaacatgtacgttgggttctcgtcggcgacggggaagctggcgagctcgcactacatcttggcatggagcttccggacgaacggcgtcgcgcaatccatcgatctccggaggctgcccaaagtcccgaggcagagctcgccgccgcccaagctgctcatcatcaagttcgccgcggtggcctgtgcaggaacactcaccctgatcgccgcggcgatggtcgccgtgctctggctccggcgaagggcggcgctcgccgacacgctggaggagtgggagctggagcaccctcagaggatcccgtacaaggagctctacaaggcgaccaaggggttcaaggagagcgagctccttggcgccggcggcttcggccaggtgtacagaggcgtgctccggcgccgctccggcgaggcggtggcgatcaagcggatctcgaacgggacacggcaagggatgagggagttcgtcgccgaggtcgccagcctcgggcggatgcgccaccgcaacctgcggttcgccatcctcaagggcgtcgcccatggcctgctctacctgcacgaggagtgggagcacgtggtggtgcaccgcgacgtgaaggcgaacaacgtgctcctcggcgccggcgacacgggggccgcccggctcggcgacttcggcctcgcgaggctctacgagcacggcgcgacgccggcgacgacgcgcgtggccggcacgctgggctacatggcgcccgagctcacgttcaccagccgcgccacgacggccaccgacgtgttctccttcggcgcgctgctcctcgaggtggcgtgcgggcgccgcccgatcgagccggcggcggcgggggaggcggacggcgacgtgctcctggtgcggtgggtgcgagaccgcgcgctcgacggcgacggcggcggcggcgacgtgctgcgagccgtggacccgaggctggaggggtgctacagacgaggaggaggcgaggctggtgctgtggctcgggctgatgtgcagccaggcgaggcacggaggcgaggcccagcatgagacaggtgtgccaggtatctcgacggcgaggagatgttgcaggaggacgccacgccggcggcgatcttctccggcgccgactcgtccgatctcttcggtggctcgttcgtcgtgtccatgacgtcgtcctccgccggcggcaccatgtcggccagctcgctgcaaggcggccggtgaactacactgtacatatatacaggatacgagtaaaagtactgtagaactatagaagtataaaactgtactgaatatgagtgtgttgtgtgtacactgtacagaggtagtgattaagcaaattcagagaagtgatatggatggagcccaacaaaaaaaaaaaaaaa

SEQ ID NO: 77081 - DNA, 292 bp, Oryza sativa
  Clone ID: PAT_MRT4530_77013C.1
ggggcaaaaaccaccacattggcggtttttctaaagatcatagcaactttttttacaaaggaaaagggtttggttttccctaaagaaacacccgggcaaaaacatttggggggaaaatgatgaaaagggcaagaaagaaatttagaggtactaagcccaatagtaaccccccttgagaaggccccaaaaagggacaatgggattatcaccatcaacttcaacttaaattttatccccccttttttgtccgggccataaaaagcccagaaagggccccgtttcttggcggggc

SEQ ID NO: 77082 - DNA, 288 bp, Oryza sativa
  Clone ID: PAT_MRT4530_77014C.1
atgatcaagactcaccagatcgagcagaatacgaggaggacgacgacgaatcgcggcgacgacgggaaagggagaaaagaagaaaaccctaaccctagctttgaaagaggaggggagaggggaaaaggctgcgtgctcactggagagaagatggcggccggaggagagcgccgtgccgtcaccatcgcctccgcgtcgcgccgcccccgccgttgcaccacctcgaatcgcctctacgtcgtgctgccgctacgcgtgttgcgcgtcgcctcccggctcccgtcgtga

SEQ ID NO: 77083 - DNA, 294 bp, Oryza sativa
  Clone ID: PAT_MRT4530_77015C.1
ggggtgaagggggaaaacgtgcgggctccggctggccctaccgtccccttcccgtacgacgtgctccttgcggcgagcggcgacggcgacccctcgtcgcccgtggccatccgcctccatcgccgccgacgtcttcttcgtcgtcgcggctaccgcctccgacttctcctccttcgcatcgtagccctacgactccgtctgcatcgccgttgtcgtgcccttcgttaccgtgttcaccaactacgcttcgtctccatctctgtctcattgtctccctccgtctttgctagcctt

SEQ ID NO: 77084 - DNA, 1300 bp, Oryza sativa
  Clone ID: PAT_MRT4530_77016C.1
ccggccgggaaaccggccggaattcagcccattcttccgtcgcaagaacagggttggactcaaccacctcgtgggctcgtcgtcgtctccacggcgccaccactaaacccaaccaaccccaaaacggagacggcggcgaggaggagggttttgcacccttgcccccccgccatggccgcggcctctcgggctcccctcgctcgccgctccctcctcctcctccgctacaaggccctccctctctcctccccctcctcctcctcctcgtcgacccacagcctcctcccgaggccccccgcgttgtggccgcctccgcctccgccgccgccccacggatgcgagcggcggcgcgcgttccacgacgggcggccgcggggcccgctgtggcggagcaagaagctgatcgggaaggaggccctgttcgcgatccaggggctgaagcggttcaagggggacgaggagaggctcggggagttcgtgaggcggtacgtggcgcggctgctcaaggccgacaagctcgccgtgctcggggagctggagcgccaggaggaggtcgatcttgccgtcaagatgtttaggataatacaaaaagaggactggtacaagccagatgttttcatgtacaaggacttgattgttgctctagccaagtgtaagaagatggatgaagcaatggtaatctgggggaacatgacagatgagaaccttttccctgacgcacagacatatgctgaagtcataagaggattcttgagatacggttccccatcagacgcaatgaacatttatgaggaaatgaaaaagtcacctgatcctccggaagaattacctttcagggtattattgaagggtcttttaccgcacccacttttaaggaacagagtgaagcaagattttgaagaattgtttccggaaaggcatatctatgatcccccagaagaaatatttggtctgcgctgaggttgaggattcaacgacttcatgcaccttctgcgtttggacttcattcggattacctgcatctccagaagttctccagaatttgatgtttggagtggaaatctgtcaggtgaaagattaagttatcgatgatcatgcttaagagaggtagacagaaacaaacagaccattccattagctgtactgtaatatctatggttacggaaattttgttgttcaggcaatctcttaaaatatcaggccttttattcacaaatgccactttgtgtatctgtaatccaggatattttgaaaagtagcataaaaaaaactctttcattgggtcaaaaaaaaaaagctt

SEQ ID NO: 77085 - DNA, 1044 bp, Oryza sativa
  Clone ID: PAT_MRT4530_77017C.1
ttattaaccctcactaaatgctggaggggggaaggtgtggggttgctgatataaaaaaaaaaagttactagagaagtgtgttacttagttacgtgcacgttggttgccatgtagtaagtctctctatatatagttaatataactaaaccactaaatggactttggaggatgatgcatatttagaagatttgataaatactactttttttctccggtattatttccatgcttataaaaaatctaagcatgttgtatatatgcatgtatctacaatgataatataacatgcatcttcaatgtgtcttgctctgtcattgtagtaaaatctggtgtaccaaatgttttaatgttctaattcaattttgttgatacgaaacttacattccaccatcaaaatttaatgtatccagcatcttgttgtgttctacatatgcacgagaaggttcattatatatatcccctcactgctccacttgtttcagtccatgccatagtgcttattaccaacttagcttgcgaactatgataatacttcctgcaagtgccataatacccaccatggaacataggcatcagaggcgtcagtatctttgggtcatccatgagaaaaaaacattgcagagatcacgagatcactagacaagtgtctctacggactattctggtatatgattatcggtaccatcatggaagctgccatgtcactgggacctgattctgttgcaaataacaagatactggcattcttgaagccctggttgacgtagtgctgtcacgacatttcgcattttacccatgtttgatctgtgatctgggctatgtttagttggattcaaagtttagattttggttaaaattgaagatgatgtgactgaaaagttgtgtgtgtatgacaggtagatgtgatggaaaagtactgaagtttgaagtttggatccaaactttgaatctaaacacagccctggtgccctcgagtgacaaactgctgctttgagaaaccggctgacacagctctcactaccagcatttagtgagggttaataa

SEQ ID NO: 77086 - DNA, 417 bp, Oryza sativa
  Clone ID: PAT_MRT4530_77018C.1
ggagaaaggcaaggttcgaaaaaaattgcttcacttgtccaaagcccaaataaaaataccttggtacctgacacggcgagagccatgccccccacttatttggacacccagagggcaaggctgccgagaaaatcaagccacacaagctgaactcacggccccacctggaagcctttcactggtcgaggccggagactcttgggaaaaacaggaacaccacgcatgccaaagaagacaaattattccccacccaaatcgcccaccccgcggccggctaactacggggagggcgtcgcccccgccggggactttgggatgaggtcccccagcccgagaggtggggctttttttccccgaggactccctggcgcttttggggccttctttttttcgggtgcttgtgaagggaaacccccg

SEQ ID NO: 77087 - DNA, 2329 bp, Oryza sativa
  Clone ID: PAT_MRT4530_77019C.1
attactgcctcatataatcagtaatcaattagccacaatcattttgatcaacagaggtaatattgtactttccttatatttcattgcatggtgataaaattaaaacttatagaatgtggaacaactaaatacccccctgaaatacaaccaatcttttacacataccaggtaagtggttacacatcttctgtttcccacacaaagttcctaaaatgaatcgagtatactgctagagataataacagaggcgacagaaacaacttgggtggaggagactgcacagatatgcaaagcgagtcactcatgttctcctcgccacttgtcagtactggagaagcttagttcttgttatgatccggttgttcttgtcactgggccataattatgtctcccggccaaccgggatctttaatggtattgcacaaattgtacatccaatatccctgaacttcaactgaagctacttcagtgtggaagagcttcgatacaaccctgtcattgcgctcgtaatcttgccatttgagtgtctgatctggaagcttccagctctccttggcttgggcaagaagagtgtgctgagcatcttatctagaccttcagcagtgaacttcacatacttgtttgcactggcatcctgctgatcgacaagcggcccatagtcttgcatgaagctctggaatacatgcactgctgcctgtaacaaaaggtgccaggtattcagcttcgaatccctatctgacacggaccacgcaaactgcttatgattcatctcatcaaagtttgtcaggaacgattaaagttgctgcttcattataatcctggctgtagccggcactgtggcgaacaagattactcccgcccagcccaacagctttgcatgtgttccccagatctccttcaacaacactgctgagaacttctccttatactgttcatgctcccggagccattcatcacctaagatctcacccatcttggtacctttcaggtgcttgaagaagtgccagtgcgtgttcatcatgaagagatacgacagtgtcacatcctcatacgcttttgaccatgcttcaaagttggcctcaagggccttgacaatattaagcactgcatcaacaagcatcttgtcattgaaggtttccttgcgccagctgcgatggatgacgagcacctgcgtgagcacagagcgatacgggtccccaaggagctgattgcagtacttggcaacaaagctaactatgcgtggcactccgccatcagctggaggcggcatattgcgctgcagctctacctgcacgagcaattcctcaaatatctccacggaaccatccaccaccctcttgacaagctccctggttcgggtttggatctcgacacatgcctttccaccaaacaaccggttgaagtccattctcagcttgctcaaagaatcaaacacatcgagcaaccgcaagagcttgatgggatccttcctggcatcacatatagcacggccaaacttgagaaaatcaaggatgccagcacgcgacgcaatctcggcgaagcatgaggatgcggcttcaggccgccgttcaaacacagcgacgcagagcttccgctccgcctctaggaggtggcgcacggcgaactccagatgccgcccccaatgctcgacgtttggggtgagaacctgagcatcctcagctgggtcgtgcaagtaatcaaggccgagcgctcgaaggctggcgctcaccgtgtctccacgagcatcggcgtaggcagccgtgcaggtgccgagccgcccattagcggcgagccggtcaaggatcaagctcagcttgtgcacggcggaggcggggcatccgcggcggcgtgatggagccagggtcggagggaactcggcctcaagaatgtccagtgcagcggcgaggaggccgccgtcgaggttcgcggagggggtcttgaggtgggagagcgcctcggcgaggtcggagacgaagcgggggtcggcgaggctgcggtccccgaggtactcgacgatgtcagcgagccactgggaggcgatgccgcagttgtcggagaggaagtggagcgcctccttgagcacggcggcggcaggccccacggcgcggtcgacgcactccccggcgccatagagcgcgtcccgcggggcgcggatcgggcgcacggccgcctccatcggcgggagcctcgcccggatctccccgagcctgggccccgcccgcgccagcgcgtggctgagcgcccgcgacctctccaccccggcccgcagcgcccgcctcgccgccagcaggctcgccatcccgcgtccctcctcctcccccacccccat

SEQ ID NO: 77088 - DNA, 350 bp, Oryza sativa
  unsure (1)..(350): unsure at all n locations
  Clone ID: PAT_MRT4530_7701C.1
cccacgcgtnncgccatctnctnctntncccaacctctccccttcccgtgggctgactgacccccttctggattcctgatccccttacaccaacgcgcgggccttggtctttccttcttcttggccttggcttccccgtgtggatctagcctagcccccccttccctctcgccctcgtgcttctcacgagatggactaccgcgacagggaggtgcggctggtgaggaggaaggggaagaagaagctcgctccgccttcgcctccgccttcggcggcggaaaggggcgagagggacaggttggacgagctccggcgggactaccgcgatgtgctcaaggataatgagatga

SEQ ID NO: 77089 - DNA, 715 bp, Oryza sativa
  unsure (1)..(715): unsure at all n locations
  Clone ID: PAT_MRT4530_77020C.1
ccacgcgtccgctgcggcatcgcctccagtggctcgctgacatcgtcgagtacctcggggaccgcagcctcgccgacccccgcttcgtctccgacctcgccgaggcgctctcccacctcaagaccccctccgcgaacctcgacggcggcctcctcgccgctgcactggacattcttgaggccgagttccgtcgcctcctcaccgaacactcagctccgctcgccatgaaagaacccaacaacagctccgaccctggctccatcacgccgccgcggatccccgcctccgccgtgcacaagctgagcttgatccttgaccggctcgccgctaatgggcggctcggcacctgcacggctgcctacgccgatgctcgtggagacacggtgagcgccagccttcgagcgctcggccttgattacttgcacgacccagctgaggatgctcaggttctcaccccaaacgtcgagcattgggggcggcatctggagttcgccgtgcgccacctcctagaggcggagcggaagctctgcgtcgctgtgtttgaacggcggcctgaagccgcatcctcatgcttcgccgagattgcgtcgcgtgctggcatccttgattntctcaagtttggccgtgctatatgtgatgccagnaaggatcccatcaagctcttgcgngtgctcgatgtgtgttgattctttgagcaagctgagaatggacttca

SEQ ID NO: 77090 - DNA, 233 bp, Oryza sativa
  Clone ID: PAT_MRT4530_77021C.1
aaaaaaaactttgggattttattttttgggggttaaaaaaaaaggggggggttgttttaaacgggccggggcccccaattacttttgggggttttcccgggcctggtttctttgggacttatacttttaaaagggtggcgtatccctttaaaagtttgggggggccccccccaatttcttggggtgggattttccaactgggggttccccgcccccccggaaagggggggggg

SEQ ID NO: 77091 - DNA, 893 bp, Oryza sativa
  Clone ID: PAT_MRT4530_77022C.1
ttatttttgaaaaggaaaagggaattattgcgtcagcggctagggtttgcggtggaccgggcgcacggcagcggttcacggaaacggacggccgagatcgatcttatccaaaacgaacggccgagatcgaccggtccacggccggaccacgagagacgacgacgatgacgtcagcggtgacgtcaccaccggcggcggctcgggcttgcaaactcgccggcgaacgacggcgcgacgacgcgaacggagggcaccagcacgtagagggtgacgcggcgaactcaccggtgaccaaagaagaagcggcggcgaccttcggcttgacgacggcggcggtgttccggcggtcgacagcaacggcgaaggggcggacgaggacggcgacgcaacggcgaccacgatggcgacctccccgagcgacggcgatgactggagcgatggcggagcacggctggagcacggtgacgacggcgtcgcgaggctacacggggctagagcgctaccgacggcgagagacgaaagcaaaggtggcgacgggggttggagggcggcggcgaaggcccacggcgaccggcgacgcgaaggaaaggttagggttcggaggaaagaggccgatccgaatcgaactcgaatccacgaatttccaaagcgatttagacgatgtttccaaaaaggaaaaggtagaggagatctcgggaaacatttcccctcaatggatttcaccagagaaggaaaggggcggtggggcccacctgtcagcgggagagagagagagaagagcggcggctcggttgcggactgggccggcttgggccgagaaagagagagagaaggttttgggccgactttcggcccaaagccaaaagagacttttttaaaaacctttttcaatt

SEQ ID NO: 77092 - DNA, 422 bp, Oryza sativa
  unsure (1)..(422): unsure at all n locations
  Clone ID: PAT_MRT4530_77023C.1
ggaaagagaaaccgacaataattatcttttttatttcggggaaaccacaaaaaggggagagattttggtaaattttttgccccacaaaccaaaaacccaatccagacattctacgttttttttaaccctgaaccacgaggcacccgaccacatttatagcagcacaaagcattatcacatcgagccgcatgccgcaaaaagttaaaanctaacaccgaaattcccaaatagcacaaaaaaggaaaaagggggtaaacaacaaaagggcacagcggtttcttttataagcaggcacacgccgccttctcatgtgaccccaagatcgggggcacaaacttaaagcaaataattttgactttaggaggtgatgagaaatttaggccgagatctaaaaggagggggggggggagatgttttttttt

SEQ ID NO: 77093 - DNA, 497 bp, Oryza sativa
  Clone ID: PAT_MRT4530_77024C.1
gtgacaaacaagggaagaaatacagagcatgggtggacagactggttgtctcacaatgtggttcagagggttggctggtgagatttaacttgtgggagttggaaggtgatgtgtggtcgtgttgtctgacaagtcttgcactgaatgcgaagcctgaaacccccgagggcttcgtggtaacacacatccacaaaacatggctcaaagggtactcatcagcggatgagcaatcgtccaagctttagaaccttttctgcacctccgtgtgcacatggaaggaatttactcgaggataaataatgaatcttctcttgagattacttccttttcttgtctatattgtcaattttgttcaaaatactatgctggaggattcccagagccccaaattaagtttgacacatccttgtttgatgtgtaagataaatcataaatgttactgtatatctcatgattatcatgagcgcataaagcaaaactacttcacttgaatatat

SEQ ID NO: 77094 - DNA, 2134 bp, Oryza sativa
  Clone ID: PAT_MRT4530_77025C.1
atggcaaagatgattgaagagaaatacaaagatttgcatccgaggttgcctgtcattgttgcggaaacacttctttacacagaccctgagattgagctaccactttggctagtccagatgtttaagagacctgtggacgttctccaccgcaaaaatatgtcagcgacctggttcccatacactgccatcgagaggctgtggtgtcagctagaagagatgcaaaatgctggccacagtgtggatcagtgcgacaggctcaagaagttgctacatggatctctgatgagtcaccttcagcaaagtaccaatctaccagcagtcaccagacacatagataaagtttactcgtgcccgtttgggttgtttgatggcagcgtatcgccgttctcggaactcggcgtctggagttatgtccgcccgtcgccgacacacacaccactccctctccctcctcccccgcgcgccccgcggcctccgccacccgcgccctcgccgtcgccgccccgtcccgtgcctcctgctccctccgccgccgcgcgcgcggcgcgtcgcaggctggtaaaatggataagctcaatggttctgcgcgtctcatgattgtttcagatcttgaccatacaatggttgatcatcatgacgaggagaacctgtcattgcttagatttggtgccctgtgggagtctgtttactgccaggattctttacttgtattttcgactggaagatcacctaccctgtatatggaattgaggaaagagaaacctatgctaactccagacatcactatcatgtctgtgggcactgagataacatatggtgaggaaatggttcctgatgatggctgggtggaatatctgaataataagtgggacaggaatattgttgttgaggagacagcaaatgtttccgagctgaaacttcaggtagagtcggaacagcgtccacataaggtcagcttctatgttgacaaaaagagtgctcaggaagtgataaagtctctctctgagaagttggagaaacgtgggctagatgttaaaaaaatcttctgcggtggccaggaccttgatgtattacctcaaggtgctggaaagggtcaggcacttgcatatttgctcaagaagttaagctcatgtggaaaaccacccaataatactcttgcttgcggtgactcggcacgatcagaattatccacatcctggtgcacaggtggcatggccagcattgccgagaggaactacttctgggccttcagaaaatgcaaggaattcatttgataatcatgcaacgaagtgctcggctgctagttccttctacctatgtaatgtaatataagtcatctgtctcgcgactcgtcgggggattacctggcaatgatgcagaattatttagcatccctggtgtacatggtgtcatggtcagcaatgcccaagaggaactacttcagtggtattcagaaaatgcgaaggataatcctaaaattattcatgcaactgagaggtgtgctgctggtatcatacaagctattggacacttcaaactaggacctaatgtttctccccgagacgtggggttcccttatgtcaaggagaacccggtcaagcctacggatgctgttgtaaagttttatgttctctacgagaagtggcgtagggctgaggttccaaagtctgattcggttacacagtatttcaaaaatataactcatgcaaatggagttattattcatcctgctgggcttgagtgttctcttcatgcatcaattgatgcattggggtcatgttacggtgacaaacaagggaagaaatacagagcatgggtggacagactggttgtctcacaatgtggttcagagggttggctggtgagatttaacttgtgggagttggaagttatggaagtttctgaaaatcctatttctctaattaatattcagtgcataaaggaaaggccagtctcatttggctgcataagttatcagcatacaaatgcaatatgtgatgtgtggtcgtgttgtctgacaagtcttgcactgaatgcgaagcctgaaacccccgagggcttcgtggtaacacacatccacaaaacatggctcaaagggtactcatcagcggatgagcaatcgtccaagctttag

SEQ ID NO: 77095 - DNA, 386 bp, Oryza sativa
  Clone ID: PAT_MRT4530_77026C.1
acgtacgcccacgcgtccggtcaggaagcatatatacatatggtgaataaatgatgaacttcaatgttcttctgaataaaaaaactaaaaacaaaaaaaaaacaaaaaacaaaaccaaaaacaaacaaaaaaaggcctacagcctaaaaccaatcataccatccgtaaacgagcaaccaacatacaacaatataccaaaattgccagcaaaaaaacaaaacacaaaccaacaattcaacagggcgggcactgtaaaaaaaccaagcattaccaccactatgacggcaggcaaaacatctcctataggccacctaaaataaataacgcgaacagccacataaaacgaagtatctaaaaaaaactcagccctacccaaaataagcacc

SEQ ID NO: 77096 - DNA, 4967 bp, Oryza sativa
  Clone ID: PAT_MRT4530_77027C.1
atggcggcgagtgggcgagacgacggcgacgacgtgcccttgttcttcctccacgcggcgggcgccgcggcgcacctcgccgtcgcggtcgcggtcgccgcgcggatggtgttcggctggtggtgccgccgcggcaaggatggggaggtgcggggaggaggaggaggaggaggcgggtttcggtggcgttgggtcgcggcctccgcgacgtgggttctcggcgggtttggggtcatcctcgcggcgtacgaggggtacctgggcggtggcggtggcggtggtgggtggtcgcgtggcgcggtggtggaggaggcggacgccgcggcgcgcgcggtggcgtggctgctgctcgcggcgtacctgcagtaccggttcgggtggcgacgcgaggagcggttccccgcgccgctgcggctctggtgggcgctcttcctgctcctctccgtcctcgccgtcgccgtccacgccgtgacgggactcgacgggcgccccgtgcccgcgcattcgtgggcgctcgacgccgtgtcggtcctcgctggcgtggtgctgctcttcgccgggttcctgggcaggagggaaccgggcgactctgctatcgaggagcctctcctgaatggtagcggtgcaagcgcgacggccgccggtgagaacaacagtaacaattgcgccgccgatgcgtcgatgttcaccggcgccggcttcctcagcgtcctcaccttctcgtggatgggtcccctcctcgccgtcggacacaggaagaccctcgacctcgacgacgtcccgggcctcgaccccggcgacagagtcgccggtctgctcccgccgttcaagaccaacctcgaggcgctcgccggcgacggctctgggcggaaggtcacggcgttcacgctctccaaggcactggtgcgcaccgtgtggtggcacgtcgcggtgaccgcgttctacgcgctggtctacaacgtctccacctacgtcggcccttacctcatcgactcgctcgtgcaatacctcaacggcgacgagaggtacgcgagcaaggggcagctgcttgtccttgccttcatcgtcgccaaggtgttcgagtgtttgtcccaacggcactggttcttccggctgcagcaggccgggatacgcgcgcggtcggcgctcgtcgccgtcgtctaccagaaggggctcgtgctgtctagccaatccaggcagagccgcacgagcggcgagatgatcaacatcatcagcgtcgacgccgaccgcgtcggcctcttctcgtggtacatgcacgacctctggttggtgccactccaagtaggcatggcattgttcatcctgtactccacccttgggcttgcctcgcttgctgcgcttggtgccactgttgttgtcatgcttgccaatgtgcctccagggcaaatgcaggaaaagttccagcagaagctgatggactgcaaggatgtcaggatgaaagcaacatctgagatcctacgcaacatgaggattcttaaattgcaggggtgggagatgaagttcttgtccaagatcatcgacctgaggaagacggagacaaactggctcaagaaatatctctacacatcgaccattgttacctttgtgttctggggagccccaacatttgtggcagtggtgaccttcatagcttgcatgctcatggggataccattggagtcagggaaggtgctatctgcactggccacattccgcgtgctgcaagaaccgatatacaatcttcccgacacgatctcaatgttgattcagaccaaggtgtctcttgacaggatagcatcctttttatgcctcgaggaattgccgactgatgctgtgctgaaacttccaagtggtagctcagatgttgcaattgaggtcagaaatgggtgcttttcttgggatgcctcacctgaagtgccaacgttgaaggatctgaactttcaagctcaacaaggtatgcgtattgcagtctgtgggactgtcggctctggaaaatcaagcttgttgtcttgcattcttggtgagattccaaagctatcaggagaggtcaagacctgtgggacgatggcgtatgtgagccagtcggcgtggatacagagtggtaagattcaggacaacatactgtttggcaagcagatggataatgagaagtatgacagggtcctcgagtcatgctcgctgaagaaagacttggagatattgccgtttggtgaccagaccgtcattggagagagaggcatcaaccttagtggtggtcagaagcaaaggattcagatagcccgagctctgtatcaggatgcagacatctatttgtttgatgatcctttcagtgcagtcgatgctcatacaggatcccacttgttcaaggaatgcttgcttggagaattggcttcaaaaacagttgtttatgtcactcatcagattgaattcctacctgctgctgatcttattctggtcatgaaaggtgggagaatagcacaggcaggcaaatatgacgaaatacttggatcaggggaagagttcatggaactggttggtgctcacaaggatgctcttaccgcattggatgcgatagatgtcacaaatggaggcaacgaggcttcctcttctagtaagacagcaagcctggccaggtcagtgtcagttgagaagaaagataaacagaatggaaaagaagacgatgccaatgctcagagtgggcagctggtgcaggaagaggaaagggagaaaggaagggtggggttctgggtctactggaagtacctcaccttagcttacaggggagctcttgtgccattcatcttgctggcccaaatacttttccaagtacttcagattgctagcaattactggatggcctgggctgctcctgtctcaaaggacgttgagcctccagtaagcatgtcaaccctgatctacgtctatgttgcactggcttttggaagctcgctgtgcatcctcgtaagagcactcattcttgtcacagctgcatacaagacagcaactctgttgttcaacaagatgcatatgtccatattcagagctccaatgtcattctttgattccactcctagtgggcgcattttgaatagagcttcaacggatcaaagcgaagtggacaccagcattgcttaccagatgggatctgttgcattttccatcatacaacttgttggaattattgctgtgatgtctcaggttgcatggcaggtttttgttgtttttattcctgtgcttgctgcctgcttctggtatcagcgttactacatcgatacagccagagagttgcaaagactagtaggggtttgcaaagctcccatcatacagcattttgcagaatcaataacaggatcaacaaccatcagaagttttggcaaagaaaaccagtttgtatcaactaatagccatttaatggatgcattttctagaccaaaattttataatgctgcagcaatggaatggctttgcttccgcctggatatgctgtcatcccttacatttgccttctctttgatatttttggtcaatcttccgactggtctcatcgatccaggaatttctggtctagcagtcacatacgggcttaatctgaacatgctgcaagcatgggttgtatggagcatgtgcaatctggagaacaagatcatatcagtagagagaattctgcaatacatgagcattcctgcagagccccctctttctgtacaagatgataaattgacgcaggactggccatcagaaggagaaattatgctcaataacgtccatgtgagatatgctccacatttgccatttgttcttaagggccttactgtcacattccctggaggcatgaagaccggtatcgttggaagaaccggcagtggtaaatcaactctcatacaggcccttttccgtatcatagaccctaccgttggtcagatactcgtagacagtatcgacatctgcaccatcggacttcatgatctgagatccaggctaagcatcatcccgcaagagccaaccatgttcgagggtaccgtgagaaccaaccttgatcctattggagagtacactgatagccaaatctgggaggccttggatcgctgtcagctaggagatgaagttaggaggaaggagctgcgacttgattcaccagtgatagagaacggcgagaactggagcgtgggtcagcgtcagctggtgtgccttgggagggtgatcctgaaacggagcaagatcctggtgctcgacgaggccacggcctccgtcgacaccgccacggacaacctcatccagaaaactctcaggcagcagttttccgacgcgacggtcatcacaatcgcgcaccggatcacctccgtccttgacagcgacatggtcttgctccttgacaacggtgtggccgtggagcgcgacacgccgaccaggctactggaggacaagtcgtctctcttctccaagctcgtagcggaatacacgatgagatcgacgcacacgtagcagagaaggtcagtgctcctgttgacgcgatggccgttttgaggctagctgacacgtcgataatgccgaaaaatcgcacttactagtagtggatgagattttaagtagcgagctggaaagtacccagtgttagtgctcacaatacagagtgctagttcttcgcacgatctgaaatgaagctcatgatcaagaggggaaagatgcttttagaggacaacagtagtagtagtattaaactagcgttgatgtctgaataaagggtgtaagctgctgatcattaggggaacaaccagatcctgatcagtgatcactactagtgcgtcgtagaaaggggactattacacgaagggaattagaattttcaggataataccgtgtaacccgattgacgggcagcagagactgatgcctggtatataaacatgttgacaataatctgaataaaatagtggtgtttgcgtggaaacggacaaaaaaaaaaaaaa

SEQ ID NO: 77097 - DNA, 1287 bp, Oryza sativa
  Clone ID: PAT_MRT4530_77028C.1
atggcggcgacactggcgcaggagccgcgccaccacccgtcgcgcccgccgctcgcgccggccgccgcccacgcgcccaactccgccgccgccgcgtgctcgacacctcgccgcggcaaaaccagcccccacgcctcctcccgccatgcctcctcctcctcctcttcctcctccctcccttcgtgctccgccgcgcgcgtcgcggtcacccccgcgccgcacgccacggccaccgctcccgtgacgatgcggatgcggagcctgtcggtgtcgttccagggggagtcgttcgtctacgagacgccccgcgcggcggccccgcggcgcgcgcctgctgctgctgctgctaggccgaggccgaccacccgacggagaggcgaggccgagaacgagcggccgtcgccgccgccggcgtcgaaggcgaccgacgcgctcgcgcgcagcctcgactgcagcctccaccgcaaggagtccatcctcgccgccgttcgcctcctgcgcagctcaatctctcccggcaacgccgccgccgccgccgcgcccgacgcggacgcggccaccgacaccgacaccgacgccgcgccgcccagtatccccacgcagacgaggttctggcaggagacgaacagccgcctgcggcggctaccggagtccgggctgccgcacccgatctccacctcccggaagccattcttggacggcccaatctcgccgacgctgctggagacctcgccggcgaacgcgccgtccatcatcagtttcgcgacggcggtgaggagggcgaacaaaggggaggacaagatcgaggaggcgcacaggctgcggctgctcgacaaccgccaactgcagtggcgctgcctcaacgctcacgccgacgccgccgccgttgcccggagctgcgctgccgagaaagctctgcatagtgcatggaaagatatatccacattacgtgacaatgtgagtttcaaaaggagcaaacttcagcttcagaaacagaaactcaaattatttggcattctcaaaggacagatatcgtacctagaagagtggtctgatgttgaaaacaatcattccagttctatgtctgaagcaatcaaagcattagaggctagcaccattcgtcttccaattgtttgtggtgctaaggctgatgcacaaggtgtcaagaaagttgtcagctctgcactaaccaaaatggatacaatggcttcttcaatgtggtctttattgtcaaagaaacttgtggtgatggaaaacaagacaatagaacacttcatcagaatctag

SEQ ID NO: 77098 - DNA, 618 bp, Oryza sativa
  Clone ID: PAT_MRT4530_77029C.1
atgtcgacttccgctagcccgtccgccgcgccatcagccgagtatgcagagtatttccttggtccaatcggcgattccgaccctactaagttcattagcgaagaaaccaataggataccctttagattggccaacccaaatctaggtcactggaaaaatacattcaagtcttggccttcccttgagaaaagttctcctgagaaaagttggcccgtatggtacaaacgtgtgtcggaaagcaagcaagttctctgggatgaactcggaattaaccaagcccttgcacttactttagcaaattcggctaaggatgaacccctgatggcttctgcaacatatttctggttcaacacgctcaacaccttcctgttcaatcaagggccgatgaccctcactctgcttgatgtcatcatgatcactggtttagatgtcacctcttcagccaatccgatgaccatgaattccaagaaccagtttgaatttaaaacaaaaaccataggtggctggtctggctacatagctgcatacatgggcaaagtatctgtcaccccccgagagcacatagcctttctgtcaatgtgtcattcttgcattcatatactcccgccaattgactga

SEQ ID NO: 77099 - DNA, 342 bp, Oryza sativa
  Clone ID: PAT_MRT4530_7702C.1
tcttgatagatcgcgagcggccgacctttatgggtttctctttatctaaactgggcaagggagacgacaaccacggtggcggaggtgatgctgagcttcaagcaaaaccactaggggtttggccatgtttgcgccgctggagctggaccgctagaggagcagtcaccgtggtgggcggggtcgcagatgctgtacggggaggcgtcgcctgaggaggctgccctgcgcgacagcggtcagatccaggtcgggcccggaggccgcgaccagctggatccggcggcgcccgagccggtgaagacaggggtgcccgcgatgcccaaaaaagggggaggatgaggg

SEQ ID NO: 77100 - DNA, 290 bp, Oryza sativa
  Clone ID: PAT_MRT4530_77030C.1
ctccactgtaaaaaaatgtaccactgtcttaagttatttcattttgaacagacacgaagcccagatcacagggttcagcgacaccaccactagattaaattaacatgatttggacttccatcagacacacgtgccggccaggctattccagttaaacaagcaaagcgaggcgccgatgcctaagccttcttgggggacttcctggcggacttcttgggcaattaggactccttgccggcggtggtggccttgtccgccgtctctttgggcaaaaccaacggcttgatgtt

SEQ ID NO: 77101 - DNA, 895 bp, Oryza sativa
  Clone ID: PAT_MRT4530_77031C.1
aggtcgggcccactcgtcaggcccatcttcaacctctggccgccgcatcctctctctccggtgaaaaatgctaccacggtgctccttcgattcgtctctgtcgaccatcctccttctcaatcggttaaggggaattcctcgcctcaactcgccgagttgctgttgctggactagctcttgcctgaggatcagtgtttcagaaagaattggatgattgaaaatatgctggagttgctcttgctggacaaggggtatatgtggcagtaacccgcttgccgcttccctcttcatgtaactttctgcctctcccagaatagcaatgcgcccacgtttttttggcatcgccctttcactgccattggtcgccgacgcatgtcggtagccaaagtgagtacgtgacgaaaagccccgttttgaccgaccgaatcggtgagcagcagccaactgccggctagtacgcaccggtattactgatactactactcctcggtacggtcgctgcagccggtgccgaccgccgtcatgtcgctgtcgtggcaagtacataccaactctaccaagtggggttgaagagcagtactgcgcattatttacccgagagttgaggcctccagtacgtgttgccgacccctgtgtttgctccgatccggcacgcgaggtatagatgtcgacgagaggagctgacgagacgacgaggcacggcccgccgccgccgccgccggcggtggtgaagatcatcgagacggtgcacatcgaggcggacagcgccgagttcaagtccatcgtgcagaggctcaccgggaaggacgcggtggccggcggaccgcggccagatcgatcgtcaactggaaaggcggatgccgatgaggatcaggctcagggttttgccaggtag

SEQ ID NO: 77102 - DNA, 219 bp, Oryza sativa
  Clone ID: PAT_MRT4530_77032C.1
atgggatacggcttggcgcggctcctcctcgtggcgctcgccgcgctctcgctgctcgccatggggggcttggacgaccaccatgccggccttagcctcgccgcgcttccgcgtgatgggatgagcgagccggctggtccagctggagaaggagttgggggacgagttatatctggttttatggttaaaggatgtgattcaaccagtggcatgagttga

SEQ ID NO: 77103 - DNA, 772 bp, Oryza sativa
  Clone ID: PAT_MRT4530_77033C.1
gtctgcagacatttccatatactccccatttgctgttcaactcagaaggaggtgaagcaagcacaccaccaagaccagaaggaggtgtttctttgaacttactaggagcaatggcatcattctcagtggttgcattacggaagttatgaaacctggagcctgcaccactaaattttgcagttccatgtctttggtttcctaaatatatgttttcagctctacaggccaacgctccaagattcacaggaagatccgaccttatgatcctctcaagaaatattgctgggaaattaaatcttggaatcacattaacttcatacaacaaaattgcactagatgaccttggaccagatctgatggaccatttcccttcgaacttcttaaagtcaccatcaaccatggagaagtggagctctcgtccattaacagcatccggaacctccttgagatccaacacgacgcgtgcctcgatatgccagtaaagcgcttgctgcagccccctctgctcgagccatactcggccctgatgcgggcatggaatcctcccactgtgaacgaggttggggatgaattcggcgagccgctcgtagtcggtgatgacgcgccacacggtgtcgacgtcggcggccaccgccacggacgcgaacacccgccgctcgcgccacgacaccacgtccacgtcgcactgcacgccggggcccgcggcgctcttcccgccgcgcccgcctccgccgccgtggtacccagcgccccagtggtccccggtggcggc

SEQ ID NO: 77104 - DNA, 418 bp, Oryza sativa
  Clone ID: PAT_MRT4530_77034C.1
gggggaaaataaaacaaaaactaaatgatttgaaaaaaccttttacaactagggggggggaaggggaggcccacacccgggagggaataaaaagggccccaggaaaaaagggaggctatctaaagggcacaaagggggagggggacaaaaaagggaagggcaaggagaaccacgcccccaaccccggggaggggggggacccccgcccccttgggggcgctccggtggcacccccgccccaggatgagccccacgggaccgggggggacaaaggaattggcccgcgccactgggccctcaagggcgccgacctgggggcccagggccccaacaagccccgccatgccgaggaaaccccggtggagggcgagcacccccccctcaatctccttaacggggtcagccccctcccggaccc

SEQ ID NO: 77105 - DNA, 2358 bp, Oryza sativa
  Clone ID: PAT_MRT4530_77035C.1
atgacgtcgagggttctcgtctcctcctcctcctcctcctcctccgccgccgccgccgcattcctgccgcgaattccgaacccctgcgcgaaccctagccaccgcggcgcgcctccttgcggggcggcgctctggcggcaccattctggccgtgcggtcaccacggccgcggccgccgccgccaccggcgaccactggggcgctgagtaccacggcggcggaggcgggcgcggcgggaagagcgccgcgggccccggcgtgcagtgcgacgtggacgtggtgtcgtggcgcgagcggcgggtgttcgcgtccgtggcggtggccgccgacgtcgacaccgtgtggcgcgtcatcaccgactacgagcggctcgccgaattcatccccaacctcgttcacaggtccacattccatctctccttctcgtgtgtcattgcaaattctcgcatgctcattgagggtctaattgggggaaatttgtgcgtcgttcggcaacgcagtgggaggattccatgcccgcatcagggccgagtatggctcgagcagagggggctgcagcaagcgctttactggcatatcgaggcacgcgtcgtgttggatctcaaggaggttccggatgctgttaatggacgagagctccacttctccatggttgatggtgactttaagaagttcgaagggaaatggtccatcagatctggtccaaggtcatctagtgcaattttgttgtatgaagttaatgtgattccaagatttaatttcccagcaatatttcttgagaggatcataaggtcggatcttcctgtgaatcttggagcgttggcctgtagagctgaaaacatatatttaggaaaccaaagacatggaactgcaaaatttagtggtgcaggctccaggtttcataacttccgtaatgcaaccactgagaatgatgccattgctcctagtaagttcaaagaaacacctccttctggtcttggtggtgtgcttgcttcacctccttctgagttgaacagcaaatggggagtatatggaaatgtctgcagacttgataggccgtgtgtggtagatgagatccatcttcgaagatttgatggtctcctggaacatgaaggggctcacaggtttgtgtttgctagtatcactgtgaaagcgccagtgcgagaagtatggaatattctcactgcatatgagaagttgcctgagttagtagttctatcttccttcagtttttacagttcagatatcttgttatacaagtatgagctaacaaagttatctgtcagatttgtgccgaatctggctatcagtaggattattcgtcgggataataacaaggttcgcatactgcaggagggttgcaagggtctactttatatggtgcttcatgcccgtgttgttatggatcttcgcgagaaacttgaacgtgagataagctttgagcaagttgaaggtgatttctactcatttaaaggaaaatggcgcctagaacaacttggtgatcagcacaccttattgaagtatatggttgagactaagatgcataaagatacctttctctcagagtctatccttgaagaggtcatatatgaagatcttccatcaaacttatgtgcaatccgtgattatattgaaaaggcagaagctgagagcggtaactccacaagtagctctattgtagcatcaaatgcagatactattgctattgattatgcagaaggtaggcaatcagaacaagcatccacgtcatgttcttcgagtcctgtgaagcagagaccaaaagtcccaggccttcaaaaggacattgaggtcctcaaatctgaacttgagaaatttattgcaaaatatggtcaggatggcttcatgcctaagagaaaacaccttcgtttgcatggaagggtggatatcgagaaggcaataacacgcatgggtgggttcaggaagattgccagcataatgaatctttcactttcttataaaaaccggaaaccaagaggttattgggataatctggagaacttgcaagaagaggacgttatgacattgctcgggcgttggaaaaatggggtggagtacacgaggtttctcgccttctttctcttgaactcagacgacctagaaggcgagccaactctgatgatgagaataaaggtgggcaagtttcttgcctacaatactggattacaacactggcatgttcaaagttattcattgacatttgaaccccgccttttgttcatcctgtccaagctcacaaacattggaaaagctgaggatgattacttgtgtggttacactaattgttcttgggcattggctgaccgggaggcaggagacctggagaaagaccgtatatga

SEQ ID NO: 77106 - DNA, 2959 bp, Oryza sativa
  Clone ID: PAT_MRT4530_77036C.1
tttcttttgagatgtctatttgtcatcaatcacaactgagtatgtacaactgatgcctcctcatttttttttgtcgaggtgtcgacgcagcgatgagggtgatgccggcgcaagatcgagctccagaactgcccaggcaactccaccatgctccagcttgacaacacgcagttcctcacctactgctggagatcacgacagagcagttcttcgtcggcatcaccgcttgccgcctcaactgcctctccggcagctcatgcgtcgcctccatggcgctctacggcggctcgagcctctgcttcctcaaggtgtccaacttcgtcagcgggtaccggtccgtggcgctgcccagcacgtcgttcatcaaggtctgcttcccggggatacccaacctgcccctcggcggcggcggctcgctgtagagcagggtgtctggcgtccgcaggtgggtgatgctcggcgtggtgtccgggctggtgctgtgcgagtgagcgttgtggtgtgtgttgtgccggcacagcccgaagtacggcgccgtgtaccacggcgtgatggcgaaccggacggtggtggcggtgaagcagctggaggggatcgagagggggagaagcagttcaggatggaggtggccaccatcagcagcacgcaccacctcaacctcgtccgcctcatcagcttctgctccgagggacgccaccgcctgctcacctacgagttcatgaagaacggctccctcgatgccttcctcttcaccgacgcgccgggctgcaagatgtcgtagccgacgcggtttgccgtcactgtcggcaccgcccgtggcatcacctacctccacgagaagtgtcgcgactgcatcgtccactgcaacatcaagccggagaacatcctcctcgacgagcaccacaatgccaaggtcttcgactcggcggcaacggcgagccacgcgtccacgttgttgaagagtgcgcgccgcagctcgctcggcggtggcagggagacgaggcggttgcccggcacgatctgtaaactcaattgtatctcccattgaccctgagcatctcgcacacgtaataatcgcataggttcgtaaagctaggttgcttataacaccgccacgtttcttataacggccgtgtgctaagttcagcaagcataggaactccatgtacgcgtccttgtcatagtccgccggatcaagaactacaacggtttggtccgttggatagacgaggaatagtatgtagtgttcgccaaagtggtaggggaccatgatgactcgtttgtcggagtgtgcgagaaatgaggtggccaagtaatttcccacctcagccatctttctcttacgcatacgctcgatgtaatcttttttctcctgaggtgtcttattctttagtaccgcactatcctccgatatccgcacagtgtgggccgtctcgcaaaccatcgttggatttacgtaaccgattaaggtccccgttctttgagcgtcgacgagattgatatccattttatccatcttaaagagtgcgtggaggtccttgaaactaaaggcgaagtttgcgttaggtccatccttgaaagcgccttccgggacatgcacagtaatcatcccgagacctaactcacttgccctcaagtaccactcatgcatcaacctcattggccatgggagttcacacatcaagttgaacggcaaaaacggcttgccatattcatactccttaggcacttcattggaggtccaagattgcattttgtcagcaagacctacaacgctcttctgtgcgtccgaatactgatcaggtccaactggctttagcggaccccctcgacccttgaaagattgcaaaaccatccgcgtctcacactctgccattttctccttgttgtatgtggataccataacgggtatgagcttgcgggcttcacaggtttttggctgctcctttgatgtatctggcgatggagctggtgtcatcgacatgaactgtccagtgaggatgatgtcacgacgatgccagagtatgaactggttaaccgcatccctgagaagttcaatcccctctggtgttgggatgtcaagctccaacgacatctggtcgccatgaacaagtgcgacctgaacacttacgtagtccgccggaattaggctgttatggaactgtctccccggtatcgccaatccagacgcaacctccttcgtttttcccgctctccctatcggaacgacaaagctgcacggtgtcggaccagttatactatctactgggtaggttgtattttctaccgacccgactgagcttaggatctgtgtcgactgcaaaccatgaggaaccaggtcagggaaggcttgaggatgttgtgcggcaagactgtagaactgttgggtgacttgttgtgtgacttgatttgtgatttcctggcgcatcttggccttgtaggcatcgcgcttcttgtaactttgggcttctgctgaaatggtgccccattcttcaaatggagtcttattcttctgaacataattggtgttcatgtccgacttccattgtcgccaccgatgggcaattgtttgcagtgcaaatttccggccaagtgcctccgactcaggcggataaatacggtgctcctgcagaccttcccacattaagttcttgatgtgaatgctaacatgcttccattcgtccacgttgagaggcccatgaagccttgccagcgcgccgcatgcggtgctaaacttcacccttacatgttgcggctcgacgggtttgccgtcaacatcgagagcagcaatgtagtacgtctccttcggcatgaggttcctgcccttctcgccacgctttttctttggacaagctcccccactcatcgtcgtgtccgttcgcggtggtcccgaggtcgttgtgtctgaatcaggttcaaccctgacggcacttagttttgaccgacgacgggttgccat

SEQ ID NO: 77107 - DNA, 1305 bp, Oryza sativa
  Clone ID: PAT_MRT4530_77037C.1
atggtgcagaggaagcaagcgcgcaagaagcccaaagattctcaacttggttccaacgacgggttgccggcggatcacgcgcgcggtggcgccattgtgcggacggcgctcccgaactacatgagggcgacgagcagctcggacgcgaggggtggagggcgggaggcggcggcggccaccggcgcgccgccgcggagggagcggggcgcggcgagagggaaggcgatggtgctcgccgacgggggtggtccgttcgtgagcagggcgacgtgctcctccgccatgagggggctcgggcgcgggctcgggctccgcggcggggcggcgcacgcctgcccgtactcctactgctcgttcaaatgccacgccgccgacgcggacgtggttcccctcagaaccctcgtggcatcgcggaggcggctgatcaagacgcagcagagcatgaagctcaagggcgcgtccccgttccgcaagcccagcaacggcggcggcgccgccgatggcttcttcgtcgagatatactccggcgccgccgccgcagccgcaccgacggtgagctcgggcgcgagctgcagtgatctctccacggaagacaatgacgccgcggtcagggagggggagtatgccgtgttcgatcatcggagtcgcggggatgacgaggacaaggcgcgggattcggatggttcagtggacggttcttgcggatccagtgatgtgatctcgggtggttcggtcgatttgttcgtgacgaaatctcgcggcggcaaacaagaaatcgatggagggaaggggatttacctggatcaagaagcagaggactttgatgcctgcaagtcagacatttcagaggagctggatgcaaaatatgaagatggtggtgtcgatgcttcaaatggatcttcaattgatgacatatcctccgcattcggtggaatgaacttcaaagatgcatgtcctgatcccactggtgcagcaagcagtcagagaaaaaggtggaacattgctaagaggacaacatctgagcagggggagaaaatgcgcctctttaatcccagggctcccaatttcctcccggtggagcctgatccagaggctgaaaaggttgatctcaggcatcagatgatgggtgatcggaagaatgccgaggaatggatggttgattatgcgcttaggagggcagtgaacaaattagcccgcgctcagaagaggaaagttgagatgcttgtccaggcctttgaaactgttcaacaggatgatgataagaaaagcatcacacttacaaagtcttcgcaaccatgcagatga

SEQ ID NO: 77108 - DNA, 405 bp, Oryza sativa
  Clone ID: PAT_MRT4530_77038C.1
cggacgcgtgggttccgggtggcttctgataattgtgtattcaaattccatgcatacatcactaccagcccaccaatgcctgttttgcagcaagagaacatcaacccttataccagaaaaaagatatttatccttcaagtttgaatgacggtagaacagcatgagtttacgttcaattaaattcatgggtccgaacaagtcaaaacttacttggattaacaaaaccttgtggaagacgcacaagcaaaaccaacgagaacccaaagacaaagttgcataacaaattcattctgaaagagagccattctactgcagccatcaagtgaaaccatggtcttgaatgattgtcaagtagactcagatttgatctgtagaaccggtcttcttggcgaaatgctcgaatta

SEQ ID NO: 77109 - DNA, 4319 bp, Oryza sativa
  Clone ID: PAT_MRT4530_77039C.1
gcccggtcggtcagtgtgtgtcactgtctctcaccctcccaacgcttagacatttcaacgttctcctccacagcaacagcagcagcagcagcatctcctcttcttcaccgcatctgccagcctagcgagcctaatcaggtcttcgtcttcttcttcctcatccccgtgccaataccgatttcgcgagctccgatggattccgcgagagaggagacgtcgccatgagaggggaagccgagctgtgcgtgtagctcgctgcaatcgctgcgccggtcaagaaaccagccggaatcggcggctgattccggtggaggaagatgcggcggaaggcggccggagatgctgctctggtaggcggctgcttcttgctgctcctccaccctctcctctcccatggcgcggacatgccgttgggctcctccctctcgccggcgaaccaggcgttgtggtcgtctcccaacaacaccttctccctctccttcacggcgtccccgacctcgccgtccctcttcgtcgccgccatcacctacgccggcggggtgcccgtgtggacggccggcaacggcgcgaccgttgactccggtggcgcgctccgcctctcgtccagcggcgacctccagctcgtcaacggctccggcgccgtggtctggtcatcgaacaccggcgggcagggggtcaccaccgccgcgctgcaggagagcggcaacctcctgctcaggaactcgtcggcgacgttgtggcaatcgttcgaacaccccacggacacggtggtgatggggcagaacttcacctccggcatgaacctcacctcggcgagctaccaattctccctcgaccggaacaccggcaacctcaccctcaagtggaccggcggcggcacggtcacctacttcaacaaggggtacaacaccaccttcacggcgaacaagacgctgagctcgccgacgctggcgatgcaaaccaacggtatcgtctccctcaccgacggctcgctcacctctcccgtcgtcgtcgcgtacagcagcaactacggcgagagcggcgacatgctgaggttcgtgcgcctagacacggacggcaacttccgcgcctacagcgcggcgcgcggcagcaacgcgccgacggagcagtggtcggcggtggcggaccagtgccaggtgttcggctactgcggcaacatgggcgtgtgcggctacaacggcacgtcgccggtgtgccggtgcccgtcggagaacttccagctgagcaacccggccgacccgcgcggcggctgccggcgcaagatcgagctccagaactgcccgggcaactccaccatgctccagctcgacaacacgcagttcctgacctacccgccggagatcacgacggagcagttcttcgtcggcatcaccgcctgccgcctcaactgcctctccggcagctcgtgcgtcgcctccacggcgctctccgacggctcgggcctctgcttcctcaaggtgtccaacttcgtcagcgggtaccagtccgcggcgctgcccagcacgtcgttcgtcaaggtctgcttcccggggatccccaacccgcccctcggcggcggcgggtcgccgtcgggcagggcgtcgggcgtccgcgggtgggtggtcgcggtggtggtgctcggcgcggtgtccgggctggtgctgtgcgagtgggcgctgtggtgggtgttctgccggcacagccccaagtacggcgcggcgtcggcgcagtacgcgctgctggagtacgcgtccggcgcgccggtgcagttctcgtaccgggagctgcagcgatcgaccaaggggttcaaggagaagctgggcgccggcgggttcggcgccgtgtaccgcggcgtgctggcgaaccggacggtggtggcggtgaagcagctggaggggatcgagcagggggagaagcagttcaggatggaggtggccaccatcagcagcacgcaccacctcaacctcgtccgcctcatcggcttctgctccgaggggcgccaccgcctgctcgtctacgagttcatgaagaacggctccctcgacgccttcctcttcgccgacgcgccgggcggcaggatgccgtggccgacgcggttcgccgtcgccgtcggcaccgcccgcggcatcacctacctccacgaggagtgccgcgactgcatcgtccactgcgacatcaagcccgagaacatcctcctcgacgagcaccacaacgccaaggtctccgacttcggcctcgccaagctcgtcaaccccaaggatcaccgccaccggacgctcaccagcgtgcgcgggacgaggggctacctcgcgccggagtggctcgccaacctccccatcacggccaagtccgacgtctacagctacggcatggtgctgctcgagctcgtcagcggccaccgcaacttcgacgtgtcggaggagaccggccggaagaagtactccgtgtgggcgtacgaggagtacgagaaggggaacatcgccgccattgtcgacaagaagctccccggggaggacatcgacatggtccaggtggagcgcgcgctgcaggtgagcttctggtgcatccaggagcagccggcgcagcggccgtcgatggggaaggtggtgcagatgctggaagggatcatggatctcgagaggccgccgccgcccaagtcgtcggacagcttcttgagcctgacgtcggcgaccaccgccaccggtgtcagcggcagcggcagcaccagcatggtctccacgtttacttcctcggcggcgccgccggcgcccacgccgtcgccgaacgtcgacgaggtccagcaggagatggccgtgggacgctcggcgtcggccaggatccgcgaccgggcgtctcgttcgctgctggggcaggagccatacatgacaatgtaaaacttcatcttctcatgaggtgaatagcaaaatgattttgctttttttttttgctccagtaaatgggaaaattgctctggttagtgagcaattagggagttgatctggttgattttgttttggtggaacatagaagcagctgtcggtggaacgagaagtgcttttcactgatggtgagcaatttcgtacttctacttgagaggatatctatgtgcctgatgagctgaattagtgttgtaatccagtattgtaggcaagaaacttgcccacctttatctgtacatgattatcagatccttcttcattgaagtcagatgataaatttgaaggaccgtattagtgaagtcctcctagttagtactcaatccaattagcatccagatccttcagcttcaggagccatttctgtttgtccggagaaacgcttggtttgtttggcttgcttgcgtgtttatttgttatggcatatgaggatccagccttactctcatcatcagagttggctcgccttctaggtcgtctgagttcaagagaaagaaggcgagaaacctcgtgtactccaccccatttttccaacgcccgagcaatgtcataacgtcctgctctctcaaaggactttctacttggcatataagcagggtccatcccccaattcttctggaatcgcctgatctcttcttgcaagttctccagattatcccaataacctcttggtttccggtttttataagaaagtgaaagattcattatgctggcaatcttcctgaacccacccatgcgtgttattgccttctcgatatccacccttccatgcaaacgaaggtgttttctcttaggcatgaagccatcctgaccatactttgcaataaatttctcaagttcagatttgaggacctcaatgtccttttgaaggcctgggacttttggtctctgcttcacaggactcgaagaacatgacgtggatgcttgttctgattgcctaccttctgcataatcaatagcaatagtatctgcatttgatgctacgatagagctacttgtggagttaccgctctcagcttctgccttttcaatataatcacggattgcacataagtttgatggaagatcttcatatatgacctcttcaaggatagactctgagagaaaggtatctttatgcatcttagtctcaaccatatacttcaataaggtgtgctgatcaccaagttgttctaggcgccattttcctttaaatgagtagaaatcaccttcaacttgctcaaagcttatctcacgttcaagtttctcgcgaagatccataacaacacgggcatgaagaaccatataaagtagacccttgcaaccctcctgcagtatgcgaaccttgttattatcccgacgaataatcctactgatagccagattcggcacaaatcctgcagc

SEQ ID NO: 77110 - DNA, 306 bp, Oryza sativa
  Clone ID: PAT_MRT4530_7703C.1
accttaagaggtaaacccgggggtgccaattaactgatctacctaacattattgccatgcgcctaattgccactttctccatcggaaaaccggtattccaacttgctttaataattcgtccaacccccgggaaaaggcggttggcgaatggggccctttcccgcttcttcgatacctgactccttcccttcgccgttatccttgcgggaagcagctctagttccttcgccggcgttaacacggtcctctccgaattcaggggttaccccaggaaaaaccttttgaccaaaaggcctgctaatggcc

SEQ ID NO: 77111 - DNA, 212 bp, Oryza sativa
  Clone ID: PAT_MRT4530_77040C.1
atagacacatgcttccgggcaaccatctcttcggagatccacctgctccggcgtctcagccgtcgaggatcacatacgacccatgcgtgtcacgcgagaaggatgacagacgcaccatatgtgccacgtgagaagctgattacacaacagtgatagtgtgagactataaccaaacacacctacctgaaggggcgtgactatgtgataacatc

SEQ ID NO: 77112 - DNA, 2292 bp, Oryza sativa
  Clone ID: PAT_MRT4530_77041C.1
gctgcagtgaattcgtgcacgagggagagaactagtctcgagtttttttttttttttttttttttttttttttttttttttgtttctggattacgagcaatattttgaagtttgaagatagatactttaatttaccgaacactcggcacagtagtcagtacagtcacataattacacacgcacacgctggagctgctatattcgtcaagaggctcccacctacgtataaaagcgtataaacagtggcgtaattcttctagagttcaagaatggcgagggattctcgcagaaatcagtggtaactcgtatcttctctttaactaaaagcatcagtccatcagttatatacacacgaattccttagcataacgtcactgagctcaccgcatagcccgctttgtggtaggggatcttcacctgtgaagtttacgaaggaaagaacggtgctatggtttttctggtggctcttgctgttttgctctactccgggacatcaacctctccttgatttctttaaatgattggagctcttcgagtgcatcagatttcctacgggacacgacagaactggttgaggctgcttcactagattcaaccgctgatgcttgagatggacaattagagtttcgcagagggcgtgcagttttgagcaggtgcaccagagagccaactgcggcatcttgtgatttatgggacgacgaacttgcctgatctctagcttccttcccatcactgctcccaggctgggagctcggtgtatcaacatcatccacagcaaagggataatctgcatcatctatatcatcttgtcgaggggaatcacaggaggagagtgcagagaacctgccagattcgtccttagtgtccttgcccttgcgtcctggcgacaagcttgcatagggatccattattcgaaatccatctgccctcccaaacgaggggcatctctctgatggagactgttgtgcactagatgttcctgtctcccctactctcctcggagacgttggtggcaatgtgatcggccggtgaattgggctcctcctgtcacccacctgtggtatgctcattggtgcagaccctcccttaggacgagattgaagatacccgctgggaaaattgggtggcgatggagtgggtgatgcgttgagcaaatgaggtggcgaaaatctagcttgctgcctaggcgcctgcggccagagcgctggcgtcgcccagctgtgcgggcgctgcggctgattggacagcgcctgcgggaaagcggaacctgtggctcctgtgagcgaagctgggaaggcacgcattggctcggcagcagggctgcccacgtagtcggcgatcagcatggagggcgacaaggaggagatctcgagattgaaggcagcgaggctggggaggtactggacagagacgacgaggcggccgtgctgcgtctcgacggggacgaactggtaggagcgcatggcggcctcctcgtcgcgggagagcggcacggcgaaggagccgacgcggtggaccatctcgtagttgtaggattggttggcgcagaggaggcggaagacgcggtacgccggcaggaagcggagcgtggcgtacaccgaccgaagcatcgtcatgcagcgcttgtacgcccggttcacgggtatcccctcgcccgccgcggcgtccggccagggctcgcacaccaccgtccatctctccaccacctccccgcccgctccgccgccgccgccgccgccggctgcggcgtgagccaggaggatgtccaccacgagcggctcccccgcctccggcgcctccactccctccgccgcgggcggaggctgcggatcgtggagcgggaggtggaaccacctgtcccgccgcctgaacgacgccgacgcggccggctgcagcgggcgcggcccgcgcacggcgagcacggcatggagcaccttgaggtggaactgctccaccatcagctccgcgcccccgcggccgcccgtccccgagtccgacatgctggacattgcgaccgccgaaccccgaccccagcgccgccgccgccgccgcccgcctcctccccctcaccacggctcaagctccacgacatggctggcgctcctcgcagcagcagcagcagaagcagtacggccgcataaatccgatctgctcgcgatcggagggaagcgcacggcgacgggggatagatctgcgcgtcgatgggagggaagaagaggagaggaagaggttggagttcgatcctcgcgccgggtgcctgccgcccgccgattcctgcagcccgggatccac

SEQ ID NO: 77113 - DNA, 1074 bp, Oryza sativa
  Clone ID: PAT_MRT4530_77042C.1
atggggtcaaaacctcatgggcttacccatgaaatttcatgggtcatcatgggtcgacccacagtgacccatggagcattatgggccgacccattagctaggtttcaggtcgagtaccaggcaggcaggaccagctgcgctgccgcatcgctcctcacactccgccgccgccgcatcgcgctgtggagctctgcccctctgccgttgccgtctaccatggaagagcgagatgcgcaccctcaagatcgccgcttggatgctccatttctcctccctgcagcgccatgcgcacccccaagatcgccgcgcagctgccaccagcagacctcccaaccggccatagaagaaggggatggatcatatgggcggatgctccaactttcagcgcctcacccaccatcactctcgccgcgccgccgccaacgatggacctcaacatgtgtcgatgctgcagcgcagccagcgggtggggaggaggccggtgggggaggcgggagtccggtggcaaggcagtggcgaggcgacgatgcggcgtcgccgacggtgcgggtgcggtgttccatctgctcgtgcgccatgttgctggcgtggttggcggggaggctggaggagtacttgtgggaggtggggagcggcgtgggcaaggcggcggcggtggcggcacggtggaggtggcggcgacggggaggccttggaggtgatcctctcaaagctgaaggtgagcatggaggaggcggtggaggcctcgatcttgaggtcgtcgtgcttgcggaggacgttctgtgctatggccttgacgtattcggagcggttttcggcctcggcgacggattcctcggccttgcggtggaggggcgctcctcttccaggttagcagccaggtcgtgcaggcgctacgcctgcgcatggggttggggttttgaaggggatggggatttttgggaggaagaggaggaggtggagggagggggcgggagagggagaaagggtcctcttcgccgtgtcgtcgccgccggcttctcgtcgctcgtccactcgttgggagggaggaccgaggtgggaggatgtcgttag

SEQ ID NO: 77114 - DNA, 1128 bp, Oryza sativa
  Clone ID: PAT_MRT4530_77043C.1
ctgcaggaattcggcacgaggaccccttctctcccatctttcttctctctggtttgtatctcctgcaagaaaccaaagaggatgatggatcatcaccacacgatgcagatacaattccatgacctgaagcactgcaacccaggcagtgatgcaaggatcacaaggagcagcggcgtctcgcaggtcgcgttcgtcctcgccgccattgctctgatctccttggtttcgccttcctccgtggagtacaccgtgttctcctccactctgcctgctccccttcgtgcactgggcagctttgtcatgagcaagaaggcgctgttcgtactctccaacgccatcttcctcttcctcgccgccgattactaccgctgcttcttcagcttatccccatccacaagtgatttcacagcctgtggacacactggtgtaggagacaaacaagaacagcatcatcatcaggttggggtagagccatcttctgccactgaatcttgtgtccctgatcattcagaagctccttaccgcgacaacgatgacgcatcggaggattgctctcatggtgaaagaatggatggtgaaggaagcaggagaaatattgtgagaacacctgatgatgaaatgccatcaggggaacagaaggctcatggagatatagcaatgccgtcgcaaccggagttcttcaggctcgatgaagatgacgtcatcttggagagtgctgtcgtcaaggaaccatcgtgtggaacaacaggtcaggagcttgacaagttagggatcgatgagctgaacaaaaagtttgaagaattcatcaagagcagaagaactaaatgggagaaggaggaggcttcattgaggcagcggcaggtggggaggaggccggcggggcgaggcaggagaggaggtgcggcagccgatggcggcggtggtgggagcatggggggaggcgaagggggagcatggggaggcccaactgcccgtctgccccgacgccgctgcggcgcgccgtcgtggttgcgggagaggctgtcgacgatgaggaacggcacggcgcggcacagggcaggaggcgagcgcggtggtgggaggaggagggcgaccctcgtccccgccggatggcgggatggcggctga

SEQ ID NO: 77115 - DNA, 285 bp, Oryza sativa
  Clone ID: PAT_MRT4530_77044C.1
atgacgcacaaaacaatcaacggtgtttggcgaatttcatctaaccggagcgacgagaagggaaatggagcgctcgaccttgccctccgcgctccgccaccggtcttcagcgccatcgccgaggaaccaaacaccggccaagctctccatggctgccgcaggtgtggcgtgccgcgcggaggcgggcaaccaaacaaccaaaccgtcggtgtgccatctgcgcccacgaaactactggaatctgaaagcccaaaagctttcgtcattgcagagaggccacagtga

SEQ ID NO: 77116 - DNA, 244 bp, Oryza sativa
  Clone ID: PAT_MRT4530_77045C.1
gggaagaattatggggcccatatcacatttggttccttttttttgaaagaaaccgtttttccgatgcggttacccaacaccctgaaaaaaaaaaagaaccagacaacctgtttgagcaaactggaaagcttttttgcagtttcagctgactcaaaaaaatgaaaaaggggttaaccccccaaaatttttgaacactaaaactttggttgttaccccgattttactaacaacttctcaagttaat

SEQ ID NO: 77117 - DNA, 735 bp, Oryza sativa
  Clone ID: PAT_MRT4530_77046C.1
atgcaccttctcccagctcccttgctcatctgcatgcggccgtgttgctactgaccaatgcctagctagcaagctccactacagctttgaccactgagccgttgctgctgctcacctgtctcctgaaatcgttgggagtcatcgatcgtcttcttcgtctcctcctcctcttcgcgatctgattcttttctgtcactgcgttatggaggcgctcgatgactgcaagtggcgccaaatcccggcgttcggcgactggaatatatgggatgatatgcccgtcacccaatacttcgagtcagggactttcttcttcacagcacaagcagagaaagatgaggacctcttcaaggtgccccagttccctgccaacccctacaactacaagaagtgcgttgttcgagtgaaaggggagaaagaaaacgcgaatgcgaatgcgaatgctgtgcgtgtgagaaagggaggaaggaagcagcagtatctgaatgagcagcagaagtggaagccaaagacggcagtggatgaggacctgtacaagatctcaccaaagctaatctgcagggtgaagaaggcaaaagaagttgctgaggaatttgctaggagggtgccttggcgtgaactgcatcgcttgaaaaacaactagcctcaataaatttctcccaagggtttgggtgttagaaagagatgtatgtacattgtgtgctgatatggaagtaatggaaactgattactgtttgg

SEQ ID NO: 77118 - DNA, 576 bp, Oryza sativa
  Clone ID: PAT_MRT4530_77047C.1
atggcaatgacatcaggtgtcacattaacccaaggtgttgaagacatcattcgatggaaatggacaccaagcggatcttacacagcaaaatcagcctatcaaatgcagatcttgggcggcataccgtccatatcgacaaacgtgatatggaaatgctgggcgccgtcaaaatgcaaatttttcgcttggctgctcctccaaaacagaatttggacggttgataggctacagcagagggagtggccaaacaactacttctgtcagctctgcttcagaaaccttgagacagcacagcatctcttctacgaatgctcgattacaagtacactctgggacgccatagcaacaaggctaggcatccctcagctacggccacaaaactggccccagacggcaatcctggaggactggtgggttcagaccgttcatgcaatggctaaggagaaaaggaagggggtcaaatcgattctaatcctactctcctgggatatttggaaagagaggaatagcatggttttcagaaacttagagactctgccgcaccgaatcattgacaaagtgaccgacgagatctag

SEQ ID NO: 77119 - DNA, 378 bp, Oryza sativa
  Clone ID: PAT_MRT4530_77048C.1
ggttaattacatccacatgagcgagcctatggaacacctccgattaagctgcgctttaggatcgttgtcttcaaaattaattactcgccgaaggttgagctttgtttcgccaaaacccggtcacaatacactaccatcacgtcggtgtgcggagagaatttggtgaagcgggtgacctttgcctcgtcggtgcccagtcatgtaccctagccttcatcaaacatggattttgtggttgcttttgcctcgtcggtgcccagcaacggtgtatccgtttcctgtccaatttagacgtgttaatagtatagtgtgttgtgtttgtattggataagcaacttgacggagaacgagattagcttgttattgatgactcgccga

SEQ ID NO: 77120 - DNA, 219 bp, Oryza sativa
  Clone ID: PAT_MRT4530_77049C.1
atgtcgtcgaggacagcgtcggactacgcctggtcggcgtggactagggagaggacgtgcatggtgatggtggccctccgcgcgatggtgacgttggcaaagggcctcgtggactcacgcttggacgaacgcactgcaattgaggcagaggccagggagcgaagggtggcgaggatggaggcgtcagggcagagctttgagcgaagtgactcggcgtag

SEQ ID NO: 77121 - DNA, 1623 bp, Oryza sativa
  Clone ID: PAT_MRT4530_7704C.1
atgcaggcgcgccggcggcacgccaggcagtgccgtctggtcgtcgccggcctcatcatcgtcaccacgctcctcttcttcaccggcgacgcccctcgcgtcttcatcgacgcgcccacgcagaaccagctgccgcgccgcctgccgctcagcctcgccgccgtccgggaggccgccacatggcccgccgacgccgtcctgctcccggactgggaggtcctcctgctcctgcatcccaacgccaccgccatcgcccacaacgccacctgcgcgttccagggcgccgcgtcgtcccccgcgcgcgcgctcgggaggctgccgtcctcgggccgccacgcctacacctgcgccatgccggagccggcgcgccgccaccagccgttccacgcgccgcggatcgtggctatggacgccgtccatgcctcaccgcatgatgatgatgagctggtgatgatggtcaagtggagcggccgcctcgtgtacgactcggtcgtggtcgacggcggcgacgtgctcgtcttcgccaagggcgtcaacccacgccagggagtcaaccgcccggcctcggacgtaaggtgcgtctactaccgcggccgcggcggcagcgccgacgacgtggtggcgtcgctccccgcagccacgtcggcgcagcaggtgttccggtgcccgcctccgccaccagcagcgttgctacgcgtgacgctcgccctcgccggcgaggaggagcccatcccctcggtggcgacctacagtctgcctccagcatcggcggcggcgacgcacaagagacgacataaaatctgcgcgtgcaccatggtgcgcgacgtgggcaagttcgtgcgggagtgggtggcgtaccacgcggcggtgggcgtgggccgattcatcctctacgacaacggcagcgaggacgacctagacgagcaggtgcggcgtctcacggcggagggcatggacgtcaccacgctggcctggccgtggcccaagacgcaggaggccggcttctcccacagcgcggcggtgcaccgagacgcgtgcgagtggatggcgttcatcgacgtggacgagttcatcttctcccccaactgggccaccgccgcctccccatccagctccatgctccggtcgatcgtcgccgtgaagccggacgtgggacaggtgtcgctcgggtgcgtggacttcgggccgtcggggagaaccacccacccgccggagggggtgacgcaggggtacacgtgccggcggcgagcggtggagcggcacaagtcgctgctccggctggaggcggcggagaggtcgctggtgaactcggtgcaccacttcgagctccgggaggggaagcgcggcgagtggaatcggcgggcgcgggtgaaccactacaagttccaggcgtgggacgagttccgcctcaagttccgccgccgggtctctgcctacgtggcagactggacccaccgggtcaacctccagtcaaaggaccggacgcccggtctgggcttcgacccggtccaaccggccggttgggccgccaagttctgcgaggtgaacgacacgctgctccgggacgtcacgcggcggtggttcgccgccgccggcgagagtcagctccaagcagcccgttga

SEQ ID NO: 77122 - DNA, 226 bp, Oryza sativa
  Clone ID: PAT_MRT4530_77050C.1
cccacgcgtccggacatactatgctactactagccactgagctaactaactaactgcgcgactatggcaccaacgagagaagggctgctctggcaccttcgtggatccattgcaagggctgaagtccaccgacgagctgctctatagacagcggtgcaacaactcatgcttggactacgtcagcaatggccgatggatcaagcacatgcaggtgcagtcaactgaa

SEQ ID NO: 77123 - DNA, 625 bp, Oryza sativa
  Clone ID: PAT_MRT4530_77051C.1
gattttgtttatttgtattcaatcatgttcgaagattgaaatattatatacatccttttttaggggttacaggttaaattaggtttagattcgaatttcgcaagaccaagaatttactcgtccttgtcgtccttgtcgtcaccaccgtccttgtcgttgtcaccttgaccgtcgctggtccacaaagtcaagttgtctcggagcaattgcataatgactgtggagtccttgtaagagtcttcggtgaggttgtcgagctcagcaatggcgtcgtcaaaagcttgtttagcaagttggcaagccttgtccgggctgttcataatttcgtagtagaaaacagagaagttaagagcaaggcccaatcggatggggtgagtagaggccaactccttggtggcaatatcagaagcagattggtaagcacccaaagacttgtcagcggcgtccttgcggaggtctccagccttgaactcagccaatatctgtagtagtcacccttcattttgtagtagaaaaccttagcctcgttggattgagcggcggggatgaggtgcttgtcgaggacgttcaaaacgtcttggcaaatgccggaaagctccggtcttcaaccttggttctgtttgag

SEQ ID NO: 77124 - DNA, 3086 bp, Oryza sativa
  Clone ID: PAT_MRT4530_77052C.1
atggcctccgccccgccggcggcgccggcgccggcgccatcgctggtagacacgctattccagcgctccctcgacgacctcgtcaagtccctccgcgccgacccgtcggccgccggcgagtccgccgccgtcgcgcgcgcgctctccgagatccaccgggagatccgcgcccccgacaccgccaccaaggccgtggcgctccagaagctgacctacctctcgtcgctccacttcgcccccgtcgcctcccacccgctcgccttcccggccatcgagctcatcgcctcgccgcagctaccccacaggcgcctcgcctaccttgccgcctcgctctccctccacccggcctcgctctccctcctcccgctcgccacccatcagctccacaaggacctctccccctccacctccagcgccgccaaccaccacgtcacggccctcgcgctccagctgctcgcctcccccgccgccgccgccgcgcccgacctccccgtccacctcgcgcacgacctcgtgccccacctctcccgcgggagcccccgggcgatcgcggccgccgcgcgtgtcatagccgcctcgccgtccgcggccgtgccggtccttttcaagccactggccgcgtgcctcgcgtcgcctgacccgcgggcgtcggctgctgccgcagctgcattctgtgagctgtcggcgccgccagccgatgctgctcctttcctgccgctggcgcccgacctctacaatctgctcaccacgtcccgctccaactgggcgctcatcaaggtgctcaaggtgtttgcacggctggctcctctggaatcacgcctcgccgcacggattgtcgacccggtgtgccagcttctcgcgcgttctgctgctatgtccctgacgtttgagtgcatccggactgttctaactgccctgccggcacatgatgctgccgtgcgccttgccattgggaaggccaaggagttccttgctgctgaggatgatcccaacctgcggtaccttggcctccttgcgcttggtatgcttggaccggcatatgcatcgacgttgcatgaatgccgtggtgtgattgcccaatcactgggtgatgctgactcaaacatctgccgggaggcgttgcacctcatgatggggttgatcgatgacagcaatgtcacggacattgctggcatgctggtcagtcatgcttcgaagtcagacccagagtttgcaaatgacattcttggcgctgttctttcagcatgtgggcgcaatgtgtatgagctggtatcggactttgattggtatgtctcactcctcacagatatgggtaggaaccttcattgtgcacagggggatgagattggtcggcagcttgttgatgtgggactgagggtgcaggatgcacggccagagcttgttcattcatctcgaactcttctcattgatcctgctttgcttgggaaccacctcctttgtcctgttctttctgctgctgcatgggtctcaggtgagtatgtgaacttcacgaaggatcctgttgagcttgttgaggcacttctgcagccaaggatcagcctcctgccgatgtccgtgagagctgtctacatccaggcagtacttaaagtgatcactttctgttgcaatttgtatgttgagaggttgagtgattcaagcaaggaagtgtctgtagcattgaatgggttatctatggatcaaactgttagtgggggaagtgacgctccaattgggtctagcaatggacaaattacagtccctaggatgatggaaaaggaccctttttcacttaaatcggttgttcacatgattaacttgattgaaacaacagttggcccacttgttgagtgcaatgaggttgaggtcctggaaagggcaagaaacttgattggttttgtttattcgctaagagagattcaagaattgaaggaaagcaagtttgatgatgataagcatagcagggtgaaggagcttgttaagaatatgcaaacagtattatctcacgaaatagggcctgtttctttaaatgcacaagagaaagtatcccttccagatgatcttgtcctgaatgaaaatcttgccgagcttgttgacatcatcagtgaagatgacactactctgtcatcttcaattgttttctaccctcgtagctgtggttcagtcgaaaccagagatgaacctgcattatcacttggttcatcttctcttctttctgagcaccgtaaaaggcacggactgtactatcttccaacaggaaaagcggaggatgggccagttgattatcctcatgccaatgatcctctgctgcctgctagcagcgaaagtgctctggatgataaattgaagactatccagcctgttaccggtgggaaaaaaccgaaggccgtcaagtccagaccaaaagtagtgaagttggatggtgaggatttcctaagttctatggtggctagtgcaagtgttccaaaagaagattctttatctggtgctgtacgtggtgtactgttgggtagagatctcaagccatcatcttcacaaaaggcttcagataaggcttacgaaggaattataaacaaaatggactctggtgaatctagttctcagtggaaaaataatgtagatgctgatttcgtaggccatcccacttcaagttctagaccaagtattcaacagagccatgataaagagagtacaaaccctcttgaaagtgatgggaaggaagcgagaaaacacagaagatctaggagtgggcatcgtcaaggaaaacataagcatagagaaaggcattgcactcaacctgatgtacctcaagctcctataatccaggattttcttctatagttgctgaggactcccttgtttttgatacatttctattgccaagtacatgttaccttttgttcattcacattcagcggtttttagttttcactttcatttcatggaagttatttagttggtttatctgtggcagctggtctaactgccactgttgtatcctgtatatctttcttgagcatagcacttgatgttcttcatagctccatggcaatatatttgttcatagtgtacaaaaaaaaaaaaaaaaa

SEQ ID NO: 77125 - DNA, 245 bp, Oryza sativa
  Clone ID: PAT_MRT4530_77053C.1
ggaaaagcaggcacgcgtgcaggagccgggacgctatacagcggtcgacctacgcgttcgatcaaatatagatgaatcatcaccatagacacattactatgagtatatgaaaacactagatttacattttacatacgcatgagggctccatattgagattaaaagtgtaagagttgtgttacaaacagaacatgaaaaagagtgcatggagattactcatctatatttgatcggacgcgtggggc

SEQ ID NO: 77126 - DNA, 1367 bp, Oryza sativa
  unsure (1)..(1367): unsure at all n locations
  Clone ID: PAT_MRT4530_77054C.1
gaggtgctcgcccactaccccgctttgttctaagctccacccagtaggaggggtccacgtgtgcaggtgacgccagatgacgtcatcgtcgtcatcgcaagttacagctcaccaaaagccccccagatctaagcgcctaggattcgacacgcctcgtgtgaatcacagcttcccgtggccgtcggatctcctcgcgacggccgagatggagccgtgcgcgccctgctccagcgcgcgcaccacgtcggccatcgatggccggaggctcgggttctcgccgacgcacgacgccgccagcgacgccacggcggaggcctcgccggcgtcgtaggcgctgcccagcctctcgtcgaccagcatgcgggcgtcgcaggcggcgcaggaggcgggcctgaggcgcggcgcgaggacggcggtgaggaggcggccctcggcggcgcagaaggcctccatgccggtgaggagctcgaggaggaggacgccgaagctgtacacgtcgctcttcttggtcaccatgccggagcggatgtagtgcgggtcgacgtaccccggcgagccgagcatggtgtgcgcggaggaccgggggcggacggcagcggagaaccccatccgcgccgacccgaagtcgcagagcttggcggacatggcctcgtcgaggagcacgttcgacgccttgacgtcgccgtgcaccaccgcgggctcgcaccggtcgtgcaggtactccagcgcccgcgccacctgcagcgccaccgacgcgcgccgcgcccacggcatcgtccccgcggccttcccgccgccgtgcagccgctcgtgcaggttcccgttcgccgcgaactccagcaccagcacgccttcctcttgctgctcgcagaaggcgaggaggcggacgatgtgaggatggcggacgcggaggagagcgtcgagctcctggcggaacacgcggtggagccgctcgctgctgcggtggaccttgacggcggcgagcgcgccggcgacgcgggcgaggtacaccgtgctgaacccgccctcgccgaccaccgccgacgtgaacccgcccgtcatcgcctccacctgcgcccacgacagcctcctcgccgccccagccacaccaccctttcccccctcctcctcctccccaaatcccccgccgccgctgccgccgccgcagtccgcgtcatcgtcgcaccccctgtcaccggcggccgaggccgccatgttcccgccgcagccgcagcacaagaacctgtatctctgccacatcctcgcgctcgatctcagcangcgttgctccttctctgcttcttgcacccacgagaagaagaagaagaagaagaggaggaggagaggaaaggcgagaggaggaagaa

SEQ ID NO: 77127 - DNA, 396 bp, Oryza sativa
  Clone ID: PAT_MRT4530_77055C.1
atgctccaccgccatcaaccttcgccgatgcatgggcgttgcactggtgccccccgccggccagcctccacatgttgccatgctacgccggcctccgtcgtcgccgaccgtgtctccttgcgctgcgcaagccttcgctgccgccgaccgtgcctccttgcgcctcgccggcgtccgccgccgccgactgcacctcaacacaccgtgccgactaacgccgccaccggtttcgcgccgagccggctgccgaccgtgcctctcgcgccgaccagccgcagcgaggccgcaacctctctgcctcctgctgccgtcgtcaacgccctcaacctgttgctgacgctgttcgcccgcatccttccaccagcgccactcccgcacttgctcaccgtgccctag

SEQ ID NO: 77128 - DNA, 726 bp, Oryza sativa
  Clone ID: PAT_MRT4530_77056C.1
cggacgcgtgggacgccctcacctcccccaactccactagctctccccttgcccctccgccggcgccggcgcccctcctccctccgccggcgccggctcgacgatgccgcctctcccctcccggccctgggcggcgagttgacgagctccccggccgccgcgccgtttctccctcctccccatccgtcggcgcacgatgcagaggagcgtggtggcctcggggacgagcggcggcggcggtctcggggccgagcggcggagctggcggcggcctcgggaacgagcggcggagcttggcgtcgaccttgatttgtgttaccgcgatttgtgttggcgatttttccaaatcccctcggagccgagcggcgagcggcgattttgttgccgcaattttggtgggcgtgttccttgatttgttgccgcgattttggtgggcgattttggggaaaacccttcaatgggcagcgcgagggcacgagcgggcggaggcgcggggcaacgcgctccacaacgtagaaaagctgtcaattcctcgcctggcatgggcctgcggcagggaggaatcgtgcttccctccgtgggagagaacgtctctgctggggcgcggaacctagcgccacgcaaagctcgattccgacgtggcgccccatagcgtcggtccacggtgttgcactgtgaagggccttaccccatgtttcataacctatctctctcgttttccgcgca

SEQ ID NO: 77129 - DNA, 1745 bp, Oryza sativa
  Clone ID: PAT_MRT4530_77057C.1
aaccctcctccccagacgcgccaccaagctcccccgccggtcgccgccgccgccgccgccgccgcggccgggccgcagcaggtcttcggaatgcacaacagggagcagaggagggagccaagccaccaacatccgaggggtttcggtagatcgctggagaaagagcagcgggtagtgcagccttctgcgggtggccatgaagcattaggtgtagcgcccccgcgagagctgcatacaatgcaaaccacaggtggccgtgatatggctgctggaacaatgtacagggaacatcagcagcggcagaacttcagatcagattctagaggaaaaaatgtatcaagccaaagtgtaagatttcagaggagaattaggccatgtcggtatgacatagatcaatttacacctagttttatgtcaatttttgaatctctggtgccctcggatgaagaaatttcaaagcagaagcaattgctggcaacactgagcagattaataaataaggaatggcctaattcaaaactttacctctatggatcgtgtgctaattcatttggtttctcaaatagtgatattgatctttgtctgtctattgacgagaaggaaatgagcaaggttgacattattttgaaactggcacatattctccatgctggtaatctccggaatattcaggcattaactcgggcaagggtcccaatagtgaagcttatggatccaaatacagggctatcttgtgacatatgtgtcaataaccttttagcagttgttaacacaaaacttctaagagattattcacgaattgataaaaggttacggccattagcattcattgtgaagcattgggctaaatctcggtgtgtaaatgaaacttaccaaggaacactttctagttatgcctatgtgataatgtgcatccactacttacagtcacagagaatactcccatgtctacaggaaatggagccgacctattatgtcactgttgataataatatttgtgcatactttgatcaagtggacaaattaaatggctttggtgctcaatgcaaagacactttatcaaggttgctttggggcttttttcgttactgggcatatgcccataattacacaaaggatgtaatatcaattcggactggaagaaccattagtaagaatatgaaggattggacaagaagaattggaaatgacaggcatctcatttgcattgaagatccttttgagacctcccatgatcttggtcgtgttgttgacaatagatcgatctgggcactccgagaggaatttgagcgagctgcggagatattgcaccttgacccaaaccccagcatcacactttttgagccttatgtgccctctgaagctgaaacatgataccacaaaatcatcatcatcatgttctgctgtgtcaagaagcccttcagttccaaaggaatcttgtcaaagcttatgtcgtactatgtgcatagcttagctgtaccatgtatacttaagttgtaaagtaactaggggcctcagcagtaggtggtgacagcatgcttctgctaagtggtaattgggggaagccagcaatatttaatcagatttctagtgctatcaattcttatttagaaagggagatgtttgaactagacactactgtccgatatttcatgatagtttagcgtgcagtagtttttttccctaatgagaagaataataaagttgctttaagcccaccgaaaaaaaaaaaaaaaaaagcggcc

SEQ ID NO: 77130 - DNA, 1487 bp, Oryza sativa
  Clone ID: PAT_MRT4530_77058C.1
atggcagatactgctccttcctgtgatacttacctgttgttcaatggagaaacactgcttccaaatggtgtccgtgcgtttatttataccgttgtcctcgcgtactgttttattggtctatccgcgatcagtggccggttcttcaaatcgatggagagcatcatgagacactcccgggaggttgtcacaatagacccacacacaaatgctactattgtcaagcatgagaaggtgtggaactacactatagcggacgttgctctcctcgcatttggtactagcttccctcaaatttcactagcaacgattgacgcaatccgaaatctgggtcagctgacagcaggaggtttaggtccaggtacccttgtgggttctgctgcatttgatctgttccccatacatgctgtttgtgtggttatgccaagggcaggctctaagaaaaagatatctgatctcggtgtttgggcaagaggtgacagacctgaagattgggttccgacggaagatgcttcagttgattatgacgataactatgatgggattggggacatactccctggccagaatgaggatattgtggatatattctcagcgcgttcttacagtaatgaagggtatcaccatgtttcagaaaaggatgtggaagaatctccaacaggtcttacattaaagaacaaatgggaggatactcactggttttctatttggtggcaacaatttgttgatgctgcaacgttggagagttcagtgtcaagaaagatggattctacctgcttgagtgtcatcggaatctcatggaatttaatcattgcaccttggaaaatgctatttgctttcattcccccttatgaaattgctcatggctggatcgcttttatttgctcactaatcttcataagtggtattgcttatggggttactaagattacagatcagataagctgtgtcacaggagtaagtccatatgttatagcattcacagcactggctgctggaacatcatggcctgatctagttgcaagcaagatagcggctgagcgtcaaatcaccgccgactccgcaattgccaacatcacttgcaggtacatttctgcacatctcctctccaattaggtgaacatatatgtcggcattggtgttccatggttggtggacacaatgtacaactattttgtctacaagaagcccctgtacatagacaatgctgctggcctcagcttctcccttctggtcttcttcgcgacgtcgttcggttgcatcacggttttggttcttcgtcgcgtcatacttggcgccgagcttggtggccctaggatgtgggcttgggcaacatcagtgtacttcatgatcctttgggttgtttttgttgtactttcatccttgagaatctctggagtaatatagactaccctaaccgctctgccttcttctccaccgagcgcagatttctccgccccgccgccgcgcgcgactcctcccttccccat

SEQ ID NO: 77131 - DNA, 3250 bp, Oryza sativa
  Clone ID: PAT_MRT4530_77059C.1
atgggttcttcttggtggtggcatggaagggcggcggcggcggtggcgtgttgggtgtggctggcggcggcggcggcggtgggggtggaggcgataggggcgaactgggggacgcaggcgagccacccgctggcgccggacacggtggtgcagatgctcaaggacaacgggttcgacaaggtgaagctgttcgacgccggggaggacaccatgagcgccctgaggaagagcgggctggaggtgatggtcggcatccccaacgacatgctcgccgccatggccagcagcatggcggccgccaacaagtgggtcgaccagaacgtctccaactacctcaacgacggcgtcaagatcaggtatgttgctgttggtaacgagcctttcctggagacatacaatggaagctttctgcaaactacttttcctgccatcagaaacatacaaagtgcgcttgtgaaggctggcttgggtagtcaagttagagtgacatgccctctcaatgctgatgtttatcaatcatcgactagcaagccttctgatggggacttccgcacagatattcatgatctgatgctcaccatcgtaaaattcctgagcgatactggtggagctttcactgtcaacatctaccctttcataagcctctattctgattcaaacttccctgtcgactacgccttctttgatggtgccgcatcacccattgttgatggctctgcgacatacacaaacatgtttgatgcaaactatgacacacttatatgggctttgaagaagaatggctttggaaatctcccagtcattgttggggagattggatggccaactgacggggacatgaatgcaaatattcagatggcgcagcacttcaaccaaggcttcctaacacatattgccacagggcgaggaacgccgatgaggcctggaccagttgatgcttacttgttcagtctaatcgatgaggatgagaagagcatacagccaggtaattttgagcgtcactgggggatattcacctatgatggcttgccaaagtatcaactgaatcttgggcaatcacatggccttctcaaagcgaagaacgtgaagtaccttgagaggaagtggtgcgtgctgaagccttctataggccttactgatccaaggctttcagatagcatcagctatgcctgctccctggcagattgcaccagccttggttacaagacatcttgtgggggactggacaccagaagcaacatctcgtacgcgttcaacagctactaccagaagaacgatcaagacgatgtcgcctgtgggttctcgaacctcgcaacgatcactggccaagaccccagcaccggaacatgcagattcggtatcatgatcgaggttgactcggccttctcgtggaagctgcagcatgttagaagcagcaacctcttgatgcttctgctagatgagaaaagttcagagaaagctcgccgcagcctgcggcctctcagaactgcatctccaatccccgacaacggccaagcggttggagcctccgtctccggcatgcgatccgcgcgaaatctcaccctccgtcgcggcctgacgaaccctgctccgatcccctcccaggaaccattggggaaccaaatctacgtcgccttcttcaattgcaaactgcaggctacaggaatgtcctactctttccctgagaagtggccatattgggctggaagaggcagcataccaacagtaagcagagctgttggtgcagcagtaacagtaaactgtgcaaggaggcaggccacccacttggcatccctctttgattcctcctgttcatttgaggctcaggtcctcattttccaccagcgcttgccagggaaaggtccagcactggactggttgatgttgttggcttcaaaggttagggatagagaaagcctgaagaggagaggaggaattcatcaggaatctgctgtgctccttttctctgggagagaagcaaagagcaggttggagcagcagcagctgggatctgtaactggcatgggttcttttgggatggactggaatcagaagagctcggtgttgtgggattgggagaatatgccgccgataggaaatagcgcgaacgagaatcccaagaatgtgatgctggctgaatcaaaacttgcaggtgttggggttgacataggccatgaatcaggccattcttctggtggtactttctcttctagctcagagattgggtatggttcatccaagagttccatatccgcgtcgatcgattctccgtccaaagtggggaacaccatagagctcaattttgcatctgcggaagagcatgataagaacatggacaagggtaagagtaaagttgatgacaccggaacttctcgatcaccggtggtagcagccaatcgtgtagagcccttgattggcctgaagcttggcaagagaacctattttgaagatgtctgtggagggcagaatgtcaagagttctccatctggtgtgagtgtggctaccccatctcctggtctggccaagaaggtgaaggtggctcagcagaacactcagaacccacactgtcaagttgaaggctgcaatgcatcgggcaatgtactgccacatggagcacatcatagttttgatggtctcatggcgttcaaagaaaccaacgcgaaggtccttaaccaaggcatggaagcttctgctgtcgcttccggctccgctagaggcccagactttgagcatgctctctctcttctgtcaatcgattcagtgggtgctgcaaaccttcagccaggttctcagattcaccctggtgtcaccgccattgccggcacctccaaccctgtcatgatgccatctccagcaatctggcaaggaggcttgtcccttgatcagcaggcgcagtttcaggctttcgaccgccttggcaacgacgacgacgaagatcatctccagctcccaaagccttcctatgacaactcccactatgatcagatgaactgacgatgtttcagatgtcgcgcaatcgacatggcttctgctcttatctgaaatttctgaaatctggaactgcattcttggtgttctgaagaataaaggtgtgcgagaaacttgaacttgaattgatctggttgtgttgtactctggttgtagcgctgccatgaaacataaacttaacttttgctttcctttagtcgctgtcactaatcgtgtgcttgaataatttcattctggtgatactttgtatcagaattgcttc

SEQ ID NO: 77132 - DNA, 1240 bp, Oryza sativa
  Clone ID: PAT_MRT4530_7705C.1
atgggggccggcgaggtggtgcaggggctgaagccggtggcggcgatggtggtggtgcaggtggtgttcgccggagtgaacatcttctacaagctggcggtggtgtgcgacggcatggacatgcgcgtcctcgtcgcctaccgctacctcttcgcctccgccgtcctcgccccgctcgcctacttcgtcgagaggaagaacagaacaaagatgacgtggagagtgctgatgctgtcgttcgtctgcggactctccggggggtcgctggcgcagaacctgtacatctcggggatgaagctgacgtcggccaccttcgccaccgccatgaccaacctcatcccggccgtcaccttcgtcctcgccgtcctctgccgctacgagcgcctcgccatccgcaccgtcgccggccaggccaaggtcgccggcacgctgctcggggtcggcggcgccatgctgctcaccttgtacaagggcgccgagctcaacccctggcacacccacctcgacctcgtcgccgccctggaggcgcgccaccccgccgccgccgccgccaccgggaataacgaccgcgtgatcatggggtcgatgctggtggtgggcagctgcgtgttctacgcggtgtggctgatcctgcaggcgaagctgagccgcgagtacccgttccactacaccagcacggcgctgatgtgcgtgatgagcggcgcgcagtcggcggcgttcgcgctgttggtggacagggagcccgcgcggtggcggctggggctggacatccggctgctgtcggtggtctactccggcgtgctggcctccggcgtgatgctggtggtgctgtcgtggtgcgtgaagcggcgcggaccgctgttcgcgtcggtgttcaacccgctgatgctggtggtggtggccgtgctggggtccctcctgctcgacgagaagtatgcacgtcggcaccctgctcggcgccgccctcatcgtcgtcggcctctacgccgtgctctggggcaagggacgcgagaccgccctcgaggccgccaaggtcggcgacgacaacgataaccaccacatccacgtcgtcgtcgtcgtgccgccggaacaagcgcagccgcagccgcaccaacaagcggaagctgatgctgatgccacgacgacggcatgcgaacaaccatcggattcggaccgggcgaatattgcatcctctttacgacacagccatagatacttccatcgttcttgcgggttttaa

SEQ ID NO: 77133 - DNA, 585 bp, Oryza sativa
  Clone ID: PAT_MRT4530_77060C.1
atggacctggacctggaccgcaagcaaatcaagcgttgcgtcgtcgccttcctgccgccgccggaggaggaggatgccggtgaggagatccgtgtggtgccgtgccctgccgctgctgcggaggaggagaggcggcgatcttccaagaggaaggggaagaggtgcgcctccaatggaagcaagcctgcggggacgctggtgccggccgacggcgaggagatgatcctcgtcccgcccgggaagctcgcgctgtccaagaatctggtcgacaagatcctctccctggagaggatggagctgccccacgtcgccgacatcgtcgacgacggcaacccgaacccgtcagaggcggacaaggcgctcaggaggtgcgtgctcgacctggacagggacaacaagaggcaccaggacaagctcgccgcgtgccaggcgatcatacggagcgttcgccatggcaagggctacgccgtcgtcgacaaccgcctcgacttcagggtcgccgtgtgcagggccgagggcgtcttcctgctcccctgccatgtcgccgatcttatccccgtgggatttgatcttgtctccaattga

SEQ ID NO: 77134 - DNA, 996 bp, Oryza sativa
  Clone ID: PAT_MRT4530_77061C.1
atggatcgggacgtcacggagccggcggctccgctccaggccgattcctcctcctcatcgtcaacgtcggtgccagggctgacgtcatccaaggggggggcggcgccgacaggtggggcccatgagtcagcggctccaaagggagggaggtggcgcctggcaggtgggccccaccaggcggtggctcaaaggggaggcgagggaggcgccggccgggctcggctcgacctcaaggccgaccggccgaccaaggcgaggcagcggcgaggcacggccaccgacggcggtgaccggcgggttccggtggggttccggcgacgcgaggcggtggccgagatggcccacacggcggcggagctagcggcggcggcggcttggcgcggcggcggccctagtggcgacggcacgcggccggagatgggcggcggcggcggcgctagcggcgagcggcccgcgaccggtaggaggcacgggagagcgcggcgaaaaggggaaaagggagagggagatgcggggaagctttataggggctcgaaaggggcggacatggccgggaaaccccccaatttggccggcgacgtgggggaaaagagagagaaagtggggggggattcaaatcgaatcccgcccatttgcgggcgcgcgtgcgggccgggagatgcgggggagagagcggcgacgtgggcgcgaggtgcgggcgcggagtggaggcgcgacgtggagaaggcggcggcgcgggcggtttcggcggcgggatggcgccgctcccgagatgcacgccgccagctcctggccaccgctcgccgctcacaatcgaccactgccaaagtcacgtcgagccgatgcccacccgctgcctgccactatccggagtcatgccgcctcccgctgcccaccgaagttgcgccgagccgacgcccgcccactcctggccactgcctcgtcggcggtggagccgagccagccgcctgccgtgcactgcacgctgcccactag

SEQ ID NO: 77135 - DNA, 2523 bp, Oryza sativa
  Clone ID: PAT_MRT4530_77062C.1
cgccggcaggaaggcagcggggcggccaagcttgaatgctcctgtgaggccgcttctcgggctgccaagctgatggacgcgccgccatcgccactgcggccggactgggggacggaggcgaatcaccctccgggctgctacacggtgggacagatggtcagagacaacgggttagacaaggtgaaactgtttttttcttttcgggaggaattcatcaggaatctgctgtgctcctttgctctgggagcgccgcagagagcacgttggagcagcagcagctgggttcgggcaccggcaggggctcttttgggttcgactggaatcagaagagctcggtgtcctgcgattgggagaatatgccgccgataggaaatagcgcgtacgaggatcccaagagtgtgatgccggctgagtcaaaacttgcaggtgttgcggttgacataggccatgtggcaggccattcttctggtgctactttctcggcgggctcagagattgggtatgggtcgtccaagagttccatatccgcgtcgcccgtttctccgtccaaagtggggcacaccatagagctcaatggtgcatccgcggaagagcatgtcgacgccggggagggacaccatgagcgccctgaggaagagcgggctggaggtgatggtcggcatccccaacgacatgctcgccgccatggccagcagcatggcggacgccaacaagtgggtcgaccagaacgtctccaactacctcaacgacggcgtcaagatcaggtatgttgctgttggtaacgagcctttcctggagacatacaatggaagctttctgcaaactacttttcctgccatcagaaacatacaaagtgcgcttgtgaaggctggcttgggtagtcaagttagagtgacatgccctctcaatgctgatgtttatcaatcatcgactagcaagccttctgatggggacttccgcacagatattcatgatctgatgctcaccatcgtaaaattcctgagcgatactggtggagctttcactgtcaacatctaccctttcataagcctctattctgattcaaacttccctgtcgactacgccttctttgatggtgccgcatcacccattgttgatggtgctaggcaacaggcaagttttctatttggtcaagctccttatggtctgatgggatgctgtgcaagttcttgggataacccagtaccaggaggcttcaaatttacagcaacaaaagctccttggtcaaggccaacaatagctgccggtgttgatgggacgcatgtatctaatcagcaggcatcgggcaatgtactgccacatggagcacatcatagttttgatggtctcatggcgttcaaagaaaccaacgcgaaggtccttaaccaaggcatggaagcttctgctgtcgcttccggctccgctagaggcccagactttgagcatgctctctctcttctgtcaatcgattcagtgggtgctgcaaaccttcagccaggttctcagattcaccctggtgtcaccgccattgccggcacctccaaccctgtcatgatgccatctccagcaatctggcaaggaggctctgcgacatacacaaacatgtttgatgcaaactatgacacacttatatgggctttgaagaagaatggctttggaaatctcccagtcattgttggggagattggatggccaactgacggggacatgaatgcaaatattcagatggcgcagcacttcaaccaaggcttcctaacacatattgccacagggcgaggaacgccgatgaggcctggaccagttgatgcttacttgttcagtctaatcgatgaggatgagaagagcatacagccaggtaattttgagcgtcactgggggatattcacctatgatggcttgccaaagtatcaactgaatcttgggcaatcacatggccttctcaaagcgaagaacgtgaagtaccttgagaggaagtggtgcgtgctgaagccttctataggccttactgatccaaggctttcagatagcatcagctatgcctgctccctggcagattgcaccagccttggttacaagacatcttgtgggggactggacaccagaagcaacatctcgtacgcgttcaacagctactaccagaagaacgatcaagacgatgtcgcctgtgggttctcgaacctcgcaacgatcactggccaagaccccagcaccggaacatgcagattcggtatcatgatcgaggttgactcggccttctcgtggaagctgcagcatgttagaagcagcaacctcttgatgcttctgctagatgagaaaagttcagagaaagctcgccgcagcctgcggcctctcagaactgcatctccaatccccgacaacggccaagcggttggagcctccgtctccggcatgcgatccgcgcgaaatctcaccctccgtcgcggcctgacgaaccctgctccgatcccctcccaggaaccattggggaaccaaatctacgtcgccttcttcaattgcaagtag

SEQ ID NO: 77136 - DNA, 888 bp, Oryza sativa
  Clone ID: PAT_MRT4530_77063C.1
atggccattgccgcccttttcaccagcagccatcaacaagggggcgtcatcgatccaggagtcggtcaaaaagacacacaccagcactgcagcatcgccggccgtacacaggagaagaaaaatcggcaccgggtatcagcgtgcgggagcgcctttgatccctgcacccgccattgtcgcttcgcacgtacactggcgtactgccaatctgccatgccggttcgccggtttcgggatgccagccagatgcctccagtatacaaaccgattaacaagcagcaggtcagaatcgagctcagttcagtggtgtcacggtacaccgacgaattaggagtcaacggcgccgggagctctaaaggtcgacaagccaacaatggaggagcttcggagcttgacgagatgggccgtcggcccatctctctccccgtgctcggcacccctttcctgggccggcccgctcctcctttcccctccccgaagtcctccctccctccctttctctttcgggcaccgacagctccgccgccgccgcccatctccggccgcgtgccgtcgccactagggccgccgccgcgccaagccgccgccgccgctagctccgccgccgtgtgggccatctcggccacctcctcgtgtcgccggaaccccaccggaaccccatctccctcgcgagccggtgtcgccgccgctcgtccgcccctcctctcgtcgggtcgtcgtcgccgccttcgtcttccgctccggccgccgtgtcgccgcgccagccacgccgctgctccggccatgcgccaccgcctttcggccgtcgccgccgcttcccgcaccgccggtcaccgccgtcggtggccgtgcctcgccgccgcctcgccttggtcggccggtcggcct

SEQ ID NO: 77137 - DNA, 1692 bp, Oryza sativa
  Clone ID: PAT_MRT4530_77064C.1
gcagtggtgtggccaagcttgaatgctccagtgaggctgcttctctggctgccaagctgatggacgcgccgccatcgccagatcggctcgccggatcagtggagctccatgcttctccaggctgctgctgattgagagagagagagagagagagagagagagagagagagaaacagtttttttttttcaggaggaattcatcaggaatctgctgtgctccttttctctgggagagaagcaaagagcaggttggagcagcagcagctgggatctgtaactggcatgggttcttttgggatggactggaatcagaagagctcggtgttgtgggattgggagaatatgccgccgataggaaatagcgcgaacgagaatcccaagaatgtgatgctggctgaatcaaaacttgcaggtgttggggttgacataggccatgaatcaggccattcttctggtggtactttctcttctagctcagagattgggtatggttcatccaagagttccatatccgcgtcgatcgattctccgtccaaagtggggaacaccatagagctcaattttgcatctgcggaagagcatgataagaacatggacaagggtaagagtaaagttgatgacaccggaacttctcgatcaccggtggtagcagccaatcgtgtagagcccttgattggcctgaagcttggcaagagaacctattttgaagatgtctgtggagggcagaatgtcaagagttctccatctggtgtgagtgtggctaccccatctcctggtctggccaagaaggtgaaggtggctcagcagaacactcagaacccacactgtcaagttgaaggctgcaatgttgatctctcttctgctaaaccttaccatcgaaagcaccgagtctgtgaacctcacagcaagactcttaaagtcatcgttgcgggtcttgagcgacgcttttgccaacagtgtagtcggtttcacggtttagctgagttcgaccagaaaaaacgaagctgtcgcaggcgcctccatgatcacaatgcccgcagacggaagccacaaccagaagcaatttccttaagttcgtcgaggctctctacattactctatggtgatgcaaggcaacaggcaagttttctatttggtcaagctccttatggtcagatgggaagctgtgcaagttcttgggataacccagtaccaggaggcttcaaatttacagcaacaaaagctccttggtcaaggccaacaatagctgccggtgttgatgggacgcatgtatctaatcagcaggcatcgggcaatgtactgccacatggagcacatcatagttttgatggtctcatggcgttcaaagaaaccaacgcgaaggtccttaaccaaggcatggaagcttctgctgtcgcttccggctccgctagaggcccagactttgagcatgctctctctcttctgtcaatcgattcagtgggtgctgcaaaccttcagccaggttctcagattcaccctggtgtcaccgccattgccggcacctccaaccctgtcatgatgccatctccagcaatctggcaaggaggcttgtcccttgatcagcaggcgcagtttcaggctttcgaccgccttggcaacgacgacgacgaagatcatctccagctcccaaagccttcctatgacaactcccactatgatcagatgaactga

SEQ ID NO: 77138 - DNA, 621 bp, Oryza sativa
  Clone ID: PAT_MRT4530_77065C.1
atggctggccggagacggaggggaatggatagctcaccggctcgcgagggagatagggttccggtggggttccggcgacgcgaggcggtggcggcttggcgcggcggcggccctagtggcgacggcacgcggccggagacgggcggcggcggcggcgctagtggcgagcggcgcgcgaccggtaggaggcacgggagagcgcggcgaaaaggggaaaaggaagagggagatgcggggaagctttataggggctcgaaaggggcggacatggccgggaaaccccccgatttggccggcgacgtgggggaaaagagagagaaagtgggggggattcaaatcgattcccgcccatttgcgggcgcgcgtgcgggccgggagatgcgggggagagggcggggacgtgggcgcgaggtgcgggcgcggagtggaggcgcgacgtggagaaggcggcggcgcgggcggtttcggcggcggttgccgtcgtggggcgggcggctggaggaaggggacgacctgacagggtgtgacacctcaaggccagctcatgatcattacagtggcggcagcgacggcgacgagctgcggcgacgagaggcaactccagatgaggaagtcatatag

SEQ ID NO: 77139 - DNA, 770 bp, Oryza sativa
  Clone ID: PAT_MRT4530_77066C.1
cggattcccgggtcgacccacgcgtccgccgtccgcaaaaataatactttattcctctctcttaattttatttttttactttgtttgagagagagaggatcaataatttcttgttgaaaaatggagattattagtcctagtagtagcagcaataacaattcacctgttcttgcaacatttcttgtggttcttgtagtgctcctagcatcatcacggccagcctcgtcgcagaaccagcaatccttcaccatcaaccccggcggcgccgcggcggcgaggcccggcggcggtaaaggcggcggcggcggcggcgggccgggcagcttcagcgacttcctgacccagaacgtgcagcactacgtgctgagcgagcagaagtacgccgggaaggtgaaggcgctggacgcggagctgtcggcagcggaggccggcgcggcgaggtacgtggtgagcggcgacgggaaggggaagttcaggaccatcaccgaggccatcaaggccgtgccggagtacaacaagaagagggtcatcctcgacatcaggcccggcacctacaaggagaagctgttgatcccgttcacgaagccgttcatcacgttcgtggggaacccgaggagcccgccgacgatcatgtgggacgacagggcggcgacgcacggcaaggacggccagcccatgggcacatggctctcgcccaccgtcgcgttcaaggccgactcctctatgcctccagcaatcatctcaaggacacacgcgccgtggcgggcgcc

SEQ ID NO: 77140 - DNA, 1335 bp, Oryza sativa
  Clone ID: PAT_MRT4530_77067C.1
atggcagccgcgacgcgcgcactgcctacaccgccgccgcacgcccaggatagatataccgtggagacgcacacgacaacgacggcacgacgagctgtggtcgagagctctcgccggccgggggttatggccgagcgcgcatgcgcatgcaccaacacgtgtggcggcagcgggcggcggccggcgcggagggccggcggcggcaagcgccggccggcgccgaggcaggtggtggaggcgctggcggcggttgccccgcgcggagggcctggcggcggcggctgcccgtccagagggcaggcggcagaggcgtggagggccgccccgcggcggctggcagcagagtcccccgttgtgttcctcgctgccggtgagttcacagttcgctttgcatcctccacgacctacccggcaatcctgtttcctacaactccagcgtacacctacgccgcgcgccgccacccggcacatcggcagagcgggacagaggggaaggaagagggggatgctcaccgagggacgtcgacgaggggcagcggccgagatgcacggacggagggacgcgagcggcggcgctcctcgggagaggacggcggcggcagggatgaggcggtgagccggctccggcggcgcccggcgaaggaggaggggaggccgagggacggcgagacctgcggaagagataggagggatggtgggtcggccgaggttctccccgacgcagcggagcgaacggcggcgacggcaaggtttgaggtggccggagatggcgacaaacggcggccggattgggtggaagagatggtgtttcggtggtggataggggaaacggagtggtggccgggcttggccactctacggcgaagccggtggtggtggcgacgcagcgcggaggcggctagggcggaggaaccagtggccgatgtagcccaagtacttgcggagccggaggagatggcggcgcaggtcggcgtcgggcggcgcaacgcggctggagttggcgacggcggcggagagatggcgatgcaacggaacggccggatcgagcggaggaggcggcgctgcacgcggacggcgcgggagggaggccggctggaggtcgaggaagaccccgacaggtgggcctcacctgtcggcggctcaggagagaggagggacgtgaagtggactttacgtgggcagcgtgcagtgcacggcaggcggctggctcggctccaccgccgacgaggcagtggccaggagtgggcgggcgtcggctcggcgcaacttcggtgggcagcgggaggcggcatgactccggatagtggcaggcagcgggtgggcatcggctcgacg

SEQ ID NO: 77141 - DNA, 615 bp, Oryza sativa
  Clone ID: PAT_MRT4530_77068C.1
atgtgttggaagcatatgcatctctgggtagcacgcacagtgcggcatgctgccgacggcgagcacgtcacgtggcacctgccggcctccgccgcagaggtggcggcggcggaatcctcctcggccctgctgtgtcggccgcgggcggtgggccccaccaggcggtggctcaaaggggaggcgagggaggcgccggccgggctcggctcggcctcaaggccgaccggccgaccaaggcgaggcggcggcgaggcacggccaccgacggcggtgaccggcggtgtgggaagcggcggcgacggccgaaaggcggcggcgcatggccggagcagcggcgtggccggcgctcgcggcgaccgcgacgaccaaagggctggccggagacggaggggaatggatagctccccggctcgcgagggagatggggttccggtggggttccggcgacgcgaggcggtggccgagatggcccacacggcggcggagctagcggcggcggcagcttggcgcggcggcggccctagtggcgacggcatgcggccggagatgggcggcggcggcggagctcggcgagcgcggcgctacggcggtagagggcgtgggagaggacggtga

SEQ ID NO: 77142 - DNA, 132 bp, Oryza sativa
  Clone ID: PAT_MRT4530_77069C.1
atggcgccgtgggctagatgcacgccgaggaagggcagggggatgcggcagatcttggcttctgttgtccgtgttggtgggcagttcagttgtggctgcgttgtggttctggtggcttccgatctcgcatag

SEQ ID NO: 77143 - DNA, 620 bp, Oryza sativa
  Clone ID: PAT_MRT4530_7706C.1
atgcgcaagtgtcacacttcaggttatgtgcggccaaacatttcctttcgccataagatacatttctctcacacaaacaagaaagtacttttcgctaaccttaacacctatcatctagccacctgggccaacaatgccaagacttggaatcctattaggccaggttcttcccatgagaacatgtggttgcacgttacgctcagatcaatcgcttatgaaataaagtctttaattgatcaggacaacatgccacaactaaataacacacagcttgacagtagactcacacagagaccataccaggtaacaatcacacacatacattactacctaaccagatgtgggacccatatgtcatacactactctctcttttctctcacaatctatctctctcctcccggcgacggcggaggcagcgagcgcggcggagaaggcggcggcggcgacgaggcgagggggcggcggaggcagcgagcgcggggaggcgagcacggcggcgaggcgagcggtggggcaaggcagtggaggaggcgacggcggcggggtacggcggaggaggagagtgcagcggcagaggaggcgaacggcggcagggtgcggcggaggaagcgagcgcgg

SEQ ID NO: 77144 - DNA, 1433 bp, Oryza sativa
  Clone ID: PAT_MRT4530_77070C.1
tcaccgtcaccttgttctgcttcgccgtcacctccaccgagctcacccctgcgcacatgcacagattccggtggccggcggcggcggccatggcgggcggcggcagctggcggggccgcgcccggcggcggccatggcgggcggccaaaggtgtcacgcgcggcagcggtcgtgccctctcgtctgccggccggcctgcaaaccttgactgcagcgacgaaaccaacctctctgagacggctccaactgagaagaacttcaactctgctggacaaccgaacacctcggccgacccaactccatcacgcccaccctcgctaccggtgcctaggaaagggtcgagctatacttcagatcaagcagttacccactcccgcttgcgcccagggctgacgtcatccaagggggggggggcgccggcacgtgggccccacaggtcagcggctcaaaagggaaggaggtggcgcctggcaggtgggccccaccaggcggtggctcaaaggggaggcgagggtggcgtcggccgggctcggctcggcctcaaggccgaccggccgaccaaggcgaggcgacggcgaggcacggccaccgacggcggtgaccggcggtgcgggaagcggcggcgacggccgaaaggcggcggcgcatggccggagcagcggcgtggccggcgctcgcgggaaggtgaggaaaggagggagagggaggactcaccgacgacacggtggccggagcggaagacgaaggcggcgacgacgacccgacgagaggaggggcggacgagcggcggcggggaatgaatagctcaccggctcgcgagggagatggggtcccggtggggttccggtgacgcgaggcggcggcggcttggcgcggcggcggccctagtggtgacggcacgcggccggagatgggcggcggcggcggagctcggcgagcgcggcgcgacggcggtagagggcgtgggagaggacggtgaatgggggaaatgagagagagagctcgagtgagggtttttatgggcgagggaggggcggaaacggccggggatggcccctatttggccggcgacgtggagaggtggaggagagagagagggtgttgggggatttcaaatcccccaccacttgcgggcgcgcgcgtgcgggagatgcggggaaagggcggcgacgtgggcgcgaggtgcgggcgcggagtggaggcgtgacgtggagcggagaaggcggcggcgcgggcggttggagctccggctccaacgaccggaggtaggggacgaccgacaggtgggccccacctgtcggcgcccgaaagagaaagggagggagggaggacttcgtggaggggaaaggaggagcgggccggcccaggaagtggcgccgagcgcggggagagagatgggccgacggcccatctagagaaaaaggaaggaaaag

SEQ ID NO: 77145 - DNA, 1475 bp, Oryza sativa
  Clone ID: PAT_MRT4530_77071C.1
aatccagcctctctttcttgctttcttggagttggaggtagtagctcggatgaggttcatggagaggtggagatgcgtcagtgtgttggctctggtgctcttgctgtcaaatgcttcccatgggagagatatctctgtccagcactctcagcaaactttgaactatagccatactcttgccatgactcttgtggaatatgcttctgctgtgtacatgacagatttaacagctctttatacatggacgtgctcaaggtgtaatgacttgactcaaggctttgagatgaaatctctaatcgtggatgtggagaactgcctacaggcattcgttggtgtggattataatttaaattcaataattgttgcaataagaggaactcaagaaaacagtatgcagaattggatcaaggacttgatatggaaacaacttgatctgagctatcctaacatgcctaacgcaaaggtgcacagtggatttttctcctcctataataacacgattttacgtctagctatcacaagtgctgtccacaaggcaagacagtcatatggagatatcaatgtcatagttacagggcactcaatgggaggagccatggcatccttctgtgcgcttgatctcgctatcaatcttggaagcaatagtgttcaactcatgactttcggacagcctcgtgttggcaatgctgcttttgcctcttattttgccaaatatgtgcccaacacgattcgagtcacacatggacatgatattgtgccacatttgcccccttatttctcctttcttccccatctaacttaccaccacttcccaagagaggtatgggtcaatgattctgagggcgacataaccgaacagatatgtgatgatagtggtgaagatccaaattgctgcaggtgcatctccacatggagtttgagcgttcaagaccatttcacatacctgggagttgatatggaagctgacgactggagcacttgtagaatcatcacagctgaaaatgttaggcaactccaaaaggatctcgccagcaacatcatcgtctccaagcactctgtcgatgtcactattgtagaacctagttcacaaacatattgaaagcaattatggatagtctacggtatttcttttatccgatttagagcaaaggatggatccttcctcttttctcgaagatgaaggcttgattagaaattcattcagatttggatgtacatacagggttcttttcatagcttgtgaatatgtagagatgtacataggatgatagattcatatttcataggtgttagttttttattttttccttttctgatgcatatgcttatgcattttgtaaatgcaataaaaacaagaatagttccacccatgtatgaatatccatacaattatctgtatctgccactgtgtaagtaaaagatatatgattatctgtgactttaggcatgaaacggaaatatgagttcattgctgg

SEQ ID NO: 77146 - DNA, 1986 bp, Oryza sativa
  Clone ID: PAT_MRT4530_77072C.1
gcacgaggagctcacccacgcacgcagccgtctcgtatcccttcttctctctcctctcctctcttctccggcacaccacaccccaatcctcccccgatctccccaatccgagagctccggaggagcagcgcggaggcggagatggcgctgcggcgagcgctgctcagatctgccgagatctcccccgatcgcaaggctgcacttgagtacctccattatctatcgagagcacagcctactcgttctctaacaggtgctggcctttattctgctggcaaatcattcagcactcaggctgctactacatcaagcacaccacaacctccaccaccacctccacctccggagaagactcactttggtgacctcaaagatgaggaccgcatttttaccaacctctatggtcagcatgaccctttcctgaaaggtgcaatgaagaggggtgactggcatagaaccaaggatttggtgcttaaaggggcagactggatagtgaatgaaatgaagaaatcgggacttcgagggcgtggaggtgcaggattcccttctgggcttaaatggtccttcatgccaaaggtatctgatggacgcccttcttatcttgttgttaatgctgatgagagtgagccaggaacttgcaaggacagagaaatcatgcgtcatgacccccacaagcttctggaaggctgtttgattgctggagttgggatgagggcatcggctgcttacatctacattagaggtgaatatgtgaatgagcgtctcaaccttttgaaagctcgggaggaagcatacgcagcaggtcttcttggtaagaatgcttgtggatctggttatgactttgatgtgcatatacattttggtgctggtgcctacatttgtggtgaagagactgccctactggaaagtctcgaaggcaagcaaggtaaaccaaggttgaagcctcctttccctgccaatgctggcctatatggctgccccacaactgtcacaaatgttgaaacagtggctgtgtctccaacaattctcaggcgtggtccagaatggtttgcaagctttggacgcaagaataactcgggaactaaactattctgtgtctcaggtcatgtgaacaaaccttgcactgtcgaggaggaaatgagcatacctcttaaggaattgattgaaaagcactgtggaggtgtgagaggaggatgggacaacctgcttgcaattattcctggtggttcatctgttcccttgttaccgaagcatatatgtgatgatgtgttgatggactatgatgcactcaaggctgtgcaatctggattgggtactgcagcagttattgtgatggacaagtccacagatgttgttgatgcaattgctaggctatcgtacttctacaagcatgagagttgtgggcagtgcacaccttgcagggagggaacagggtggctgtggatgatcatggagaggctcaaagtaggtaacgcgaagcttgaggagattgatatgcttcaggaggtcactaagcagattgaagggcatactatttgtgcccttggggatgctgctgcatggcctgtgcagggacttatcaggcacttcaggccagaactggaaaggagaatccgtgagcgagccgaaagggagctactggcagcttcggcttaggacactgtcaatgacgatcctgcactagtttcctgatttctttcacagaaataatgcaaactgatggagctcatctctgtatacgaaatgcagctcccctgatttgtttaaacctttatgtggatgtttatttaatgcactcagaagctggtgaattttgatggactgatgaaaacttttttaagtagaaacaaaatgcagttactgtaccatgtatgtcacatgagccagccaaatatgatggtggatgtggacgtgtaccctgcttgtttttttttcactgttaaactatgcattgtttgaaattgtctaaaacaaaaaaaaaaaaaa

SEQ ID NO: 77147 - DNA, 284 bp, Oryza sativa
  Clone ID: PAT_MRT4530_77073C.1
gttacaatatgaattacatcatgtatataccgggctctctttgccagataggctgtcaaactttattgacggtccactgctttataatttgagtcaagtgccttaggaaatctgatctacacggatttgtagcactatacatagacctcaatcacatacgctagccacttgcagtgcacatcaactgtgtattaaatgcgcttccaaaattgcgcaatatgcatagtgctacctttaacgtgtccatgccacaatatctaactcataactttccaagttgaata

SEQ ID NO: 77148 - DNA, 426 bp, Oryza sativa
  Clone ID: PAT_MRT4530_77074C.1
gaaaagacaggtatcaaaacaaacaattgataatgatcagacaggatggctcaccaacagtaacgaaacacattacttggtgtgataccacaaactctgaggcatatcgcataagacgccccctgatcattatcgaatatactatgcatgctggggctcagcaccttacaaagaaagctacatgattagcgtacatgctatacaccttgagagtctcaaacggtgcattactgattgctgctgcaagctctcgtacctggcatcaatcgacgacctctcagaccggagatctcagatcatgcaaccaatccttgttggctactgactatgatgacaacgaagaacaagattgatccacaggcatgatcctgcatattatagccaatcgctctattcgcgaggaaggtagataatgctgctggaccc

SEQ ID NO: 77149 - DNA, 372 bp, Oryza sativa
  Clone ID: PAT_MRT4530_77075C.1
atgatgttggagacggcgaagaagttcaaggagatcttctcagagaccacaaccaactcacaggagatcacagcggaggccaacaagcaggctgacctcctagtcaaccaaatcaagcacctcactaccgacctccccgtcccctccatccctgcgatcccacatatcccctccgccgtcacgccgaagccagacgccgcaaagctcgagcactatggcatcatcgaagacctccgcgagttcgtcaagggcatgactacgctaccgacaccctcctcccgcgtcaacgccgacaaccttctccatgctaccgccagtcgccaccgcttgcactctgtggcctcacgcgccgtggacacccaattgtcgtga

SEQ ID NO: 77150 - DNA, 615 bp, Oryza sativa
  Clone ID: PAT_MRT4530_77076C.1
atgtcgtccgctggcgccgccgccctcacctgcgtctctcgacgtcgccgcctcacctgcgtccgccgacgccgccactgtcgtccgcctgcgtctctcggcgtcgccgctgtcatccgcctacatctgccggcgccgccaccgtcaaatgcatctctcggcgccgtcgccctcacctgcgtccgtcggcgccgccgctgtcgtccgcctgcgtccgccgacgccgccaccctcacctgcgtccgcaggcgtcctcatccccctgtggccgcctccgtcgccgtcgtgccgccgccatcgcttgcatcctctgccgtggctctcgtccaccgcggccgcagccgtcgtcgtcgccgcgtccgccgcaactgtggccctcgtctaccccggccgtcgccgttgccatcgcttgcatcctcaaccgtggctctcgtccatcgcggccgcagcagtcgtcgtcgctgcgttcgccgcagctgtgaccatcatccggccactgccatcacgttgtcaccatcacttgcttcagccttggtcgtggccctcaccagccacgaccgtggccgcgccgccgcggtcgttgagccgtcgtcgtctcccgcgtccgtcgcatga

SEQ ID NO: 77151 - DNA, 2913 bp, Oryza sativa
  Clone ID: PAT_MRT4530_77077C.1
tttgtttcacgttcatagttagcacatggctggggctgctttctctttgtattaaagcccctgacccactaaaatctggtttgctggaaaacgggaacaactattttatctcaggataccagatggtcccttctttgtaggccatgtacttgcatttgagtattggtgataacacacctgactgattgaatttcaagggatgacgaaggaacctgacttatgaatctgaataaagcccctgttcaactggagagtgcagataacccagaaggccagaactgcaatccacttgctcgacacagtttcttgtcccagcaagctagctctcccctccaccacatcagcaccggaatttttcaactccgagcacacctctctgatcaggtcagtgtgtctgcattagacttgtgtcgtgggagatggaagagccgtcaagccaagccacaccttcttaaagacggccaagctatgcgggtagggatcactagaagtgaagtcattgccatcaggcacagccgcacaggcagagctgagagcttaggagcacattggtttcttgcaagagcaagtggtgtttgccttgttttcccatggccagcacggcggcgctgcccatcgagacggcgttctctcttccggctccgttgccgtcgtggccgtcgtcagctccacttagcaaattctgattattattatttttttcaatcttgtcctgatcacgcattcatcattaattttcctcttgactacaagtccaatatgattggaacatatccagagaaaaatacatgcatggcaaatgcaggagttatatggctaaatgcaaataaggcagctttaggcgatgctggcgagaggtgcgccaagtcaccacgtttgccaaggtctggtccaccggccaagacggcggcggcgccaccttcttcaggccggagcaggtccccgccggcttcagcgccctcggccactacgcgcagcgcaacgaccgggccgctcttcggccacgtcctcgtcgcccgcgacgtctccggcggcgggctccttgccccgccgctggactacgcgcccgtctggtccagccaggacgacgccgcccacttctggctccccacgcctcccgatggctacagggcgatcggcgtcgcggtcacggcctcgccggacaagccgccgcgcgacgaggtcgcgtgcgtccgcgccgacttcaccgacgcgtgcgaggcggaggcgacggtgtgggacaaggacgggttcagcgccgtcgccctgaggccggcggttcgcggcgtggacgcccgcggcgtgcacgccggcacgttcgtcctcgccaggagcgacgcgacggcgggtagcgcgtcggcgctggcgtgcctcaagaacaacggcgcggcgtacacgtcctgcatgcccgacctcgcccaggtgaacgcgctcctcgccgcctacgcgccgcagctgttcctccaccccgacgagccctacctgccgtcgtcggtgacgtggttcttccagaacggcgcgctgctgtaccagaagggtagccagaccccgacgccggtcgccgccgacgggtcgaacctcccgcagggcggcggcaacgacggcgggtactggctcgacctgccggtggacaacttccagagggagcgggtcaagaagggcgacctcgccggcgcgaaggtgtacgtgcaggcgaagccgatgctgggcgcgacggcgaccgacctcgccgtgtggttcttctacccgttcaacggcccggcgagggcgaaggtggggcccctcaccatcccgctcggcaagatcggcgagcacgtcggcgactgggagcacgtgaccctccgcgtgagcaacttctccggcgagctcctccgcatgtacttctcgcagcacagcgcgggcgcgtgggtggacgcgccgcagctcgagtacctcgacggcgggaaccggccgtcggcgtactcgtcgctgcacgggcacgcgctgtacccgagggcagggctggtgctgcagggcgacgcgaggctgggcgtcgggatacgcaacgactgcgacagggggagcaggctggacaccggcggcgccgggcggtgcgaggtggtgtcggcggagtacctcggcggcggcggcggcggcgtggccgagccgacgtggctgctgttcgaccgggagtgggggccgagggaggagtacgacatcggccgcgagatcaaccgcgtggcgaagctgctgccgcggtcgacgagggagcggctgcggaagctcgtcgagagcgtcttcgtcggcgagggcccgacggggccgaggatgaagggcagctggagaaacgacgagagggaggccaagtaaaaattttggcggttctcaaatttcagacgacgacacgcggtgatgacgagtgaaaagtttattatatggggtttctcaaattcaaatcagattgttacggagcaattctgaaaaacgatgacagagtgcatggtgaaatatattcttttaagataagatttaatcaaacttaaaattcccatcacaattgatttccaaatgatttgggtttttaaaaaaaatactgtacatagattcaccataagaactcctatgaataatatcatgaaaatttgattgtattttgtaaacttactctaaaaaaattctaataccaaatgtcatcttaaaaagtaaatattttttaaacatccaatatttatgattgaatcaagtaccgttgtacaaaatttcaagtcaaactcgaccaatagatctatatttttttttctttttctttcaaatgtgtatatcgaacttgcagttcacattctttacgatggtgtatttgtattgtaaatatatcatatttctagtaatatccgcccacaatgtaatttctggtaaaaaaaaaaaaaaaaaaaa

SEQ ID NO: 77152 - DNA, 438 bp, Oryza sativa
  Clone ID: PAT_MRT4530_77078C.1
tcaaatgtttacatccctaccgtccattcgtaaatcagatgtaatctgtaccgtccagccttctccaccgcacgattcccactctccaggcgcgaaggccgggcgaagattacgcctcatcaccctctcaatgcgcggctcgctcctcgcatcgtcgtccccttccgccgccactgcgcactctaccgccgccgcttccgcgcactgaaccggaggcgaggtcttccccagccaccgccggagcttccccatccgctgcggccggagccgacgtcgtccccatccgccgccgccggagacaaggtcttccccatccgccgtcgtcgccgcagtccaccgctgcccacgaggtcgtccccttctgctgccgccgccaccgcgcactgaaccggaggcgaggtcttccccaaccccccacggagccgagatcttccccat

SEQ ID NO: 77153 - DNA, 279 bp, Oryza sativa
  Clone ID: PAT_MRT4530_77079C.1
atgaaggccatgggtgcccagggacatcagcgggagcaggccccgacccccacgctctgccagctgtcagcctccgtttacatggagggacggtcgcaaggggctgtagtcaccgttgagctcctcgacagaggtctggtggcgtgggatagaaggtgtgagcccagacctgcgaaatctggccaggaacctatggcaatatctggttccatgttcttcccggagcaacgcaataggcggacatggagcggaatctccgacgtcggtggcatgggctga

SEQ ID NO: 77154 - DNA, 601 bp, Oryza sativa
  Clone ID: PAT_MRT4530_7707C.1
catccacaggcacagggcggcggcggccagccaagagcggcgcggggcgcggcaggcggcgaccggccaagagcggcgcgcgggctcgcgaggcggggcaggcggcgacgggcggcggcggcggcagtgggaccctcggcgggctcccacggccggcggcggcgggcgagctcgagcggcggctcgcgccgcggcggcgtcggtgggtgggagccgcggcgggctcccgcggccgatatccaatgaaaaatcccggatagtttccgaccgtttattccagatagtttccgaccattttccaattccgacggatagtacccttattgtattcgttttcgtcttcgagaaaaaaaatccgaattcgtttcagaatccgagaatttccgaatagttccgaccgaaactatccgaatccgaaaaatggtccggacggacggaaactatccgaaccagtttcatccctagctgttgtacatatgcctgcgcgacaccgaactatcgaggctaagtagcgcgcgggcggcaatggatcgaggggacaaggatacggtctttgggcctggtagtccttgtgagtctttatcttttttcatttgttatg

SEQ ID NO: 77155 - DNA, 178 bp, Oryza sativa
  Clone ID: PAT_MRT4530_77080C.1
cttttgtagttcctcagtagacaccaatcacatacccatttgaactgggcattgtacgatgcatctcctgaatggtcagtagaacatgtattatatcaggcatctacctcgttctgcttcgacaacagtaatacatcggaataatccggctcagtaggaaaaaaaaaaaaaaaaaaaa

SEQ ID NO: 77156 - DNA, 379 bp, Oryza sativa
  Clone ID: PAT_MRT4530_77081C.1
gccctcctggtatattgagagaccacccctgattgccgagttccttacgacaacccgtcatggccatccgaccggtaatgaatacggaggagtacccacaccaggaaaatgtcttacgattatatacgaacgtggaggaatacccgtactgagctatcaccattagcggcccacctctattgacccgtgacatataaccccaattaatggtatctaataatctaagcaccgcgcttacattacaaaatactactctacatccatgcatccgacatagagcaaccaagtactcggacattaaaccaataccaatgcgtatctctagtaagctacccatacgattgacacatatcaaatttataccaaagcaagtaattaa

SEQ ID NO: 77157 - DNA, 1860 bp, Oryza sativa
  Clone ID: PAT_MRT4530_77082C.1
atggaggtgttcgtcgctgctcctccatgtccttcggtgttcgaacacgccgccgcggaggtcgccgccgttcgccccgtcacgggatccgccgtcgagccacctgcatccacgcctgacacgcaccaccgcaaccggatccgtatcggcggctgggtgcgccgcctcgtcgcctcctacacgccgtcaaccgtcgcctccacgcctgccgccgtgtcgtaccggatccgtcgacgtcgcgcccgccgccgctcggcagtggaggtggcgctcgacgtcgcgccgccagccgtgtcgtgccggatccgcccaatgccgccaccactcgccgccacgcccgctcgccgctctcatctccgaaaaaataggatctacatatgtggttggttacggggtggatgtacaacactggtgcatcgcgcacaagagggccaggttgtccggcggatccgtcggctccagcgccggcgggtggccgtggttacggtggggccggaccgtatcaaccgcctccccgacgagctgctccaccatgtcctgagcttcgtgaccacgccggaggccgtccgcacaagcgcgctgtcccgccggtgggtcggcgtctggaagcgcgtcccgcggctgcaccttctggaggaggaggcgacgaaggccgagcacatcccggaccactatgacgggatcctccgccgctacgccgccgacgtggacatcgccgacctcgccatcacctaccactgggactggcccgaggtcgacggggaccgggcctccgcgtgggcgggcttcgccgcgcggcgcgtcaccggccgcttcgacctcgccgtgacgagccaggtgggccgcggcggcgacgacgacgagcgcgccgtcctcgacctcccgtgcttcgagcgggcgacggagatctccctctactcctccgggctggcggtccgtctcccggcggagctcgacgccgccggcgacggagacttcacccgcctgacgaagctgcagatgtccgagctccggttcagcgatgccggcgagggcatcagcggcgtcgtctcgcggcggatgcgggtggagtactgcttcgacgaaacgagatcgtgtcgtccttggaacggcggcggcgcggcggcggtgatgcggctctccgcgccggcgttggaggagctcggttgggaggacgcgtgccccgacgaggttgagcggattaggttaccgacgtgcctcagggagctcgtcgtcagcgagcttccttctcatattatccgcagcatggggcaatctgatttcaccaagatcttggagcttttctctggggctgatgttctaaagcttacttctcctatgactgctacactggattcagaagagcaagagagccttatatacagtgtccaacttccttactattcaaagctagacctcggcgtgataacaaaagggcataagtcgtacggctcaagtgttgtacacttcctcaagagaaatagctccatcagaaacctaactcttacactacatccatatcatcctgagatgaatctgatggccacattgggtttagctaccattacaccattcctcccactcagccactcgagaggacgcctcagctcacctaccaagctggagtgcgagagagcttccgtctccggcggatccgactgcgacggtgacgccgcctacgagtgtcccgattgcatcagctcgctcgccgccgtgctactccaccacatcctcgtcttcctccccgtggtcgaggctatccgcaactgcgtgctctcccactgttgggtctgtgtctggaccggcatcccacagctgcagctcgacgatgatgcgtggagggtcgatctagttaattag

SEQ ID NO: 77158 - DNA, 321 bp, Oryza sativa
  Clone ID: PAT_MRT4530_77083C.1
atgcgggccccacatggcagtgacatgggtggcggtccgcggtggaccgggtctacggaccgggaaaggggcggcgcaccacgtggcgctgacgtggcgccgacgcggcggccacgcggcagccacgcgggcggccgaacggatggccctgatccactcggggtggatcggacggcggagggggtggcactcggccggcgcgcacgtgcggctcaagctggcctgacggccatggcgcacggcggcgcggctcgacgcagcggcggcgttgcggcgacgcggatggcgacagcggtggctaagcggctaggcggcggctaa

SEQ ID NO: 77159 - DNA, 249 bp, Oryza sativa
  Clone ID: PAT_MRT4530_77084C.1
atggggcgccgtagagtggtcgtggatgcacgggagggcgtcgtggaccaaggtggcgatagagacgacgaaagtggcaaagctgcggtccgagagaacaacacagttgcagctccatgtcgatgcagtggcgaagagtccacctgtgatgaagctatgttgaggggggcgcctctcagcactgcaacaactagtggaggtggaccatggatagaagcactccggtccgaggggacgacgcgagcttga

SEQ ID NO: 77160 - DNA, 1578 bp, Oryza sativa
  Clone ID: PAT_MRT4530_77085C.1
atggacaggtacagggtcgcgccgcgacctgtctacctctccgccgccgccgccgccggcggtgatcacggcgatgggccccgccgcctgccacgcggtgtcgccggcggcggtggcgccgagctcgacatcttctccgccgagcgctacttcaacgcagacgacgtcgtcaagaaggaggagtaccgcgacgaggagcagccgcggcaggaggtggccgtggatgcggccagccagagcggacgcaccgtggcgtgctcatcggaggcgagctggaccagccgctccgggctgctctccggccacgcccagtccgccgcgtcggcgggtgctgctgctaagctccagatgggtggtgccaatggcggcggcggcgccgccgccgccgccgcaagcgctcaccgcggcaagaagcccggctccggccagcggtgggggctgttctctcgtgactgcccctgcgccggcaggaaggcggtcaccgtcgacgtcgcctccgagccgaggagcccggcgacgccgagaacccacgcgaggtttgaaaacagccatgtcgtcgccgacagcacgatctttaaagcgaatgcgccgccgccgccaccgccatgcgaggaggagcccgtcaagatgaagatatctccggggagcagcacgtttcctcctcccctcgcgaacagtatcttcgcggcggcgccgaacaggggcggcggcggcggtggcgcggcgccgttcgccgctttcccggcgccggacattgttggccgccgcgtcgtgagctccggcggcttcacgttcccggtggccgtcggcgcggcgaaggtggtgagcaccgttggcgacgagccgccgcgcgagtcgctcgaggtgttccggcccatagacgaggagtcggtgctcgccgacccaccggccgatcacctggcgacggtgggcggccgcggaggaggaggaggaggcctcgccgcaggcttcgcgcgcgccccaggggtggcggcggtggcgaccgacgaggaggcaatgagcgacgcgagctcggacctgttcgacctcgagagcttcgcggcgtcgtcgtcgttcccgaccacgtgccgcgggcgcagcagccggcgcaactcgcgggaggacgacgacgacgacgaagaccttccgtacggcgccgcggccgcggccgccgccgccgtcgagccggcgctgagcgagtgcatgtacgcgccgagcgaggtgagcgtggtgtggagcgtggccacggcggagggcggcgcgttcgacgcggccagcgtcgccaacttctccagcgcggcgtccgcctgctgcgtcgaggagttcagcttcgtcccgccgcctgactccgccgccaccgctggcggcggcggccacgagggcttcaccgccgccatgtcgcgcagcgccgcccgcaagaaaggcggcgggttcttgagcagctgccggtgcgagaaggctgtgagcgtcgggccaactcccgtccggatggtccggccggaggtgaacgtcaagaccaccggcggcggcgcggcacggtatcaccccggccgcgtccgcatgccggtccggacgtga

SEQ ID NO: 77161 - DNA, 298 bp, Oryza sativa
  Clone ID: PAT_MRT4530_77086C.1
ccattcaagctaagaacaaagtggagataacgctgaacaaagagccactttttatgggattttccgcattagtaaaaccgacttcgggttcagtcacctcgcctcttaaatctaaaaccgccactgtttgagcaaaaccctcgaaatggtcaggcgctaagacacggcaaatacccattcattcttgcattcaaaaatggcgaagagcccagagtcagataaagctttttagcacttgggttccacgcaaatgggggccgaatgacaaccatggcgcttagacgacctcctccatctt

SEQ ID NO: 77162 - DNA, 304 bp, Oryza sativa
  Clone ID: PAT_MRT4530_77087C.1
ttctatctgtcgccattcgccctccatccctgcctccgtcgccgtccatctccgtcgccggctgcgacggacgatggggagccggctccccctcgagagccatcgccaagtccgctccctcactgccctcgccgacttctcccgcgccagcgcccctccatcgacgtacgactccccgcctgccccggtatcggcggcttccctccgtagaagcccttgctcgacgcccatgccgccttctactacgaccgcgtctccgcgccggcttgtaagcccccagcattgtcgtgcttcacactagccc

SEQ ID NO: 77163 - DNA, 165 bp, Oryza sativa
  Clone ID: PAT_MRT4530_77088C.1
atggcgatagctggcgaaggtgcatccgtcgacgctggcctcgagggtggcggatccgcgcgggctcctcctccgatgaggtctgcggcgacgggagggacctgcgcgccctcacccccttcccagtgcacggtggtggtggcggcagttggcgacggcgggtag

SEQ ID NO: 77164 - DNA, 252 bp, Oryza sativa
  Clone ID: PAT_MRT4530_77089C.1
atggagatggctgggatgaggtgcagcggcactgttcttggcaagggagagcgaggggtcggcggaggaagcgtcgtcgaggccgtgctccgcgggagcagagactggttttcgctcctggtggatctccgtcgcgccacctcaaactccgtcgtcaggcggatctccggcgaggctgcgtacagcggtggtgaaggagatggccagcaagatcaagcggaggaggaggctgagcgattttgtggatggtga

SEQ ID NO: 77165 - DNA, 1010 bp, Oryza sativa
  unsure (1)..(1010): unsure at all n locations
  Clone ID: PAT_MRT4530_7708C.1
atgagcaaaagccggtggtacttcacgccaaaacaccatgcaaatcccggtcccttagccctgcccaccggaaactcctcccccccggccccgtctacaaccgcccacaaccgtcccctcggccagctgcgtcccttggctccacttgcctacactgttgctgccagaactgtggctgatccatttctttcaagagattatacagcagtcccagccacaagatctgatggtgctgcccgtgttgaggaactcaggcggataggggatattgcttcacttggtgctcgggtggaggagctctaccgtccaggagagcttgctgctcgcggttctcgtgtggaggagctctaccgtccaggagagattgttgctcgtggttctcgtgtggaggagctctatcgtccacgagaggttgctgctcacagtgctcgcatggaggatctgtatcgtccaggagaaattcctatccgtggtgctcgtgtggaggatctgtaccgtcctggagaaatttctgctcgtgctgttcgtgtagaggatctttaccgttctgaccaacgcatcactcatgctgtggacctccctctccacgcaccctatccaacagctcattatgaggtccccaatcccgcatattctgatatcagtcaaaggtatgcctctacaaggcttaatgcacctggtgcatcggtttcgtctctctattcctttcctggcgcgccagcgtatcgatgattggtactctgaatttaccatgtttttaccctgagccggttatactgctagatgcatcggtgccatttagaagttgtccaaaccttaggaaacctggatggttgtcacagttcctgtcactgtggtttgctttacctgtattttctgtcctcgttgatctgctccctgcacanatgatgtcctggtccaaccttgttcacccatgctgttgaattgtgctgcaaagttatatccatgaatcttaagctaacanaaaanaannnaaannnnnnnnnnng

SEQ ID NO: 77166 - DNA, 958 bp, Oryza sativa
  Clone ID: PAT_MRT4530_77090C.1
acatcagaaggctttacaccaaataatcttgcattctcaaaacgacataattgtaaacttggttgctcaaggataacaaaagtgaagtgtttgctaaaaaatgattaatttgaatgagatacacgccttatgattaacaaaacccctcagctgttaacatgcaaaatatctgtgcatcaagtgaactgcagaaggctttacaccatatggtgaagatggcagcggactacatggtgatggatgtattgtcgtgctaaatcctcccatctcaacttccaaccacagaagttcttctcccatctcaaattttctgttcaaactccatcttgattgaattcatcaatagcttgtgctgattttagcattttcctgactcttagaggaactccttgaggtcgagacttaagttgatagatatttgtgacctgataccgtgtacgaataaaatatttgccaatcactttcacaactccctgccctctgtccttgccattgttgatctcatgatctgtagttcttgcttcgtcatggagatggctgggatgaggtgcagcggcactgttcttggcaagggagagcgaggggtcggcggtgcgactgatcttgccgatggcgagtgagtggctggcagcggcgccaatctgagagagttggggtgaggtgggaaggaggaagcgtcgtcgaggccgtgctccgcgggagcagagactggttttcgctcctggtggatctccgtcgcgccacctcaaactccgtcgtcaggcggatctccggcgaggctgcgtacagcggtggtgaaggagatggccagcaagatcaagcggaggaggaggctgagcgattttgtggatggtgaaatcgtgtgtaggctaatcgattttgtggagagcgatatcaaggggaagaggaagctatcggcagcgtgatttcaggggaagtcgacccgggaatccggacc

SEQ ID NO: 77167 - DNA, 588 bp, Oryza sativa
  Clone ID: PAT_MRT4530_77091C.1
atgaggtgtgatcaacatgatgctaatgagaaagtgaacaactacagcaaggaggggagaaacatgacggagccatctttctcatcgcttcaaatgaagtctaatgcacctccatcatctgaagagagcatcaaagaacatcatgtagatgtggataaagctttcaagctagagatacatgttattgctaatcatattacttcgagtttctctagttttgattggatgaaacaggttgttctaaatggactacgcaaaaagcaccatatggaaaaaccgaggacggttttccgtgaagaaggggaggatgatgtgactatgcctaccagtgatacaaccattacttacatcatggatcaacaagaagtcatcaaggtcaagtcctccaagtgctggaatctgattcggccacctgctgcactgctgactttgatgggctgccaaagctacatacgacctctgtttttggcccggttgatctgcactggcaagattaacaacccacggagaggtgtatcaatcgctaatgcgcaacacaacgtctcgtacggttatagtcggattgtcaatgtttctcccaaatcgtag

SEQ ID NO: 77168 - DNA, 1206 bp, Oryza sativa
  Clone ID: PAT_MRT4530_77092C.1
atggcgctccccttcctcctcctcctcgccttcgccctgctcttcccgctctccgctcccccgcgctgctgctccgcggcccccgcctcctcgccgcccccgtccccgcccccttcccctgcggcggcggcggcggccccgcgccgcacgccgctcgtcccggcgctcttcgtgatcggcgactccacggcggacgtcggcaccaacaactacctcggcacgctcgcccgcgccgaccgcgagccgtacggccgcgacttcgacacccgccgccccacggggcgcttctccaacggccgcatccccgtcgactacatcgcagagaagctggggcttccttttgtgcctccataccttgaacagaacatgcgcatgggtgtcggcagtgtcgacctcagcaacattgatgggatgatacaaggtgtcaactatgcatccgcggcagctggcattctctccagcagtggttctgagctgggaatgcatgtgtcgctgagccagcaggtgcagcaggttgaggacacatatgagcagctctctctggctctcggggaggcagcaacaactgaccttttcagaaagtccgtgttctttttctcaatcgggagcaacgacttcatccactattacctgcgcaatgtgtctggcgtccagatgcgttacctcccatgggagttcaaccagcttcttgtcaatgcaatgaggcaggaaatcaagaatttgtacaatatcaatgttcggaaggtcgtcatgatgggcctccctcctgttggctgcgcacctcactttctctgggagtacggcagtcaagacggggaatgcatcgactacatcaataacgtcgtgattcagttcaactatgccctgagatacatgtctagtgaattcatccgccagcacccaggctctatgatcagttactgtgatacttttgaggggtctgtggacatactgaagaatcgtgaccgctacggttttctgaccaccactgatgcctgctgtgggctggggaagtatgggggcctgttcatgtgtgttcttccacagatggcgtgcagcgacgcgtcgagccatgtctggtgggacgagttccaccccacggatgctgtgaaccgaatcctggctgataatgtgtggtctggtgagcataccaagatgtgctatcctgtggatttgcagcagatggtaaaactcaagtagaactga

SEQ ID NO: 77169 - DNA, 204 bp, Oryza sativa
  Clone ID: PAT_MRT4530_77093C.1
atggtctgggaaacttgcagcagccgggtggaggaagggaataatgatgtggggaacctgcagcagccggagggagaggaacggtcggagaaggaggagaacagcacaggcgccggcagctggagaggcaccggcgaaaatcccggcatgacgagtgcgcaggtgtggcggtggccggccgtcgacggcgacgcttcatattga

SEQ ID NO: 77170 - DNA, 974 bp, Oryza sativa
  unsure (1)..(974): unsure at all n locations
  Clone ID: PAT_MRT4530_77094C.1
aattcggcacgaggcaacgcatatnccaaatcgccatccttgcgatgtgatgcgatgcgatgcagctctcacctctcgtctcgccagcaatgtcgcaccagattctccacacctccaaccccacgctgccgacgccacctcagccgcacaaccaccacccgccggtgccgccaccgcccaagctcggtcgccgcgctgcgctcgccatcgcggccgctccggccatcctcagcgccacacccgcaccatccagagcgcaggaagcagcagccgccgccgcggcgccctgcatcgccgacctgcccgtcaccgccaaggccttcctggacgtgtccatcggcggcgagccggcgggccgcatcaccatcggcctcttcggcgacgcggcccccgccggcgcgtcgcgcttcctgtcgctcgtcacgggcgtcggctaccggcgcaaggagttcgtcaagatcgtgccgggctacgtgcagcacggcggcgtggtgtcgtacccggccatcccggcggtgaccgagcggctggcggcggagatgggcgccgtgcgggcgcaatgcggcggggagaggagcccgcacgcggcggcgggggcggtgtcgatcgtggtgagggacccgagcctgccgccgcccaagcccaagctggtggcgcgcggcgggaagctggaggtcgaccaggagcaggtgggcgtggtgcccaacggcaccgagttcgtcatcaccaccggcgacgcgccggagctggacgcgtcggcgctggtggtcgggagggtcgtggacggcatggacgtcctcggcaagatcgcagccgtgcccaccgtcaaggataacactgcctctccatacttcagagtagccaagttgatcggggacaagagagcagtggttgcagagcgagggttcaaccgcccatacaccaagatcctaatcaccaattgtggagtcattgaacagcagcaggagcagtag

SEQ ID NO: 77171 - DNA, 603 bp, Oryza sativa
  Clone ID: PAT_MRT4530_77095C.1
tttctgttcttttgcagtccgtgtgatatagcatatctggctgctaaatattgacatctgaatgtgcacagtcattcggatatttttttttatcaagttcacacgttgcatctcattacatttctttgctggtaatgaagatttcaaatatgctggatagttgtatagctacacaggtaaacaagaaaatgggtaggcatttgatgaatctatgtgattggtccaaattatcaatcatgactgtacaatagctagtctatatattctctagtatttctctattttctatagcattcacttaatttttaggatcttacaacttgcaagcacatggtacttatttgatgctcttgttgatcttgctattaatatttgagtccatttatcattactaactttaagatcataagcttatttaacctgagacttacatcgtgttctgttgagaaaaggcagcactcagcacccagctaatgttgttcttgtaatgcatgttttagcttgtattggtttgctaagtttattgcagtgtgatcttgttgaaccttaattcaaataaacagttacatcattgaggggcgagtatgctatctgactatgtgt

SEQ ID NO: 77172 - DNA, 484 bp, Oryza sativa
  Clone ID: PAT_MRT4530_77096C.1
ttattttccccagaaccaatacctctcctttggatctccacctaaatattcccatagtccataaaatatccttttcaatctccctgactctttgttatattcccttaaccattttatccttggggctaaagtcctatttgcttcccttccatctattttgccaccatccctctcctttagccacttccaccagccaccaccggcaccaccatagccggccggagctgagctcttgttgttgccgttccggccatcctcttttctccctatgtcttccaccgaccttcccggatgcgcagcgagcgggaacacgcttggccgccgccgtcgaggccgttcaaccaccgaagcaccggcgccctgctcctcttcctctctgttgttgctcgggagaagaaacagaaggaaggagagaagaacgggaggaagaagaagagacatatgacaagtggcctctgcacattagaccatacaacaagttcta

SEQ ID NO: 77173 - DNA, 3607 bp, Oryza sativa
  Clone ID: PAT_MRT4530_77097C.1
atggaaaatctaccaaatggctcagcaaatatagctgagaagaaccaggataatgagatgtctacagatgctggtgagcctgaagaagtagcagatatatttatttatagagaagatgttgtcagcttgaagtcaaaagaggacacccgtgggttggttttggaggttgcaggagaatatgattctgatggtagcatcactgatgatgatactgatactgaggagcatgaacccaaaagttctcatggtgatggagataatggtgctgatggagattaatgcagaaatggagtttacgttgcttgacagcgatgtttgcctgctaacgaggttagggttcgcatgtccgggactttgcaaagagccacttctccaagcgtggcaaatacattctcaaagcttgtgaggcctatttgcaaggtaatggggttgggacgctcacagatgatgcctgcaccaccgagagaagcaaagaacagccatgctcggtgggtttcaaactcgcattagcaaaaattatgccacggttgattactgccctgaaggacgctggagcaaattgtgaccaatatgagcaccttgggaaaacggaaactgctcaagaacactgaatgacttgtatggatatcattttttggtttcagaaagatgatcacctcacctgctgtttttcgtataaatgtacattacatttgtttcttgtttctatttcaacatttggaaaatttggttccaaacaaggcaatgaattcatctgtttacaaaacatccaggtggctcaatggactatggaaagcaagtcgtcttgaaggcactgtcacaaaggtggaaacagttgcagttatagtctattggattgcatctgcacactttgccacgaatcaagaatctgttcctcctgaagagcagaacccaaaggatctgactcttttatcttgtttttcatatgcaaattggcaattaactgattggtgtcttcctaaccaatacacatcatcgtgtactgatgattctttgattgaaagttcagaaataaaagactctgatgacattcctgaatccagtgatgttaagacagaactaacgcagaagactgatatggatgaaaaccctgggaggatggatggagattcttctgctgatggatcaaatatggtttatgaagataacacatgcttagccaaacaatcagaatcaggcactattgcatcaaccgttccaaaggagggatcacaggacaatgcaacttacaggaaaaaacttaggaaagtttttgtcaaaaaggataaaagaacaagaagaagagacgagagctttgaaagggctctgcttattgcaaatacatacacgaaggttgatgtgatctggcaagatgggacaaaagaatgtggagcaagctcaacattgctcatcccgatccacagtccaaatgaccatgaattctttccggagcagtatgtcgtggacaaggttggtaatgatgttgatgattcttctgaaacaaaacgtgtgggtcttgttagaagtgttaatgcaaaggaccgaactgcatctgtatcatggtttaagccttcattacacccagaggagcccagagaaatcgagtgcaatgaaattgtgagtgcatatgaattggatggccatccagattatgattattgctatggagatgttgttgttcgcttgccatctgtttcactgcctgttgaatcaaccaatagggagaacaccatggaactggataatgtaaattctacagaagtatcggcaacccctgtagctgatgcagaggaacagtttccacagaaggaatccagtttggaatttactagcctttcatgggctggtaatatagttggttttgaagacggtgatattatagtcatttggggcgatggttcagtgtcaaaggttggtccacatgaaatatatgttgttggtcgtgaagatgatggtgcctcactagatgatggaactgccagtgatggtgctagctgggagactgttgatgacaatcaaacggatttgcctgatgattctgcacaggatgattcgcaaaatgtagcagatagtaacatcgaaagggaaaacggttcatttaattcgcaggatggaagctctgttgcaactggtccactttctgttgcttttggctttgtgactcggctcgcgagtgaactctttgctcgaggtaaaaagcatttagatggatcaaactcagatgctatggatgaagttgaatctcaccagtctaatgagatttcagaatctggtgatgatattgataaagctgagggggagaacaatgtggcaacatctgagagtaccgttgtaacaacaaatgacgcttccggtgggaagtctgtagatgttgatatggctgacaagcctggagattcagatggcttcaaacactttgatgttcagcagtgccctccagaccatcattacctggaaaacatggcgcagggcactggtggaagaaagtgggtaaaaaaggtacagcaggaatggaacatacttgagaaaaatctaccagattatatttatgttagggtatttgaggatcgaatggacctcataagagccgtgattattggagcaagtggaacaccataccaagatggtcttttcttcttcgacttccaccttccacctgagtttccacaagttcctccgtcggcgtactatcattctggaggtttgcgcgtaaatccaaacctgtatgtggatgggaagggcttggttctaaatgaaaagccttattttaatgaagctggctatgagaagcaagttggtactgttgaaggggagaagaatgcattgccatataatgagaacacatatctgctgagcttgaaatccatgttgtatatcctgaggcgacctccaatgcatttcgaggactttgcaaagagccacttctccaagcgtggcaaatacattctcaaagcttgtgaggcctatttgcaaggtaatggggttgggacgctcacagatgatgcctgcaccaccgagagaagcaaagaacagccatgctcggtgggtttcaaactcgcattagcaaaaattatgccacggttgattactgccctgaaggacgctggagcaaattgtgaccaatatgagcaccttgggaaaacggaaactgctcaagaacactgaatgacttgtatggatatcattttttggtttcagaaagatgatcacctcacctgctgtttttcgtataaatgtacattacatttgtttcttgtttctatttaaacatttggaaaatttggttccaaatgtgttcatctcttctcaactgggagcttgagctgccctgtacagtttgtttttgttaagcttgcagggttcgttatggccaggatagtatgccaattctgaaccgggcctagaatttccaggaatagagatgtgaaatctaatggatagtataattcccctcaccgagtaaaccgtagacaagtaattcaccggactatgttcatgtttactgatatacggtcgttcatcagcttcttcacatgctgtaatggtgaactggtattacctcattttcattttttgattgaatgctaagttgagaatagtgggtgat

SEQ ID NO: 77174 - DNA, 1100 bp, Oryza sativa
  Clone ID: PAT_MRT4530_77098C.1
cggacgcgggaccaaaatccaccggagaagaagacgattagccggggaccacgccggagaaaaaaaaatgctgtcctccaccgctctccggccgctggcgcagcccgccacggccacggccacggccaccgccttctcggcctcccgcacggccgccgcggctgggcggcgcgggtcggcggcgggggtagtggttcgcgcggtgcggaactacgactcgatcccgaagcgggagcccttcagctcgagccgcagcgtcctcgacgagttcctcaggcaggagaagcctctcgtccagcgcaccaaagaccagatcacagattattgcacaaccctagaaggtgatgagtgctgcagctgttgggatgcttactttgaactcaataaacttgagcaagagctacccaaagaggaaattgcaaggatggtgaaggactccgagggagatccgaggtacctgatcaatagcatccatcaccgttcagatctaagaaagaagatggctgagaaatctcataattcactatcatcaaactccctggggcaagctgcgaagccaaggcctttccctgtgcctgacggattgccgaaaacacaggaagagcttgctgaagaacaggaggccctaatgccggagtcctcctatacgaggctactgagaagaatggggagatttcctgattggtatacgcctcgcccagatcatgaaaccgactgaatcaagtcaccaagcatccatataccgctccttgtgaaaattttgtattggttgccggataattatgatgcctgaagttctgtggtttgggtaatgcactaaggttcagcagcgtggtagctatccaggttagattgctgttgcttgctttactgaatgtataatggcgtgtgttttatgctgttcaggtcttcccctcaggattcagatagctccttccctgtaaactcaagcaatgtcccatgagatagcttgcacaaatttgtctttctgtatatatatgttctggaatagagtttctgaatctgtttcctggagttaatgatcaaaaaaaaaaaaaaaaaaaaaaaaaaaaaaaaaaaaacccgcggggacctcgtgc

SEQ ID NO: 77175 - DNA, 473 bp, Oryza sativa
  Clone ID: PAT_MRT4530_77099C.1
cccacgcgtccgacaagttcctccgtcggcgtactatcattctggaggtttgcgcgtaaatccaaacctgtatgtggatgggaaggtctgcttaagtctcttgaatacctggacgggcagagggaatgaagtatgggatccatcatcatccagtattctccaagtcctggtttcacttcagggcttggttctaaatgaaaagccttattttaatgaagctggctatgagaagcaagttggtactgttgaaggggagaagaatgcattgccatataatgagaacacatatctgctgagcttgaaatccatgttgtatatcctgaggcgacctccaatgcatttcgaggactttgcaaagagccacttctccaagcgtggcaaatacattctcaaagcttgtgaggcctatttgcaaggtaaatgggggtgggacgctcacagatgatgcctgcaccaccgagagaagcaagaac

SEQ ID NO: 77176 - DNA, 1149 bp, Oryza sativa
  Clone ID: PAT_MRT4530_7709C.1
atggagcactcaccttcaaacaaaatgaccctccttctcctcctcctcctcctccttggatgcacgcaccacggtcaggcgaacatgtactccggccatcccaagatcgactccatcttcagcttcggcaactcgtactccgacaccggcaacttcgtcaagctggcggcgccggtgattcccgtcatcgctttcaacaacctcccctacggcgagaccttcttcggccaccccaccggccgtgcctccgacggccgcctcaacgtcgacttcatcgctgaggactttggagtccccttgctccccccgtaccttggcgagtccaagaacttcagccatggcgccaacttcgccgtcgtcggcgccacagcgctcgacctcgccttcttccagaagaacaacatcaccagcgtgcccccgttcaacacctcattgagcgtgcaggtcgagtggttccacaagctcaagcctaccttgtgctcgacgacccaaggttgcagagattacttcgagagatcgctcttcttcatgggcgagttcggcggcaacgactacgtcttcctcttggccgccggcaagaccgtcgacgaggccatgtcgtacgtgccaaaggtcgtcggagttatctctgccggcgtcgaggcggtgatcgaggagggagccaggtacgtggtggtgccgggtcagctgccgacggggtgcctcccgatcatcctcacgctgtacgcgagcgcgaacgcgacggactacgagtccggcgccggctgcctgaggcggttcaacgagctcgcacgctaccacaacgcggcgctgttcgcggcggtgtcgctgctccggggcaagcacccgtcggccgccatcgtcttcgccgactactaccagccggtgatcgagttcgtgcgaatgccagaaaatttcgggttcagtcgctcgtcgaggctccgggcgtgctgcggcggcggggggcggtacaactacaacgcgacggcggcgtgcggcctcgccggcgcgacggcgtgcccggaccccgccgcgtcgatcaactgggacggcgtccacctgacggaggcggcctacggccgcatcgccgccggctggctgcgcggcccgtacgcgcagccgcccatcctcgcggccgtgcgcccgtag

SEQ ID NO: 77177 - DNA, 720 bp, Oryza sativa
  Clone ID: PAT_MRT4530_770C.1
atggcggatggaaccacgatggagctcaacatcacgccggcgaacatgttgccgtcgaggaatatctcagccaaggcgttgcagttggcgctcctctcatcgtctcccgcgcccgcgcggatgctctccgcggcagcgtccgacgccctcgtcgagatcaagccaggcgagataagcatggtctccggcatccccaaggagcacctccgccgcaaggtttggtgggttcttttggttgttactcgggttagggatagagcctggagaacttggaggaatgtgctggtccgcgcacgcccacgtcaatcggctaggagctcactgcggaacacgttgttcgcgagtgcgaggcctcgcaacgacgtcatgttgaagaaactcggcaggatctctccggtgaggctgttctgcgacaaggctaacatgcggagcgctgggaggcgtggcaagccgtcggggatggaactttccagaaggttctggtcgaactcgagctgcacgatcttcgtgaggttcgccagcgatggcgggatgtggccggagatcgagttgtggctgagccggagcaccatgagattcggcaacgcgtcgagccaccgtggaacgccgccgacaatcgaggttgttgttgttgaggctgagataccacatccgccggagccagccgaggccatcggggatgctcccggagaaggcgttggaggtgaggttgatgagtag

SEQ ID NO: 77178 - DNA, 233 bp, Oryza sativa
  Clone ID: PAT_MRT4530_77100C.1
gggccggaattcccggcctcgaccccgcgtccgggaggaggttgagcttggtttctgggttgggttgggctaggttgcgatgaggcccacccatcgcattcgcgttgcgaggcacaaaccaaacacctgccctcaaacatgtctttcttgactattcacccttcacgcctcccctcagctagctgcctgcgctccacaaatcacaaaccgaaagcagaaccaccacaacacgg

SEQ ID NO: 77179 - DNA, 121 bp, Oryza sativa
  Clone ID: PAT_MRT4530_77101C.1
cccacccgtccgggtattatccgatatccgcagcgagggacacatgggaggggacacctgaccagccccgtatgcccaagcatgatatcgaggcggagcggtacgaggggagcccgggccg

SEQ ID NO: 77180 - DNA, 2235 bp, Oryza sativa
  Clone ID: PAT_MRT4530_77102C.1
atgcaagaagcattagtccttgcaatgaaggtcataccaagcatcatcttcctcgcagtggcagtgcaggatgcagcttcttctgggtacagtctgtcgttgccaggatgccctgataagtgcggaaatgtttccatcccctacccttttggcgtcggccccagctgtgctgcaaccagcatcagcagctacttcaatctcacctgcagcaacaccttcaacccaccacggcctatggttggggactctgaagcactcgtcgaggtcactgacatctcactggagcacggcgagatgcgggtgctcagccctgtctactacatctgcttcacggcaaataccacgttcaccaagttcaccgaagggtatgagctgaagcacacacccttcctcccctccccgtcgcgcaaccgcttcacagtcatcggttgcaacaccctggggctcatcggtggctacaagggaaccgtgagccactatgtgactggttgctactcctattgtgagagcatcaacagcacatctgatggggcgccatgtgcagggatgggctgctgcgaggccgccataccgactgacctcaccgcctggggggcgatgtttgagatgaaccagagcaaggtatggagcttcaacccgtgtttctatgccatggtcagtgaggttgggtggtacagcttccagcagaaggaccttgttggccaccttgggttcatagatgacagagctcagaggggagcacctgttgtggctgattgggccattaggaatggctcatgcccggaagaggggaaaggcatacctggtgattatgcgtgcatcagcgcaaacagctactgcatggacgcgaacaatggtccagggtacttatgccagtgctccaaagggtatgagggcaacccttatcttctgaacggctgccaagacgtggatgagtgcgcattacgtaagcaggatcccaagtatgaaggatatatatccttgcaggaaaggagttctgccacaagcacaccaggaggatatttatgcaaatgcaagttaggaaaaagatctgatggtacaaattatggatgccggcctctgcgcactacagccgagaaagtggttattgtacaaaggaaaaggcataagaaggacaaagatgagtacttcaagcaaaatggaggtctaaagctatatgatgagatgagatcaaggaaggtagacacaatccgcatactcactgaaaaagatataaaaaaggccactgacaactacagtgaagatcgagttcttggaattggaggtcacggaatggtctacagaggaattttggatgacaacaaagaggtagccataaagaagtccaaagtaattaacgacgaatggagggaagaatttgtcaatgagataataatcttgtcacagatcaaccacagaaacattgtgaggttgataggatgttgcctggatgtacatgtccccatgttggtctatgagtttgtatccaatgggaccttgtctgagttcctccatggcactgatcgtagatcatcaatccccttggacattcgcctgaaaatagccacacaatcagcagaagctctagcatacctgcattcatcaacgtctcgcgcgatccttcatggagatttcaaatcggccaatattcttttggacgatcagcacaatgcaaaggttgcagattttggggcatcagcactgaagtccatgaacgaaagtgagttcatcatgtttgtccaaggaactttgggttaccttgacccggagagcttcattagccaccgtctaactgacaaaagcgacgtctacagttttggggtggttctgctggagctgatgacaagaaagagggcaatctatgccaatagcatcaatgaaaaggaatcattgtcctattcttttctcctgatgtttgatcagaacattcaccggaatatgctggacagagaaattatggataaagaaaccatggttgtgctcgagaaactttccattcttgccgccaactgcctgcgaccaagaggagatgaccggccaacaatgaaggaagttttagagtgcctacagatgataaggagacacccaatgcacggcgctagtgatcacaaaggagacagctatgcacatcacaactatgaaggatcttcatcaccatcaatgtctgcccatttcgacgaaacgatatacaagagcatagaggcatccagattggtacaagatcttgtgagatga

SEQ ID NO: 77181 - DNA, 490 bp, Oryza sativa
  Clone ID: PAT_MRT4530_77103C.1
ggacccggaccccggtacaatgcggcgcggcacgaatgtttagcgttcacatataccccggccccacatatgcccatcacatgttcagtgctctcatctacacatatgtgtgtaatatatgtatttatacatatacacatatgcgcgtgcgtatatatatatatatatctatatatatatatctatatatatatatacatatatatagatatatatacacacatacatatatatatatatatacatacatatatatatatatacatatatatatatatatatacacacatatatatatatatatacacatatatatatatatatatacatacacatatatatatatatatatacatatgtatatatatatatatatacatatatatatatacatacgtatgtatgtatgtatatatgtacgtatgtatgtatatatatatatatatatatgtatgtatatatgtatatagacatacatacatatatgtat

SEQ ID NO: 77182 - DNA, 345 bp, Oryza sativa
  Clone ID: PAT_MRT4530_77104C.1
atgggcgaccaagggagcggcgtcggtgtgctccagcggcaggcagcgggagaacggcgaaatcggccagcgacgggtggaaaggagtcgccaccgcagccgccggaggtcagagctgaggggaggtgggcggacaacaacgagcgacgcctcgagggtatctttcctcttcttgttcttcttgttcctcttcttttccggcgtggccccggccggaaccctaaacgggggcacgtctcattctccgtccgcgcgtccgccgcggcggcgccggcggcagggcttgagaggcactgggaatggggtgatgacaagcagaccggaagccagaagcttgaaacccaa

SEQ ID NO: 77183 - DNA, 332 bp, Oryza sativa
  Clone ID: PAT_MRT4530_77105C.1
atgcacgcgccgcagctcgatcctctattctggcgccctttttttttttttttgatcaacttgacgcttatgattgccttgaaatggcgagctataagttgcagaaaacgaacactatgttcacaggcctgaatgtttttattgaccaacgtaacgattaatctgcactcaaatggacacacaccaaatggccccgctaacatatatcaggtgcagatcccgataactctttttacttgaatgccacatacactgccttacttatttggattatttgcacactattgattaagacggctggtccttgaccttcaatacatcctgtattacta

SEQ ID NO: 77184 - DNA, 804 bp, Oryza sativa
  Clone ID: PAT_MRT4530_77106C.1
atggcggtttctgctgacgtggttggtttgactgggtcctcgtcccatgtagtgttgactggggtccgtgccctgctcggtggctcacacgacgacctccgccttcgcgcggaccagctctcgtggtcgctcagcgttgtcttcttcactggcggcagtgcggggcttgggcccgatgggagcgtgctcgtctgtgccgacgtcccgccaattggggcagcgctgcggggcaagcagtggacagcggtacgggtcgcggtcaatgaagcggaccatggcgcgtgtggctgttccaacgacatcttccgcgacgtcatgtggttgtttgtcggtgacgtcgtgtttttcaggtcatctttctcgtcccactgggtgttcttctccaacgtcgagttctatcccgcttccgcggctacaagctggtccctactttggctgctgggtccatcatggggctgcgatgtctgtcgcccatgccttgctcttcgcatcccacgaagacctccgtgttcaccacttgtcgcactcgctgagcagcgcgttcttcgccgatggtgccgtggcagcgcccagtgatggtggcccagagcaccagcagatggggtcggggacgagcgcggcggcatccgaggagaaggaggcgtcgttcccctcgcgtggccagggcttgacgatgagcctcctcctcctcatcaatgtcatctcctctgccacgaggccgcatcttctctggttgggtggccgctccctcgccgccttgcgctcgtggacgctgtcctccagcgccgcacgccgctcgtccat

SEQ ID NO: 77185 - DNA, 1644 bp, Oryza sativa
  Clone ID: PAT_MRT4530_77107C.1
atgggcaactgctgcccgccggggtcatcctccgagcccgacccgccgccggcgtcctccggctcctcccgccccgccggcagcgccggcgccgcggcctcgccggcgacaatatccccctccgccgcgccggcgcccgccaagccgcccgcgcccatcggccccgtcctcgggcgccccatggaggacgtcaagtcgatctacaccgtgggcaaggagctcgggcgcgggcagttcggcgtcacgtcgctgtgcacccacaaggcgacggggcagcggttcgcgtgcaagacgatcagcaagcggaagctgtcgaccaaggaggacgtcgaggacgtccgccgcgaggtgcagatcatgtaccacctcgccggccagcccggggtggtggagctcaagggcgcgtacgaggacaagcacgccgtccacctcgtcatggagctctgtgccggcggcgagctgttcgaccggatcatcgccaagggccactacaccgagcacgccgcctcctcgctcctccgcaccatcgtcgagatcatccacacctgccactccatgggcgtcatccaccgcgacctcaagcccgagaacttcctcctcctcagcaaggacgagcacgcccctctcaaggccaccgacttcggcctctccgtcttcttcaaagaaggtctccatcaattcctccattgctgctctctccttgagctcatcatcatcgtcgtcatcaatggcgttccaattgcaggtgaggtgttcagggacatcgtcgggagcgcctactacatcgcgccggaggtgctcaagcggagctacggcccggaggcggacatctggagcatcggcgtcatgctctacatccttctctgcggagttcctcccttctgggcaggcaagctgctgctgttcatcgccatggaccttgtcaggcggatgctccattctgaccccaagcagaggatttctgcatatgacgtgctcagtgagtacccttcactttacgctgaacatcccaaatctttcaacaccctgaatttttcagatcatccatggataaaggaagacggcgaggcgcccgatacgccgctcgacaatgctgttcttggcaggctcaagcagttcagagctatgaaccagttcaagaaggctgctctaagggttatcgccggatgcttgtcggaggaggagatcagggggctcaaggagatgttcaagagcatggattccgacaacagcggcacgatcaccgtcgacgagctgaggaaagggctggccaagaagggtaccaagctcaccgaagctgaagttcagcagctaatggaagctgctgatgcagacggcaacgggacaatcgattacgaggagttcatcactgcgacgatgcacatgaacaggatggacagggaggagcacctctacaccgcgttccagtacttcgacaaggacaacagcgggtacatcacgatcgaagagctcgagcaagcgctgagagagaaagggttgatggacggcagggagatcaaggacatcatatccgaagtcgacgccgacaacgacgggaggatcaactacacggagttcgtggccatgatgaggaaaggcgacccggaggcgaacccgaagaagcggcgcgacgtcgtgctgtag

SEQ ID NO: 77186 - DNA, 236 bp, Oryza sativa
  Clone ID: PAT_MRT4530_77108C.1
gcgagagccacgatgccggccatcacgacagtgtggggggatacaggtgtgacgttgggcaaggcggcgtggtgattgggtttgggtttgaggccgccccggtgttgacagcaatgacggaggtcgggatcgactggagcgacattgaactgccagctgggacgaccggtgtcgtcgcaacaacaatcccggtcgatcaagcccacaatgttttagattcttatgagattcgctag

SEQ ID NO: 77187 - DNA, 351 bp, Oryza sativa
  Clone ID: PAT_MRT4530_77109C.1
gttaattaaaaaggggggttttatttaaatttatttgacatcaagtttcaactggcacgcatgatgatgcatgactttttttttaacatttgaaccatttttcttttacaattcagtcccaaacaccaccaacggggggaatgctccttggggcaatgtagtatttaggataaataccacatatggatggcaagtttaaggccagcaaagcttgagcttgagcttgagtttgataaaagtaaacaacaccgacctggtgaaattgtagttgttgaaaaatcgcctgaacgctactaatggcctggtaatgaaattgttgccctaccaacctgggctgttggcaaaactgtt

SEQ ID NO: 77188 - DNA, 1245 bp, Oryza sativa
  Clone ID: PAT_MRT4530_7710C.1
atggagcactcaaaaccagtagctttcgtcctcctcctcctcttagcctgcctgcattacgctcaggcgaaccccagccgccgtcccttggtccagtccatcttcagcttcggcaactcgtacgccgacaccggcaacttcgtcaggctggccgcgccgctgcttccggtcatccctttcaacaacctcccctacggcgagaccttcttcggccaccccaccggccgtgcctccaatggccgcatcatcatggatttcatcgccgagaagtttcaggtcccattcgtcccaccatctcttggccaaggtgaggacttcacccatggcgccaacttcgccgtcgtcggcgccagcgccctcgatctagccttcttcctccacaacaacatcaccagcgtcccaccattcaaaacctccctcagcgtgcagctggagtggttccacaagctcaaacctacactgtgctcaacagcccaagaatgcagagactacttcaggagatcactcttcttcatgggagagttcggcgggaacgactacgtcttcctccaggccgccgggaaaaccgtcgagcagcttatcccctacgtgccaaaggtcgtcggagccatctccgccggcatcgaggtctcgtacattttcaccgacatttgcagagacacaaactatacatataatcctcaattcacaaacggaattgacgttaattactgtgtgatcgatgcatttattcaggcggtgataaaggaaggggcggtgcaggtggtggtgccgggggagctgcccaacggctgcgtgcccatcatcctgacgctgtacgcgagcaagagcagaggcgactacgacgcgcgcggctgcctgaagaagcagaacgcgctcgcgcgctaccacaactcggcgctgttcgaggcggtgtcgcggctgaggcacaggtacccttgggtgaagatcgtctacgccgactactacaagccggtgatcgacttcatcaagaaaccgtccagattcgggttcagtgcctcgtcgaggctccgggcgtgctgcggcggcggcggcggcgggccgtacaactacaacgcgacggcggcgtgcggcttccccggcgcgagcgcgtgcccggaccccgccgcgtccatcagctgggacggcatccacctcacggaggcggcctacgcccgcatcgccgccggctggctgcgcggcccgtacgcgcatccgcctatcctcgcggccgtgcgccagtag

SEQ ID NO: 77189 - DNA, 1858 bp, Oryza sativa
  Clone ID: PAT_MRT4530_77110C.1
gcccaatcgtccgacgaaccattagcagctagctaggtcgcgggctgagggctgactaatcatggagcaagcagcgaaggccaccatctcactgtcgccgccgagttacgctggatgttgcatggcagcatgtccctaccgatcaacgcggcacctgcgcagaggaggcggctgctctgctcgctccatctcctccctccggcatgccccttctgctcgtgtttacgccgcagccgcagccgcagccacgccggagtccaagtcgacgaaagagaatgacctcgtcttcatcgcgggagccaccggaaaggtgggatcccgagctgtaagggagttcatcaagcttggcttccgtgtccgcgccggcgttagaagtgcacagagagcatcgtcccttgtgcagagtgttgagcaactgaaagtcgatgacgatgcaacttcgcccgcagaaaggctcgagatcgtagaatgcgacctggagaagcaggcgcagtcagacatcgtgtcggccattggcaacgcggcgattgtggtgtgctccatcggcgccagcgagaaggacatcctggatgtaacgggcccctaccgtatcgactacatggccaccaacaacctcgtgcaggctgcaactgctgcaaaggttgagcacttcatcctggttacatccctgggcacaaacaggattggcttccctgcttttcttctcaacttgttttggggggttctgtgctggaaaaggcgagctgaagaagcgctcatcggcagcggccttccttacacgatcgtccgacctggtggcatggagaggccaacggacgctttcaaggagacgcacaacctggtggtggcagttgaggacacgtacgtcggtggactcgtttccaaccttcaggtggcggagctcatcgcgtgcatcgccagcaacaggagaacggcctactgcaaggtggtcgaagcgatcgcagagaccaccgcgccattgctgcccacggaggatcagctcgccaacataccttcaaagcggttaactcagcaacctccgcccgaacctgaggtagttcagcagggagagacccctccaaaaccgatccagcaaagccaacgaccactctcaccctacacggcatttgtggacctgaagcctccaagctcgccatcgccgtgcccaccatcagcagcagctcctgctcctacttctacagataccgctgcggcaggttcatcgtcaacgttgaactccagcgccaccggcacccccatcagcgtggatcaaccgaagcagcagcagaggcctctttcaccgtacactagatatgaggagctgaagccacccagctcgccgtcaccgacgccgccatcagcagcttcatcggcttctgcttctgcttctcctgatacacctcctgcagcagcagcttcatcggcggcgttggactccagcgccaacggcactcccatcaccggcgatcaactgaatcagcagcagaggcctctttcaccatacacaaggtacgaggaactcaagcctccaagctcgccaaccccatctacccccaaactatagaagcaagatagttagcatataaggctatattcgttttttgccttggccaatcatcactcaagatccagttatccactactagttaattaccttcatccaggaaaagcgacttgtatttttcatgtccaaattcaaaaaaaacaaagagtagtattggaattggaagtcaacaaattaattctctctaagtcttacaatgtttgtgcaccaagacccaggaataatttaaacggcatcaatcaatatgacatgcacaatatacaaaaaaaaaaaaaaaaaaaaacctgcagcccg

SEQ ID NO: 77190 - DNA, 357 bp, Oryza sativa
  unsure (1)..(357): unsure at all n locations
  Clone ID: PAT_MRT4530_77111C.1
gntgnnntcagggagcgcaagctagcgtnggggcgcggcgnncancgggcgtcggggcgggggcggggccggggggacgggaaggnggntttggaggacccctgttccagagggagaaggtggcaggtgacggtaggccgaggcgacgatgagagccgaaaggacttccagtacaggcggctgcttcttaagtcacggcgggtcggcccgtgggactggggagcgttttggagatgccagagaggggcgggccctagggaagggcgcagcacggagcctgtgtacgggtcgggccggttgctgccatttggcggagtggtggccgaccaggtttcgaaattgagaagcgggcagtag

SEQ ID NO: 77191 - DNA, 486 bp, Oryza sativa
  Clone ID: PAT_MRT4530_77112C.1
ctggaatgattccatccagtacgcaatgtacaagccatcataccacagcataacagttaacaatagttagtcaacaagttcttgctttgctctagtgatgcaagaacaaatacatccattaaatgctagtaagtttcttttcttattttgttcagcactagctagtatccattaaatgctaacttagtattgcctgcgagtattgagggttcagctcctccgcacttgcagagtgaggcattggcagaacgcctcaccaactaatggtttctgcaaaattccttgtgtgcagactgaaggatacggcgctgtataaatacaagagaactgctgtctcacgatcatgacgagcatgtgtcatttttatgcacttcgcttcccatacttcaacatttgtattaaatactttccaccaaataaatcattaacccacttcatctgaactgtcactatctgaggagaaatatatgtgctgtcctctagttg

SEQ ID NO: 77192 - DNA, 112 bp, Oryza sativa
  Clone ID: PAT_MRT4530_77113C.1
caatggcgaggtggacagcaatagtgatatggtggtggatatgcagagatggaccatgaggaaggccttggcgttagagctggtccaccacgtgtatcttgtattcttgtag

SEQ ID NO: 77193 - DNA, 428 bp, Oryza sativa
  Clone ID: PAT_MRT4530_77114C.1
acagggagctcgccagccggtgccagattcatgttccacagtgtgcagacagctcttgagcagttgctttggtgctgcagtgctgtgttcaacaggaggagggcagaccagcagtcttccagggatgatctcccagcacagcaggcacacaggggtgcagacagccgcgacagatcgccgggatggcgagcgcagctgacaggactacaggccaggtgcaacactgcagcacacaggccggttccatttgccatgccatcatgtttggtggtggcatggattagattaattatttcattagtgattaattaattaattaggcctttgcttaattaattatcgatgtttgctagtactagctaccagtatcatgtttggatgctgcttctctatgtttgtgataatgataaaaaaaaaaaaaaaaaaaa

SEQ ID NO: 77194 - DNA, 1341 bp, Oryza sativa
  Clone ID: PAT_MRT4530_77115C.1
atgggctgcctccgccgcgcgctccgcctcggcctacgccgtgggctctcctcctcctcggcggctccggcggccgcggagcaggctgagctccccccgccgcgcccctccgcggggcgccgcgtggtggtcacggggctcggggccgtcacccctctcggccgcggcgtggggcccacctgggaccgcctcgtggccggcggctgcgcggtgcgcgcgctcgccgccgaggacctgcgcctcccggggggagccgacgcggggaggacgctggagcagctcccgtccagggtcgccgcccccgtgccgcgcgggaagggcgacgccgagttcgacgaggaggcttggactaaggacaataaatctatatccggatttatagcctatgctctatgtgcagctgatgaggctttaagagatgcaaattggttgccttcagaagatgagaagaaggaaagaacgcgtctacgtcgcctcagtccatatttcattcccaagattttgattaacatggcatccggtcatgtcagcatgagatatggtttccagggtccaaaccatgctgctgtgacagcttgtgccacaggtgcccactctattggtgatgctacacggatgattcaatttggagacgcggatgtaatggtggctggtggaacagagtccagcattgatgctttgtctatagctggattttctagattaagagcattgtctacaaaatataactctcttcctcaagcggcttccaggccatttgattgtggtagagatggatttgtgattggtgaaggttgtggagttatggtgttggaggcacttgatcatgcaaaagaacgtggggcaaaaatttatgcagaagtgagaggctatggaatgtctggtgacgcacaccacataactcagccacaaaatgatggtagaggtgctaccttagccatgaaacgagctttggatcagtcaggccttcaggcagatcaaatcgattatctgaatgcacatgcgacctcaactcctcttggtgatgctgtagaggctaatgcaatcaaatctgtctttggtgaccatgcaacatcaggtggtcttgcattgtcctcaacaaagggagcaattggtcatctgcttggggcagctgggtcagtggaagcaatcttcaccgtattagccatccaccatggcatcgctccaccgacacttaatctagaaaaaccagacacgctgtttgaaggcgcgttcatgcctctatcttccccaaagaagatgcctatccgagctgccatctcgaattcctttgggtttggtggaaccaacacgtcgctgctgttctcgtgccctccttag

SEQ ID NO: 77195 - DNA, 428 bp, Oryza sativa
  Clone ID: PAT_MRT4530_77116C.1
gcacaggtgcagacgcggctgagcagtgcatggtgcagcaggcagtggtcacaggaggagggcagacacagcagtctcacagggatgatcatcaccaagcacgcaggcacacaggggtgcgacccgcgacgatcagccgggatggcgagcgcagctgacaggactacggcacggtgcaacctgcagcacacggccaggttcacatttgcacatgcacatcatgtttggtggtggcatggattagattaattatttcattagtgattaattaattaattagccctttgctttaattaattatcgatgtttgctagtactagctacagtatcatgtttggatgctgcttctctatgtttgtgataatgataataaaaagaaataaaatgaggaacggatgttcctctttgttgttaaaaaaaaaaaaaaa

SEQ ID NO: 77196 - DNA, 1153 bp, Oryza sativa
  Clone ID: PAT_MRT4530_77117C.1
cgcgtgggccggacgcgtggggcagaggtgagcgctcacatattcatggcatcagcttcagacaagctcgtcctctcggccatcgtgctcgccgtcctcgccgccgtggtggcagcggcgtcgggctacggcgacgtcggcgagtactgcccgcgtggggaaggcggtgtccccggaacccggtcccgtcgtgccggaactacatcgcgcggtggtgcgccgccgccgggggccgcatggactcccgcaagcagccgccgcgggagttcctggagcccgtgctgccgggagctcgccgccgtgccgatgcagtgccggtgcgacgcgctgagcgtgctggtgcgcggcgtggtcacggaggagggcgaccgcgtctccgggatgatctcccagcacgcggcaccggggtgcgacgccgcgacgatcgccgggatggcgagcgcgctgacggactacggccggtgcaacctgcagcacacggccggttcctttgcctgcctcatgtttggtggtggcatggattagattaattatttcattagtgattaattaattaattaggcctttgcttaattaattatcgatgtttgctagtactagctagcagtatcatgtttggatgctgcttctctatgtttgtgataatgataataaaaagaaataaaatgaggaacggatgttcctctttgttgttaaaaaaaaaaaaaaaaaaaaaaaaaaaaaaaaaaaaaagggggggggaaaaaaaaaaaaaaaaaaaaaaaaaaaaaaaaaaaaaaaaaaaaaaaaaaaaaaaaaaaaaaaaaagggggcggccgttttaaagaaccaaagtttacttccccgtgcttgcaacgtaaaagtttttttatggggccaccaaaattaaattaactggccggggtttaaaaacgtgggaactggaaaaaccctggggtacccaaattaaatccctttgaaaaaaatccccttttccccagttgggttaatacaaaaaaggcccgaaccaatcgcctttccaaaaatttgcccaccctaattggaaaagggaaccccccctttacgggcccataaaccgcggggggtggggtggttacccccagggtaaccgttacatttgcaagccccttagcccccgttcttttcgtttttt

SEQ ID NO: 77197 - DNA, 216 bp, Oryza sativa
  Clone ID: PAT_MRT4530_77118C.1
ttaggtggcaacaggcggtctgacacacgcctcgccccatcccgtcaggatgagagcctccaggcactcgtccctagccggagccagcgtgctagctcctgaagatggcacgttggtcccggtcagatatatgccaggcctggtcatgtcgtcggcagacagccatgatcccacgttgcacctgcttccggcggagtagaggtaggtatgggccat

SEQ ID NO: 77198 - DNA, 309 bp, Oryza sativa
  Clone ID: PAT_MRT4530_77119C.1
ttgttttgcccaacatatgtagtaactctatacatatataaatctgtacagcattataatacaagattatgatcactcacaactgcatgcagggggcaccacaaataagagaagacggagcagtgcctttcttcttcgaacatgtacaggaaattcactaggaacatcagtgatcacagttaaaacaccattcctctaataatcatcacatcagcattcgcagttagacgagctgctcccgaagcagctgttcttgggcgccatcttcctgacgctgacctgcaggaactggagcgtgctgggcgagat

SEQ ID NO: 77199 - DNA, 456 bp, Oryza sativa
  Clone ID: PAT_MRT4530_7711C.1
atgccgtcattgggcgagctattgaaaattggtgacaaggttggagaaggaggaagacgaagagagaaggtcagtggcgtggcgctgaaggtcaccggtgtcatggtgaggcttccttcgagtttcaagtacactgtcaatgcaacaagcccctacctccaagtctacttccataggctttttgtgagagagaaagagaagatgcgatgccccacacacaacaccccatcacctaacgaacttgaccaagagcaccaaaatttgtggaatgtgcatggatacggcaatggcattgccactgtatccgatgtccaacggcaacatgataaccgcaagctctaccactactccacacaagcagaactgcagaagacatccgtctcctctctgtacaggttgtcggacagcctgtttgcaacggacgctacgtaccccgtcgtgtttcctgaggcttga

SEQ ID NO: 77200 - DNA, 514 bp, Oryza sativa
  Clone ID: PAT_MRT4530_77120C.1
ttttttttttttttttttttttttttttttttttttttttttactcttgttctttcttttgggcacgcccggtggggacgaccggggaataccgggaggggcacccggaggattcccagccggccccagagggagcccaatcagagcttggaggaagcatggtaaaagctgggcccagtgaaaaaaaaagatgcgcccacaatgaaaaacaacatacgccgccggaagcaaaaagcgtaaagccgggggggcaaaaggggggagccaggggacataaatgggggggcgctcacagccaaattgcgaggcggaaaacctgcggtgccaaggggaaaaacgaatcggccaacccgcagaaagaggcgggccaacgcatcgggcacaaggggggatcttcttgggaccagggggacggttaacagccaacagggggacaccccctggcccagggagagctacagcaaggggctcaagctagttcgccccggcaggaaagaagtttggcccaaggtgg

SEQ ID NO: 77201 - DNA, 373 bp, Oryza sativa
  Clone ID: PAT_MRT4530_77121C.1
atgcacgcgtgcgcgagctgcgtcctggacctgccgcggatgcagccgcttcccctccccgcgtcgcactgcctcccccatcccccacgcgccagccacgccggagctgggaaccctagcgccatgccggcctcaaccgccccctccctcatcctgttcggcgttacatgcggcctcttgcaatccccgctgcaacccggcctctcctctgatctatacctccctcacatcaaccgttctgtgtgcaagcctcaaccctgcaccccttcatcctacagcattatgaaaggtctatcgattggtttctcccgcccgtcggcgagcgacctgaagcggatgtgggtgcggttcaagaaggcgccgcgcggcggcg

SEQ ID NO: 77202 - DNA, 303 bp, Oryza sativa
  Clone ID: PAT_MRT4530_77122C.1
atggcgagggtgccggcgaggggttacattaggtgccaaatgctgaggggtttatcgacgacgcgtgggcacgtggcggcgaggtgcttgaccgcgcggggacaaagcgacgcgccccacgtgacgccgtcgcccgggagctgggtgtcacggcggcggcaagccaagaagagcttggggaagggcaagggcgagcccgccggcgagatgggcgtggtaggcgtcggaagggatggtggggctgggagcgtggcgccatggagggctgagggaccagaaacagacttcactgatggtccttag

SEQ ID NO: 77203 - DNA, 229 bp, Oryza sativa
  unsure (1)..(229): unsure at all n locations
  Clone ID: PAT_MRT4530_77123C.1
gacgccttccctnaagatngcactttttgctcctncccctgtattttttcccccncagtgtcatncgngtggtgntgttgggcttgtccccgngttgcccggnaatgttgcctattctaggaatttcgattgtcttgtgtggcatggagtgtccccgttgngggattttttggaatgctgccanttngncgttattgccgttatggccttttcattacaggaaacctag

SEQ ID NO: 77204 - DNA, 577 bp, Oryza sativa
  Clone ID: PAT_MRT4530_77124C.1
aacaatgtgcaacagagaactttctctttgtaggataaaagaagatacatagtacttcatgctcttgcaaaacaataacggggaacatatccctatcaggacaaatccacactcccaaaattggtaaaaaaggatcttcacttgtcgaacaaaaaccgggccgggagaaaaatatgtcaacatgccttctgaaaacccaacacatatccatatgccattgaaaatctcattcttgcccaagaacccaaagaagggacctctggtcagactcttgcagatgattctgcttgaagtaatactgcatatccttggccacctttctctggttcaccaacgtaacagtccccccctccttgggcgccttcacatcaccggcgtcccggtctgcttaggcttatgaacctagaacggccgtggcgacaactaaagcccaaccggcttaaccggggtgggcggttgggacagcatctgaggtgtggacagagccggaaactcgggcggtggccacatccgcggcgccgctggtcttctgggcgacgcctacatcttggagcatctgatcacggctaacgactac

SEQ ID NO: 77205 - DNA, 720 bp, Oryza sativa
  unsure (1)..(720): unsure at all n locations
  Clone ID: PAT_MRT4530_77125C.1
cacacacacacactctctactctctctaagctaagctaatgacagcagcaatggcgccgccgcagctcgtgtccgtgctggtggcgctcctctgcgtggcggcggcgtcgccggcgggggtgggggcggcgcggttcgtgtgcaacgcgacggcgccgcgggcgtccacgtgccaggcgctggtggcgtacgcgccgcccaacgccaccacgctcgccgcggtgcgggcgctcttccagctccgctcccaccgcgcgctgctggcgtccaacggcctgccgctctccacgccgccctccgcgccggcgccctcgccgctccgcgtccgcctcccctgcctctgctccggtggcgccggcgccaccttccagcgccccacctaccgcatccgcgccggcgacaccctcgacgccatcgccaggggtgtcttcgccggcctcgtcacctaccaggacatcgccgccgccaacaacgtctccgaccccaacaagatcgccgtcggccaggagctctggatccccgtgccctgcagctgcgaccccgtcgccggccagcccgtcgtccactacacctacgtcgtgcgcccgggggcctccgtggccgccattgctcaggacttcgccaccacggaggccaccgtcctcgccttgaaccggatgcccgacgccaagagccttctcgccggccaggttcttgatgtgccgntccgagcctgctcct

SEQ ID NO: 77206 - DNA, 558 bp, Oryza sativa
  Clone ID: PAT_MRT4530_77126C.1
ctggcgctgcatggcgcgagcagacccaacagaggcgatgaagactcgaagacggcggcgaggtgctccagctacttgcggagctcatggcgggcgacgaggaggcggttggagtctcggagaggcaccgtctcctcgccggaatcgagctcgcgccgtcgccctctctctcctcctgattttccccattgtgaactagttgaactaagcatggctaagcaattcctagtccaaagtctattcatgttataacccaagctaacaaaggagcatggtatcaaaatagcatggggaggaaggggcgccggcaagcgggccccaccggtcagcggctcggggagggcggtccacggcggatcgggtccacggaccggggaggagcggcgcgccacgcggcggccgaaccgatggccccgatctacccaagggtagatcggacggcggcgggagctcgcggccggaattcaatctctctcttgggtggcatggtagtgaggtcttcggggaacacttccggatactcgcagactatgggtatatcttcccatttcctcaagt

SEQ ID NO: 77207 - DNA, 594 bp, Oryza sativa
  Clone ID: PAT_MRT4530_77127C.1
atggggagccggctgggtcgccgcgtgatccacttcgccaacctccccctcaagctcatgctccctcccgcgccgctctcctccgtccaggagttcgccgtcaagaccgtcccctccgcctccaaggtcgacatccgccgctgcctcgagtccatgtacggcttctccgtcgccgaggtccgcaccctcaacatggagggcaagaagctgcgccggggccccttcctcgccgccaagcccgactacaagaaggcctacgtcaccctccgcgccccgctccccgtctcccccgacctcttccccattgggcttgtcctcggcgagagggagcgcaaggccagcgccgccgccgccaggaggaaggcggtggagggcgccgaggtggaaggggagggcaaggggaagcactggatggaggatgagaaggtgggcttctccagggccggccgcggcaaggtggtgtacggcaaccccgggaggctggggaagaagaggaatggaggtaccaaggtgaaagacagagccggagaggaagtggggaagttcccatggagcgggacgcgtcttgctaccgagaagaaacctgctaggtga

SEQ ID NO: 77208 - DNA, 2718 bp, Oryza sativa
  Clone ID: PAT_MRT4530_77128C.1
atggcggcgggaggaggaggtggtggtagcgccgccgcgcggccagcactcgattgcgtctggtttcctgtgaaattttcttcccgcaaaacgtcagggtttaacttgttgatcaaaaatgcaggcaagatcactgatgctgcgtgcatctccagtgagagggacgctctgcttgctttcaaagccggtttcgctgatcctgctggaggggcgctgcgtttctggcaaggccaagactgctgcgcatggagcggggtgtcctgcagcaaaaagatcggcagtgttgtcagcctggatatcggccattatgatctcactttcagaggtgaaatcaactcatctctggctgttctgacacatctagtgtaccttaacctgagtggaaatgatttcggtggggtggccatcccagatttcataggctccttcgagaagctgaggtatcttgatctttcgcatgctggttttggagggacagttcctcctcggcttggtaatttgtcaatgctcagccaccttgatttgagctcaccaagtcatacagttactgtcaaaagcttcaactgggtgtctcgcctcacttcactggtctatctagaccttagttggttgtatcttgctgcttcctctgattggttgcaggctacaaatacgcttcctttgcttaaagtcctctgcttgaatcatgcgtttcttcctgccacagacttgaatgctctttctcataccaacttcacagccattagggtacttgatctgaagagtaacaacttcagttcacgaatgccagattggatttcaaagctaagttctcttgcatatttggacttgtctagctgtgagctttcaggctcacttcccaggaaccttgggaacttgacatccctcagtttttttcaattacgagcgaacaaccttgaaggtgaaatacctggatccatgagtaggttgtgcaacctacgccacattgatttatctggaaaccatttctcaggagatattacaagacttgctaataccttgttcccctgcatgaaccagttgaagattcttgaccttgcactcaataatctaaccgggagtctgtctggttgggtcaggcacatagcaagtgtaactactcttgatcttagtgagaactcattatccggacgagtatcagatgatattggcaagttatcaaacttaacctacttagatctttcagccaattcatttcaaggcacactgtccgaactccactttgctaatctgtccaggctggatatgctaattttagagtccatttatgtgaagattgtcactgaagcagactgggtgccaccattccaactccgagtcctagtactttatggatgtcaggtaggaccacacttcccagcatggctgaagtcacaagccaaaattgaaatgatcgagttaagcagagcacagatcaagagcaagttacctgattggctctggaacttctcatcaacaattagtgccttggatgtctcaggaaatatgattaatggaaagttgcccaaaagtttaaagcacatgaaagcgctggagttacttgacatgagttcgaaccaactggagggatgcattcctgatctgccatctagtgtgaaagtattggatctgtcaagtaaccacttatatggaccattgccacaaagactgggtgccaaagaaatatattatctatcactcaaagacaacttcctcagtggaagcatccctacgtacctatgtgagatggtttggatggaacaggttcttctatcactaaacaacttctcaggtgtactcccaaattgctggaggaaaggttcagcgctgagagttatagatttctcaaacaataacattcacggagaaatatcttcaaccatgggtcatctaacttcccttggatcattgttactccacaggaacaagttatctggtccactccccacctcactgaagctatgcaacagattaatctttcttgatctttcagaaaataatttgtccggaaccataccaacctggataggtgacagcctgcagtctctgattctcctcagtttaaggtccaacaacttttctggtaaaattcccgagctactatctcagcttcacgctcttcaaattttagatattgctgataacaatctatcaggccctgtacccaaatccttgggaaatttagcagccatgcagttaggcaggcacatgatacaacagcaatttagcaccatttcggacatccatttcatggtttatggtgcaggtggtgcagtcttgtatcggttgtatgcatacttatacttgaatagtctacttgctggcaagcttcaatataatggaactgccttctatattgatctctctggtaaccaattagcaggggagattcctattgaaattggatttctatctggactaacgggtttaaatttgtcaggaaatcacataagagggagcattccagaggagttgggaaacttaagaagtttagaggtgcttgatctctccaggaatgatctgtcaggcccaattccacagtgcttcctgtcattgtctggtttgagccatctgaatttatcatacaatgacctttcaggagctataccatttggaaatgaacttgcaacttttgcagaaagcacatactttggtaatgcacatacaactgtcaagaagctgtttgtaccacaaaaggaagcatcaactaaactttga

SEQ ID NO: 77209 - DNA, 177 bp, Oryza sativa
  Clone ID: PAT_MRT4530_77129C.1
atgggccaccaggcgtcggcgttgccgctcgggccgtccgtgccgctgtcgccatccgcagcgctgctgctgtgccggatgaggaaggggaggcgtggcagccggagaagggaggaggcgcacgggcggactggccccaggctccgcaaaatgggtggcgcgctgctaatgccttaa

SEQ ID NO: 77210 - DNA, 549 bp, Oryza sativa
  Clone ID: PAT_MRT4530_7712C.1
atggccgggaacggctggacccaagaggtggaggaggagatgcgcgacatcctccgtgtcatcagggccaaggacgagaacgagtacgtgtcagtcggcaagctggtcctcgccctcaacaagcgcctcgccatggcaggcccggcgctggccggcgctgccacgctcgccgcagcgttcatcggctccggcgaggtcgtagcatccaggaggacatcgaggcgtcgcctcaaggaggccgacgtcgagcagagggagaactgcaaggtgttcgagacgaaggtggcgctgcagctcggccggagcacgttggagctcaagaagttcaaggcgatagcctcgccgacggtcaaggacgaggacatcaaggaatttgccgggagggaaggtggactgggcggagcacgggtcggcgccgccgccgtggtggtggtcgcagtacttcacgacgcgggagagggcagcgcccttgacgacgttggggaggttgacgacgaagtcgtcctcgccgctgccgtccgccaccaccctcctcgagcatcctcctaa

SEQ ID NO: 77211 - DNA, 648 bp, Oryza sativa
  Clone ID: PAT_MRT4530_77130C.1
atggaggtggtgacattatgcacagaatccaaccctgttgctattgttcttcaacacctcaagtgctcaaccatgttgtcacaggtggtcttcttctcagggatgctgaattatatcaccggcttgtttgaatctacaccgtccttaagggcgaggcagggaagaagaagaggaacacgctcgacgtatccatcttatcgcaagattccgaatccaccacgagaccacgatgacggtgacggtggcacggcgagggcaagagcgggagggcgcgccggcggcacggcgagggcacgacgagggcgggacgacatggtggtgggtgccgtgaggtcggtggtggtggcgatgtggcttgacggcgagctcggccagagcagcaccagcaggaggagcccgagcggcagcagagggcggatggggatggagcccaagctcggcccgagtggcggcgccggcggatggggacgcggcccgagcggcgacgacggtgagggaggagcgagggaggccagtgaggagcggatccgctcgctgcagcccgccagctcagcgtcgtctccactcaccgctcgctactgtcccccggcctgcctcccacgtctgtcgccttcgcgcccacgagtcgccgccgccgtccgccgttga

SEQ ID NO: 77212 - DNA, 303 bp, Oryza sativa
  Clone ID: PAT_MRT4530_77131C.1
atgaggaggtcagggaaggggaggggatgcggcggctcggctcctccctctcccggcgacggcagcggctcagcgatgaggaggtcgcaacgacgacatgacgcctcttggatccgctgctggctcgccccgggagtgcggatccaccgccggctggccgcgggcgcgcggatccgctaccggccggtctcggggaggggaggggaggtggtggcgatgagaaactcctccctctaccagcccggcgacgaggagggccagcagcggcttggcgacgaggagaggaggtggcggcgggggtag

SEQ ID NO: 77213 - DNA, 430 bp, Oryza sativa
  Clone ID: PAT_MRT4530_77132C.1
atgtacggctcccccgacggcgtccgctactgccagcagtgcgagcgcaccacgtccatggggctcgaccacgacaccggcgacgccatattcaccgagtgcgccattgtgctcgggaacgggaacgacccgcgccggcccgccgtcgcctttgtgggcaccaaaaacgggggggccgacgctcctgccgatgaaatacccttgcttcagggcaacgacttggtccccccccccgtccccgaggtggcttgctcccttgcccccaccaactttaggcttgggcccttcccccgcggcgcccccaagattcggggggcttttttggggccacaagggccagcgggggtgggggcgcccctaaaaaagccccgggggggtccctacaccaacaatttttccccggggttgaaccccataaacatggggccgg

SEQ ID NO: 77214 - DNA, 391 bp, Oryza sativa
  Clone ID: PAT_MRT4530_77133C.1
agaggaaaaacaatatgcatgagggttgttgaagagaaaaacagagcaaatcacatacgaactatgttacaatggggaatgcgatgagacaagaatcaccgccatgactatgatgctcattaatactaaatactacacggaattattgaccacttagcttgaccatacaagcaccacccaaatacaggcgaagcatatggccaaccaagaacagctgaggtcacggatctgtcgactgtgtaagcacattagcactaactacggtcgcaacagcaacatatgtccagaaggaaagcatttggttactagaaaccaaaccgactagccgcagcaacagctgtataacaggcacctgaaaagataattctgagctgaataaaagcacaagcac

SEQ ID NO: 77215 - DNA, 589 bp, Oryza sativa
  unsure (1)..(589): unsure at all n locations
  Clone ID: PAT_MRT4530_77134C.1
ccgtggcagaggaagctcaaggtcccccggcgaaggagggcaatacaagggtggttcctctggcantcagccagggcatagctcnagtctgnacaccacactgctcggaactgccctgccanaagggagtggggaaacaggcgaggccaccttgccccatgcaaacctnaaagccacaagatgcgccaatgtcggccaatgtgggcacatgtgggcgctatacaccccatgtcgatgtcagaaggaggagaagggagactgataataaatgataataggagataaccggagaccagctgtgtcgtggtgatgtctgtgctagacacaaataagaccctcgtgatggtgtcgttgcgtgtcgttgccgtttgggttgtatagtggatctgcgtggttgctttggtggttagctgctctggctcaagcttggcacagcccatggcgggcactaagcaagcggctntgttgctgaagatgattggtcggctaaactggtattttgggggtggaaagtgattgctactcgattccatccttaaaagttggggtaatagaaatgttttgatcccaaaaaaaaaaaaaaaaaaaa

SEQ ID NO: 77216 - DNA, 623 bp, Oryza sativa
  unsure (1)..(623): unsure at all n locations
  Clone ID: PAT_MRT4530_77135C.1
ccgatgagcctaccttgggagcagtcacgcaggctgggctttttttaagaggcgacgagcgtaaaaaaccaaccaanaagcgacagcacaacaatatgattgacagcctatttgcaacatggtgcattatatcatgcaacaagtgcagtttgatgctggctttgttgacgagccacaagctcaggcccaggcccaggtggctctcaatttgccctccatgtgtggagtctaccctaggtactgcagcactccatgcaaagttgctactggtcattgcggttcttggtagtgtgtaccatcatatatatatagttggataaataaagtgtcacacatcatcgtgtgtgtcatgtaataaaatccggaatagtctttggctgttcgcatgaataaatgaaaattattaacaaaaacaaacattcgggcggtggctaggcatgtacagtgcacccctacatgcgcgggaggacaagagaccctcaggggaatcagcccggactacatccccagagtacggggcgggctgtttaaaagaattaattttacagcccgcgtcatgggaaatccaaatttctttttaggggcagctaaataaaattgaggggacgctgatttaaaacatg

SEQ ID NO: 77217 - DNA, 849 bp, Oryza sativa
  Clone ID: PAT_MRT4530_77136C.1
atggcggcgctctccctcgcgcgaagccccccccaccaccaccacgccgcggcggcgctcgcgctcccggccccgcgcattccccggctcgcgccgctcctccgcacccctcgccgcccccgcccgcccagcggcttccgccgcctcccggccgccgcggtcgcggcctcctcgcctcccgaggcgcaggcggtcgaggatggtgaggaggaggaggaggaggggggagagaagcggcggaagctgtacgtggccaacatcccctggtccttccccgcgccggagatcgagaagctcttcgcgcagtgcggcgccgtcaaggacgtcgaggtgatcaaggggaaggatgggaagaagaaggggttcgcgttcgtcacgatggcaacggcggaggaggccgccgctgctgtggagaagctcaactccctcgatgtcgtcggaaggaccatcagggtggagttttcaaagagtttcagaaaacctgctcctcctcctcctccgggcacaattttggagaggcacaaactttatgtgtccaatctcccatggaaagcaagggctcccaatatgaaggagtttttctcaaaatttaatccactttctgctaaggtggtctttgatagcccatcaggaaaatcagctggttatggttttgtttcttttgggacaaaagaggaagccgaagctgctctcactgaactcgatgggaaggagcttatgggaagacctgttcgtgtgagatggcgacaaagtgtagatgattcggatgacagtgtaaaggctgatggtgaaattgaagatgcaaatgttgatggcgaggctgaaggtgtcactgataatggtactaag

SEQ ID NO: 77218 - DNA, 420 bp, Oryza sativa
  Clone ID: PAT_MRT4530_77137C.1
atggcgccactccccttctccctcccctaccggcggcgccgctccatctccccctctccctcccgtatcgccggcatggcaccgcgtcggcgagtgctcgacgggggtacagcggcgacgacgaccgtcctctcttcccctctccccgtcggcctcgatggtggggctacggtgcgggccatccttctctctttctctcctctgcctccgagcaggaggagagcacctgaggatggggggttagagggagggggtgccagtgtggttgggaaggcggcgagtgtgaccgtgcccggcgggcgcagccacgacatgagtgcgatggacggctatggcaacgagctcggatcaatcggattcggtgtccccgagctcgcccatttatgcgattttttcctctcctttttttcttttttctag

SEQ ID NO: 77219 - DNA, 324 bp, Oryza sativa
  Clone ID: PAT_MRT4530_77138C.1
tcagagccggtcaagattaagtttacatgtattaagaaaatacttgagcatggatttcttctcaacagtttgatggattgttgttactgacatcatcaccagcacatctacttcatcggccttgatgtctccgtcgttgctaaggggtgaccacgtcctcgccgtcggttgctttttgtcatcaccgactttcatcgccgacttgttatttcgttttcacggttggcctactacgcaactaccgatagaggatttcattgttatcatcggctgctacaccactattgactggatcactgacatcgtcatcttcatcaacatcct

SEQ ID NO: 77220 - DNA, 284 bp, Oryza sativa
  Clone ID: PAT_MRT4530_77139C.1
ggaagccaacaaagaacccaaagtttgcttaatttggggcaaatcaaaactgctaaactatgcatcacccacaaaataaaagatgctaccagaaaacataaagcaccaatccataggaggggggagaaagcaaaaaaaaaaatccgagcaaacaaaatacccaatccacgcgcatggcctaaaggcctagttcaactaccaataaaactaaaactccaataaaccaagaaaccaagacggttccaattctagatagaaaagaaaagggagatgcgcatcaaaaa

SEQ ID NO: 77221 - DNA, 300 bp, Oryza sativa
  Clone ID: PAT_MRT4530_7713C.1
gaagcaagattgggaagcactttctgtataaaattggaagaaaaatatgcagtggttgacacgacattgtatttgaaaatatatgtgcagtttgaagatctaatatactgcatcagtgaaaaaaaaacattataaacttacaacaaaagtaagccaaaaagcttctgcatcagggaagcaattaccagaccaacaaacgaaaaacacgcgatctacacctccttccctaggaattgctatcagcctcagtctctgcagcctcatcttgagcaggctgctgtgcgctgccttgtgcttgtt

SEQ ID NO: 77222 - DNA, 291 bp, Oryza sativa
  Clone ID: PAT_MRT4530_77140C.1
atggacggcggcggaggtggggatggggtggactggcgacgggaagtggtgacgagagaaggaggggagggcgatgaggaagggcttcgacggagggaagccgccgatatcaggggaggcggggaggcggacgtcgacggaggggcgctggcggtggagaaggcggcgaggaagggcgagggggatgaggacacaagcaccaatccgaatggacagaacaagcaggcaataggaatggaaggcaatactggtggccgtataacggagaacctaacagatgcttctaattag

SEQ ID NO: 77223 - DNA, 3018 bp, Oryza sativa
  Clone ID: PAT_MRT4530_77141C.1
atggcggcggcggcggcggcggcggaggggagagggccacggcgcgtgcgcaacacctgcatcttggcgcacgtcgaccacggcaagaccagcctggccgaccacctcatcgcggcgtacggcagcgagcgccgggtgagcgagaggatggccgggagcgcccgcgtgatggaccacctggaggaggagcagcggcgggccatcaccatgaagtcggcctcgatcgcgctccgccgcggcggggaggacggcggcggccaccgcgtccacctgatcgactccccgggccacatcgacttctgctccgaggtctccgccgccgcgcggctcgccgactcggcgctcgtcctcgtcgacgccgccgagggggtccgggtccagacccacgccgcgctgcgccaggcgttcgtcgagcgcctccgcccctgcctcgtcctcaacaaggtggaccgcctcgtcgccgagctccgcctcacccccgccgaggcgcacgcgcgcctccgccgcatcgtgtccgaggtcaactccatctactccgcgctgcgctcgcgctcctacttctccaccctcgacgccgcctgcgccctctcgcaagaactccccgacaacggcgacgccgccgacgaggaggaggacgcgttccagccgcagaacggcaacgtcgtcttcgcctgcgcgcgcgagggctggggcttccgcctcgtcacgctggccaagctactagcccccaagctcagagccgaccccgcggagcttctcaaaggcctatgggggcagaagtacttcgacgagaggagcaggacggtggtggggaaggaggccatggcggcggcgacggccaacccgaacccgaagccgatgttcgtcaagtacgtcctcgagccgctctggggtcagtaccacaagatgaagcggaagctgcggctcgcggaggcggtgttcgacatggtcgtggagtgcactcccaaccccatcgccgcgcaggccaccagggtggcaaggctcatgccggccgccaagacggagcagctaacggcggccgcgccgtgccccgccgctgtcgccgcggaggtggagaaggtgaggaggtgcgtggcgacgtgcaacgcgagcaccagcgcgccggtggtggtgttcgtgtccaagatgttcgccgtgccatacaggttcctgccatccaggggcgtcaatggcgagcccctgaaccacaggggatcatcatccagcgccgaatcaggggagtgtttcttggcgttcgcgagggtgttcagcggcgtcctccgtgctggccacaaggtgttcgtcctgtcccccatgtatgatccactgagaggaggggacgacgcaatgcagcagaagcatctgcaggaggtggagctgcagcacctgtaccagatgatggggcctgacctggagatcgtctccgccgtgcgcgccggcgacgtgctcgcgatcgaagggctcgggcatcacgtgctgaagaacgccacgctgtcgtcgaccaagaactgccagccgttctcgggcatgatgttccaggtgtccccgatgctcaaggtcgcaattgagccctccaatccgtcagatttgggcgcccttgtcaaggggctcaagcttctcaaccaggctgacccgttcatcgagtacaccgtctcggaacgcggcgagcatgtcctcgctgcagctggcgagatacatttggagcattgcatcaagaatctgcaggagaggtttgcaagagtccagctggaggtgtccaagccattggtgtcgttcaaggacaccatccaaggagaaggtgccggtataatggagagcctgaaagcttcacatgaatttgttgagaggactactccaaatgggagattcactgtcagagttaaggtcttcaggcttcccaatgctgtcactaaggtcattgaggatagcaaagaattgcttgctcaagtaatcgagggggattcaggaaatagtaatggtgtgttggattcacggttttcgcaggatggcggtgattctgcatcaacacttaggcagctcctcatcaatgccatagacagtgatctcgaagcgctctctgctcagttggatgatgaaaagacagagagttacagaaagatgttgattgggtaccttcagagaatctgggcacttggtcctctgcaagttggaccaaatctcctcctctcacctgatgcaacatcaagcgatggtgtggtgaccagccaagatggaagagaaggtattctcgtgcgcggtacatgccatgtttctgagaggttagggcttgtgaattcttctgatgcaaaaactacaattggcatcgacggcagtcaatcagcagtagatggtcttgatcctgaaacagtgaagaacagcattgcaacaggatttcagcttgcaaccaatgcaggaccattatgtggtgaacctacttggggcttgatattccttgttaaaccttacatacttccggatagtgcagatgctagcaataatcaatctgaccattacagcaccttcagtggtcagatcattacagcggtccgagaagcatgccaggcagccatccttgagagcaaaccaaggcttgtggagccaatgtacttctgcgaactgaccacacctactgagcagttaggttccatgtatgctgttcttggcaattgtcgggcgagggtgctgaaggaagagatgcaggagggaacctcattgttcacggtgcatgcgtatttgtcagttgccgagagctctgaattctctaagaagctcaggaatgcaactgcaggtgcagccagcgcgcttctggccttcagtcactgggagactgttcctcaggatcccttctttgttccgaaaactcgcgaggagattgaagaattcggagatggctcaaacattggcccaaacctggcaacgaagctcatgaattctgtgaggcgaagaaagggactgcacgttgaagagaaaattgtcgagtatggcacgaaacaacgaactttagctaagaaagtatag

SEQ ID NO: 77224 - DNA, 273 bp, Oryza sativa
  Clone ID: PAT_MRT4530_77142C.1
aatatatacttgtatgtctagttattgcttgggcgctatctggttcacagtacaaattttttacatttattggtgaaattattaaagctagcgtgaaggcagacaggacaaaaggggaaaaggcaaatgtcgccttctacaaaaacattgggtaaaagggggtgggccaaggggggagtatactttcggcacaagaaactaaccaacttgcatgtgttccttggaagacggtactaaaaaggcccatcaattatgcacccaaaggatgcgaac

SEQ ID NO: 77225 - DNA, 366 bp, Oryza sativa
  Clone ID: PAT_MRT4530_77143C.1
atgcaccaagccgacgccaacgaccccaacctggcccgcccttacaccgagctatggatgggcacgcaactctctgcgccctcctccctcctcgctgccgccaatggcctcctcagggactggctggcgcgtaaccccgccgtcagcgcttgttggggaggcgacctcccgttcctcaccatggcgatgctctccacctccatgccgttcaccatggtgacgctctccgtctctgtgccattccccaccattaccctcaacctcacgcagatgcccgcggggggagcaggcgtcagcatcggcgccgccggcctgctgcacgcgctccaccgcccgccggtcattcaccctggtgctgctgcctag

SEQ ID NO: 77226 - DNA, 779 bp, Oryza sativa
  Clone ID: PAT_MRT4530_77144C.1
cattttgatttttttttgaaagtcaaacttctccaaagcaacatagttttaacattgattaaatattcataggatgtttattttgtggtgaaaatatcgctttgtttttataaacttgataaaactttgaataggaagaagtcaaaacatcttataatataaacggaagatgtatttttttaaaaaaaaaagggacaaatttgacaacaaatattttggcacagccgttaaaaaaagaacagtgaaggtatgatgtatggatttatttattttgcttctgcaattaattaacacagcttgaagttgaaatggtcagtttcgttggctgcggcagccgcaattaatattccgagcaaaattacaaactaaaacgtatctatctaaatttgattaattattggaaatggaaacacaattaaaccagcagcatgttgcttggacttgttgaagtcttgacgtatgtctggccggttgaaaaagaaccggaagattgtgactcatgggagaaaaattaacgcgctgtcacacgagacaattaacgacatcgtctctcatcatctaccataattaacaatgcatagtagtcaattaatctctctctatatatgtacaaagtgtatgaacgatctatgggctgcacgcaaatgtggtcaagatttgcccaacgattatgtgtactgtagtgacataatgattaaactgttgaccatgtagaacacgtaattaagatactactagtaactttcacaatcacgtatgcatggtttggcacacagcat

SEQ ID NO: 77227 - DNA, 3229 bp, Oryza sativa
  Clone ID: PAT_MRT4530_77145C.1
gtgtgcttctcctccccctctttaccttttcctcctcggttcggttccgtggttcgtctagggtttagtgggttgagatggatccatcggatgtcgagaaccattacttcggcgacgactccctctagggacttgccctaccaccacatactgttcaccatattccacactcaaacccagattaatcttgccatacttatactactcgacaacacgatcatcgtatctcccatttttcccaaatcgctgtatcacatggttttgtcaaattcctgtttgatggatgcaattttggcacaaacttccctcattcctggcctatcatttggtgattccttggaacacagaaggccaatttcaatcatcggtaggatgaaactttgcatccacagatcatgtaccaccttttcatctcggggcatatggggatctaaaacctcaccaattgtgtttgggaaagcagagtccacatacttatgaaggctgaggtcgctgccgaattgtgtgtcagttggccgcttcgctgtgaacatttcaagtagaagcaccccaaaactgtacacatcaccagcagttgagattttgcatcccatcccatattcaggtgggatatatccaatggttcctccaaaaccaacaaatccttctggcttagtaaaatttgatgatagaaacttagctgacccaaaatcaccaatgcgtgaggtcatgtcataatccaaaagaatattactcggtttcaagtcacagtggatcagaggaggtaccaattggttgtggagataatctagagcagaagcaatatctgccgctatgcttatcctttgacctaacgttagcaccctctttgggctgccttggtacagctttgggtgtacaaacatttccaggttgccatttgccatgaactcatatattagagctttgaattcattattgtcaaaatccaccgttgagcacaaggttattgctttgaccaggttgcgatggcgagtgcattttagtacttcacactctctaaagaagctgttatgtgcaccttgctcatcaagatgaaataccttgatggcaactaggtctgtatcaaactcgaatcgtccgatgtagactgatcctgtgtgacttgagctgattttattgactggggagaaccaattggtggctttaagaatgtccccatatgataccctcttcattgtttctttgtagtttgaagattgttgggttgtactttcctttctaagagtgaacattatgcatagaattgagaataaagcaacagtaacggttggaatgagaatcactatcagtagccatcgtgtattgttcttcttccttttagcaggtgaggtggggcaaatcggcaatgcaaatatggatgtaagtgcacacaaccctttatttcctttcaggtttacagaatttggttttccaaagatacctccggtgggaacaacaccggataaattgttttccgagagatcaatttgttgaattgccggcagttggcttaatgactctggtatactcccacttaggttgttgttttccaagttaagggacaatagaacagcacactgtatgagtgaagaaggaatttggcctgataactggttgttggaaaaatttaggtggccaagattgtgcaatgtaccgacttgctgtggtatcaaccctgaaagtttgttatttgaaagatccaaacccaaggaaagagaagatatattgacgagttcaattggtatggatccatcaaggttgttcactgataagtttagcattgctagccttatgcactgccctatatttgccggtattttaccagataagttattattatcaagataaagctggccaagttgtgaaaggttaccaattgtagatgggatttgtcctgacaattcattcatggataggttcaagataaacaattttttcaagttcccaattgtcatgggaatttgccctgactgcttgtttgtgttgatctcaagcagagagagatttataagcttccctatctcgtctggtattattcctgttatttgattgccgccaaatttcaacttttgtagatgtgttgaaaggttgccaattgattttggcaggctaccgttcaggttatttccatccatcgacagttctaataatcgagtacaatttgtcagagatgtaattaatgaccagatatcagctcctagcctgttacttcctagcaaaagtttgttcaagtttctcaaggatcctaatgctggtacagatccgcttagatgattgctagagagatcaagcatttgtaggtttgatgcattggccaaggaagttggaattgatccatcaaacctattcagagacatgaccaacgatttgagatttggaagtgtgtgaccaatgtcaggaggtatctttccaataagactgttgtttcctataccaaagaattcaagcgacgacttattgtacagtgtgactgggacaaaccctgataatctgtttccactcagatctagcttattcaggtttgcgatttgactcaaggattctggaattggtcctgataaattgttttgtcctagcaatatggaacttagagatgaaatatttgctagagatggtggtattcttccagaaagcaagtttccagtaaggtcaagaaatcgaagagtccccatgttacttgctaaagaatcagggataacaccagtaagagtattgtttgcaagattgacatagctgagagacaaactagtaccaagtgaatcagggatgtcaccttcaaggttgtttgcagcaagcaacagagtgcggaggacaggaagtttgcccagttcatcagggatggccccagacagatgattatccgtaagatttatctgagatagagaagtcaggttgcctatgcaaccagatatcctcccagtgagatgtgaagaactgagttctagatgtaccacacgggatggatatgatgagctgcaagtgacccctctccaactgcagaaattgagtgagtcgtccatccatgaacttaggacaccatccaggtccaacaagatgccggacttgaagcaaaggagggctttccgatcactctcggacttgtttgattgtgctgctgcaagtattgcggtgctgaagaggagatgaggctggtggcgattctggcgaagcgccgagccggcggccggcaccgccgagcgtcgtgctctcgatgccccgttgcccgtcg

SEQ ID NO: 77228 - DNA, 620 bp, Oryza sativa
  Clone ID: PAT_MRT4530_77146C.1
cttgggtatgtgaactatgattcttcttcctttctcaatttttgctttgtacatgcacaagaggaaaacaagtaaacatcttgaaataaagcattattacttcagcatgttctgcatgttttgttgcttggtctcaaccaggcttcaaaattcagctatagattgcataaattcacttttttttttccatgcatgctattttgttccagtatcactcttctcttcttttttttttggtcaattcctcagttttacatctagctcactatgagtttccctctgttctcttttattcattcaccacgtacaggtagcagcagaggggagcacatccatgacttgtgttcataaattttgtgttattctaccttctttctttgtcatttcactttggtacataaactgtgctaaaaatttcaccagtgcgatatgcaaagccacaagaaggttgctgctgtgaagcctgtggcttccaggccttcttccagattgaggtccttctcaatgctccaggaagactccactgctattgattctcctcgggttacttccctggaggagattatattaaggcgtccaaaggcaacgcgattcacacacccattgagtaattcatcgac

SEQ ID NO: 77229 - DNA, 1014 bp, Oryza sativa
  Clone ID: PAT_MRT4530_77147C.1
cccacgcgtcccggccgggatccaagtctagggtttcatcctcctcctcctcctccgccgccgcctccctcctcccccacctccactctccactccaatggcgactcacacgcagatcagcaagaagcgcaagttcgtggcggatggggtgttcttcgcggagctgaacgagatgctgacgcgcgagctcgcggaggacggctactccggcgtcgaggtccgcgtcacccccatgcgcaccgagatcatcatccgcgccacccgcacccagaacgtcctcggcgagaaggggaggaggatccgcgagctgacgtccgtggtgcagaagcggttcaacttcccggagaatggcgtcgagctctacgccgagaaggtgaacaaccgcggcctctgcgccatcgcccaggccgagtcgctccgctacaagctcctcggtggcctcgccgtcagaagggcgtgctatggtgtgctcaggtttgttatggagagtggtgctaagggctgtgaggttattgtgagtgggaagcttagggctcagcgtgctaaatccatgaagttcaaggacggatacatgatttcttctggttatcctgttaacttgtatattgactctgctgttagacatgttcttctgagacagggtgtgctgggtattaaggtcaagattatgcttgattgggatccgaagggcaagcaaggaccaatgactcctttaccggatcttgttaccatccatgcccctaaggatgaggatgagttttcaaagcctcttacagctgagatcccagttgctgcttaaatagaataagtttaggtgatctgatgcatgcgcttcatgtttttttcagttatgtaatgttcattattaacattattactagtaaagagttctagtttttaagttgcaaacatcagcaactaatacaagattcgtcactattaatttcttcctggtgctcagtaacatttatggtgtgtctcactttctagttccaaagaaaaaaaacaacagac

SEQ ID NO: 77230 - DNA, 1326 bp, Oryza sativa
  Clone ID: PAT_MRT4530_77148C.1
tgtgctgttctattgtcccttaacttggaaaacaacaacctaagtgggagtataccagagtcattaagccaactgccggcaattcaacaaattgatctctcggaaaacaatttatccggtgttgttcccaccggaggtatctttggaaaaccaaattctgtaaacctgaaaggaaataaagggttgtgtgcacttacatccatatttgcattgccgatttgccccacctcacctgctaaaaggaagaagaacaatacacgatggctactgatagtgattctcattccaaccgttactgttgctttattctcaattctatgcataatgttcactcttagaaaggaaagtacaacccaacaatcttcaaactacaaagaaacaatgaagagggtatcatatggggacattcttaaagccaccaattggttctccccagtcaataaaatcagctcaagtcacacaggatcagtctacatcggacgattcgagtttgatacagacctagttgccatcaaggtatttcatcttgatgagcaaggtgcacataacagcttctttagagagtgtgaagtactaaaatgcactcgccatcgcaacctggtcaaagcaataaccttgtgctcaacggtggattttgacaataatgaattcaaagctctaatatatgagttcatggcaaatggcaacctggaaatgtttgtacacccaaagctgtaccaaggcagcccaaagagggtgctaacgttaggtcaaaggataagcatagcggcagatattgcttctgctctagattatctccacaaccaattggtacctcctctgatccactgtgacttgaaaccgagtaatattcttttggattatgacatgacctcacgcattggtgattttgggtcagctaagtttctatcatcaaattttactaagccagaaggatttgttggttttggaggaaccattggatatatcccacctgaatatgggatgggatgcaaaatctcaactgctggtgatgtgtacagttttggggtgcttctacttgaaatgttcacagcgaagcggccaactgacacacaattcggcagcgacctcagccttcataagtatgtggactctgctttcccaaacacaattggtgaggttttagatccccatatgccccgagatgaaaaggtggtacatgatctgtggatgcaaagtttcatcctaccgatgattgaaattggccttctgtgttccaaggaatcaccaaatgataggccaggaatgagggaagtttgtgccaaaattgcatccatcaaacaggaatttgacaaaaccatgtga

SEQ ID NO: 77231 - DNA, 741 bp, Oryza sativa
  Clone ID: PAT_MRT4530_77149C.1
atgccggacttgaagcaaaggagggctttccgatcactctcggacttgtttgattgtgctgctgcaagtattgcggtgctgaagaaggtaaagatgagtaaactacacagcatggacaacatccgaatcattgtgtctagggctctaggcagtcagggtgctgaagaacaaagaactgcaagagctaggagagggaagagaaatttacaagaaaaggacaatgaagaaagacacctaagcaacgagaatgactgcaagcgtcagcaaaattctgcaggcgtggcagtgggcacacaacaaactgggcaatatggacagatgatacagcgatacacactgaaccaactgaattggcagtgctcactgctgatggagtccactgtccagccgtctagggaccaaggggacgcgccgacgcgggggtgcgtcgccgcaaccggctgccgccgtgcgccgcaacgccgccgccgtccgtgcgaacctcagctgctcagcgtcacccgtccccgaggaggcggcggtgtcgtcgcaggctgcgccgcctccgcagcagcaggcccagggaccagggtccagggagatgaggctggtggcgattctggcgaagcgccgagccggcggccggcaccgccgagcgtcgtgctctcgatgccccgttgcccgtcggtggggatgagtggaggcgcagcggattggggctgggacgacaggaggggtggggactggctgaccgggggataa

SEQ ID NO: 77232 - DNA, 1732 bp, Oryza sativa
  unsure (1)..(1732): unsure at all n locations
  Clone ID: PAT_MRT4530_7714C.1
gagcgtgctcacccgcaccacgcggcgcacgcgggagcgcgcaggcggcagcgacgcgcggccacctcaccctcaccaccacccggacgcgccggaaacgtacccacatcggcgcgcccctcgccctccgtcacacccacgtggccccccacacccggcccaccgacaccgtccgcgcgcccaccccttcccccccccacagactccgctcaccccgaggccgccacccccccgcccccccacgcgccccccgcgcccccgcaaccgcgccaccacacagccgtccccccccactccccactctaacagttcccccacaccgccgacactacccgaatccccacctccccccccccccccaaccgcctctaccatacacgcccccccgccgctccccgccacgctcccgccgccctcccacacccccgtcacgccccccacctcccccgcccgcccaccccccccccccccccccccaacccacaccaagacgacaccaccccccaactccacaccccgcgccggctatccctaccaacctcaaagaacaacaacaccccccccccctcccccgccccccgaccccaccagtcccacccgcccaccacccaccccccctcgcgccccccccaccccccccccccgcccgggccccccacccccccccctccccccccccccccccccccccgccccccccccccccggcccccccccccccccccccccnccccctcagccaccgacgccatcattgccaccaaaggaagaagagagccggcggagggagccacggctactggatccgcttgcggtcgccgctaccagtgacggatccacccgcggacgccgccgacaccaccacggacgctgccgacgccgtcgtcaccgtcgacgcgccatagagagggcgccgtcgccgccatctccaccgcaccccgccgtcgccgcgccctcctcgacgcgcgccgccgccggggcgtccaggacggcgtcgaccacaccggcacacctctcctcggcagcgcctccctcgatctcctccgcctccccaacgtcgtcaagggcgctgccctctcccgcgtcgtgaagtactgcgaccaccaccacggcggcggcgccgacccgtgctccgcccagtccaccttccctcccggcaaattccttgatgtcctcgtccttgaccgtcggcgaggctatcgccttgaacttcttgagctccaacgtgctccggccgagctgcagcgccaccttcgtctcgaacaccttgcagttctccctctgctcgacgtcggcctccttgaggcgacgcctcgatgtcctcctggatcttccggtagatgctggccatgttgcggcacaggtcaaacaccatgcccacctgcccgccgtgctcgacggtgttcaccgccgctgccagcgcgccaccgaggactgccacgccggacgcctacgctacgacctcgccggagccgatgaacgctgcggcgagcgtggcagcgccggccagcgccgggcctgccatggcgaggcgcttgttgagggcgaggaccagcttgccgactgacacgtactcgttctcgtccttggccctgatgacacggaggatgtcttcgtcgctctcgtcgtcgctagcagtgtccgaggagtaatcagacgagttgtaaacaccatcgtacagtttcttgccgtccattttctcttccatggcgacggcattatcttgtggcag

SEQ ID NO: 77233 - DNA, 493 bp, Oryza sativa
  Clone ID: PAT_MRT4530_77150C.1
gttcttggttttttttttccctatgttcatttgtattctatggagctattccatccatgagccatcatccatgcgggggttcatggaaatatagtaattaatcgttcggtcgagtatcgatcgagacccacccttcgggcagagacaaaaaaaaaaagaggcaaaaagatagagttcagaaggccaggccagcagctaggcatctttgcggcggcgtcaaaaggggggacggggaagcagcaatactgttttaatggagaagaagaagaagaagaagaggagaggagtctaggccgggggggcttggttgtgggaggagtccatctagaggacgacgagcttcttggccgccacgcgcgcgctggtggggttgttgccgaggaccaccccggcgtgggcgtttatggtctccggggggtacacccgctacggggccggggccctccccccctgcgcgaagctctcgacgatggactggtcgacgagccccccg

SEQ ID NO: 77234 - DNA, 540 bp, Oryza sativa
  Clone ID: PAT_MRT4530_77151C.1
atggtggtcggtgccccggccctcggtcgatgctcaggggcctacgtgcctccggagatgctgcggctagtgatggcacgacttggcggtgcgtcctgcgggtgccgtcgccaccgcaccttcgtcgtcccttgcaacagaaccacggccgctggccctggcccagggagccagtccactgtccagccgtctagggaccaaggggacgcgccgacgcgggggtgcgtcgccgcaaccggctgccgccgtgcgccgcagcgccgccgccgtccgtgcgaacctcagctgctcagcgtcgcccgtccccgaggaggcggcggcgtcgtcgcaggccgcgccgcctccgcagcagcaggcccagggaccagggtccagggagatgaggctggtggcgattctggcgacgcgccgagccggcggccggcgccgccgagcgtcgagctctcgatgccccgtcgcccgtcggtggggatgagtggaggcgcggcggattggggctgggacgacaggaggggtggggactggctgaccgggggatag

SEQ ID NO: 77235 - DNA, 366 bp, Oryza sativa
  Clone ID: PAT_MRT4530_77152C.1
atggacgcccaccatcgaccgctctgccctcgcggccccgctctcagatccaaagttgccttctccctctcctctcaattcatggcccggagcagcgcgggggaagggattgctcggtggcggcacggggtagcggtgctcggtcgcagcggcgtggggttgggggtggctctgcggcagcgcggggcagggggtggctcggccacagcggtgtgggggagggggtggctcggtagtggtgcggggtggcggtgctcggtcgcagtggcgctcgaggtggcggtgcttgacagcggcagcggagcacacctcacgcagaagcagcggtgacaacggcggaaaaggtgtggtggccggctgcggcat

SEQ ID NO: 77236 - DNA, 306 bp, Oryza sativa
  Clone ID: PAT_MRT4530_77153C.1
atggcgcgacgccatcgacgagcggcgcgccggccggcggcgaagtgccgcgccaagacgctcgtcgtcgttgatgatgatagggatctacctcttcgacgacctaacgagagggatcagcagggaggtgctgcacgactgccagaacagttgaacacaggcgtcaccgtcggcaccgagggatcacagcaagttcagcttcgatcgatcggctacctgccggcggcgtcgacggggcggtacaagatcgtgcacttccccgtcaagggtgttcgacgtggtgcgggtgttcatgttggtggatga

SEQ ID NO: 77237 - DNA, 431 bp, Oryza sativa
  Clone ID: PAT_MRT4530_77154C.1
cacttctgtgactgcgcacggcctcgtctcctccgcttcccgagtccgaccttgccccgagccggagtcgcctcctcctcgcgcgcagcgcacggccggtgccaagcaggttttggaccgagggcggacggacgcgggcacggaacttgctccctccactagcatatgtacctgctgctgcaataggcgggtgccatggccgccggtgagctacaggaagatggaagaggtgccgaagggtggaagaagatgcccaagggcaaattagtccagtagggcattcgggcgaagccatcttcgttgaacgtggtattttaccgaagcctgttttaaggatggtattctagcgaatccattcttttgcaatggtacatatgcaattttctctttggtggggggggggtggaagacagttgacctggagacgggaa

SEQ ID NO: 77238 - DNA, 236 bp, Oryza sativa
  Clone ID: PAT_MRT4530_77155C.1
gcacgagggggaacaccgcaacatttaatattatcggtaggttattcacccggcgcattttatttattgattgatgtgatcatctgaaaaaattgtagttctagtaatgctatcctgctgcatcttttggctccatgattgccttcaaatcaggcaattttgtactgtacaggctacaaattctggctattacacctgtgctattatgaattgtaaacagtactagtagtactctg

SEQ ID NO: 77239 - DNA, 300 bp, Oryza sativa
  Clone ID: PAT_MRT4530_77156C.1
atggaggcccagcagcagcaggggcggattccggcgaggaagcggaagggcagggacggcgcggccggtggctcgccggacgcggcccccggcgccgggagcaggctgctcgccgggtacctcgcgcacgagttcctcaccgccggcacggtgctcggggagcggctcgccgcgggcaccacgccggaggagggcggcggcggccggtacgaggccgtggcggcgctggtgcacggcggcggggcgcgcgttcccggcgtggtgaaccccgcccagctcgccgcctgggtgcggacgtga

SEQ ID NO: 77240 - DNA, 195 bp, Oryza sativa
  Clone ID: PAT_MRT4530_77157C.1
gtagttgtctggttgttcatgttctgagggactcagtagtgtttaactaaatgcaaggtgggggggctctacgtccacgcataatcagacttgcctacgtttttttgcggcgtgttggactgttttcccttcttgagccggcatgcgctcctgctctctgtctgccccccccttccctggggggggggggggctc

SEQ ID NO: 77241 - DNA, 699 bp, Oryza sativa
  Clone ID: PAT_MRT4530_77158C.1
atggagatcggccaggtgaaacaagcagccggagtacagcccgtccaccgctgctcaccggtgcccaaagggagacgggcgtttgcgatgaagcggcacatgtacgcaggattggggacccacgcccacgcttgcgacatcgtcgtgcgcaaccggttcggcgtgtggtcacggcgaaaccaaaagtacatcaggaagacgcggtatttcaagttcgtcgcgctcggttcggcgatgtccaaggtgagacggaagctccaggagtggatcaagcagcacggcttgttaacgtgggctcagtactcggcgcggcgggaggagttggaggccgctgaggcaggtctgcagaagcttttccaccgtcgcatgcccgctcggtttaggaagctgaagcggcgagtcgtgaaagagcgcgagtgggagcggcgtctcttgttgaagaagcaggcccacgcggcgcagggtgcacccataacacgcgccctattcgtgtatatgtcttcatgtctagttcaactgttttactatctgagaagacttatgcttggtagtgtcacgcccagaaatttccgaatagaatttcaacgggaacaccactccacaggcatcctcgacggcacggacgaagcctactcggagaagccaccatctgacgcatacttaaactttggggttttggggaaaatagagcaagattga

SEQ ID NO: 77242 - DNA, 708 bp, Oryza sativa
  Clone ID: PAT_MRT4530_77159C.1
atggaggcgccctacggtcgctgtagacaagccccaaccgcggcggcgccggcgggacttgacagcggtggccggagcacggaggccgctccggcggcgccggcgaagtgttgctggaggcggcatgaggacgaggttgctgcacttgctgcttgccagcagttgccgagtctgaaactagcactagcaagatcacaagagcttgagccacaaagcagcagtgaaatcccattcctgacaaatgccgaagctctcattgtctcaggaatttatgcagcctatgcattgagagggacgaggcttggtgatcatgctctcctcttggggcatggcgaatgtttcgcattctctgcaatggagtttcctacgatcaaggggaatcatgtctactacttggcgcgccgcggcaacaatgaacatgaggatcacggattacagcattgggcatttgtgttcgatttgggatcaggtccaatgattggatgggcctttgggggtaggaatttatgcagtttgtatcaatggcgatgcattattggtagcgagacgttcagtggttgtggcgagttcgtgacaggtggtgaaggaagttatgggtctcgcaaccgctgccttccccggcaacggcgatgtggggtccaccaagaagcctcaacggtggcgctggagcttttctccggcgatcatcgtgatgaccagaaggaataa

SEQ ID NO: 77243 - DNA, 616 bp, Oryza sativa
  unsure (1)..(616): unsure at all n locations
  Clone ID: PAT_MRT4530_7715C.1
gggaaanttccngggggncnnncccccccnctttttttttttttttcaaaangggtttttgggnagggagngggggggngggggaaaaacngantcgtttnaaaaccncaaaaggnggcccnnnggggcgggggnggtctttntttttcccnanaananaaaannttttttttttttccccncgganngngggggggattnttngngggggaggggganaaantttnaaatngaggaatnngaangggngcccnnaaatgtgggtggggataggaacccngggaaanngggggggncccgcccccttntntttggnngccnaaaaaaaacccttttttttttttnnganggggggggggttaatnaangnggggggnanccccngcgaggtggggnggatattttnttntttgggggantttntnaagnaancccgntccatttncttanggggggnngggnttttaaaaaaatnaanctttggntttntccccnnaaaaaaaaaaaaaaaaaaaaaaaaaaaaaaaaaaaaaaaaaaaaaaaaaaaaaaaaaaaaaaaaaaaaaaaaaaaaaaaaaaaaaaaaaaaaaaaaaaaaaaaaaaaaaaaaaaaaaaaa

SEQ ID NO: 77244 - DNA, 3398 bp, Oryza sativa
  Clone ID: PAT_MRT4530_77160C.1
ctatctttggatttggtctgcagctgggttgctagttgctgatgatgttgacgtcctgccattgggcaccccgttttccgtgggaggcgtcgttccccacttcccttcggactccattttttttttttttgtacatgaaggaaggaaaaactatgtatagcttgaaaagcatctaagcaaagataactacagcatccgacgtcccagttatactgagaaaacctaattttatggactatccctattacaagataaccttttcataactagggcaaacatccgacaagttacaagcacacctgatcttacgattccattttttttctgtttgcttttccaacaaatgcaacaatagcctagtcacatcaacatacaaacaagtcaatgtaaaagattagaaaagctttacagtgaagatccaaccggcatgcacgtctatctttggatttggtctgcagctgggttgctagttgctgatgatgttgacgtcctgccattgggcaccccgttttccgtgggaggcgtcgttccccacttcccttcggactccaagggttcaatcactttaacagatccatctgaaagcccaaccgcaaattgattcgactcctgtggatgtgcagcgacgacaagagggtagaccgatggattgctgtttatggctgcagaagataagtatgctggaggtgcaattcggcatcttaatctcaagttctccacatcaaaaattcctatgttaccatcggtaaaggcagcaaaaaccaactggctgttgcgtgagtatgatgcatgtgaaatgggagctgacaaagcgtcctgaggtatccactggaagattctttccatttttggccatacgtctttgcatgacaagaccactgtttggttgccaatgttgtggcactacattggctgtggccttcccacttggattttgatcattccgagcccatttccacagcctttgaatggcattggaaccaagtgctagcaagccaacaccagaatttgtgtcagaagtcttgctggcttggtctggagtttctggcattgtaagaaggccaaaccagttatcctcctttgatgccctttcaatctagttttgacctcatctaccctgacattgtatatatggatggttgaatcttccattccaattgctatgatattattgtcttgagggtgaaatgctaaaaaggttgatgctggaggtggtggcatgaatgttgtcatcaccgttaaatgtcatcatgttaaacagtgaaaccttcccaccacatgcagacatcacataagaatcattcttggagagagcaatgcatggaactgcatcctcaggattggtatctgctgtatcattttgcatgacaagaccactgtttggttgccaatgttgtggcactacattggctgtggccttcccacttggattttgatcattccgagcccatttccacagcctttgaatggcattggaaccaagtgctagcaagccaacaccagaatttgtgtacagaagtctgacaaccttgctggcttggtctggagtttctggcattgtagctacacggcattgctgagcatttaggacttccatcagctcccagggttttgctttatcgggcctttcttctgaaattctaggctttatatcgatgcttctagatgctggatcaccaccattcattataggagatggctttgcaggagaattcctgtcgatgtgatccatccgaccaatattaggagaaatgcccgcacccacgcgtgcaccagagaccttcatagaagaagcattcatattgcgatctaaacgttgtgaaaggtcggtttccaaatgctcgtaaagttctgagcctcaaatgaaaacagtttctgtccatgcatatcccagacctttatcagcctatcatctccacaagtgacaacacaaagttgcttatttggccgggagaatgctatgtcattaactgctccagaatgagcgtcaatctctagaacttgccgcgtctcatttggttgctgatatgcatgcagatgaatcaaatgttttgcaaatgcgacacctgaaaccacaaaggaaacctgaaattgtggtgaacaagcttgaatgtcccaaattttgaagggctttgaaaacagtctctcacgcataccaacctcccaaagtgtaatttcaccattggtagatccaactagtaatagtgtatgccgagttggatgaaaatccatgctggttacactagatccctgtgacaatgtacaagctactgtcctgggaagatcctccactgaccataaaggttggggaattggtgcaggataggtggcctcatcaacaccatgtccacttggcctcaatcgcttcattagttgctcagattctgcactttgatagtctgttatagttggtcgtttcatgattgggacagcttgatttggcggaacaggtagtgatgatgccgccacaacagcagatggaacagatgatgtagcagcagcagcatttgccatccaacccgctaaagatggaccagcaggaggaggttgaaatggagtatgagctgtaagtggtgggtatgtgccaccggcctttggaaccgctgccagtggtacagaaactggtgaagcacgagctccatttggcggagtgcaggtatgatcagtgaacaaagtcttgatatctggatttggccgaggattcttacaaagctgatgctgccagttcaagctttggttgattaaagtccgaaggcgtgatgccttgagagttgggaaaacaagcttttcccggaaaagggggttcgcttcaataagttttttgagctcaatcagcattatactgcgagcagatttggtatccccgtacttagacagctgttcattttccctgaaattctcaagagttagaagctgtgttatctctttatataactcctcgttgaatgtcgagaagactttaagatctttaacaagaatatctactgcctttgctctatcatgcctgtcaagtgcttccaaatacttctgctttctgatctcaaagaatatcttcatagaatacctattgtcatccaccttggtgaaacctgaaagatatttctccacttcatcccactccccagcatggaccttctcttcaaagtacttcatgttgaagaagaatcctgactcttgctcaagcttgtgcacggtctccttgaacttctcctcgtcgaggaactggaggatgaggaacacgagctcccggctgagcgacgacatggcgccgcccccccgccgccgctgaaacccccctcccggctccgatctgccgcgggcgccttcaccgcttcaccccgccgaattctagggtttccccgtcgccgccgccgcctcccctcgtatgagagagagag

SEQ ID NO: 77245 - DNA, 857 bp, Oryza sativa
  unsure (1)..(857): unsure at all n locations
  Clone ID: PAT_MRT4530_77161C.1
cagcgctataaagcatagtagtacaccatttttcctgaagcatcataatctanccctggatcccattagatcataaagccatgccttaattttcccgtcgagggaggttgagaagataaactgaattactctctttgggtgagggcagatggaatacactgggtgcctcatgcccttcaaatgaaaacagtttctgtccatgcatatcccagacctttatcagcctatcatctccacaagtgacaacacaaagttgcttatttggccgggagaatgctatgtcattaactgctccagaatgagcgtcaatctctagaacttgccgcgtctcatttggttgctgatatgcatgcagatgaatcaaatgttttgcaaatgcgacacctatcaagtctccatcaggactccaggtaacccggttaatggatatggaagactctttagccacactctgaaattgtggtgaacaagcttgaatgtcccaaattttgaagggctttgaaaacagtctctcacgcataccaacctcccaaagtgtaatttcaccattggtagatccaactagtaatagtgtatgccgagttggatgaaaatccatgctggttacactagatccctgtgacaatgtacaagctactgtcctgggaagatcctccactgaccataaaggttggggaattggtgcaggataggtggcctcatcaacaccatgtccacttggcctcaatcgcttcattagttgctcagattctgcactttgatagtctgttatagttggtcgtttcatgattgggacagcttgatttggcggaacaggtagtgatgatgccgccacaacagcagatggaacagatgat

SEQ ID NO: 77246 - DNA, 468 bp, Oryza sativa
  Clone ID: PAT_MRT4530_77162C.1
atgatgcggtcggtggaggtcgggatccagtgcagcgcggacggccacgccctcccccacctcgaccccgccccgggcgtcgcctccgctaacgccgtggcggtggcggcggctgtggatatcctcgtcttcgccgtcacggccgcggcggctgctcggtgcatgcaagattctcgaattttccctccctcactccctcgatcggtctctcacccttcttctcgcggagttcttggtggctttgccgccggcagaatcgagcctcgccagccgcccagtggctcccccgccgctcgcgcgctgcgcctcctcccgccgcgcaccgcccgcctgctcctggcccgccgccgctgtgtcgccccttctcccgcgtcgccgcgccaccacaccgccgggcggcatgaggagaaaactgagaaagagaagagaaacagagagaagagaagaggggaaagagatgatgactag

SEQ ID NO: 77247 - DNA, 351 bp, Oryza sativa
  Clone ID: PAT_MRT4530_77163C.1
atggccaaaaggcccaaggcccgacggcccggcccatggcacgacattgtcggcccgtgccggcccggcccgaccaccgggtcgtgcctgggcccctccaccggcccgatgggccacccatgccttcgggccggcacggcacggcccgacagctggtgggccgtgcctgggcaggaggtgcagcctatgggccggcacggcccgataggcacgtgccggtccgatggctgctgggccgtgtccagccgtgcctggggcgggccgtgccgagcgagccctttggccatctatagcaagaatgtcgacttagaaagtgccctcgtgtggagccccattgtctcgtctgggtag

SEQ ID NO: 77248 - DNA, 238 bp, Oryza sativa
  Clone ID: PAT_MRT4530_77164C.1
gtggtaaacaaattcatagaattacactggtgggcagcgcataactaatggggacggattacttagttacaacacagtttgtcattctgatataaaatcaaatacatttcttattattgattaacgaggacattccagatattctatatttacgctcaatatacaatacatcctgattgcgtttgatctcagtgcatattcaacgtttggttctgatcttaacacctgctctttaatg

SEQ ID NO: 77249 - DNA, 625 bp, Oryza sativa
  unsure (1)..(625): unsure at all n locations
  Clone ID: PAT_MRT4530_77165C.1
ccgtagcccagtcatatgcatgcggaagatttacacagtctgcgttccaagttctaggccacatgaagacggttcttgtgttgaccttgggctttcttttgctttggaaaaggagggccttaacttgccatggttggcgattgggcatggatgcctgggctgttggattggcatgattgtgggtgatggggaatgctgtgcatgcggaaaccacaggaggccaagagcgccagggtgttgagctgctagcacccagcgaggataaacncagataactactaatgatgactggtgcatgcacagtgctgagcttggaccngaaggtgctggaaatgaccatggttgatggacctgagtggtgatagtgtgatgtggaaatgctgtgaggaccgtgatgctggatttatgtgctgtgttgtgacacgtgtgtgtgtgtgagatgctgtgctgatgagaatgttggtgtaggctgatgagcagaaagaggggtgacctgggccaactggtgcctgggctatacttttgcggcgtatangnccaccaaaaagtaactagatgntaantggaatnttaatatttctttaactgccagagccgtgctgtgtaaaaaaaaaaaaaaaaaaaa

SEQ ID NO: 77250 - DNA, 306 bp, Oryza sativa
  Clone ID: PAT_MRT4530_77166C.1
aacatattattagcataagatgcattaataattataactaaggcactataatagaggggctgtatcagtttagctgtaacatctacaactagggttgggagagatcatttacatacttagactgtcataaccaacttatcactagcatcagggcttctatgaattccatcgtccggtgcatcctttggcccagtagacggaagttcactatcatcagttgtttgaaccttagaatgcgtcatacttacagtcatctcgctcatcacttgcaacctcagtaccttgaatagcgagatctagtggctg

SEQ ID NO: 77251 - DNA, 946 bp, Oryza sativa
  Clone ID: PAT_MRT4530_77167C.1
agttcttgcctcctcttttatttttgccataaggtgccgcagtctccttgtgttcgaaaacccgccgatttctttccttccagatctcccaaactattaaaagaattagggtccgaaggcctttcttgggcacctcctttgtattggctagcatttcccaccaattttggacgctctggcatggagcccagtggcacgggtccagttgctggtaagccacccaggcggcagtcaggctccagatccttctagtatatctacaatggacaagaaggtggcttgctgactcacttgtcacgcgacagaggggccacgtcccgctgtttggccatcctctagctgctagccggtctgaagtccacaccctgttttggatcacaagccacgcgtagaatttacattttggtggggcccgggctctccaaattaaggcgttgaagttggtgccagtggttcccaggcattgcgctttgtatgccgacgaggccgggtattctccatggtttgaaagcttccaggtgatttgatcgggctcgctttgattgagaagaatgtcctgggttgcttcccatagggagacgagctggctaagcaggcccacagtgggaggaatggtgccgctgaggtccaggtcatcgatccaagagccgttctcaatgccttccctcagtgtttttcctcttttttggatatcgcataggctagtggcatggcgtcttttggtctctgtccctaggtattttatcgggaagtgtgctcgcacagctggtacaccgtcaagaatggtgtcgaggtctatgttttgacatctgattactgccacctgagatttctgcatatttgtgaccagcccagccgcatgcctgaagcgtgtaagtatgtcagtgaaggtctggacatccttcctgacaggattgatgaagaccactgcattgtcggcgtacat

SEQ ID NO: 77252 - DNA, 482 bp, Oryza sativa
  Clone ID: PAT_MRT4530_77168C.1
cgagactctatcaagaataaggagcacgctgaagttgaatatgctattgtaccaatacctgttgatgatgatgatgacataggaaaggaggttgttaccagactgacaacaaatatggccaccaacaaaatattttatacagattctaatggaagagatttcctcgaaagggtgagaaaccacagggatgattgggaccttaatttgactcaacctgttgcaggaaattactacccggtcaatcaaggaatatatgtagcagatgggaaatatgaactatctgtccttgtggatcatgctgttggagcttcgagtattcaagatggtcagattgaagttatgctccacaggcgtctttctgcagacgatggcagaggagttggggaaccacttaatgaagtagtatgtgtggatcaaaagtgcgatgggctagtggccagggcaacttactatatcaatgtcaataagaaaggacatggagc

SEQ ID NO: 77253 - DNA, 330 bp, Oryza sativa
  Clone ID: PAT_MRT4530_77169C.1
atggcccacgggtgcatacaactcgctgctcgaggacgacgctccacgccgctgctctccctccacccgcgcctccccgtgtgcccggcggcggcgacctcctgcgcctccctccggccgccgcgcgagtccgccgccggctgccgcgcgccggggttgagctcctctgccgcgagtgcatgcgccccgggagctgtgcgattccccgcaacggaaaatggcggagacaatatggtggaggaggagcctgtgaaggaaggcagggggcacatctcgtcgcaatcaatggtgttgggcgaatttgatggcgtgcagagcaatgaaggatag

SEQ ID NO: 77254 - DNA, 441 bp, Oryza sativa
  Clone ID: PAT_MRT4530_7716C.1
atgacgaaggtgttcctacctctgttccagcctctgaattttcttctctgtgacaagcacaacacacacagcacatgcccatctgaacattctgaaaccaaagcaagaacagagctcacgcatggcgatgtcgctgtggtaatggcagcgcttgggctcagtttcaatgcggagggcaacgaggtagaggatgaagctcttgtactattagaagagaagcaagcgagctgggaagaactagaggaagctttcagcgtgttcgacggcgacggcgatggattcataagtcccctggagctgcagaatgtgatgagaaggttgggtttgcagcacgacgctggccatgaggagtgtgagagaatgctcaaggttttcgacagagatggcgatggaatgatcaattttgacgagtttaaagtcatgatgcaaggagttgtctga

SEQ ID NO: 77255 - DNA, 888 bp, Oryza sativa
  Clone ID: PAT_MRT4530_77170C.1
atggaggacctgccggacgacctgttgctggaagtcctccgccgcctcccgccgatcagcctcgccgcgtcgcgcgtcgtctgcagcgcatggcgcgccgccgtcgacgccaaccgcctcctgcgcgcggacctcctccccctctccgtcgccggcatcgtcgtcaaccccctctccctgggctcgcgcttcctctgccgccccaatgccgcggcgaccatcgccgacgacctcgacgacatccgcaacacgagcagaggcatcttcaaccgcttcgatttccgagtcagcgaccactgcaacggcctcttcttggtcgacgacgacgtccagcacgtggttaacccggacacgaggcagtgggcgccattgccgggctatccaccgccgcatccgtgctacccgcacaagctcttctcccccaccatctgcctcgtgttcgatcccgccgtatcgcctcacttcgaggtgttggtgattccgcggctccgctccgaattacgcaggccacgagaatggccgccgtcgccgttcgtcctgcgtgctttctcgtctaggacgggcggcgatcaatgggaggataggatatcactatcaaacgggacttaccgtgtgattcaatcggagcctagcatgtcgctgagatatagggagaaacatccagacctttatcttgggaaatcagaaaaggggagggactcttatgatgacgatgatgatcatcatgagagcaaccgccatgccaaacatgttactttcttaggattccatccttttgatgaagaggttgtgttcctcggtgaaactttcagaaggggatttgcctataatctgaacaactcagagatccaagacctgggattatatgatatctttcttaagcaataa

SEQ ID NO: 77256 - DNA, 345 bp, Oryza sativa
  Clone ID: PAT_MRT4530_77171C.1
atggccgccgccctccgcgctggcctccgccgctgccgcccggccgcctcccctcccgaatttggcggaagggaggccgccaccaccgcccgattgcctatcgccgccgaatgccgggaggtgcggcccgccggaggggaggagaggggacattcaaacaccacctttgtttccaacagctcccaagataaaatatttgctattttactagcatctatacacagccccactttgtttccaacaactcacaagatgtttgcaccattttcacaagaatatgagttgaagctagggttcaaacccgcaacctctcttcagccgaagtctgcttaccttgtcacctaa

SEQ ID NO: 77257 - DNA, 144 bp, Oryza sativa
  Clone ID: PAT_MRT4530_77172C.1
atggcgggacacgtgtacggccagatcaaccgcagcacgagatcggacgggagaatgccaaattaccaaggggacaccaccaccagtgcccgcattgtctacggagataacactcctgatgtctcagaggcacctgcgccctag

SEQ ID NO: 77258 - DNA, 374 bp, Oryza sativa
  Clone ID: PAT_MRT4530_77173C.1
aaaaattagggggcccaactaatcttgaaattgggcaacgtttggggacgggggctgtcaaaacagaacaaaaaaaggggggggggggaaaacatagccatagacgggggcatggggatttggggaattcccccccaggggggcagttaaaggaaaatggccccaaaaaaaatagggctgaacaaaaatgggactgatagttgttcaggggctacatttggttcgggcaacggcagatttttcacttcatcgggcttcacttatcggtcacgggggggctggaaaaaggggaccacattttccgggccacaaaggcgactgggtccgcctaaatcatgcttttgggggccctagggtttacaaaacagggcccc

SEQ ID NO: 77259 - DNA, 1680 bp, Oryza sativa
  Clone ID: PAT_MRT4530_77174C.1
atggtttcactgaagctgcgagccatcctcttcccgttccagatggagcctcgccgcgagatgctcctgcaggagcttggggagatgtgggaccagatcggggaagcggaggaggatcggcgagagatgctgcacgcgctggaggaggattgcctcaacgtgtacagggtgaaggtggcgcaggtgaagcagtacagggcacagctgcaacgggagatagccgactccgtcgccgaggtcgccgccatctgcgccaccatcggcgagccatccaccaccgtgcacattgcgtgctcctcgctgcagagcacagggaacctcaaggaggagctcggctcgatcacgccggagctggaggagatgaggaggaggagggaggagaggcggcggaaattctcggaggtgacggagctcatcaacaggatcgagcaggagatgaagccgagcaagcagcttcatctcaccatggacaactccgacctcaccatcagacggcttgaggagctcagagcatacctgcaagatctgcagctggagaaggatagtcgcgtcaggaagatgacagagctgatgggttctctgcattcctcctccttggttcttggcatggatttcagagagaccaaccttcatcatgatgatgaaggagacatcagcgacgatgcaattgcaagattagtttccgagatcgggagattgagagagatcaaacggaacaggatgcagaagctgcaagacctcttggccaccatgctggatctgtggaacctgatggacacgccatcggaggagcagaagaggttccagagcgtggcgtgcaacatcgccgcgtccgaggacgagatcaccgaacgggatgctctctccatggaattcatcaacaatgtggaagcagaggtggtaaggctggagaggctcaaggagtgcaggatgaaagaccttgtactgaagaagtatgatgagctcaatgagatacgacggcgagcgcatgtacccgtcgagaacgaagacgatgcgatgatgatgttcgacgccatcgacagtgatgccaaacggtctctaatcctggagcggctggaagtgcagatctctgaggccaaagatgaggagttcagcaggaaggatgttcttgagaagatggagaaatggcaggctgcactagaagaggaatcttggcttgaggagtacaacagaaatgagaacagatacaatgtgggcaaagggactcatcttgtgctgaagcgtgccgagaaagcgcgtgccttggtcagcaaaatgccagcaatggcagaggccttgatcacaaaggtaattgcttgggagaaggagaggggtgccaaatttgagtacgatggtgatggtctcctggacatgctggaggagtacaacaatacaaggaaggagaaagagcaggagagaaagagacaaagggatcagagaaggatgctgggtcagggcacaggggagtcgccggtggtgaggcctccgcccaagaacatcaagaatgtaacgaggacgttgtctatgggtggcactagtacgggcggcaagaaggcgtcggcatcggtgtcgtcgaggccaagcacgccgagcttcctcaagtcacctatgtcagcacgaaggagtgacgagggacaaatgttattgtcacgcgcagttgaggaagatgatttgttatag

SEQ ID NO: 77260 - DNA, 339 bp, Oryza sativa
  Clone ID: PAT_MRT4530_77175C.1
atcaaggtgggtcccggtgctcagcggcacaaaagagtgccgcgtgggcccagcagcgagctcttcgaatattttgtgctgggctgggctcaaagctccaaaagatacagtagattggatcttgaggacggatgccaaggtggccggtgtggcggcgccgtggccgccaggctggctggacgcctccggctccgggccgacgaagcttcctcgcggcttcgagactcgctgtgcgtcacctgccatatgctctacctgatggaatctggatgtgtgggcggtgttatggcaaaccacagcaaatcagcctcactgccgatggcgttttttttttattaa

SEQ ID NO: 77261 - DNA, 310 bp, Oryza sativa
  Clone ID: PAT_MRT4530_77176C.1
ggcacgagacggaggcggcatgcacggaggtggaatgcacggaggtggtatgcacggaggcatgggcggccgacgcggaggtggtggcatgatgggctcgatgatgggcggcaggaggaggtgctagatcaacccgacttaatttttgtcacgagagcgatgagtgttgtgcgatgagtttttcctgagcgctaagcgactatggctttgtttacaaatttcgtttgtattgagaaatgagtcgtacaaacaattgatacttaatcttagcattaaactttgactaaaaaaaaaaaaaaaaaaaaaaaaa

SEQ ID NO: 77262 - DNA, 477 bp, Oryza sativa
  Clone ID: PAT_MRT4530_77177C.1
atggggttagcgagcgagagagagagagaaacgccggcgcctccggtgtttgagcaggttaaccaaggacggagacgtcgaggtagaggagcatccacgagccaacaaacaacgactcggactcggaacaacgagtggcaaatcggcaatgggtggtggccgccgggagctcggagtcagaaacggcgactccctcaaacaggaggcgtcgccgtcgtctttgccgatgtggtgtcgcctcgcgacctggaccctccctttccaatcccatgggccactcatgtccaaaccgctcgtacacggcccagaagtcaaccaagggtgtcgtttccttccaaccaagacaccttctcagaaatttcggctgctgctgctgctacaaccattttccttcgcaggaagttggttctagagctcatccagacgatgcaccatcgtacacagacccatcccctgctgcattttcagcacagtaga

SEQ ID NO: 77263 - DNA, 597 bp, Oryza sativa
  Clone ID: PAT_MRT4530_77178C.1
atgacggcggcagtggcccccctctctttaccttccggggccggtgttgcgtgcgagtctgcaagaggaagagaggggtcgggcgtggcggcaactgcgacgggcaggggggtgggcgctagagcggcggtggccacctcctcttgcgctgccgcgctcgcgaggccgcctccttcgtccgctggctatgccgccaagactccccgcagcggcccgacggcgtgggcgctggaggcggcgatgaagcagcaggacatcgtcaccaatggaggcggcgatggagcacgcgcatggtgtcgtcgtcgactcttgctctggaagagctctccttggccggagttcggagtggctgcgtggctgcgtgcatcgacagacaacagggagacagggagcagcggaggctcgcagcaggcagtagcagctggactgcaaagcagggcactagggcagccgagcaatgcacagcagcacagccaaattgaaattgatgaaggctatgaactatcgatgatattgacattgacaactttaatgtcgaggatgtatatctttctttatgtttccattcgtggtttctttcatcttaaatttctgtaa

SEQ ID NO: 77264 - DNA, 279 bp, Oryza sativa
  Clone ID: PAT_MRT4530_77179C.1
atgggattggaaagggagggtccaggtcgcgaggcgacaccacatcggcaaagacgacggcgacgcctcctgtttgagggagtcgccgtttctgactccgagctcccggcggctggaggggccagaattattgcagtcgaggagacgacggaatgcaatcgcagtgccaccgacccacccaccacccattgccgatttgccactcgttgttccgagtccgagtcgttgtttgttggctcgtggatgctcctctacctcgacgtctccgtccttggttaa

SEQ ID NO: 77265 - DNA, 206 bp, Oryza sativa
  Clone ID: PAT_MRT4530_7717C.1
acttgttctgcattcattttcaagatggggatattctccgacatatgataagggagcaccttgagcttacaatgatgggcttgcaggaatccagcatcggtggtcggacggccagcttcttccactaccagaggctggaatgccgggatgacggtggcccgccgcggccatccaggtggcggtggctgccggccctcgacggtaag

SEQ ID NO: 77266 - DNA, 186 bp, Oryza sativa
  Clone ID: PAT_MRT4530_77180C.1
atgccggtcagaccacaatgtctgcccggtcagaccggccatgcaaagccggtcagaccgctggctaccaccggtcagaccggccgtgcaatgccgaccggccacaagccgtcggtcagactggccagtaaggtcggtcagaccggctgtagactggcggttagacaggccagctgtctcgattag

SEQ ID NO: 77267 - DNA, 1260 bp, Oryza sativa
  Clone ID: PAT_MRT4530_77181C.1
tcgccgaaacccactcttggaagtgtcagaatgtccgatttctcttctcagacacatcccggcgagagacgagagacggcgccaccgccgccgccgccgccgccgtgctggactccggctggccaccgcgctccgctcgaggcgtccgcgatggcgtccccagagccgtgcgccgccgccgccgcaccgggaagcgggttcggagccgtggacggcgtcctgcccccggagctgctgctcgaggtcctgctgcgcctccccgccaagccgatctgccgcctccgcgccgtctgccgctcgtggctgtccttcaccacggaccggctcttcctcgccgcctacgccgccgtccaccctcacccgctcctcgccgtcttggttgacagcttccccagtcgatgctgcgttgatctcgtggacctgtccggcaacgtcgtcgaggagatcctcggcgtgggcggcgagtgcagggtgctgacggcgagctacgaccgtgtcctcgtcgccggggagcaccaccgcgtcagcgtgctcgaccccgccacaggatccgtctccgccttgcccttcggcattgcagaggatatggtgcgtcgcaacgggatgaggccagcctggtttgcatttggtcagacgaattccacaggagagtacaaactactccggattctagaggacttggaggatggatatgaggctgatccagtgtgtgaggttttcgcaatcggcgacatgaatggacggtggaggaagatggagagtccaccggggtatcttgatccgagctgcaccaatggagttgtcttcgaaggggctgcttacttcttcttggatcactggcaaatggatccctcctactattttgctacgggctgcataccttccttcgaccttgcgacggagcagtggagcacggctctccaagggccagtaaacagaattcttgaggaagcgaatggcacactcaactatgctgaccttaccgatcgtcttatgttagcccaacttgaaggaactttgtgtacagcacatttcaatgatcaaatttctgcggtggacttatggtttctagttgattttgagaatggtatgtggtccaaagaatataggataaatgttgaatttgcttttgatggttttggagatggtgtgcaacctttgcttgtgacggatgagggaaatgtgaaatggaagaagtgccaaaagaagaggagcaaaaccgatgtcaggactggtgtgattgcatactggagaatttga

SEQ ID NO: 77268 - DNA, 597 bp, Oryza sativa
  Clone ID: PAT_MRT4530_77182C.1
tcgttctcgctacctttcccttcccacctcctcctcctcctcctcaccaccaccacgcgcctccgctcgcaagaagcacctccgaccgccatggcgcgcgcgggagctggcggcagtctctccctggaggcatgacgcggcggcgcccgtggccgtggctcctgttgctactactgcgaccaactactgcgctcggtcggcggtggtggtggccctggtcgtcgtcgtagcgcgtcggcggaggcgggagaagaaggagaagggtcgacggggatggcggcggcgatggtggcggcggtgcatggagtggggaggcaggacaggtcgtcgcctggcggcggaggggcgccgcaagtggacacgggcaagtacgtgcgctacaccccggagcaggtggaggcgctggagcgggtctacggcgagtgccccaagcccagctcgctccgccgccagcagctcatccgcgagtgccccatactcagcaacatcgagcccaagcagatcaaggtctggttccagaaccgcaggtgccgcgagaagcagcgcaaggaggcatctcgcctgcaaactgtgaaccggaaattgactgcgatgaac

SEQ ID NO: 77269 - DNA, 280 bp, Oryza sativa
  Clone ID: PAT_MRT4530_77183C.1
tttctgcggctaaagaagagagccctgtatgtgggatcatatgtggatcagggtttgcagccgctccaaacgatattaccatctaacaacagatctaccgaggagaccgagtatccagtggacgctcctctgctggtacgcgccgctgctatacagttacacaatcttgaccccaagatggcttgcgagattgtcatccgtgaccaccacgatgtacgctacctccgctgtatgagtattaggctactgaactttacctgaagcatgccatctaaccaca

SEQ ID NO: 77270 - DNA, 377 bp, Oryza sativa
  Clone ID: PAT_MRT4530_77184C.1
ctaagtatcggctttactttatatatgtatcgctatagttgtgtaactaggctaccagagaggtgtgtgggtttaatgttcgattattcggttgccctatgtcatctcgggggatatagagtactatttaataatgtagatgtggtgtctagattattaaatatcattatctgggcatattatgctgcgggacagtagaggtggatggctgatggtggcagctcagtacgggtattcctccacgttattatatattcctaagaaactctcctggggacggtactcctccgtatttagtcccggttggacggccatgacaggttgtcgtaagaaactcgacaacccgtggtggtctctcgaaacaccagaagggcatt

SEQ ID NO: 77271 - DNA, 382 bp, Oryza sativa
  Clone ID: PAT_MRT4530_77186C.1
acaccaacagaaacagcatccaccgccggggcccggagagccaccgcgaccatagactctctccagcatctctacttaaccacacgcacgccgcctaagctacagccgaacgatccagctattgggtgcgaacgcaagtccaggggagaggcactgggaaggaggtttgatcgagcgcaagatcaggaggaggggagcatttcggcacactatcgcacagagaggtcaccaaggagacctcccaagacctcagatgacaacaaggaacagtcccagtgcccagggacatccgacatcccaagatccactgaggcccataggcccatgatcccgtcataaaggcactcaacgggcacgggagacactctccaagggagaggaa

SEQ ID NO: 77272 - DNA, 1143 bp, Oryza sativa
  Clone ID: PAT_MRT4530_77187C.1
atgggggatcgtaggatggctccggtggcgagcaggatctaccgacgacatcgacatatgggcattgccgtcgacgagttcatcgctgccgccgacacgttgggaggaggaggacgacttcctcagtgtgctgcgagcactacgcaatgccgcacgaagggtggaggccgctgccgctgggcgactgtgacgatgaaggccccgcgtatcacgcgcttgtgcgtcggatgcttgcgtggattgctccttgtagttagtgttcgtgggtttgtgggtgcttacgagggaggtggagatggtgcagagcgaggagagggatcgcgcgcgtggctggcggtgtcgccggcgagaccccaggcgtggatcaaccgggagaacgtggcgtgccctgcgcacggcgtgttcgtcgccatggaggcgaaagcttggggccccggccgtgggggacggctgcgcggcggtgcacactttggccacgtgttcctcagtcgcaggtgggacccacggcgtgtcaaggatgagagagggaggatagagaacggtcatcctcgcgctccacgccgccgatatcgtcagccagaggaggaaggagctccaccgtccctcgctgcccgatccgtgtccgccgtccctcgccgagctcgtcggcccccgagccgccagaggccatcgccgaggtggggatccggcggtaaggtggcgctggcgccgaatggatggggatccgaccggaagaggaggaggggaggcatcgttcgccgtccctcgccaccccgatccacggcagccggaagaggaggaggaggggaggcgctcgagcagccccgccaatggccgcgttgcccctcgatccgcgacggccagaagaggaggaggaggggagccgccccgctgaccagcaccattgagctcccgatctgttgctggcgtcgtcaccgtatgggccacccggcgtcggcgtcgccgctcgggccgtctgtgccgccgtcgccgttcgcagcgccgccgccgtcgtccgccgcgccgctcgacgccgcagctaggtgggttggcaccaccgctgccccggaggaggaaggggaggcgcggcggccggagaaggggggatccggctcgcgggcggagatagagaggcgcgcgtga

SEQ ID NO: 77273 - DNA, 231 bp, Oryza sativa
  Clone ID: PAT_MRT4530_77188C.1
atggctcgcgttggcacttgtgcaacgatcgctcttcttgtcctcgttgctcttgtagcctctgcagtggcggatcagccccgctgctgcgtggactaccacttgtggggagggaacaccgggtgcggccctaatcagaacgatgcttgcaactcatggtgtcagtcgcagtgccgtggcggcgaatgcaaacaacgcggcgaccgtcacttctgccactgcttctgctag

SEQ ID NO: 77274 - DNA, 468 bp, Oryza sativa
  Clone ID: PAT_MRT4530_77189C.1
atgacctccggccgtcgccactatttgcgcaacaagattcgccttgagcgcaaggagccgatgactacagtaacgtggacgtcgagcacgccgccgtgccggcaacagtcaggcggccccagcaacagctgtagcagcagatttttcggcgccgtgatctacccctcatcatccaaggccaagtcgccattccaacttatgccttttggcttgaggaagccgggcggcgctggggcctggaagcggcgaggcgaggggaagaagagggcggcgctgtttatcgggcggcgaggtgagggaagcgcgggcagtgcttccgcggctgaggagcggtgctgcccgaggaaagagcgtcacgtaaccgtcctcgtggtggggatcgcttcagatggtgcggcacctggcggcgtgtcggcggccaacctcgccggagttcgcctgccggagtcgggggtggaagtgccgtag

SEQ ID NO: 77275 - DNA, 432 bp, Oryza sativa
  Clone ID: PAT_MRT4530_7718C.1
gtggagggcacgggggaactcggcgaaatgtagaaaaagagagaggggagggcggtgatgcttaaataggggagagggggctcggacgtggccgggagtggtccgatttagccggccgacatggggtggtggaggtggagagagagggggattcgaaaatcgaatcccagccgtctcgagcgcgggcgcgagcgggaaagagagggagtgggcgcggaagacgcgggcgcacgcgcgggcatggccgacgtggcgcggggaaagcgggcgcgggcggttgcgaggcggcggctgtggacggcgggtggccggaggtgggagacaggccgaagggacacttttaccctcccgttgctgcgttcgtccacggatcacgcccgcaccggccggcgggcagtactacagtacccattttcccgtgccggtaaaacg

SEQ ID NO: 77276 - DNA, 549 bp, Oryza sativa
  Clone ID: PAT_MRT4530_77190C.1
atggccaagcgacgcagcaacggcgagaccgccgccgcgagcagcgacgactgtagcgccggcgtctgcggcggcggcggcggcggtgaggttgagccgaggcggcggcagaagcggccgcggaggagcgccccgcgggattgcccctcccagcgcagctccgcgttccgcggcgtcacacggtgcgcaccggtggacgggcggttcgaggcgcatctctgggacaagaacacctggaacgagtcgcagagcaagaagggcagacaaggggcttacgacggcgaggaagcggcggcgcgcgcctacgacctcgccgcattgaagtactggggccacgacaccgtcctcaacttccctctgtcaacatatgacgaggaattgaaggaaatggaggggcagtccagggaagagtacatcggatcgctccgaggaagagcagtggcttctcaagaggggtgtccaagtacagaggagttgcaaggcatcatcacaacggcaaatgggaggctcggattgggcgtgtgttcggcaacaaatacctctacctag

SEQ ID NO: 77277 - DNA, 759 bp, Oryza sativa
  Clone ID: PAT_MRT4530_77191C.1
atggtttctccaccagtggctccgaccagcgatctcctcgagcggctcggcgacgagcgtgagggaaatggccaagtccgcgaaagcaagcgagcatcgatgatgtcgcgaagagactgcgaccggcaaagcgacgacgtcccgcgtctcgacagcatcacgtcgccgggtagagacatcgtgaggaagactgctgcgctggtgaggatgagtagatcttggcggcgtctaaagaagaggttgcggccggcaaggcgatggcgtgcagcgtctcgccgacgtcatagcaacaggagtcttggcaatcgacggtggctccggcgatcctggcgcgctccagcggagcagcgtcacgacgactccgacatgccatcaagttccttcttcctcatcgaagtactccctcctgtgcttgccgatgatcgggtcaccgcgcgcgccctctcctaccagacgccggagctccggccgaagtcgctcgctgccgccggtgcgtgtcgtcgctggatggatcaagatcgaatcctctttcccttcctcctcccctcgatccttcctcatcccgatccatcccctccacctcctccccttcctcatccgatcccctcccctctcctccacctcctcctctccccttcctgcccatccttcccttcccatccacctcctgcccttgctcatcccctcccctggtctccacgtcgtcctgtcccctttcctcccatccttccgttcccattcagcagccggcgggcccat

SEQ ID NO: 77278 - DNA, 729 bp, Oryza sativa
  Clone ID: PAT_MRT4530_77192C.1
atggcgtgcactagctactacctaccagatcggcatgaggtggagacggagaaaggtgaccatggatgtcagcagaacaaggccaaggacgagcatagacatggaagtgacgctagcatagtgccgtcatcatggccaccttgccattaccgtcaactctgcctgcaagatctggaggagaaggtgcaacgcatggagggaagtggtggcctgaggaggctcaatccattggttccgggagttggggtttggatggttcaggtgccactgatttatttgctgagtttgttgcaattggttctttatttgtgttcttttgggcaagcattgcccccaatcggctcggctttaacagtaaatgggaacttcgaccttgaacaacctctgagtgttcctgggtcagaggtgggtgggcacatatttgagatcaacgggtacagattccagaagggcatcggtgttggcaagtttgtccggtcgaacatcttcactgtcggtggcttcgactgggcagcttctatcctgatggagtttggaggtgataagattgagatgatccggcatttacttgtggctgcggatagatatgccatggacaggctcaagttgatttgccaacacatccttggcaagagtcttcatgtggacaatgtggcaactacattggctttggcaaacgtgcacgtcacaactacacacctgatttttcctagacaaacacctcaatag

SEQ ID NO: 77279 - DNA, 405 bp, Oryza sativa
  Clone ID: PAT_MRT4530_77193C.1
atgggtcttaaaagtaattgttgcttttcagtgataatgtactcaagtcctgtgaatgcactcattattctggagaataatgcacaagacattgtcgtagtcttggcaacagtggacgtgaaacaattgagtggtttaaagttccttgaagctgcaagaatgaaacatcaagaccttcaagtgatcatgatgtcagctgaaaccacaaggttgtacacaatgatgaggtgtgttaaactcgctgcacgttttctagtgaagaagcctcctaacgaagacattgtacatgatctgtggcagcatattgccctgaaagttctgatgatggagaagatcagggccttactgcaaggatgcaccatatatgttaatggtagcgtttgtgtcttactttctgcaaaataa

SEQ ID NO: 77280 - DNA, 317 bp, Oryza sativa
  Clone ID: PAT_MRT4530_77194C.1
ctcagtgagagcactgccggcgagctcctcaagaactccggtagcttacgcgcgtcgcatcctcaactcacggccgccggacgggggagcggaggattaacatccctggcatctttcttgatggcgccgacgaggtggtccatgcgatggcggagaaggcaccgacggcgtagaactgagctcgtcgtcggtgacgatggtgtcagggtgaagctccctacgagggattcctgtgcctcgagttgaagcccttgactgccaacgccaacatcccatcccatccacctcaaatcaatctcagtatttggggaggaaga

SEQ ID NO: 77281 - DNA, 291 bp, Oryza sativa
  Clone ID: PAT_MRT4530_77195C.1
atgaagcacgctgatccaaaattggacacacatacttcacctccatcgagggcgtgcgacgcagggagaaaggtggaacgctgcgttgtagaggtcgtcgcctcgtccctccgtggtttcgccccggagctcttcggccacgccggtcagagctcgccgaccacgccgcctccaatccgccgccagccgaagctcgccgaccgcgttgaccggagctcgccggtcggccacgccgcccctcgaggcgagaggggagaggtggtggtggccactcgcatcagacggccgtga

SEQ ID NO: 77282 - DNA, 708 bp, Oryza sativa
  Clone ID: PAT_MRT4530_77196C.1
atgaagcacgctgatccaaaattggacacacatacttcacctccatcgagggcgtgcgacgcagggagaaaggtggaacgctgcgttgtagaggtcgtcgcctcgtccctccgtggtttcgcgtattccccacccgtgctctcctctcatgccaataactcgtgcaagggtgacggaagggagaacgagaggagcagtggcaagaaggctgcgcagcgggagagaagaggggcctaccggcgacctaggagcaccactgtcgggatccaccgcgtcggcgccgaggcaactccaccgcggccctcactagtggcgcctcctccctatccgcgccgaccagagctcgctggctacgtctccccccccccgatccgtgcagcccggagctcttcggccacgccggtcagagctcgccgaccacgccgcctcccaatccgccgccagccgaagctcgccgaccgcgttgaccggagctcgccggtcggccacgccgcccctcgaggcgagaggggagaggtggtggtggccactcgcatcagacggcctagaaaaagaagaagggagaagaaaggaagacggatgcaagaagaaaagcgcgtggaggcaagtgggtccttctcccgatcgctggcgacgcaagtgggtccttctcccgatcgctggccgcaatcgcgcaataggggcacccgcctggtggttggtaggtag

SEQ ID NO: 77283 - DNA, 303 bp, Oryza sativa
  Clone ID: PAT_MRT4530_77197C.1
cttaaaagccgcccgccctttttttttttttttttttcttttttcatttactttcctttcattatttggggttctttttctttcgggtttttttctccacacccccaaaacactttcaccctcccctatatgagcgggaaacacccccacaatttatttgtccaaatcccaaaaacccccttcccacccaaagatttccacttatcttaccgccttataccccccccctttaaaaaacaaaatccacacttcaaccaaagaaaaattcttaaaggggcctatttcttccaaacccctgggcca

SEQ ID NO: 77284 - DNA, 617 bp, Oryza sativa
  unsure (1)..(617): unsure at all n locations
  Clone ID: PAT_MRT4530_77198C.1
acccggcggcgccaatccgagccgcactgctcctcctctcctccctcaacccccgccaccactcctgcttctcctcctccgcgtcacaccggatccggccgcttggaggtcggggccgccagatccagccaccacgcgcggcagcagcgcccctcctcccttgcgtcacgccggatccggccaccacgtgcagcagcagctcctcctccggccttcttccggcagcagcaccacggcaacagctcctcctctggtcttcctccagcagcagtgcaaaggatcaaatcagttggcacgcccttgatacacttgaggctagccttggacttgcactggagttaagaagatcccctaggccgccgtgttttcacatgaacagcatgccacggatcgaagggttaatggtgtggagggttccaacgttggagttgagtcggagtatcgaagaagttaaggcaagtacaagatggacttgtgtgatggataaactgtattgctttgttggtctcatttacccaattattattcgaagcttcctattatcaattggtggtggntttggtattatgctacatattcatatttcacttcatgttcaagttcacaacgntattcat

SEQ ID NO: 77285 - DNA, 412 bp, Oryza sativa
  Clone ID: PAT_MRT4530_77199C.1
acacaaggcccagattaccagcacatgcaacgggcaatcgaaccaaccagctgacacaggactgctgatgcactgatacgcgaaacttagctgctgaaccgggatcttacaccaggccatcatagaacctcgatgagattacgggatcaccatagtaatatgcggtactgatgtgctcatgtttgagacagatgaggaggacctccaagatgactcgcgcaaggccaccgcccaagagagatccagcccttccaaagcctggaactgccaggactacatgacgaggtccggacctcatgacatggtcctgtcactggaggagcgaatgaacgcccaggccacaaggtatgcacatcggacaaacaaccaaatggcaatggaggccatggtgcttaagctcccctacatgggg

SEQ ID NO: 77286 - DNA, 4770 bp, Oryza sativa
  Clone ID: PAT_MRT4530_7719C.1
ttatacattgaatttacgtaattgatcaatgttccaggaatttgccaactcgcgaccatcgccgtctgcaatcttgaatgcgcctggctgcaagacttgtgtgatcgtgtacggtccttcccatttgggtgagagcttgtttcgccctgcttggctttgaacccgtcggaggacgtagtcgccgatcaaaagcgtgcgtgctcggatgcgcttctcgtggtaacggcgaagggcctgttggtagctgactgctcgaacggcaactcgttcgcgatgttcctcgagtagattcacattgtcgtttcgctgctcctcctgatcctcatcggaatacttctgtactcgtgtactttgatgtcgtagctcggtggggagcatggcctctgagccgtacatgaggaagaagggtgtctccttgttagacgttgtcagtgtggtacgcacggcccatagtactgatgggagttcttcgacccacttcttgtcatgtgacatgagcctgtcgtagacgcgggtcttgattccttgtagtactatgccgtttgtcctctcgacctgtccattgctctgagggtaagaaaccgaggcgaagcagatcttgactcctagcctgatgcagtaatcctggaaatcggcactgatgaactgggagctgttgtccgttatgatacggtgaggcaatccgaatctgcaaaatatccctttgatgaatttgatggcgttgtcggccttgatttcccccgtgggtgtcgcttcaatccacttagtgattttgtcgatcgccatgaataggaacctgtagccgccctgtcctcgtgggaatggcccgagtatgtctaggccccagcacgagaacggccaagtaagagggatagtctggagtgcttgcgctggtagctttgtgtgtttactgtggaattgataggcttcacaccgctgaaccatgtcgcaggcgtctttgagggtggttggccagaaaaacccttgtcgaaaagcttttccgactaatgtccgaccggccgcgtgtgacccacagatcccttcatgtatgtcgaggaggagatgtctgccgtcgtcggacgagacgcattttaggagtaccccgtttgacgccttcttgtatagatcgttgccgatcatacagtagatttttgctttacgggttattttctcggcttctgcgttgtcctcgggcaactcttcgctgcgccgtgctatatcatccggctcgatgttgtcgttgcggtatagatgtcgaacctcgatcccatcgaaccttttttctagcttcctgacttctgcgagatacttggataactcggggctagagcacttgtaatctttatgcacctggttcgcgactagttcggaatcccctttcacgaccagtcgcctaactccgagtgcagctgcagctcttatcccggcgagtagtccttcgtactcggctgtgttattggtcgccctgaagttgaggtgaattgcatgcttgaattgatctcctgaaggtgatgtcaagatgaatcctgcccctgctccttggctgttgagtgcgccgtcgaacgccattgtccacgtttcgttgtcgatttggttgtctgacctgcttagtgccgccatgcatccggttagcttctgtacttccttgagtcttgtaggcgacttcatgttctcgattgccttgatcgtcttaggatttgcttctattcctctgccagagacgaggaaaccgagcagcttgcccgatggtactccgaacgtgcacttctctggattgagcatgaggcgatatcgtcggaggtcttcgaacgtttcccgcagatcgtcaatcaatgagtcgcttgtcttggtcttgacaacaatgtcatcgacgtaggcctcgacgttgtttccgagttggtcgctaagtgcgccctgaaccgtgcgctggaaagtgtttcctgcggttattagtccgaacggcatcttaacgtagcagaataccccgaacggcgtgatgaatgctgtcttctccttgtcctctttcgccatgctgatttggtggtaaccggagtaagcatcgaggaagctcaacgactcacaaccggctgttgagtccaccagttggtctattcgaggaagagggaagtgatccttgggacacgccttgttgaggtcggtgaaatcgacacacattctccatttcccattggccttccgcaccatgactggtttggctagccactctggatagagtacctctctgatgaaaccagctttgagaagcttgtcgagctcttctcgtatggcttgttttcgatctggtgcaaatctccaaagtttttgctttactggtggcttggcgtcgggtcgcaccatgagtttgtgctcaatcacctccctgggtacccccggcatgtcggacggtttcttgggtggctcagctgtggcaggtgggctgggcgtgtgctcgaccatgtcgaggctccgcttgtcgcattgcactgccagcttagcattcccttgaatagtgattgttcccttcggtcccggcatcttgagcacttgatacgcgtagtgagatgcggccatgaactttccgagtgcagttctcccaatgatggcattgtatgttgtatcgaattcagcgacatcaaaggtgatctgctccgttcggaagttatttgattggccaaaagtcacaagcaacgtaattttgcccaatggtttggacgatgactgaggagtgattccatggaagggttgatcggtgggcgtcaactcacttcgtgggatcaccatcgtgtccaaggtgcctgggatgacagcagtcttggggtggtcctcttctgagaattctatcttctgttcagaccacttcatcttgggcgcagctccctgccacgtcgaacagacttcacgttccactttcttgtattctcgctttgaggagtatgccgtggaacatccgaagatgtgcgagacatggaaatcgcagtctgggtatgctgagtctgattcctgagtagccgcctcagcgtccttctcgaccacacgtactcgcttgcctttttccaatgccatatgttttgcgagcgactttttgaagacgaggcaatcttctagagagtgtctgtcagacttgtgtatagggcaccatgttttcttcgtgtcgctgccttgtgggtctgggcgcttgggacggtccgcgtattctgttgcgagaacttccgcttgagctttccttttcccactcttgtgatttttcttcttgcttgagtcaggtgcgtccttggctggtttcttctctcctccggtcttcggtttgtcgttaccggacttgaaggcgcggattagagaagcgttggtgattttggggattgtatttctacactcattaaagcgccgaacataatccctcaaggattcacccgggttctgtgtcaacgcatgtaggtcgtcttcaattgcgtggcgcttgtaaattccttggaagttggcgacgaactgctgccacaagtctgcccacgaagaaatcgagtagggcgggagatgcatcagccatgaatgtgcagagcctttcaatgcagttggcaaataattcgccaacgcgttgtcgcccgctccggcagtgtagagtaccgtggagtaaacctgaaggaattcttctgggtcggtactcccatcgtacttctctattgctcctggtcggaatctcttaggccatcggacatcacgcagcgaacgactgaaagctctacacccagcgctgggggtggtgggttgtcggcgatcatacgtccttcgtggatgtctatctcgcgtggcgtacttgtcgacgatgagccatagtcttcgagcaggtgtagaactgacggctcgtggggatcgatgtcgattacccccaacgaatcgatctgagatcagcgtcgctccttgttccttgtcctcatccctgagggggatacgtgactgctggaccttaggaggtgacgtcttcatggcgctgagaaagaccttgcagcttgagaggtcgtgattctttgtcttgtgaataggacaatagacatcacgagttggagaagtacgctgaattccacgctctttgtaggcacgaatttcagcgtggacgttgagaaaaacccagcaggcttgcaaggtgtgttttttggttttgtggataggacaccaggaccttgtcacctcggaagtcatcctcgtcggctcgtgattcttgtcggaaagacaaggtttggccgcactaggatccttctcgggctcgaatgtcgtcgatgttccgttctccgcttcggcgggaggatccttcgacatggagttgtcctgggttgtagccactgcgttctcgcttccggtcattgatggaccagccaagatcggcaccgtggtgtaaaccgggaagacgatttcgccgacttgagtccgcaccagcattgttgaagcaggaactccttggttgaggttggtgttgacgctgttgtcgacgaagctggatgatatagtagtagaaccttgagcaccaagtccccctaccgggcacgccactgtcgacgggggatacccgtagaccggatgtagagggtactggggtacgctggtacgaggatcggaccacgtcggcggcgtcctcgaacgcggcggggaggcggtcatctgcgggttcgtctcggcgtgggtgctcattgggctcaacgcgctagcggcgaggctcaaattcgacgacccgctcgagaccgcgtagctgcacagcgagtgcggcgcgttgggcgtcat

SEQ ID NO: 77287 - DNA, 1258 bp, Oryza sativa
  Clone ID: PAT_MRT4530_771C.1
tcaggtcgagcttgagtagctgcgtgaggtcgccaatcggctaatggtggatggaaccacgacggagctcaacatcacgtcggcgaacatgttgccgtcgaggaatatctcagccaaggtgttgcagttggtcaggttgttcaagaactcccaggcgccgccgtcatcggtcggcgtacggctcctctcatcgtctcccgcgcccgcgcggatgctctctgtggcagcgtccgacgccctcgtcgagatcaagccaggcaagataagcatggtctccggcatccccaaggagcacctccgccgcaaggtgcttctttggacttactctgatttatgtagtgtcgatagattcgctagccctcatagatccgtgtgggaatcgctcgagatgtccaggtttggtgggttcttttggttgttactcgggttagggatagagcctggagaacttgggaggaatgtgctggtccgtgcgcgcccacgtcgatcggctgggagctcgctgtggaacacgttgttcgcgagtgcgaggcctcgcaacgacgtcatgttgaagaaactcggcgggatctctccgatgaggctgttctacgacaaggctaacatgcggagcgccaggaggcgtgacaagccgtcggggatggaactttccagaaggttctggtcgaactcgagctgcacgatcttcgtgaggttcgctagcgatggcgggatgtggccggagagcgagttgtggctgagtcggagcaccgtgagattcggcaacgcgtcgagccatcgtggaacgccgccgacgatcgaggttgttgttgttgaggtacgcgacgtcgagggtggtgcaattgcgaagcgcgtcaggatttataacatggatttatggactggatatgaaatattgattgcatcttcggtggtgcggtcaacggcgcggcgagcggcggcgacggcgcaggggtacgggcggcggtcggcggcgatgtcgtccggcggcggcaaggcgtcttcttccgagatgagaaggatagactacgggtcgatctggcacgtcatcgccggcaatattggcctcggcgtcaccctgttcggcctcaaaggactacacgatatgcggatggaggaacgggaagagaaatggaatagggaacgggaagagcgactcgaggcggctaggaaggaatggattcagcaaacgcaaggccaacgtaaggctatgtgcctcctatgccggtgtccttgccatttggattatatggagtga

SEQ ID NO: 77288 - DNA, 1188 bp, Oryza sativa
  Clone ID: PAT_MRT4530_77200C.1
ggaatccgctacttgtaggctagccagaaagatcaagaaaggcgcgccatggctttcctcctccccaagctcaccacgccgtcctgcaagtcgccgccgagcccgctcaagtcgcagctcggccttcccggcggcgggaagctccagccggcgcaggccgtggcaccgagccacctcaacctcctgctcctgctcggcgcctcgcagcaggaggccgccgccgtcccgacgcccaagagccggagcaagaacggtggcggccggagcggcggcggcggcggggaggacccgcggaggtcggattattacctcaaccttgggacggcggtgcgcacgctgcgggacgacctgccggcggtgttcgtccgggaacccaactacgacatctaccgtgaagatataacattcgtcgatccgttgaacactttccatggaatcgacaactacaagacaatcttctgggctctcagattccatgggcgcctactcttccgtgaaatcgggcttgacatatcacgcatttggcaactgacagagaactcgatagttgtccggtgggagctgtggggaaccccgcgtgtcccgtgggaatcatacggttgcttcagtggcacctcgagatacaaggtcgacaggaacgggaagatttacgagcacaaagtcgataatttggcactggactttccccggccagcagccaaagtaggcagcattgctgacattgtcgtcgcctcatgcccaccaagccccaatttgacgttctgggacatggttgggagtactggtgatgggtgctcatgggcaaatctctaccaggcggtggtggaaaccgtggagcgggaaggcaatgatcctgctggcattgccattgaaggtctgcttacttgttcataggatggaatgagcttcagggctagctgcttggtagtgggctttcttagggaagatgtatagaaggtggatacataaatcataatgctattaatcttcgtatactgtagctctagaataacaattttagatacaatacatggtagataactatgtctcaaaatcttcgccacgcattctagaatgtaactaccagtctcttatgtctccaaagttaatggctattcttagcaggtctttcaatatcctaaattatgaaaatgaaggttgccaaaaaaaaaaaaaaaaaaaaaaaaa

SEQ ID NO: 77289 - DNA, 171 bp, Oryza sativa
  Clone ID: PAT_MRT4530_77201C.1
atggctttcggctgcacgaaagatatcgacaggaggggcgcgcctccctttgcaagttgccaagttggcaaggtgagacgctcaagtggccaagtgggatcggagcaagttgctgcccgtggccggcgcatctccagatatacggatataccatgctcccgtggatcactc

SEQ ID NO: 77290 - DNA, 263 bp, Oryza sativa
  Clone ID: PAT_MRT4530_77202C.1
tggtcatctcccatttcacctgcaagcaagcaagcaaagcaagaaacccaaacttttggtccagactccagagaagccaagtagccaacccatgtgtgaatcctggaaagaatagaacagctgcctgcttgcattgtctccacggtacaagagctagctgagctcacacacgctgagagagtgagagtgagaggcagctagctagagagagcgatatttcagctaagctctcgtctcgtcttctggcaggatttttttttttt

SEQ ID NO: 77291 - DNA, 983 bp, Oryza sativa
  Clone ID: PAT_MRT4530_77203C.1
atggcatcgcctttccctcgcctcgcctcgcctagccaccacgagtcgtcttccttcatgtccaccttagtggcacggtcgttgagattgcacgtgcaccaattagagttggagaagaccaacctcctccttcgtgggaccctgtaccctctccaagagtgcaaaattgtaaataatttgtgtgctacctatagtacttctatggatatgagagcaagggacctcactagaaagaggagggaagaggatgacgatgatatgatgttgtttattttccctgcactacatttgttgagttctagtggagcaagaaacaaagaagaaaaagaacccaagaagcaaaagaagagtgttggcgtagaaggacttatggaaaggtaccttgatatgagaaccaaacaagctgaagatgaggcggcacaattggcaagagaaagggaggctcatctagcaaaagaaaaggaaaacaatgatttttcaatcaagaagtgcatatccattctcaactcgatggtggtagtgacaaaacaagagaaggccaatgcttataccgtcttcaagaatgcagagaatagagagatttttgtgagcacttgtcaagaagatgccgaatctgccttgatttggttaagaagtgagatggcttgataggtatcagaagacactggcttatagcttatgatcatgcttcgatagaaatggctcaaaatgctcaccctctgcggctctctgctcattgactttctggagttactattgttgtagcttttgtgcatgtctttttatcttgcgtagttgtgcagggtgactaaaatcatcattgatagcttcatctctgaatcctagaagtcgggtacatggtacttcataagttgcaaacttgcaataggatcatatgattaatttctgagaactgtatacatgtttatattatctatagttggatgacaactcggaaaaaaaaaaaaaaaaaatttgcggcc

SEQ ID NO: 77292 - DNA, 381 bp, Oryza sativa
  Clone ID: PAT_MRT4530_77204C.1
atggtcgttgtcgggccaaaggcggtcatcgtagctgctggggaggctgggctcattgcatcggggaagggcggcggggcacgggggtcgtcgtcaggccaaaggcagttgtcgttgtcacaactacgggggaggctgggctcgtggtactccggcaggagtggctcggacgaagacgacgacggcgatggtagggatgactctgacgattctcctggcctcccgcccccctcgctagccacctccctcttctactcgcttactggcctcctggccgccagttggcttcaactcaccgaccgccgccctttctctgtccccagctctccgcacgcgctcgtccgtggactcgtggagccggtgatgacgtgcccaagctag

SEQ ID NO: 77293 - DNA, 458 bp, Oryza sativa
  Clone ID: PAT_MRT4530_77205C.1
cggacgcgtgggtatttctcgacgttttccttctttctgggaggagttgttccatactctctttcgtttcacaatataagttattctagcatttctcacattcatattgatgttaatgaatctacacatatatatctatttagattcattaacatcaatataaatgtgaaaaatgctaaaatgacttatattgtaaagcgaaggaagttacatgaaaattcagcatccaacatcgatggcgcaccagtcaccattcatttccgggtgattttttccgtccggaattagggtgggacagggaggaagagatatgaaggtaatggtctgatagtaaccggaggggctgaacaatctatctatagttggcatttgcaatttgtgcactggtgggcggctgtgtattacgtgcatggccgtacataacatggttcgtgtccacatcttatcatttattatgc

SEQ ID NO: 77294 - DNA, 405 bp, Oryza sativa
  Clone ID: PAT_MRT4530_77206C.1
tggacttttagttttcatcctttgtttgtgttattgttctcagctctcactacaaggtatagcttgtgcatgttgaattgattgatatacccagcagccattaagttaaaaagatgtctgtgaaggaaatagacatccatcttgttggttagtgttattgtactcagctctcactccaggcctgttggttagtgttattgtactcagctctcactccaggctagatcttgtgcatgttgaattgatagatattcccagcagtcatttatcagtctgtttgcgcttcctttggattatttttgcacatccttctatcaattgtttgtgcgaaagcttcaatgctctttaaacatgctcgcgccaactgcaagccagcttttgcacaccatgaattgtatatatgct

SEQ ID NO: 77295 - DNA, 2535 bp, Oryza sativa
  Clone ID: PAT_MRT4530_77207C.1
ctcgagttgctttttttttttttttttttttggcatcctgaagcggccaagccacaccaacaatgttactcatttaggcctcgcgatttcgcaagcatatgtagccggggtgaaacaacaatgtgacaatgactcaaaaagaagaagaaaaatggcaatctaacacgcatacgctaatacgctatcagttgacgcgtgccagacatcagtgcacacatctcaccatggtctacaatcatcagactggatcagctaatggtaattctacagctgcacttatgatggaccatatcgtttcttcacttggttcttccaagttgacaaaagcacctccaatcaggttgacgcatgaatgatgttgtatcgctctctcatgggtgctcattggcctctgatggatcaacaatgttactcagtatctaaacccaagggcatgatcctcagttgttatccaggtggtcgcctttcgccgttgcgactctgtgtttcatcaaaaccgcctacaggcgcaacctcgtttaagtcaagaaatcttctcccatcgcttccattattcctgctaggagaaagcaggggtggccgctctttatttacttcagcaccttcttcctcctggtcttgactagttgtcgagagctccatgtcatttagtgcatcagaaccagcatctggatctggtacctttattttacctggctttcccaattctgtatctgtgccagaaagatcatactgatgatacttcatgtgtgggcgggtggaacgcttacttcgtgtgatgcatgtttggaatccatcgatagttctcaagttggtccctcgaggattgcaagtagccaatcttttgtaccgttggggctccttttcatcttcactggtactcgaaggatattccacttcatcattaccatcatcggcaacttgttccaattggaactctttatcgagttctaaaagtctggccttatattgctttcgacttctaagatattcctcatcatagactgcttcaccaatgatatcatcatcactgtcgaagtttgggtcgacgtccgagatagcctcaacaaaatcttgcgtgtaccttcgagatctttttctttgcctgcgatcgagagtctcaggttttttctcccactcacttccttggtagccatgtgaccttagtggatattctccatagaatccattgcataatggcgaaggaccagctaacctaccattggtcgctgtctctcgttttgggtgtactcttctgttagaagtagtaatgaactcagaagagttctcacttttctttgttggttttatggcttcatttattgaacgctcataatcatcaaaagtataggtgacacgctttctttcacgacgagagcggacagaggtgaacccattcactgtcaagcggttgtcaaggaggagtgcttctctttgttgctttttgagcagcctctccttcttcttgtgaatcttttccatctctggaagataattgttcttcaacttcttgccaagcgagacctcagtcctgttcctacttgaaaagagtttttctgctgctaattcaaattcaataaagttgcatgcaacagtctcccattgataggatacaactggggcatttgagattcccttccctttagcttttttggttgggtccttctcatactccacttgcctaatctcacgatataaccgatgtccaaggacgggatcctcgtcatacctgtagcacatcaattgattagagatgctccagtatgagattccatatgaatctcctccaatacgttctttacggaacacaggaagctcataaccacgctttaaagaactatctatgaagttccgaatatcctcttgctcaacacgtatatcacatattgctttaaggatcactaatcgtgttgctggctcaagtgccttgtacatttcaatttccgcaccgtgtgaggcaacaattggaagatcaccttctgcaacccaattccaccagtacttcaatttcctgcataacactgttatccatgttccacgtcccatagccattcgagttactggaggaatcgacttcagcagaggcatatgaacgtcatccaatgtattgttgggcgataggatcgcctcctccagctcctccgccgtgaactccaccgtaatgttcagcaatggccggaacacgtggaggaagttgatgacggaggcgagctcccacatgccgcgcagcctccaccgcggcagctccgcgggcgcctcgggctccgccaccagcggcgtcaccacgcggcatttcggcgtcgtctcctcctcctcccccgccgccgcccccgccggcggcctcgcccgctcctgccgcggcgggggcgggggagggggaggcaccttgggccggctgttgcacgcccgcgggagccgcgtcctcctcggtgtcagctccaccaccgcatcctccccctccccctcctccccccgtcgctgctgccgcccccgcggcggcgttgcggccgccatcgccgccgttgcggccgccat

SEQ ID NO: 77296 - DNA, 660 bp, Oryza sativa
  Clone ID: PAT_MRT4530_77208C.1
ctacgtgtcggtgccaccgatcgaggcagggcgacggtggtccagcggcagagaatggtgtctccatggggcggcgatggagcttgtctccataaaattagatgttgccccgtcccataaaaatttcagccttgttcgcatcgcggtggagagggctaaggtggaggcgcaaaggagagcagatggcacgagggagtcggcggcggcgtcgcggtatagaagggggcgcgtgggcgagcagtcccggtggcggcgcgaggggccggggatcaacagcgcgtgacaacgatctgcattgtgtgggggctttggcggtgtcaatgtgctggttggggcgtcggcgacatcgatatggaggcgggattcggtgacgattggcgtgagggtcaaggtggagagacgggaatcgccggtggcgtcgatgtgaaggcgtgatggggcatcaatggcatcgatctgaaggcgggagtcgacggcggctcgatggcgggacgtgggcggcgtcggcgcgattgcggcgcgtcggaatcgacggcggcatcggcggcggcgcttgcggagcggatggccggtggggacaagggaggaagctgtcgatggtcttgacagcccacaccaaaaaggcaccgatggtgcagtgcattttgaaatgcaagccat

SEQ ID NO: 77297 - DNA, 1747 bp, Oryza sativa
  Clone ID: PAT_MRT4530_77209C.1
ctcgtgctgaatactagccgcttcttggataggaggacaactagtagtagttcttctctcctctcgctcgctgttccttgccccattctcttggcttcttcttcttcttcttcttcttgttgtggttgtgtgttatgataagagttcttcgccgttgagatgggttgctttgggtgcttctcgccggaggtggacgacgacctcaagccatccaagcccaattaccactcttctgacgaatcatcaggcgccgacgcgaggagaaaggtcgcgccgttggcgacggatggggggaacggctacgcgcacagcttcaccttcaaggatctgtcagtggcgaccggctacttcaacgaggcgaatttcatcggagaaggtggctttgggaaggtgtacaaaggcaagatcaatgggcagatggtggcagtgaagcagctcacccgggacggcgtgcaggggaggaacgagttcttggtggaggtgctgatgctgaccgtgctcaaccatccgcatctcgtcagtttggtcggcttctgcgcgcagggtgacgagaggctgctggtgtacgagtacatgccattcggcagcttggagagccatctcttcgatgtgcctcttggcaagcagccactggactggaatacacgcatgaggatagctgttggagtggccgaagggctttcgtatttgcacaatgtggctgatccgcctataatttaccgtgacatgaaagcagctaacattctgttggatgaggactacagaccaaagctctctgatttcggactagcaaaagttggaccagtcggtgacagaactcatgtctccaccagggttatgggaacttatggctactgtgctcctgactatgtggtgagtggtaagcttaccatgaaatctgacatatacagttttggtgttctcctgttggaactgatcaccggcagaaggatctacgatgcttcaaggcctaaaccagagcagagtttactaacatggtcaagaccatttctgcatgacaagaggaaattctacaggctcgctgacccagctctgcacgggtgctatccaacatctgcactaaatcagttggttgtgatcagcatcatgtgcctccaagatcagccccacgtccgcccaatcatctctgatgtcgtaatcggcctgaaccatgtcgcaagccagccatatgtccctgagcgctcctcagtgtcgctgagttccccagcaaggtgcgggtcaccacaatatgccggcacgccatctagaaggcgaggcggcagaagagttgctcagtatgcatagcctagactatatccttgtctcaaaagaacagcaagatctcagtctggtgagacgggtagatagttgaaactgtcaaaaatgccatatagtcaaagccttcttgattcaagaaccggtctttagcaacccgattgacacagtttgctgtgagattggtgatagtttgaagctgaccatgatgactgttgttctttcatgcctttcattgttttcagttccttaattctgttgccagtgtacatagcatcatcggttgtgctctgcttgggcagcagccatcagacatgcatcagtccggcctggaagcatggggacaatgtacttaattgggattttgatcaagttatttaatcatgtacaaagctctcatgcctttgctgcatattactgccatcttggagctggaccaaatctgaaatgtctctgttaagagtactgccgc

SEQ ID NO: 77298 - DNA, 1320 bp, Oryza sativa
  Clone ID: PAT_MRT4530_7720C.1
atggcgcccccaatcgccgggaacgcccgcgtcttcctcggccgccctccattgccgccggccgccattcccgtcgccgttccgccctctcccgtgcccggctccctcccccatcctataaaatgcaaccccctccgtgcgttctctcgttttaaccccatcccgagcctccccgtgcgtcgccgccacctcctccacgccggcctgccctccgtttcgcgaggagacccccggaactacgttcccgccgtcgccctcctccttccttcgcgccggccacctccagccgccttcctctcctcgcccgagcgccgcccggccgcgccgtcttctccctcggcctcgcagctgccccctctccctcggtcagccctccgtttcgcgggtaaagcaccggagacgcgtcctcgccggcgtccagtggtgttgccgccacgatttcgcctccggccgcctctgccgcgtccccggagcgccggccgacgtcgccaccaccttcctcggctccacgacgccgctctcatccccggcatcacctcctcctcgcccgaacatcgccggaacaccgtcgcccgcgccggcctcaccttcctcctcgtcgacatctcctccggctgccccggtcgccgcgccagagcgtcggccgacgtcgccgtctcctccctcggcgacgccgcatcgccctccaccccggcctgccctcggtttcgccggaacgtcgccgcgaacctctccgtccgcctcgccggagttgttcggccgcccgtccctcctcgccgtgcaccggtcggccacacccccatcatcttcggcatcgcagctgcgacgtcgtcctcggcctcgcctcccctccgaccgaacaccgccggtgcccgtcgtcgtcttcaccgttccctctcgcccggctcgtcgtctcgcggcgccgcctccgtcatcgtcatcgcagcggcgtgttccacgtcatcctcgtccccgtgcagccgctgccggctgtcctcgtcgcctcctcgccggccccggtcgtcgccgtcgtcgtcctctcgtcgtttccgccccgtcctcgtctttgtcctcggctccgcgtcgtcaagcctcgtgccggccgcgtctcgccttcgtccaaggatcgccgccgaagccgtcccctcgccgttcgtctccgttgtgcccgtctgtctccgccgcgcccgttcgtcgttgtcgttcccacgcctcgtcgcgtggtggatccgccagcgaagcgaaggaagcagtgaagccagctgtgaagcaggagtgaagatcttggagaacccgtcgcagaacctaagccaccctcta

SEQ ID NO: 77299 - DNA, 2061 bp, Oryza sativa
  Clone ID: PAT_MRT4530_77210C.1
atgcgacacctcgccgtcgtcctcctcctcctcctcctcctcgccgccctcgccgcctcccaggaattcacctactccggcttccgcaacggcggcggcggcggcggcgccgggaacagcccgaacctgacgctgaacggcgtgacggagctccggccggacggcatcctgcggctcaccaacgagacgtcgcggctcatcggccacgcgttctacccgtcccccctccgcctcctcgccggcggcgcggcggtgtcgttctcgacggagttcgcgttcgcggtggtgccggagtatccgaagctgggcggccatggcctcgcgttcgtcgtcgcgcccgacccgcgcctccccggcgcgctgccgagccagtacctggggctgctcagcgccgccgacgtcggcaacgccaccaaccacgtcctcgcggtggagttcgacaccgtgcaggacttcgagttcggcgacatcaatgacaaccacgtcggcgtcgacctcaacagcctcgtctccaacgcctccgcctccgccgcgccggtcaacctcaagtccggcgacaccatcgtcgcctgggtcgactacgacggcggcgcgaagctactgaacgtctccatcgccgccgcgtcggcgtcgaagccggcgtcgccgctcatctcgttccacgtcgacctgtccccgatcttcctcgaccagatgttcgtcggcttctcggcgtccacgggcctcctcgcgagctcccactacctcatgggctggagcttcaagctcggcggcggcgccgcgccgccgctcgacgtcccctccctcccgtcgctgccccgccccgccgccggcggcaagaaccgcacgtcggcgatcctcgccgcggcgttctcggcgttcgtcgcgctcgtcgccctcgccggcgccgccgcctacgccgcccaccggtacaagaaccgcgacgtggtcgagccatgggagctcgactacgggccacaccgctacagctacgccgagctgcggcgcgccacgcgcgggttccgcgaccgcgagctcctcggcgccggcgggttcggcaaggtgtaccgcggtgtgctcccggggaagccgccgcgcacggtggtcgccgtgaagcgcgtctcccacgagtcccggcagggcctccgcgagttcgtcgccgagatcgcgtccatcgggaggctccgccaccgcaacctcgtccagctccaggggtggtgccgccgccgcggcgacctcctcctcgtctacgactacatgcccaacggctccctcgacaagcacctgttcggcgacggcctcgcggccgcgcggctgacgtggggcgcccgcgtgaaggtcctccgcgacgtggcggcggcgctgctctacctccacgaggggtgggagcgcgttgtgctccaccgcgacgtgaaggcgagcaacgtgctcctcgacggcgacatgtccgggcggctcggcgacttcgggctcgcgaagctgcacgagcacggcgcgaacccgagcacgacgagggtggtggggacgctgggttacctggcgccggagctgacgaggacggggaaggcgacggcggcggcggacgtgttcgcgttcggggcgctggcgctcgaggtggtggcggggcggcggccgatcgagccgcgggcgccgccggaggagctcgtgctggcggagtgggcgtgggagaggtacgccgccggcgaggtgggggcggtggtggacgcgaggctgcgcggggagttcgacgccggcgaggcggaggcggcggtgaaggtcgcgctctggtgctcgcacccggcgccggcggtgcggccgacgatgagggaggtggcgaggtacctcgacgccggcggcgcggcggaggtgccggagccgccgccgccgccgcctcccccgccggtgagctccggcgaggtcggctactacgacttcgtgcactcgtacccgacgtcgtcgtacgagagggcggcggcggcggcggacggcgtgacgcagacgtcggtggccacgttcccctactcgccgctgtcgatgaggtcatcccacgtcagcgtatga

SEQ ID NO: 77300 - DNA, 1974 bp, Oryza sativa
  Clone ID: PAT_MRT4530_77211C.1
atgaaccgcttcgccgacctcaccaacggcgagttccgcgccacctacctcggcaccacgcccgccggcagggggcgccgcgtcggggaggcgtaccgccacgacggcgtcgaggcgctgccggactccgtggactggagggacaagggcgccgtcgtcgcccccgtcaagaaccagggccagtgcggtagctgctgggcgttctcggcggtcgccgccgtggagggcatcaacaagatcgtcaccggcgagctggtgtcgctgtcggagcaggagctggtggagtgcgcgaggaacgggcagaacagcggctgcaacggtgggatcatggacgacgcgttcgccttcatcgcccggaacggcggcctcgacacggaggaggactacccgtacacggccatggacggcaagtgcaacctcgccaagaggagccgcaaggtggtgtccatcgacggcttcgaggacgtgcccgagaacgacgagctgtcgctccagaaggccgtggcgcaccagcccgtcagcgtcgccatcgacgccggcggccgcgagttccagctctacgactccggcgtgttcaccggccggtgcggcaccaacctggaccacggcgtggtggcggtggggtacggcacggacgccgccaccggcgccgcctactggacggtgcgcaactcgtgggggcccgactggggcgagaacggctacatccgcatggagcgcaacgtcaccgcgcgcaccggcaagtgcggcatcgccatgatggcgtcctacccgatcaagaaggggcccaacccgaagccgtcgccgccgtctccggcgccatcgccgccgcagcaatgcgaccggtacagcaagtgcccggcggggaccacctgctgctgcaactacgggatcaggaaccactgcatcgtgtggggatgctgccccgtcgagggcgccacctgctgcaaggatcactccacctgctgccccaaggagtatcccgtctgcaacgccaaggctcgcacttgctccaagtccgtctaccgaatggccgcggcggcgcggcccgtcgacgtcgtccgccacttcccgtgctcctcctcggtcgccgcctcctcctccttgctgctgtcgcgctccaagtccaggctcgcgtctcctgcggcggcggcggcgagctccatgcggcgaaggcttgtgctcggcgtgggcgccgccgccgccccggccgtggcggcgctcgcggcctcggcgacgcccgcggcgctgcgggactgcgccgccacgctgctcatcaccgcgggcgcgtactccctggtgcgcgccttcgacgggctcacggcgcggcggctcatcgaacagaacctgagcagaaaaattgtgcatgtgctctccggagtcctgttcatgtcttcctggccactattcagtaattcgacagaagcacggttcttcgcggcaattgtcccgttgctgaactgcataaggcttctgacctacgggctccgcctttccactgatgaagctctagtaaaatcggtgacccgtgaaggaaaaccagaggaattgctgagaggtcctctgtactatgtcattgtgctgctggtcagtgttttggtcttctggcgccagtctcctattgggattgtttcgttgtcgatgatgagtggtggtgatggctttgctgacattgttgggagaaggtatggctccgcgaagctgccattcaatgagaacaagagctggataggaagcatctcaatgttcatttctggcttccttctatctgcactgatgctgttctacttctcttgccttggttacttcactgtctgctgggatctggcacttggtaaactggctcttgttgcattagcagctactgtagtggagtgtattcctgtcaatgatgttgtggatgacaatatctccgttcctttggccaccatgttggcagcctatctgttatttggctacagttcatgttgttga

SEQ ID NO: 77301 - DNA, 2514 bp, Oryza sativa
  Clone ID: PAT_MRT4530_77212C.1
atggcaggcggtggcggcaagtccgtagcggcggcgctggccatggcctgcttcctcctcatcctcgccgccttcgctcccccggcggcggcggcgccgccggacatcatgtcgatcatcaggtacaacgcggagcacggggtgcgggggctggagcggacggaggccgaggcgcgcgccgcgtacgacctgtggttggcgcggcaccggcgcggcggcggcggcggctcgcgcaacgggttcatcggcgagcacgagcgccggttccgcgtgttctgggacaacctcaagttcgtcgacgcccacaacgcccgcgccgacgagcgcggcgggttccgcctcgggatgaaccgcttcgccgacctcaccaacggcgagttccgcgccacctacctcggcaccacgcccgccggcagggggcgccgcgtcggggaggcgtaccgccacgacggcgtcgaggcgctgccggactccgtggactggagggacaagggcgccgtcgtcgcccccgtcaagaaccagggccagtgcggtagctgctgggcgttctcggcggtcgccgccgtggagggcatcaacaagatcgtcaccggcgagctggtgtcgctgtcggagcaggagctggtggagtgcgcgaggaacgggcagaacagcggctgcaacggcgggatcatggacgacgcgttcgccttcatcgcccggaacggcggcctcgacacggaggaggactacccgtacacggccatggacggcaagtgcaacctcgccaagaggagccgcaaggtggtgtccatcgacggcttcgaggacgtgcccgagaacgacgagctgtcgctccagaaggccgtggcgcaccagcccgtcagcgtcgccatcgacgccggcggccgcgagttccagctctacgactccggcgtgttcaccggccggtgcggcaccaacctggaccacggcgtggtggcggtggggtacggcacggacgccgccaccggcgccgcctactggacggtgcgcaactcgtgggggcccgactggggcgagaacggctacatccgcatggagcgcaacgtcaccgcgcgcaccggcaagtgcggcatcgccatgatggcgtcctacccgatcaagaaggggcccaacccgaagccgtcgccgccgtctccggcgccatcgccgccgcagcaatgcgaccggtacagcaagtgcccggcggggaccacctgctgctgcaactacgggatcaggaaccactgcatcgtgtggggatgctgccccgtcgagggcgccacctgctgcaaggatcactccacctgctgccccaaggagtatcccgtctgcaacgccaaggctcgcacttgctccaagagcaagaacagcccgtacaacgtggaggcgctgatcaggactccggcggcgatggcacgaagtgttccggaacaacctgattcaatctctttttccgtctaccgaatggccgcggcggcgcggcccgtcgacgtcgtccgccacttcccgtgctcctcctcggtcgccgcctcctcctccttgctgctgtcgcgctccaagtccaggctcgcgtctcctgcggcggcggcggcgagctccatgcggcgaaggcttgtgctcggcgtgggcgccgccgccgccccggccgtggcggcgctcgcggcctcggcgacgcccgcggcgctgcgggactgcgccgccacgctgctcatcaccgcgggcgcgtactccctggtgcgcgccttcgacgggctcacggcgcggcggctcatcgaacagaacctgagcagaaaaattgtgcatgtgctctccggagtcctgttcatgtcttcctggccactattcagtaattcgacagaagcacggttcttcgcggcaattgtcccgttgctgaactgcataaggcttctgacctacgggctccgcctttccactgatgaagctctagtaaaatcggtgacccgtgaaggaaaaccagaggaattgctgagaggtcctctgtactatgtcattgtgctgctggtcagtgttttggtcttctggcgccagtctcctattgggattgtttcgttgtcgatgatgagtggtggtgatggctttgctgacattgttgggagaaggtatggctccgcgaagctgccattcaatgagaacaagagctggataggaagcatctcaatgttcatttctggcttccttctatctgcactgatgctgttctacttctcttgccttggttacttcactgtctgctgggatctggcacttggtaaactggctcttgttgcattagcagctactgtagtggagtgtattcctgtcaatgatgttgtggatgacaatatctccgttcctttggccaccatgttggcagcctatctgttatttggctacagttcatgttgttgagactataaaatttctcccttttgcttttcatgtcctgaatttggtactgccaaacatcatagattggatctctttctgttgaatcaaaaggtattttgctcc

SEQ ID NO: 77302 - DNA, 396 bp, Oryza sativa
  Clone ID: PAT_MRT4530_77213C.1
atggcgcctccctatgaaaccagcgccgccggctctgaatcgccggtgccggtggtaacggtggatgtggcggcggcgagcgaccttatcacctcggccggccaccgttacgtcgacgtcaggacagaggaggaaatgaacaagggccatctacacaactccctcaacgtgcccttcatgttcgtcacgccgcaaggcaaggagggaaaagaatcctctgtttgtggagcagttctcgtcgctggtgagcaaagaggagcatgtggttgtggggttcaagaacgtgaagaacatgggaggaggctacgcagcgtggctcgacaatggattccccataaacactcctcctcatacaatgtattaacgctttgcagcaccgatgagatgagcgagtga

SEQ ID NO: 77303 - DNA, 360 bp, Oryza sativa
  Clone ID: PAT_MRT4530_77214C.1
atggagctgacgacgacgctgccggatctagcagctcctcccatcccctcccctccctttcctctccctctcctagatctagccggagggaggggcagcggccgccgcggcggcgacggcaggcgggcagcggcggagctgacgacgacgacgctgccggatctggcggcttctcgcctccccttccctcccctccctctccttctcccagatctagccgaatggagggggtggtggcccccgcggcaccgatggcaggcgggcggcggtggagctgacgacgatgaccgcgaccgcggtgacggggccgatggtggcggtggctatgtcgcgggaggggacggggccgatggtggctag

SEQ ID NO: 77304 - DNA, 841 bp, Oryza sativa
  Clone ID: PAT_MRT4530_77215C.1
ccacgcgtccctcctctcttcttcttcttcttcttcttcttcttcttcttcttcttcttcttcttcttcttctaggctagcactgcacgtgcccaactaacacatacattcatcatatatacacctcctcctccttcttcctctaagttgtgtgtgcatatataatctactagtagagagcagggctaggctagcaattgcaatggcgcctccctatgaaaccagcgccgccggctctgaatcgccggtgccggtggtaacggtggatgtggcggcggcgagcgaccttatcacctcggccggccaccgttacgtcgacgtcaggacagaggaggaaatgaacaagggccatctacacaactccctcaacgtgcccttcatgttcgtcacgccgcaagggagggaaaagaatcctctgtttgtggagcagttctcgtcgctggtgagcaaagaggagcatgtggttgtggggtgccaaagcgggaagaggtcggagctagcatgcgttgatctccttgaagcagggttcaagaacgtgaagaacatgggaggaggctacgcagcgtggctcgacaatggattccccataaacactcctcctcatacaatgtattaacgctttgcagcaccgatgagatgagcgagtgataaacacggactctactgtatctactgtatctcattccaacccctcttctcatctgcctgctagccgctgcttcgtgtgccctgccatgtatatgtatgtgcgtcctgttttcctgtttgttactactggtattatggaggcagccaattgaataaaattgatcatcatgcatgcaatgcacgatgcgtctgc

SEQ ID NO: 77305 - DNA, 511 bp, Oryza sativa
  Clone ID: PAT_MRT4530_77216C.1
ctcaattatttatttctgtgactgttgcgcttgctccatcactttctgagccatcgttgatggtaatagtcccatagatggaatggtttggttggtggaattaatgatacatagttgctttagctcatctgactagagaatgtatggaaattaagatttgagaatagagaataggaatatagtttagtcgtttaaaatcatttcattcattcattgggactcaacatatactgatccatctgataattagatgttaacatttacgcatcagatggtgaaggctgctcttggtctggggttctctcttttttgggtaccattgttgttcgtaaatgagattgctagcaaatatgggtttttgcattcatttaaaaagtttatgaatactaaagaaaaatagttaaacttacagtttttcaaaaagataaattaattatgggacaatatgtgaagatcgatttctgaattgtttcctgctgctggtggatgaataataaaaaaaaaaaaaaaa

SEQ ID NO: 77306 - DNA, 288 bp, Oryza sativa
  Clone ID: PAT_MRT4530_77217C.1
atgggcggccggctgcggggatggctgcgggctgcgggcgggcgtcgagcgggcgaggagccaatgccgacggtgctcgatgaggttgcagcggtagagctcgaggatgctggccatggcggcctcccgctccccggtgcactccccggtctcctcgtcatccgcgtcaagctccttcaccgcgaacacatgttccgacgaggaggagctcgcctcgggcgcgggagacgaacacctcgtgcgcgtgcgcgtgcatcgcggcgtccatgtggggcggaagagccatga

SEQ ID NO: 77307 - DNA, 383 bp, Oryza sativa
  Clone ID: PAT_MRT4530_77218C.1
gcatagcctaggattaccattccatgatcaggaaaaaaagggtgagtgcatctaaaggataaacagcatcctacggccgcaacacagaagcgatgctacatccatatgaacccgacgaaaatgagacatgtgtatgaacactatctatagcacactacggacatgtatgcataacgacgatcaacaatccaccaacacacgatcacagaggtgggagacactactgaatgctatacatacactctaacatggctatatatgacccagacgtcttaaaagcaaccagactcctcagagggagaacgcttgaggctacagaacgacctagcctcacttgcgtggcagagaacggaacctcgatccccgcaaatgcatcatatgac

SEQ ID NO: 77308 - DNA, 223 bp, Oryza sativa
  Clone ID: PAT_MRT4530_77219C.1
aggagcggtgcgcgccgtgctcactgttgcgccaggagggttgggcgagatgagagcgacggagaggagagggacgggagcgatcggtgggacggggctccctgaccacgaggccgcaggcagaggtccgaagagcgccggagcagatctagggggtggggaaagtcatccccaacggtggccgtgtaggggtagccccccggaggccgagaggggaggatag

SEQ ID NO: 77309 - DNA, 2976 bp, Oryza sativa
  Clone ID: PAT_MRT4530_7721C.1
atggccgagcaaggaaaagcgcacgacctctctccgagtgtgagcggcgacgatggggagccgaatccacgccgtcgagctcgtactcccccacctcctccgcgccaaagccctaagcagggggaggcgcttgagagggtcgacaaatccgtggcatcaccagtcgcaggtgatgcaggagaacggcgagatggggagcgtcgcctcctcgtctacggcgacggcagcacgcctcagggtgcgcttcaggctgctggcgcgcttctacgacatccgcctgtcgtccatgacccggagtctccagcccaacggtggctggaagacgtggccaacttggtcatgacggcacagcagcgcctgggtgctggtggacggtccgccaccaccaagacctccggcgccgccaccaccggttccgtgtcatcgaggcggagggcgcggcgagcggcggcggctgcacgtcattcggctgccactccctcgtcggcaccttcgactcgggaggatcagcatggggagccggatgcccgcctcaacatcgagcgccggcgtaatagccggcgtactccccgcgcaatggagggcgcctcttcgtccagagtgtcacctcgacatggacgtgaggaccagccctccgtgcccccggctggtggtgttggctgtagagcctttgtggcgagtcttcggaatgtccgttggcccccaaggttccggcccaccatcaccgagaagtacgatgggagcgtcaaccccaccgagtttctccaggtctatacgaccgggatcgaggccgctgggggtgacgacagggtcatggcgaacttctttcccatggccctaaaaggacaggcgcggggttggctaatgaacctgccacccgcgtcggtccactcctgggaagatttgtgccaacagttcaccatgaacttccaaggcacatatccgcgcccaggcgaagaagcggacttgcatgcagtacagcgaggcgatgatgagtcgcttcgctcgtacattcagcggttttgccaagtccgcaataccataccatgcatccctgcacacgcgctgatctacgcgttcagggggggtgtgcggcacaaccgcatgctcgaaaagatcgcttccaaagagccccagactaccgcagagctttttcagctcgcggaccgagtggctcgcaaggaggaggcctggacctggaacccctccggttccggagtggcagcttcggccgcccccggatccgccgctcagacagggcggcgtgacaggaggaggaagaagagtctatacaagaagggggcccgaaggcctcggaagaagaaagaaaaagctattcaagattggcgggggcctgggggctcactccgacgcgcccgggtcaccagccttgtcgtcgctgtcgtccgcaccaccgtcgccgccctcctcgtcggagtcgagggcgaacgcgagccgaggggccataccctcgaagctgtggacgatgtggtcggcggcgtcccggacctgcgcgcgtgcgccgtcctcggttccggaagggaactcttccagcgctacccacggggagaagtcagggtccgagaggcccccaagccgaacggcggcccaaggcccccgacggccggagttggccctccgcctgcttgtccgacggtgtcaggcgcccccgaccctcaggatagcctcggggccactgcgggaaggccgcgcctgtcgccctcttaccccgaggatatcggcgcagaagccgagggcgccccgcgctgcctctcggatgaagagcgccctggagatacggcccctagcgaagaggatcggccccgccgaaaggtgcagcggcccgtctactttgttagtgaggccctccgggacgccaaaacccgataccctcgggcccagaagatgctatacgctattctgatggctccgagaaaagcgccattaccgtatctccaggcgaggcaaatcggctcgcccagattcgtgcgcctctcaggtgatgtggcagtcttgaagagaccgcccattattgacagacaaattaccattaccggtgtgcatggtttgagaccgttgggtttttgcccaactatggagaccggtcccacctgtcaccaggctttaggagtggcgtcacacctgaccgcttcccttgggaagggaaattgctctggcataacgccgggggctactgtcggtgatatgggaccgggagtatcatgactagaggcttgaggcagacacaatcgcccacgtggcctggcaccttcggggacgtcgggcccgagggtgaggtgtccgccctcctcctgatttcccccgaggggggggtcgggttgcgtttgccccggccccgagggccgaggcaccccgacccccttaaggaagtcggtcagatcacgggttaggtggcgacaggcggtcagacgcacgcttcgccccatcctgtcaagacgagagcttctaggcactcgtccccggctggagctagcgtgttacatcccaaagatgacacgttagccccgatcgatatatgccaggcttcatcctaaccattacaagcaagatgttgtttgaagaagggcaaacatacacgttgctaagtcaacgcgtggtggacaagaatgaccgatttgtgaccggtctgacactgctcatgtcgtcagcacactgccaccttcccacgacgtgcccgcctcaggcacgagtggaggtaggtgtgtcccgtcccgtcaggaggatgcttggaggacgaccgtgcaaatctccgtccatttatgaagagaagaaaagtccagtttggaaagggaagggtgcatgtggtatccccttgaagtataaaaggaggaccttgcccatagaaaaggaggatgatcttttccagattcagaacctagaacaagggagaggacacgacgagcacgacaccagctccgcgcgaactcagcgcgtgtcaagccttactgcacatga

SEQ ID NO: 77310 - DNA, 1710 bp, Oryza sativa
  Clone ID: PAT_MRT4530_77220C.1
ctccccgcgccgccccctccccccccccccaatcccgatacctcctccacccacgcgccccaatccctaaccctagatccctcctcccacgccctgctcgcgcacgaccaatctccctcttccttcctgttgtgtctctctcgcactgtccaatctcccaattcattatggaggcgggggcggggagcagcagcgccaagctggtggcggcgtgcgtcatcggcgggatcgtgctgggggcatccgtggtcgcgctccacctcgccggccccgtcgccattcccgccctgccgcccgtcgacgcgctccgccgccggttccgccgcggacgacggcgccccgtgcgcgtctacatggatggctgcttcgacatgatgcactacggccactgcaacgcgctgcgccaggcgcgcgccctcggggacgagctcatcgtcggcgttgtcagcgaccacgagatcaccgccaacaagggcccgccggtcacgcccctccacgagaggttgataatggtccgtgctgtaaaatgggtacacgatgttattccagatgcaccttacgccataactgaggatttcatgaataaattattcaatgagtataatatagattatatcatccatggcgatgatccttgtctgctcccagatggtactgatgcatatgctcttgccaaaaagggtccaggtccagattctcggatagtgtacatagatggtgcatttgatctattccatgctggacatgttgagatattgcgcctcgctcgagagcttggagatttcctgcttgtgggtattcacacagaccagactataagttcaccaagaggaccacatcgcccaatcatgaacctccatgagagaagtttgagtgttttggcttgccgttatgttgatgaagtgatcattggtgctccatgggatgtttcgaaagatatgattaccacatttaatatttcgttggttgttcatgggacaattgctgagaatatggactttatgaaggatgatttaaatccatatgctgttccaagggctatgggcatctaccgtagactggagagccctttagacatcactactagtactatcataaggaggatagttgctaaccatgaagcctaccagaaacggaacgagaagaaagaagccagtgagaagaagtactacgacagtaaaagctttgtcaatggagagtaacttaggaacaggtcttgcattaatgctattgcccagaagtttagttcacaaccttctggcacaaatgcagcggttagatgatccacaattttacagtcttgtggtaactattctcatgttgctgatatagctcaggaaacttcagatgcaaccctgatgatggtgctgacttgggtgatgctggagaccctattttcctgtatatggggctttgtggctgccaataccagctgtgttattttgagatgggtagttttttttttttgtttttttgttcaggattgttgtagagtatgaatgttaagcttgattaactattcctgatgctttatttcggagttgccaggtatatgtggcatcatcttatgagagtccttttctcatatattttggtacacttctgatatgatctggaactgagcaactgatatttgtgtgggtccgcgacagcaactgtgtctggaaaaaaaaaaaaaaaaaaaaaaaaaaaaaaaaaaaagcctcgtgc

SEQ ID NO: 77311 - DNA, 321 bp, Oryza sativa
  Clone ID: PAT_MRT4530_77221C.1
atggggtctttgaatgggcaagggaagtaccaggaatcctggactgttacgaggaacccatcccgcttcacccagaagctctcaaagagagcgagcagagcgtcaagaagaagacgaggtgaccaggtcggacagctgcggtcaacgcaaacaacgagtaaacgcaaggctgcaagcagaaagggtcaacgcgaacaacgagtaaacgcaaggctgcaagaagaaaggcgcaaggcggatcttgtctggtataaggcggacgagcgcctctattgctccctcactgcgccgccgccgtcgtcgtgtgaggaggatggatga

SEQ ID NO: 77312 - DNA, 174 bp, Oryza sativa
  Clone ID: PAT_MRT4530_77222C.1
atgccgttggttttcgtctcttatgatgcaattgtggttgattgttatgggttcagaaggaaggctgtcgaactgcccctgttcgacaggagggctgtcgaactgcccctgttcgacaggatatccgtcgaactggcgcagttcgacagggtcgcgttctccatttatttgtaa

SEQ ID NO: 77313 - DNA, 342 bp, Oryza sativa
  Clone ID: PAT_MRT4530_77223C.1
atgttggaggtcgtcgcaggcggctgcgtcctctgtcgtccacgcctcacgtcggaggtcgtcgccggcggccgcgaccttcgtcgtccacgccccatgtcagagctcatcaccggcgaccacgtccttcgctaccacgtgccaccccgggctcgtctcgccggcggccacgtcctccgttgtccatgcgccgtgccgcgccggagctcgtcgccggaggcttcatcctccactgtctatagccatgccacgccgggagctggtcaccagtggccacgccggagctcgtcgttggaggttgcatccgtggggaccaaaataagagcgagaagaagaacctag

SEQ ID NO: 77314 - DNA, 1569 bp, Oryza sativa
  Clone ID: PAT_MRT4530_77224C.1
atggccaggatgagcttgagaccgagaggccggcggccgcgggaggcctgcggcgacgaccgcctcagcgcactccccgacgacctgctcctcctcgtcctccgccgcctcgacacccgcgcggcgctcgccaccggcatgctctccaggcgctggacgaatctgccccacgagctcgacgccctcgatttcagggtcagcgacatactcccgccgcgctaccaccggtgcatcctccgccaccgcggcgtgatgaactggatagcgtaccggcacgccatccccaatagcctgatgcccgccatccggaggcacgagcggcgagccgcgcgcgccttggtccgctccgtcgagagcttcatcgacgccgacgacggccgacctagccggcggaaggtcagtaggctgaggctcgagttcttcggcacgcacaacaccgctggcatcaaccggttgatctccaaggccatagacgattggggcgtcgaggagctcgaggccgtcgggaagccaatgtactggcgccaacctcccacccacgaattccctagccatggcctctgcaaggatccccgcgcgtcacgcctgcgaaccctcacgctcggcggctgcgtgctcccgccgctgcacgagtacggcggcgtcaccaagctcgtcttgcacggcatggcggcctcgacgccggcggaagcctacgagggcgtcttcacctcgtgcccgcagctgcaagtgctgcacctcgaatcatgcttcctcgaccggaggaagtccttggtggtggacgctcccatatcggagatcagggagctcgtcgtcgatgcctgcgatatcatttcggtgaagctgcggtctcttccgagactccagaacctagcctccatgggcacccaggtgctgttcgaccgccgcacctcctcctcctccttcccctgcctccggcaatggcacctcgcctgcctttacggcttggcccgcaagttcagccgttggctcgaacccgacctgacgctcgacagattcttccactacaccctggacatcaccgacctgatcgtccggttcaccggaccggagagatggatcgtgccgtcgtcttgctcgccgtcgccgccgttgctgcgcagcttgaggcggctgctggtcgccgacgtgccttcctcctgggacgcgtcgtggcctcgcatcctcctcgacgcggcgccttcgctcaagacccttcacattcacatcgccccgcgcgacgcgaagaagcccaccggcggcgagttctcatggcatcatcccaccgttcctctgcacaactatcgcttggaggagttcgccatggctggctttggagggacagtgagtcaggtatactttgtgaagctcgtcgtcggagcgtgcaccgcgctgcgccatgtctccattttcaagggaggggatctgaagtacaagggaaattgggactgggagatgccgaggttgcaggagaattcgtggaatgacaaggagaaagaaaccatggagaagcagatcatggatgcggtctcttgctcaacggatcatctccaaatagttctaggttga

SEQ ID NO: 77315 - DNA, 150 bp, Oryza sativa
  Clone ID: PAT_MRT4530_77225C.1
cccacacgatacgcatctgatgaatgagctgaaggagatgttcaatataaaggacctcacacagagatggaaggtggctttcactgatcatgagggtgacactaatgcaagttctagatgctcctaggctgggattatgccagatgggca

SEQ ID NO: 77316 - DNA, 173 bp, Oryza sativa
  Clone ID: PAT_MRT4530_77226C.1
atatataataagatcccccgcgttattattgcggtacatttatattattctccatacatcgttaaagaaaatactgccttaataaccgattaagcagagagagtggggccgcccttttaggggggcggttcctggaagttgccggcggggttgttgttacaggtgatgaagac

SEQ ID NO: 77317 - DNA, 387 bp, Oryza sativa
  Clone ID: PAT_MRT4530_77227C.1
atgacggtggtccggcaagctggtgcgcgcgtgcagcgacaaccgctgagcggctcctgctttgccggctgggggggcgcacccgagggcggcgcaaagccgtgccacgacggcgacgccaagccgacgcttcccgtcttcggcaaaggacggtggaggggtgctctaggacagcgcgtgcagggaacccaacacgactgcgaggaggtgaaggtgcggcggtgccgcttcccggaaagcttcggtgagctcaggggcttcaagtccggcaaggtttccactcaaagcagtcgctgcctccaccgccgagagacacctaacctaaccccaagagattctatccccctgatctattccgcgtctgacaccccaatttccaaggtttag

SEQ ID NO: 77318 - DNA, 303 bp, Oryza sativa
  Clone ID: PAT_MRT4530_77228C.1
atgtggttccacatgtcagcctcctcctctctatcccctctctccctctcccttacgctgaaggagaaggacgagcggcggcgggcggtggacgttgctcctggccgcgggcgctaccgacgacatgggcgtggtggcgtcggggcggtggcagatggcggcggcggtggagacgtgcgacggcgccgctcagggagtgcgacgtggacgaccgaggaggaggtggaggagatggcgttgatgggggcggccgccgccgccgccgccggggagacgctgatgcggcggccgacgaactggtag

SEQ ID NO: 77319 - DNA, 893 bp, Oryza sativa
  Clone ID: PAT_MRT4530_77229C.1
cgaatttcggttaattttaaattgtattcctacttgaactcttcttttttttttgttgctaattttggattttatttttatttttactagcaatagtgcccgtgtgttgcaacgggaaaaacaccgtttgatggtgtgacaccttgaaaactttcggcccaagccttcccaagccggcccaaacttgggcttgcccatctttggcgagttgagtcaattcgacggcccacaagctgagcagctaagcgcgacctacatatgcggggacggtccgatgcacttccgcggcccattgggcgtagcataatcaatggcggcgacggcccgacgctgggcgaatctaagccgtccgatctaatggacggctccaatcgtccccgcgccgaatgaagcaccgaccggggagaggggcaaaaccctagctcccaaatccctctcatgatcccatttctctccggcgacgagcgagtggaatgacggtggtccggcaagctggtgcgcgcgtgcagcgacgaccgccgagcggctcctgcttcgccggctgggggacgcaaaaccgtgccacgacgtcggcggtccggctaggtgggcgtgcaaacggcgacgagcaccgagcagcctggacctcgtcgacgggaacccgacacgactgcgaggaggtgaaggtgcggcggtgccgcttcctggaaagctccggtgagctctggggcttcaaatccgaattgcggcaccgcgtcaatgctgcggcctgggtgtgcggcaacgtggtggagggcgggaccatgtcggtcccgtggcatccatgcgggggtgcagtggtgcaccgcgcgttgtgcggaagcggccgcggcagcgcgaccaacggtgccggaggcgtggggcgggccatatga

SEQ ID NO: 77320 - DNA, 233 bp, Oryza sativa
  unsure (1)..(233): unsure at all n locations
  Clone ID: PAT_MRT4530_7722C.1
gcgtgaactgatggaactcgccagattgagaatacgaagtagatcatattaatttactaatatgatggtggactccatcccaagttctntggtaccctattagtttggaaaattggaaaggaaagggggaaagataatggacgctgcttgattcacatagccctgagctggaatcagaattttttgcccatatggcatcgcattnggttcccaaattcaaccatcttccaagc

SEQ ID NO: 77321 - DNA, 844 bp, Oryza sativa
  Clone ID: PAT_MRT4530_77230C.1
tggcctgcggaagcagaagtatcaggtccccttggaatatattttttaacgtttattgatacaagtttgttgattttcacttttagtttaaactagcaatagcgcctgcgcgttgcaacgggaaaaacaccgtttgatagtgtgacaccttgaaaactttcggcctaggtcttcccaagccggcccaaacttgggctggcccatcttcggcgagttgagtcaattcgacggtccgcaagctaagcagctgagtgcagccgacatatgcgggggcggtccgatgcacttccgcggcccattggcgtagcgtaatcaatggcgacgacggcccgacgctaggcgaatctgagccgtccaatctaatggacggctccaatcgtccctgcgccgaatgaagtgccaaccggggagaggggcaaaaccctagctcccaaatccctctctcttgatcccatttctctccggcgacgagcgagcggaacgacgatggtccggcaagctggtgcgcgcgtgcagcgacgaccgctgagcggctcctgcttcgccggctagggggtgcatccgagggcggtgcaaagccatgccacgacgtcggcggtccgactaggtgggcgtgcaaatggggacgagcgctgagtgacctagacctcgtcggcggtagggacgacgccaagccgacgcttcccgtcttcggcaaaggacggtggaggggtgctccaggacagcacgcgcgcagggaacccgacacgactgcgaggaggtgaaggtgcggcggtgccgcttcccggaaagctctggggtgagctcaggggcttcaagtccggtaagtaacccgaacccttag

SEQ ID NO: 77322 - DNA, 837 bp, Oryza sativa
  Clone ID: PAT_MRT4530_77231C.1
ccggctagctctacaagatggtgggttagctgatctaggttcgaagactcactccttatatttatttgatatttagtcatttgtaatactagcaatagtgcccgtgcgttgcaacgggaaaaacaccgtttgatagtgtgacaccttgaaaactttcggcctaggtcttcccaagccggcccaaacttgggctggcgcatcttcggcgagttgagtcaattcgacggcccgcaagctgagcagctgagctcggccgacatatacggggacggtccgatgcacttccgcggcccattgggcgcagcgtaatcaacggcggtgacggcctgacgctggtcgaatctgagtcgtccgatctaatggatggctccaatcatcctcccgccggatgaagcgccgaccggggagaggggcaaaaccctagctcccaaatccctctctcttgatcccatttctctccggcgacgagcgagcggaatgacggtggtccggcaagctggtgcgcgcgtgcagcgacaaccgctgagcggctcctgctttgccggctgggggggcgcacccgagggcggcgcaaagccgtgccacgacgtcggcggtccggctaggtgggcgtgcaaacggtgacgagcgccgagcggcctggacctcgtcggcggtagggcgacgccaagccgacgcttcccgtcttcggcaaaggacggtggaggggtgctctaggacagcgcgtgcagggaacccaacacgactgcgaggaggtgaaggtgcggcggtgccgcttcccggaaagcttcggtgagctcaggggcttcaagtccggtaagtaacccgaacccttag

SEQ ID NO: 77323 - DNA, 281 bp, Oryza sativa
  Clone ID: PAT_MRT4530_77232C.1
ggggggaaaattccctgtttttattggggaaaaaaaaggaaatctatgtaaaaaaaatggttttttaaaaggaaaactggcaaaaatttttataaaagggccctaaacctgatgcttaagggggaaaaatttaagggttaaaatttttataaaagggaaaaggggaggggaaaagggattggtactggattttttatgggggtgcatttaaaagggatgttttgggattgatttaaaggactgggttaaaattgaaaaatgggccaaggaggggttttttt

SEQ ID NO: 77324 - DNA, 996 bp, Oryza sativa
  Clone ID: PAT_MRT4530_77233C.1
atgaaaattttttataattagtattttcattgttgttagatgataaaacatgattaatactttatgcatgacttgtctttttaatttttttcataactagcaatagtgcccgtgcgttgcaacgggaaaaacaccgtttgataatgtgacactttgaaaacttttggcctaggtcttcccaagccggtccaaacttgggctggcccatctttagcgagttgagtcaattcaacggcccgcaagctgagcagctaagtgcggcccacatatgcgggggcggtccgatgcacttccgcggcccattgggcgcagcgtaatcaacggcagcgacggcccgtcgctgggcgaatctgagccgtccgatctaatggacggctccaatcgtccccgcgccggatgaagcgccgactggggagaggggcaaaaccctagctcccaaatccctctctcctgatcccatttccctccggcgacgagcgagcggaacgacggctgtccggcaagttggtgcgcgcgtgcagtgacgaccgccgagcggctcctgcttcgctggctgggggagcgcacccgagggcggcgcaaaaccgtgccacgatgtcggcggtccggctaggtgggcgtgcaaacggcgacgagcgccaagtggcttggacctcgtcggcggtaggagcgacgccaagccgacgcttcccgtcttcggcaaaggatggtggacgggtgctctaggacagtgcgcgtgcagggaacccggcacgactgcgaggaggtgaaggtgcggtggtgccgcttcctgaaaagctccggtgagctcaggggcttcaaatccggtaagtaacccgaacccttaggaagagatagggattttttcaaataagacggacggtccacgttagacacgaaatttttaagtagtagagatagagaagagatagagattttttcaaataagacggacggtcaaacgttggacacggaaaactagagtttgtctttttt

SEQ ID NO: 77325 - DNA, 576 bp, Oryza sativa
  Clone ID: PAT_MRT4530_77234C.1
atgttcagcattaatatgctggagggaattacatgcaagtttgagaatctgagggaagccagcctgaacatagattttggccaactctcaagtgttctatcaatagattctttactgaagtttgctccgcatattgagcaccttgaaattcagactcttgatacagaattggataaagaaaagattgatgaagactccctaaattcagagataagcagtgacttgtttgcaagcctcaaacatgtgtccctgactggtgccaagcaccgcgaaaatcaaatgtgctttatgaagtttttactgtccaaagcaggctctcttcaaacatttgctgtcacttttatgtttgatgatgatggaaagagcgaatggtttgaaaataaatgcaaagagttaatcgagtgccaaaaggcttcaccccaacttttgttgacagcaaaagtgacacaagacggatcatgccagggtgctattttagatcagcttacggggcacctcaaggttcagattcttatgtatgaatcaaaaggcttcgttcaaatgatttgtgcacggttggcaccaatgtatatttga

SEQ ID NO: 77326 - DNA, 292 bp, Oryza sativa
  Clone ID: PAT_MRT4530_77235C.1
aagcttcgactgttgaagataagaagaaggttattgctgaagttgaagctaccgtcagttctttggttggtgctgctaaggctaatgctgatgtatatgctaaggctatggctcgtatcgttgaaaagggtaccgaatacgttgctactgaagttgccagattggaaaagattttggctggtggttcagtttctggtgatagagctgattccatgaagattagaatgaacgttttgaagaccttcaattaagtcaactagataaaacaaaaaatttcaaaaaaaaaaagctt

SEQ ID NO: 77327 - DNA, 328 bp, Oryza sativa
  Clone ID: PAT_MRT4530_77236C.1
taatgataatatatatataatataatgatgataatgatgatgatgatgatgatgatgatatgatgatgaactgttgcagctgatggatttgctgattggctggcaaagcagctgggcaatgatttggctgcgagaaaaggaaggagtttgcaactgtgggattacatgctggtgaagtatattagcatggagtttgctatacatggaataggatacctgttatatctatgtatttccaaggattattgtgttgaggctctgcgacaatattatcagatgaataccagtagccctgtgctcgtttgttaacgtaaaaaaaaaaaaaaaa

SEQ ID NO: 77328 - DNA, 1890 bp, Oryza sativa
  Clone ID: PAT_MRT4530_77237C.1
atggcggcacaaatggcggcggtggcggtgaacgggggctctccgggggctgtcaccgcgtgcggcggcggcgggaggggtcggcgtcgccgtgggcctcgggggcggcggggcgcagtcgctgtacgtgggcgacctggaggcgtcggtcacggactcgcagctgtacgagctcttcagccaggcggggcagctgcaagagcactggagctgctcaactttgctcctctgaatggcaaacccattcgggtaatgtactcaaaccgtgacccaagcagtcgcagaagtggatctgctaacattttcatcaagaaccttgacaaagcaatagaccacaaaactctccatgataccttttctgcatttggtaacattctctcctgtaaggttgccacagatgaaatgggccaatccaaaggctttggttttgttcagtatgacaagggagaggctgcccaatctgcaataaaaagtctaaatgggatgctgatcaatgataagcctgtttatgttggaccttttctccgcaagcaagagagagagaattctgttgacaagacaaagtttaacaatgtttttgtgaaaaatttgtctgagtccaccacaaaggaggatctagtcaaaatttttggtgcctatgggaacatcacaagtgctgttatcatggttggcatggatggtaaatcaaggtgctttggtttcatcaattttaagagcccagatgatgctgctcgtgctgttgaggaacttaatggaaagaaaattaatgacaaagaatggtatgttggaagagctcagaagaagtcagaaagagagattgaattgaagagaagatttgagcaaagcatgaaagatgctgctgacaaatatcaaggactgaacttatacatgaagaatttggatgatagcattggggatgaccagctttgtgaattgttctctaactatggcaaaattacttcatgcaagataatgcgtgatgcaaatggtgttagcaaagggtctggatttgttgcattttcaactcttccttttatacagttaactgaaatgaatggcaaaatgatatctggaaagccattgtatgtcgcatttgcacaacgtaaagaagacaggaaggcgatgttgcaggcacaattttctcaggtgcgccctgtaccgatgacaccttccatggctccacgtcttcccatgtaccctcctatggctcctcttgggcagcaactcttctacggacaagctccacctgctatcatgcccccacagcctggatttggtttccagcaacagcttgttccaggcatgaggcctgggggtgcccatatgccaaattactttgttccagttgtccaacaaggtcaacagggtccacgtccaggtatccggcgttctggtgctggttctgcccagggacagcaatctgctcagccatttcagcaacagatgcttccaagaggacgtgtgtaccgttacccacctgcgcataacatgcctgatgttccaccaatgccgggggttgctggtggtatgattcaatcgtatgatatgggaggcttcccagtacgagatgctggtttgtcacctgctccaattggaacgctgacttctgcccttgcaaatgctaatccagaacagcaaagaacgatacttggtgaaagcctgtatccactggttgagcttctggaacagaaccatgcggccaaggtcaccggaatgcttctggagatggatcagacggaggtcctgcatctgctcgagtctccagaggctctgaagtccaaggttgctgaggcgatggatgtcctccgcaatgtggcccagcagcacaatgcgaacaccccgaccagtcaacttgctgcgctgtcactgggcgacgccattatctcctaa

SEQ ID NO: 77329 - DNA, 2694 bp, Oryza sativa
  Clone ID: PAT_MRT4530_77238C.1
acactatataagagatatgcggtggcatgcgcagcgcgcgcgtgcgttggaactcttgagagggggcgcccgtttgttttctttttgttgggcccaaggaaaaaggttaactttttttttttttttttaacagcaatcgttaacatccaaccatttctctcaccaatcattaacagcaaaaattgtgatcaagcataagaggtatgtgacggatggtccggataatactcaaacttggaaacaagtacctggccttaatggcaaggataccaggccgagaagtataacgcctaacatccaacccgggaactcgaaccactcaagtcaaaccatacgagggaaaaagtgccatgttgccgataacctcatgcaagatcacacacaactgcaagctaaaaagatagctacgactgtaaattaggagataatggcgtcgcccagtgacagcgcagcaagttgactggtcggggtgttcgcattgtgctgctgggccacattgcggaggacatccatcgcctcagcaaccttggacttcagagcctctggagactcgagcagatgcaggacctccgtctgatccatctccagaagcattccggtgaccttggccgcatggttctgttccagaagctcaaccagtggatacaggctttcaccaagtatcgttctttgctgttctggattagcatttgcaagggcagaagtcagcgttccaattggagcaggtgacaaaccagcatctcgtactgggaagcctcccatatcatacgattgaatcataccaccagcaacccccggcattggtggaacatcaggcatgttatgcgcaggtgggtaacggtacacacgtcctcttggaagcatctgttgctgaaatggctgagcagattgctgtccctgggcagaaccagcaccagaacgccggatacctggacgtggaccctgttgaccttgttggacaactggaacaaagtaatttggcatatgggcacccccaggcctcatgcctggaacaagctgttgctggaaaccaaatccaggctgtgggggcatgatagcaggtggagcttgtccgtagaagagttgctgcccaagaggagccataggagggtacatgggaagacgtggagccatggaaggtgtcatcggtacagggcgcacctgagaaaattgtgcctgcaacatcgccttcctgtcttctttacgttgtgcaaatgcgacatacaatggctttccagatatcattttgccattcatttcagttaaagcttgagatgcttcctcacgagttgaaaatgcaacaaatccagaccctttgctaacaccatttgcatcacgcattatcttgcatgaagtaattttgccatagttagagaacaattcacaaagctggtcatccccaatgctatcatccaaattcttcatgtataagttcagtccttgatatttgtcagcagcatctttcatgctttgctcaaatcttctcttcaattcaatctctctttctgacttcttctgagctcttccaacataccattctttgtcattaattttctttccattaagttcctcaacagcacgagcagcatcatctgggctcttaaaattgatgaaaccaaagcaccttgatttaccatccatgccaaccatgataacagcacttgtgatgttcccataggcaccaaaaattttgactagatcctcctttgtggtggactcagacaaatttttcacaaaaacattgttaaactttgtcttgtcaacagaattctctctctcttgcttgcggagaaaaggtccaacataaacaggcttatcattgatcagcatcccatttagactttttattgcagattgggcagcctctcccttgtcatactgaacaaaaccaaagcctttggattggcccatttcatctgtggcaaccttacaggagagaatgttaccaaatgcagaaaaggtatcatggagagttttgtggtctattgctttgtcaaggttcttgatgaaaatgttagcagatccacttctgcgactgcttgggtcacggtttgagtacattacccgaatgggtttgccattcagaggagcaaagttgagcagctccagtgctcttgcagcatccacggggttgttgaagttgacgtaggcgtagccgagcgagcggcgcgagctgatgtccctgcagacgcgcaccgacatcacctgccccgcctggctgaagagctcgtacagctgcgagtccgtgaccgacgcctccaggtcgcccacgtacagcgactgcgccccgccgcccccgaggcccacggcgacgccgacccctcccgccgccgccgccgcggtgacagcccccggagagcccccgttcaccgccaccgccgccatttgcgccgccatcgcccaccgatccctcgacctcgctccctcacccttctctctttttcaatttttttccgcgaaacaaaaaaaaaaatctgctctaaaccctagctgatggattggtatatagctcggcacgggcagatctcgcggagttttgggggaaattttttttctcttttttcttttggtgtgatactagaaattttttttttttgggagtagtttttggttgcgggatacaagaggccgtaggcggagagcacgcggcggaggcgagactctctccccgccgacgccccgccgcccgagacg

SEQ ID NO: 77330 - DNA, 583 bp, Oryza sativa
  Clone ID: PAT_MRT4530_77239C.1
ccacgacgcccccctcgcctcatcgagccagggggccccccgacccatgaggagcggcggcgacgtcaagtccttccggcagcgtcaagcccaccggcggcgtgccggcgtctccaagaaggcgcccgcgtcgcaggcgacgacagatcgcgccgtcgaggaggcggaggatgaggggcgagagaggatggctcgggagttcgacatggacatgcggtaaggtgctcggggccctgcctcggcctcccccgccccgccgcgcccgcccgcgccccgccgcccgccggcgtcgccggctgccccggcggcccgccatgcccctgcgggggccgcctctggcccctgcctcgccctcccccgcccccccgcccgccgccccgcctccccgcccgccgtctgcgccttcggccccgccgccccgcctcgcctcccggcggccccgcctcgtggtgcttgatgatcgtgtgttcttatctgaaatttatgatgttattcttctcccagttggtatgatctatggcattttgatttgattactacaaactctaaaatcatggtaaattaatccaaactatattccctt

SEQ ID NO: 77331 - DNA, 2412 bp, Oryza sativa
  Clone ID: PAT_MRT4530_7723C.1
cttaaaggtgccaccgttttctccaagatcgatcttcgatcagggtatcaccagttgaggattaaagaggaagatataacgaagacggctttcaccactcggtatgggttgtttgaatgtactgttatgtcttttggacttaccaatgaccctgctttcttcatgaacttgatcaataaggtgtttatggaatacctggacaagttcgtggtggtctttattgatgacatccttatctactcccgaaccaaggaagagcatgaagaacatcttcgtcttgcactagagaagttacgagaacatccactgtatgccaagtttagcaaatgtgaatttcggacgtctgaagtaaagttccttggacacgtcatctcagccggaggagttgccgttgatcctagtaatgtggaatacgtaaccaactggaaacaaccgaagacagtatcagagattcgtagtttcctgggtcttgcaggctattaccggaggttcatagagagtttttccaagatttctaagcccatgacacgcctgcttcagaaagacgtgaagtacaagtggtcagaagaatgtgagcagagttttcaagagttgaaaggtcggttaatatcagcacccattctgattttgcctgatccaaagaagggtttccaagtgtattgcgatgcatctaagcttgggttaggttgcgttttgatgcaggatgggaaggtggttgcctatgcatctcgtcagttacgtccccatgagaagaattaccctactcatgatcttgagttagtcacagtggttcatgcgttgaagatttggcgtcactacctctttggtactcgtacggaggtgtacacggatcacaagagtttgaagtatatcttcacccagccggatctgaacatgaggcagcggagatggttggaactgattaaggattacgacatgggacttcattatcacccagggaaggctaatgttgtagcagatgctctcagcaagaaaggctattgcagtgctacggaaggacgacagttgccgtgggagttatgcaaggaatttgaaagactaaacttgggaattgtcagtagaggtttcgttgcagctttaggagcaaagcccactctggttgatcaagttagagaagttcaaatcaatgatcctgatattcgagaaatcaagaagaatatgagaagaggaaaagctatcggttatttggaagatgagcaaggaaccgtatggttgggcgagagaatttgtgtcccagacaataatgagttgaaagatgcaatcctgaaagaagctcatgacactttatactccattcaccatggtagtaccaagatgtaccaagatctcaaggagaaattttggtgggcgagtatgaagcgtgagatagcagagtatgtagctgtttgtgatgtttgtcagcgagtcaaggcagaacatcagaaacccgcaggtttgctgcaacctttgaagataccagaatggaagtgggaggaaattgggatggatttcatcattgggctacccagaacgtcatcgggccatgactctacttgggtgatagtcgacagacttaccaaagtggctcatttcatccctgtgaggacaacatattccggaagccatttggcggaactgtatatggcaaggattgtgtgtttgcatggtcttcctaagaaaatagtatccgatcgaggtagccagtttacttcaaagttttggaagaagctgcaggaagagatgggttctaagctgaacttcagtaccgcatatcatctgcaaacagacggacaaactgaaagggtaaatcagattttggatgacatgttgagagcttgtgctttagacttcggtggaagttgggataagaatttgccttacgcagaattctcgtacaacaacagagaacgtcaggtttttgggactgatattctaagggaaatagaagagaaggtaaaaatcattcaagaaagattacgcatagcccagtctcgtcataagagctatgctgatagtcaccgcagggatctaagttttgaggaaggagatcatgtgtaccttcgtgtcacgcctcttcggggagttcatcgttttcacaccaaagggaaattggcaccgcgtttcgtgggaccttataagattgtcagtagaagaggtgaggtcgcctatcagttggagttacctcaatccttggcaggtgttcataatgtgttccatgtgtcacagttgaaaaagtgtttaagggtacccactgaagaagctaatcctgagcagatagaaattcaagaggatctgacttatgttgagaaaccaatccgtatcttggagacagatgagggaagaaccaggaatcgagttatccgtttctgcaaggtccaatggagtaatcagtcggaagaagaagctacttag

SEQ ID NO: 77332 - DNA, 560 bp, Oryza sativa
  Clone ID: PAT_MRT4530_77240C.1
ctcggcagatccttccagaaggtatggtagtactcatgccaaagtccctaacctcacatcttggcaatcatggagaaatcagaagcaatgagtgctgtgcaacaacataaagcttttgctatctgcagttgcaatttgcaaacgagcacttccatatgccgactgtctcacctcatctccagatgccttgtcctcaatttgcatgggactcgtaccacgtaatggtgggaaagttggttttccttttttgttcagacctcacctcaattggtggtagcttttgatgatccgtttcagctggttttggctacgttggtatttgtcttgtttcttacgctagggcactcgaactgtagcattggcagtgagttttttcccttgtttcttttaaattggattagctatctctgtattgcttaagagaaacatacggctggctttttctctagttaaattaagagtatatttgttctaatgttcgggaaaaaattcaattcccatcgacgatgggataccctctcgtgtacctttacctttcaaatttgatgcaaatagttgtg

SEQ ID NO: 77333 - DNA, 1999 bp, Oryza sativa
  Clone ID: PAT_MRT4530_77241C.1
ccccgctcctgccttcttccgcctcgcttgcattgttccgccgccccccctgcctcggctcctgctcctcctcgggccgaggtcggctcatctgtccctgcgccagctgcccctgcgcctctccgccacccgcctccctcgaccgtcattccaccagatcctccctgcagctccaaagtaccgacccatccggctttgcttgccactcaccagcatgacacctccatctattaactccctccccccatggatcagcagctgcacctgcaggggactagtactgctacaactgttccattgcaaggtgaccctgcttctgatcaccacccacatctctcaatcgacataccaccagctgcagcaagcatgtcacctgcaccgacacaagctgctgcagatatcacacccacaccgaccacttcgattttgagcaccaaagcgagcacacctgcaggttcatgttccagcagaagcaccagcgttgccccaaagccgcaacgatcgtcatccttcatgctgaggcagactgtcaagagcctcttgccagtgggaagcttcaagtcgtcagtcaagttcttcaacgccagaatttcgaggacatcgtcgctcccggtgaccgatgtctcgcaggaacaagccgataaaacttcgactactcatgctgttgataaagcaggtcacatgtaccggtcacagtcgcttcccatgaacatgaagaaattgaataatggaaagagcttcaagagaatgaattcactcggcggtgtctaccgcgtagttccttcgacaccatcagtccccgtgacaagcagcaatgtcatcccagatatagtcccatctgaaccaggtgatgaagatggagaggacatagcagaggaagaggcagtatgcaggatctgcatggttgagctgtcagaagggagtgacactctgaagctggagtgttcatgcaagggcgagctcgctctagctcacaagcactgcgccatgaagtggttcaccatgaaaggtaccaggacatgcgaggtctgcaaggaagatgttcagaacctccctgtcacccttgttcgtgttcagagcatgcagcagcctgagcttcagaccaaccctgccaacgcatcaagatacgatcgcctcaggatgtggcagggagcgccaatccttgtgatcgtcagcatcctcgcctacttctgcttcttggaacagctgctggttgcccgtgatggtattgcagcgctggcaatatcgctgcccttctcatgtatccttggcctcttctcatccctcaccacaacaagcatggtggcaaggagatacgtgtggatctatgcgacaattcagtttctgttcgtcgtcttcttcacccatctcttctacagatatctccatttgcaagcggtgatatcaatcatcctggccacgtttgccgggttcggcgtagggatgaccggcaactccatcatcgtggagattatacggtggagggcggcgagggcggcggcggcgccgccggctcaaacccgtcatcgtcgtcgtcgtcatggtcgcaggcaacaacagccaccacctgcacaaccagctgcttcttcagctgccgtcgccgacgttgagaacccacctgtataatactcatcgatcgttacctgaaaggaaggttggaggccttgcaaactgtataaatttatttcaaactaggaagttaagttaataagtaggcatggagttgatttttttgctcaggatcgatgcatggatgcatgtcaattttatactatattttttcagttctttttattttttttggagcttgtgtgaaagaatcagtcttagtatagtatactagtataaaatgtgtcctggtgtacaaagtatgtcagacatgtatatctgcttgaaatcttgtattagtataaaactcttgagatgctctgctcttggcttggtgaaattgtaaaccatgcatcctccagaaaataaaaaaaaaaaaaaaaaaaaaaaa

SEQ ID NO: 77334 - DNA, 416 bp, Oryza sativa
  Clone ID: PAT_MRT4530_77242C.1
aaacccaatcaatccctttttttttaaaaaaaatagatggggggtgtccctgtttccgccgacaaaaataccgccgatttgctagctaaaaggccctgcgtgggaataatcaaataaatggcccccctttccccgtaagttgggatgggggggggacctaagggggagggccatgctttttagcttccttttttttgggaagcccggggggggggaggcccacccttccggggggaatgggggggggaattttcttttttaccctgggggaccgggcattttcggggtccttttttgccttgggctttttgggcatggggtatgctccggggggaacgggccccaacttggaaagctgctccatgggcttggggggcttttcctccttggggggggcccccccggcccccccccgg

SEQ ID NO: 77335 - DNA, 131 bp, Oryza sativa
  Clone ID: PAT_MRT4530_77243C.1
cacgaggctatcaggggcgctgatcacaagccacggaccgagatggtagaacagcttcagtagcagacgtgacatgcgcaagtctgtttatgagccgtatcacacacctgcccacttctccacacgcccag

SEQ ID NO: 77336 - DNA, 282 bp, Oryza sativa
  Clone ID: PAT_MRT4530_77244C.1
atgacggttgtgacggttggaatggtcggtaataccatccaaccgtcattggggcttcatctcaaccgtccagccaaaacctggatccaacggaggcgagggaggttcggccgaacctggggccggcccaatccagcccaatttcggctggtggcctcctccgttgcttcacttcgtagacttgtgaattttggcctaattcatcgtgtcaattctacgttcttggcccattcattcataagtctgactctcgacatcgtccgattgatttatcgtctatgt

SEQ ID NO: 77337 - DNA, 359 bp, Oryza sativa
  Clone ID: PAT_MRT4530_77245C.1
ccaccgaaggaatctcgttgggaaggacaaattaatcatttctccaagccagagtccatttgcataaaaaaaaaaaaaataatgggtatacttactgaccagtaacggagggttcggttaatatcggaccaaagggtaaagcaaatcaaaaagctatagctagcagggtttttgggagggaaaccaggtcatgacatggagcggccccttgataagctccaccgccgcctccagcaccagggtaacccacaggcagaacgggcaaatgcacaaaatcggcaccccgatgatccaaatgatggccccgacaatggaaacaaggacggggagcagcgcaaaaggcaaacccagaagccacc

SEQ ID NO: 77338 - DNA, 1201 bp, Oryza sativa
  Clone ID: PAT_MRT4530_77246C.1
gatcaaaggtcatacaacccagcttttaaattgagagcaaaaaatagcatggaacctcctgaaaaataaagatgacatcataggagagcaaactcttaaattgcttgactaaaaagattactagaccattctgaaaagaaaaataaggatcatctaagagtgtatttgtcatcttaggtgcctttataatatgcaaggcagcacaatataaaactaatataaccaactgaaaccttcaagatgccaacaacagctccttgatattgtatccctgaagaactgttagcaataatattactccagagttccacatagcatgtataataataggagtgagaagattgcgagtttgagcatatgagaatcccagtacaataccaagcacaaatagctgtggaaattcgcctggtgtaagatgagcaaaggcaaacactgaagcagtgataagcacagaaattggagtagaaaaccacatggtcaaggacaccattagaaatcctcgaaacacagtttcttccagaatcggcgcaagaaccccagtgatgcccagtaaacaggcagtgctaatattagacgagccaattagtggcaataaaaggaccaacgagtcggtctctcgctctggagtttcaccacccagaaaggacattgcagctccagctaaagcaatagagattattgcggcaaagaaaccgatcccagcccatagtagccaaccattttcaagcttaaacggctctttcaaatcataacgaaatatatcatttgagaacggccggtaggtattggtgatgccaaatataactccaagcacagctgcagtcacgctactgtatgcacaggccaccatggtgagtgaaatggttggccattcccatggcacatcccaccggcgaagcacggaccaatcgtccaaaatttccttattgtcaggaggaagctggggcgactcgttgctgtcatcgaaggagcaagagcaggcgaagcctccatcgccccttctccggccagtctccggcaaccgtagcaccagctgctccaccgctgcctctcccacccgacggcgaccggttcttggcgagagaagctggcgcagcctcctccgcttggatacgacgcggagcggccacatccccccgccgccgcgaggcgtcgggcggaggcggaagagcagagagggtggcgccgacggcgaagccat

SEQ ID NO: 77339 - DNA, 652 bp, Oryza sativa
  Clone ID: PAT_MRT4530_77247C.1
acattaaaaacagtatgtacttaaaaaaaaaggtatatactgctactgacttaaaacacagtatgtactaataaataaaaaaagtatatataaatatagttgtcagctctcttcgggcacagaggaccgtcttgtccggcattcgacaggcgaccagctctactcagctagctcagcttaccgggctttcttcctaggctagcactcctttacttgcgccgatctgctatggcaggctaaaggccctgtcaagtgcaatctatttctctggcttgtgttccagcagcgttgttagacaactgatctactgaaaaagcgcggcatcgacagccactcggtttgtcctttttgcgcccaggagcttgaaacgatgaaccatatcctcctctactgtgtgttcgcacgctaggtctagcatcatatcatgtccccctcttattggctaggtctcgctccttctcgtggctactctctccaagactagtggctgtctggtaggacctgcctgcgtgagcatcttcgtaggggttttgactctctagttctcttggtttcctgacagctgtggaaagagcagaactccaggattttcagctcctctctcttaccagtttcggtggttttagagttcatcgttcaggagggccatctc

SEQ ID NO: 77340 - DNA, 724 bp, Oryza sativa
  Clone ID: PAT_MRT4530_77248C.1
ctacgcgaggaggctatcgccgagggatgcctccatggccaaggtctcgagcacaggaacgtctgagttgatgacggggacaatgttgtcatccttctccttcatcagctccacatccagctgcagatcaatcaacgccccaatttgccgcttcctgttcgatcgttcactcggcacgacctcattggcggccagtaggacgtaggtgctaatttgcttgggtacatcacagatgtggggcgggctgccacagcccgtcccacttacaacccgtaaggtgagggtggagcgccgcgcctgcgtggcaaaggccgccgccgtcggccgcgcgcgctaccccaacgtcacccacctctgcgcctactaccacgagaccgacgagaagcttctcccctactatcgtcttcgacgacaagctctggcttcggcctcgcctgtctcgtcgccaacgctcacaagacgacgcagtcgaagaagctcagcagagtggcgcgctcgctgcgtagcgagggcgaggctctatcggtggctcggcgctggcgtacatcgcattggagtggccgtggtgactcagaagggtaacgtgttcgcgctcgggatcatgctgctggaggcggtgaccgtggcgcgggttgacgaggagaggggcagtgctgagagctggaggtgtaggcacaacacgtcttcaaggaggagcggctgtcgtcggaggtcgtcgacctga

SEQ ID NO: 77341 - DNA, 1921 bp, Oryza sativa
  Clone ID: PAT_MRT4530_77249C.1
gcacgagcccccccctctttttttttttttttttttttttttttttttttttttttttttttttttttttgtgaagttcactttcatttccggcagcatactatgtacagaactgtttaagaaatacgaggatatgtacaattcacaactagctctaacaccaaaattcttaatcctatgaaaaccacccactgtaaaaaaggaaaagaaaaaggtcaacaagcccggttaacatgttaattaagtttctgttcctctatctgagtaaacaaaaagctatccctaacatttattggaaaatctcagcaatatcctttttgtcgccaaacttcttggcaattatgggtcggacatcatccgcagaagcaagggtctccaggaacggaatcagctgaggtaatgcctcatcagagtcgtcgctaaaccaactctctatgggtataccattattcacttgcaactggaaaacctgcggagtgttgtcaattatgacaactttagcaaggtcaactccaacaactgtcagatccttcgtgtagctagtgtttgtaaatacacatgactcccggaaataacgcctagagaacagttttttctctggatccaagatgtcaagcagctgatctgcataaacactttggctggctgtgaatataacaacctcaaacatctcagccattttttggaggaacatgtggagatgtggtctcttcctcacataaaccatatgctccttcatatcaaagaacactggaaaggtaaagtcatagtcatcacactgctctgtggtcgaatgaacaagggtttcgtccaaatcaagtacaagagtgaccttcctggccccttgctcctttgatacagcatgtgagttcagctcagtaaaatcaacgagattaggcaaatcctcctcagccagatgtggattgagccactctaacacctctgagttactaaatagcatatccccctcagatctgcatggctcattaccaatactggcttctgtagtgctctcagtaagtgggaatactccacatcggccacttatattcaccaatgaatcaattggtacaacttcatcatataatgcagtaaaactacccagaaactcagagggcgtatccaataggaaagagaaagcatcatcaggattataaatgtccaacagactgcaaccctcattcgagccccagctttcttcatgacaattaacggtacagctattatatgatgcagaatttgcatcttcatctttgtcaaaataatttactacatttaactgagatctgatgtcttcataattaactaacatatcattctccatatttggtgaaactgccacctcagatattaaatccttgagcaaagatgctcctccaagagcatcatccaaactagcagcttccatgatcataatgtcctggccagctaactgagttgtcaaatccagctcatcgtggggatctttataaggcaagttcaacacagctgactgctctagttcgctgacttgaaaatgtgagatcttcatagattttgtgggtttggaatcaaactcatccctaaaaacatcatcgtcaaagttcctcttcatcctcagtgctggcatcttgagcagcgttgtgcttgaaactataaaaccctctggagtgagtcagctcgagcgaattcaaccccgagtcgcgcccccaccctccaaacctccctcgtcgaccgtccgcgcgcgcgcgaccaccaccggagaggaggctaccgcgcgaggtcgccgacgagagacacagagagagaagaggagcacctcgccgcccgcgcctcccgcccttctcgccggccgcgcgctcgggggggaaggcgacgcggagtcgcctcgcctccgggggctcgcgcagcacaacgcagacggagaaggggggagagagag

SEQ ID NO: 77342 - DNA, 2165 bp, Oryza sativa
  unsure (1)..(2165): unsure at all n locations
  Clone ID: PAT_MRT4530_7724C.1
atggcgggcgacaagacggcggcgccccctccgccagacgcggccgccttctcccccgacggcgagctcttcgctgccgtctccgatcggcgagtccaggtatggcgtacaggaggaggagaaataatagaaggatggactgatccaatttcagccccagatgattcatacagttgtattgcatgttgctctgttcagaaaaagcataaaaaggatggaaaccttattcttgttgctgttggtactacaaatggtcaagttttagttctcgattctactggtgtcatatggaagaatgctcctcatacttgcaaggttgtttctcttcattttgcaagacatgggcgtgttctttatactgctggcatggatggaattatatgtgaattgaattctcgcaccggggaatccaaagacactattaaagctacgaagaaaccaattaattcttttacactttctcatgatgagaagtttatgggtgtatcaagtaagataacaagattatttagtgtgagtgagaaaaaagagatcttgaggattccttctgatgttggtcctgtccagctgatgtctgtatcagatgatggacgttttttggtttctcatgttgacaataataaggaagtgcaagtgtggtcttgcgatcagaatagttgtaccatcgtttctacagcctcccttacaatgcaaaatcagccaaagatagtagagtgtacaaggagcacatcatatggagatgggggcattgttctcgcagtatcgaagaaaggtgttgctcatgtctggcatttacagaccctctcccaaaatgaagtactgcccacaaaaatctcagtcaaaaattcactcgataaaaaaggccgtatcccaataatttcagctaaattatgtgacaccaatgaagacaatactgttaaggttcatgttgtatttggatcaccaaactttttacagttcaaggttgtagaattggatgatacttgcaaggacatcaacttggttgcagagtatgatgaactagctaaacaagatatggtgtctccgcaggaaaggaatttggagcaagaagctaaagcaaatagcaaggatgcagaacctgttcaaggaaaagcaaagaaaaggacatcatccgttttggattccactaatgacacaaccaaggaagtgaatccagagtacaatcttgatgaaccgaccatggaggaaaaacttgcaagtctgaatttgctaaacaagtctgaaattactgaagagcaaccaccctctttagcgccaccaagtgcagattcagtccatgttttgctgaagcaagctttgcgtgctgatgatcacactgaattgctaaaatgcttgtacaatagagatgaaaaggtcattgtaaagtcagtatcactcctaacaccggcagacgtcgttaagcttctcaagttctttgtattgctaatacaatccaggggtgcaaaactggtttgtatgctcccatggcttcaggctttactttgtcggcacatgagcagcatagtgtctcaggaatcttctctactgttgctaaactcactctatcagcttattgatgcaagaacatcaaccttcaagtcagcacttcaactttcaactaccctagactatcttttcagcggggtttctgacggtgaaactgatgaggaggacgctgttccaccgataatatacgaggacaaggacacagacgatgaagaatctgaagttgatgctatggaaactgacgaggagagccaagagctgggagacgttactgatgcctctgagcattcagatgggagtgatatcatgaccgactgatttacttgcgctcttctttaatttagttcatgatcagcctgacaaggtaggagctcgcgaagttggacaaatcatggttgctcctgttgtagtgctgtgcctggaattagttgttgctctncactttggtngaagctccgattcgctcccaatatgattgccttagtgttaggatcagatcttgatgtnagtcnagccagcttgtntcnataagcataacatataactttaaccccctcgtccaattttgttctgggcgantgcataactgcatattactgcaagctgtttcactttgttttctatgaagattaacgtctcaattgaaaaaaaaaaaaaaa

SEQ ID NO: 77343 - DNA, 271 bp, Oryza sativa
  Clone ID: PAT_MRT4530_77250C.1
ggatacggcagcctccaagcacaagacgaagaggcccaaaaaagtggaccacgcagatgacgaggcagcacaccggggaacccaccgccaaagaccaaagagagccaccgaaaacaagcaaaaaggcgagcggccgagaagggagcaacggcacataaggcaaccagggcggaagaggcaacacagcggccgtgggcagcggggaggcgtcgcggggcggacacagaaaggggagggagtagttggcatgaatgggagagtgggcatctaa

SEQ ID NO: 77344 - DNA, 540 bp, Oryza sativa
  Clone ID: PAT_MRT4530_77251C.1
atggactccccagcaacccccgtgggcttatctccgccacttctcagtctggtgctccgcaatgaaccatgctatacaaaagggaaaagggaattattgtgtcagcggctagggttcgcggtgaaccgggtgcacggcggcggctcacgaaaactaacgaccgagatctttccattcaaaacgaatggccgagatcgaccggtccacggccggaccacgggagacgacgacgatgacgtcagcggtgacgtcaccaccggcggcggctcgggcgtgcatgctcgacagcgcgaacggagagcacctacgggtagcggacggcacggcgaactcaccggtgaccaaagcggcggcggaagatcaacggacggcgacagcgatgaggaagaagcggcggcaaccttcagcttgacgacgacggcggtgctccggcggtctacagcagcgatggaggggcggacgaggacggcgacgcgacggcgaccacgacggtgactttcccgagcgacgacaaacaatttatatatttaggatttttag

SEQ ID NO: 77345 - DNA, 1860 bp, Oryza sativa
  Clone ID: PAT_MRT4530_77252C.1
atgggatggacaacagtggcacagttggaagttcaaaccgtttcccaccaactgcggttaggaaaaagggttcaaaagttagctaacctcgccttccacagaacaaaccagggttgcgcggacgcgaacaccaccagaccagaccacctcctcctcgagcttcccctcctccccctctttccaaatttccccaatctcgcgtcgcttcttccccgaattccccaacctcgcatcccgattcctcccgcggatcgtgcggcgacctcgcccaaaatcccccgccggattggcctcgccgatggcttaattggcgatttcgactctgcaatggaggcgcagtggctcgccgagtacccgcaccagggcgccgacaagcggccgcggaagcggccccgcctcgcctgggatgtcgcgcccccgctgttccagccccccaaggcaattcctatgctatattgcgggcaggaactaatcaatggaaattttgcgaccgcttttctgccaccgccaccaatctattatacaggaccaccacgcaatctttcgcctccctggaggccagatgacaaggatggacactatgttttcgcagttggggagaaccttacaccaagatatagaatacttagcaagatgggtgaagggacttttggacaagtcttagagtgctgggacttggaacaccaagagacagtggctatcaaaattgtgcgctcccttcagaaatatcgagaggctgctatgattgaaattgatgtgcttcagaggcttgggaagcatgattttactggtagccgctgtgtgcaaatacggaattggtttgactatcgtaatcatatatgtatagtatttgagaggctcggaccaagcttatatgacttcctccgaaagaatagttatcgtgcatttccgatcgaccttgttcgggaatttgccagacaaatattagagtctgttgcatttatgcatgacctgcgacttattcacacagatctgaaacctgagaacattctccttgtttcatcagaatctatccgggtgcctgattataaggttacaatacggcccccaaaggatggttccttttttaagaatcttccaaaatctagtgctatcaagctgattgattttggaagtacaacattcgaacaccaagaccacaattatgtggtatcaacaaggcattatcgtgcccctgaagttatccttggtcttgggtggaattattcatgtgatttgtggagtgtgggatgcattttagttgaactctgctcgggtgaagctctctttcaaacacatgaaaatttggagcatttggctatgatggagagagttctaggtccccttccaaaacatatgattgtcagagctgatcgccgtgctgaaaagtatttcagacgtggattaaggttggactggccagagggggctgcctcacgggaaagcctgaaggcagtctggaaattgcctcgtctgcagaatctggtaatgcaacatgttgatcattctgctggagatcttatagatcttcttcaaggccttcttcggtatgatcctgatgcgcgcctaaaggcacgtgaagctcttcaacacccgttctttacaagatgccacagaagatgtggttactgagactatactgagattaaaatgctcaatgctgtatttcttcattttgatgtgtaagaaccacccaaaaaaaaagtgaagatgttccacaaaaatgaaatgtgctaactcgcattctgttcgatgatgtgcaaggtaactgttgtatatagacagagttctacgactgccgatttatttgaactgggagatatttttcaattcttaaaaaaaaaaaaaaaaaaaaaaaaa

SEQ ID NO: 77346 - DNA, 513 bp, Oryza sativa
  Clone ID: PAT_MRT4530_77253C.1
aactcttcaaattcttctcctgtaaaaacggactctccgattttaattgaattatgacgcaataatgaattatttttgaaaaggaaaaggtaattattgcgtcagcggttagggttcgcggtgaaccgggtgcacggcggcggctcacgaaaacgaacgaccgagatctttccatccaaaacgaatggccgagatcgaccggtccacggccggcccacgggagacgatgacgatgacgtcagcggtgacgtcaccaccggcggcggctcgggcgtgcatgctcgccggcgaacgacggcacgacagcgcgaacggagagcacctacgggtagcggacggcacggcaaactcaccggtgaccaaagcggcggcggaagatcaacggacggcgacagcgatgaggaagaagcggcggcacccttcggcttgatgatgacggcggtgctccggcggtctacagcagtgatggaggggcggacgaggatggcgacgcgacggcgaccacgacggtga

SEQ ID NO: 77347 - DNA, 428 bp, Oryza sativa
  unsure (1)..(428): unsure at all n locations
  Clone ID: PAT_MRT4530_77254C.1
aaggccaaaggggccctttttcattctccaacagatctttggacggggggaaacaaacaacatttcccccctagtccctgccaggccgggggggccgggccattctggaggttctgggccttttgccgggggccctcccggggggcgggggccccaagggggggttttttggggccctacccccttatttcgggggggccccccccccctcaaccctgggggggaacttccccttttcgggttggggccccccgcccacgggttcctttggttggggcntcggtccctttggtttcccgcctcccccggggggcttctccttggcccccttggggaattggcccgctgggggtccggccccccctccgttttggggcccgggggtttcatttttccccggggggggggcccccggggggaaaagcctc

SEQ ID NO: 77348 - DNA, 675 bp, Oryza sativa
  Clone ID: PAT_MRT4530_77255C.1
atgtgggattctgtggtcaaggtgttagcaatggttcatgcagatgagcgtaatcctagtcgagccggtggtttggtgcacaaaatggagagcttttcctttgtgttaaatatgaagttgatgttgaaagtatttcgtattacaaatgagttgtctcttttgctacaaagaaaggatcaaaatatagttcaggccatgcagttgcttgttgatgtgaaagcgcgcttggtcgccttgagaaaccaagctcttgattctattatcacggaaatggatcatcgcttcaatgaggtatcatctgagttgcttgtttgcttctcttgtcttgatccaagagagtccttctctaagtttgatgttgataagatcgcacggttgacggagatgtatgaccaagacttctctcttcttgatcgttctaatataaaggatcaacttgagacatttattttacacgtgcgacgtgttgatgatttcactacttgtcatgatcttggtagtttggctatgaagatggttgagacacagaagcatattgtttttccattggtctatcgtcttatcgagttagcattgcttctacctgtggcaacggcatccgttgaaagagccttctcggctatgaatataatcaagacagatttgcgcaataggatttttgtttttaacttatag

SEQ ID NO: 77349 - DNA, 165 bp, Oryza sativa
  Clone ID: PAT_MRT4530_77256C.1
atgtcccttgtacatgatcatctcacttctggtgctctctctggttctcgccaacaaccattcgtgttccagtattctgaaatttatattaatattgccagtagctatggacaagatgaatggtgcccggagcgagaagatcaatcagtcgctgcagaagtatga

SEQ ID NO: 77350 - DNA, 319 bp, Oryza sativa
  Clone ID: PAT_MRT4530_77257C.1
gctcctggttggttggtggtggtggtgcgctcttctgggtggggttacttttaaaaattgctgtggatcaagcaaatcaccttcctcgagatctgctggacattgtcgatcaacttggaggcagtggcacgttctccctcacttagttatgatccagagaactacaaatgcggacaacttgactggacaacatgtatccctcctaggggcctaccatgacatttacattccaaactggattcacgcgcactttactgaaggtcaccacaagcatatggatcccttgtattgctgttatgagccaaacagctccttatgc

SEQ ID NO: 77351 - DNA, 2475 bp, Oryza sativa
  Clone ID: PAT_MRT4530_77258C.1
atggccctcgccttcctgctgggattcctcctcggcctcctggctctggcggcgctcgaggccgccgcgctcctctggctcgtccgccgcctccgccgccgggactctgccccgcagcccgcgccggacgccgacgagctccccggcgaacgccccttcccgtacgagaagcaggtcaggctgcttccactcacggctaaaaggtatcctattaaactggaaagcaaggaatatcaaatttataatggaagcaaggtatgctatctttatgctgaaacttcctgggagaaggaatcatggtgtaaagcacttcgtcttgcagctactgctgacaaggagaaaaagaattggcatgccaagctgagcgaggagttcaataattacatatcatcattaaattctgaatacccaggtttcctaaagcctacagtattttctagtgaggaccatgaggttatggacagggcaataaagactgatgggtcttccaagcgaacgttatcaagcatgaggaccccaccttatgttggtgacatcacacttgctgacttcagccttggaaagcttccaccttatgtacacgcgatgagagtccttccactggatttgaatgagttatgggcttttgaagttgattttgaatattctagtggaatactactgcacattgaaacaagactcgaggttcaggaaccagagttacagaaggacataatgaaaagtaactttggtacagactcaaatggagaggttgaatcagatcttcttgagagtattgaacaatacgcggatgcatcgcatgagccgaggaagactcccttggctccagctggtgaagcatcgtctccttccagtcctgacacaatcgacgagctgaggaagccattgctgatcacagaaaagattcaggaagaggattctgaaagcaaagtggagtctccctcgcccctgtacacatctctgagggggatagtgcctgcaggggagcaatctggagacgagtcgaagcgaaaaggcggcaggcgagctcggatgatggacttcgggaagaagatgggagacaagctggaggagaagaggcggcacatcgaagagaaggggcggaatatcgtagagaagatgcgcgagaatgccaggaccaacagcttcgataggtacatgcgcatgttggcctggttctgccgcgacactcagtacaggtcattcgaggagtacaggaaccaccctttgcttcatgagctctgggttcccgatgctatcaccgagaatggcgcggagttcgtcgtcgtccctgcaggcattctccagaaccctgcatttgcacagcaggcagcattagcaccagcccacaaatctactgtatctatctgtatggatgatgccgggataggtgttgtcgagctcgtgctgacggcggcggcgctcctcccgcaccttggcgaggcggcgctccctcgccgtggtgccggacgccgcggcggcattgtcggacctccctgtggccgtaaggcgccgtcgccgtcgggaagcacattggttggcccggccgtactgattgataaccaggctggcggcgggcgcagtcgcgatggccgagcgcggcagcagagcggtggcgggctgtgggcggagcggacggcgggcgagcccggcggcggagcggaggctacgggcggagcagccgcgcgccgtggccgccgtcgtcgtcgccatgggcgaggctacacggcgcggccgttcggcggcatcggccaggcgtcgcagtggccgtgcataggtggctcgaagagcgtgtccacgctcggcgtgccatcggcgtcgtggacggtggtcggcgcgggcgcggtgaccctcgtcgtcttcgccgacgtcgcgtggaggagcgcggatgcggggggtgcagcggaaggcgagcgcggcggaggagcggcggcgggcgagcgcagcggtgggcaaagcagcggagggcgagctagcgaagcggaagacagtggatgggacgaggagcttccccgtgctcggccgccaccaccgccgtgcccccgcgggtggccgacgatgctaggagaggcaccaccggcgggagaaggggaagaggcagaggaagcgattgtttcttggttgtcggctgcctccccctccctcctaaactcgctggccaccgcgctcgctcgccgccgctccaccgccgcgctcgcgctccgctactctgtccgcggcctgcttgcgctccactgctcggcccaccgccgcgctcgcgccttccgctgctctgttgccgcgctcgccctccgctgcgccgcctgcatccgtgctcgccactccgcctgctgcctccgctccgccgccgcgctccgctgcctccgctccgccaccggacggccgcgccgcatagcctcgcccacggcgacgacgacggtggagagccgacgacggcggcggccacggcgcgcggctgctccgcccgcagcctga

SEQ ID NO: 77352 - DNA, 807 bp, Oryza sativa
  Clone ID: PAT_MRT4530_77259C.1
atgacgacggcggtgacggcggggcggtttggagcggcgcgacgacacgggcgacaggcgcgggctggcgcggcagagggtgacggcggcggcgaccaggcggcgcggcagggcagcggggccgggcggcgcagacgcgacgcgggcgaggaccacgcgggcgcgcgcgcgaacgacgcgcggggagcggcagcgaaggggcggaaaggagggctcggctcggcgccacgacagaacgggcgctacaatgagcaaaggcggctgcgccgtcgctggtccatcaccagcttctcgctgtccacgctgaccaactcgctcatcgtcggcgtgcccatggcgcgcgccatgtacggcgagtgggcacagcagctcgtcgttgccatcgtctggttcacgctgctgctgttcgtgctcgaggtcaggaaggccgccatcggaatcgctggcgccgccacatccacggtcatcgtcgtcaccgcggcgagcggcgccggcaagccgtcgctgtggggcgctggtgaaattggtggcgccgctccctcctctcccgccggcggtcatcggggagaagggcggcagacggcggccatcggggacaagggcgacgaccggtccttcacatcatcttcgacaagagacggaggcagcgatgacgatcttctggaggcggcgatagcgggtgcggcgctggtggcggcggagctggtgctgccggcttcgggagctgcaggacctctggcaatgatggcgaacgatgctcaggagctctgtgacaacgatgacggaggcaacaatgggctgcggtaa

SEQ ID NO: 77353 - DNA, 582 bp, Oryza sativa
  Clone ID: PAT_MRT4530_7725C.1
atggagcccgagagcgccgcgccagtttccttcccctccggccaccctctcccccttccaaccctatataaaccctccccgcacctcatccgttcgtttccgcctcttgccgcccttcctcccgactggaatcgagctcgcgccgtcgctctctctctccgccgtcgccgccgagctccggtccgccgccgtcgtcgccccggaccacctcccacctcggcgccgcctccttcggcttcgccgcatcctcgccgaccttgtccacccctccgttttgctcgtcgaccgccggagcgccgccgtccccgtcgacccgagccgcgccgccgccttcctccgctccggccaccttttcgtcgtcgctgtcgacctagggtgagccgtggaccgccgcctcgtttccccctttccctcccttctctcggccgccgctccgccgtgcctatggccgctgccggcgaccataggggcgcgggcgcgccgcctcccgccggccgcgcagcagtggccgccttcgggcgcaccgagcggctgccgcgtggggcccggctgtcagccacccgcgccctcgggtgcggctga

SEQ ID NO: 77354 - DNA, 261 bp, Oryza sativa
  Clone ID: PAT_MRT4530_77260C.1
aagcttctcaacggatcatctgttcaacacgacgacaatgactacaaaatcctactgttttgattcattcatagatagaaagatcttgttcgacgaatatttgtaaggcatttaacaatcatggcaaaacactaaagagttgatttgtgctgtcaatgcacacatttggttagtcagccactaacatttgtctatatattgcctcattgggagaggttgttaagaattgagaatcatactatttctattacatcatgtgca

SEQ ID NO: 77355 - DNA, 729 bp, Oryza sativa
  unsure (1)..(729): unsure at all n locations
  Clone ID: PAT_MRT4530_77261C.1
ctggaattccacatcaaaaattaaatcatgcatgcataccgtccaggaaagttagctatacatctgaaccaggaataaagactggcaccaaacgatctccaaagttttacaaacgagctagctagctattggctttggctattgctatggctgctgctagtcattgacctatcgaagctgttggtcctggcattctcgcgcatcttctctacgatattccgccccttctcttcgatgtgccgcctcttctcctccagcttgtctcccatcttcttcccgaagtccatcatccgagctcgcctgccgccttttcgcttcgactcgtctccagattgctcccctgcaggcactatccccctcagagatgtgtacaggggcgagggagactccactttgctttcagaatcctcttcctgaatcttttctgtgatcagcaatggcttcctcagctcgtcgattgtgtcaggactggaaggagacgatgcttcaccagctggagccaagggagtcttcctcggctcatgcgatgcatccgctgccgccacaggcacttgggttggctcatcaatggatgctgctgttttaagtgtttcctcacttcttgctgacgaattgggcaaacttggcgccacagttttgntactagcatcatccttcagaataacttcgtcaggccgggttggcgtaacggctgcagcgtggcttctggtctcagtgggctcacgattg

SEQ ID NO: 77356 - DNA, 305 bp, Oryza sativa
  Clone ID: PAT_MRT4530_77262C.1
ctctgggggatacaaccctaccccgcccccaatccgcgcctccgtctctccgcctctcttcttcgataggcggatcatgacgcaggcggatcaggcggtgatcagcctgcgcccgggcggcggagcatttgcacctgcgcagcacggaaataaggactactggaaaggcttgcacgcactagccagcatctatgaaggtcctgaccatgatgctatgtctgcaccctaagaagctcgagtcaagcgcctttagacgcaccgccttaggatggtctggcggtcaatgatgtagtggcagacataca

SEQ ID NO: 77357 - DNA, 645 bp, Oryza sativa
  unsure (1)..(645): unsure at all n locations
  Clone ID: PAT_MRT4530_77263C.1
ccacgcgtccggaattggcatgccaagctgagcgaggagttcaataattacatatcatcattaaattctgaatacccaggtttcctaaagcctacagtattttctagtgaggaccatgaggttatggacagggcaataaagactgatgggtcttccaaggtccgtctctttctcaaaaagctggcaaagaaggcatctacaaaggttccgttagagggtaagacaagttccggatcatctacacaaggagaaagaaagatattggataaattacgcagctatcagggcacaccgtttattgaaggattaatgggttcacaagatgacaagtccaatagcagttcatcacaagatacagtgaaacccagtccaacgtctcctgctctgggtcaaattggacaaccttcagctttccctgatgtaaatgccgatgatagaatagcagatgaaggtacactttgttggaaccttttatcttcacggttgttttttgatgctaaaatgagcgatgagatacacaaggccatcaaagcacgcattcagcgaacgttatcaagcatgaggaccccaccttatgttggtgacatcacacttgctgacttcagccttggaaagcttncaccttatgtacacgcgatgagagtc

SEQ ID NO: 77358 - DNA, 453 bp, Oryza sativa
  Clone ID: PAT_MRT4530_77264C.1
atggaggctggtggaggccgcgcggtgtcttggcgatggccggtgacaccagctgctggcatcgacggcgggcgcagttgcgactccaacagtggcggcgacaccgatggtgggcgcgacagttggtggttgccatatgcaccaacgggtggcatatccggggatccggcctcccccatcgtcgcggcggtggatccggccaccctcgtcgtcgtggcggcggatccgacctcccccgtcgtggcggtgacggctccggcctcccccgtcgatgtggctgcggattcggccacccccgtcgtcgcagcgacggatccaaccacccccatcgatgtggtggctggatccgaccccgagcctgcggtggagaggcgacggcagcccccggcggcagtggaggacggagagggagaaggagagaacgcgagtgagaaggagagaaggagagactga

SEQ ID NO: 77359 - DNA, 239 bp, Oryza sativa
  Clone ID: PAT_MRT4530_77265C.1
gaacttaacttacacagactgcatttaacagagtgataacccttaacaagggaaactaatacatagaaacaggctgaatactctctgatacagacaagacaattggcttacaaaaacaccgacaaaacacagcaacaatgggtgcacatgcgctgtatgtcaagtacaaaagtctaatatctccaagctgagcgcacatgaatacttctatgatactaataatatgattgatagggttc

SEQ ID NO: 77360 - DNA, 118 bp, Oryza sativa
  Clone ID: PAT_MRT4530_77266C.1
gtagccaacaggcggcaaacgacaggggcagccatcaattcctctggccgctccctccaacagcagcacgcgtctgcatgcgtgacagattctcggcagcgaagcaagcaactgatcg

SEQ ID NO: 77361 - DNA, 363 bp, Oryza sativa
  Clone ID: PAT_MRT4530_77267C.1
tgttggtttttttttttttttttttttttttttttttttttttttttttttttttttttccccagcaggtccacggttcaccaatgaattatttccacattaagtaaacaaactgcccaaagaaaagaaacaaaaaattaaaccgggcggggggcgcagctccccaaggggacatgatctgttcccctaatcccctccctgggcaataatccccccgaggcaggagtgttgtctgaaaaaagggaggcatcaataggggtagtaaaactattttttcacgaaaggggaaaaaaactatcaaccggctttacaatattttatataaggggcagggcgccccctttaagccgttggaaacaattt

SEQ ID NO: 77362 - DNA, 1884 bp, Oryza sativa
  Clone ID: PAT_MRT4530_77268C.1
aattcggcacgagctcgtcaattcaacccaacgaagaaggaaaaaaaaaggaggaaaagaaaagaggaggaaagcgaagaggttggagagagacgctcgtctccacgtcgccgccatggccgcccgcgccgccgccgccgcgttcctgctgctgctcatcgtcggcgcggccaccgcggcgccggacatgtcgatcatctcctacaacgcggagcacggggcgcgggggctggaggaggggcccacggaggccgaggcgcgcgccgcgtacgacctctggctcgccgagaacggcggcggctcgcccaacgcgctcggcggcgagcacgagcgccggttcctcgtgttctgggacaacctcaagttcgtcgacgcccacaacgcccgcgccgacgagcgcggcgggttccgcctcgggatgaaccgcttcgccgatctcaccaacgaggagttccgcgcgaccttcctcggcgccaaggtcgccgagaggagccgcgccgccggggagaggtaccgccacgacggggtggaggagctgccggagtccgtcgactggagggagaagggcgccgtcgcccccgtcaagaaccagggccaatgcggaagctgctgggccttctccgcagtaagcacagtagaaagcatcaaccaacttgttactggtgagatgatcacattgtcggaacaagaacttgtagaatgctcaaccaatggacagaacagtggctgcaacggtgggctcatggatgatgcctttgacttcatcattaagaatggaggcattgatactgaagatgactatccttacaaagctgtagatggcaagtgtgacatcaacagggaaaatgctaaggttgtgagcatcgatggctttgaggatgtacctcaaaatgatgagaaatcacttcagaaggcggttgctcaccaaccagtcagtgttgctattgaggctggtggccgcgagttccagctctatcattcgggcgtcttcagcggtaggtgtggcacaagccttgaccatggtgtggttgccgtcggttatggcactgacaatggcaaagactactggattgtccgcaactcttggggcccgaagtggggtgagtctggatacgttcgcatggagcgcaatatcaatgtgaccacggggaagtgtggcattgccatgatggcatcataccctaccaagagcggagcaaacccacccaagccatctccgactcctccaactcctccaacaccacctcccccatccgcccctgaccatgtctgcgatgataacttctcttgcccagcgggcagcacctgctgctgcgcattcggcttcaggaatctctgcttggtttggggctgttgcccagttgaaggtgcaacctgctgcaaggatcatgccagctgctgcccgcctgactaccctgtctgcaacacccgggctggaacctgctcagcgagcaagaacagcccattgagcgtgaaggctttgaagcgcacgctcgctaagctgaacaccgcatgagctcatcgataacatgtaatcggcgaggagaggggatgaggcagcgtggagcctttctgaaatttctgcttccgtgcctccatatatcgttgtcgcattttgaggggacagcttatttactctactgcctgccttttatcttacagtgatctgtgtacatagctcgatccaatttgtactcttatttatcttctccaatttgtactctatataatttatcatctcaagaatacattaacgaagatcctgttttaccgttccaaaaaaaaaaaaaaaaaaaaaaaaaaaaaaaaaaaaaaaaaaaaacccgggacccaaatcgccctatatggagcgtattaccccgctcctgggccggcgtttacaag

SEQ ID NO: 77363 - DNA, 900 bp, Oryza sativa
  Clone ID: PAT_MRT4530_77269C.1
atggctcgccgcctcctcgcgcgccacttcctcccgcatctccgcctcggcctccccgcgcggtgcctcggggacccgtcctcttccccgtcggctctggccatcgcccgctgccgcaacgtcgccggtccttctacccctccaatttgggccctcggaggaacgcgattctttgctgatgatcgctcgcgctatgacctgtttggtaaaagaaggccaggtgatgaagagtttaggaaagcttggcaagagaatgtagatgaggaggactgcctgtggactggtagcgaggatgaggatgaggaagagaatgatacaaaaatggagagagaaattaaaaaagtgaagaaacaagccaaggaaaatgcaaatctaattgatgctgatgacagtgacgaattaagaagtatatgctctgagagtgatgaagacgatatggctctctggagtggcagtgaagatgatgatgatgatgacattcctactgatgcacaccccaatgagcgcagtgattcttatatagacaaggtgtttgaatttgatgaagcacctaaatatcgcacaatctcagagttgttgaaagctgagaaggagccgccagagctttctcctggaaagcaagcaagaaaacttgctgtagaaaatgctctgaagaagttgaagaaagggcctgatggacgctacattaatgtgtttgatgttgtcactgatatagatatccttattggtgcatttgagaacattgtctcaggaccagaatatgcagagctacgggagggggccaagtttcttggtagttgcaagcacgaattcactgtgcttcgcacctgcgggtcaaaagacatgcccccatggtgctcctgtgcaggccttgctgtctcaaagcttactctttcctga

SEQ ID NO: 77364 - DNA, 3778 bp, Oryza sativa
  Clone ID: PAT_MRT4530_7726C.1
ttagtaatgaaaaatttagtaaaaaaagttatcaagatagagaccggaaacaagaacgcagtggctacaaaccaagacgactccatgtcgaaagatccaacctgtcgacagactctgacctccacgtttcacacatcttcggaggttccacaacgacgatatccgatcatggttgaacccactattcggaacatcaaggtcgcgcaggtcctcatcgacggtggcagctcaatcaaccttcttttcgccagcactttggacgcgatgggaattccgcaaagcgagttgacaccaaccgatcaaccctttcatggaattacaccccaatcctcatccagaccatttggcaagattacgttgcctgtgactttcggccaagccaacaacttccgaacagagcagatcacctttgatgtcgctgaattcgatacagcttacaatgccatcatcgggagaactgcacttgcgaagtttatggccgcatctcactacgcgtatcaagtgatcaagatgccgggaccgaagggaacaatcactattcaagggaacgcaaagctggcggtgcaatgcgacaaacggagcctcgacatggtcgagcaaacgcccagcccacccgccacgactgagccacccaagaaagtgagcaagacaaacaagacgccgaaaccggacggcgcaatcaagatcgttccactctccagtgccaaccccgacaagaccgaactcgcgctcatcaccttcctccgcgacaatgctgacgtgttcacttggcagccgtccgacatgccgagggtccccagggaggtgattgagcacaaactcatggtgcgacccgatgccaagccagtaaagcaaagactgcggagatttgcactagaccgaaaataagccatacgagaagagcttgacaaacttctcaaagctggcttcatcagagaagtacttcatccagagtggctagtcaatccagtcatggtgcggaaggccaacggaaaatggagaatgtgcgtcgacttcaccgacctcaacaaggcgtgccccgaggatcacttccctcttcctcgaatagatcaactggtggactcaatagccggctgtgagctgttgagctttctcgacgcttactctggctaccaccaaatcagcttggcaaaagaggacgaagagaagatagcattcatcacgccgttcggggtattttgctatgttaaaatgccgttcggactgataactgcagggaatactttccagcgcatggtccagggcgcacttagcgaccagctcggcaacaatgtcgaggcatatgtcgacgacatcattatcaagaccaagacaggcgactcattgattgacgatctgcgggaaatgttcgacaacctccgacgatatcgccttatgctcaatccagagaagtgcacgttcggagtaccgtcgggcaagctgctcggtttccttgtctttggcagaggaatagaagcaaatcccgagaagatcaaggcaattgagaacatgaagtcgcccacaagactcaaggaagtacagaaactaaccggatggatggcagcattgagcaggttcgtcgctaggatgggagaacgagggcaacctttcttcgctctgctgaagaagcaagaaaaatttgtatggacacaggaagccgaagaggcattcgttgcactcaagcgctacctatagaacccccctgtacttgttgccccccaacctaatgaagaattattcctctatatcgccgccacgccatattccgttagcaccgtcatcgttgtcgagagagataaattacaacgaccagtctattacgtcagcgaagctctccacgacgcaaagacaagatatccacagatccaaaagctgctttacgcggtcatcatgacatcaaggaagctacgccactactttcaagcccacagagtcacagttgtctcctccttccctctcggtgaagtcgtgagaaacaaagacgttgtcggccgcattgcgaaatgggtagtcgagctgagccagtttgatgtcaattttgcgctacgaacagccatcaaatcccaggtactcgccgacttcgtagccgattggactatgcctgataacaaatcagacaaccaagtcgacaacgaaacgtggacaatggcgttcgatggtgcactcaacagccaaggagttggggcaggatttatcttgacgtctccctccggagatcaattcaagcacacaatccacctcaactttagggcgaccaataagagctgcagccgcacttggggtcaagcgactaatcgtgaaaggggactccgagctagtcgcgaaccaggtacacaaagattataaatgctctaactccgagttatccaagtatctcgcagaagtcaggaagctagagaaaaggttcgatgggatcgaagtccgacacgtctaccgcaaagacaacatcgagccagatgacctagcacgacgtgcgtctagacgagaaccgctcgagcccggcacttttctggacatcctgacaaagccatcagtaaaagaggttagcggcgaagttagcccggtcacccccgacattagctcggaggccacaaaggcagaacaagccgttgccgatatcgagaccacagacgactggcgcatcccactaatcaaattcatcaacagcgaggagttgcccgaggacgatacagagaccaagaaaataacccgtaaagcaaagatctactgtatggtcggcaacgatctatacaagaaagcgccaaacggggtacttctcaaatgcgtctcgtccgacgatggcagacacctcctccttgatatatatgaaggcatttgtgggtcacacgccgccggtcggatattggtcgggaaagcttttcgacaggggtttttctggccaaccgcccttaaagatgcatgcgacatgtaaacacacaaagatacccgcgcaagcgctccagactatccctcttacttggccgttctcgtactgggggctagatatactcgggccattcccacgaggacagggcggctataggttcctattcgtggcgatcgacaaattcactaaatggatcgaagcagtacccatgggggaaatcaaggccgacaatgccatcaaattcatcaaggggatattttgcagatacggactactgcaccgcatcataaccgacaacggctcccagttcatcagcgctgatttctaggattactgcatcgggctgggagtcaagatatgcttcgcctcggtctctcaccctcaaagcaacgtacaagtcgagagggcaaacggcatagtactacaagggatcaaaacccgcctatgggctgtacgcaccacaccgacaacgtctaacaaggaaacacctttcttcctcgtgtacggctccgaggccatgctccccagcgagctacgacatcagagtacacgagtacagaagcactccgatgaggaccaggaggagcagcgaaacgtcgatgtaaatctactcgaggaacatcgcgaacgagttgccgttcgagcagccagctatcaacaggccctccgccgttaccacgagaagcgcatccgagcagcatactttcgattggcgactacgtcctccgacgggttcaaagccaagcagggcgaaacaaactctcacccaaatgggaaggaccctacacgatcacacaagttttgcggtcatgcgcattcaaaattgcagacgacgatggtcgcgagttagcaaattcttggaacattgaccaactacgtaaattctatgta

SEQ ID NO: 77365 - DNA, 201 bp, Oryza sativa
  Clone ID: PAT_MRT4530_77270C.1
atggcgcagcattcacgtcgcacaccgtgcatgaggtgggagggaggcagtgaggggcggagaggaggcggagaagggaaaggggaagcagatgctacagttggtgggggtgctgctgcatggtccgtcaacaagatcaggtgtttgctgtggaaccacaccaattatccaaggtcattagtcctgcctgagtggtactag

SEQ ID NO: 77366 - DNA, 270 bp, Oryza sativa
  Clone ID: PAT_MRT4530_77271C.1
atgagtagtgtgagactaatcatgaaaaacattgttagacccacccataaccgcggacatggctattcgaatatttttactctgatgagagatgtaccattgttcccacaagacacagctccacaacatgtcaccatgcacctctataccaccacgggaccttggaaaggaactttgacaatacctgtaacacagcacaacttaccacagtgcatcattcctggatcatgatctgcccgtcaaaaccagaggcaatggacttgccagcga

SEQ ID NO: 77367 - DNA, 1413 bp, Oryza sativa
  Clone ID: PAT_MRT4530_77272C.1
atggagcctccggctcctgcgacggacgtgccaccgtcgtccctcacactctctgcagcagaccttgccaccgtcgtagcgcaactcggcgctctctcgacggcgccaggacgactgcctccaccaccgttggcggtccttctagcgccgccgccggtcatcgacgccgacgccctagtcgctctccaccagcaggccatctccgttctcaacatcacagcgttgatccctgtcacgctcgacctcaccgccgggaactacactcgctggcgcggcatgtttctcgtggtcctcggcaaaaccatctccgccgacctcttccatgaagtcctgtccccgacgtcgtccacgcgtatcgtctggcgcaacctcgagcaccagttcctcggcaactccgagcttcgtgccatcaacctcaccaccgagttctacaccttcctccaaggcgacatgtccggcaccgactactgtcgtcgtcttcgcgccatggtagattcgttggcggacctcggcgaaccgatcaccaacaagacgctcgtcctcaacttccttcgaggtttgaatgaaaagtaccacaacttgcagacgattctccccatgcagcgcccgttcccgacgttcctagaggcacgctcgcaacttctcatcgccgagatcaacaagggacaaggccactccaccggcgccgccactgcctttgtcgcagcggccaccagtggtactcgcgggacctgcaacggcggcaacacatccggcacctccagcggcaacaacggtaacggcggcaacaacggcggctccatcggcaccagcaacgccaccacgccacccgctggctcggtccagcggcccacgacgcagtggcccaccgccttcaacccgtgggccggcaccatccagctcaccggccaggcctgttgggcccgccaccccgtgtgcctttcgccgactggaaaaagtacaccgaaggtccctcaacttgtcatcgagttacaaaaccgtcccccaaccgcaaaaccagggttcctatggtcgcagctgcagttcggcgctgaggcagccggcacgacggtcttcacgatgcgcaacaactgcacctacaccgtctgggcgaccaccttgtccagaaacacagcggtggccatcggggccggcggcttcgagctgtcgcccggcgccaacgtctcgttcctagccccggatggttggtccggccgcttgtgggcgcgcacggactgtgcaacctctggcaccgcgtccctcgcctgcgccacgggggacttcggcggcgccgtgagctgctccctcggcggcgcgccgcccgtcaccctcgccgagttcacgctgggcggtggcgacgggaaggacttctacgacgtgtcatattttgaaatccaaattctaactatttaa

SEQ ID NO: 77368 - DNA, 390 bp, Oryza sativa
  Clone ID: PAT_MRT4530_77273C.1
atgacagcaacgtttgctcggttcacagagcacatgggagggcttcaccgcttcaatggtgactggtggcactgcaatggccagatggtagtgcgcggtgcaactaggatgttcttgccgatgttcatgaggctgccgccatgcagatcttgtcaaagcactaagatcaccctcggggcgattttgtctggatcagacgggaagttgtggatgtgggagagcccgtccgcggccaacttgccgcagattatgtgcggctccgcatgcccagagcgcaacggaggagcaattctacggttcttgagtagataccatgagggggtgaacaatggcacgctcttgcacatccaccatgagctcgtcgacatcggcgatggcccctcttcctag

SEQ ID NO: 77369 - DNA, 1167 bp, Oryza sativa
  Clone ID: PAT_MRT4530_77274C.1
atgttgatgatcctgccctgtagattgctgctgcgtctagtcctcgcaacccttctgattttggctgctagtacagatcaacatgtagccacgctgccgccgataacacttccaggctgcatcgacaagtgcggcaacatcagcatacccttcccgttcggcacgaagcagagcagttgcttccttccaggcttcgaggtcacctgcaacgacacattcagtccacctcgcctcttcctcggaaattctaatcctggagacaggcaaaactatcaggaatttgaagagcgctactacttgacgacggaggaaggcatgccgacacatctcatgactgatgattttttgttcatggagctgatgagcataaacctcacagagggcgtagcacgggcatatggccctgtgagctcggattgcagcctcaacgacacatatcatttggtgaagaggcagatgacgggcttggccgggccattcctcatctccacgcgcaatgctctcacagccgtcggctggaacatggaagcaaacctcgcgagatcggtgcgtggatccggcttcctcaagacctgtggtgtgcggctcgggcaacctgaatttgcaacgaatgggtcatgcctgggaggaggctgctgccagggtgaaatcactcaaggcattggctctatcgcgaaggactggtacaacttcacttcgccggacctctattccgacaacttctccaagaaatatccaaagggtgtcccgctagtgattgacttcgccatcagggatggtttttgcccagcggcaggccaggcgccgccggcgaactatgcttgtgtcagcagcaacagctcatgcgtcaacgtgaccaacggtgatggttacatctgcaactgtagtaagggatatgatgggaatccttacatacctaacggatgtcatgatattgatgaatgtgccctccgagatagccatcctgagctccgagtcctgtatccttgttcaagaaatggaatctgcatgaacagaccaggcggatatgattgtccatgcaaacgtggaatgagcggtgatggcaaagcaggaacttgctcagagaaatttcctttacaggctaagattgttgtaggagacgtacgagtgaaagacaagtgggatgaagttgagaacactgagtag

SEQ ID NO: 77370 - DNA, 530 bp, Oryza sativa
  Clone ID: PAT_MRT4530_77275C.1
atgaacaacgtctccttcgtgctcccggcgagggcgctgctgcagtcccacttcaccggactctccagcggcgtgtacgcgccggacttccccgtcgcgccgctgtcgccgttcaactacacggggacgccgccgaacaacaccaacgtgaagaccgggaccaagctgctggtgctgcggtacaacacgtcggtggagctggtgatgcaggacaccagcatcctgggcatcgagagccacccgctgcacctgcacggcttcaacttcttcgtgatcggccaagggttcggcaactacgacgccgtgaacgacccggccaagttcaacctcgtcgaccccgtcgagcgcaacaccgtcggcgtgccggccgcggatgggtgtatggttcatgcactgtcatttggaggcgcacacgacgtggggcctgaggatggcatggctagtgttggatgggagccatccgaaccagaagctgcttcctccgccgtccgatctgcccaaatgctagtcgggaccttaccacagatgcc

SEQ ID NO: 77371 - DNA, 2064 bp, Oryza sativa
  Clone ID: PAT_MRT4530_77276C.1
caggccatctcccactcaaagtctcacagagctagctgatcaagagccattacagattgtggctcaaagcttaggctacacaaattaagatgaccatggctatctcctctgctcttcctagccctctactcttggcggcttccctactgcttctcatcgtccaagctcagggccgcgtccgcccacgcgtccgcaatgtgcaaatggcgaacgcgacgaggctgtgcaacaccaagagcatggtgacggtgaacgggcagtgccccgggccggagctggtggcgagggaaggcgaccgcgtcgtcatccgcgtcaccaacaacgtcgcgcacaacatctcgttgcactggcacggcgtccggcaggtgcggaccgggtgggcggacgggccggcgtacatcacgcagtgcccgatccagacggggcagagctacgtgtacaacttcacggtggccgggcagcgcggcaccctgtggtggcacgcccacatctcctggctccgcgccaccgtctacggcgccctcgtcatcctccccaagctcggcgtcccctaccccttccccgccccgcacaaggaggtccccgtcatcttcggcgagtggtggaacgcggacacggaggaggtggtcaaccaggcggtccagaccggcggaggcccgaacgtctccgacgccttcaccatcaacggcctccccggccctctctacaactgctctgcccaagacacgttcaagctgaaggtgaaacccgggaaaacgtacatgctgcgcctcatcaacgccgcgctcaacgaggagctcttcttcgccgtcgccaaccacacgctcaccgtcgtcgaggtcgacgccgtctacgtcaagccgttcaccgtcgacaccctggtgatctcgccggggcagaccaccaacgtgctcctcaccgccaagccgtactaccccggcgccaacttctacatgtccgccgcgccctactccaccgccaggcctgggaccttcggcaacacgaccgtcgccggcatcctcgagtacgagaaccccgccatgtcgccctccgcggcgagcttcgtcaagggcttgccgctgttcaagccgacgctgccgcagctcaacgacaccgacttcgtcaccaacttcaccgacaagctccgtagcctcgcgacgccggagtacccggcggccgtgccgcagtcggttgacaagcgattcttcttcacggtcgggctgggcacgctgccgtgcccggcgaacatgacctgccagggccccaacaacacgcagatggcggcgtccatgaacaacgtctccttcgtgctcccggcgagggcgctgctgcagtcccacttcaccggactctccagcggcgtgtacgcgccggacttccccgtcgcgccgctgtcgccgttcaactacacggggacgccgccgaacaacaccaacgtgaagaccgggaccaagctgctggtgctgcggtacaacacgtcggtggagctggtgatgcaggacaccagcatcctgggcatcgagagccacccgctgcacctgcacggcttcaacttcttcgtgatcggccaagggttcggcaactacgacgccgtgaacgacccggccaagttcaacctcgtcgaccccgtcgagcgcaacaccgtcggcgtgccggccggcggatgggtggccatccgtttcctcgctgacaacccaggtgtatggttcatgcactgtcatttggaggcgcacacgacgtggggcctgaggatggcatggctagtgttggatgggagccatccgaaccagaagctgcttcctccgccgtccgatctgcccaaatgctagtcgggaccttaccacagatgccgttgattcttctttcctcatttcatttgttcgccaatttgcgattgctttctcctgaaggagattttagtgtgttagcccgttcttagctaacttttgtgacattattttgttcttttttcttttatttgtgtacaactatacaatgacactgttttgatgcttctttgaataaaaaaatgggcattaattgcatgaaaaaaaaaaaaaaaaa

SEQ ID NO: 77372 - DNA, 201 bp, Oryza sativa
  Clone ID: PAT_MRT4530_77277C.1
aaggactggcacagccccacgccgaggatggggagccgaagcatgccaccggggggtttgtctgtgcccgagtacggcaccacgggcagcaccagcttcaatccgtctccgtgcgatggggcggctcctcgtagtggctacggccccagccgccttctcgtcccccgccgccgcagctccgtgtcccccgcctgccgctga

SEQ ID NO: 77373 - DNA, 426 bp, Oryza sativa
  Clone ID: PAT_MRT4530_77278C.1
atggctgccctgcatcctctcgcgatcctcgtgttcgtgtccctcctggccgccggcgccaccgcaaattatggttacaccacaccatcaccatcgccgccaccgccgccgcagcagtacacccctccggcccacagcgacaagctgttggccgtcgccgacgataatggctacttccgcgcggagctcgatgagactaaagtctccgacttctacatgggtgatccgcgtaaggcgtgctatgtgcgtcttcatgcctcgccggatttcgaatgcaacaaccccacaaacatcaactactctagcattgagggtgcgccactccgtgacgagggcaagcggtggtccgaccatgactactataatgtcatgtatgccactggcccgctcgctttccggccggtgatgtgccctcctaagcactag

SEQ ID NO: 77374 - DNA, 205 bp, Oryza sativa
  Clone ID: PAT_MRT4530_77279C.1
ttacagcgagcgcgcgaagctgaccacacgtaccccccacactcattcgcaaactcgcaaatgcagcacaattaaacggctaacagcagtagcaccaccaggccaccttaccttaccacacacaaacacacaccacgagaagccgggcagccccctccaaaggcacacctcaattgcggccctaggggacagccacgagccctaa

SEQ ID NO: 77375 - DNA, 547 bp, Oryza sativa
  Clone ID: PAT_MRT4530_7727C.1
atgaatagagtacccactagttggggttttatttatcctagggtgaacaagcgaggggagaggagcgcgcggaccgggtccacaggagtggggcccacgcggcagcctctcggtccacggtggaccgggagcacgcggcttacgccggccggcgccgtgggtcccacgcgtcagccgcacctaagggcgcgggcggctgacagccgggccccacacggcagccgcggggcacgcccgaaggcggccacgccggcacagccgacgggaggcgacgcgcccgcgccccgatggtcgccgccggcgaccaccggcgcggcggagcggcgcccgagagaggggagggaagggggaaacgaatcggcggtccacagctcaccccgggtcgacggcgacgacgggaacggcgaccggagcggaggaaggcggcggcgcggctcgggtcgacggggacggcggcgttccggcggtcggcgggcgaaacggaggggtggacgaggtcggcgaggacgcggcggagccgaaggagacggcgccgaagcgggagaag

SEQ ID NO: 77376 - DNA, 270 bp, Oryza sativa
  Clone ID: PAT_MRT4530_77280C.1
tgaaatatactttgccagctcaaagtctcttcttagatgatccaacttaaaatatttgcagaatcaagattgctaaaggaacagcctcataatttatctttggtcttccttggttcagaaccttctacactgtatttgacgtcagaaacatgatgatgaactttgctttaggaaaaaattcttttggcaatataatgtgaattctaagttagtgactattttaaggctttacaaatatataattctttcttattacacattaacaatcct

SEQ ID NO: 77377 - DNA, 241 bp, Oryza sativa
  Clone ID: PAT_MRT4530_77281C.1
atacacaatctcaaaatcctataaatttgctattatcgcaccacagcacaggttttctcatcaccactcatcacacgtgccctttgcatcctcacacatcattggtttgcaccacagccaacatttcatcaccacaccacacacatcacatggggcaccacacacacattcagcagtgcacatgggggcacatttccccctgtattgttgtctcccacggcgtcaccatatgtggtgccat

SEQ ID NO: 77378 - DNA, 346 bp, Oryza sativa
  Clone ID: PAT_MRT4530_77282C.1
aacagactaacactctccatgttggcttacatgcggaaaaccaaatcgactggatactccataacattgtaaagcatgagagggactaggaacgattcatccatatgtgccaaggcacgcatcacagatgatgtatcaggctctgagcttatgaaggccacactggtgtgcttgtcactgaaataaaagccaggctgatgggtgtaccctcgctaggacaacaactcgcgcgctttcaggacgagctacttgtgcgtcaccctgccgctattctacgacaggatggtctggatggatgtgctgagcccgccccaggacacgcttttgggcgtcgtggatggcgtcg

SEQ ID NO: 77379 - DNA, 289 bp, Oryza sativa
  Clone ID: PAT_MRT4530_77283C.1
cattatgttcatccaggaggagtccttcttcgctactcattaagagatgatcgatgccgacgacgacgacgacgactaggcggacgtgaggccgaggcggtcgacgtgctcggtcgtgcacagctaggtggcgatccaggcggagttgaccgtgaggacgacctccagcagcgtcttgctccaggcctgctgcgtgccggccgcggtgatggacgtggaggaggagaagcggctgatcgacagggaggaggaccgcggcgtggtgtacctgatgggcgaggccaacgtg

SEQ ID NO: 77380 - DNA, 480 bp, Oryza sativa
  Clone ID: PAT_MRT4530_77284C.1
aaaatcactcaggtccatcactctcattccaacggggtcctctactaaagcgagcttaaccaatagcaaattctattagaacaaagaatatgcacaggaaataactcaggcctgggctacatttgtactaccccaacaaatctaacatcatacaaccccccccatacaacaaatgaatcccctacttccttatgactgagctaccatacataaattatctaacgaaacattccctttccataaaacataaacaatttgaaaccagtcttacacatataaaacttcgaaacacaataacagctgacttaccaattgtaccataagttgtattttgtatacaacatgcttacgggcatcaacttgtctcccatgaaccaccgtccatgacagagttccaccaagccacacacactgcataatctctatccattcaaaatcctatgtgactctgaaacaccattatatataaaattatctgtc

SEQ ID NO: 77381 - DNA, 225 bp, Oryza sativa
  Clone ID: PAT_MRT4530_77285C.1
atgatgtccatcgcgtcggcgagtagtaccccatacaccacgaccttagcgacggtggccgaggaaggcatctacttcagccactcggtggccctgcgcacagatgcgccgattgccgccaccgccaatgccaagctcctcttcgccggctgccgctcctctccccgctcgtctttgctagcaagcgtcgccgccgccaacgagggccacttccgccgtgtttag

SEQ ID NO: 77382 - DNA, 980 bp, Oryza sativa
  unsure (1)..(980): unsure at all n locations
  Clone ID: PAT_MRT4530_77286C.1
cccccgggctgcaggaatcggcacgaggctttggtccaatgcccactcaaacaaacaaacgaaaaaaaaagctctataaaatcgaacatgggtcaaatttatccaaataaacaaaaaagaagctctataaaatcgacaatgagtcaaatttatcgtgtctatcatttgtaggaaaaagtacactttgactccctcaactatgacccgagtaaaaccaggtatttcaaaagtggtgaaacccgtgtaaaacgactacttgagtagtatagtaggtggtttcatctgatgtggccatttaaccctagtcaacatactgaatcagcagacgatttttgaccgcacgtgctaaggtggtgtttggatccagggactatgtcacatcagatgtttgaaaatagattacttacaaaactaattgcataaataagagctaattcgcgagacatttttttaagcctaattaatcaataattagcacatgtttactatagcatcacataggctaatcatggattaattaggctcaatagattcgtctcgcaaattagtccagggttatggaataggttttatcattagcctatgtttaatacttctaattagtgtcccaaacatccgatatgatagggaccaaaaataagtccctggatccaaataggggtggtctaagtaagctgcgatttcgattaagagatgcttgcctccccctggcctnctctctcagatctctacagctgtgttgacgttggtgattccaaattcatttgcacttaataaaggccagcttctaccgtagtggagcggaggcccatcgccggatggtgacaaactgaaacagtctcctcgtcaatggtataaaaggtttgattcatttatgttgtcacatggctttaagaggtctgaatttgatagctatgtgtatattaaatttgttaatggatcacctatatacttgctgttatatgttgatgatatattga

SEQ ID NO: 77383 - DNA, 554 bp, Oryza sativa
  Clone ID: PAT_MRT4530_77287C.1
gcacgaggttttctatcacctaaacaaagatctgttctttggctcataaataagattattgtcaatgggaacatgtttcttcagtgaaaacaaatactaaattacatgcaagtattcaatcttacatgtttcagaacagatcactgagcttgctactcaatgtttgcttgtgctcgtcgatggttttgcagactgctgttggattccatggaagagagagaggagagctcaaatccgggtggccagcttgtcggcgacgacgagcgggttctgcttggcgatctgctccttcccggcgctcttgtagtcgaagccgcagccgtgggcgtcggcgtggcggtggccgccacagaagttgccgccgcaccggcacttgaaccccgtcagccccaccttcttccggcacgccgcgcaccggttcggcgccgtagcagccttcgccgccggctgctctgccgccgccgatgaagatgacgcgacggcgacggggacgacggcgctcatcctggccttcttcgtcgtcgtctccgccacgccaaccagctcgaggtcgc

SEQ ID NO: 77384 - DNA, 608 bp, Oryza sativa
  Clone ID: PAT_MRT4530_77288C.1
ccggccgggcagcatgcgtgtcacataatatagcgacttccatgtcattctttaattgaatacctagatgctacctctatcaattaattaattagccatggcggaggagaagcaccaccaccacctgtaacaccacaagaaggacgatgagccggtcaccgcagtagactcctacagagagggcagtctacacgtaagagacggcgaccaccgaggtggtcaacggcggccacgacgagtacagagaggtacaagaaggaggagaagctgtacaagcacaagcagcaccccgtcggctacgaccttacacgagcaccacgagaagatgaaggaccacaaaagcgccgaggagttcaccggcgagaaaaagcaccacctgtttggctgatcgacctcattacaacgttgacggcggaggtgaccacctcaccgtacgtcgtcggccgtcgcgtcgtcgatttgtgtgagtaataattggtcttcttctgcatgcgtagctgttgatgtttataacaagaagtatacggactcgaccagtgagatgctgacatgtgttgccgtaagttcagctagtggtgctttattctctatgaagcctatacctgtgt

SEQ ID NO: 77385 - DNA, 736 bp, Oryza sativa
  Clone ID: PAT_MRT4530_77289C.1
atgcttccggcctcgtatttgtggtgaatttgtgacggattacaattttcacacaggaaacagcctatgaccatgattacgccaagctctaatacgactcactatagggaaagctggtacgcctgcaggtaccggccccgtgggcccggctcgtcccccgcgcccctgaaatatctaggctgttctggaaatcacacaaggaattccttgagttattccagtcctcttcaattaaagattttcggtgccagtattctcttcgagactctgaggccagtgttgatatctagctatctgctggtccgacactctcactagacagtgaaaatgttttcgacaaggacgggatatatggattattggagcatcatcgatcctcttgccacccaacatgctcaaggcttgccgttttcgtttccgtttcatgaataaatgaatgtcaagtggtcctcgtaacctacttgtgctgtccaacattttatctgcttgtttccattcctacaatacttctggactacgattcctgtttcagtactgactacggagtactaggcttttgtctgtcattactgtattctactatattattaaggagttctttttttttttgcaaaaaaaaaacaacttctttatattgtttgggacagggagtcctatgtttatgagatgttttcccaggttttattagttctatatatcccccgcaaattctatttaaaaaaaaaaaaaaaaaaaa

SEQ ID NO: 77386 - DNA, 1629 bp, Oryza sativa
  Clone ID: PAT_MRT4530_7728C.1
gtgaagcggctagtagctgctaattaagcagcaagcaaaggtacccagcaaccttccctttggcttcccccacaaaacgcggccgccgcgcgcgtatccgaggctgaggctcctcttcctcttcctcttcctcctcctctcggcggcggcggcggcggcggatctccatttgctcaagcttgcctgccatgcccatggggacgaggtagcgcttcccttcctgcctgcggtacatactaactaagcagagggcatccctcatatataggctttgcgaaatcaatcaacaagcttggggaggagaagaggaagaggaagaggagatggagcaggggggtgaggccggcaccggcggtgggctgggcaacctgcgcgcgctgctggccatcctccagtggtggggcttcaacgtcaccgtcatcatcatcaacaagtggatcttccagaagctggatttcaaatttcctctgacggtgtcttgtgtccacttcatatgctcttcaattggggcttatattgcaatccatgtgctcaaagcaaaaccactcattcaagtcgaaccagaagaccgttggagaaggatttttccaatgtcatttgtcttctgcataaacatcgtgctcggaaatgtcagcctgcgctacatcccagtctcctttatgcagactatcaaatctttcacccctgcaaccacggttattctgcagtggttagtttggagcaagcattttgagtggcgcatatgggcttcgctggtcccaatagttgggggaatactcctaacttcaataacagagcttagtttcaacatgtttggtttctgtgctgccatggttggctgccttgctacatctaccaagaccattttggcagagtctctactccacggatacaaatttgacagcattaacacagtgtactacatggcaccctttgccaccatgatactggctctaccagcagtgttacttgaaggaggcggtgtggttacctggttctacacacatgactccattgcttctgcactagttatcatcataggctctggagtgcttgcattttgcctaaacttctccattttctacgtgatccattcaaccactgcagtgaccttcaatgttgctggcaacctgaaagttgctgttgctgtattggtgtcatggttgatcttccggaaccctatctctcctatgaatgcaatcggatgcgcgatcacgctcgttggctgtactttttatgggtatgtgaggcatttgatccctcaacagcaggctgtagctccaggaacaggaagcccaacaacatcgcaaacaaattcgccgagaagtcggatggagatgctcccccttgtaggcgacaagcaagaaaaggtttaacaaaagaatacactttgtactatgcaatagtcattatggtctggattcccttgtagttcgaactattgtgttccttcaagttactgttttcaaattggccagaaactgccgcacgctaaacttcctttctgtgtagtgcatacggaattttttctactactaggatgtcacgcaagtccagcgtcattttctgttgctagacgtgtaacgcactgaatgaacagttggatatctcatctaaccaatttgtctt

SEQ ID NO: 77387 - DNA, 972 bp, Oryza sativa
  Clone ID: PAT_MRT4530_77290C.1
acgcatgacgcatcaaaccacgcgtccgtgtctatagaccctcgagccctaatccggggacgagattcatccctccgcgaccaaagaaaccgaattaacctccgagtcctctgctccctctttgcttcttggaccaggatctgatctgcgcggcgctcgaccggaatcgcgcggagatggacggcggcgacctgaggagcagcatcaagaagtggaacgtcatctacccggtgtacctcaactccaagaagacggtcgccgagggccgccgcatcgcctccggcaaggcctgccccgaccccacctgcgtcgagatcgccgattgctgctcccacctcaagatccctcacgccatcgaattggataaggcgtatccacgagatttcttccaggtgggaagggtgagagtgcagctcaagaaggatgacggctccccagtcaatcctgcaatcaaaacaaagaagcagctgatgatccaaatcgcggagctagtccccaagcatcatggcaggactaagaagcaggaaccagcagcttcttcaactgcagggacttcaaaggggaaaggtggcaagaaaaagaagtgatgatagtacaccatcttgtgtcgttcttctgtccataggaagttccctgagattcgtcgatgtctgttttgaggcctgaaattctgcgtctcttctgtgctctgaatttctaatttctcgggaaacatcaatcaatgcccgtatttcttgtgatttggactattggaaagaggaagattgcactgttgtttgcaatggatagcttccaagttatgtttttgaatagagctcaccttgaacatgcttatgctactaaaccccttgcaacagtgggctagcagaggttatgacttatgaggctaacagtggccatcggatgattaatcgttcatgtgtcaattgggccttggcctacgtttctttaaaaaaaaaaaaaaaaaaaaaa

SEQ ID NO: 77388 - DNA, 190 bp, Oryza sativa
  Clone ID: PAT_MRT4530_77291C.1
ttgtttgttttttactaaatgtggtccttttttgttttttaaaatgtttttatttattataacaacctgtgtctcttcaggttaaggccaagaatactctgaatgatgccaacaagaacatgcatgatacaattaatacagggagagaaaaacaaaatgggcacagctagaaatgtaatactgcgtgaat

SEQ ID NO: 77389 - DNA, 1485 bp, Oryza sativa
  Clone ID: PAT_MRT4530_77292C.1
atggagctgacgacactgctgcttctggccttgatatccttcttcttcctcgtcgagctcatcgcccgctatgcctcgccgtccggcagggagagtgcgctgcggctgccgcccgggccgtcgcagctgccgctcatcggcagcctgcaccacctcctcctgtcacggtacggcgacctgccgcaccgggccatgcgcgagctgtccctgacctacggccccctcatgctcctccgcctcggcgccgtgcccacgctggtcgtctcctccgccgaggccgcggcggaggtcatgagggcgcacgacgccgccttcgccggccgccacctcagcgccaccatcgacatcctcagctgcggcggcaaggacatcatcttcgggccctacaccgagcggtggcgcgagctccgcaaggtgtgcgcgctcgagctcttcaaccaccgccgcgtgctctccttccgccccgtcagggaggacgaggtggggcgactcctccgctccgtctccgccgcctccgccgagggcggcgccgcctgcttcaacctcagtgagaggatctgccgcatgaccaacgactccgtggtgcgcgccgcgttcggcgcgcggtgcgaccaccgggacgagttcctgcacgagctcgacaaggcggtgcggctcaccggcgggatcaacttggccgacctgtacccgtcctcacggctggtgcgccggctcagcgcggccacgcgggacatggcgcgttgccagaggaacatctaccgcatcgccgagagcatcatccgcgatcgcgacggcgcgccgccgccggagcgagacgaggaggacctgctcagcgtccttctccggctgcagaggagcggcggcctcaagttcgcactcaccaccgagatcatcagcaccgtcattttcgacatcttctcggccgggagcgagacgtcgtcgacgacgctagactggaccatgtcggagctgatgaagaacccgcggatcttgcggaaggcgcaatcagaggtgagggagacgttcaagggacaagacaagctaaccgaggatgatgtcgccaagctgagctacctgcagctggtgatcaaggagaccctacggctacacccgccagcgccactcctgatccccagggagtgccgcgagacgtgccaggtcatgggctatgatgtgccaaagggcaccaaggtctttgtcaacgtgtggaagataggcagggaaggcgaatattggggcgatggcgagatatttaggccagagagatttgagaatagtacagttgattttagaggggcggactttgagttcatcccgtttggagctgggcggaggatgtgtcctggtatagcgctaggtttagctaatatggagcttgctcttgctagccttctttaccactttgattgggagcttcccgacggcatcaaatctgaggagctagacatgacagaggtatttggtatcacgattgctatactctaa

SEQ ID NO: 77390 - DNA, 340 bp, Oryza sativa
  unsure (1)..(340): unsure at all n locations
  Clone ID: PAT_MRT4530_77293C.1
gtgattcctcaatcctcgtgccgagcagcgtgtacgcctcactccgcctcatcacccgaggcgccccaatctccctcggtctctccgcagctccctctccctctctctctctctctccattcggtgggcagcggcctgcgtcacgaggcagcgggggaggggtggctcggcggcggtgcggggtggcggtgctcggccacagcggcgcgcggngtggcgtcatggtggaggaagaggatgacgcgggcggcggatccggtgacggggaggcatgangncggcggatccggagatggggagngtacgaggnagcagatncngaggangacgtnanagncgn

SEQ ID NO: 77391 - DNA, 504 bp, Oryza sativa
  Clone ID: PAT_MRT4530_77294C.1
atggggaagacgtcgccgcgggtgccgaaggccatgaacacggcacgaggccgccggcctccgccgccgccgtccatcgcctcgttgagccgccgcaccgaaggtcggggtctctgcggcggcggcggcggctgtggcctgcggctccacttctccgctggtgcggcggcgacggcgacggcgacggtgccccgcgcgccggagaaggccccgcgccgcatctacgtccgatggcctcctaccagggatgcttcccacaaggttatttgctgcaagggaaacaccaacaagagaggaaaggcggctaagctcagctggtatacgcccgtgaaagctattgttcgacagatcaagcctctcaatggagctcaagttggctatgcacggaggtataaggccatcgagctgacaggagctgagggctctggctggatcagagaccagagacctgaaggaaaggagagcctgccgatcaatgtcattgccgtcgccatgacctgctga

SEQ ID NO: 77392 - DNA, 148 bp, Oryza sativa
  unsure (1)..(148): unsure at all n locations
  Clone ID: PAT_MRT4530_77295C.1
cggacgcgtggggttttaactactaccgcaaattggtttatattattacagtattacttcgatatttatggatacgtagttaataacaatttgtaatcctgtggattatgatacaggttgngggggcggcggctgaagagcgagacct

SEQ ID NO: 77393 - DNA, 143 bp, Oryza sativa
  Clone ID: PAT_MRT4530_77296C.1
atggtagaagaaatcggacgagttctggagttgtttgagatcggtgtagaggtggtgatagccctcaagtacactaaagtcctccatgtacgggaaatcatctggggatcctctagagtcgacctgcaggcatgcaagcttga

SEQ ID NO: 77394 - DNA, 1319 bp, Oryza sativa
  Clone ID: PAT_MRT4530_77297C.1
atggagcgccacgacttgcacacggacctgaaccgcaggatggacttgacggggagacggaggaggatttgctcgatgacgccccgcttgacgccgaggaggcgcgtcgagctcgcgcccaccgccagcgccagcatccaccaccaccgcccgtcgccatggccttcctccgagcaggaggaaggattctgcgtccgtgcgccgccgaagctgaacgccaatagcggcctagatgctctggaggacgcctggcggctggcggcgggcgcctcttcatcgtcgactggctgccacggcctccggcaccgacgcccgcaggttggctgccgaggccattggccaacgccgcctccgccgcggcgcaagaaaccaagagcgcagcgaactgctcccctccctccgctctcccctcgccgcgccgtctcttcttctcgccgacgggagcgccaagaaagcaagagaaccctcgccgcctccgccgctcgccggaggcaatggagaagttccacgacgggcaccacgtgtggctgcggagccgcgtccacggcacgtacctccgcgccggcgaggacgggagcggcgtctccctgcacgagggccgcgcgtccgtgcacgcggcgtgggcggtgcacattctccacctcgacggcggcgacatcctcatgctccacagcgccgcgaacgggcggtacctcgcggcccccaggaccgggtggtcgtggaacagcgtcgacctgcgcgacctcaaccagctcccgtcgttcaccgtcgggtggttcgccgtcacggcgggttccggggactacgtcatgctgcgtcacagtagtagcgggctcttcctccgagctgatggcgggaacctcctgtgcaatagcgtcggcgtcgtcgtcgacatgttcgacttccgccgcagagagatcaggcagtgggtggtggaggccattcccccgagagattccatgcctatcctccccaatccttcgcccacagctttcagctggtgccgcatctggtacgtgcgagcatctcctcaagggaatttccgccgagaagactggcgttcgttattgttccatgggaggtcagtgttccatctaaggaacaggctggcgagtcagttgcgcatcagagagtcctctgacgccatattgtgtgttcgagcgggctccactggacgggtgactcctctggttactgatctgcctcgcaacactttggtgatagacattgtcgttatcacagccgggacgaatggtgagatttccttttatagtgatagattacatatttacatgttcatggtacttcttaagtcttga

SEQ ID NO: 77395 - DNA, 570 bp, Oryza sativa
  Clone ID: PAT_MRT4530_77298C.1
gcacgaggctcccacagtcgcgtagccgaaggccttgctttcttccgcacaatgacatttaccagtgggcttgctgcagattatgtgatgctcgtcaccgttctcacgggttgtgcatcagctggcttgctgccagtgtcctgcagggccattcatgtgatatattgtccggcgctggaatcaccttcaccatgcaccttggcacggctttgatgggttgctatgccaaggctggccgccttgattatgcatcccgtgtgttttgccgagtccctttgaggaatgtgatgcactggaccgcaatgatttgtgggtcggcagcgcatcttggcagcgaaaaggccatccagctgtttgaggagatgtgtcggagtggagtgcaaccaaatgagatgacattcacagctgttctcagtgcatgcgggcaagctggactggtggatcaagggaggaggttctttaaacttatggttgacacatatggctttgagccgactatacatcactatggctgcattgttgatctctatgcaaaggctgggaaactggaggatgcttatgaggttatca

SEQ ID NO: 77396 - DNA, 290 bp, Oryza sativa
  Clone ID: PAT_MRT4530_77299C.1
gggtaaaagtttaagaacaggagacaatactgtttcatctttttaccaatttttgtagggaaaaaagaagtaagacctttggatttacaacttatggtacagctttcatccattccttctggaacgaacgatctgttctttttctttttatttttaatttatacaacaaatttacaatttctagctttaagataattacgccattctaaaactaaagcactggttgagccattagggctggaggaggctcatttcggtgggcccgtctgcttccatcttttttttgtttt

SEQ ID NO: 77397 - DNA, 783 bp, Oryza sativa
  Clone ID: PAT_MRT4530_7729C.1
aaacgatgcggcggtccactgctcaccctaggtcgacggcgacgacgaaaggcggccggagcggaggaaggcggcggcgcggctcgggtcgacggggacggcggcgctccggcggtcgacgagcgaaacggaggggtggatgaggtcggcgaggatgcggcgaagccgaaggaggcggcgccgaggtgggaggtggtccggggcgacgacggcggcggaccggaactcggcggcgacggcggagagagagagcgacggcgcgagctcgattccggccaggagaaagggcggtgagaggcggaaacgaacggaggaggtgcggggagggtttaaatagaggtggaagggggagagggcggccggaggggaaggaaaccggcgcggcgctctcgggctccatcaatggtgccggcgagatttgcgggggcaaatccgcccgtttgaacgcgagagagggaggggaaaatggggggaaagggagagggaatcacggggaataattcccccctattgattgcacacggggaggacgggggcggcgggattcgcggcggcggtggcgctagggcgcgggcgaggcagcgggagcggccggaggaaggggatgacgggtgggccccacccgtcagcgagggtggcgggcgggcccgcccgtcagcggcgcgcgcacggggagaggccggatgggccgcggggagaggagagggagggggagggagatgggccgagccggcccgagagggagagggagggaaaggggactttttagagtttttttttata

SEQ ID NO: 77398 - DNA, 596 bp, Oryza sativa
  Clone ID: PAT_MRT4530_772C.1
ccggggatcgccgaattgggggaaaacatccaagttcgtcgctttatccgctttaactcttggtgaaggcatcgaaaaagcagaaaccaactttgcggaagaagtggccgccgccgctaagggctagtaactcaggcttgattaccgcactacttattagctaaatctaagaaccttttgaacccagatttccaccgccacaggccagggaagatttgggtttttgcttttgggataaaccccagaaaatcttggcagcccatctttgctttgcccagagagtgtgtcaaaatcgtgggtaacttagtctgtcctaggcttccataacttataattatcgccatcattgctatgttgccattgccattaattgctaacggaaaaggatttatccgcgctctagaaaacgacggggctttggcagtgtatgcccccctagaaggtggttatgaaggtcgttaccaaagacgcctacaggccaacggctacgccagtatatccctttcggcaaggggtttgggggacgtggaagcctatttgatgcaagtccatggagtacgtcccgcccatttaggtaagaaaaacattgcccaaga

SEQ ID NO: 77399 - DNA, 378 bp, Oryza sativa
  Clone ID: PAT_MRT4530_77300C.1
ccaaaaaaaccaagggaaccttgggggaaaaagggggcaaggggtcagggaaaggtaacataagtttttatggggacacaaatttttactccaaaaaaacccccaaggggaccttttatggggccccccaaaaaaagggggcctggagggaactttgggggggtccatctaaacttttaaaaacggggggaacaaaaaatttaaaggggccccggggggattgggggggttttttatgcctgggggccgagttccaaaaaaagggggggggtcggattgttggttccaggggcactgaacgggaggggaccaggggtgaagaaaggggtttggggggaccactcatttgggaagggagcaaaatttttaaaggggggc

SEQ ID NO: 77400 - DNA, 678 bp, Oryza sativa
  Clone ID: PAT_MRT4530_77301C.1
atggcggcgccgtctcctccctgcctcctccgtgtcctgctccctgtcgcctcctcctcttctcggggcctccgccgccgccggcggcctactacctccttgcttcgctgctcctcgccgtcagcggatacggcgtcgtcgtcgggggagggtggccgcgagtacgagccctccttcgccgacgacttcctccacgccttcttccgtgccaagatggtggaggaggttggatgggattctgaaaaacctggctacactggactgattgaagttgccaaccgccccatggtccgagtactccgatcgctgattccccctctcttgcttgttcttttaaaggctcttgtagtaccaattgctaatggtcaactagcttccatgatggttgttcacggacattacgtgatggaaactgtcaggtgttcgttgagaagtgcaaatatttggaagagagcaaatgacttgacattcttcaaggatcacattggcgttgatttgtacatggaaccaaacttcgaagactatagctgccagttcaactttggggtgccacctccacctcttgacaccgacaaagccctaaaggagccctgcttggacatatgcacgaacgcaggacgatggagagtgctcggaacgggtagtagcacagatagtttgcaatgtcctcaagtttga

SEQ ID NO: 77401 - DNA, 596 bp, Oryza sativa
  unsure (1)..(596): unsure at all n locations
  Clone ID: PAT_MRT4530_77302C.1
ggccgcaaattttttttttttttttttctttttttttttttttttttttttttttttttttttttttttttttttttttttttttttttttttaaaaaaggggagttaattaaaattaaaaaaaaaaaaagttaaaacggccccccaagaagaagcaagacttaattttaaaaattggaaccataaaactaaaaaaaacaagccccaaccccccccaacggggggaaggccccccggggcaaggaaagggtaaggaaagaaaccacaaaggggggggaggctaaaggccggcaaagctgggcctggacctggggtcggaccaaagaaaacaacccccccccgccggaggtggagttggtgaaaaaacccctgaacgctacaaaaggccgggaagggaaaatggtgccccaccacccggagcggggggaaacactggggggggaagaatgggtgggtaaaaaaaaaaaaaaaaccgggttgccaaaaggggggggccacaaagcaaggctggggcctaacaaaccaacggcaggggcggaccacttgttgctggaacaggaaaagcaatggaangtaaaatttgtttataactttgc

SEQ ID NO: 77402 - DNA, 136 bp, Oryza sativa
  Clone ID: PAT_MRT4530_77303C.1
cgccacaggtaaggcaagtgctcaacggtgttccaccggaagaggagggaaccgccacgccggccgaagcaacgctctcccatcctgggccggaaaaggaaggacccggcgtatttggtcctggtttcacaataag

SEQ ID NO: 77403 - DNA, 138 bp, Oryza sativa
  Clone ID: PAT_MRT4530_77304C.1
aattaactagaaaagactaattagggacgcaattgccaccacaaaatccacactgagaaggagcgccataatcccactctaccatggcatccggcatatcagcaaaggaaactaactcagattcatgtcaaggggtag

SEQ ID NO: 77404 - DNA, 762 bp, Oryza sativa
  Clone ID: PAT_MRT4530_77305C.1
atggcagtgactcggggagggtggttcacggtggaccgagtccacggaccggggatggggcggcgcaccacgtggcgctgacgtggcgccgacgcggcggccacgcgggcggccgaacggacggccccgatctaccgcccggtagatcgggcggcggatgcggctcgcggccggcgcccgcgggcatggctcaagccggtccggcggccatggcgcgcggcggcgcggcgcgcacacagcggcgacgcgaggcggcgaccggccggcggcggaagacgacggcgatagcggcggctaagtggctaggcggcggcgcggcggctaagcggcgcgggagagagggagaaaggggagcaggggcctcaccggcgacgatcggcgacggcgagcgatggagggcgacggcgacggcgggacgagctccggaaccacctagcgaacaagatgagagggattagagggagagaggaaaatgggagagggcgaggacggcggccatggcggtgctcaccggcgcacggcggcggattccaacggaggaggggtggacgggacggcccgcacgacggcgaacgcgacggcgtcgacggcacggcggctagcggcgaccggagcggcggcggcagcggcggattggagggcgacggcgcttgggcgatagagggcacggggaagcttgcatgcctgcaggtcgactctagaggatccccggatgcggtattttctccttacgcatctgtgcggtatttgggctgcaggaat

SEQ ID NO: 77405 - DNA, 4437 bp, Oryza sativa
  Clone ID: PAT_MRT4530_77306C.1
atggccaccaccacccccgccgcccgcaaaatagccggcaccgaggtccccatcccgggctcggacagggtgcggtggatcgagctcaccgtcccctccaccccgtccccctcaccggagggcgattccgatcccttcgtcctagtgcccccgcgcgccgcctcggggttccacgtcgtctcctccggcgactcgcagtgctatctcgcctggaggttccatgaggaacaacaaaatgttctagaggttattgatctctgtgctttcaaggagtttccaagctctggactgcggttggtattccaggaggagctatgcccgttttccttcttatgtgcacgtttcttgaatgagctccgagatgatgctgggatcggacgtttatggtctcttgtgtcaagaacaaaggctgtgggccctgtacaagatatagtaacagctactgtaaatgaaagggaactgctgtttgttctccatctggatggaagtttgcgcatatgggatatttttaatcacactaaacttctcagttacaatgttcgctcgaatgatatcgaaggtcaaccatctaggatatgggttggtgatgctgatgatgatcaagagttgatttttttggctgttctgcgtcaaggcactgtgactggagcttgtgattgcgtttctgtatatggttttagttttggtgctggtgaaaggttcttgttttctcctgaaccttcatttttttctatacctttggtggagggaaagcttatcgacttgaaaataagcatggacaagctttggatacttaaggaagttggatcaatgctatatgaaatagtgcagtatgattgtgatactgagataatgcattcatatgtgctacaagaagtttctgtcagtgaccagttgtttcaaagctctgagaatacattggatgatttggtctggacagctgattcaatattctcatccaagaagataaggtcacctattgatctatatgacttctggttcaacttgaattataagggaagttcacagactgcaagttcgactgcttatcattggaaaaagttttctgcacggtatctccacaattggtgctggaacaataggccatatgggttacttcttgatactaacagagaagtttttggtttaataagaaagggttcattttctctcttccgttgtttggagggcatggagcagtttatttatggttcctctgatgacctgcgcaatcttgatatccttggggtgaacccatcggataatatatctcagtctgaaatcctcattgaagttctaaggtgcatggatcatataagccatctgctggggagatctgctgctgcaatatatcatgaatccctcatcagttctgttatatcacctgatgaaattgtttctcagatcttaaagattctgggcactggtttcagtcctcagtctccctcagccctcattacattatttggaacagatgcttatgcagaaagaaggcagaccgctcacaagagtcagaggaagttttctgttgaaatgttactatcttttcgtaaattgcaatcaaagtcgacatcctggtcagcagtatttgatgtgattgagaacttcatgaagtatttgaacacaaacgtgaccatccaagagtatgagctgaagagagtttgcaatgtgaatactgcgttattggttcaagctacttcacaggtagcaagaacaatgttcgagtccacttttgatctatatctgttcctcaattatctggtctccattggtgggcagggaagttcacagactgctagttcgactgccatgctattactcaaacttgctccggtctccttgtcacaaaatgatattgccagaataaaactgaagttgttcccagtgattcaagatatactgggacagtggattgtcctccactttgtaggaatttcacctactacaccaccaactattgaggatttcagctatcagctttcttctctccagctaggaaaagctgatgacctgtctttgcacagaaagtttggctgctcttattttacattggcttgtttacttgattttccaaaatctgctgacggggatgttctctcaccctggtttcctaatccaactgagttggtcaacttggtaaggaggtttagtggctcaattatgagtgaaaatattgctggaaatgctgactgtttcttgagttccacaattaatctggcagcagttcttgttcgccatggtcaatatgaagctgctcagagtcttctgggcattctcgacacacacatgaactatgtgaaagcatctcaagctgaccaggatacagatcttgcacgctcatcatgccttcatctcaatggattttgccttctggtgcttgcacgtgatgaagcaaacattgtcctgaaagaatccaaggttcatgaagctatccgatgcttcttcagagctgcatctgggcaagaagctccaaaggctcttcagaagttctctgtggaaacagggtttcaaatctccggggaatgcagatcttttacagcatggaggcttcgttactatgagtgggcaatgcaaatttttgagcagcactccatgagtgaaggggcatgcgagtttgctcttggtgctcttgaacaaatagatagcatcgtcgatttagataatggaagtgaagctgaggatatccctgaaactacaactatgattaaagggcgactatgggctaatgtattcaagtacaaattggatttgaaaaattttcaagaggcgtattgcgcaataatctcaaatccagataatgatagcaagtatgtctgtttaagacgtttcatcatagttctttgtgagcttggcgagacaaaggtaatttgcaatggcgagataccattcactggcttggtggaaaaagtggagcaagagctcttctggaaggctgagcgctcggatcttttgtctagaccaaatctttacaaggtcctttattcatttgaggcttataggaacaattggaggaaggctgctgcacatatgtataggtatttcgttagattgagtagagagggtaatgctggtggaacccggcaactttctcatacattgcaagagaggctgcatgctttgtctgctgctatcaatgcattgcagcttgttgatccctcattcgcttggcttgattctgtttgtgaagcggatgatcaaatctcaccaagtaaaaagccctgtaatcttttgatgaagaactctgcttttggcacagattcagagctgtctaggttgaagttttgtgttgacattgaaattctcgaaaaggaatatacactaacagaagcactctatatgctcagcactgtaaattctagattcaacttttcagataaccaatctattgaagcactgacggatattcttataaatgagaatatgtacgacatggtgttcaccattgtgctgaaatttcggaaggagtcaggaatgaaaagggagttggaacgtgtatttgcagcaattgcgcagcaatgctgccctaatagagtgggcaactcagggaagaatttactgctgccatcttccgatgatgatgcctgtgatggcaatggtaacagtattgccatggctcatcaatcccaggggagttgccattgggagactcttgaaatatatttggagaaatacaaagatttgcatcctaggttgcctgtcattgttgcggaaacacttctttacacagaccctgagattgagctaccactttggctagtccagatgtttaagaccaccaaggctggtaacaggatgatttcatggggtatgtctggcacagaggcagaccctgctacattatttagattgtacataaattatggacggcacacagaagcggccaatttgctggtcgagtacttggaatcattcacatcatcgagacctgtggacgttctccaccgcaaaaagatgtcagcggcctggttcccatacactgccatcgagaggttgtggtgtcagctagaagagatgcaaaatgctggccacagcgtggatcagtgcgacaggctcaagaagttgctacatggatctctgattagtcacctgcagcaagttgtggttgattcagatgatgtgctttcatcgcttggaggagggaaaggaatggggagccaaagcaattgagtttttttttcttttgttccttagtgagcgagcaactgagatcttgtgagccgtggattagtgtcagcttactgttgtactgtcatgtgtatgtaatagttgtatggctaatgcctgtgagccatgttcatcacctgtttctgtagacaagggcaattttccatttgtaagtccttttaacacttatgtgaaaaatgcctcgctcctttgaagagtaccaggctaccagcagacacataaagtttcctcgtgcccttttgggtttgtttg

SEQ ID NO: 77406 - DNA, 461 bp, Oryza sativa
  Clone ID: PAT_MRT4530_77307C.1
agtcgcacatcacatagctcagttttattagcgagtcaaaatttcttgaaagaataagaacaactcttattttgtctacaagctttttaggttctactcggtactcactgacacaaatctgcaggtaccatttcaggtaatacctgctgtctcaccaacttctttatggccatctataaatatctcatcacacgctactatgcttactggaccaaaacctcgttttccattggaggaaacaagagagaagcctctcatcaactcacaagctgctggttaccgtagtaagggtaggctccatatgctgctgcatacatgtttgggtgtggaagtggcgacgcatagccatatccaccgtagaaaggtgtaccgtagtacatgccattgcgccggtggccggaatcacccctagactgtttgcttgctggactgcggccccaggaaagacgcactgcctgctt

SEQ ID NO: 77407 - DNA, 1632 bp, Oryza sativa
  Clone ID: PAT_MRT4530_77308C.1
atgtcgtcctcccccaaccatttaataccccatcagcggagtatgttaagcatctctccaatcaagtcgcgattccaagcctctcatacgaaaactactattttctcggcccagtggacaaccctgattccactgagtttattattggtaaaccaataggatccccttcagattaaccaccccagatctaggtcactgaaagaatactttcaaatcttggcggtttatagagaaagtcccacctgaaaaagttggaccacatggttcaaacgtgtatcagcaagaaaaagggttcactgggatgaaattggaatcggccaagaatttgccctcactatagtaaactcggccaaagatgaacccttgagggcaactgctttttatttggggtcaaacaccatcaatgcctttttgtttaatcaagggccgatgactccaactttaatcgatatcaccatgataagtggattagatgtaacttcatcggctaaccctatgagtatgaacaccaagaactaatttgacttcaagaccaaaagcataggtggctggtttggctatgtggcggcatatatgggccaaggatccgttacccctcgagagcatgtaagctctcttgctcatggggttagaaaaggtcctcttatgtggatccagttgtggccctacaaccaactgggaaattttagccgaagccttagaatcaaagaaagaatttcctttgggcaaaaaccttatcgggtatctgtaccaaaagttgaacaatgcattggctaaaacaggcggcggctcaaaaattggagcaggtggaccaagggagctgctgcaaacttgggtaaaactgaaaggcaataagggtgagaattagccatttgtgaaagaaactgaatttccaaagattagagccgactgttaaagaagacggagaggaactcacctattggggaagcacattatatggagaggacgcctttacaccaactggtgcgggagccaaaatattggggcgaactgtttaaaaataggttttggtagcttttaagaagggggttcaaaagggggatttatggggaatcaaacacatttggaaaaagcaagcgggatttagaattcgaggacatcaccaatgacaggatattaaaaggcttgagaaatcttttatttggaaaaacgccaggggttctttcagtggggagtaataacgggggaaaaaaccgaggtttccaacagtgtttataagccaaggggtccggccgacaatttgggaagggacaaaccgccaaaggggtaatatttggcgctaagaaaaaaaggccgggagaaaaagtcataacttttaatagaggggcgggtgggttaaaaaacaaggaacgtcctttgggtgggaagggagacaaaaaagaaggggaacgctttggggagcaaaatattttctaaggtgggggtggaaagaagctacccatttatttaccacacggggtgctatggtgaagaaaaaaaacatttcataaaaaagacctctccgcaagagcccccacacacgtgcggttgtaagagagaaaactcagcggggtgcggagaccgttacaaacactctttccagagtggcgcacaaaaaaaattagtactccc

SEQ ID NO: 77408 - DNA, 1948 bp, Oryza sativa
  Clone ID: PAT_MRT4530_77309C.1
tttttttttttttttttttttttttagtttgaaaagcaggtcaccaagatgataattttcatccaattcctttagtttaaatgttttttggtttttttttttttttttttttttttaacacaaaagtaataccactgtattcatatttcaatggaaaaaaaacatattttacaaggcaaaaatattcccaaagttcaacatatacatatatagaagacctaataattgaaatacagtcacgcttcattagaagaaaactaattaaacagagaggatgtagatggagtgtattgtatccttgagcgaacttggatgagtgtatgcatcttggtcgtccttgtagacgaaatccagcacgcgtgtggcgttgacgacggcctccagcagcggcggcggctgagccgccgccggccggagacactccccggcgatgtccatccatgactcctccacgagctccctcagcttcgcgtaggcttcctccttcgtgatgccgccgtgctccctcatgcaggcttccaccgtcgacgacgacgacgacgaagacccttgctctctctcatgtgaagctatgtcattgagtaatcggccaacgatgcaggaagatgtgatgatcttggggtaggccatgcccccgttgatagcatcatcggttgtgacatcgttccccatggcgacgaaggagtagacagggacgtgcatgcagcagatgcttggtctcacttgttcctcggaaacatgagcttttctcttcatattcagtgcaccttcagagcgccatttcacctcgttgtaaaagcatctcgtagcgtcgattaataggtttttgacatagtcgacatgcttgttcccttggagtttaagatcagtttctatggatttcatggtggtcagtactttcttgtagaagaacttcatgtagcctggaagttcttcagcggcttcctcatcccatctttcaattgcttctgtgaacagcttgctttcttccaaggtgctgtagttgtcgtagatgtcatcgaaaatcgagacaaagatgaacaatttagtgagcatggttctcccatatgagtactgaggctcgaagagaactccaagcatccaaaagtgcatctccaccatcctatctcgcgcaaagcttagatgatcctggagttggagctctttccaccacatggtgaggatattgagctcctcgcaatacagagattgcaaaatcccaaagtcgagcttggcgaactccaaaatggtctcatttcgtgtgggcaacttgtcgtaaactgagatgtagtgccttgcttcaactcttcttggcctcctgaaaagaggggtcctaagtgcactgcacacctcgtccgccattggcgactgcagatgttttaccacagactgcaaatagttcctagtgaagacgatagcatcgtcgagtatctcctccccatgaatcctgagatgggcagcattgtacaagctcagcatgcttcttgtgccgttattgttatcatcgcgtgtgaaatttccttcctcgtccctgaacctctggaacacatctggagaggcatagtatccatgcttcctgagcagatagaaccggagagctgtagtgtggaggtcatagtgattgtcggtatcgtcttcttcctcatgaacccggcgcaacacattttcaatctccttctcgtagtggtagtcaatgcaaagacgttctaaggtgtcgacgagctcaagttttacgtgcaaattggggccagaagaacactcaagtatcatccttctcacttgttcctcggaaacatgagcttttctcttcatattcagaagctacatatacatatacatgcgaggacgattatgctacgaagtaattaattatttgttaggcatatttatatgtactatacgtactatatatctctaaatgaagaataatagatagataggaaaattg

SEQ ID NO: 77409 - DNA, 857 bp, Oryza sativa
  Clone ID: PAT_MRT4530_7730C.1
atgacgtcaccgacagcggcggcggctcggcggagcggacggctcggacggcgcacgctcgccggcgaacggcggcgctaggacgcaaacggagggcaccagcacgtagaggacgacgcggcgaacacaccggtgaccaaaacggcggcgaaagaacaacgaacgacgacggcgacgaggaggaaacggcggaaaccttcgggttgacaacggcgacgaagctccggcgatctccgacggcagcgaaggggcggacgaggacggcggcgacttggcgaccacgacggcggtcttcccgagcgacggcgacggctggagcgacggcggcgcacggctggagcgacggcggcgacggcgaagctagggcacacggcgctagagcgattccggcgacgagaggcgaaggcgagggtggcggcggatagaggagacaccgggggtccttttaaaggggctcggaggcggcggcgaaggcccacggcgaccggcgaaggaaggaaagcccgcggcttgaaggaaaggggccgatccgaatcgaactcgattccacgaacttccaaaacgatttagccgatgtttccaaaggagaaaaggtagaggagatcccgaagagtgtttcccctctatcaattcggccggagaaggaaaggaacgaccggatttggaaggaaacggcggcggcacgaaactagggtttcggcggcgacggccgaaggtagacgacggccctgacaggtgggccccacctgtcagcgggtggacgcgcgcgcgcggcggcggactgggctggctgggccgaggagagagagaagagaggttttgggccgactttcggcccaaagccaaaagaagacttt

SEQ ID NO: 77410 - DNA, 1981 bp, Oryza sativa
  Clone ID: PAT_MRT4530_77310C.1
gttattttgagaaaccatggagaccgcgcatctagcctacgtgctcctcttcctcgtcaccgccgtcctcctcttccatctccggcgaggcggccggtcagctccggcgaagctcacgacggcgcaccgcccgcacccgaaccccgtcctgggcaacaccgtcgagttcatccgcaaccggcgccgcttcttcgactggtacaccgacctgctgcgcgcgtcgccgtcgggcgccatcgaggcgtggggcccgttcggcgccggccacgcggtgaccacggcgtgcccggccgccgtcgaacacctcctgcgcggcaacttcggcaactatgtcaggggggcgagcttccgcgccgcgatgtccgagctcatcggcgacggcctcttcgccgccgacgggcgcctctggagcgtccagaggaaagtggcgtcctacgccttctcctcccgcgcgctccgccgcttctccgacgacgtcctcgccgtgcacctccgcggagggctcctcccgttcctggacgccgccgcggcgtccggggaggccgtcgacctgcaggacgcgctccgccggttcgccttcgacagcatctgccacgtcgcgttcggcgtcgagagctcgacgctgctcgagacggcgagggaggactccggccgccacgaggccctcttcgcggcgttcgacgccgccgtcgagatctccttccggagggcgctggcgccgttcaccctcgtgcggaagctcacgggcctcgtcaacgtcggcagctcgcgccggctccgcgaagccatcggtgtcatcgacgactacgccatgtccgtcgtcgaatccaaggaggcggcgtgtcgcgatcgcgatagcgaggacgtggacccggacctgctgtcgcggttcatggcggccatggacgaggaggacggcggcgagctgggcgccatgttccccacgccggaggggaagcgccggctcctgcgcgacgtggtcgtgagcttcgtgctggccggcaaggacacgacgtcgtccgccctgacgtggctcttctggctcctcgccgcgaacccgcggtgcgagaggcgcgtccgcgacgaggtgtcgcggtcgcccgacggcgacggcggcggcgacgcgaaggggatgcacacgcactacctccacgctgcgatcacggaggcgatgcggctgtacccgccggtgccgttcaacgggagggtggcggtcggcgacgacgtgctcccgggcggcgcggcggtgcgcgccgggtggttcgccaactactccgcgtacgcgatggggcggatggagaggctgtggggcgagggctgcctcgagttctcgccggagcgatggctccgcgacggcggcgagttcgtggccgtggacgcggcgcggtacccggtgttccacgccgggccgagggcgtgcctcgggaaggagatggcgtacgtgcagatgaagacggtggcggcagccgtgctgcggaggttcagcgtcgaggtggcggcgccggctccggccatggaatcgccgccggcgtacgagatgacggcgacgatgaagatgaagggcgggctgacaggagataatcaaatcggatcacaaataaatcacacaggagaggaaagggcaagcgagaggccgtcgctgctcctcgccgcctcgttgccgggatccaccaacctgccactgcgccgggaatacgttgcgccgccaacccgcagccgcgcagccacgccgtcgttgcgccgagaagtcgctgacccatcgctgcgctgggcagatgttgagagggagagagaggagccagatcccaagccgctgcgccaccaacccgccggatatggcgacgagcgggacagcggcgacaccccgacgaggaggaaaggggccaccgcccaccggtggggaagggacagcgccggtagggggagagggatggggagctgcgatgctggtggggagaggggagagggaacagtgtcgccg

SEQ ID NO: 77411 - DNA, 435 bp, Oryza sativa
  Clone ID: PAT_MRT4530_77311C.1
ttcatctctcgccgttcgcagagaaaaactcagcgcctgtcatcgctcaccctctgcgaacagatcgaatccagacccagacgcggatctaggattcgagagcggggatgtgagtcaacacacgccctgctccggatcgacccgctgctctttagccatggcaggaatggcgcctacaggctcccagcttgatgctcagcactatgacaggacgatgcaggagctactgcaccaaggtgacaatgcggaatgcttcactacatatgatgaagtgctagagagcggcgatgacatgagccttagagagaccctcctaagaagcgtctatacttatggttccgagaacgcatcatctatcgatcataaggggattgttcactacagcacagggctcgatgagatgcagtatgctcagtctggaacaggaaaaactgc

SEQ ID NO: 77412 - DNA, 250 bp, Oryza sativa
  Clone ID: PAT_MRT4530_77312C.1
gtagtggcttcccccatcagtatacaactggtagttgggatatacagttaagtatcatttggtagtctacaggctgcactagcatctgtgtgttgtgcaaacctacaaggtgtactttttagctgttgatgattcatcttttggagtcagtggtcttaactcatagtagtcctatgcaagaactacaattctttgcctgataactgatggatgccactaattaaccatgagttctaaaaaaaaaaaaaaa

SEQ ID NO: 77413 - DNA, 249 bp, Oryza sativa
  Clone ID: PAT_MRT4530_77313C.1
cccacacctacgtacattactagctaaattctatcttctttaacacatacgatatggggcgggactactacatcattaggttgatcccaaacatctcaagaattatctcaccttcgttgacaacaacttccagatctacttcacccttcaccttaatctcacgattacgtgttacacgtatatcctcaacaagaccctgactatcaacaccattacaccttgacgttaagcttggacgacacatatacg

SEQ ID NO: 77414 - DNA, 504 bp, Oryza sativa
  Clone ID: PAT_MRT4530_77314C.1
cgctcggccagacccagtccgatcactagctcctcccaacctatccgtttacttccgtggcggtacgcggccgggtttcaccccagcgcgcaccagctcaccacgacggcgacgcgcgcgcgcacgctgccctcctccgagccagtaaaccgagaggagaccgcgcacgcagggacgtctcgggctctcggccgtgtccgcgccgcacccgcgctcgcccgaccgcccaagacacctcctctcggccaagccgggggcggggggtcgcggtcaatgcgacacgcggaggcggagatcctcctcttcgctctgcgcgcgcgcgcggatcagcaaaacgccaatgataaaacgccggcgccgtgcagagcaccgcaacgagaccggatccacgggccccctggtggatggatggatcgacgtgtgccatcaaagtcgctggatacatcgaaccggcggatgattgggacgagaatgagtcgtgtgcaaggggagacgtgcgaatct

SEQ ID NO: 77415 - DNA, 572 bp, Oryza sativa
  unsure (1)..(572): unsure at all n locations
  Clone ID: PAT_MRT4530_77315C.1
anttgtntgtcgactcnactacaatggcgngttnggtgggtggcnngcccccccagtgagttttttttttttttttatgaagatacaaattatgcnncnatttatgtcacacccggntatcgnttgtctntgatgatgantnangagcttanntacaanttcgtacncncnatacngtcanggngnctnacangaccccgccnnnggtggctnnggnactgggtncancaaggctatctagggtatgaaacantngntgcagagnacntctangatcccagtaatctnaagctngaaccagnntccnatntnccnntacatntnccctncgccggcttcccntctgntgnggcttggactgnactgntgcatntctcnacgctgcttacccggtggcttagaggaccanctcagtctgtgccnacttngcctntttctcacgacgncacacagctgatacantncngggcctccccngttgcctgatcntgatctcaatcacnccatttggngtctcatcgccaggnnccnnaccgnangggtatgccatcatccgatngncncccnccccc

SEQ ID NO: 77416 - DNA, 717 bp, Oryza sativa
  Clone ID: PAT_MRT4530_77316C.1
tcctagcatacttggtggcggcgagttcgaccccctatcaccaatggaggcctcctcatcggctatcgagcctcctcatctccctactctgacagctttgccctagggtctagtgacgtctggcttgtgtcggtcaaatgtagcctccttggtgccggcatagagagaggggggcttctctcgttgttgcagccgccttaccaccgtctttgtcgttgtcgcaaccgtggcgaagaggggtgtagctctaggcggagtgcgtgcgtgcgaaagagaggcgaggaaaaagatgaagtagtggataacatggcgccggacggcgggcggcggcagctaggcgtcgtcgtctcgtcctctgcggtgcgcgccgtgtgcggcggccggcggtggcggcctgcaggtgtcgctgcgcgtggcgcctggcgcggagacggaaccttttcatgtcgatcgaggcccaactcgccaagtcactcgcggtctagtccttgcggaagtacgaaacatacagagagagcagtacgtgtacccatgaaccaccacgagagagaccggccgagggccgcggccgcggccgcgacgagacgacgaccaaccggcgacgttcttttgttgcccctctcgtccgttcgatcggtggagcgtcgcaactcgcacgcaccacacgcggtcgtgggtgtggcggtgaaacgacctgtggcgtgtgtaggagtagat

SEQ ID NO: 77417 - DNA, 221 bp, Oryza sativa
  Clone ID: PAT_MRT4530_77317C.1
ggcgcatgcactagactgtcggatacggtaacaatgctaactcggctaacatactagtagtgatgtgtgtgtgagagtgtaattaactactatcgaatcgatataaccaatgtgaattactggactgtcgagattggaacttaatccatggtctacacatgcgacatgcgtatacgaagagactgcagtatgatgactagagtcaagagtcagcatatagt

SEQ ID NO: 77418 - DNA, 285 bp, Oryza sativa
  Clone ID: PAT_MRT4530_77318C.1
tcaccaggctcctccatccagacaacatggaggatcagagaacatgaggcggcaggagatatcttcaagacctactcctactccattgggaggaccagagttatcatcaccaacagaaccatcatcagaattattatggtcacaggcaaatgtctcaagatcagtatcatcaccaacagaaccatcatcagaattaccatggtcgccagggaatgaacggaaaccagtaccatgacaggcagaatcataaccagaatccccagaggtttcgaccatggaagccat

SEQ ID NO: 77419 - DNA, 2157 bp, Oryza sativa
  Clone ID: PAT_MRT4530_77319C.1
atggccgcccccgccgccgacgacgacgaccaccgcgccgccctgccccgtgaggaggacgacggggaggaggaggagggatcggaggaggaggtggagagcgacgacgaggaggaggaggagggggaaggatatgactggtcggaggaggacgaccccgaggccgcgagcctcgccggcatctgcgaccccgacgcgggctcctacgacgaccccaccttcgaccccgccgccgacggtgacctcgaggtggacgccgtgctgcggtccaggatggcccggatgtcactctcctccgcgcgcaaggacaggaaaggatcgcggatgccgaagatggggaaggaggagatggatcttctagccatggtggacaagctgatgcatggtcagttctttcttcgattgccattgtgtgactgtgatatctccaacaatgtgatgcaaactgatggccagttggagaaactaaaggtttatgaatgcaaagcatatttgaggatgcacaagctaagattgtcaggcaacaaggaagtgctcctaactcgcatcagaggacaaattgagtatgaactatatcctttatgtaatctgtccttcttctttatatgttacttgtcaactttgttgatattttgtaatgcaaatgaactgcttttgtttgaccactttcttgtgcttcaaaaccagggtgaaaactatgggagaggtgattcatgcaaaggtgatgttgtggtctttgagcaaaatatttacaaaaggaaaaaaggagctcctcgtggtgtcaagggtcatttatgtggtcaaaggacaaatgcaggtcgaataatcaaagaaagctatggcactaagaagcaacagcacacgttcactccatggcttgatgaagaggaaagaaacagagccctccaagaaaaacatgcaagagggtatgtggcacgtaagacaagggaagtcaggattaaggacaaagagaatgaacggatgaggagattaaataggaacaaggaaaacaagagcaaaggacaggacaacatgaataaaaaatcatctcaagcggtttttccgcaacatacggtgactacgaatactgttcagaaaagagctgagaagataattccttcactccaacatggtgaatctgggaactcaagtcagcaacatttatcatcaaagcaaactcccacagagcaattgctccattacctgccacagttccctcatcctcaacaacacaacgaagtgcttctccaaaagggaacatcaagaactagcacaacgcagctcattaaccatcaggctccttccctccaacatgccgtaaaagtggaaacaacacagcagcagcagcagcagcagccgccaaaatcaatcaagcctgctcctatacagcaaagttctgcatacccacagcagtatcccaaacatcaacaccacaatcaagcgcttccgcgggttcctccttcgcaagagcaaagggctgcagtatcccaaacatcagctgccagacaagattttaccaatcaccaggctcctccatccagacaacatggaggatcagagaacatgaggcggcaggagatatcttcaagacctactcctactcctactccacagcaagcagtctcttacacacagcagcaacctcctaatcatcaatacaggaatgaagcgttttggcagcagggcgggacaagtacttcaagaacaggcttcatggatcgtcagagtaacaattggggctctacagaccatgataaaccagccttccagcctttcactcagaaggcaaagacataccaacatggttccaatggctctggtcatcaccaggctcgtgtcgatcgcgaaacgcatcaacctctcaggtcaagaaaccaggattaccattgggaggaccagagttatcatcaccaacagaaccatcatcagaattattatggtcacaggcaaatgtctcaagatcagtatcatcaccaacagaaccatcatcagaattaccatggtcgccagggaatgaacggaaaccagtaccatgacaggcagaatcataaccagaatccccagaggtttcgaccatggaagccatgcttcatttatcaacaacagggatggtgcccgtatggggaaaactgcaaatttatgcatgatttgaggtag

SEQ ID NO: 77420 - DNA, 339 bp, Oryza sativa
  Clone ID: PAT_MRT4530_7731C.1
ccggccggggccaaaggtatacaccctattagattgacgatccacgacctcggtgaggcgcgccctacatgtcctaacgaggatgatgtagtgcgtacttgtcaagcagatctcgctaggacggggacatgttaggcgcggacgtagacatgggctccggtgtcgacgacgccgtgcagatgcatgagctagatcatatgaagcaaatgcttaagcagatgcaggaagagatcgctcacctccgcgcacatggagttcttcgatgtctctaatatgttgtgacgatatcctagcgcgtctactgctcagccgaaggatgaagcgaatgctctacctgtg

SEQ ID NO: 77421 - DNA, 228 bp, Oryza sativa
  Clone ID: PAT_MRT4530_77320C.1
tctacaaaaatgaagatcattttcgtatttgcgcgccttgctattgttgcatgcaacgcttctgcacggtttgatgctcttagtcaaagttatagacaatatcaactacaatcgcatctcctgctacagcaacaagtgatcctcgacccatgcagtgagttcgtaaggcaacagcatagtggcaaccgatcccttcctggcaaccagctgacttcattgataacacag

SEQ ID NO: 77422 - DNA, 627 bp, Oryza sativa
  Clone ID: PAT_MRT4530_77321C.1
agtggatcccgggctgccgcggggactctgaatacatgaattcccccatggccaaaaccttcctcccaggtttgcatgttgatcaattttctcctctgctgcttctccaatttcttcttcgctggagatatcgtagtagtagcattctttctcaagggaattccttctttctcaagggctgttcttgagagagtgttctctctgtgattaattcttctagccgattcaccggtttcgccgtcgtgggcgccgcgaaaaaatgtacaggcgagtaggcgaccaccggaatatactggtgattaattagctgagaactgacgagcaacagcacactgttctaccgtgtgatcatactgtgattgatgcaatactgtcggttgctgctgccaagctggttctgttctctctcgcacgcaattgagcaaattatattatattttattttatttttccttgagatcgatcgattgtgatggccatgcttgccaccgtgtgctttctctgcttatcaactgcctcagtttgggagttcttcttcgtccatgtcgccatcaaccagctgacagcaatgcacactgcatataatagttatgaaaggaacaattctagagctattactatcttttt

SEQ ID NO: 77423 - DNA, 113 bp, Oryza sativa
  Clone ID: PAT_MRT4530_77322C.1
cccacgcgttcgctcgtatagcaataatataacgcccaggcacctgactgcaacgaacgctgccatgctcaactaaccaccgcagggaggactgctcctgccgcatggttgac

SEQ ID NO: 77424 - DNA, 169 bp, Oryza sativa
  Clone ID: PAT_MRT4530_77323C.1
agcaggcacgcctgcaggagccggtccccaatacagcggccgacccacgcgttcgataaattcacctattcaaatagcattcatgttagagaatgagaggaaactaataatattagacacatcattaaacatcacctgcaaaaacattattaaagcaccacacatagaa

SEQ ID NO: 77425 - DNA, 288 bp, Oryza sativa
  Clone ID: PAT_MRT4530_77324C.1
atgtgcacgtgcgggggtgagctcttcttcttctccgcggcgagacgatggaggcatcgcgtggagatgaagcggcggctttacctatggccgtctctttctcagtcacggaatgggtgtggccgtctctttcttggtcgggtcgggtcggtgtgcggtgtccggttaatttttgcccacccctaccaccgaggactgacatcgccgaggctgcgcacggagccatcgctaccgagggccaccgtcgccatcgagggctccgttgccgtggaccgccgccaccgctag

SEQ ID NO: 77426 - DNA, 870 bp, Oryza sativa
  Clone ID: PAT_MRT4530_77325C.1
atgcgtttgacgcgtttaggtatgatgaagaaaaacggcaagaggactaccatggatcatggcacggctaagaagacgaggtcggtgaaggtggcgaagaagacggaggcggggctctgcacggatcagcagcaggatgtggaagaggagacgaccaagatgacctactccatcgacagtgactcgctagatgcaagaacgggcacgccgcgtgcggctcctgctgcgtcgtcatggatggacagggcatgcccgagctgcaacgagcccatcggcgacatccggtgccggccgctggagaaggtgctcgcagccatgtccgctccctgcaagttcagggcgagcggatgcatggagactgttggcttcaccgagaggctcagccatgaggcgtcgtgcacgcacgcgccgtgcggttgcccgttcgacggctgcacctacctcggcctgctgctctacaaccacatcctggacgaacacgccacggacgccgtcgtcgccatgggctccctccggggcaccactgtgacggtgcacaagagcaagccgttcaacgtgctcctccaccgcggcggcacccgcggcggcaaccgcgtcttcctcctgctcaacggcggcgacgtcctgtccggccgctcgctgtcgctcgtcagcgtcggccctccgccgacggcgaactgcgagctgctgtacaagattgaactcgccgccgacgggccaggaccgtgcacgggcgtgcttaagctgtcggcgtctggcactgtcccgtgcgtccgccggctggaggggttcaatgcgaaggcgttcctcttcgtgccggattcttactggggctcgtcggacaccgtctccgtcaccgtgctcatctaa

SEQ ID NO: 77427 - DNA, 1520 bp, Oryza sativa
  Clone ID: PAT_MRT4530_77326C.1
atatcagactgcatttgtgagggaggggttgcataagtgtacgttgaggagcctgaaatagtggacttatgtgatgattcagacaaggatagtgattatgaagctgacatggaggtggacggtgaaaaggaagaggattgtgaagaaattgctgcagatgttgagccagagcaaataaaaggcaattgtgtgcaataaacagtaacccaagaagctcagggtgatacaagtgcactaaagggtaaagctgtgcaagaatgtgatgaagatgagaggatgcttgtggtttatcaccctgattctgcccccttgctagtgtgccaccctctgaaagtgaaactgacagtgattacatcccaggagatgactgccctctgatgatgatgaagaaacagttgaaatagagaagcattttaaagaggtgaagaagaaggttaagacagcacagttagacatcttggatgatgtgttctttgtggtagagaggtccaaccctagtgacagaccagctgcagatgagggggatgaaaccccttatgttgacagtcaatatgatgactcaattgaagaaattggcagtgatggagaggttaggataaggagagacaagcaccctaggtacaagaagagagaaggggtgcttgtatttgaactaggcatgaagttcaatggcaagaagcaatttaagaaagccatgacaaggtatgtccttgctgaaaagaaggtggttaattttatgaaagatgatcggataataaaattgtcacaactggcaggatagctgagaaatactggaattcatagctgccatcccttcatggaacttgtcacacatgaaggccacagtacaagaagagatgtttgctgaggcctctatttccaagctgaagagagcaaagtctattgtgatgaagaaacagatggatgccacaaaaggacagtatcagaagctgttcaactaccagcttgagttgttaagaagtaaccctgggagcacagtggtgttaaacaaaatagtgggacgggtcctagcacaggaggttctaagccaccaacaactcagaatcagccaccatccatttagaatcagaacctggttctgtctaacacaactcaaagctatgctcaaagtagaagaggaagtcagttgggtttttttgcagactcctatggattcctagaacaaggtgagggtgaatgccaaggccaaggtttctgcccaacatggtggttcagctaggattgatctacaagcaattgttccttattcacagagttctaccagtgcatcagtgagagtcacttcagggagtgcttctatctgcgtgtcagctgaggaacctgcatatgccaaatcaaggaggaagacaagcggtgccttgctgctattgccatgggagtgtccgaggacggggccaggtggacccacaaaggggcgggtagatggaccactgtgatttgtccaggcatactaaaaaaactgaatgtgtacatcattgagtctggtttctgtcatgcaa

SEQ ID NO: 77428 - DNA, 114 bp, Oryza sativa
  Clone ID: PAT_MRT4530_77327C.1
atggcttcaagttactccatccatttcacaatgacagcgggagagggtcacaatggtagagagcaccttgcagattggatggatcgttgggattctcacactgtcatctcttga

SEQ ID NO: 77429 - DNA, 308 bp, Oryza sativa
  Clone ID: PAT_MRT4530_77328C.1
cttacaccaatcccaagagcagctttctctaatcacattattcccattctctcctttctccatttctacaatttctactatctcctccttcaattttaccattcttaattaatttttcccttacatcttctatttactaatcacttttataatcaaccacttcatatcttcattacttctttaagtacttcctcacttacttctacattcataactcctattcttcttcttttcttttattcatttccttattatctctttctttacattctcttttatctattttcttcattacttcatatctcctt

SEQ ID NO: 77430 - DNA, 3862 bp, Oryza sativa
  Clone ID: PAT_MRT4530_77329C.1
ctagcgcggcgtaggcggcgggaggacgacaagcgcggtgtagaggcgctcggagatgccgtcctggcgcgcgtggaggtcggcggcggcgacacagatggtctggtggtcggcggaggtcccggcgcgcgcgttggtcggcggcggcgacacggatggcggcgtcgatggcgtcttccagggcgctgccgcgctgctcgccttcacgcggaccggcggcgctccggtcggggggcagcgccgaccacgcccaccgctgccgccggagctcgcctgctccactgctcacccgcgccgtcctctgcccgggaagaagagagagaagggagagggaagaagagaggaggggaaactgatcgtttgttgggttcgtggtggctactccatcaatacaataaaacggttgccaaaaagtgtccatagctcgttgcgctcaagcattgttctatttgacctatcaagggttgttgaggagctggtatataatagcattgacgcaaatgcgagcaagattgacatctcagtgaatgccagagcatgttatgttaaagtggaagatgatggctgtggtattactcgtgacgaactggttcttgtaggagaaaaatatgcaacatccaagtttcataatgtcatggttgatggggaacctagttccagaagttttggattaaatggcgaagcactcgcatcactatctgatatctctgttgttgaagtcaggacaaaagctcgcgggcgaccaaattcatattgcaagataataaagggatccaaatgctcacacctgggaatagatgagcagagggaagttgttggaaccacagttattgttcgcgagcttttttacaatcaacctgtacgcaggaaacaaatgcaatctagttacaaaagagaactacatcttgtgaagaagtctgttctgcgagttgcactcattcatccacaagtttcactcagactttttgatattgagagtgaagatgagttgctatacacgattccttcatcctcccccttgcctcttgtatcaaacattttggggaaaaatgtctccagctgtcttcatgagatagctacctctgacaagcattttgctctttcagggcacatctccagaccaacagatgtgttctgtaataaggattggcaaactgtcatgtatttctttgaacgaactatcacagactattggaagaagcatgcacctcaactgccagaagtgaaagctattggcaatgatacctgtgtgcctttggaaagagatgtgaaatcaagtcaggaactgttaaggcgtcatggtgtgcagaagaaagaagatgtcgctgaattgtaccaaacagctctgcagaagaatacagtacgagacatgaattttgatacagctgccccagcagaacctaaagacaattacctttctttggatatggagccatccacatggcgtgcctgctatgaccagatcagtgatgcatcccacacagatgatgttgctaggaatggtcggaaatttggtcataagcaaatatgttcccttcaaagttatagttatcagtggttagaggacggctcttccctgttagaagactctgatctttcaagtgctaacccaactatttgtaaaatgcaaaagacagaagatatattccatgggcatgcatattctggtaagtttggactgctacaagatgcagaaatcgaaatcggtccagaaattaaactccaagaatattgctttgaatctcccaataaaccgaacagaatgacctgcgattttgtgcaaaagcaaaccaatatagaggcacacatttcaggccgtgatggattctatgttgattttgataaattgaacgaggactgtctactcaatgagatatcaaagacaatcactgatgtttcctgccctcaaatgccacactttaatgatggactctgtcctgaggacgttggctcctccaagagttcctgtagtgtcaggaaaaagtctagtaaaaggcaaaatagtgctaatgcaattgcccagatgaagttccatgatatgcaagcagtttgcgaaagtgattacatggataggtccttcatcaaggatacatgtggccttcatttctttcatccattctcgttggctgatacacctcgcagtcacagtcgtgcaaggattgacttggaattgcatggaaggtcaaatgaaagcattaacagttggaactgtgaaaatattggcactgattttggatttacttcagacaggtttaatattgattcatcaatgatttttgaaggaagcaaacatctcaataactttggcaatggaactcaatctcctagttacttcaatcatgaatattgttctgtcggtcagtttgcttccaaacaggatcggatacccttgaaatcaaaacatgatgcaagaatgtcatatgatatttctcctgagaaaagttctactggttgtcatttgaatgtttctttttcccaagtggcaaaaagcagcaagcttactgaagatcagtatggatgcagtcagaggcccaggctttccagaggtagatataggagtcgttctgcaccaccattttacagaggcaaaagaaaattccctagattaaacgaaccactaaccaaattgactacagaaggtggtaaatataccactgttaatgactcaggagatatcacacctgttcaggagtatacatcacatatgaacgcaacccaacctattcctgagacctttagcaatgacttttctgacctaaatttcagcttgaagggaaatgtcaaaatgtgcgaagagaaatgttctgatgaactcgaagattctactgcttcagatgaaataacaaaatggcgtgatgactctgaccatcatgcagttgagcattttgtgccaagagtttcggagttgcaacatggtccttttgaacacgatgatgatgtacttagcatttcttatgggcccttacacctctcatgcagtgttctagttcctgaatgtattgataaaaattgctttgaggaggcaagagttttgttgcagctggataagaaatttattcctgtcatatctggggaagtactactccttgttgatcaggaagaattcattttttatgttcacatactatatgaagtagtcagtgtgtatatggtgacaaagcatgcagctgatgaaaggatacgtttggaggaactccgtcgaaaggttttatcagatgatggcagagggattacttacttggactctgaggaggacttagttctccctgagactggatttcaattgttccaaaagtatatgcaacagatccaaagttggggctggatcatcaacagtactaattcctgtgaatcattcaaaaagtacatgaacgttctgaggagacaatcgcgccgtcttactcttgctgctgttccatgtattttgggcgtcactttaacaggaaaagatcttatggacttcattcagcagcttgatgacacagatgggtcgtcagctatccccccagcggtcattcgtattctcaatttcaaggcttgcagaggtgcgatcatgtttggcgatcctctgctaccatcggagtgctctctgattatcgaagaactgaaagcaacatctttatgtttccagtgtgctcatggacgtccgaccaccgtgccgattgtgaacgtcgcatctctccgcggcgagttggcgaggctcggagcggtgaacggaaggcaagaagagacctggcatggtctctcgcaccatggacccagccttgaacgtgctcgaacgcgcctcagagaactgagaaagctacgtggtggcctgtagctgtacaacagtacaagatgtaggatcatatagagggtaaat

SEQ ID NO: 77431 - DNA, 429 bp, Oryza sativa
  Clone ID: PAT_MRT4530_7732C.1
gggcccccggcggaaaaaatggcttccaacaaggcccatcctggggaagttggccctaacacagtccactaatggatacttaaatcctttcccttttttaaaagcaagataaccccctaaattttacggacagaatttttgagctcctgacctgggggaggagctgaaagaccttggccagagcttcttgtttttttctgaaaacacacccggaaccggccctgcaaaaaggggttgaacccggcatataaaccagctttctttgaatggggtagggaattttatgaccgatctttttttggcccccttcgagaccccggatttcccccccggcggggccctggccttaaatggcctcccgggggtggttgggcccctggttacaaagaaaaaggactcccctttggggcctgcttcgggggattgaag

SEQ ID NO: 77432 - DNA, 383 bp, Oryza sativa
  Clone ID: PAT_MRT4530_77330C.1
ggggtggaccggggggcgggaccggggggcattttcaaaagggaggccttcaaaaccggtaacatgggggggaacaaaaagaaccgtggctcccccgcccggaaaagggacaaaaatcaaggcccatgccaaaaaggctttatttgcctattggcccttgcttaagggttctaacccgggggggggggtgggggggccttaaaaccttggcccttggaggtgccctttaaccaaagcccggaaaaaccccccccgggtgaagaacccgtcgggcgggcccctctccactatttggcccccgaaaaaaaacgcaacggggtccgccccctttacgggggaaaaccggggaagtataaaaagcacgggcctccctttaataaaaa

SEQ ID NO: 77433 - DNA, 515 bp, Oryza sativa
  Clone ID: PAT_MRT4530_77331C.1
tctgtacatggtttgcttatttcacttggtcacctctcgaactaaaagcctctaccatttcttcactactaccttcagcaactcccatttccttcactttttcaagttgcctgaggagatctaacctctctggagcataggtggatgggatcatggaaggcacatatctctggatgaaagccaaaatagcagcatgcccaacagcagttactggcagaagcatgagtattcctataggaacaacagaggctaaatctgtcagggttctttgaagagcctgcttttccttatgagttagttcatccccaataagagctcttcttaacaaacccatagcagctcctgtgtcaattgctaagagctgtgtcccttgcacaacagtcgtcgtggtttccttaaccttctctactgatttggtaataacattttctttcttgctagctggaccagaaggcattgatacaggagatgatgacacggaagaatccaatgtttcatttgcgcccacgcgtccg

SEQ ID NO: 77434 - DNA, 1880 bp, Oryza sativa
  Clone ID: PAT_MRT4530_77332C.1
ttttttttttttttttcttttttttttttttttgcaaaactatgagtgctgggtgcgagtatattttcgttctgttttttggctaaatagtccttggttcccctttccatggtgagatgcatcaggttgtgagggagcactggagcgcaggccacaggcatcaggcatcaggcatcagctgagagcccgttgcctttttttttttgtcgtaaacagaactacattgatgtactagcgcatgcgaatatatatggtttgcttcattatttcatacagcaggtaaacaaccgaggtaattccacaccaaaagaacaaacaggttttacgacatagactgctcaagtttatgtatcttcaggtcatcaggtgttttttttgtttcttttcctgggcccctctttctcttcatggtaagatagtctcaacgttctgaggaatcctggtttgccatgcccaacgctaaaagcatatctcaactatcagagtacaagtatatatttatctgcaaaagcaggtctccttgtatacataaaccaactgagatttctcgacatcttgaaataccgctctacaaacttggcaagaagctcagaagcacttcatatggacaatgccaggaccagattcatcatactcgcccttggagatccacatctgctggaaagtgctaagagaagccaaaatagaaccaccaatccagacgctgtattttctttctggtggtgcaatcactttaaccttcatactgctaggagcaagggaagtgatctccttgctcatacgatcagcaattccaggaaacatggtagaccctccacttaggacaacattgccatacaggtccttccttatatctacatcacacttcatgatggagttgtatgtagcttcatgtatgccaggagattccataccaacaagagatggctggaacagaacctcagggcacctgaacctttctgacccaatggtaattacttggccatcaggcatctcatagcttttctcaacagaggagctgctcctagaagtttccagctcctgctcataatcaagggcgacataagcgagcttctcctttatgtctctgacaatttcccgctcagcgcttgttgtgagggaataccctctctctgtgagaatcttcatgagatggtcagtgaggtctcggccagcaagatccaaccggaggatagcatgaggaagcgtatatccttcatatattggaacagtgtggctcacaccatcaccagagtcaagcacgataccagttgttcgaccgctagcatacaaggatagaacagcctggattgcgacatacattgctgggcaattgaaggtctcaaacatgatctgtgtcatcttctctctgttggctttgggattgagaggggcttcagttagtaatacagggtgatcttcaggtgcaacacgaagctcattgtagaaggtgtggtgccatattttctccatgtcatcccagttattgacaattccatgttcaattgggtactttagagtcaggatacccctttttgcctgagcttcatcacccacataggcatccttttggcccatcccaaccatgacaccggtgtgacgtggtctccctacaatgctagggaagacggcccttggtgcatcatcaccagcaaaacctgccttgaccattccagtgccattgtcgcacacaataggttgaatatcctcgtcagccattcttcagatgttctgcttctgcttgacgaggcgtacgtgtaacgatcgcttcctcctccggagtctggagagctcggcggcggcggtgtaaagtaacgcgagctcgcgagcgaggcgaacgggagggctgcggctgcggacgcgtgggggacgcgtggaat

SEQ ID NO: 77435 - DNA, 6302 bp, Oryza sativa
  Clone ID: PAT_MRT4530_77333C.1
atgaggttggggaaacaacgagtcttcatcttcaccgcctccactgagatctccggcgtctccacgcgcgagcatggtgagggctatggattcctgtactgcaaatctcatgtcacggctgagcagcatttacagccaacacaggacttctggattgcggctagtccttctaaagtggttcaagcagatgctgctgcacttgggaccatagctgctgatatggcacctgttgttgatggtttttctgctgatgatgacgagcttgacctagacagcccaactgagggtttctcatccattcctgaagctattgaggatattcgccaaggaaaatatgtgattgttgtggacgatgaagatagagagaatgaaggagatcttataatggcagcatcaaaggtgacacctgaggctatggctttcatagtgaggcatgggacaggcattgtatgtgtcagcatgaaagaagatgacctggaaagactagaacttcctcttatggtgacaacaaaggaaaatgaagagaagctgcggactgccttcactgtttcagtggatgctaaagaaggcacaacaacaggggtttcagctaaggatcgggcaaatacagtcttagcacttgcatctcctaattctaagcctgaagacttcaacaggccaggacatatttttcctcttaaatatagagaaggaggtgtgctgaaaagggctgggcatactgaagcatcagttgaccttgccatgttggctgggttacctcctgctgctgttctttgtgaaattgttgatgatgacgatggatccatggctttattgccaaaactccaagattttgcaagaagggagaacctgaagataatttcaattgcggacttgattaggtataggaggaagagagacagattggtagaacgtgtttgtgttacacctttacaattacaatggggatcatttcaatcttattgctaccgatctcttattgatgggatggagcacattgctatggtcaagggtgatgttggtgatggccaggatatcttagtgcgagtgcattcggagtgcctaactggagatatatttggatcagccaggtgtgattgtgggaatcaacttgccctggcaatgaccatgattgagaagactggcaggggtgtagtagtttaccttcgtggacatgaaggtaggggcattggtttgggtcacaagcttcgtgcatacaatttgcaggacgatgggcgggatactgttgaggctaatgaggatctaggtctgccggttgattcacgagagtacggtattggtgcacagatactacgagatcttggtgtccgaaccatgaggcttatgactaacaatcctgcgaaatatactggactgaagggctatggtttgagtgtcttgggcagagtgccactgttgacaccaataaccaatgagaatcggcgttacatggaaacaaagagattaaagatggggcatgtttatggaacccggcctagtggtaatacaagcaccttggctgatggcggcataaaaaaggagcaagatcagattgacagtgctagcgagcaagacacatcgaagatttacactctggagaaagtatatggattcagattagtatgcagaagtgtggttgatctgaggagtcaaaaatttcatacacgtgtttataagagaaagagctatttcaggagttcagcatcagaatgtgagaagatcattcacagtgctagatggctagaatttaggagacagagggtagcatttcagagaactagaaggacaatccatcttattcctttggcttctcaagatgatagcagtggtttatctgttaacggatccccacaagttgattcggcaagcgagatggactttccagaagccaaagaacacttggttgctaagacagagctagcctcttttgacaagtcacttgaaagtgttgaggaagctttggttaagttagaagatttgctccaagaattgcatctctccagttccaactctggtaaggaggatctaagggctgcatgttctgatcttgaaatgattagaaggctgaagaaagaggctgagtttcttgaggcttcctttcgagcaaaaacagaatttcttgaggctgatgctagtagcagaccattatctcctgctgtcgaggaaggccgtggaaagacagctagcaatgctaatgagagctcaacaccacaaaaaccagcaaacagagtggagaacaaacgtcgtccaatttgggacctctttggtaggccttctggaaggagagctcagcttgtccaacaaacttcagatcaaaatgtttctgtctatgccatgaacgccagcaaatgaatactagtgaaagtgacctttttttacttattctaggtttgacatgtcttgctgctatcacaaagcttggatcaacaaaagtttcttgtcagcagttcttttccatggtccctgatatcattggtcgattcatggatatgcttcttgaatttgtccctctaagtaaagcatataccttgacaaaagatattggtcttcagagagaattcctttgcaattttggtcctcgtgctgctgaccctaagttttccagtgatcgtgaagttgagatatcgttttggattgatctggttcagaaacagttgctacgggctcttgatcgtgaaaagatatggtcaagattgacaacaagtgaaagtattgaggttttggaaaaggatttagcaatttttgggtttttcattgctttaggcagaagtacgcaaacatatttgtcttccaatcatcttaccaatctggatgattcaatcaatgatattgtaagctctcaccttaacaagcttacaatcatccaggtagtttgcgaagagctcgagtggcttccattttacagtggtgatgtgccagctgcaacaattgaaggtagagaggatgtgcataaaggagaaataatatcaagagtgctaaatgtgtgctcttattggatgactagttttataaagtacagctcatggcttgagaacccttcaaatgtaaaggcagccagatttctgtccaaggggcattccatgttgagtgattgcatgaaggaactggacttaacaaagtatgatatgccaaaagaccaaacctttccagaagccaaagaacacttggttgctaggacagagctagcctcttttgacaagtcacttgaaagtgttgaggaagctttggttaagttagaagatttgctccaagaattgcatctctccagttccaactctggtaaggaggatctaagggctgcatgttctgatcttgaaatgattagaaggctgaagaaagaggctgagtttcttgaggcttcctttcgagcaaaaacagaatttcttgaggctgatgctagtagcagaccattatctcctgctgtcgaggaaggccgtggaaagacagctagcaatgctaatgagagctcaacaccacaaaaaccagcaaacagagtggagaacaaacgtcgtccaatttgggacctctttggtaggccttctggaaggagagttcagcttgtccaacaaacttcagatcaaaatgtttctgtcgctaatgtggataacaaagacacacaatcaaatgatatcctccggtttgaacagttaagacgtgagctgattgagttagagaaaagagttcaaaagagcgcagataatgctcaaaaggaggagacatatgtcgcaaatgaaacattggattcttccgtgtcatcatctcctgtatcaatgccttctggtccagctagcaagaaagaaaatgttattaccaaatcagtagagaaggttaaggaaaccacgacgactgttgtgcaagggacacagctcttagcaattgacacaggagctgctatgggtttgttaagaagagctcttattggggatgaactaactcataaggaaaagcaggctcttcaaagaaccctgacagatttagcctctgttgttcctataggaatactcatgcttctgccattagtgaactttaatgttcagtgcaaatatcttcatggatacagcattgtaaacaagttcataatgttcccagagaggttagatctcctcaggcaacttgaaaaagtgaaggaaatgggagttgctgaaggtagtagtgaagaaatggtagaggcttgttttggaacaagacagaagatggtttcatttcgtttatagaagattctttcagtgacatgctgatagaagtgaacataaaggaaaaaactggagttttaccaaacattgcaactgtgttcgttgaaggaagatccttcagaagttgcactttggaagattgttttcatacttcatagtgtacaagggcgccgtgtgcccattcaacatagaagaaggttatccaaagttcctcttggataatgtctgtagggtagatatttggctgatgatttgtatatctagctgagattggtgtatcaactctccaaatgtaaagagacaggcctgagtggtggcttatcggtccgtgatcctaggtcatgcagtgatgcacgactctgctgtcagcttatgggcaattcagcagcaaaagattgatgctggtggcgcactgctacatccaatagcacgtaaagacttttgtgctcttgtagtctactctactgtccggtctacattgcctggtcgtcttcccctttcatttacgtatcattatcttggattaacccggatatacaacccacggtgattttcgctatgcggacgcggaggcgcagccgacgacgacgagcagcttgatcagaacggaagaagacgccatggccggctagtgttcgccactggaataatgccggagacgaaggggaagattagttagctagctatcggtgtctcgccgtttagacgtgagctgattgagttagagaaaagagttcaaaaacgcagataatgctcaaaaggaggagacatatgtcgcaaatgaaacattggattcttccgtgtcatcatctcctgtatcaatgccttctggtccagctagcaagaaagaaaatgttattaccaaatcagtagagaaggttaaggaaaccacgacgactgttgtgcaagggacacagctcttagcaattgacacaggagctgctgggggccggggcgggagactaactcataaggaaaagcaggctcttcaaggaaccctgactgttttttttttttttttttttttttttagagtgtccgatcaatatgcagatgataaaattcagaggaaaattatacaaatccatggagatgagaaaacaaatcacatgacagctcgtaattacagtactaagtacacgatggaacggaacaacaaccccatatcatcatcaccatcatcatctagctagctagcaaaccactcatctctctcacacacatgcatgccggccgtcagacgaaatgatcaagaaacaagaatcatatgcactgcctctatcctggcaggtgggcccgatcagaagagggcgagcttgacgaggacgccggcggcggcggcgacggcggcgctggcctgcaggccggcggacgcgccgccggtcggcttggagggggaagaaggggtggccggcggcgtgccgctgcttcctggggtggtgctgggtggcgtcccggagccggagccggagccggagccgctgccgacgttgatggccagcttcatgccgccggcgcagtggccgctgatggtgcagatgtagtagtgcatgccggcggcggcgaggtcgagggtggctgggctggtgctggtcgagctgatcgagttgcttgcgacggcgcagttgtcgtaatcgttcttgttcacctccgtcaccgtgtgcgccccaacgaagctgaacacgagcttgtctccaaccgcgaaggtttggccacttgcccaagtatcgtagttctggccaagcgtccacccggagctaccacccacggtgagcgtcgccgcggaggccgcggcggcgcagccgacgacgacgagcagcttgatcagaacggaagaagacgccatggccggccggtgagctagtgttcgtccaagtggaataatgccggagacgaaggggaagattagttagctagctatcggtgtctcgcccaggggaagattagttagctagctatcggggcgagtccgaggcgagcgaccaccccccaacaagaatcatatgcactgcctctatccggtggcggaggaggggaggcgggcgacagcggctagggttaggggtgagtggaccggcggcggagcccacgcgtccgcccacgcgtccg

SEQ ID NO: 77436 - DNA, 162 bp, Oryza sativa
  Clone ID: PAT_MRT4530_77334C.1
atggggcggtgggcaatcagggcggcgccagcatccggcaaaaccagcgacgtccgcgtcaaaaaccgcgacctcaccctctgtttcccattcgtcggcatggttctagaattggaacagtcaccgtcgaccttgacaacaacatcgaagaaaataaaataa

SEQ ID NO: 77437 - DNA, 360 bp, Oryza sativa
  Clone ID: PAT_MRT4530_77335C.1
atgttcattatttgctgagcgcactaccatgtaacatagattgagtggactcacatggttacattaaaaattggaagttccatcagtaagttcggggttatcaccaaccttgcaaggcacaccaattatgaatacttgacccctatatcttggaatgtgaccgaaacccgtttgggtgaaaaatgaaaatgggtgggcaaattttgaccacacattggttcagatcgttttaaacctatgcggacgttcacccagaggaccctctcaccttctggcgattaacatatccatccgtagctaccctatactgctcgaagttgccggaatctgataactaatgcatgccgggctgtgaaggct

SEQ ID NO: 77438 - DNA, 2256 bp, Oryza sativa
  Clone ID: PAT_MRT4530_77336C.1
tagtggccaaccttttcctcctcttgaccaagccaagaacaccaatccccgcatcaccaatccacacaagcttcgcagctcgcgcgccgcgggaggggagggagaaaagctcgcccccgagatttttctcctctcctctctgctcgtgtttcttggattggtccatatatccacggttcttgggggcgcggcgcgccgccattgatctggttttggttttgtgaggaggagaagttgcggtggtgctggtgctggtgctttcttgatctgatgatggcgagcacgacgtcagcgacggccgccgggggcgcgttcgccgccgcgaagacgcgggcggggtcgtcggcggcgggcggcggcgcgtgcgcgagggtcgccgccggcggacggaggcggtccggcgtggtggtgcggtgcgacgccggcgtggaggcgcaggcccaggcgcaggcggtggccaaggccgccagcgtcgccgcgctcgagcagttcaagatctccgccgaccggtacatgaaggaaagaagtagcatagcggtaataggcctcagtgtacacactgcaccagtggagatgcgtgagaaacttgctgttgcagaggaactatggccccgtgctatctcagaactcaccagtctgaatcatattgaagaggctgctgttcttagtacctgcaatagaatggaaatctatgtggtagctttatcgtggaaccgtgggattagagaagtggtagactggatgtcaaagaaaagtggaatccctgcttctgagctcagggagcatctattcatgttgcgtgacagtgatgccacacgccatctgtttgaggtatctgctgggcttgactctttggttcttggagaagggcaaatccttgctcaagttaaacaagttgtcagaagtgggcaaaacagtggaggcttgggaaagaacatcgataggatgttcaaggatgcaatcactgctggaaagcgtgtccgctgcgagactaacatatcatcaggtgctgtctctgtcagttcagctgcagttgaattggccttgatgaagcttccaaagtcggaatgcctatctgctaggatgctgttgattggtgctggcaagatgggaaagttggtggttaaacatttgattgccaagggatgcaagaaagttgttgtggtgaaccgttcagtggaaagggtggatgccatccgcgaagagatgaaagacattgagattgtgtacaggcctcttacagagatgtatgaagccgctgccgaagctgatgtcgtgttcacaagcacggcatccgaaaccccattgttcacaaaggagcacgcagaggcgcttcccgctatttctgatgctatgggtggtgttcgactctttgtcgacatatccgtccccagaaatgtcagcgcctgtgtgtctgaagttggccatgcgcgagtatacaacgtcgatgacttgaaagaggttgtggaagccaacaaggaggaccggcttaggaaagcaatggaggcccaaacaatcatcacccaagaattgaaacggttcgaggcatggagggactcgctggagactgttccgactatcaagaagctgaggtcctacgccgacaggatcagggcttcggagcttgagaagtgcctccagaagatcggcgaagactccctcaccaagaagatgagaagatccatcgaggagctcagcaccggcatcgtgaacaagcttctccacggcccattgcagcacctgagatgtgacggcagcgacagccgcaccctcgatgagacgctggagaacatgcacgccctcaacaggatgttcagcctcgacaccgagaaggcgatcattgagcagaagatcaaggcgaaggtggagaagtcccagaactgagattgaagaagagatttttttttttcagcccgtgtatctactatgtatactactaccatatctgtccagacattctaattccaattttttttctctctctcttgagcctttgcttactgagccctcgctgagttggtcaaattgtctcgtgaattagcgccatggctgctgctagagataactaggaaaatgccttgtttgtaaattactgcatctgctgtggcaagagctccattttgaagatattatatacacgctgttggtgaaataaaatcagaagttcatcagccattaaaactgaagaaaagagaaaataaaaaaagaaaaacgcggacccgctagcttggtccgcccccgccccgtttcctgcag

SEQ ID NO: 77439 - DNA, 400 bp, Oryza sativa
  Clone ID: PAT_MRT4530_77337C.1
cgacggtatggctttcttcttcttgaggatgtcgcatctcaagacccacttagtgtttcggttgcaattcttcaccaggttaacattttgcctgagatgtatcaagttgggtacacaaaattgttctttcgaactggccagattggcaaacttgaagacactcggaaccgtactctgcatggtattttaagggttcaaagctgtttcagagggcatcaagcccgtcgccatgcaagggaacgaataagaggagttttggctcttcaatcatttattcgaggtgagattgcaagaaaaatgtattcgtctctggcaaggaaacacagggcagccattattttacagagaaatctaaaatgctggcttgcaagaagatatttcgttaacataccgaaggctt

SEQ ID NO: 77440 - DNA, 557 bp, Oryza sativa
  Clone ID: PAT_MRT4530_77338C.1
gctagtaataaaccggtctgttattattacttttaataatccagttgaagtttcctcatgatatggattgatcagcagcaacctagctgcagcctctgctcttggccgttgagattcataaataatactactgtcttcgctgcttccgtcttcccctcctccatcggtctaaacttgtgaatgtagtcagtcagtaaattagtgagagccatccatgagtatctgcagcttaattgcttgcctggcctccactccatcatcccaaggaacgggattagttgaggtcacagctccagcaccacaaagtctgaatcggtggtgatccactgcgccatccgctgctcgccatcatcagggacagtggaccaaggccgcagctgctgctggctcgacggcgccttcgccggcgcggacacggctgacagcggggaatacatagccgacgatgatgcagacgagcagctacccgcgtcccacttgaaactcagcttgctcgtgctgtcgttgcctgctttgctgttgctgctatccctcgcctggaagctcataaccttctt

SEQ ID NO: 77441 - DNA, 511 bp, Oryza sativa
  Clone ID: PAT_MRT4530_77339C.1
tcgaacttggggggcgggccttcttcggcgggcttgcattgggcccgtttttggacgttggcaagggcgtttggggttcaaacccgtgcccgccggaagaacaactgcttccttgaattccaacttccggaaggtggccaccaagggccccatggccgcaaagttggccggtttggccttggcaacttaagttttgttggtttgggcccccaccccgaagggcttcccaaggaggctaactttcaacaaaattcaaagtaaaacgtccttggaggggaagggacccggcccgggaaaccattgcccaacggtggagggcggggtcaactccttcgccttaaaggccggcaagtccaacatgaaaaagttctgcctgaagccaacgtccttaaccgttaaggcggagggcgtggccaaaaccgcgccacccgagttccaaagaaccaagctaatgacccgcctgacctacaccctcaacaagatcaagggcccgttcaaggtcagttccaac

SEQ ID NO: 77442 - DNA, 1144 bp, Oryza sativa
  Clone ID: PAT_MRT4530_7733C.1
ttgggaatttttccacttaaatttaattaaaaatcggattttttgcttcaccccagggagggggccccggaccgggatcacgggagtgggggcccacgcggcaccttcccggttccacggtgaccggggtgcacccggcttgcgccggccggcgccgtgggtcccacgcgtcagccgcacccgagggcggggaaggctgacggccgggccccacatggcagccccggggcgcgcccgaaggcggcctcgccggcacggccgacgggaggcggcgcgcccgcgccccgatggtcgccggcggcgacctccggcgcgacggagcggcacccgagagaggggagggaagggggaagcgaaatggcggtcctcggctcaccccgggtcgacggcgatgacgggaacggcgaccgaagcggagagaggcggcggcgcggctcgggtcgacgaggacggcggtgctccggcggtcggcgggcgaaacggaggagtggacaaggtcggcgagaacgcggcgaagccgaaggaggcgatgccgaagcgggaggaggtccggggcgaggacggcggcggacctaagcttggcgtcgtccgcggagagataaggacgacggcgcgagctcgattccgacggggagagaaagcggcaagggtcggaaacggaggagggaggcacggggagtgcttaaataggggtgggagtgagagagggcggccggagaggaaggaaaccggcgcggcgatctcggctccatcaatgacgccggcgaggatttcgggagggattccaaacgaatccgagggagagagagagggaaaagtggggggaaagagggagggaatcacggggagtgatttccccctctttattgcgcgcgggggcggcgggatgcggcggaatccgcggcggcggcggcgctagggcacgggcgaggcggcgggcgcggcgcgaggtagcggatgacgggtgggccccacccgtcagcgagggtggcgggcgggcccgcccgtcagcggcgcgcgcgcggggaggaggctgatgggccgctggggagaggagagagagggagggagttgggccgagccggcccaagagaggaagggggggaaaggacttttagggatttttctttttataaaaccattt

SEQ ID NO: 77443 - DNA, 2604 bp, Oryza sativa
  Clone ID: PAT_MRT4530_77340C.1
atggagactggagagggggacgaagattgggagattgcttcaggggttagctccattgccatcaataagcactcgattataaaaagggccagtaatgaacattggttttataatattccaacctccaaaaaaggtggagctgtagctaaagccccgctaaacacaagccctacatatattaagggtttattacttaaaaaaaatagagtacaatacaatatgtgggagctacaatacaatctagtgaaaaaaaaagtccatcagtttgagagaaaggaggacttcctgaaggagattttggacaaagtatcttcccagtccattcctgttatggttgggggtgactttaacttgattagacatgctgaggaaaaatctaatggtcatgttaacaggagatggatggaaaaattcaataagttcattgcagatgcagagttgagagagttacatagagtgggatgcaagtttacgtggacaaataaacaggtgaatcccatctgtgaggtcttagatagggtcctggtgtctcctaattgggattctttgttcccatatgctgtggttaaaactttaactagagtgggctcagatcataacccaatcatggtcttattggagagacaaggacatatacaaacacagagggtttttaggtttgaccgagcttggttgacccaggatggctttaaggaatgggtaatcaaacacgggcctgaaagaagaaaagacaagattttggatcattggaagtgtcaggggactgttctaaggaggaaaatgagaggatggagcatgaataacataagcaatctaaggagaacaaaagagaagcttttgagtcagatacagaaaattgatactgaagctgatatgagacaactgaattcagatgagtgggctcaaagatatcaattagaagatgaattgagtaagatctatttagaggaagaaatctactggcaaggaagaagtggtgagaaatggcttctagaaggtgatgccaacactgctttctttcatggcatagctaatggcagaaagaggaagagtactattctgtcattggaagatgaggggagacaaattgaggatccagctgaattgaaacaacatatctatcaatattacaaaaatttgtttggagctgaagtacctccaaaaatttttctgtccaatgatatgtggactaatgaggggagacttactaaagaagagagtgaacatattactagaccttttacaatggtagagattgagcaggctttgaaggaaatgaagacaaatactgcaccgggtcctgatggtctacctgtaagcttttacaaagagttctggccacaactgaaaaaccagttgaaagaaatgactgaccttttgtttgagggtaaattagatctgtggcgtttgaattatggagtgatcactctcattcccaagattaaggatgctaataacataaaagcctttagacctatctgcctcttgaatgtatgctttaagtttctaacaaaaatcctgactaagaggttgacagaagtagctgccaaagtgatagggcaaagtcagactgcttttatacccggtcgacatatcctggatggtgtcgttattttacacgaagttctgcatactctaaagaagggtcaccattctggtatcatctttaaacttgactttgagaaggcgtatgacagagtacaatggagttttttgtttgaagttctgcagaggaaaggatttaatgaaaagtgggttcagtggattaagatggctaccgtggaggggagggttgcaattaatatcaatggagaggtgaaagattttttcaaaacctatagaggagtcagacagggggatcccctttcccctttattgttcaatttagtagctgatgcattatcagagatgctaaatagagccaaagaagcaggtcatttagagggattggtccctcaattagttccagggggtttgacacatttacaatatgcagatgatacgattcttttcttggccaatactgaagaaaatatagctactattaagttcctactatattgctatgaagagatgtcgggcttgaaaatcaattatcaaaaaagtgaggtgatagtgattgggggtgatgaatctgatacattgagagtggccaatctgtttaactgcaagtcagggaaactacctttctcttaccttggcattccaatgtatgttgaaggggagtggaaaatctctttgagaagaactttaggtgaaggggagttagaagagtggggtcaattacatgctttattgcagaacatcgaattgaattcaggaaaagattccatgtgttggaatttaaacaaaactgggatgttttctacaaaatccctgtatcgagaaataagttttggggggattaaagactacatcttacaagagctgtggaggtgtcatattcccctcaaagttaaagtgtttttctggcttatgctaaaaggaaaaattcaaacagtggagaagcttagcacccgtgaagaagaggagtgctttggatacattaaggggcttgctccttgccagtatccgaaagatcggaggatcaaatacttgatctaa

SEQ ID NO: 77444 - DNA, 147 bp, Oryza sativa
  Clone ID: PAT_MRT4530_77341C.1
tcagccgacggcacaagtatcggcccctgcacccgccagtccagcaatagccgattcagcaaacaccaccgaggcagcaggttgtgcagacgattcagcaaacaccactgagacaacaggtgttgcagccgattcagcaaacgccat

SEQ ID NO: 77445 - DNA, 146 bp, Oryza sativa
  Clone ID: PAT_MRT4530_77342C.1
agaaaaatatgccttacttattatagggaggactaatatggtactggatatgttatacatacatgaacgcgattaattcattcatataaatatatataaaaagaaaacatccatgtcgtagcaagtatagcgaactagtaagggcg

SEQ ID NO: 77446 - DNA, 2193 bp, Oryza sativa
  Clone ID: PAT_MRT4530_77343C.1
atggaggtccccatctccggcggcggcggaggggagaggttctgccacgcggcgcaggtggtgggggcggacggggagatggacggggaggcgatggcgcggttcgcggcgggggcggggctcctgggccgtggcctctcctacgccgtcgtctccatcgtcgggccccagggcagcgggaaaagcaccctgctcaaccaactcttcgggacaagcttcacggagatggatgccttgaaagggaggagccagactaccaagggaatttggattgccaaggctgtaggcattgagccgtttactgttgtaatggatttggagggcacggacggcagggaaagaggagaggatgatacagccttcgagaagcagagtgccctttttgctctggcagtatcagatattgttatgataaatttgtggtgtcatgatataggacgagaacatgcagctaataggcctctgttgaaaacaatatttgaggtattgatgcgtttattcagcccacgcaaaacaacgttgctacttgttattcgcgataaaaccaagactccactagagtatctaacccaagctctgaaggaggatatccagaagatatggaatgctgttcgcaaaccagaagtttacaaggaagctgcactaagtgaattcttcaatgtggaggttactgctctgtcaagttacgaagagaaagaaaatctatttaaggagcaggttgggcaactcaggcagagatttattcattcaatcgctccaggtggtctagcagctgatagaagaggtgtgattcctgcttcaggtttttgtcttagtgcactccagatctggaaagtaatacgggaaaacaaggatctcaaccttcccgctcacaagatcatggttgctactgttcggtgtgaagagattgcggatgaaaagctcagaagtttcatatctgataagggctggtatgacacagaagccatgtactttgatgaggatgtgagaaccgctaaacgccaacagttagaatctgaaatcctaaaacacacatatgatgctttcaagaaaatgttagaacacctgcatcatgtggttctgaacaaattcaaaagtgatctagaacaatcattaaggagcggtgagggatttgcagcatcagctcgttattgtgtgcagtcatcaatggcggaatttgatgctggattgagagatgctttggttaagcatgcagagtgggacacgacaaaagttaggagcaaactggagcagcatatagaagctcatgcaacatctgttcggggtacaaaactggctgaactaaaggctaattatgagaaaaaactcttggatacacttgctggacctgtacagtcaatcttggaaactggtgaaaaggactcttgggcatgtattagaagactttacaggcatgcgactgaaagtgctattttggcattctcagcttccctctccgagtttgaactagaccagacaactatccgtaagatggtcatggaattaagagaacatgcaagaagtatagtagaagagaaagctagagaagaagctgggaacgttctgatgcgtatgaaagaaaggttttccactgtgttgagccgtgataaggattccatgcctaggacatggaaaggaaatgaagatatacgtgcaatcactagagaagcacgcttagcggctttaagacttatgtcggtaatggcagctgtacgtttggacgataaaccagataaaatagatcgggctctaacgactgctcttttagatggaggaccgctttcacagaaaaggagtattgaattcacatctgatcctcttgcttcaagcacatgggaggaggtgtcagaaaagaatacgctgatcacaccagtgcagtgtaaatccatctggaggcaattcaatgcagagacagagtatgctgttgcacaagcaatttctatgcagctctcaggtcttctgactattacatctgggtttctccccacaataatggacatcataacagcagtcatcaacatgagtcacaaccagaagagctcctcgcacccgcctcgacatcgtcccccgcttcatcctcaaagcttcaggaaccaggcgcagcaacagtctcaggctcaggtgcagtatcaggctccaagttcactgtcatcatcctcttcggtgggctccaacagcgatgacgaatcctga

SEQ ID NO: 77447 - DNA, 976 bp, Oryza sativa
  Clone ID: PAT_MRT4530_77344C.1
tagagtccttttcaccagtttccaagattgactgtacaggtccagcaagtgtatccaagagttttttctcataattagcctttagttcagccagttttgtaccccgaacagatgttgcatgagcttctatatgctgctccagtttgctcctaacttttgtcgtgtcccactctgcatgcttaaccaaagcatctctcaatccagcatcaaattccgccattgatgactgcacacaataacgagctgatgctgcaaatccctcaccgctccttaatgattgttctagatcacttttgaatttgttcagaaccacatgatgcaggtgttctaacattttcttgaaagcatcatatgtgtgttttaggatttcagattctaactgttggcgtttagcggttctcacatcctcatcaaagtacatggcttctgtgtcatactcagatagataaaaatcaagaatagcattaagcttctttccaaagcctggtactagaccagaatttgcagctgtttctagctccaaccagcccttatcagatatgaaacttctgagcttttcatccgcaatctcttcacaccgaacagtagcaaccatgatcttgtgagcgggaaggttgagatccttgttttcccgtattactttccagatctggagtgcactaagacaaaaacctgaagcaggaatcacacctcttctatcagctgctagaccacctggagcgattgaatgaataaatctctgcctgagttgcccaacctgctccttaaatagattttctttctcttcgtaacttgacagagcagtaacctccacattgaagaattcacttagtgcagcttccttgtaaacttctggtttgcgaacagcattccatatcttctggatatcctccttcagagcttgggttagatactctagtggagtcttggttttatcgcgaataacaagtagcaacgttgttttgcgtgggccgga

SEQ ID NO: 77448 - DNA, 528 bp, Oryza sativa
  Clone ID: PAT_MRT4530_77345C.1
atgctgctgctcgtcatcatcgcccactccaagccgcaacgacctctccttgacccctccacagcctcaatgggagcctccacgacccatccagatcgatgcgccaccgaggagagggtagaggccgcgctgccgctcgtccttgttgcccatagccatgggcgccgacgaggagagagaaaggatttggcaccgacgaggagaggggtgaagggatttagcgccagagaggggaggagagaggggagatctggcgagcttcgggcttgttttggccgcccggcgctgtcgcttcatggggaccaccgctgcaaacaaccctccgcctggctcgccgtcaccgcttctgcctttcacgagagcatgcaccacctgccgtcaccccccatctctagtgcaaccttcaccgcagagcacctggacggactggcagcgctcacttcgatgacaagctatgcccttgccaccaccacctccaagaactatgcatggaaggcaatggcacttctcggcgacacgcccaattga

SEQ ID NO: 77449 - DNA, 321 bp, Oryza sativa
  Clone ID: PAT_MRT4530_77346C.1
ctctcttccataccccgtgccggtcgagctttgcttcccatggcaactgccttctggcaggcgcgcctcctttgccatggtcgcttaggggtctgagacacagccgggggggggggtgctcgggcgcggtctgggtacagtggtgcctgtctcagtggcgggggaggataattacgacgtcggcgaccctgacttgtgctagctgctgcactgccttcgtggcgtttactactacctctcggactacgccgcgctcggtatcgccatcctgtgggttaaggactccatgtgtccatggttatacgcgtacttgcctgtcta

SEQ ID NO: 77450 - DNA, 615 bp, Oryza sativa
  unsure (1)..(615): unsure at all n locations
  Clone ID: PAT_MRT4530_77347C.1
gacgagggagacggaggacggggagaggctgccgccgcccgccgctataccatcccattcgggncgcccgggaagacactcagcccaatcccatgcgcctgtacagttgtgcgggaggagcaagggccaagagcacggcacctgcccctcggcatcggacacgctggcctcctcactgctctctccttcttgtgcttgtgcaggcaggaggcggaggctatgtccaattactcccttttgtgtgaatactattgggctaggcccccagaagctgggtgtatttttaagaggattgtatggctacatttgctgcaagctagagagagctattgtgcgtcggattgggagctcacatgccatcaggaaactagatttctgtttaacttgtgtcccatggttagataaatgcatgcgccaagtttagtaatgacaaagtgcttccatcttgctaaaaatagtgaaataaaattaatcgaaaaactttggcactgcctacccaaactgactctttaatttgatcttggtacatgagttcaattttggtgccaacaaattgacttgtttttccatgaacccatgcatttaattgatgatacttacaagttgtcattttac

SEQ ID NO: 77451 - DNA, 585 bp, Oryza sativa
  Clone ID: PAT_MRT4530_77348C.1
ctgcaggaattcggcacgagggtgagaggcaacgaagcggatgttcgtgctcggcccagacggcggcggtgaggagcaactcttgcggtgacctcgccgtcgaatgtggaagctgataggcgcaccttccaaatgctggtggctgcgggagcctgcgagccggcggcgctcccatccatcaccggaggcggctcggggaagggctcccatcgactggcgttgagaggtgaggtggttcccgtcatcttcctcgctcgatctattgctcccttcccaccccgccctgaatcggcgacggcaccggcgggatcttgtgaggaggatgcggggaggagctgtcggctgcgtcgaccacgccatacgcacacgctcctgattcctccccggacggatgtgctggtcggcggagttcccgtggtccgtgggcggtgggccgcttcctcgacggcctcctctcttgcccttgctccagttgaaatggttttgttcagggttgttgctcatcggatttaaggaaggagaaaccaaggggattttgatgttaacttgttcttgcaaagtgattttgcaaacacatgctttccg

SEQ ID NO: 77452 - DNA, 3124 bp, Oryza sativa
  Clone ID: PAT_MRT4530_77349C.1
cctccggccgcgcgttccccgcggccacatcacatcgccttctccgccgcgacgcggacgcgctcgaattaacgccgccgccgccaaccaccgcccgccgccaccgcgatgtgcgagccagggggcgagccctcgtcgtcgggccgatcccgaaggggaagaaggactactcgacgagcgatcctgggagaggaagaagtcgccgaacccggctggtggtggacgaggccaccaatgacgacaactccgtcgtctgccgctgcacccggacaccatggcgaggctgccggtcgctccgccgcgacaccgtcctccgcaggggcaagaagaggaaagatactgtttgcattgtccttgcggcggagacctgtgcggcgcccacgattaggaggaacaaggttgtcacgaaggccctgagggtgcgacttgctgatgttgttgctgcccccccgtgccagggtgcgccggccgcggcacgtctgcacatgcttccgattgctgatacagttgaaggcattaccgggaacctgtctgatgccttcctgaagccatacatctcagaagcaaaccgcccagtgaggatgggagatctcttccttgtcacgggtggaatgagaactgaggaagtcaaagtcatagagactgaccctactgattattgcatcggtgcaccagatacagaaatattctgtgatggggagcctattaagagggaggatgaggaaaggcttgatgagggttggatatgatgatgttggtggagttagaaagcagatggctcaaatcagtgagcttgttgagcttccactgcgtcatccccaacttttcaaatccattggtgtgaagccaccaaagggcatattgctgtatggaccacctggttctggaaaaaccctcattgctcgtgctgttgcaaatgagactggagcctttttctttttgattaatggacctgagattatgtcaaagctagctggagagagtgagagcaatctcaggaaggcatttgaagaagcagagaagaatgcaccatctatcattttcattgatgagattgattccattgctcccaagagagagaagaccaatggagaagtggaacgtcgtattgtttcacagctgttgactcttatggatggactcaaagctcgttctcatgttattgttatgggtgctacaaaccgtcccaacagcattgatcctgctcttcggaggtttggaaggtttgaccgtgagattgacattggtgtccctgatgaggttgggcggcttgaggttcttcgtattcacactaagaacatgaagctagctgaagatgttgatttggaactcattgcgaaggatactcatggatatgttggtgctgatcttgctgccctttgcactgaggctgctcttcagtgcattcgtgagaagatggatatcatagatcttgaggacgagacaatagatgctgagatattgaactcgatggctgtcacaaatgaccatttcaaaaccgcgcttggtacaagcaacccatctgctcttcgtgaaactgttgttgaagttcctaatgtctcatgggaggacattggtgggctggagaatgtcaagagggagctgcaggagactgtccaatatccagtggagcaccctgagaagttcgagaagtttggaatgtctccatccaaaggagttctgttctatggccctcctggctgtggtaagaccttgttggccaaggcaattgccaatgagtgccaggcaaacttcatcagtgtgaagggcccagagctgctcaccatgtggtttggagagagtgaagctaatgttcgtgagatttttgacaaggctagccagtctgctccatgtgtgctcttcttcgacgagcttgactcaattgctacccagagaggaagcagtgttggtgatgccggaggtgcagctgatagggtgctgaatcagctgttgactgagatggatggcatgaatgccaagaaaactgttttcattattggggctaccaacaggcctgacatcatagatccggccttgcttaggccagggcgtctcgatcagctgatctacattccactgcctgatgagcaatctaggctccaaattttcaaagcttgcctcaggaagtcccctgtggcgaaggatgtggacttgaacgctcttgccaagtacacccaaggcttcagtggtgcagatattacagaaatctgtcagcgtgcatgcaaatatgcgattagagagaacatcgagaaggacattgagagggagaggcggagtaaggagaaccctgaagcgatggaggaagatgaagtcgacgacattgctgagatcaaggcagcccacttcgaggagtcgatgaagtacgcgcgccgcagtgtcagcgatgccgacatccgcaagtaccaggcgttcgcccagacgttgcagcagtctcgcgggtttggcagtgagttccgtttcgagcggacagaagctggtgctggagctgcggctgatccttttgcgtctgctgccgccgtcgctgatgatgacgatttatatagttaggttgtctgttgtgtccttcgttagctcgccctccgagtttgtgttcaatattggttccatctgccatgcctttgtgttgaaactaatcgtacttgaaacacggcaaagccctctggttatatttattttcagtgcaatagggtgctgcttggctgaggacgatgccctcggtctaagccgttgccctcctgtggctggctactggacgatgacaatttctgaatttcccaacaatatacagctatttttttatctgcagcagtctcgtgggttcggcaccgagtttaggttcgctgaccagccagcgtctggcgccggcgccgccgctgaccccttcgcatccgctgccgccgcagctgacgatgatgatttatatagttagatcgctgtgctatttatatttaacctccgtgcttttgttcagtatgtctatttcgctttggtaaactttatcatatgtaacatacggggaaacagtgtactatttttaagttaatattttgagaggtactgaaccgaattgcaaaaaaaaaaaaaaaaaaaaaaaaaaaacacaaaaagggggggggcctcgtgc

SEQ ID NO: 77453 - DNA, 395 bp, Oryza sativa
  Clone ID: PAT_MRT4530_7734C.1
agttaagatgaaattcaccgtgtgagtttgcttggatatatctataactaatataaatatttggatttttccggtcgtcacaaatcggacgaagggcgccttcgtccctcgcggtgcgccttcgcccgcagcccccgaatcccaatccctctcacaatcagatacaatagaaataattcccaaaatcggcacaaccaaatcactcaaccacaatcatcacaaaatcacaaaataaacatccaagaagaactacaatatacatcacaatcacaaaactacatcacaaaatttcactcgcctgccgccggatccaaccttgaccgtcgccactgccaccctcagccgtcgccatgctatccatccatggccgccgccaccgccaccggagggagaag

SEQ ID NO: 77454 - DNA, 2889 bp, Oryza sativa
  Clone ID: PAT_MRT4530_77350C.1
atggcagaagcaattattcttgctctatcaaagattaatagtacttttggattggatcccacaaatattgccaaatctgcagtatccaagctatatcagaaaggaaagagtttggcggagttaccggggaaggttgaagaaataagaatggaactaacaacaatggaaaatgtcatagaacaactagatacagcacatctcactgacaaagttatcaagggttggattgcggaggtacgaaagctggcctaccatgttgaggatgtaatggacaaatactcatatcatgctcttcaaatggaggaagaagggttcctgaaaaagtacgttgtcaaaggatcacattatgccattgttttcgatggaattgttgctgagatagtccagattgagcaggaaatccaaagagttataaagctgaaagataaatggctgcaaccatcccagcttatccgtaataaacattctgattttgaaagaaagcggtcacaaggctgcttgccagagctcgtaaaggatgaagatcttgtggggatcgaaggcaacaggatgttattgactggatggttgtactcaaatgaactagatagcacagtgataatagtatctggcatgggtggattaggaaaaactaccattgttgccaatgtgtatgagcgtgggaagatcaggttccatgctcatgcttggattgtcgtgtcacagacctatgacgtagaagaattgctgaggaaggtactcaggaagattggatatgcagatcaagcacacttggatggtatggatgttcatgacttaaaagagaagttcaaagaaaacataagtgatagaaggtgtttgatagtgttggatgatgtctgggatagagaagcatacaaccaaatacatgatgccttccaaaatctccaggcaagccgcatcatcatcactacacggagtaagcatgtggcagcactagctctaccaacacgtcaccttaaactccaacctttggacaaggtcgatgcattcagtctcttctgcagaagggctttttatagcaggaaggactacgattgcccctcagaacttctagagttggctaattcaatcgtcgataggtgtcaaggcctacctctagctatcgtatctattgggagcctgttgtcctcaaagcagccgatacagcatgcttggaagcaaacatacaatcagctacagagcgagctagcaaagagtgatcatgtacaagcaattctgaacctaagctactatgacttaccaggagacctcagtaactgctttttgtattgcagcatgttccctgaggattgccccatgccacgagacaaccttgtacgactttgggttgctgaaggatttgctgcaagaaaagaaaacaacacgccagaagacgtggctgaaggaaatctcaatgaactgatcaaccggaatatgctggaagtggtagagacagatgaacttggtagggttagtacctgtaagatgcatgacattatgcgtgatctagctctttttgtggctaaagatgagagatttggttcagcaaatgattctggcacaatgatgctgatggataatgaagtccgccgcttgtcaatgtgtcgttgggaggacaaaggtgtctataaagctaaatttcctcgccttcgaacattaatatcagttcaaacaatttcatcctcctctaacatgttgtcctcaattttctctgaatccacctacctcactgtccttgagctgcaagattctgaaatcactgaagtgccaacaagtatagggaatctgtttaacctaagatatatcggcttaaggcgcaccaaagtcaagtcatttccagagacaattgagaaactctataatctccacactctagacatcaagcagacaaaaatagagaagctaccacgagggattgtcaaggtcaggaagctacgacaccttttagctgacaaatgtgctgatgagaagcattcagatttccggtacttcactggagttcaacctccgaaagagctatccaacttagaagagttgcagacactcgaaactgtggaagccagcaaagatttggccgagcagctgaagaaacttacgcaacttaaaactgagacgctttgtttcaaaaccctcgagcctatttcagggaggctccacaagctaattgtcagagggcactgggccaatgggacactgcaatgcccaatatttcaggactgtgggagaaatctcaagtacttagctctaagctggtgtcatcttggggaagatcccctgtcactgttagcatcacatgtgccatacctcacctttctaagactaaacagggtgtatactacaaagacattagttctttctgcagggtgttttccagagctaaagacactcgttttgaaacacatgccggatgtcaacaaggtggagatcgaagaccgtgcccttccacggattgaaggtttgcacattgtgtctttgtacaatgtgaaaaaggtacctgaaggcatcgagtttcttcgctccttgaagaagctatggctgctgcatctacataaggacttcaacacttactgggagagcaatggaatgcacgagaaaatggcgcatgcgaatactgcaaagacattgattctttctgcagggtgttttccagtgctgaagacactcgtgctgatgcatatgtcggatgtcaacaaggtggaggtcgaagctgaagcccttccacacattgaaggtttgcacattgtgaaaaaagtatcggaaggcatcgagtttcttcgctccttaaagaagctatggttgctgaatctacataaggacttcaacacttactcgaagagaaatggaatgcacgagaagatggtgtgtggacaagaggtttgccgcatctag

SEQ ID NO: 77455 - DNA, 268 bp, Oryza sativa
  Clone ID: PAT_MRT4530_77351C.1
attgggaataacattgaaggtcattatttattcaccatatttatatattctttctgacaaatgaaacctctatttaaaaacaaaccccaagggaaaaacacacaactagttataggggtctagccccccagcgggggggcctatgataacctagccaacaccagaaaaaacctgttccattaaccaaatgcacgttccaaaacccctggaggttcgcccccacacgctaaaaaacccctgtcctttagacaaaaaacaccagggggaa

SEQ ID NO: 77456 - DNA, 362 bp, Oryza sativa
  unsure (1)..(362): unsure at all n locations
  Clone ID: PAT_MRT4530_77352C.1
ctcgcctttgcttggacggaacaaccagccggcgactgcggcgactccgactcctcgcacgcacgcacgcacgcggccgtggaaatcgcgccggctcgcctcctccctccccacncccacccgctagatctcgccggcttccgtagtcggtagatctcgctgcctcctcctcctgggaatctccgtctcctccgcaagattccaatcgggaggcggcggggcggcggagaagctcgctttggtggagtagtttgactaaccggtgcggcaggatgagggggccggtncggtgggcggtggtggtggtggtgatngcgatggtggaagcggcggcngggaagttcgtggtggagaagaacanc

SEQ ID NO: 77457 - DNA, 261 bp, Oryza sativa
  Clone ID: PAT_MRT4530_77353C.1
atgaccccatatagaagaaccaaatcgctgatgtacctcttggatgatcggaaatttgatctcaagtcaaatgacaagcacacaacacccctaagaaatgggtcttctaaacgacgcctccaaggagaaaacgacgccaatagcactgtcgccgcccgtcttagaacaggacgtggttttcacctgaagaacccactgagagaggaaagaaaatgcagcaacgccccaagaggaaaacgtcgcccccagcccgaaggctag

SEQ ID NO: 77458 - DNA, 2212 bp, Oryza sativa
  Clone ID: PAT_MRT4530_77354C.1
gctgcctccaaacttcaatgttacaaggagctacggaatcagcagtagagccacaaagaaactggtaaagttgaaggtagtgtacaataatggtgataattttaatgaagatgagtttcctgataaacctccagccaatgtcgagcgcaggcacatcggaacctcagtcgtcggaatggaatgttaccttgacaaagccctgggctacctgagaaagagagacatcccagtacttgggatatggggaatgggtggagttgggaagacgacgctgctaaagctcatcaacaatgaattccttggtgctgttgatggcctgcatttcgatcttgtcatctgtattacagcatcaagggactgcaagccagagaatcttcagataaacttacttgagaaacttgggctggagctgaggatggacaccgggagagaatcccgtcgtgcagctatcttcgactatctctggaacaagaacttcttgcttctcctggatgacctttgggggaaaattagccttgaagatattggagttccaccaccaggtcgtgacaagatccataaagtagtcctagcaacccgttcggagcaagtgtgtgctgaaatggaggcaagaacaacaataaaagtggaatgcctacctcaagatgatgcatggaagctattcctacacaatgtcacagaagcaactatcaacttggacatgaggatacaacgtttagcaaaggaggtttgtaataggtgcaaaggacttccgctagcacttgtttctgtggggaaatccatgtccataagaaggcagtggcaggagtgggaggccgccctcagatcaatcaacaggagctaccagcttttggaaaattcaagacggaacagcgacaacgctattcttgccaccttgaagcttacctatgacaacctgagtagtgatcaactaaaacagtgcttcctggcatgtgtcctctggccacaagattactcaatatggaacattgacctagtgaactgctggataggattgggcctgatacctataggaaaagcaatatgtcaaagccacaatgatgggtattccgtgattgggcagctcaaaagtgtgtgcttactagaggagggggacatgaggcaaaccgaggttcggcttcacgacacgatccgcgagatggcactctggatcacgtcggaggagaactggattgtgaaagcaggcaatagtgtgaagaacgttactgatgtagagagatgggccagtgctacaaggatctcactgatgtgtaatttcattaaatctctgccttctgagctcccaagctgcccaaaattgtcggtattggtgcttcaacagaacttccatttcagtgagatactaccatctttcttccaaagcatgtctgcactcaagtacttggatctaagctggactcagtttgagtatcttccaagggatatctgctcccttgtcaacctgcagtacctgaaccttgctgactcacacatagcctccctgccagaaaagtttggggacttgaaacagctaaggatactgaacctcagtttcacaaaccatctgaggaacataccttatggtgtgatatccaggctctcaatgctcaaagtgttctacttataccagagtaagtacgcaggcttcgagaaagaatttgatggtagctgcgcaaatggcaaacaaactaaagagttcagcttaaaggaactggaacgcttcgagaatgggctagctctcggtattactgttaagacaagccgtgctcttaagaagctgtccaaacttcagaacattaatgtacacaatcttggtgtagaacaacttgaaggagaatcttccgtcagcttaaaattaaagagtagcatgtccgtggtgaacttcaaaatgtgcctcgacattgaaaccttgtcaattgaatatgtcgatgatagttaccctgaaaaggcaattccatatttggagtacctcaccttctggcgcctgccgaaactaagtaaaggattcttcaaagtgtttgacaagaacctggagacctttgagccaacattgggtaccaatcccttcatcgtgtccaatagttctttctttgcacgccggaggccaatgatgcgcacagccatacagttctcctcatatatttccttgcttttgggcgcaagtttatgtcatgctattcccctttttgctaagaacttcgatagcaactag

SEQ ID NO: 77459 - DNA, 3051 bp, Oryza sativa
  Clone ID: PAT_MRT4530_77355C.1
atgatgtgtcgtgctggccaatggcttctaccgcaccttgcatatcctttcaaaactgcacaaaatgttgacaagctaacaaagttcagaagaaaactgcaagcgctgagggacgataatgaggtacgtattaagaatgcagagaggaaacagaaaatttgcccaaatatagtgagcgaatggatggaagaagcgagacaagccattgatgaagcagatgaaataaaagccgagtatgacagtaggacactatgttttcataggctgcctccaaacttcaatgttacaaggagctacggaatcagcagtagagccacaaagaaactggtaaagttgaaggtagtgtacaataatggtgataattttaatgaagatgagtttcctgataaacctccagccaatgtcgagcgcaggcacatcggaacctcagtcgtcggaatggaatgttaccttgacaaagccctgggctacctgagaaagagagacatcccagtacttgggatatggggaatgggtggagttgggaagacgacgctgctaaagctcatcaacaatgaattccttggtgctgttgatggcctgcatttcgatcttgtcatctgtattacagcatcaagggactgcaagccagagaatcttcagataaacttacttgagaaacttgggctggagctgaggatggacaccgggagagaatcccgtcgtgcagctatcttcgactatctctggaacaagaacttcttgcttctcctggatgacctttgggggaaaattagccttgaagatattggagttccaccaccaggtcgtgacaagatccataaagtagtcctagcaacccgttcggagcaagtgtgtgctgaaatggaggcaagaacaacaataaaagtggaatgcctacctcaagatgatgcatggaagctattcctacacaatgtcacagaagcaactatcaacttggacatgaggatacaacgtttagcaaaggaggtttgtaataggtgcaaaggacttccgctagcacttgtttctgtggggaaatccatgtccataagaaggcagtggcaggagtgggaggccgccctcagatcaatcaacaggagctaccagcttttggaaaattcaagacggaacagcgacaacgctattcttgccaccttgaagcttacctatgacaacctgagtagtgatcaactaaaacagtgcttcctggcatgtgtcctctggccacaagattactcaatatggaacattgacctagtgaactgctggataggattgggcctgatacctataggaaaagcaatatgtcaaagccacaatgatgggtattccgtgattgggcagctcaaaagtgtgtgcttactagaggagggggacatgaggcaaaccgaggttcggcttcacgacacgatccgcgagatggcactctggatcacgtcggaggagaactggattgtgaaagcaggcaatagtgtgaagaacgttactgatgtagagagatgggccagtgctacaaggatctcactgatgtgtaatttcattaaatctctgccttctgagctcccaagctgcccaaaattgtcggtattggtgcttcaacagaacttccatttcagtgagatactaccatctttcttccaaagcatgtctgcactcaagtacttggatctaagctggactcagtttgagtatcttccaagggatatctgctcccttgtcaacctgcagtacctgaaccttgctgactcacacatagcctccctgccagaaaagtttggggacttgaaacagctaaggatactgaacctcagtttcacaaaccatctgaggaacataccttatggtgtgatatccaggctctcaatgctcaaagtgttctacttataccagagtaagtacgcaggcttcgagaaagaatttgatggtagctgcgcaaatggcaaacaaactaaagagttcagcttaaaggaactggaacgcttcgagaatgggctagctctcggtattactgttaagacaagccgtgctcttaagaagctgtccaaacttcagaacattaatgtacacaatcttggtgtagaacaacttgaaggagaatcttccgtcagcttaaaattaaagagtagcatgtccgtggtgaacttcaaaatgtgcctcgacattgaaaccttgtcaattgaatatgtcgatgatagttaccctgaaaaggcaattccatatttggagtacctcaccttctggcgcctgccgaaactaagtaaagtaagctttggggaggatctcctctatattcgtatgctgaacatcgttgagaacaatggacttgttgacctaacctggattgtcaaattgccatacctggagcaccttgacttgtcattttgcagcatgctcaaatgtatcatagctgaaacggatgatggagaagaaagtgaaatcatggcagacaacaccagagtccacgccttccctaggctcagaatactacagttgaactacttgccaaatctggaaatattcagcaggcttaagctggacagcccttgtttggaatacatggatgtgtttgggtgtccattgcttcaggagtttcctctccaagcaacacatgaagggattactcatctaaagcggatacgaggagaggagcaatggtggagcaaactacagtgggattgcaataaaacctttgatcattacaagggattcttcaaagtgtttgacaagaacctggagacctttgagccaacattgggtaccaatcccttcatcgtgtccaatagttctttctttgcacgccggaggccaatgatgcgcacagccatacagttctcctcatatatttccttgcttttgggcggtcaaacatcaaactatacaggagaaacaagtgagacgggatctaggaacttggaggcacatagctgtcggaggtacaaaatgggaattgcttcggtcatcaggagttgttgcatcttcctgattggattatgtttgctttggtactctgcgtcagttttcttccactatgccctcgcgaaaaaataa

SEQ ID NO: 77460 - DNA, 1590 bp, Oryza sativa
  Clone ID: PAT_MRT4530_77356C.1
atgggttccattgcccagattgccgtaggagccaccacaataatgtgtcgcatcggcggatggcttctaccacacctaacatatcctttcaaaactgcgcaaaatgttaagaagctaacagagcttagaagaaaactgcaagcaaggagggatgatattgagctaatgattgagaatgcagagaggaagcagaaagtttgcccacatgtagtgagggattggatggaagatgcagaacatgccattggtgaagcagatgaaataaaaaccgagtatgacaataggactccatgttttcaaaggttgacgccaaatttaaatgttgcaaggagctacaggatcagcaagagagccagaaagagtatgataaagttgaagcaagtgtacgcgggaggtgaatttagtgaaggtgaatttccttgcaaacctccacccaaagtcgagcacaggcctatcggaacatcggtggtgatcggaatggagcattaccttgacatggtcatgtgctacctcagagagaaagataagaacatccctgtaattgggatatggggaatgggtggagttgggaagacgacgctgctaaagctcatcaacaatgaattccttggtactgttgatggcctgcacttcgatcttgtcatctgtgttacagcatcaaggagctgcaggccagagaatcttcagataaacttacttgagaaacttgggctggagctgaggatggacaccgggagagaatcccgtcgtgcagctatcttcgactatctctggaacaagaacttcttgcttctcctggatgacctgtgggagaaaattagcctcgaagaaatcggggttccaccgccaggtcgtgacaagatccataaagtagtcctagcaacccgttcggagcaagtgtgtgctgaaatggaggcaagaacaacaataaaagtggaatgcctacctcaagatgatgcatggaagctattcctatccaatgtcacagaagcaactatcaacttggacatgaggatacaacgtttagcaagggaggtttgtgacaggtgcaaaggacttcccctagcacttgtttctgttgggaggaccatgtcgataagaaggcagtggcaagagtgggaggctgccctcagatcactcaacaagagctaccaacttttcgaaaaatcaggattgaagaaggaaaacgctattcttgccaccttgaggcttacctatgacaacctgagtagtgatcacctgagagaatgcttcttggcttgtgccatctggccacaagactactcaatatggaacattgacctgctgaaaagggtgtgcttactggaggagggggacatagggcacactgaggtccggcttcatgacacgatccgtgacatggcgctctggatcacatcagagaaagggcaacacattggctccggtcttgggcacaactacacaagtgtgaggaagatacaatggggcttcgtcgccgagatcgccgggggacctggggacagctgcggtgtcgcgagatttggcacaacggcggggcacgacgatgctcgctcgctggctgaggaagacgacgaccagaagaactga

SEQ ID NO: 77461 - DNA, 126 bp, Oryza sativa
  Clone ID: PAT_MRT4530_77357C.1
atgtcgggtgatcaagccgacgacgttgggtgcgataactccgcatttgttgagaatgttctcgataatggagtgtactcgaccataacctactcgaaagaaaacagagcgagcccccagcgttag

SEQ ID NO: 77462 - DNA, 545 bp, Oryza sativa
  unsure (1)..(545): unsure at all n locations
  Clone ID: PAT_MRT4530_77358C.1
cacgaggctcaattaatatttcgcaaactggccaaacataattttgtgttgtggttctgttggggggggttgagtatgagtcatattattccgttaggatcaagataacaaaaagtagatagcagagttgtagcggattgtgggggatattgtcggcgttacattcctaaagcggactataaaaaatactcataaatcataagtttaagtnggccatgaacatacgatggcatttatcataataagacatgtattagaagtacactgcatacaaggacatcaatcataagtagaactggaagatgatctggtatgtatgcatagctacattcatgataaacaattatatcttagttgcacaggaacagcagaaaactcatgcatgtgcaagctagcaccatcaactttgtatttctgcatgtttaacctgtctaggacctgtaattattgaaattgactgggcttgaaattactatgaaagcctgctactgcaatagtggccgctatttagtactatgcttcggattattttgagtgttactgtt

SEQ ID NO: 77463 - DNA, 402 bp, Oryza sativa
  unsure (1)..(402): unsure at all n locations
  Clone ID: PAT_MRT4530_77359C.1
cccccccttgaaaatnnaatnnccccancgncangancccttnttgcaaaaaaanggccntngggttttntttttggggtnncccaacccttggtttngggantnnnncnattaangggggnttnannnnttcctgggtgggttngttgtnaaccgaatttnggcaagnaaaaanaantnctangncnttnnnnnnnntnnnnntnaactngacaaggnccntnatnccgttcntgggntttcccttctttggcggnaanaacccgncccattcccanttnaattagaagnttgggcaattaaaaagcntgantttncngaanaccccgcgacctctnttccattgccaatgaagcgcatctatcgtggtaaaaaaaataaaaaaanaaaaaaaaaaaaaaa

SEQ ID NO: 77464 - DNA, 495 bp, Oryza sativa
  Clone ID: PAT_MRT4530_7735C.1
atggctggcactgtccttctgctgcgccttgttttcttccacgtcgtcgtccttagatcgagcgctgtcggctccaaaagcgcgcaccaccgctgtggtccctccgctatgacaccatgcgttgcgccgtcatccctccagtgcggccccggaccgctgtggccgtcttccgcggttgcacaacaccgccgtccacagccctgtcgtcctgaacggcgacagctgaccgggatggaacccgagctcgccatccttgccgaattgctccctctccggtgcgactgccccgcctccatcgttgccattgactgcctcccccttcaattatcgccgccgtgcacggcctcctggcctcccgacttccaccgggccgccgctcagccggcgcccagccgccgccgctgcagcgtccgcagcccgccgccgcggccccttccgtcggcccaccgcggccacatccgcctgcgcggccgcagcctcgtgcgccgcccgtag

SEQ ID NO: 77465 - DNA, 495 bp, Oryza sativa
  unsure (1)..(495): unsure at all n locations
  Clone ID: PAT_MRT4530_77360C.1
tttttttttttttttttaggttaacttactttttttttaatttcttggtgatttttttatgttttttgtttgtttcatatttttttttttttttttgggcaaaaacccctttaattttccaaaaaaaagggcccgggggggaaactccctccgcccaaaaaaccaatacataaaccggggaataaacctaggggggaccccaccccccttaaaaattaaacccccttaaaatttttttgggaccggggggatccttttaaaaaaaccccaaaacattttttctttactggtcaagattgacaagcatttaaaggccgccttctcccaaatttacaaaatggaaattgtgaacaaaagccccttaaacaatnggggttttaaacaagaaaaggttcaaaaacaaaaaatttttgggtgaaaaaattccccctccccccccaaaaggggggggatccccggggatttcatttatgaaaaaataaaaaagggcgcaac

SEQ ID NO: 77466 - DNA, 311 bp, Oryza sativa
  Clone ID: PAT_MRT4530_77361C.1
agaagcgcgcgagaagttgggaagcaatttagggactgaccggtgacccctaaagggggtgaccaccgcaagcagtgatgtaccatccaacaaggtcatcttatgcagtggaggcaccagagcattggcatccactgagggacaacactccagggagagccttgtatggccatctaagccatgctttgtacctgaagatgaggggagccactgtagacgacacatgcttaagggcgctggtatgcaagctgactggaatgctatagtggcacgctgatgagatgaagctccccgaagatgcacagcacctt

SEQ ID NO: 77467 - DNA, 252 bp, Oryza sativa
  Clone ID: PAT_MRT4530_77362C.1
atgggcagggataatgacaactacgagctctacgctgccgcaacattattattagcattagctatagcaagagacagagacagggagatgttgcagagatacactagctacaagctagctaggctttacattaatggacagaagtcaatacccgaaccattcatcctctgctgctacaacaccagcgacaacgcgcgaggtgacaaggatgcatatggatggatggatgatgatgcatggatgatgatatga

SEQ ID NO: 77468 - DNA, 294 bp, Oryza sativa
  Clone ID: PAT_MRT4530_77363C.1
atggctgtccacctccccgtcgattggttggttgttgatggcttcttcaagcgggagcagggggagcgcggtgttggtggccgggggggggggagggtcgtcgacggcggtggaggaggagctgagggcgctgatggagcagcggcgggcgaagaggatgctattgaacagggagtcggcgcggcggtcacggatgcgaaagcagagccacctctcgacgacctcaccgcgcaagtggcacacctctgccgcaagaatgcgcacgtcgtcactgcgctcggcctcacctcctaa

SEQ ID NO: 77469 - DNA, 624 bp, Oryza sativa
  unsure (1)..(624): unsure at all n locations
  Clone ID: PAT_MRT4530_77364C.1
accggagtcgtgtcgagagcccgggtcggttctccgctcgtatccggcgttcggtccgcgaggagcgtcgtggctgcgtatgtccgtcatccggcgagaagcttcaagtcccccggtcgaaggagttgcgacactcaaggtgttcctcggcatcagccagggcaagctcatgtcganccccaatgctctgagctgtcctcaaggagtggaacggcgagcccctgtgcccatgcaacgaagccaagatgcccatntcgccattggccattggccatgacacccatgtcatgcgagggagggagagggagactgagaaaatgaaaagagaaacgaaccgcttgcgtggtgatgctgtgcaggacaaaaaagagccctggtattgttgcttgcgtgtgcgtntgccgtgttggtttatgagtggatctcgtgtgtgctttgtgttgagctggctctggctgcaggctgtgccagccatgggcggcaaatgcaatgcgggcttttgtctgaagatattggtgcgctgaaactgtattttggggtgaaagtattgctactcgattccatccgtttnaaagttgtggtaatagaaatgttttgatcctataaaaaaaaaaaaaaaaaaaa

SEQ ID NO: 77470 - DNA, 588 bp, Oryza sativa
  Clone ID: PAT_MRT4530_77365C.1
gagcagcagaatgcccaaggagcctatagttctacagcagaggtgaaggaagaagtgaagtgcatcaaggccatcatagagaggttaatacagagggatggccatctcatagtgatagacgaaggagcagccccagcggctgacgacggtgctgcacgaagaacatcagagagcagaatcctggcagttaatccgaactatgtcatcgattaaccatctgaattatgatacgcagctaacacaatccaatcgatgtggttaaccgatagaaccaagagtagattctagggagaacccctggtgggttatgctatgcactagacatgtaccatttccaactgtggtagtctttgcaattgagtatatgatctcttgacaaattgtacaattaattcttggaagcaaaggtgtagtcagagttatagttgatgataactataatcggtagtgtgcctgtgtacattttctttctcttggttgaactatgtgagggctttggagtttggagaagcttgaattttcaagtgcttgctgtgcttctaacgtgtatcattcagattcagatgattcgagaaacgtacctttggc

SEQ ID NO: 77471 - DNA, 2555 bp, Oryza sativa
  Clone ID: PAT_MRT4530_77366C.1
ctcccttcctgagccgcgtttcttccccaaaaaccaagggggaaggcaaactttccccaaatcgcaaccccaatcccaatctagggcacatgagccacccctcgtcgtcgtcctcctccgctcccccggcggcggccgaggccacctccctcgcaccgggattccggttccacccgacggatgaggagctggtgtcctactacctgaagcggaaggtccatgggcggccgctcaaggtggacgccatcgcggaggtggacctgtacaaggtggagccatgggacctccccgcccgctcccgcctccgcagccgcgactcccagtggtacttcttcagccgcctcgaccgcaagcacgccaaccgcgcccgcaccaaccgcgccaccgccggcggctactggaagaccaccggcaaggacagggaggtccgcaacggccccaccaccgtcggcatgaagaagaccctcgtcttccacgccggccgcgcccccaagggcgagcgcaccaactgggtcatgcacgagtaccgcctcgacggccaaaccaccatcccaccacaggattcattcgtcgtgtgccgtatcttccagaaagccggcccaggtccacagaacggggctcagtacggagctccttttgttgaggaggagtgggaggaggatgacgaggatgttggtttgctaccggtggaggagaaggacaactctgatgaccaggaaaaggaaatttctggtgctatggagaagggctatctccagatgagtgacctcgttcagaacttggttgatcaaaatgagaatggtaccattgccttgccagtttctgacaattcaaacaacagcaaccattctgaagacgtggatggaaattcaggggacattttaagtgaccaaaaccttgggtctaactttcttcaccatgttgagcctgtggagcaaaatggcctagtgcttaatgaaaatatgttttctagtgccaatgctggagacctttttaatatatctagccccaatgatggattcctagaactgaaggattttgcagatattgcagatttggagaatcctttagccaatgaatccaccatctggccttctgatggttggccctggaaatcaactgattccatggaggctgtgaatggggctagcaatgaattttctcccttagctggtgaacagatattccagccagaagaattggaacagttgttacagtcactgcaagaagactctcatatgggttcaactatctctgatcccccacattcatctataacaaatttagctaagccagaggaagattgtctaatgttctatgatgcaccctttgattcttcaatgtgtgatgatggttttagacagctcaatggatttcttggctccccatcgaccaatctatctggtattgacatggtggacgatggtatgccgtactatgatgcgatggatgataacttgtttaatgatcttctgagctcagtacagccatcagctggtagcagttcccatgcttttagtgggccagtccttactcaagaggtcaacaattcaacctatacatatagtccaactcaaaaggttttagaacctaattttgtagttggtgccccatcatctgctaggttacctgaagcgggtagtcagttaaattatgttgttttaccagattcccagaccaagagtagtctgatcgggaagcgttttgtaaagatactggattcaatctctgctccccctgcttttgcagcagcagagttcccagctagccttcgcaaatccttggctcctatttctggagctcatcacaacactatccgtgtctctgctgaagtaatcagcataggaagtttaactcctgattctcaagataagtggtcccttgagaaggatgaaggcatggagctgctcttctcggcaggttttgagcctgatacccgtgtacactttggctgcaacacaataaccgcagtactgcgtggtggcttctgcctcttcttcttttcagcaataatgctcttggtgagctacgaggtgggcatgtgcatctatggcaagtaggcctgctggtattggagacgttaagaacatgacgttaggtaatcctatctgtatttgaggcaaactagggacctcctgctgctggcttaatgtattgcactgcatgacattacatgacctccatgtgttgaacaagggctgaggctgtttaactatagcactagcagtaccgttttgcagctcgagagagctagtagtgtatgtatgaattcctcaggtgctattcgtagtagtaagcgcgaattgattattatcagttcatgatggtgctactattcatattcatgtttctggttggcatgggcggtgctagtgcaaactgcagagtgctgtaaatattccccaaatctgcaatgaattgaacgagggtgcatttgcccttatgactgttgcggtgttgcaggtttttgaatgagaaggaaagattactatgtagaaaacgctgtgttgtatttgtcggtcgcaggcatctggtggtaaattctgttactgaag

SEQ ID NO: 77472 - DNA, 326 bp, Oryza sativa
  Clone ID: PAT_MRT4530_77367C.1
caggagggagatgaagacgatggtgctcagtaggtcttagtacggtcgttgcctgtggcaatggcatgccgctgccttaattccgctgccttatctatttctgcttttggatgtattccggaccactcggtccgataatttaagacaatgcctgcgggcttatgatgtaataattcataactgctacttcttcctcaccccgccatacccacccgcgttccacgcccttactcccctggtcactgtcccgtcaccgcagctgggttacagtatggagactccgatccagattgactccgaggcagagaggaccgataccaagccag

SEQ ID NO: 77473 - DNA, 298 bp, Oryza sativa
  unsure (1)..(298): unsure at all n locations
  Clone ID: PAT_MRT4530_77368C.1
agtaaccctaatcagatgtatgtacctacgtcagttatgccgttaattgtctgaacagatcatctcctttaccattctctgtacacaagatttgtactgtttctagtatagttttgggcttataggtctgtgcagagtccaaggcatgcccaccatgtccatgtaaagcgcttttacatgatgaagagtctttgtacaagaagcaattgagcagacttcttcnctgctattttcttcttcaccaaaaatatatgaataaataaattaaatcttctccataaaaaaaaaaaaaaaaaaa

SEQ ID NO: 77474 - DNA, 307 bp, Oryza sativa
  Clone ID: PAT_MRT4530_77369C.1
ggggcaaaccaggaagattttttcagaagaacattggagttcattattttttcaccacatttttttaaatagatgcttcctggcaaaagaaagccctatttttttagcacccccacattgtcacccccacccagttaatttttgtggcctagggcccggtttttggggtcctaggatccccaagccagttgcagacaccaccgggcccattggggatgtccacgttgcaaaacgccgggggggtctcccccgcgcgctcaaagtccctttttgggaagggggggaaaacctgggccatggggggccc

SEQ ID NO: 77475 - DNA, 346 bp, Oryza sativa
  Clone ID: PAT_MRT4530_7736C.1
aagtgtctttttgctggtagattttgcatgtacagctaacaacacggcagcgcaatgaagtgaataggtactagttgagtcgttagtcagaactcagaacccattgatttccggtcccagacgaggagattcttgacagcgagagaacaagaaaggcttcgcgaacattatttgcaatcggtcggaacacactagtggtcaatgtagtgttgatcaacggagcacctttcgcgtttaattccagtaactaagaagtctacataaaaattttgcccccactttgtatataactaagaagtctacatatgtatttttataaatattgtttaatataattacctaatcg

SEQ ID NO: 77476 - DNA, 275 bp, Oryza sativa
  Clone ID: PAT_MRT4530_77370C.1
aacagacctgccaactcttgtgaatcaccaggagcaagtccttgacagggaggacacagatgaggaacaacgcctccttgctgcccttgaaattgaagttaaaccaatggctatgcaaattgattatcctgaatgggcaactgcattttcctggggccacgaagtatttaagaagctgatagagaacataattggatggaagaatccagcatcaacatacagccgtaagcaggaacttctggggttcttcagcagtaaaaggatgtcgaatggca

SEQ ID NO: 77477 - DNA, 513 bp, Oryza sativa
  Clone ID: PAT_MRT4530_77371C.1
atggccgcctccgcctccggtgagaagaagcgtcaggctcagccgcagccgagctcgtcgtccggcgccggcgccgtcgtcgtcgccggcggcggggcggcgcagcagatcatcttgttgcaccggacgctgcacatggagttgctgaaggaggcgggcgagatggcggcggcgtgcggcggcgacgtccacgccatcgtgttcttccccggcgggtcgcgcgccgagtaccacacgttccgcggcgcgcccatcgcggcggcgcgggcgcgggcggtggcgaggcggaggcgcgaggcggagccggcggcggcggcgctgcggggggtggtcgcgatggacgtgtcggggatggcggcggaggaggtggaggcgcaccgccggaagctgctggcgctcaaggccgccgtggtccgcaagctgcaggagaaggccgccgcggcggtggcgaacgtcgccgccggcgacgacgacgacgccggccgcagcaacaagattaggaagatagagtga

SEQ ID NO: 77478 - DNA, 410 bp, Oryza sativa
  Clone ID: PAT_MRT4530_77372C.1
cccacgcgtccgtgttcgtccgagcctcagttttggctgtggatatgaccaacaagtggggagaaatggtgcagcaccagcaacaacagacggcttgcttgggcttggtaggggatcagttagcttgctctcacagctcaagcagcaagggatcaccaagaatgtactcggccattgtctcagcaccagcggagggggattcctcttctttggggatgatatggttcccacttcacgcgtaacttgggtatccatggtccggagcacgtctgggaattactactcacccggctcagcaacactggactttgatagacgttcactgagcaccaagcccatgggggttgtatttgacagtggtagcacatatacatacttttttgcgcaagcataccaaacaactatttttt

SEQ ID NO: 77479 - DNA, 1653 bp, Oryza sativa
  Clone ID: PAT_MRT4530_77373C.1
atgtcccgcagcagccgcggcggcaggcagtcggcctcgtcggccacccggatggcgtccagggcccgaccgggtttccccgtggcgccaccaccacccatgggcccgccgccgcccccgccgatgcccccggtcccggtgatgtatctccggggggtcccgccgcccccgccgtggctcccgcagcacctgatcatctgcgggctcgatcccgcggccgccgagcggactgacgctttccggagcaaatccctcctcaacttcatttctcgtacgggggttttgccctcgccggaggaggagttgaagaggcaagtggtggtgcgggagctcgataagatagtgatgggttgggcgaagagggtggcgtacgaccagagggaacaatattggaacacaacagctacggtgttgacctttgggtcgtatgctttgggggaattcccctttgagatttttaatatatcttattgtgacaagcgttgcctaaaatgttctgctttgaaggcatatggacctgaatctgatatagacgcagtctgtgttggcccttgtattgcatcgttacagcaccattttttcattgtcttgcgacaaatgcttgaagagaggccagaagtatcagacctgcattctattgaaaatgctaaggcaatacatgcatttgaccctcgcttgctagcggcggttaatgaaccaagctggagatgtctatctggagttcgtgttaatagacaaatcatgcaattgcttccaaatataaagaagtttcaaattcttttgcggtgccttaaactatgggcgagaaaaagagggcttcattgccatctacttggcttctttgctgggatccatttggcgattcttgcagcatttgtttgtatcatgcatccacatgctactctcagctctttgttcaactcattctttgatatattttctcactggcattggcctcttccagtgagtttacttgatcagccaactccttggagacctcattgctgctctttcatgcccatagtgatgccctgttctccaccagaattttgtgcctctagtataacaagaagtacctttaacaaaatcaaagaagaacttcagcgtggttttgctttgaccaagcttggtgtttgcactgttgaacagggtgataggaatggtgatattaattggactgagctttttgcaccttttccgtatactgtgagatacaaacattttctccgtatagttctttctgctccagtggctgaagaattacgtgattgggttggatgggtgaaatcacgatttcgcaaccttcttctcaagttagaaagcattggtgttgattgtgatccagatccctcagaacaagccgatcatagcatgattgagcctaatgtcgtatttttctggggtctcatgtatagaacgagtacaaacatctgcatcgactctgtgaaagaagacttcatgaagagtgtcaccaacgacatctatggaaaggagaagtgcacccattcagacataacgatgtccattgtctggccaacccatttgcccaaatgtgtgtatgctcactcagtttactcacagaatcgacagaatccgcggcaatttatgatgggcaaccaactgatgaatcaggactgcaatgcagtgcgttag

SEQ ID NO: 77480 - DNA, 678 bp, Oryza sativa
  Clone ID: PAT_MRT4530_77374C.1
ctgcaggcagaatcgtttaatagcggtgaggactttcttctttgcatgactcatgatagatactgtttaatttggttgtctttctattgctctcccagcatgtcactaagagttcatgtgctatttttccatttgaaaggatgaaatgagtgagtgcaacaaattgtttccattaaaaaaatgcttccatggctgaaatacgaaaatattgccttgaattccgtatagttcaacaaatgtcatgttgatatgcaaaggattgctaagtatattctctctgtaatttctggtattattgccttaatgattgagaagcgcttgccttaagtcaaatatcagcagatgtccatcctaagcaatatgtaatggcatgtctaattgtctgtcatgcagcaaagtgctttttctttttgcctgaaagcttgtgcattcatggcgcacttaactgttatgttacaccaatatacatgaagtgtagtggtagatccgtcactaccttgacaattaccgccatttggaacagtggtattcatcagtatatggactttatcttaattcctgatataactattagatgaaattgcaggggattcaacgaattgaaccctgccaaaattgatccatttaatatcgacgatttcccttcagttggttgataactctaggctatgttctact

SEQ ID NO: 77481 - DNA, 1482 bp, Oryza sativa
  Clone ID: PAT_MRT4530_77375C.1
atgggggatcatcagatgatgcacgcagctccggcggcgatgtacaacggcggcgggggcggtggtacgacgagctctcatggcgtgtggtggagcaacgcggtgggggtaccggcggcggcgacgtgctcgacgacgacggagctcgccgggtacaccgcctggtcgtcggctctggccgctggatacgatggcatggtagctgacaacggcggcaagcaggcgaagagcaccaccacggcgtcgtcggagtcgcccggcaacaacagctcggtgaccttccaagagccggcgagcatccccgacccggccgccgtcgccgccgtgccgcagccggggctcgccggcttcaccgactggacccagcctttcatgaacaacggtgctggtctgcatgagtttctgcaagatggccaccatgacatgagcgcgtcgagcttgatgaatcactcatcaaataacctagcactgcagcaagcaggtcaccaccacgagctgctgtccagcttcggctcagacctgctcttgtcgccgacgtcgccgtacggcggattccagtcctcgctgctgaggagcctcatggagccgacggccaagcagcagcagcagcagccggctttggctggactccagcagtatcatcagtaccagcagcagatgggacacacaccagcagctgctgccaagttcgcgcaggcagttggggccagggattcactccagttcaccaacgacgcgccgttctggaacccttctgccggattcggcatgccggcggctgtggcggtggcggcggcggcggcgcaagatcaagctagcgttcgctctgccaaacgctcgtcgccggcgccgccgcgtgcggcagcaacccttgcattaaagactgctatggaaggagtaggggactctagctcagtgatcaccaagaaggagacagcgttcaagaaaccgagactcgagacaccgtcgccattgccgaccttcaagacggataccgcatcggtgctccatgagaccatcgagtacatcaagttcctgcacgaccaagttggtgctcttagtgctccatacttgaagaacggtgcccatcaagtgccccacttgaagaactcaagtcctgacaagtccaagcacggcgagatatcactgaagggccgggggctttgtctggtgccgatatcgagcacgttcgccgttgccagcgaggtgcccgtcgagctgtggactccatttggtgccaactttattagtgatcaaaatgtggatgattgggctgagttaggctgcaatgttgaagaaagcagatctctgaaatcttacagatccgacgggattgtccgcggcggcggcgaccgaggtgacggccggcggctgcgaagcgaggtcagggaagcggaggagatggaggacgagccgccggagagcagaccgccggcggcgagggattcggaggtttcggcccatgagaagaggcaggaatag

SEQ ID NO: 77482 - DNA, 292 bp, Oryza sativa
  Clone ID: PAT_MRT4530_77376C.1
cccacgcgtccgcccacgcgtccgctcacttatcctctcccttacctctctctccctcagattcctcacggcgatgagcgcgggggcggcgggatccgcgcgcgacggcgaggcgcggagtcggcggcggctcccggtgctgtggcggcggcgaggcaattttttttgtttttttattggattttcgcaggcgggccatttgccggcttgcgaagatggatgattttcaccgtcgtttgtgtgcaggcggtcctcccctccgcctacaaaaattgcttttggccgcctgcct

SEQ ID NO: 77483 - DNA, 390 bp, Oryza sativa
  Clone ID: PAT_MRT4530_77377C.1
atgtcggtggggaagaaggagatggcgccgtcgaaggaggacggcgcggcggcgaaggggggagcgcggtcgtacgcgcggtgcttctccgggctggagttcagcgtggggccggggtcgctgagggacgccgacgccggtaagctcaagagccagatcaagaagtgggcgaaggccgtcgttgcgtacgcgcgccagatcagcttcggctcgccgagggcggcggccaggtcctcctcctcccgtcgggccatgtcgtcgacccgtggccgcgacggccacgccgaaggcggcggcggcggcggcgccgccaccgcgaggtcggccaccttcccgtccaagtccgatctcggcgaagccaacaacgacgagatcgtgcctgcaacttaa

SEQ ID NO: 77484 - DNA, 1314 bp, Oryza sativa
  Clone ID: PAT_MRT4530_77378C.1
atgggggatcatcagatgatgcacgcagctccggcggcgatgtacaacggcggcggtggtacgacgagctctcatggcgtgtggtggagcaacgcggtgggggtaccggcggcggcgacgtgctcgacgacgacggagctcgccgggtacaccgcctggtcgtcggctctggccgctggatacgatggcatggtagctgacaacggcggcaagcaggcgaagagcaccaccacggcgtcgtcggagtcgcccggcaacaacagctcggtgaccttccaagagccggcgagcatccccgacccggccgccgtcgccgccgtgccgcagccggggctcgccggcttcaccgactggacccagcctttcatgaacaacggtgctggtctgcatgagtttctgcaagatggccaccatgacatgagcgcgtcgagcttgatgaatcactcatcaaataacctagcactgcagcaagcaggtcaccaccacgagctgctgtccagcttcggctcagacctgctcttgtcgccgacgtcgccgtacggcggattccagtcctcgctgctgaggagcctcatggagccgacggcgaagcagcagcagcagcagccggctttggctggactccagcagtatcatcagtaccagcagcagatgggacacgcaccagcagctgctgccaagttcgcgcaggcagttggggccagggattcactccagttcaccaacgacgcgccgttctggaacccttctgccggattcggcatgccggcggctgtggcggtggcggcggcggcggcgcaagatcaagctagcgttcgctctgccaaacgctcgtcgccggcgccgccgcgtgcggcagcaacccttgcattaaagactgctatggaaggagtaggggactctagctcagtgatcaccaagaaggagacagcgttcaagaaaccgagactcgagacaccgtcgccattgccgaccttcaaggttaggaaggagaagctaggggacaggatcacagcgctccaacaactagtctctccttttggaaagacggataccgcatcggtgctccatgagaccatcgagtacatcaagttcctgcacgaccaagttggtgctcttagtgctccatacttgaagaacggtgcccatcaagtgccccacttgaagaactcaagtcctgacaagtccaagcacggcgagatatcactgaagggccgggggctttgtctggtgccgatatcgagcacgttcgccgttgccagcgaggtgcccgtcgagctgtggactccatttggtgccaactttattaggtag

SEQ ID NO: 77485 - DNA, 528 bp, Oryza sativa
  Clone ID: PAT_MRT4530_77379C.1
cgcgtgggttcaaagagcttgtgtgttgaaagattgagcaaacgtgaagtgcagaaaaagcattaagaatttttggagtctaaaagactttttcaaattatttctcaactgatgtagtggaaacctctccttccccaaggagaagcagatggaggctctggtggcacgtctgaaggggcaatagcaaggctgcgaccaagatcaagagttggatgatgtttttcctaccaaaaaaagtttgaagtccgtgttaaagtaagagttgtcaatttctgctatgggagttcttacccctttttgtttagtttgtctatcctttaagtgaccctagctggtcgggatgtgtgaccatgtgagacttcccttttgctctgagctcatgtaaaccttgtaatcccagcgaacctgtcgttgtggctttcaatataagctacggggtaggtctgaggaccttcttgaaaaaacatttattcctatgttgaatgaattgtctagaattagatccacaaaaaaaaaaaaagggcgggc

SEQ ID NO: 77486 - DNA, 909 bp, Oryza sativa
  Clone ID: PAT_MRT4530_7737C.1
atgggacggcacgcgtgctctgccgccggtgtccagcagaagctgcgcaaggggctctggtctcccgaggaagacgagaagctctacaatcacatctaccgctacggcgtcggttgctggagctccgttcccaagctcgcaggtcggctccagaggtgcggcaagagctgcaggctgcggtggatcaactacctgcgccccgacctgaagcggggcagcttctcgcagcaggaggaggacgccatcgtcggcctgcatgagatcctaggcaacaggtggtcgcaaatcgcgtcgcacttgccggggaggacggacaacgagatcaagaacttctggaacagctgcctcaagaagaagctgaggcagcgcggcatcgaccccagcacccaccagcccatctccacggctgctgctgctgcggcggcggcattggacacgtcgacgcaggaccagaagccgccggccaccgccgacggcttcgccctgaagcagcagcagcaggtgttcgacccgttcccggtgatcgacagcttcggcagcgggttcgacgccacgggcatgccattgtacggccacctcggcggcaaggacgcggccgggttcgtggactacagcagcgtgcttgacgtgtcggagaacctgggctacggcgagagctccagcaacagcagcaactggaactgcggcgtgggcgcgccggaggtgaacaatgcgctcgagagcgagccgctgcattgggccaccgagagcaaggtcgagcctttcgtgggctacggcgagggggacgccatggagcacaagttcgggctgccctgccatgggcagcaagagcagggcatgacacatttcgacttcgacgtcagccggagcatggtggtcggcgacttcaacttcgagtacttccgatga

SEQ ID NO: 77487 - DNA, 2038 bp, Oryza sativa
  Clone ID: PAT_MRT4530_77380C.1
atgagatctgtgatgatgtgctgcctcctcctcctcctggtctctgccgctgccggggccgagggcaagtcggaggtggcgctcctcctggagcgcgtgaagccggcgctgcagggggagggcgaagtaggagggaacgcgcagctggccacctggaccgcctccaccccgctctgccagtggcgcggcctccgctggtccaccgccgccaccctcccccgcgagctcccctgcggcaacctctctgcaggcctcgcccaccacccggtcccggacgacctcctcctcctcctctccatccgcctcccggcctccgccctcgccggccacctccctcccgaactcgccgctttctccgccctcgcctccatcttcctcgcccacaactccctctccgggcccatccccctcgccctcggcaacgcccccgccctctccctcctcgacctcgcctccaaccgcctctccggctccctcccgctctccatctggaacctctgcagcggcaacgcccgtctctccctcctccgcctccacggcaacgccctccacggcccaatccccgaccccgccgccctcgcccccaacaccacctgcgacgccctcagcctcctcgacctctccgccaaccgcctctccggccccttcccctcctccctagtcaccaccgccttccccgccctccgctccctcgacctctccgacaaccgcctccacggtcccatcccgcacggcctcgcccccatccactccctcaacctctcctacaacaacttctccggccaacttccccccgacctcgcctctctgccgcccgacgccttcctcgccaacagccccgcgctctgcggcccgccgctgccccaccactgcctccccagcaaccccctcacctcctccgccgtcgccgccatcgtcattgccctcatggccgccgccgtcgtcctggcttccctctccatcggctgggcgcagggccgttggaggcgagcgcctttgccgccggaggaagggacactcacggaggacggcgaggggaagctggtggtgttccagggcggggagcacctcacgctggaggaggtgctcaacgccacggggcaggtggtcaacaaggccagctactgcaccgtctacaaggccaagctggcggagggcggcggcagcatcgagctgcgcctcctccgcgagggctgctgcaaggacgccgagtcgtgcgcgccggcggtgcgccgcatcggccgcgcgcgccacgacaacctggttccgctgcgcgccttctaccaggggcgccgcggagagaagctgctggtgtacgactacttccccggcaaccggacgctccacgagctcctccacggccacggggagcagagccaggggatgaggccggcgttgacgtgggcgcggcggcacaagatcgcgctgggcgtggcgcgcgcgctggcgtacgtgcacgcggggcacggcgaggcgcacggcagcgtgcgctcgtccaacgtgctggtggacgagtggttcgtggcgagggtggcggagtacgcagtgcaccggctgctggtggcggcggcggtggggaaggcggacgggtacagggcgccggagctgcagtcgagggggaggtgcagcccgcggacggacgtgtacgcgttcgggatattgctgctggagctgctgatggggcggaaggcgtcgggagagctgccggcggtggtgaaggcggcggtgctggaggaggtgacgatgatggaggtgttcgacgcggaggtggcgcgcggggtgcgtagccccgcggaggaggggctgcttcaggcgctgaagctggcgatggggtgctgcgcgccggtggcttcggcaaggcccaccatggcggaggtggtgcggcagctggaggaggtccggccccggaacagcagccggccgtcggcgatctacagccccgccgagcccaggagcgacgccggcacgcccaccgccgccgccgtctaattccaatataatgtcgtcccgactccgaaccgtacataacatacgccag

SEQ ID NO: 77488 - DNA, 303 bp, Oryza sativa
  Clone ID: PAT_MRT4530_77381C.1
attcttgccatcctcgccgaggcgctttaggccgtgttctgcgaggtgatgatctgcatgtcggagatacaccgaccacttgacttataaggtcaagcaccttcctggtcagatcgcggtccccatcattatggcgcacacttagcagggaagctactacatgaagcatgccctgaagctaggtgagctctacctactgttgaagacgaagcatgaccggtactcgctctagacatccccacagcggcttgtttctcaatatgaggtctttctcctctttcttctattcctttttgtgtttta

SEQ ID NO: 77489 - DNA, 168 bp, Oryza sativa
  Clone ID: PAT_MRT4530_77382C.1
atggcgaggagctcactgaagaccgctatgccaaggtacgccaatagcaccttgaaccgcaccccgtcggctgtctacaccgcgcagtggcccttgccggcgagagacgacgacgccatggttgaaggctaccgatggcaccacgacctgactgctgctgcggcatag

SEQ ID NO: 77490 - DNA, 3652 bp, Oryza sativa
  Clone ID: PAT_MRT4530_77383C.1
gtcgttagccgcccgtgtcctcgggtgcggctgacacgtggggcccacggcgccggccggtgtgagcccgagtgcgcccggtccaccgtggaccgtgaggctgccgcgtgggtcccactacaacgactacaactgtggcagtcacaacagcagtgagcagcacaaccaaagctcaactccaccctcactaatggcaccagctccgtcagatccgccagctatgccagctcaatcagaacagcccaagaaggagtccggaggaaagccaggaccctgcttcaattgtggcaagcacgggcactttgctggcaagtgtccaaagccgtagcgtgctggacctaagttcgttcaggcccgcatcaatcatgcatctgcagaggaggcacgggcagcaccagaggtcgtgctgggcacgtttcctgtcaactcacatccgacagtggttctttttgattcaggtgcaacacattctttcatttccaagaagtttgctgggacacatggattatcggtagtgtaacttaaaataccgatgcgggttcatacccatggaaatgacatgaagacaacacacaactgcccctcagtgactagtgagatcaagagatcacagcttctagctgcgcaagggagtgattgactgcgcaagtcgcaccatcactctaaccaatgacaaaggggagaagatcacctttcggcctctagtgccacagaagtctgtagcaagtcaggatcaggctgctactgaggaacagacagaaatagtgaagaaaagtcccaagaagttggaggatattcttgtagtacaagagtatcctgaggtgtttcctgaagacctcactacaatgccaccgaagagagaaatcgagttccgaatcgatttggcacctggaactgctccaatttacatgaggccgtacagaatggcagctaatgagctagcaaaggttaagaagcaggttgatgaacagctgcagaaagggtacatccgcctgagtacttcgccttggggtgctccggttatctttgtggagaagaaagacaagaccaagatcatgtgcgttgattatcgcgcctttaatgaggtcacaatcaagaatcgacaacaaatatccgttgccaagaattgatgacctgtttgatcagttaaagggagccaaagtgttttgcaagatagacctacgatcaggctatccctagttgagaatttgggaagaggatattcccaagacagccttcaccactcggtatatgttgtttgagtgcacggttatgtcatttggactgaccaatgcacccgccttcttcatgaacttgatgaacaaagtattcatggagtttctggacaagtttgccgtggtgttcattgatgacatacttatctgttcaaagtcagaagaagaacatgagcagcatctccatctggtactcgagaaattgaaggtgcaccagttatatgccaagttcagtaagtgtgacttctagttgtcggaagttaaatttcttgatcacgtcattactgctcaaggtgtggcagtggattcatcaaatgtggagtcagttaccaagtggaccccaccaaagacagtttctcaaatccggagttttcttggacttgcgggttattaccgttggttcattgaaaatttctccaagattgccaggcccatgactctattgcttaagaaagatgaaaaatttaagtggtcagctgagtgcaaccaaagctttgaagaacacaaaaagaaattggtatctgcaccaattctaattctgcctgaccagacgaaagacttctaggtctactgtgatgcatctcgccaagggttgggatgtgttttgatgcaagagggcagagtggtcgcttattcctcgcggcagttgcgtccacatgagagcaattatcctactcacgaccttgagttggcagcagtggttcacgctctgaaaatctagcggcactatgttattggcaactgctgtgaagtctacactgatcacaagagtttgaaatacattttcactcagcctgacttgaaccttcgacagcgaagatggttggagttagttaaagataatgacatggggatacactaccatctaggtaaagccaacgtcgtggcagatgctttgagcagaaagagctattgcaatgccctatgtacagacaaattgcagcaagacctagaggcatggcctacgctcgtggatcaagtcagagcagctcaagtaaatgatgctgaaatagctgagctcaagaagaatatgagggttggaaaagcctaagattttcacgaagatgagcacggcacaatctggatgggagaaatgttgtgcgtacccgaggacaaagaactaaaggatctgatactcacagaagcccattagactcaatattcaattcatcccggcagtaccaaaatgtaccaggacctcaaagagaaattcaggtgggccagcatgaaaagagaaatagctgaagtcgtcgcactctgtgacgtttgtcagcgggtaaaggtagaacatcaaaggctcgcaggattgttacaacctcttcagatcccgaaatggaaataggaagacattggaatggatttcatcaccggtatgcccaggacgtcatcagggcacgattcaatctaggtagtcgtggatcgactcaccaaagttgctcatttcattccagcgcacactacctatactgggaaaagattggaagagctctacctttcaagaatcatatgtacgcacggggtacccaagaacattgtatctgatcgagggagtcaattcacctcaaaattctggcagaagttgcaagaagaattggggactcgcttaaatttcaacacagcctatcacccgcaaatggatgatcagactgagagggtcaatcagatcttggaagatatgttatgagcatgtgcacttgactttggcggagcttgggataaaagtctgccttatgcggaattctcttacaacaacagctattaggccattttgtaaatggctccattcgaagcgttgtatggttgtaaatgccgcataccactctcctgggatcaaattggagaacgccaactgttcgggacagaagtgctaagcgaggcagagaagaaagtcaggattgtcagggaaagattgcgaatcgcccagactcagcagaagagttatgctgagaaccgccgaagggagctcacttttgaagtaggggattatgtgtacctttgtgtcactcccctcaagcgagtacaccgcttccaaaccaaaggaaagttggcaccatgctttgtgggaccagacaggattttggaacacagatgtgaagtcgcataccagcttgagcttccatctaatatggttggtatccacgatgtgtttcatgtgtctcaattgaagaagtgtttgagggtacccgaggaacaagctagctcagagcacatcgacattcaggaagatcaaacgtatgtcgagaagccagtccgcatcctcgaaaccaatgagagaaggacctgaaacaatgtgatcaggttttgcaaagttcagtggagccaccactcagaggaagaggccacttgggaaaaagaagacgaattgaaggccgcacctcttcgccagctcttctgaatctcggggtcgagattccgtt

SEQ ID NO: 77491 - DNA, 582 bp, Oryza sativa
  unsure (1)..(582): unsure at all n locations
  Clone ID: PAT_MRT4530_77384C.1
ctgcgtagcttagttactgaatgatgcacccctgtaagttttctaagctcacttctgacagctgattnataacttaagacttccatgttcattntgatttttcttcttttctccaaagattgtttccaatgtttttatgaactagaaatgtgaagctggttcgtatttgcagtgctaaaatgaaacataaatcagcagttcaggttgttctggacaacgatggatttgttttgaacagtttgttaggtataaactgtgggatgtcatggtccttctgaaattcggatgctttatactgacattttctgtgtgaaaaatttggagctttcaactcatagtgtgagtcataagtgtcaggttagaaatgtctaatttgagacatgaatgaccattgagtgatgaancattgagattgtctaacatcgacgacgtgctaccgtgcccaggaagaagttgatttctcttattaaagttggtatctcttattaacttgtgtaaacctgaaccttgttggaccggacgcctctcttgtcaggctacctaaaaccgtctgaatatgtccatgttaaaaaaaaaaaaaaa

SEQ ID NO: 77492 - DNA, 262 bp, Oryza sativa
  Clone ID: PAT_MRT4530_77385C.1
tgacaggggggacattaatattacggagtttgtactttgatacaccattcattagcataatgatttcatgttcatatttttgatcatatcaagcaacaaaagaagaatttaaaatataaaaaaaaatttactaaaatataatgatattaaaaatttcgaactggttcttataatttaactagaatttttaattatcattttcaacattatagggttgaatttctatagatttaaggaagtttcaacattttttattatgttt

SEQ ID NO: 77493 - DNA, 376 bp, Oryza sativa
  Clone ID: PAT_MRT4530_77386C.1
agaatatcgcgctctctctctctcttggcccgatctcccggcgaggggataactcttgctttgatcgagtacaatgtttacgacgtggctaccaaccaaaacaagtccagaacaccgtgcaatcactacaccacaaacgatgtcgtaccaaccgtgacgtgcggtagatgatcctcggaatgaatttggatatgagaccagatgcgtttgaaaggtagcgagataagctttccaattaagtccaagatcacccaaattgaagttggtatgaaggcactaggtccgtttgaagttagtattgtttccggaggctgaaatggattccaaaactcattagactttaatattttggtggtgtttaaatctcctgaagatg

SEQ ID NO: 77494 - DNA, 190 bp, Oryza sativa
  Clone ID: PAT_MRT4530_77387C.1
ccactactatgggggatgctgctccggctgctaccgctccggcggaattggctggtcccacgcctccgttcttgtgcgtatgcgctggtttccttgcgagattgagtgatggaatcggtttgattagaaccacgcgttctggaactcccttaccggctcgatgcccgtgaccctgtcggcgctgttgtct

SEQ ID NO: 77495 - DNA, 390 bp, Oryza sativa
  Clone ID: PAT_MRT4530_77388C.1
atggcggccctcccatcccctctcaagtctggccagagggggaggggcggcggcgtggctctcccctcccctccctctccctcccaaaatcctaaccctagatccggctggaggaggagggcggcgacgggcccccacccgtggcagccgacgtacaggcccagtactccagtagaggccgagtctcaccgggcgcgtgggcgcgcggccattcaggattcagcccaggccaccgcacgtcgcttcgtcttcgatcccatcgatctactgctgcgccgcgccgttctctcccatcgtctctgcgccttctctcctgacctcgaagcgaagaagccgacgagggctgttgatcgtctgattgagtgcagccagccggccctgatcgagtga

SEQ ID NO: 77496 - DNA, 1012 bp, Oryza sativa
  Clone ID: PAT_MRT4530_77389C.1
tgtggatccccgcatcgcgcaccccgcctaacgaggtctcccctcccaaccactcctctcccgttcccccggcggcggacggcggacgcgggggggttgacggccaaccacggctcagagcgcgcgggaggagcaaaccggggcgcgccgcagcttttgagagcgagagaggctactcacccctctgttcaagaggggctttgcagctctggctccgccaccgcccaaggagcacctattgacaacaaaaatcacatagtgctgctcctgggggtttggagggtgggctatgcatacgatctcaagcccctaccaacgcttaagtgccaccgctactaatactctgacatcaaggagcattgatgtcaggaattctgctagctttgtcaagttgccgagaattggactcaacattggaaacatagtcatgagtgccaagccgaattctggtttcagctcagaaacggcccaaggagagagttgcaccgttggtgagaaggatggtgtgatcattgttgaccatgggtcacggcgtgaagaatccaatctcatgctaaatgattttgttgccatgttcagggcgaggaccggttacaagatcgttgagcctgctcatatggagctagctgagcctactattaaagatgcatttggaaaatgtgtgcaacaaggagcgtcccgtgttattgtcagtccatattttctttcacctggacgacactggaaacaagtagatgggtatttgccttatgtattattctccacaattaagatgaaaaatttcattcaagttggcactatatttttcacccaggatatccctgctttagctgcggaagcatctaaggagcactcaaacataacttatgttgtcactgcccctcttggattgcatgagcttatggtggatgttatgaatgatcgcatcaagtactgcctgagacacgttgcaggtaatgttgaggaatgtacagtatgtgctggaactggaaaatgccaactgtacccttga

SEQ ID NO: 77497 - DNA, 474 bp, Oryza sativa
  Clone ID: PAT_MRT4530_7738C.1
cataattattatgagataatcacgaaaaacattgctcaacttgcccataaccgcgggcacggctattcgaatagttttactctagctagagatgtaccactgtactcacaagacacagctccacgacatgttaccatgcgcctcaataccaccacgatatctcggataggaactgtgacagtaccccttgcacaacacaatccaccacagcgcaccgtccctggatcataatcatcccctcaataaccagaggcatggactccccagcgacccccacggacttctcgccgcttcacagtctggtgccccgcaatgaaccatgctatacaaaagtcacgggcaacgaccttgccggcgatagagaggtcggcagggctatctaaagtcatctacacgtagaggacgatgacgcgaactcaccggtactagcaaacgcgatggacgacgacgaatggtgggcggcggcgagctcta

SEQ ID NO: 77498 - DNA, 2092 bp, Oryza sativa
  Clone ID: PAT_MRT4530_77390C.1
gaaggagaaaggaattgagccggaattctcacgggatttcaaggcttcatttctcaggcttctgccattgcgttcgatgtcacgtttatggggatccttgatggaagtggaacttccagtgttcatgcgccctgccatctataaagcatgggctagagccttccactccagtatgtcttctcctgttatgatgctttcttatattacagttcattaggtaatttcactctgatgattgacttgcattttagagtatctagtgcagaggttgtgtgcctgcacactgctagattgactttgaaatatatttttttgaccaaaatgactttgaaatatatgcagttttagactttttagtgcattggaatgagtagtacacattattcttgatataacacatgaatacttgctattcccgtgaggcaagtttttggcaagaacttgcttctccatagatagtgcaatgctactagaatagttttgtcgtatttattagcgtattgctgggtcctgtttttttttttttttttgactgaagggggtcctggaattcttgtgtgggcaatgctgtctttttggtttgtgttggtgaaaagctctgatcgatgctaagttatttgtagttaatcaacgaaatgtttgacttaaatttaacttgcactgttgatccggtggtacccaggccgaccaccggccgggctcttggactctgccggcgccggcgttggtagggtagccatggcggaggaggccaccctgagccacccgtcgcggtacgtgaagctgagcagggagcacgacgcccccgcccccgccgaggacatccgccccggcgagctcaaccagccagtccacgtcccgcagctcgagggcaggaggtgcagcgagtgcggccaggtcctgccggaatcctacgagccccccgccgacgagccctggaccaccgggatcttcgcctgcaccgacgatccacaaacctgccgaactgggttgttctgtccttgtgttctttttggacgcaatattgaggccctcagagaggatatcccttggacaacgccttgtgtttgccatgctgtctttgttgaaggagggattgcgcttgcaattctcaccgcaatatttcatggtgttgatcccagaacgtctttcctgattggagaaggtttggtgttcagctggtggttgtgtggtacttatacgggcatctttcgccaagaacttcagaggaaataccatctcaagaattctccatgtgacccttgcatggtccattgctgcttgcactggtgcgcgaattgtcaggagcaccgtgaaaggacggggcggcttgcagagaacagcgcggtgccaatgaccgttgtgaatccatctgcagtgcaagtgatgagcatgccagaaagttctagtccggtgttggctggaagatttctgcgcgatgccggcaaacggtgtaactacatctgtcatgaacgagatgagcatggcagagagccgtggtcctgtttcccccggtatggagaacggagcaccatcaaactcaaagggtgagcatgaggaacccaacagtgatcaccatgatgtggaggtgatacctctatagggtgaatgaaagaaagatattctttctgttaataggatagccagaggaatgaatcgatgtgacgaattcatggacgcttggcgacgatgttcttgtgtcatctggaactggaatcatcataaaacacaccagggtgatactctttcttttttttttgtactagtattaaaacttcaaatataattaactggagagcaggggctgcctgagtacattgctacgtttctgcatccaccggccgtgtgttgtttatgccatcatgtaaaattcattcttgattttagctgtgtttgacacttgtgaccttcattggtcctaagagaaacagttaattcgtctgtccctgtagtaagtttcttcttaagaacaacctccagcccgccgccacgtgtgttgtttatgccatcaggtaaaattcattcttgattttagctgtgtttgactcttgtgagcctgccatctttctgaataaaatgatgattgttgagt

SEQ ID NO: 77499 - DNA, 462 bp, Oryza sativa
  Clone ID: PAT_MRT4530_77391C.1
ctgcgttgctcctcatcatcgtcttcgtgctcgccgggacggttaccatggcggaccaccacaaacaccaggtggtgtacagtctcggcgagcgatgtcagccagtaatgggctacccgatgtactcgctgccacgctgccgttcggtggcgaagcgccagtgcgtgggccacgtagcacccggtagcgccgtggacgaacaacttctgcaagactgctggcgcaagctcgacaaggtcgacgacagttgctgcaggcgctccaagctcaatctcatggatggaggcatctacagggagctcggggccaccgatgttgggcaccccatggccgatgtgatccccgcatgcctgagaggggacttggagcactcggaccagatcctcccgaccttctgcaacgtgcacatccccaatgggacaggtggtgtctgctactggctaggttatgctacgaccccca

SEQ ID NO: 77500 - DNA, 363 bp, Oryza sativa
  Clone ID: PAT_MRT4530_77392C.1
atgtcggctcttcctatcattgtgaagcagaattcaccaaactccaaggacgggacgacgggcgggctccgggcgcgcgccacggacagcgggcggtcggacggcgcccatgcccaccaagccccccaggcgtgcggctgcacgcaacccgccaaggtcctggacgcgtaccgcgcgatagcacccgcgccaccccggcctgtagtggttcggtccacgctcggggcaaccgaccgggaaccgggtgcgagggctgggctgccacccgccgggcaaccgaccgaaaacccgattcggtcgacgttcggtctgccgggcgaccgaccgaaaaccgtgtgcgagctgtcaagggctggacgctag

SEQ ID NO: 77501 - DNA, 253 bp, Oryza sativa
  Clone ID: PAT_MRT4530_77393C.1
ttgtctttcgtaattagtttcacacttctcatcataaaaaaaatgatgctgtacttgttaataacttgtttagctcctggtctggaatggtatattcctggtttggagatagaactgtacagccgggattggttgttcagaatggttgggcctatgcaacacgggtgtgttgtatagtgtcgatttaatattgcttaattactcaactgttttactattctctcaaatgtttattaaatgatgtttatgcaaa

SEQ ID NO: 77502 - DNA, 2395 bp, Oryza sativa
  Clone ID: PAT_MRT4530_77394C.1
tctggcgctcctgaatcctccttagatggttataccttggtgttcgtccatgatgcggcttttgtggttcttgttcgcgcttcttcttgccagatcggtggcagatgctgcaactgcgaactacactttcactgtggaaagcatgcgagtcagtcggctatgcaacagcactgacattattgcggtgaacggccaactgccaggcccaatgatagaagtgaatgaaggtgacgcagttgctgtcgaggtcatcaacggatcaccatataacttaaccatacactggcatggcatactccagctactgacgccatgggcggacggcccgagcatggtcacgcagtgccctatccagccgaacagctcgtacacgtacaggttcaacgtcaccggacaagaaggcacgctgtggtggcacgcccactcctccttcctgcgcgccaccgtgtacggcgctctcatcatccggccaagaaacggctccgcctatcccttccccgcgccggaccaagaggtccccatcgtgcttggggaatggtggagccggaatgtcgtcgacatcgagagcgacgccgtctcatctggccagcttcccagagaatccgacgcgttcaccgttaatggtgttaccggcgagctctaccaatgcgcaaatgacacgttcacggtggacgtgcagcccaacacgacggtgctactccgggtcatcaacgctggactcaacacgcacctcttcttcaaggtggccggccacgcgttcaccgtcgtggccgtcgacgcgtgctacaccgccaactacaccacggacacgctcgtgctcgcgccggggcacaccgtggacgcgctcatggtcaccaacgcgtcggccggcagctactacatggcggtgcaggcgtacgacagcctgtctccgaccaccatggccgtaaccgacgacaccaccgccacggccatcgtgcactacaacaccacgtcgaccaagaaaaacgcgacgcccgtcatgcccaccatgccccagagctccgactccgcgacggccaacgccttctacttcgggctgaggggcccgccgtctcccagcgcgccggccgtgccgaccaaggtggacgtgaacatgaccatcgagctgggcctcggccagctgccgtgcgactccacacagagcagctgctcggggaaatccgtcgcggcggcgatgaacggcgtgtcgttccgcctcccgtcgcagatgtccctcctggaggcgcagttcaaccgcacgccgggggtgtacaccgccgacttcccggacgccccgcagccgagcggcacgccgatggtcgaggggaccaaggtgcggaggctcaagtacaactcgacggtggagatcgtgctgcagaacccgaccgccttcccgtcggagaaccacccgatccacctccacggcttcaacttcttcgtgctggcccagggcctcggcaacttcacgccgggcaacgtgagcggctacaacctcgtcgacccggtttcgcgcaacaccctcgccgtgccgaccggcggctgggccgtcatccgtttcgttgccaacaatccaggaggaaacgcaccgagggaggccggcgacgagaggcgctaccgagctcgagcggcgacggcggtgagcacacagcgggcggtggcaaggcttggggcggcgccagctgactacgggggtctactcgtgctactaccgaaagctaggggcaggaggaggaacgaggagggagaacggggagtgcactaccgcgacgaggtgaagggcgcagtgacgatggctgacggcgcggggcgtgatcgctccggcctcgggccggggaagaggaggaagacgtgcgcccggagtccccttccgttcctagcgcgcactggctcctccggcacacgcgacggcggaaggcgacagcaagcagggcacgggcgaggcggcaatggctcggcggcttggagcgaaacaggggaatcgagcgagagggggaggggcggcttttatggggtggttatgtcggtttgggaggagaggaaaccgacctcgagcggtactggggcgagggagcttcgaggggaaggaacgggctcacgggcgcggggtcaaacggcatgggcgatggctcggcgtcaggcgctcctccctgcccatggcgctggaaccaagcgggagaaacagaggccgggccgagtgaggaaaggggaaaacagagggggagaaagggagctcgagccatgccgatttgggaagggagagagatgggagcgggaggcgctgtctccggtttttggacggatgcaggtggagcggctcgggcacgcgcgctggctcgcggggcaaggcgcgacgcaagcggcgcagcgcggtagggcgcggggccggacggcgtag

SEQ ID NO: 77503 - DNA, 396 bp, Oryza sativa
  Clone ID: PAT_MRT4530_77395C.1
atggcggcggaatacaccaaccgtgtggaggcgaagaaaccggtcggcgacgaggacactagtcggcggtggcgaggcatgccggcggtgatgatgaagatgcctatcaatggtgctgtgaccaaccaaccatataggcgaggacagcagtcggcggcggtgaagaccaaccatgagtgcaaaggcaccaatatcaatatgataaatgatgctagattggaaggtaaaaactctggtgatgtcggcgttctaactcccgcgagcaaccagaaactccgtagaactcgggtgaccatgtgcacgacgatcgaaacgcggccgacgacagcgacaaacacggccgacgcggggatgagatcgccgcctagcatcatggaggcggccgccggccggtga

SEQ ID NO: 77504 - DNA, 636 bp, Oryza sativa
  Clone ID: PAT_MRT4530_77396C.1
tcttgtaatgacggacctccaacttatgaggggaaacagctgggtgaccgccactgtgccaagtgtacacccgtgtcccaggatatctgccccaggggttcagacccacacggcgtcccgcaaatctgaagcctatagtatacaaagcattcagcagctggtgggtatttcgcttgcccatgatgtaaataatagtgtatccgacacagcctgttggttgttggggcctaatgattggatgggatgatggagtcccaatgatgatgaatgatgggctgatgatgatgtgtgttgatgtgttaacacgtgtgtggggttgatgcgaccccatgcctgccacatggccctgctggctgtctgtgaaccaccatgagtggtgatatgaatgctgtctgcccctcccctgctgcccgacccggtgtgtgtgatgtggtaaagagtactgcccatggatccctgtggggtgagggataatggtggaaacccaagctcccggctgatatacaccccacagatatggtatgctgagacccatatgctggataaatgtgcgtgcgccaatgaaaaaaaatgggatggtgatgtgaccgtgaattaatgtttgtggtgtgtgttgaaaaaaaaaaaaaaaaaaaa

SEQ ID NO: 77505 - DNA, 366 bp, Oryza sativa
  Clone ID: PAT_MRT4530_77397C.1
ttggttgatgaggaaatgagggggtttcactcatccgccactattttattcagattattggcaacatgttcatataccaggcatcggttttggctgtccgacaatcgggttacaccgcataatccccaaaattttaattccctttggggaaacagaccccttacaacaccggcctactagggatcactgaaaaggattgggtgggtcccttaaggaaaagctgcttacaccctttattcatacaacaacttttgaggaatagcactactacttctgtgggcctctaaaagcatttttacccagtagaacgtgagcttctttttatatcgagcaaagaattagagcactgaattatgagcaccaacc

SEQ ID NO: 77506 - DNA, 266 bp, Oryza sativa
  Clone ID: PAT_MRT4530_77398C.1
tcgcccacgcgttcgcattttccctctccccgctcgacgacgccgtcgacggcggacaagctcgccgctcgccatggcccgaatcaaggcgcacgagctccgggggaagaacagggcggacctgcaagcccagctcagggacctgacggcggagctctgcctactccgcgttgccaaggacaccggcggcgcccacaacatgctctccaagagcaaagtggtgcgcaccttgatcgcgcgcgtgctgactgagatctagcagaagc

SEQ ID NO: 77507 - DNA, 760 bp, Oryza sativa
  unsure (1)..(760): unsure at all n locations
  Clone ID: PAT_MRT4530_77399C.1
ggggggtcatnngcnccgnnaaanttgttcgttttnntgggangggggaaattgcggtgctccacttccccccttttaatccaccgctttttctctcgcatcgtcctctcccccgaacccgcagccgccaatccacacgccagaagccgcgccagcttccagaagcttccccagggggaaggtcgctctcactcatgagcgtctgaccggccgtcgccatgggttgcgccggatccacacctaaaaccgatgataacagcaagaagctgaaaaagcccaagccttggaagcacaatcaagcaataacaacaacacaactcaaacagatgcgtgatgaattctgggacactgctccacattatggtgggcagaaagagatttgggatgcgcttcgagctgctgcagaagctgagttatctcttgcacaaacgatagtggacagtgccggaatcattgtatcaaattctgacatgacaatttgctacgatgaaagaggtgccaaatatgaattaccaaagtatgttctgagtgagccaacaaatttgatcagggaaggctaagtaatataatttgaagggcccatgtaaattatgtaaatctcatttgttcactgacatcagtctttgacttgctcgaaatttgaatgaagatattgttcgcactttaattctggtactcctatatcatcttgacctgactcctgtatacactttattgggctgtaagactacatcaataacagtgagccccgattcacagt

SEQ ID NO: 77508 - DNA, 1410 bp, Oryza sativa
  Clone ID: PAT_MRT4530_7739C.1
atggacaagggaggcggcgccggcgattgccagccgccggagtcgtcatcacatgagaacgaagagaagaacgcgttggttattccttgttccctcgctccaatcaaaacggggaagaagtatgaccagcagcaggaggaggaggagaacaattgggagtatgatgaggaagaggaggaattcttgtacgacatcgacgaagacgacgacatgatggaagcctccgagctcatcggcgtcaagcacagcgacggatccatctacgaccccgactcccacccgttccacagcctctactgcctcgacgacacccgcgagactagcctgctgccgatgaggctgtcggctcggaccgaccattgccagccatgctggacggcttgcatcgtccaccatggctgccgcatgatgcaaatcttctccatcaagatagcagctctgtccaacgccgccgccgacgccccggtccagatctatggcttcatggctgcccgggatctctttgaccccctgcgcaactacatcttcaaccgcggccgggatgatcctttcgtcttgcctggccactactctgatcccaactcgcttataagattgtcaggtcctaagcgaggcatctcgctggaaaatcctgctgtgatcgagtacgacctcaagatcaagaaaggagaggacgaaaaggacgacttgcagctcatcgacggggtggccgccttcagcgaccttacaccatttcatggggtgtatagtcggcggatccatggcatccatggcgccgtggatatcagcttagcccttcttcgcaatgggaaggaaagcaccatacaaattaagattccgaagctaattcatggcggcatacacttatccatctcttgctttgtcagtcaaatacctgaggaaatcaagctcttcgatggcaccattgttaatccatcaaaactcagaaacttcgtggttgctgtgcagctgcgcactgtgttgattcttgatttcaagattacgcctgtggtagcggccgccggcgaaaatggatccaatcaaatccatcgctattgtgccttcaaggctaccactcatgcagccaatagcaatggtgataacgacctcagtgccttcgtgagctgcacgatggcacccaccatcccagcagcttccacgcactcctcgggacactcgaacataagcatcccccatgccctaggtatggatgagctaccgcgtggcgtccaagacttttatggtggaggtgggagggggacgcaaaggagcttgcggatgcagcggccgttatggaaagtccttgggcttgccaacggccatggactgagcgacaaaaccgaggcaacaaaggaggtgaaggttgctaccttcccacactcgagcccatcatcagctcatcaccaatga

SEQ ID NO: 77509 - DNA, 399 bp, Oryza sativa
  Clone ID: PAT_MRT4530_773C.1
atgaagggtctttacgtccaaaggatgccggtagaggagcgccaccaggcaaagagccagatctctcaagggagtggataccttgacctcctctatgcaaccgctcatgcaaagacaagctccgctcgagatgttcatgctgctccaccgatgaggatctctgaagggactgcagaagatcaaaatcttgcaactgttgctgcaacatttgctctagaatcagctgttgctgttgctgttgttgctgttgctgctgctgttgaagaagctgctgggcttgacgctgctgcagttgcctctggtgctgctcttgctggagctgttggcggcgttgctgttgctcaagctcaaactggactctcaaaagatgctccacctcaggaaccggttgattcatag

SEQ ID NO: 77510 - DNA, 1338 bp, Oryza sativa
  Clone ID: PAT_MRT4530_77400C.1
ccggccggacccgcctggcgcctagtgccctggccagtatacagcgaggacatcgtcacctcgcagcgccacaacgccggggcggagatgggctccccctcctaccgtctcgcggcggcgatcacgatcccttccaccgacgagttcctcctcgtccgccagccgccgccgccgtccccagcgcccgcaccggaggaggaggaatacctataccggggctacgtcgacagcgagctctacgacctcccgtcggcacccctgcggcccctggcgggtgagctccggtcggatgtggccatccgcggcgcggactccgtcgccggccggctcgacatctcgcgcctcgacgtgtccgcctccctcgaccagatttgcgatcaattcggtttgccgagtggaatttgcggggagtggaggctcctgaagtatgtggaggaagcggagtttggcccagatgctgggctcaacacggtgctcatcatcggttcattggagtcaaaactggaggcgttgcaagactcctggaggtggatgtccaaggaatgtgcttcgggattgctctctggagcaaagtccggtggtactcgcatagggccctatgcgtatattggacttctgaagccagagctgccatcaaactggacagttgcccctgcattgccttgccagggtcatacagatggtcacatgggggttttacatgttaataccaatgcattaattgttggagatcactgtgtagggcaaggaagtgcaacattggacaatagagctggtggcaacatgaaggactactttcaaactacatacaatttcttggacatgtcaccgcacgtgctgattccaatgcatggaagaatcaacctatggcccaaacatatgctttgtggatacctcaggcaccgaagggcaagggaagtgtccattctacagtctatagagaatggggctcggactctgtttgacatagtttcaaaaacttatgctgatgtagataggaaattatggattcctgcttctttcaatgttcgccttcatgttgatcatctgaactcccaaaataaactacctaagagcttttcgatggacaagtttgaagtgagctgtggaacaaacttcatgctgtggtgggcggtggcgtatgtgcaagccaggagctcaccagctatccttgcggcaactgcccttgccggtggtttggcaattgcttacgctctcaaaaggaacagcggcaacgaacctatcctcccttgcgccatcatcaacgccaatgccaacgccaacggcgccatcaccatcgccggagacaccgtgcgtgtggccaccatcgccgcctag

SEQ ID NO: 77511 - DNA, 525 bp, Oryza sativa
  Clone ID: PAT_MRT4530_77401C.1
atcagcggcattcgcctgtcctgctacagctacatggtggcttgagccccatgataatgagttcgtaaggcagcagtatggcatagcggcaagcccctgtgcttgcaatcagctggcgtgttgcaaactggagaaacttaccatagtgctgggcaacatgctgcgcgctgggtgggccgcaacaatgctgcactatgcaggacattgaacattggttgcaggccatgagcgcagcagctgacaactgccagctagtttgggtggatctctactttgatcggaatctggctcaagctcaagctgctattggcttttaacgtagccatctagatatgggtatccccccctaggtactatggtgcacccagtaccaattgaccacccttgcggtggtcttgtaatgagttttgaaacagtatagtggttcggaagttaaaaataagctcagatatcatcatgatgtggacatgtgaaactttgggtgatatacacccccaataaagttcgtctttcatagtgaaaaaa

SEQ ID NO: 77512 - DNA, 876 bp, Oryza sativa
  Clone ID: PAT_MRT4530_77402C.1
gcaatggaggagagccgcgcggacgggcggaacccgaaccagctccgccccttctcctgcacacgcaaccctctcgaccgcgcccatggctccgcgcggtgggctcagggggacaccatcgtgctcgccgccgtgtacgggccaaagccgggaaccaggaagggggagaatcccgagaaggcatccattgaggtcgtctggaagcccatgaccggccagattgggaagcaagagaaggagtatgagatgacgctcaagaggacattgcagagcatttgcctgctcactgttcatccaaacaccaccacctctgtcattcttcaggttgtgggcaatgatggttctgtatccttttgccgtaatgtactacttagtattgtttctgggtgccttttggattatgaacattcccttgtttttgctggcatccccttgaaacatcttgcagttgcaattggttgtggagtactggaggatggtgaagtgattttggacacaaacaaagcagaagagcagcaattgaaatcatttgctcatttggtgttccccaattcacgcaagtctgctagttcaaaagaaccaaaccagaaagaggaggattctgagagaggattgataacttccattacccatggagtgatgtccggaagattatttcagctgcatagagaggggccttgctgcatcgtcacggatctcggattttatgaggacaacattgcagaagcaggcacctggagatgtctgagaggaggcaatcatgcgatagaaaacgcctcaacattgcagaagcacaaggttgtagcagctcatgttttgaatatgaaacgcgtggggactcttggtgcattattgatgtttgaaattggctcatag

SEQ ID NO: 77513 - DNA, 621 bp, Oryza sativa
  Clone ID: PAT_MRT4530_77403C.1
atggcgacggggagagcgggctgggcgcgaccgtcagggtggaggccacggcagcgacgatggagagggacggcgagggggcggagggcacctcggctgcacctccgtcggatgcctgcacgatgcagcacaactgcgcatcatcctcggcatcacccttgccctcgtcctcggcgtcggcagcggcggcgctgggaggagctggtcgagagtggcgtggaggcccaaacttggcggtggtggccgctgccggtgtggctaatgctaggatcgaccgcagtttggttcgtcatcttcaacgtgggggtgtgcgccgtcggcgtgctgttgtcgcgtgcgcgggagtcgctctcgccgcgctgcggcagtggcggcggcggcagagtcacgcgcacggcctcgtcagcgccggagcgcatccactcgtcgttctccatcttctccttcccgtcggtgatcttctatgagttccatcttgacgccggcgagccacaaacgccgatgccgcgcaagtatttgtcggtggaggaatcgcagcccacgacggatctcgcgggaaggaatcgacaagcatgccgccgtttcgagcttcctcggcgactttccctgccagcactgtga

SEQ ID NO: 77514 - DNA, 231 bp, Oryza sativa
  Clone ID: PAT_MRT4530_77404C.1
atggagggggaaggaagacatgacaaacaagatcagtattctacaacacctaaggatggaagagataaaatccaattttacgccctcctcccccttatcccactaagacatcagcaaatctgctgtgttcatcttgatattgaatctattactgaccctttatggtctgactcaaaagtatggaacccattctcagataatgatttgacattgcttgatattgagttctaa

SEQ ID NO: 77515 - DNA, 308 bp, Oryza sativa
  Clone ID: PAT_MRT4530_77405C.1
aaaatcagaagaggcatattgcatataattaagttaatttcagtgacaatattacaacagtaaacttctcatgcagaacaaatgctccggccacacagccacttctccgctcatctacaaatttaacactgtttcacaccatgcatgacaaaaaagacacaaaagcttaaattcttgtgttttcctcctcttgcatacatacatacatacatgtacacccataatttaatcaccggttacgttcaaacatacatacacaccaataccgtaaatatcctttggttttattacaccgaattaacccacca

SEQ ID NO: 77516 - DNA, 2241 bp, Oryza sativa
  Clone ID: PAT_MRT4530_77406C.1
atggctaccactaccctgtgcctgcagggtgcggccctcgtcgtcttgatcgtctgcctggcgccggtggcaccagcgtgggctcagcagccggcgggctgccccgacaagtgcgggaacaccagcatcccctacccattcggcattggctcccgctgtgcccgcgacttcaacttccggctcgtttgcaaccacgcctactcgcctccgcgcctcttcgtgtctgaagtcgagctggttagcctgtccctcgacggcgaggcccgggccctcatcaacgccagaaactattgcagcgacggcacaacctacatcagttacaatgctttgaggagggacagccagggccagctgccgttgtctgatgtgtctttcggccgtagcaccgcctaccgcttctccgcggcgaggaacaggttcgtcgtgctcggttgccccgtcctcggttacctggttgacgccgaggagtactatgtcagcggctgcatatccatgtgccgcaagtcgcaagccggtaatgatcacctgccttacatcctcagcttgaataagtcggcagaggagaaccgcgtggaacccatctaccatcgcctcaactcgacggcatgcaattacatgttcctggtggaggacaagtggatcgacaccacgtacagctatcgcgcctacttcaaccgaaccgacgacttcgacgtgcccgtcgtgctcgactgggcgattcggaacgtccgcaactgcagggtcgccaagcgcaacgccaccaagtacgcgtgccggagcgagtggagcgagtgcttcgacgccagcgacggcgtcggataccggtgcaggtgctccaatggctaccagggtaacccctacctcgacagcggatgcacagacatcgacgagtgccaagacaaagagaaatacggatgctacggagactgcacaaatacgataggagggtatacttgcttatgccctcgggggactattggaaatgtccacgagaagaatgtttgccgccctaaggacaagttcacgtttgctctcaaggctgttacaggggttggcctcggcgtgttcatgtcggtgttcatggcattctggctccgccttaggcttcagaagaggaaactcatcagaacgaggcaaaagttctttgagcaaaacggtggaatctttctgcaacagcagatgcgttcctatggtggcgctggcggtggagtgggtgggttcaagattttctccacggaagaactcaagaatgcgaccaacaacttcgcagttgatcgcattcttggtcatggagggcatggcattgtttacaaaggcgtcctggaggacaacacggtggtggccatcaagaagtcaaagatgatggaggaggcccaaaccaaggagtttgcaagagaaatgttcatcctctcccagatcaaccatcgaaacgtcgtcaagctgcttggatgttgccttgaagttgaagtgcctatgttggtctatgaatttgtctcaaacggtaccttctaccactacatccatggcaaagaccccgaagttgacatagcacttgatacccgtcttcggatagcggcagagtctgccgaggcgctctcctacatgcattcgtcggcttcaccaccaatcctccatggtgatgtcaagacagcaaacatcctgcttgatgataagttcaacgccaaagtttcagattttggagcatcaaaactagcaccaactgatgaggctgagattgcaacattggtgcaaggaacttgtggatacttggaccccgaatacctaatgacatgccagctgaccgataagagtgacgtatatagttttggtgttgtcgtgctggagcttctaacaagaaagaaggcattataccttgacggaccagaggaagacaggtgcctggtgtcatgtttcaccacagctgtgaaggttggtcgtcatcaagagcttctggacagccaagtaaggaatgagctgagtgacgaaatgctccaagagattacatacctcctaatgagatgcctaagcatgattggggaagaacgaccggcgatgaaagaggtagctgagaggctggaatcgctgagaagatatcagcagcacccttgggctaaagctgaaggcaatgaggaggagattcagagcttgctcggcatggaacaaaataatgcaaattaccaactcaggcaacaagatgtcctgggtctggaagaaggcaatgcatatacatttagcttatag

SEQ ID NO: 77517 - DNA, 285 bp, Oryza sativa
  Clone ID: PAT_MRT4530_77407C.1
ctctaatacacacacactcaacttaactttcctttggggtctccttcacccctcctggggtttttaaacatccctttaacttcaatcctattacacaacaacaccttcctgtacttcttttgcatttttatccttaattaccgacaccaaattactacatttcaataacattcaaaatcatttttccaggtcaacatccttcataccattcttctttttcaacttttcccactgctcttaattcttctgcaactttcattcctcaaccaaccctccactacatta

SEQ ID NO: 77518 - DNA, 252 bp, Oryza sativa
  Clone ID: PAT_MRT4530_77408C.1
atgtctttcgtgattagtttcacacttctcaccttagtgaatgatgctataattggtaataatttgattagctcctggtttggaatggtatattcctggtttggagatagaactgtgcagccggtatggttgtacagaatggttgggcctatacaacagggtatgttgtatagtgttggattaatattgtttaattattacttaactgttttattaaattctgaaatgtttgctaaatgctgcttttgcaaa

SEQ ID NO: 77519 - DNA, 616 bp, Oryza sativa
  Clone ID: PAT_MRT4530_77409C.1
gcacgaggaaatgttgctgcccagtacagtagaggcctgcacttgcaagttgcaactgcaagcaatggcgggaagcgggagcgggacaccgtgcgcgtcgtgcaagctgctgcggcggcggtgcacgtcggagtgcgtgttcgcgccctacttcccggcggaggaggcgcagcggttcgccatggtgcaccgggtgttcggcgccagcaacgtcagcaagatgctgctcgatgtgccgccgccgcagaggcccgacgccgtcagcagcctcgtctacgaggccaacgcccgtatgagggaccccgtctacggctgcgtcgccgccatctccttcctccagaaccaagtctcccagctccagatgcagctcgccctcgcccacgccgagaccgccgccctgcaactccagctgcagcagcagcaccaagatcaagatgaccaccaccaccagcagtgcatcctggagaatgctgctgctcatcaccagctgatgctgcaggaggcattcctcaagaaagagtccatgtggacataattgtagtagatgctttctagtagatctttatgcttcgattgatatgatttgatgttgcacaaagatttatagtaaatcttt

SEQ ID NO: 77520 - DNA, 1480 bp, Oryza sativa
  Clone ID: PAT_MRT4530_7740C.1
gagaaccttgattgttccttcttcaggagaggaatacacgttacacagtcctcccagtggcagcaacttacagagtacaagtgtaagaacttaattattcttacaaaatcttatagtagtaatgtctcttattctaaccaaccagaaaaacagtatacattttctcaaaaaaaaaaagaaaaaagaaacagtgtgagtagagtccgggctagagaaaattaacatgtagtagtagtaataataataataacaatcctaatcttccaatggttctttatcctgtacgtgtagaatatactgtagtgtggtaaaaaaaaggagtggtaaaaattaattgatcagaagtattccaagttgaagtcgaattgagccaagctctgctcatggcatggtagcgagaacttgtgctccagcgtggcgtcgtcttccacctgatactcgccgccatagccactgtgctgctgctccatgtcggcgaagggctctgccttggcggcggcgtcggcgccggccgaggcggcccagttgagcacctcgctgtcgagcacattgctcacctcggcgcaggtccagttgctgctgttgctggagctctcgccgtagcccaggttctccgacacgtcgagcacgctgctgtagtcggcgacgaacccggcgccgtcgtcggggtgggagccgtacagcgccgccgccatgttcgccgcgccgaggtcgaagccggcgccgaagtcggtcaccgggaacgggtcgaacaccgactgcttggcgttcgcggcgaggccgtcggcggcggcggcggcggcggcggcgccgtggggcttgtgatcctcatccacctgggtgaccgccgactccgaggacgtcgccgccgcggcggcggcggcgatgggcttgtgcgtggccgggtcgaggccgcgttgccggagcttcttcttgaggcagctgttccagaagttcttgatctcgttgtccgtcctccccggcaagtgcgacgcgatctgcgaccacctgttcccgaggatctcgtgcagcgcgacgatgaggtcctcctcctgctgcgagaagctcccgcgcttcaggtcggggcgcaggtagttgatccaccgcagcctgcagctcttgccgcacctctggagcctgtgcgagcttgggaacggagctccagcaaccgacgccgtagcggtagatgtgattgtagagcttctcgtcttcctcgggagaccagagccccttgcgcagcttctgctggacaccggcggcagagcacgcgtgccgtcccattcccgcccgacacgcgagcagctacctgccgctgggttcgttgcccttgccggcgtgtatctgtctatcgatctctctgtcgatcgaggcggccggctgggcgcccgatccagggggtatatatggggaagcgtgccgagaactactgcacacacacacgtacggtgcgcgcgcgcccacgcgtccgcccacgcgtccg

SEQ ID NO: 77521 - DNA, 240 bp, Oryza sativa
  Clone ID: PAT_MRT4530_77410C.1
atgggggtgagcggcgcgtggttggcggcgcagagcacggcgccctccatcgccgccgtggtggccgtgggcgtgtccggcgaactcgggatggcgagatcaaagtcagagagacaagctgaggtggtgggggtcgagggtgttcttccattcgtgcagcagaagggacatcatgcgtgcgggactcgctcgagagggcgtgggagtgaggatgggcttacggtggacaagggaccataa

SEQ ID NO: 77522 - DNA, 1917 bp, Oryza sativa
  unsure (1)..(1917): unsure at all n locations
  Clone ID: PAT_MRT4530_77411C.1
atgtctttcgtgattagtctcacccttctcaccatagtaaatgatgctataattggtaataatttgattagctcctggtttggaatggtacattcctggtttggagatagaactgtgcagccgggatggttgttcagaatggttgggcctatacaacagggtatgttgtatagcgttggattaatattgtttaattacttaactgttttattaaattctcaaatgtttgctaaatgctgcttttgcaaatgaaacctttatctttgatcctttgctttcttcctcttgattgccttcttctataccttcccgaacacgaccttaatcttcttggccatgtcgaagacttgtgcaccagttcatgcttcaggaggaagatcgttctctacggacttgtcaaataagttggccatcttacgccacttgtgcctctgtggtaagaaccgacggtgacgcatgtacactgtcttccttgaggaggtgaggtacctgtatgacgtgttgtcgatacatataagacatccgaacttcctcttaagctatcctgggagccaaaagttaaccggcaggtcgttgatggtaatgaatataatggcacgtagagtaaaatgttccctacggtacttgtcccacattcataacccttcctcccacagttcttgcatgtcctccatcaatggttccagaaacacatctatgttaatcccaggctgtcttggaccttgtataacgatagccaaaaaaatatactttggcttctggcaaatccaggtaggcaagttgtacacggtttagcagcacttgccaagtgctgtgtgtgcggcttaagtcaccgaacgggttcattccgtccgtgctcaatgcaaaccttacatttttcgggtcctttgcaaattccaggtgtagtgcttcaaagtttttccacagtcgagcatcggcagggtgtcgaatcttaccgtcatttttcttaccctcctagtgccatcccatcaacttggcatcatcacggttggaatatagccgctttaggcgatctttcactggtaggtaccacaccaccatcctaggaatcttttttttctcatccaccggtgcatcatctttgtcgaccacctctccatcggaggctccgttacccgtcttgtaccgactcgtcccacatgttgggcaagagtcctaaatcccgcgaaattttctttgcaaattttaaaaattttcacatgaatggacttctgaacacctaaagaaaatggacatatcaatttctacacttgatatgtgttcnttggtannaggttnngtttnncacggctnnccctcaaaanatgcatnaaatnnttgaanttngtgcccanaattcatttctggccttcaatctgagaagttcaagcaccgagcgcagcatcgaatagtccttgtcgcatcctttcgcttcgtcatacagaaggtccttcgctgctttctccaacgcttcccaattgtccaaccctcatcttctaccagttaggacctctggttcaacgtgccacaacatatcttccagatcaaattcaatgccttcattctctatatcagagccaccacattccgggatgtttccctgtgacatgtctttgattataaaattttctgcatcatcaaagcagaaatcatccatcacttcgttacgaccaccgacttccccatgaaaagtccatattttgtggccctccttaaatccttgctctacgatgtgcgacaatacttcattcggatcttgcagcaaatttcgttcttacacactttgcatgggcaaaaaacgctcctcaaattctccctcacagcatgtgcctttgcgacctcaacaaatttggctgcttccttcaagaacgttggatgagctcttttcttgctgtacatccatgacctacaataaag

SEQ ID NO: 77523 - DNA, 607 bp, Oryza sativa
  Clone ID: PAT_MRT4530_77412C.1
cgcgaggaggccgcacggggtggaagcctgaagcaggctagggcgagttcaggaagaagaggggaccgtgctcaccgcgccgccgatctgctcgccggccggggcagccgacaacgggtggggagaagggtgccagccggcggggacaagctcgacggcggagactgccggctagtgtggctcccaatagccgggagtgctcgtgtcatgtacctgactgcgcacccaactgcaattgcaatgtattcacctgcacacacaggggctggggcttccgccacgtcatgctgcccaagctcttattccccaaactcagagccatctccactgagctgctcaaaagccgatttgtttaggtgtcctcgagctttgtctctcccccgcggaggcgcacgcacagctccactgcatcatcttcgaggtcaactccatttactccacgctgtggtcgcgtcatcctcaacgcttccgcccttcttcccgccacccgccaccgtcaagcttctcgccggtcgccagccttctcccacccattgccggccgtcaccgtcaggcttctacttggcgtcgccgcccaataattatcattaatcttattgtatttcat

SEQ ID NO: 77524 - DNA, 1768 bp, Oryza sativa
  Clone ID: PAT_MRT4530_77413C.1
cagcaacagtaagtacaaaaaaaatgtacaattaatgatctgattaatctttcgtaataatcggattaagattcctgacgatgtgtgcatcaggtggtgcagaagaagggtaaacaggaggggagaagagtagcggccgttgggcggcgacgccaagtagaagcctgacggtgacggccggcaatgggtgggagaaggctggcgaccggcgagaagcttgacggtggcgggtggcgggaaagaaagcggaagcgttgaggatgacgcgaccacagcgtggagtaaatggagttgacctcgaagatgatgcagtggagctgtgcgtgcgcctccgcgggggagagacaaagctcgaggacacctaaacaaatcggcttttgagcagctcagtggagatggctctgagtttggggaataagagcttgggcagcatgacgtggcggaagccccagcccctgtgtgtgcaggtgaatacattgcaattgcagttgggtgcgcagtcaggtacatgacacgagcactcccggctattgggagccacactagccggcagtctccgccgtcgagcttgtccccgccggctggcacccttctccccacccgttgtcggctgccctagaggtttgggttgatatgagaagagagtcgagagaggtggaagaaaattgatggctgacatgtggcgctcacgtgggccccacactgattcaaccgccatgtcaccaaaatcatagagtaatactgccttgggaccaaatgtgacatacattgtatcttggtatttcagttcaggaacggttttaaaactcgacgtcaagaaaagggaccttaggtgaactttttccgagatgaaaaatttcttctttccagcctcatgggcctgtgcatatgacccacaggcaggcggtagcagagcgctgcacggccccgccccacaatcgacctcctgcctgtcttgacttttgagcacggtgagccagagctccaacgccgccgccccgctccgcgccgtcgtgcacctgctccgcctcgcctcatcgtgtccgcggccggcgagcagatcggcggcgcggtgagcacggtcccctcttcttcctgaactcgccctagcctgcttcaggcttccaccccgtgcggcctcctcgcgcgcacggccggcctccatcgctgctcgaatcgaactaaggaactggtatcaggctgttggtgagaatggaaccaaagcattcagctgaaatgtccaagcatttggacaagcaaaatcaagccctaatggaaacttaccgagcaatgtcccacgagttgcataaagttcaggtggaagaagaaacaatcatgcgcaagttatatgagctgatgtctgcagaaggacttcttccgaagcgcaagaaagaaagtcaagcacagaaaactgggaaatcaactcaggaaaacaaagagcttgaaccgtaggatgtaaactgtgaatattgatacgatactcatcttgatgcaattaacgagttgagctgaagaatcagatggttactatctccacgacatcctatatccccacaccttggaatttccaagtgatggatttaccgtagataatgtgttctaactatagatgttaagtgtgctccagaggccagagcaatgcaaaacgaacaattgaacccttgaatcgaattgttatgtgaggagccaacagctggctagaatcagaagtgtatttttcatctgagatttctatattttcatagtattagttttgctgtagtgctag

SEQ ID NO: 77525 - DNA, 663 bp, Oryza sativa
  Clone ID: PAT_MRT4530_77414C.1
atgtgggtgacggagaggctgagagctctcctttctcgatctggtcggctctggggtgtgaagtggagatgggcgacgcgtctgggagaggttgaagataaattcatgtggattttactggagaagtctatgtcccgcgatgaacttgttcctatcactagggtgcatgaggaagctccgttgacggaaacaagcattgcagttgacgccataatcacgagaaatttggaggatgcagcacgcgacgacgccatcctccccaccaccgacggcggcgccttcgtggtcgacctacacctccgcgaagaaccgggcggccgatccggtggcctcgcaggaggcgatgaagttgtagtggcaaagtatgtgcgagaagtagcagggacagtgagtgaactagtagctgatgatatattttttgggcgtgtgatgaaaagctggagaagatttggattcgttgcttggcttggcaagaggatagagagatgtttgaacctgtaccttccttggggcttttgggatctagtcgcattccaggcagtgattgatcaatggcttttcagaatgtctttctgggaatggatcagcctcaacttttcagtaatcttgatttttaataggtctggtgaacttggtgactgctttggtggattggacttctga

SEQ ID NO: 77526 - DNA, 1225 bp, Oryza sativa
  Clone ID: PAT_MRT4530_77415C.1
ctaactgtgcgcccacgcacgctcagccatacatgcagctggtttcatctggcaaaagattatacctgcagtgaaccagagtgaaccatcgccagcagcagatagcaggggttcacagcttctggatttcactattatctccagttcatctacagatgggacaaggcttggcattttaaccaccatggcatagtccgcttgttctatatgcaactctgcatcgtcttcatctccttgtgaagctgcagggaaaggacctgtccttgaagaaaggctgaccttacttttcaaaaacactacatgtgcaggaatcatgtgttcatacgaagcaactgatagatagtccaccccgactagcttaatatcagtgtaaccaaccaaccattgcgcaccatcctctgtaaatccaacaaaactcagatcactctccttttgccacatcagtctcttgtcagtgttcattgttctgaaaagaactcgacgaactcctcttgggatgttcagggactccattacttcagctgcataacgcaattttcttagtacagttacgtttgagtgtctcgggacatcaaccagcaatgcaggaccgtggcagaggccaaggaggaagaggaagccacccacgacggcggcggtccacgacggcggcggcatgcacttccagtggctgcgcgccgcggtgctaggtgccagcgacgacctcgtctccactgcgtcgctcatgctcggcatcggcgcggcgtgccccgccgacgagcgtgccgtcctcctgtccgggctggccggcctcgtcgccgtcgcctggccatcggcaagccgtcctcctgtccgggctaaccggcctcgtcgccggccacgcgcagctcgatgtctagctggccgaaatcaagcgcgcggccctactccggtgtcggctggcttgcgactgcaagcggcggcggtgtcgccatcctcccaggccgcggccacgtcggcgctgtccttcgccgctggcgccatgttcccgttgctcgcggcgtggttcgtcgctagctacgcgagccgcaggcttcttccgcctcccttccgccgcgaagcagcgcgcccaccgcgcccctgggacggtcaccgcctcgtccttctctcgccggcgacggcgtccggaacaacgtcgccccttccccttctcctcgcccacaactcccacatgttcaccggagagaggggtattttggtcagttga

SEQ ID NO: 77527 - DNA, 179 bp, Oryza sativa
  Clone ID: PAT_MRT4530_77416C.1
ttgatctctgcgttattgcttgcttgatggtttcagtgtatgaatttccctggagacgctgatgctcagcctggacaggccttacttcctgtggtagcttcggcattggacattgttttgcatgtctgcagttcttcggctggttcttgcttcctgtggtagcttgtttgttgttctac

SEQ ID NO: 77528 - DNA, 970 bp, Oryza sativa
  unsure (1)..(970): unsure at all n locations
  Clone ID: PAT_MRT4530_77417C.1
ttttttttttttttttttttaacgaaaaaccaaatattncncggaatcgaagaatctgagctggtatcacttcaaccagcagctggtactcaagtttcatcactgcatgacttcaatcttcttggtacttgaccaaagcacatcacaacaaatctatcaacgttgcaaggaagaaataaaaaacatcgaacatattaattaggtaattagcaggtaactccaagaacacacaagctgcatacacttgcatagttgtatatacaatgtcgccgtgtcggcagcaatgcagcatcatctagatctctcaaaatcacaagcaaaaaatcaatactagcattgctgcgcttcagttgttgatccgggggttgggctagcgggtgaaggcgtagaagacgatgccgatgtagatgagcatggcggtgggcacgagcgagacgagcggcacgacggcgccccacgcggcggcgccgccggcgccgcagccgaggcggccgagcttgacctgcacgacgttgacgagcgccatcatcaggaacccgcacccgcacacggagcccaccgccgacgccaggatcccgacgcggagcgccacccggttgatcatggccgtgcggctgacggcggatccgccgccgccgccgctccggaggcggtagtgcgggtgggtgcgcacgatctgcttgaggcagagcgcgacgatgctggagaagaggaagcaggcgaaggcgaggacgtggaacaggacgaggtcggactcgacgcggtcccccgcggcgcaggcggagcccaggcggtcggcgccgccggcgagctcgggcccgtcggcggaggggcgccacgccaggccgatgaaggccgccagggtgaagagcgagttcacgttcacgatgccgtccagcgccgtgatgtggatgctcgtgcccccgccgccgccgccgccaccgccaccgccgccgctgccggtgtccat

SEQ ID NO: 77529 - DNA, 373 bp, Oryza sativa
  Clone ID: PAT_MRT4530_77418C.1
caacggaccttaaataaccccataaaatggggggataaacccgaccaaccaacagaggaaggcattaaaaaaaaaaaaaaaaaaaaaaaggggggcttggtagcccttaagaagggagggggggaaaaaaaaggctggacaaaggttttggggaggaaaaataatccactgggccttaattataaccggaccgggcataaggggccctgggggagggggaaaataaacggggggactttcccgcggggccgggggccgccgaaggcccagccgggttttaagggggcgcgtggggggcaaacaaaccccgggaccccccggggacggggggggtttccgaaaacgggcccactgaaaagggggggggggggac

SEQ ID NO: 77530 - DNA, 210 bp, Oryza sativa
  Clone ID: PAT_MRT4530_77419C.1
atgtggagtatgtgtccacaacgaaagcttttcgacactggagattccaccggacagcatcggtttgaaggtgcgatcgataacttggttcagcaagcttcgtgtgagggccacttgatgatcaacacgagaatccacactagtggagaaaccatctttgatcggtcggccgaaattcacaatagtcctagttccaataaaaaccgggac

SEQ ID NO: 77531 - DNA, 255 bp, Oryza sativa
  Clone ID: PAT_MRT4530_7741C.1
acggcacgagggtacatcttccggccgaggtcggcgtggaggaggatggcgtggatggcaggctcgtggccggcgaagatgaggaaggccaccaagtctgatgcggcggcaagctggtaactatcgtttcagtataggatttcgtacagtaaacagtcaagggaggcggtgaaactgggtgtgtaaaaaaaagaaagggaaagaaaaagtagtgttcgtatcctctaaataaaatgtgtgtttgttgattgttgc

SEQ ID NO: 77532 - DNA, 319 bp, Oryza sativa
  Clone ID: PAT_MRT4530_77420C.1
acgaagctagacccttttgagcgcgcccctttttttttgggtttttacgacaggggggaacacatcccaagtcaaattggctacgatggggtagaaacgcgctaacatctaatgcatgttggcctcgaaattctcactctatactagctggatgatgccgagccaactgtaggcaccggcagctgctgttgttacgttattagccctagcttccgagaatggacgcggggtctgcacggctctgtcgctgtccccgaatgatgaatgtgacgatgtccagcaaggtcctgggggccaccctcaacttggggttcccggt

SEQ ID NO: 77533 - DNA, 485 bp, Oryza sativa
  unsure (1)..(485): unsure at all n locations
  Clone ID: PAT_MRT4530_77421C.1
gttaagtaggggtggtggtgatggagatcaaccagggctgctggtgatggagaacgacaacgaggtgatcgatctgctggcctatcgctagatccggtgggtacatgcactcaagttcgccatgaagccgatgcaatccttctccatctccacagtgggttggcgcccttctgctcaagtttgaagctccgctgccgtgcggcgccgacactgtttcgcaattgcagatctggctagcaacaggtaatctgggaaccatctgtcgtcgcctagccaagggccatttgcaattgccttgccattgttatttatggtgtaatttacttaggggcaatggatgtatgcaacttcatcattaattgagaatccatatgtataggtattttgggaaccttttttttttttgnctttnctacttccacttnaattttactagggggtattttagtttcacaatggttcatcttgaaacttttttttaaggg

SEQ ID NO: 77534 - DNA, 130 bp, Oryza sativa
  Clone ID: PAT_MRT4530_77422C.1
gagtgtgaaatgaacagccggggcggtaaacgttcacaacatatcacacccacatattctttatccccctatctattaacatcaatctcctattcaacaactaatctccaccctattgtttgtccaaacc

SEQ ID NO: 77535 - DNA, 2814 bp, Oryza sativa
  unsure (1)..(2814): unsure at all n locations
  Clone ID: PAT_MRT4530_77423C.1
ttccgacctagccgacactacgtgctggagccagcagagagtaaaatccaacgtgattctctcggctggctgcgcctgcgtgtgcagctaagctaagcttgcttgctctctcttcttcttcgtgttgttgtttctctctctgtctcgctgtctgttgccaccattaatggctggctccgtgggtagctgagctctttgctggccgagctgagctagcctacctagctggggggagagagagagagagagagagagcataaggatcttggaggaggtggagatggagtacggcggcgggcgggaaggaggaggagggatgaacggcaacgggacggcgtacgcgggggcgctgtcgccggcggcgaggtacgcggagtcgggcggggcgagcctgacgtgggagaatctgacggcggtgctccccggcggcggcgggcgggcgacgaagaagctggtgcagggcctgtacggctacgccgtccccggcagggtggtcgccatcatggggccctccggctccggcaagtccaccctcctcgacgccctctccgggaggctggccaggaacgtgctcctgacagggaaggtgcttctcaacggcaagaagaggcgactcgactatggcgtcttggcgtacgtgacacaagagaacgtgctgctggggacgctgacggtccgggagacggtgacctactcggcgctgctccggctgccgtcgaccatgtccaaggcggaggtccggcgggtggtcgacgacacgctcgacgagatggggctccgggagtgcgccgaccggaacatcggcaactggcacctccgggggatcagcggcggcgagaagaagcggctgagcatcgcgctggagatcctcacccgccccaggctcctcttcctcgacgagcccaccagcggcctcgatagcgcctccgccttctccgtcatcgagacgctccgccagctcgccgtcgacggcggccgcaccatcgtctcgtcggtgcaccagcccagcagcgaggtcttcgccctcttcgacgacctctgcctcctctccagcggcgagtgcgtctacttcggtgacgccaagcttgctccacagttcttcgcggaaacagggttcccctgtcctagccggaggaacccgtccgatcacttcctccggtgtgtcaacgccgacttcgacgacgtcgccgccgccatgaaaggatccatgaagctgcgagcagaggcagattttgatccgttactcaagtactccacgtcagagatcagagaacggctggtggacaagtacaggatctccgagtacgccatgatggtcaggaacacgatacacgagatcagcaaaatcgagggagtgatcgaggaggtggtgatggggagccaggcgagctggtgcaagcagctgacgacgctgacgaggcggtccttcaccaacatgtcgcgcgacttcggctactactggctccggatcgtcatctacgtcctcatggcggtgtgcctgggcaccatctactacgacgtcggcacgagctacgcggcgatccaggcgagggcgtcgtgcggcggcttcgtgtccgggttcatgaccttcatgtccatcggcggcttcccgtccttcatcgaggagatgaagatgttcacgctggagcggcagaacggccactacggcgtggccgcctacatcatctccaacttcctctcgtcaatgccgttcctgctcgccgtgtcctgggccagcgcatccatcacctattggatggtcaagttcaggcccgggttcagctacttcgccttcttcgccctcaacctctacggcggcgtctccgtcatcgagagcctcatgatgatcatctccgccctcgtccccaacttcctcatgggcctcatcctcggtgctggcgtcattgggatcatgatgctgacttctggattcttccggctgcttccggaacttccaaagatcttctggcgatacccggtgtcctacattgtctacggctcgtggggtttgaaaggagcgtacaagaacgatctgatcgggctggagttcgagccgatgatgccggggcagccgaagctgacgggggagtacatcatcaccaagatgatggggctgaacctcaaccactccaagtggctggacctctccatgatcttcgtcctcctcttcgcctaccgcctcatcttcttcctcgtcctcaaggccaaggaggccgccgcgccttacatccgcgtcgcctacacccgcttcaccatcaaacgactcgagcgccgcgcctccttcaggaagacgctcgccatgtcgtccatgtccaagcggcacaaccagccgccacaccccatggccgtccaggaggggctcaactctccaatgccatactgaagaactgttattacaagttacaactactactactgatgatgatgaagatgaagatgatgattgatcgatcgagcaagaagaggccggtagtttgggcgaccttgcgacgacgatgacaacaaagatgatgatcatatagatggtgttcgtgtgccacgaatcgattaattaatacttgtgtatgtgttgcccttggattgttttcagctcgttggaagctggaagggttcataaactgatagcgtattcttttttttaagatcttgtattttactgtaagaactcggtctctgtgaccaatacacatacaaaaaggatgctgtgtagttgagtgttaaaagtttcttgttttcctcccgccgtttttanctggccatgtcganctggttagaaaaaaaaaaaaaaaaaaaaaaaaaaaaaaaaaaaaaaaa

SEQ ID NO: 77536 - DNA, 414 bp, Oryza sativa
  Clone ID: PAT_MRT4530_77424C.1
atggccatgctagagcttgttcaaatcttgcgtgctcaaccaggtccatttcctccgcggccgtgccgcttccgagttcgtccgcgtgcactgccctcggtctcccctagatgcgtcatcctcaagctcatccaatccatgaacgcccgaagtgtcattgtccagctcgtcgccggcattgtcggctcatccatcggccctcaaattcgccccgaagcaccaccctcgcgctcgttgcgggctcgcctgagtgccgacccgctcctccttgccctggatccgttgtctaccgacccaagagccgccgcctctagcatgccagaaccagctgccaccatccaaggctccaactcgctcagcgctatactgtcatggtcgagctcgcctgatgccttgaagagtggtcaaccatag

SEQ ID NO: 77537 - DNA, 3219 bp, Oryza sativa
  Clone ID: PAT_MRT4530_77425C.1
tcactctttcatcctcttcttgtcaaacatttgtaggcttctgttttgggaaccagaccttgatcttctgcttgggctcgatgttggcgactgctggcggcgacagaagctgggcttggggcactcggcgtacacccgctccagcgcctccacctgatccggcgtgtactgcacgtacttgccggagtccatcccggccttgtcgtacccgccgccgtcactgccgctgccgccatcctcctctccggccaccaccaccaccaaagtttcccccttcgccgcatgctcggcataaacatccaacacccggttgatggtaccggacacaacaaggcaaagcgtcaagctaatcaacaaagcaatgacttcagttggaacctggaccactaatatgcattgtgagaacatggtcttgtctatatatactcccagatatttcaatgtgactgccaacatgatatctgcatctggtacaaagcaaacttctccttgttttccatcaccatatattcctgaaatcctttgactttccatttgacagtaacaatgtgaacagtagccattgcatcttatcgcactgtcagtcatgaaaaagcataacagtgaatatgttactcctgcagcagagctgtccatgacctgaaaattatccagtagctcacgcggatatgaattcaacatttcaatgatcatccagtatccaaactttttatgtgtaaacttgaaggatctgctgttgcgaatagttgtgcatgtcatgagcattaagaactcgagaaataggcacttatcaatgtctgcactgctagcatgaggatcatcctccatatccctgtatgcccagtcaagtatattccttgtagcatcatcaaaattgaaggaatcatctctcagcttctcagcccacacaagagcccgctttccaaaaccattcttgcagaaatgagaaaacaaaatgttaattgtgacagtgttgggttgaaaagccaacttaatcagtctgccagtcagaatcatggcccgatctagaacatcgctgcagatcccatccatcaatgtgttgtatgtaacagaattaggagcacaatccgttgcagctaattcatccagtaacatcattgctcgattcagcagatggttgctacacaagctgtgcatccaaatattatatgtgaaaatatcaggttcacagccatctgcaagcatcttattcatgaaaatcatggcaccattaatatccttagagcggcaatatgcattgagcattgtattatatgtcacaacatctggagttaaaccaatactgtacatgccaaagaaaaggttattagctgtgttcaatcccccttctctgcaaaagccatcaattaaaatgttcctcgtaaaaatatcaggaacaaggccactctgcctcatcttctgctctaatttcaatgcttcagacacattcccagccctacaaaatgcagatatgagggagttgtaagtaaaattatttggaacaagccctcttcttatcatctcgataaaaccattgtaagcctcatctagaaaatctagtctgcaaagaccattgacatatgccgagaaggcaacaaaatcaggctgtaaaccaactattttcatatcatcccaacacttcaaggcacctaatacatcaccagctctgaaggatgagtccaagtagatggtaaaagatgcaatcacacaatatcccattctaaccatatattctaagaacagccgtgcctgatcaagtctcccacgattacacagtcccattatcaagtaattcaaagttgatgatgatggtgcaagacctaatttgttcatagttttatatagctcaaaagcttcttcatcaaatccctccttgctatatgcagcaatcagcgcattaaatcctgaaacgctcacttgaacacccttctcaatagcgctacacaggagctcccaggcatcatccaatcgcccatcccaacaaagtctacagatcaacatatctatcccatctgttgacaactgtgaaccaaacatttcatgcaactgctgctgatcaagtacaaacaacgcagccttcccaaacttgtatgctccagccgaaagaatgttgaaggtgcagcagtcaggcattaatcccatggccttcatctctgcgcaggccatgttagcgttctccatctgtccagcctttgcataaccatcaatcaaaacattgaacgtgattgtattcacttcaactccagcctgcaacatctcatcaaacagcatccttgcctccaccatcctgccctcacggcaaagctcattcatcaatatgttatacgtgacgatagtaggacaacaacctgtcacacgcatctcgtcaaacagattgaaggcatcctctgcctgcccatacaagcagtgccccttcatcaggatgttatagctgcacgcatccgggacgacgtggaacctccccattacgccgagcaggccaccgctgacacgtacaagacccctgtggcacaacccaaagatcatggcgttgaatatggcaaggttaggcctcggtcccctcgcagccatttcctcgaacaccttccaggcagcccggacctccccgccacggaagagcaggcgcagcagcgccgccaatgcagacaggctgggcgtgtccccggcgcggcggacgcgcgcgagcacgtcgagcgcctcgtcagccatgccagcggcgaggaaggcatggagggcgaggcggcgcgcggcgtacctcccgctacgcccacggaacccctcgcagaacgctagcagatcaggggtcgcatccggcagcagagccgcgaggaggagcgacgcgaaggtggggagcgcctgggccgacgaggcgaggcgcagcgcggcggcgaagcgggccgggagcggtgacggcgacgacgacgacgacgtgggggaggtgagcgcgtggagcgcgaggaggcatggaggggagaccttgatgaggcgggcgagcgcgaggacggcgtcgcggcggagggaggccggcagggagaggtggtggtggtgggagtgggtgttggaggggaggaggaggaggaattgcttgatgggatcgtaggaggaggtggaggaggtggtagtggaggtggcggcggaggagaggtggaagctggaggagaggaggaaatggcggtgtgacgaacggtgtgctctcgccgccgcggcgaggaggcgcat

SEQ ID NO: 77538 - DNA, 1005 bp, Oryza sativa
  Clone ID: PAT_MRT4530_77426C.1
aaggacagtatacttccttgattggataaaggttgttccattatgcaagaaaggaagcaaaacaaataaatacatagacttgcaattcctaaatatagttgaagcagagtatgcacaaccaaggcaaacaattgaacactactattgctattgctccattgtcaaccaatttgtccagaacatttcacagccagacacacagaaggcaaaccagtttgatagtatatccctgcatgcttttgctcaccttctgttttgggaaccagaccttgagtaggaagtaaacaaattcagctagagcatacaacatagttctgaattttcttacacgtcgcactatattatccccaaaattaagcatagtaagcacgtactaaacacatctatacagtaggtaggctcgggttaaagatgtaccagtggatagcaaacattctatatatgctacagagctcgcctatgtcactctttcatcctcttcttgtcaaacatttgtaggcttctgttttgggaaccagaccttgatcttctgcttgggctcgatgttggcgaggatggataactcgcagagtaactgctggcggcgagagaatctgggcttggggcactcggcgtacacccgctccagcgcctccacctgacccggcgtgtagtgcacgtacttgccggagtccatcccggccttgtcgtacccgctgccgtcactgccgctgccgctccgcatcgggcatcgccaccgctgccgccatcctccactccggccaccaccaccgccaacgtttcccccttcgccaccttcaacacaacaacaacctgagagatttcgagcaaaagtgaaatcatccggagaggatgaggagaaaaaataacctgacatgtgagagggggaaacgaaagaaagaaagaagaaagagaaggaagggagaaatcgatagaatggttgtgcgattgcaagcttgcttcctcctctcctctccgtcagggaatgcgtcgacctcggcggcg

SEQ ID NO: 77539 - DNA, 288 bp, Oryza sativa
  Clone ID: PAT_MRT4530_77427C.1
cccacgcgtccgccgagggtggctgtgagtggcactctttagcagccgagaacatcattcagagactcggacagagtgaggggagggaagcagcactacaaggtgacggtgctgacaagaacgggggcacggtacaagtgcacaagagcaccaggttatgaggagcgacacgcacgacgggagagcgtacatttgaaatgcccatggacccgacgaaaggtggtcgaagggcgccagtaaggactcggagagcgcatcctggtctacaagggcatcatgagcgaatta

SEQ ID NO: 77540 - DNA, 2955 bp, Oryza sativa
  Clone ID: PAT_MRT4530_77428C.1
atggacgctccggccgaccaacaagtcgccgacagcacgtccacctgctgcgcgatccacctgtggagcgaactcgacgacatgctcgacgtggcgaggaacgtccgccgcctggaggagaccgtcggccagctcgccgcgcagcgtagcagcttgcacggcgctatcgtggacgcccgcgtcgtgggcgtcgacgacggcgaagacggtggcgccgccgaccggctgcgccgcctggggtgcaccgaggaggcggcgaactggctggggcgcgcccgcgtcgccgagaagcaagggaacgccgtcgcggcggactacgccgcgctgtccatgccacgcctccgcctcgtcgcgcgctaccgcatcggcaagcgcgcgtcgcgcgcgctccggcaggcgcagcagctcgtgcaggagcgtggcgcgatctgcgccgcgcggcgcggggtcggcagcttcgccgccacgacgcaccagtcggcgccgacgcccgcggcggccgccgtcgggacggaggattacctcaaggaggcgctcggctacatcgccgacgacgccgttggagtcatcggcgtctgcggcatgggaggggtggggaagaccaccctcctccgcgccatcaacaacagcttccttcccaccgcgcggcagccgccggcgagcagcaaggtgttcgaccacgtcgtctgggcagtagcctcgaaggaatgcagaatcgatcggctccaggacgacgtcgcgaagaaacttggcttgccattggcgagcctccccgacgaacactcggacgccgacttggagcaacgtgctctgccgatcgccgagcacctcaagaacacaggcttcttgatgctactagacgacctgtgggaatgcttcgatctgaagctcatcggcgttccttatccagacggcagcgccggcgacgagctgccgcggaaggtcgtgctgacgacgaggtcggagatcgtctgcggcaacatgaaggccgatcgggttctcaacgtggagtgcctgaagccggacgacgcgtggacgctcttcgagatgaacgccacggccgcggccgtcacgtcccacccggcgatcgccgggctcgccagggaggtcgccggcgagtgccgcgggctgccgctcgcgctcatcaccatcggcaaggctctgtctaccaagaccgacccggagctgtggcgacacgccattgacaagctgaggaacgcgcacctgcacgagatcaccggcatggaggaggagaacgccggcatgctgcgcgtgctcaaggtcagctacgactacctcccgaccaccacgatgcaggagtgcttcctgacgtgctgcctctggcctgaggattactcgatcgagagggagaagctcgtcgagtgctggctcgggctcggcctcatcgccggctccagcagcatcgacgacgacgtcgagacgggcgcgcggatcatcgccgctctgaaggacgtccgccttctggagtccggcggcgacgtcgtcggcgacacgcggggcgtcaggatgcacgacatgatacgcgacatggccatctggatcgcctccgactgcggcgccacgaggaacaggtggctggtgcgcgccggcgtcggcatcaagaccgcgtcgaagctgaacgagcagtggcgcacctcgccggcggcggcgggcgcgtcgacggagcgcgtctcgctgatgagaaacctcatcgaggagctcccggcgcggctccccgcccgccgcggcgtcagggcgctgatgctgcagatgaacacgtcgctgcgcgccatccccgggagcttcctccggtgcgtgccggcgctcacgtacctggatctctccgacaccatcgtcatggcgctgcccggcgagatcggctcgctcgtcggcctcagatacctcaacgtgtccggcaccttcatcggcgctctgccgcctgagctgctgcacctcacgcagctcgaacacctgctcctgagcgacacgaacatgctcgacagcataccaaggaacgtcatcctgggcctccagaagctgaagatcctcgacgtcttcgccagcaggtacacccgatggaggctgaacgccgacgacgacgatgccgccaccgcatccgaggcgagcctcgatgagcttgaagcgaggaacgcgtccatcaagttcctcggcatcaatgtcagcagcgtcgccgcactccggaagctctccggcttcaccaacgtctcgacgaggcggctgtgcctgaaggacatggccgggccggcgtcgctcaccctgctcccttccacgctatcggacacgctaggaggccttgacatgctggaaagactgcagcacctcgccatccggagctgcaccggcgtcaaggacattgtcatcgacgccggcagcggcagcggcagcgactccgacgacgagctgcgtcgatctttccgcctaccgaagctggacaggctccgtctcctgagcgtccgtcacctcgagacgatccgattccggcacacgacggcagccgcccatgtcctcccggcgctccggcggatcaacatcctcaactgcttccagctcaagaacgccaactgggtgttgcacctcccggcgctggagcatctggagctacactactgccacgacatggaggcgatcgtcgacggtggcggcgacaccgcggcggaggaccggaggacgccgacgacgttcccttgcctgaagactctggcggtgcacgggatgcggagccttgcgtgcttgtgccggggcgtcccggcgatcagcttcccggccctggagatcctcgaggtcggccaatgttacgctctccggcggctcgacggcgtgcggccgctgaagctacgggagatccagggcagcgacgagtggtggcagcagctggagtgggaggaggatggcatcaaggatgcactcttcccttacttcaagaaccattcctga

SEQ ID NO: 77541 - DNA, 3324 bp, Oryza sativa
  Clone ID: PAT_MRT4530_77429C.1
atggagcccgagagcgccacgccgacgttgcagcttcggaagatccgctcttcgtggaggttgaagccgacatttgggaaaccgaggcgccagcaaggccaagcgcctccccgccccaacaacagtggtaaggatgtcattcggggtcatgtgaaccacgtgactgccgaggatgtgctgacaactccagacgtcatcgtgggtacgttcctcattcattccatccctggtaccattttgttcgactctggagcttcccactcgtttatatctgtgccattcgtggggagaaatcagttgggggtagaaaggcttaggaaccctctgctcatcaccacccctggaggggttatgacagcaaagtattatagccctgccgttcctatagaaatccagggaattccttttccttcggatctgattcttctagacaccaagaacttgcatgtgatccttgggatgaattggttggctcaattccaaggagtagtggattgcgcaagacgcactgtcactctgtaccgagggccggaacaaccggttgttttctttgcacccccaacctctgtcggtagtttagaacttcatcagataggactgtcagaaatccccatagtcagtgagttcggagatgtgtttccggaagaactacccggtatgctgcccaagcgagagattgagttccggatagatcttgctgtaggaaccactcctctgtacaaccgaccctaccgtatggtagcaaatgaactggccgaagtcaagaaactgttggaagagttaaaagaaaaggggtacatacggccgagcacttccccctggggtgctcctgtgatttttgtggagaagaaagacaagacaaagaggatgtgcgttgattacagagctctcaatgaagttactatcaaaaacaagtaccctcttccccggattgatgatctgttcgatcagcttaaaggtgccacggtattctccaagattgatcttctctccggatatcaccaattgcgtatccgtgaagaagatatcccgaagaccgcattcaccacgtgttatggactgtatgaattcacggtgatgtcgttcgggctgaccaatgctcctgccttcttcatgaacttaatgaacaaagtgttcgtggaatacttggataagtttgttgttgtcttcatcgacgacatcctggtatactcacaatcagaggaagaccatcaacagcatctctgtctggtgttgggaaagttgcgggaacatcaattgtatgccaagctcagcaagtgtgagttctggttatccgaagtcaaattcttagggcacgtgatatctgctaaaggagttgctgtggaccccgaaacagtgaccgccgtcactgattggaagcaacccaagacagttactcaggttcgcagctttttgggtttggcaggatactaccggaggttcatcgagaacttctccaaaatcgctcgacccatgacacagttgttcaagaaagaagaaaaatttgtgtggagcccgcaatgcgagaaggcgttccaaactctcaaggaaaatctggtttcctcgccagttttaatcttaccggatactcgcaaggacttcatggtgtactgtgacgcttcgcgccaaggattggggtgcgtgctcatgcaggaaggtcatgtggtagcctatgcctcacgccagctacggcctcatgaaggcaactaccctacccatgatttggagttggccgctgtggttcatgctctaaaaatctggcggcattatctcattgggaatcgctacgaaatatataccgatcataagagtttgaaatacatcttcacccagtcggatctgaatctttggcagagaagatggttagagctcatcaaggattatgatgtggggatccactatcaccctggtaaggccaacgtggtcgcagacgcgctgagtcgaaaaagccgttgcaacactcttagcgtccgtggcattccaccggaacttcatcaacagatggaagccctgaacctaagcatagttggtcgtggattcttggctacgctggaagccaagcccaccttgctcgatcaaatctgcgaggctcaaaagaatgatccagatatgcatgggatcctcaagaatatgaaacaaggtaaagccgctggtttcacagaagatgaacatggaaccctatggaacggaaatggtgtatgcgttccggacgacaaggaacttaaacagctgatacttcaggaagctcacgaaagtccttattccatccaccctggcagtacgaagatgtacttagacttaaaagggaaatactggtgggttagtatgaagcgggaaattgcagagttcgtggccctttgtgatgtgtgccagcgtgtcaaggcagagcatcaacggccggccggacttctccaacctctacaagtaccagaatggaaatgggatgaaattgggatggatttcatcatcggacttccaaaaacccaaggcggttatgactctatatgggtagtcgtggaccgactaaccaaggtagctcggttcattcccgtgaagaccacctatggagggaacaaactagctgaactctacttcgctaggatcacatgggataagagtctcccttacgccgagttctcctacaataacagctaccaagccaacatacagatggcaccgtacgaagcattgtatggccgcaaatgccggacaccactattgtgggaccaagttggggaaagccaagtgttcgggaccgatatcttgagagaagctgaagcgaaggtcaggaccattcgggagaatctaaaggtggcccagtctcggcagaagagttatgcagacaaccgacgccgtgacctggaattcgcagtggatgactttgtgtatctccgggtcgcaccgttgcgaggcatacaccggtttcagacgaaagggaagctcgcacctcggtttgtgggtcctttccgtatcattgctcgacgcggagaagtcgcttaccagttggagttgcccgcctccttgggcaacgtgcatgatgtgttccttgtgtcgcaactcaagaaatgccttcgagtgccgtccgagcaggccgactcagagcagattgaagttcgcgaagacttgacctacgtggagagaccggtgaaaatcctggacgccatggagcgcaggaccaggaaccgggtaattcgtttttgcaaggtccaatggagcaaccacgccgaggaagaagctacttgggagcgtgaagacgagctgaaggcagcccatcccgatctcttcgccagttcttccgaatctcggggtcgaggttccgtttaa

SEQ ID NO: 77542 - DNA, 120 bp, Oryza sativa
  Clone ID: PAT_MRT4530_7742C.1
gttgacgtgatagaaaaagttggaagtttgaatccaaagtttgactgtttggtagctagccagtcagccagacacggttttgttgagtcctcaatcttcatgcattccaccatgatttga

SEQ ID NO: 77543 - DNA, 3012 bp, Oryza sativa
  Clone ID: PAT_MRT4530_77430C.1
atgacagcaaagtattatagccctgccgttcctatagaaatccagggaattccttttccttcggatctgattcttctagacaccaagaacttgcatgtgatccttgggatgaattggttggctcaattccaaggagtagtggattgcgcaagacgcactgtcactctgtaccgagggccggaacaaccggttgttttctttgcacccccaacctctgtcggtagtttagaacttcatcagataggactgtcagaaatccccatagtcagtgagttcggagatgtgtttccggaagaactacccggtatgctgcccaagcgagagattgagttccggatagatcttgctgtaggaaccactcctctgtacaaccgaccctaccgtatggtagcaaatgaactggccgaagtcaagaaactgttggaagagttaaaagaaaaggggtacatacggccgagcacttccccctggggtgctcctgtgatttttgtggagaagaaagacaagacaaagaggatgtgcgttgattacagagctctcaatgaagttactatcaaaaacaagtaccctcttccccggattgatgatctgttcgatcagcttaaaggtgccacggtattctccaagattgatcttctctccggatatcaccaattgcgtatccgtgaagaagatatcccgaagaccgcattcaccacgtgttatggactgtatgaattcacggtgatgtcgttcgggctgaccaatgctcctgccttcttcatgaacttaatgaacaaagtgttcgtggaatacttggataagtttgttgttgtcttcatcgacgacatcctggtatactcacaatcagaggaagaccatcaacagcatctctgtctggtgttgggaaagttgcgggaacatcaattgtatgccaagctcagcaagtgtgagttctggttatccgaagtcaaattcttagggcacgtgatatctgctaaaggagttgctgtggaccccgaaacagtgaccgccgtcactgattggaagcaacccaagacagttactcaggttcgcagctttttgggtttggcaggatactaccggaggttcatcgagaacttctccaaaatcgctcgacccatgacacagttgttcaagaaagaagaaaaatttgtgtggagcccgcaatgcgagaaggcgttccaaactctcaaggaaaatctggtttcctcgccagttttaatcttaccggatactcgcaaggacttcatggtgtactgtgacgcttcgcgccaaggattggggtgcgtgctcatgcaggaaggtcatgtggtagcctatgcctcacgccagctacggcctcatgaaggcaactaccctacccatgatttggagttggccgctgtggtttatgctctaaaaatctggcggcattatctcattgggaatcgctacgaaatatataccgatcataagagtttgaaatacatcttcacccagtcggatctgaatctttggcagagaagatggttagagctcatcaaggattatgatgtggggatccactatcaccctggtaaggccaacgtggtcgcagacgcgctgagtcgaaaaagccgttgcaacactcttagcgtccgtggcattccaccggaacttcatcaacagatggaagccctgaacctaagcatagttggtcgtggattcttggctacgctggaagccaagcccaccttgctcgatcaaatctgcgaggctcaaaagaatgatccagatatgcatgggatcctcaagaatatgaaacaaggtaaagccgctggtttcacagaagatgaacatggaaccctatggaacggaaatggtgtatgcgttccggacgacaaggaacttaaacagctgatacttcaggaagctcacgaaagtccttattccatccaccctggcagtacgaagatgtacttagacttaaaagggaaatactggtgggttagtatgaagcgggaaattgcagagttcgtggccctttgtgatgtgtgccagtgtgtcaaggcagagcaccagcgaccggccggacttctccaacctctccaagtaccagaatggaaatgggatgaaattgggatggatttcatcatcggacttccaaaaacccaaggaggatatgattctatatgggttgttgtggaccgactaaccaaggtagctcggtttattcctgtgaaaaccacctatggagggaacaaactacccgaactctacttcgctaggatcgtgagtctccatggcgttcctaaaaaaaattttgggaagacatgggataagagtctcccttacgccgagttctcctacaataacagctaccaagccaacatacagatggcaccgtacgaagcattgtatggccgcaaatgccggacaccactattgtgggaccaagttggggaaagccaagtgttcgggaccgatatcttgagagaagctgaagcgaaggtcaggaccattcgggagaatctaaaggtggcccagtctcggcagaagagttatgcagacaaccgacgccgtgacctggaattcgcagtggatgactttgtgtatctccgggtcgcaccgttgcgaggcatacaccggtttcagacgaaagggaagctcgcacctcggtttgtgggtcctttccgtatcattgctcgacgcggagaagtcgcttaccagttggagctgcccgcctccttgggcaacgtgcatgatgtgttccttgtgtcgcaactcaagaaatgccttcgagtgccgtccgagcaggccgactcagagcagattgaagttcgcgaagacttgacctacgtggagagaccggtgaaaatcctggacgccatggagcgcaggaccaggaaccgggtaattcgtttttgcaaggtccaatggagcaaccacgccgaggaagaagctacttgggagcgtgaagacgagctgaaggcagcccatcccgatctcttcgccagttcttccgaatctcggggtcgaggttccgtttaa

SEQ ID NO: 77544 - DNA, 225 bp, Oryza sativa
  Clone ID: PAT_MRT4530_77431C.1
attgagacgttagaaaaaaaacaagtaggactaagaaaggaaaaaaaacaaaacactgaaaaaacgaaatccgggcggagcaacacaaaaaaaaccggcgggcggagagagcagaacagccggggagacaaataagaccgccggtttacggcaacggaggcgacaccacggggcgcactgcagtcgtgcagcctacggcgccgccggccccggggcggccgccaa

SEQ ID NO: 77545 - DNA, 4779 bp, Oryza sativa
  Clone ID: PAT_MRT4530_77432C.1
atgtcatggcacagggccggtgtcctgctgctaggggctcagtcctgcctgcctgtcccgggggttccggccgtaggtgggattgggtcggtactcttgtctatggctaggatgggttggaaactatgtcacgtcttccgtctgtataccgtggtgatggccggcagcgtcacccgtcgtggtttggacatgactggcttcgtcttggagctgcggggtatgtgcgtggtcttggggtatccacatggagtggactaccaggccaggccgcttccagagcaggagggtgaggatgcagagccccacgctggttgggaggttactgcagtgatcctctctggctctcccgagcggacttcgctggcagtcaccgcgggcggagattccttccccgccgcttgccaaaacgccgctctcctcgccatcggcactcttcaccagcgctacccggacgagttgcagcactcgccctaccgctaccaccctcgtcgcggaggagcccgcgactacgccaccttccgagatgctggctcggaggatgacgctcccatcgtgcacctggcgcgcatggtggaggcgtacgacgcggctcgtatcgatttccatcagatggtgcgccgtgggatggtcgagaacaacatgaagatcctggagctgcgtcaggagaacctgcagctcaagaaggacctagacgcagtggaggcgcagctgcatcagctcaagatcgcccagggagaggactgccgtcccaagcgccgccgtgtctgccgcagccagaagatcaccgcccgcaagagcacctccaggcccgagcttgttcgtcagtccctggcgtggacctgcttcgtcgagacccctcgtgccgagcccgcgcccgtggttccccaggagggggaagcctccggcgttggtagcacggaggatgcgttgttgctcaccttccgtcctgggccgtcgcagcgcgatgaggagaaagtcatcttcgccgcccaccagctgcaagggcccgcatctctatggtgggaccacttccaagctacgcagccagaggggcaacctatcacttgggctcgcttcaccgccgctttccggaggacccatgtgcccgctggagtcgtggctcttaagaagagggagttccgagagttgaagcaaggcaaccgctccgtgatggagtatttgcatgagttcaacaatctggcccgttatgccccagaggatgtgcgggaagatgaggagaagcaagagaagttcttggcaggaatggaccctgagctgtccgtccgtctagtctccggggactatccggatttccaacgtctggtggacaagagcatccgcttggaagccaagcacaaggaactggagtcgcacaagcgccgcttggcgaacttccgcaatcaacagggtgctaaccaaagggtccgctacaccaatccctacccagggggatcctcctcgcagccgcagcaacagcatcaacaacctcgctccgcgcctcgacctcaattcgtgcctggacaaggccgcagggacgcttcaggtccgcagcgtctgtgcttcaactgcttcgagcccgggcactttgcggataaatgcccaaagccgaggcgtcagcaaggccaagcgcctccccgctccaacaatggtgggaaggatgtcattcggggtcgtgtgaaccacgtgacggccgaggacgtgctgacaactccagacgtcatcgttgacaccaagaacttggatgtgatccttgggatgaattggttggctcaattccaaggagtagtggattgcgcgagacgcactgtcactctgtaccgagggccggaacaaccggttgtcttctttgcacccccaacctctgtcaaaagttcagaacttcatgagataggactgtcagaaatccccatagtcagagagttcggagacgtgtttccggaagaactacctggtatgccgcccaagcgagagattgagttccggatagatcttgctccaggaaccactcctctgtacaagcgaccctaccgtatggcagcaaatgaactggccgaagttaagaaacagttggaagagttgaaagaaaaggggtatatacgtccgagtacttctccctggggtgctcctgtgatttttgtagagaagaaagacaagacgaagaggatgtgcgttgactacagagctctcaatgaagtcaccatcaagaacaagtatcctcttccccggatcgatgatctattcgatcaactcaaaggtgccactgtattctccaagatcgatcttcgttctggatatcaccaattacgtattcgtgaagaagatattccgaagaccgcattcaccacgcgatacggactgtatgaattcacggtgatgtcgttcggtttaaccaatgcacctgccttcttcatcaacttaatgaacaaagtgttcatggaatacttggataagtttgttgtggttttcattgatgacattctgatatactcacaatcagaggaagaccatcagcaccatctccgcctggtgttgggaaagttgcgggaacatcaattgtatgccaagcttagcaagtgtgagttctggttgaccgaagtcaaattcttagggcatgtgatatctgctaaaggagttgctgtggaccccgaagcagtgaccgccgtcaccgattggaagcaacccaagacagtcacccaaattcgcagtttcttaggtttggcaggatactaccagaggttcatcgagaacttctccaaaatcgctcgacccatgacacaattgttgaagaaagaagagaaatttgtgtggagcccgcaatgcgagaaggcattccaaactctcaaggaaaagctggtttcctcgccggtgttaatcttgccggatacccgcaaggatttcatggtgtactgtgatgcttcgcgccaaggattggggtgcgtgctcatgcaggatggtcatgtagtggcctatgcctcccgccagctacgggctcatgagggcaactaccctacccatgatttggagttagcagcggtggttcatgctctaaaaatctggcggcactatctcattgggaatcgctgtgaaatatatactgatcataagagtttgaaatacatcttcacccagtcagatctgaatcttcggcaaaggagatggttagaactcatcaaggattatgatgtgggaattcactatcatcctggtaaggccaacgtggttgccgacgctctaagtcgaaaaagccattgccacgctcttaacgtccgtggcattccacccgaacttaatcaacagatggaagccctgaacctaagcatagttagtcgcggatttttggctgcgttggaagccaagcccaccttgctcgatcaaatccgcgaggctcagaagaatgatccggacatgcatggactcctcaagaatatgaaacagggtaaagccgctggtttcacagaggatgaacacggaaccttatggaacggaaatcgggaagctcacgaaagtccctattccattcacccgggcagtacgaagatgtacttagacttgaaggagaaatactggtgggttagcatgaagcgggaaattgcagagttcgtggccctatgtgatgtgtgccagcgtgtcaaggcagagcaccaacgaccggccggacttctccaacctctccaagtaccagaatggaaatgggatgaaattgggatggatttcatcaccggacttccaaaaacccaaggtggatatgattctatatgggtagttgtggatcgattaaccaaggtagctcgatttattcctgtgaagaccacctatggagggaacaaactagccgagctctacttcgctaggatcgtgagtctccatggcgttcccaagaaaatcgtatctgataggggaagccaattcacctctcacttttggaagaagctccaagaagagctgggtacccgattaaatttcagcaccgcgtatcacccgcagacagatggacagaccgagcgtctaaatcagatcctagaagatatgcttcgcgcatgtgttctagatttcgggaagacctgggataagagtctcccctatgccgagttctcctacaacaacagctaccaagccagcatacaaatggcaccttatgaagcgttgtatgggcgcaagtgccggacaccactattgtgggaccaagttggagaaagccaagtgttcgggactgatatcctgagagaagctgaagctaaagtcagaatcattcgggataatctaaaggtggcacagtcccggcagaaaagttatgcagataaccgtcgctgtgacctggaattcgcagtgggtgactttgtgtatcttcgagtcacgccattgcgaggtgtacacaggtttcagacaaagggaaagctcgcacctcggtatgtgggtcctttccgtatcattgcccggcgcggagaagtcgcttaccagctggagctgcccgcctccttgggcaacgtgcacgatgtgtttcatgcgtcgcaactcaagaaatgtctccgagtgccatccgagcaggccgactcagagcaaattgaagttcgcgaagacttgacctacgtggagaggccagtgaaaatcctggacaccatggagcgcaggaccaggaaccgggtaatccgtttttgcaaggtccagtggagcaaccacgccgaagaagaagctacctgggagcgtgaagatgagctgaaggcagcccatcccgatctcttcgccagtccctccgaatctcggggtcgagattccgtttaa

SEQ ID NO: 77546 - DNA, 291 bp, Oryza sativa
  Clone ID: PAT_MRT4530_77433C.1
atgggctgccttcagctcgtcttcacgctcccaagtagcttcttcctcggcgtggttgctccattggaccttgcaaaaacggattacctggttcctggtcctgcgctccatggcgcccaggattttcaccggtctctccacctccaactggtaagcgacttctccacgtcgagcaatgatacggaaaggacccacaaaccgaggtgcgagcttccctttcgtctgaagccggtgtacgcctcgcaacggcgtgacccggagatacacaaagtcatccactacgaattctag

SEQ ID NO: 77547 - DNA, 2905 bp, Oryza sativa
  Clone ID: PAT_MRT4530_77434C.1
atggtgagaccattttgccggtcaccgcatcagctccaccattgccatgctgacatcagttcacatccaagcaccatgcttccggccaacttcttcttcttcatcatcgtcatcgtcatcatcgcactcgcaaccatagcaccgccggtctctgcggagcggtacgactatcccactgccaacctctcgacgcggtgggtgaacaatgccgcggcgctccaacacagcgtcggctactccgacgggtcggccgtgcgtgccatcgtcctccgttcaccgaagaccttctacggcccctcctacgccgcgggcttcttctgctctcccccctgcgacgcgttcctcttcgccgtctacatcgtctacaccaacagcggcgccgggatcacgatgacgaccaccgggatcccgcaggtggtctggtcggccaaccgggctcgccccgtccgggagaatgccaccctcgagctcacttacaatggcaacctggtcctcagtgatgctgatggtagcctcgtctggtcaagcggcagctcgagccggtctgtggctggcatggagatcactgacaccggcaatcttgtgctgtttgatcagaggaatgtgacggtgtggcagtcttttgatcatccgactgacacactccttcctgggcagtcactgatggaaggcatgaagctcagagcaaacagcactacaacaaattcgactgagaatcaggtgtatatggctgttcaaccagatggattgtttgcttatgttgaatccacaccaccacagctctactattctcattcagtgaacacaaacaagagtggaaaagatccaaccaaggttaccttcaccaatggcagccttagcatatttgtgcagtccactcagccaagcaatatctcactgccacaagccagctccacccagtatatgaggttagagtttgatgggcacttgaggctgtatgaatggtctaatacaggagcaaagtggacagtcgtgtctgatgtaatcaaggtattccctgatgattgtgctttcccaatggcgtgcggaaaatacgggatatgcacaggtgggcaatgtacctgtccccttcagagtaattctagtttaagctacttcaagccggtcgacgagcgaaaggcaaatcttggttgctcaccactgacaccaatctcttgtcaagaaatgcgaagccatcagctcttggcccttactgatgtttcatacttcgatgtcagccacaccatcctgaatgcaacaaacagagatgactgtaagcaatcctgcttgaagaattgctcctgcagggccgttatgttcaggtatggccagaatgattctgatggcacatgcttctcggtatcggaggtcttctcgttgcaaacgatacaacctgaagcccttcattacaactcctctgcttacctcaaggtgcagcttagtccttctgcttctgcttccacagcaaacaaaacaaaggcaattttaggtgcaacaatttcagcaattcttatccttgtactggctgtcacagttatcaccctttatgtgcaaaggaggaagtatcaagagatagatgaagaaattgattttgagccattgcctggaatgccagtgaggttttcatatgaaaagttgagagaatgcaccaaagatttcagtaaaaagctcggtgaaggtggatttggatcagtctttgaaggagaaataggtgaggagagagttgcagttaaacgactagaaagtgctaaacaaggaaagaaagaattcttggcagaggttgagactattggcagcattgagcacatcaatcttgtcaggctgataggattttgtgcagagaagtcaaatcggcttcttgtatatgaatatatgccaagagggtcacttgataggtggatatattaccgctacaacaatgatcctcttgattggtgcacaaggtgtaggatcattatggatattgccaagggtttatgttatcttcatgaggaatgcaggcgaaaaattgctcatttggatatcaaaccacaaaacattctcttagacgagaaattcaatgccaaactggctgattttggactttccaagctaatagacagggatcaaagtaaagtagtgactgtgatgagaggcacgcctggatatttggcacctgaatggctaacatcacagatcactgaaaaagttgacgtctacagctttggagttgttctcctggaaataatatgcggaaggaaaaatattgatatttcgcagccagaggaaagcgttcagctcatcaatttattgcgagagaaggctaaagacaatgtattgatcgatataattgataagaaaagtactgatatggtctcacaccaccaggaggaagtgattaaaatgttgaagctcgcaatgtggtgcttgcaaaatgagagcagcagaaggccttcgatgtcgatggttgtcaaggtattggaaggcgcagtgagcgtggaaaattgcctagattacagctttgccaacgcaaattcagtgatatctgctcaagacaacccatccacatattcagctccaccctctgcatcgattctatctggtccaagatgaaataggcggcttgggtttttgccagggtgaggattgacgccgaggaggagacagtgagtagaagtaggtcgccggaggcgaacgccgttctcgatgcggccatcatcgtggtgatgctttcgatcggctcgaccgccggtcgccgtcgttccgccgccgccgccgccgcgaagggtgtatcgatattgacacggatggggatggaaattgggccaactgccgctgtaacagtaggtgcgaagatggcggcggcgggtgcgggatcaagagaccaccttgaagcggcaggactagaagccgctgccgtgcacat

SEQ ID NO: 77548 - DNA, 356 bp, Oryza sativa
  Clone ID: PAT_MRT4530_77435C.1
atgggagctgcgatgccgctcgctgccccaagacgcgacgcgactagaccctacgcttcgcattgcatatcatatggcccccgcgtgctgctatgctgctgcgacgactacctcacgctcgctctgtctcttccgtgttttctccttccttctgatttgggctggtcgcagccgcaacaagcactaccgatcagatccaaagataaagctaaaagcacgagaaacaagaaaactattagcggtctgtgtggcacagctccagctccagctctacccctcctggagctggagctcagccaaacagtttcagctccaccaaaactgggagtggagttgggtagagctctctcacaaaa

SEQ ID NO: 77549 - DNA, 324 bp, Oryza sativa
  Clone ID: PAT_MRT4530_77436C.1
atggcccagtgggccggcggaggcggagcacaagcacgggcccacttgcagaatcacactacaattttctccaaatcttgctgggttgcaagcggcggcggcggccgcttacgcaacaagcggcgacgcgcggcagggaggagtggcggctcgggccagcgcgcggtggagtcgggcgcgggcaggcgcggcgcggcggccccgaggagcggcggctccgtcggcgcgtcggcgtttgctcggctaaaaactctgggttattacatcctttctataagttgtgagagcaggctgcaaaaacaaatagggcagccagctctgagg

SEQ ID NO: 77550 - DNA, 1626 bp, Oryza sativa
  Clone ID: PAT_MRT4530_77437C.1
gtctttgccacgccgccgccgccgccatggccatcaaaacctagtgccgcctcgcgcagcgcgctgcgtcgtttggatctcgacgacggccggcgccaaggcacggagggagaagaaaaccacgcgcctcttctgtgttctccggcgatggcgagctccacggcatttgcagcggcatttgcgctgctgctgctagcgtcgtcggcggcggcggagggggaggcggtgctgacgctggacgccggcaacttcacggaggtggtgggggcgcacgacttcatcgtcgtcgagttctacgccccatggtgtggccactgcaaccagcttgctccggagtacgaggcggccgccgccgccctgcgctcgcacgacccgccggtcgtcctcgccaaggtcgacgccagcgccgacctgaaccggggcctcgccggcgagcacggcgtgcagggctaccccaccatcaggatcctccgggaccgcggcgccaggtcgcacaactacgccgggccccgggacgccgccggcatcgtcgcctacctcaagaggcaggccggcccggcctccgtcgagatcgctgcctccgcctcgccgccagcggccgactccatcgccaacgacggcgtggtcgtcgtcggagttttccccgaacttagcggcagcgagttcgagagtttcatggcggtggcggagaagatgagggccgactacgatttccggcacacgacggacgccggcgtcctcccacggggtgatcggacggtgagggggcctctcgtccgcctcttcaagcccttcgacgagctcttcgttgactcgcaggattttgatagagatgcgttggagaagtttatcgagtcttctggtttccctacagtggttacctttgacactagtccggcaaaccagaaataccttctgaaatacttcgacaatgccggcaccaaagcgatgcttttcctgagcttcagtgatgacagagcagaggaattcagaactcagttccatgaagctgcaaatcaatacagcgcaaacaacataagctttctgattggtgatgtcactgcctctcagggtgctttccagtattttgggcttaaagagagtgaagtgcccctcgttttcatactagcatcgaagtcgaagtatatcaaaccaactgtggagcctgatcagatcttgccctacctgaaggaatttacagaaggaacattggcaccccatgttaaatcagaacccattccggaggttaacgatcagcctgttaagaccgttgttgctgacaatcttcgagaggtggttttcaactccggcaaaaacgttctgctcgagttctatgctccatggtgtggacattgtcagaagctggccccgatcttggaagaggttgcagtttcattgaaagatgatgaagacgtcgtcatagcaaagatggatggtactgccaacgatgtaccgtcagatttcgcggtggaggggtacccaagcatgtacttctactcgtctggggggaacctcctgccctacgacgggaggacagccgaggagatcatcgatttcatcaccaagaacaagggctccaggcctggggaagcaaccacgactgaatctgtcaaggatgaactgtga

SEQ ID NO: 77551 - DNA, 996 bp, Oryza sativa
  Clone ID: PAT_MRT4530_77438C.1
gcacgagatcatctcaccacccctctcctcctctgcacagcaaccaggtgtatgctccatgaggaggagggaatcttgagaggtcacagatatcctgatcctgctgttttttggtggtctctgtgctgtaagttgggtttgtggcaagaattctttgctgcgcgaggcaatggcgtccacctcgggctcggcggcggcggtggaggagagggggaatagtgagcggaagaggaagcgtggcgcgacgggggagtcggaggggtccgaggcgcagccttccaagtggcggacgcggcgggcgcacgagatctactcgtcgaagctcctcgacgccatccgcctcgtgcgttccgggtcgccctcctcctcggcggcggccccgccgcgcagccgggccgtgcgcgaggcggccgaccgcgcgctcgccgtctcggcgcgcgggcggacgcgctggagccgcgccatcctcgcgtcccaccgccgccgcatccaggccgcgcgccgcgcgcgcctccgcgaggccatctccccgccgtcgcgccacccatcctcgtcgtccggtaaagggccgaaggccccagctctggcgaggaaggcgaaggtgctcgggcggctggtgcccggctgccgcaagctcccattcccggctctcctcgccgaggcctccgactacatcgccgcgctggagatgcaggtgcgcgccatgaccgcgctcgccgaggtcctttccaccgtctccggctcaggctcagcctcctcctccggcggctcctcttcgccggcgtgacccccaagcctcaagattcgtgcattcgttgtaaatttgttttttctttctttcattttttccttgggattagttagcctcgagctgtctgctctctagtttgtcctcttcttttccatgagctgggtgagcggttatggcggtggtggtgatggcattgcggtgattaacccgcgctgtaatgcagtaggccacatttgttttgttct

SEQ ID NO: 77552 - DNA, 885 bp, Oryza sativa
  Clone ID: PAT_MRT4530_77439C.1
gctatttgatcttttcacaagtatacttgacatagtcattcagaatgcacgaagtgaaggacagcttgattccggtattgttgacatcaaagcaaaaagtgttaaaatgaaagaatcaccgaagactgttcatgttgatagcttgtctggtgcttctacagtgttatttactttcacaatcgaccgtggatttacttgggagtcggcaaatgcaatacttgaagaaaggcagaaagatggagctggttattcagatgttggattttatgaatccagaagagaatggatgggtcgaaggcattacatgctagcatttgaaggctcaacagaaggaatgtacagagtaatccgtcctgctgttggagaagctttaagggaaatgcctttggttgaacttaaaagcaagtacaggaaggtttcatcaattgacaaaattggcaatggttggcaggaagagtatgatgcatcatccaagcagtgtatgcatggacccaaatgcaaacttggaagctattgtacagtaggcagaaggttacaggaaatcaatattttgggtggtctaatacttcctgtctggggcatagtagaaaaggccctagctaagcaggttcgacaaattcacaagaggatacgtgtcgctcgcttggagacaaatgataatgagcggattgttggacttatgattccaaattcagctgtggaatcagtattagaaggtctgcaatgggtgcaggatattgacgattgagtgacttgagacaagttaattcattgcacattcttttttttttttaatcttttttgctggtgactagtcatttgtaaaggtgaggaggcagttgagctcgagaggtgcatctttccctctgaatctgagggaggcac

SEQ ID NO: 77553 - DNA, 378 bp, Oryza sativa
  Clone ID: PAT_MRT4530_7743C.1
atggtggaacaacccatccatcataataaacatctcgatagttcccggtatagacggatatctcaaaatgatctgtttatttctcttagggtgtccatcctacaatcaggggagaggtctgggagtttttacttggctgttttgatcctgggagcacttttgatgagcgcgagcagattagggagaaaagaagggacatcccctgcgaccttcagcgcggcggccttggctttggcaagctgcggcggtggcctaggcagcggagagctcgagctcggcctccagccgtccagcgtgcggcagcggcggcctttggcgagcaacgacggcctcggccccggcctccagcgagcagctagcggcagtggtgcgatgtga

SEQ ID NO: 77554 - DNA, 146 bp, Oryza sativa
  Clone ID: PAT_MRT4530_77440C.1
tttttggttttttgagaagtataacaacaatcccctgcatattgaagggccataaagacggcgttatcagccacctcctcctcatagatgaggacacttttccccaccgttttcaggggaaaccggccccaaaaaccttacaaaag

SEQ ID NO: 77555 - DNA, 430 bp, Oryza sativa
  Clone ID: PAT_MRT4530_77441C.1
ctcgagcaaagaaggagagagctcggtgagctgcatagatggccccctccgtgatggcgtcgtggtccaccaccagggctcgctttcagaggcctcaagtacaccgccaaggtgccattcgtccatcacgccaatggaacaaaatattccacgttttgcccaatttccaggatcaggtgcatgcaggtgtggccgattgagggcatcaagaagttctagaccctgtcctacctgccaccgctcaccgtggaggacctactgaagcatatccagcaccttgtgcgatccaagctggcgccatgcctcgagctcagcagaagtatttcattagtgctgagattgcccgtagtgcacatgctcggaagagggtcgttctaccacggattccattgcaccccttgggggatcttcaattgcccccatgtgctca

SEQ ID NO: 77556 - DNA, 717 bp, Oryza sativa
  Clone ID: PAT_MRT4530_77442C.1
atgtccgagcccaccgccgccgagcttgccgcgctcatcaaggcgctctcggcaaccgtcgacaagctccaggcgtccgtcaccacactccagcaggcatcctcttccaccaccaagtccatcggcgagcaccacaacaaccggccaccgcgattccaaaaaatggattttcccaaatacgacggcaagtctgatcctctcgccttcatcaaccgttgtgaatcttactttcaccagcagcagatcgcggaggaggagaagcaaaacgagggcaccccgccatggcatcacttcaccgagctgcttcatctccgtttcggccctccactgcgttccaacccccccgacgagctcatggcctacaagcgcaccggctccgtcgtcgactaccaagacagcacacccgaggagacaggaggaactaacacacacgtctcgctccacgcgatcgccggcgtccgcttcaacgacaccatgcaagtgcacatcaacatgggcggcaccaacctcctcgcattgctcgactcgggtttcacacacaacttcgtctccacggctgctgcgagtctcaccaagctcaagctccttcctaacggcaagatgcaggtcatggtcgccaatggagaatacgtatcgtgcccgggcctctaccgcaacacagctttcaccaccgacactgagacgttccagataatgttgagattcaagaggatttga

SEQ ID NO: 77557 - DNA, 315 bp, Oryza sativa
  Clone ID: PAT_MRT4530_77443C.1
atgtcactggtggagtttgtggatctgccggactgccgcgttttggccttggccaccggcgtccggatgggattatgggatgcggtgcggaccatgcggtcatgcggatggatgacggatgcacactcgcagtcacaggcagcactgcagtgccgcgcacgtcgttcagagcacaatcacaaaaaccagcaagaatgtggcgggcccgacgacgccccgtacgtgccaggcggctggtcgaggcagtcgaacatgctggctgccggccgcgctggtggtggtagcgagcgccgagcgcgcccgccgcccgtgtag

SEQ ID NO: 77558 - DNA, 588 bp, Oryza sativa
  Clone ID: PAT_MRT4530_77444C.1
atgcgggtgcgaaggcctcaacaacagagaatgtcttccccacaccaggcatggtaacctcggacaccgccttctccccataaggcaaagctcgctcatgaaacggattcgccttgctctcaaccacatctagtccgttcgctttgactgcatcatcgaccagcattcctggtcggaacccgtcggcacctgcaagagcaagacgccgttgcaggctgagcagcgacttctcagctttcctccgctgccgcgcccgctccacctcatccgccccagccttagccacctcctcactccaccgcctccagcatccgcgccaccgccgccctcgccaccgccctcccgaagtcccctcctccacccgctgctgccgccgctgctcctccccctcctcctcctcctcctcctcctgcwcctccgccaccaccgccgcctaccctgccggcccggccaccacccccgccgcctctgctgctcatgctcgccttcgcgctcggccgcgccccaatcataccggcggcacctctatcccaccgccgcgaacccaggccgcgccgccatcgagggggggagtggcagcgccaaaat

SEQ ID NO: 77559 - DNA, 1173 bp, Oryza sativa
  Clone ID: PAT_MRT4530_77445C.1
atgagcagcagaggcggcgggggtggtggccgggccggcagggtaggcggcggtggtggcggaggagcaggaggaggaggaggaggaggagggggaggagcagcggcggcagcagcgggtggaggaggggacttcgggagggcggtggcgagggcggcggtggcgcggatgctggaggcggctggcttcgtctgcgcgcaccgctcggcggtggacgcgctcgtcgacgtcctcctgcggtacatctgccagctcggccgtgccgccacgttccacgccaacctcgccggccgcgccgccgcaaacgagtgcgacgtcatacagttcctcgaggagtgcggcgcggcctactatggcttcgcgggggccgcctcggtttctgcccgttgcctcgccaactccgccgtcgtcaaggatatggccgtgtttgttggcgcgtccaaggaatccccgttcgcgggccggccattgccgaggtttccggtacagcgtgtgccgctgcactcgacgacgagctttgcggtcttgggtagggagagcgggatgagccatgtcccggaatggctcccggcctttccggaacctcacacgtatgtgaggagcgagttgtggagtgaggaggtggctaaggctggggcggatgaggtggagcgggcgcggcagcggaggaaagctgagaagtcgctgctcagcctgcaacggcgtcttgctcttgcaggtgccgacgggttccgaccaggaatgctggtcgatgatgcagtcaaagcgaacggactagatgtggttgagagcaaggcgaatccgtttcatgagcgagctttgccttatggggagaaggcggtgtccgaggttaccatgcctggtgtggggaagacattctctgttgttgaggccttcgcacccgcatttgaagaatcaaaaggtggagaatttgatgagggtatggatcagggccaaaatgatagtcagactcagaagagggttgttccaaaagagaggccaccggtgtattttagaattgggattgataagaagtcaatggtgatggcactgaattcgagagctctggttgaactgaaggatccctggttcttcaaggaggataaggagcagagggcagagttgatactaagggaagcaatggataatccacatgaacttactcagctttaa

SEQ ID NO: 77560 - DNA, 601 bp, Oryza sativa
  Clone ID: PAT_MRT4530_77446C.1
ggtgatttcttcccaggtgaaaaagaagaatcccctttatatatactccattaggtttggtttgcttccattactggcgcaccgagacatgatattttgattttctcaagcacctacttttggttcgactggatgaggcaattagccaaacaatagcagtggtagggatgcaagccatgatagccatggaggcaagcctatacctctctgtctcttttatatcattatatatttgtctgatagagtgtacgttagattcatctacaactcgcacatagggggaatcatttgatctccgtgttgataattttgttttatttgactctattgttgagatgtattaggccatggtaggattattgtatataaaatatgtagtaatccatggtcaactctaggtccgcaacttatttttatgcgtgacaaacacaagaatttctctggcttttctgatccgaatatcttaaggatatcaaggcatgaaactttatctcgataaatttcttggttggtgtgtatgttagtaatcatcgtactttacatgtgaaagtaccaacattcaggttcgttcaaaataagaaaatgctaatttcaccatgaa

SEQ ID NO: 77561 - DNA, 147 bp, Oryza sativa
  Clone ID: PAT_MRT4530_77447C.1
atggggccggatgttgacatcggcggtgcggtggatgtgatggacgtcggcggtcaggtccggatcgtcgacaccgccagggaggacaaggatttgtgcttgtgcagagcaccttgcgtgcgtgttggctgtgtcgcgtcgggctga

SEQ ID NO: 77562 - DNA, 348 bp, Oryza sativa
  Clone ID: PAT_MRT4530_77448C.1
aacagcacgaagatgttttgaatctaccttctgttttgtctttcctacttccatagcttagcgattctttagttattacttgcccgggcttctgatcactaaggcgcttgtgtaaattgttcttgaaaaaacacatcatagttttgatccattttgcccgtaacatgtgtaattggggtgtaacaatacttcggttgaagacttgcagatatgcagtgtgccaaatcctgtgatgatagaaactttatactcagattgcatgacacccaatgttaaggaacaagatgtcctctgatgtaatcaaggttttattatttggcacatgcttcagtgatattgtggaatgac

SEQ ID NO: 77563 - DNA, 1794 bp, Oryza sativa
  Clone ID: PAT_MRT4530_77449C.1
aacagcacgaaaatgttttgaatctaccttctgttttgtctttcctacttccatagcttagcgattctttagttattacttgcccgggcttctgatcactaaggcgcttgtgtaaattgttcttgaaaaaacacatcatagttttgatccattttgcccgtaacatgtgtaattggggtgtaacaatacttcggttgaagaatggcggggaagcagctcccctcctccctcgcgcgcgcgcgcgccgcctccccgcgcggcctcctcgccgccgccgccctcctcctcctcctcctcctcgccgcctcctactccctcctcctctctccctcctcgcccggtggcctcgctagccctagctccggccccggctccgccgccgacaccgccttcctcgcctccctcgaccgcttcctcgcctcgccccgccgctccgcggcccccgccgcggcccccggcgacctcgacgccgcgatccgggccgaggaggaggaaaggctctacgggggcggcgcctggccggcggccccggcgcctctcagggtctacgtgtacgagatgccgagcaggttcacgtacgatctgctgcggctgttcagggactcgtaccgcgagacctccaacctgacctccaatgggagccccgtgcaccggctcgtcgagcagcattctattgactattggctgtgggctgatctcattgcgcccgaatcacaaagacttttgaagaatgttatcagggttcggcggcaagaagaagcagacatcttctacgtaccattcttcacaacaatcagttacttcttgctggagaaacaagaatgcaaggcactttatagggaagctttgaaatgggttactgatcaacctgcttggcaacgttcagaaggcagagatcatgtaattcccgttcatcacccatggtcgtttaagtcagttcggagatttgtgaagaaggctatatggcttctgcctgacatggattctactgggaactggtataaaccagggcaagtttatttggaaaaggatgtcatccttccatatgttccaaatgttgatctttgtgattctaagtgtgtatcagaaactcaatctagaagaagcacattgctattctttcgaggaagactgagaaggaatgctggaggcaagatccgcagtaaacttgtgacagaactaaaagatgcagaaggcataatcatagaagaagggactgctggagctgacggcaaagcagcagctcagaacggcatgcgcaagtctctcttttgcttgaatccggctggggatactccatcttctgctcgtctgtttgatgcaattgttagtggttgcataccagttatagtcagtgatgaactagagcttccttttgaaggaatacttgactacaggaagatagctttgttcgtttcgtcaaatgacgctgttcaacctggttggctggtgaagtacctgagaagcattgatgccaaaaggatcagacaaatgcaatcaaatcttctgaagtactctagacattttctatattcaagtcctgctcgacctcttggacctgaagatcttacatggagaatgattgctggtaagctggtaaacatcaagttgcatattcgacggtctcaacgcgtggtcagagagtcaaggagcatatgcagtgtgccaaatcctgtgatgatagaaactttatactcagattgcatgacacccaatgttaaggaacaagatgtcctctgatgtaatcaaggttttattatttggcacatgcttcagtgatattgtggaatgcct

SEQ ID NO: 77564 - DNA, 109 bp, Oryza sativa
  Clone ID: PAT_MRT4530_7744C.1
caattctgggcgaaactcatgataaggctataacagattccaggggcattatgggagggaactaaaaggctaatcaactaagacttatcgttgaagatagaataactaa

SEQ ID NO: 77565 - DNA, 447 bp, Oryza sativa
  Clone ID: PAT_MRT4530_77450C.1
gtggaaaaccccaaataatcttccaagatctacccgttgggcttcaatattaaaaataagacaagtcccttctaatgcttcagcctggcaactgacaataggtgatgtttctatctgaaatcagccattgtgctcagtttgggacaacatacaaaatgatcatcttaatggtatctttcttccatctcaaatgtcagacaatggggggatctttgggatcataataaaaacagggatgaacaaaaaaattctttcaattttgaacagtgcccctgtgcaagctattatgcaggaacaaatagttcagtaagacactgaagacaagctttgcttgaaacattcctttttaccaaactgcatccacgacaaacccaggtaaatactttaactgttaatattctgatttagcttggaaacacaaatttgttttttctagggtgcacacat

SEQ ID NO: 77566 - DNA, 285 bp, Oryza sativa
  Clone ID: PAT_MRT4530_77451C.1
atgtcgcaacgccctccagagttggccaaggaaggtggcagccatgagggggttgaggtggtggtctataggaggaaggcgaaggcggcaacgaggggctaccaacgccgtggtgttggcgataaaaattatgtagaagcaaggtggtggggggaggcgcgcgccgatggggaggaagcgcatgatagtgctattgacctaccaaccggtgttgtttgtctacgggctcccattttctcactatttttccgttcgatgcaaattcaacgctacagaatgggctga

SEQ ID NO: 77567 - DNA, 200 bp, Oryza sativa
  unsure (1)..(200): unsure at all n locations
  Clone ID: PAT_MRT4530_77452C.1
cacctccaactctcgaagtctccaagccaagccaagctccgcccccccgcactctccacactccacctcggattncccagcgcgcgagaagcccttcccgtcctcgatgggcaactgctccccgtcccctcgncgnnggggccgcccgacgtcgncgtcggggtcgtnacctctggaccgnancnngtcggccaaggncg

SEQ ID NO: 77568 - DNA, 320 bp, Oryza sativa
  unsure (1)..(320): unsure at all n locations
  Clone ID: PAT_MRT4530_77453C.1
ggccctgtggggtctcgcattccacaacaaccgaagggccncantcnggcctcgggcctccccgttttttaccgggtgggacttaacgggttttcaccgccttacattgtgcacattgcgggccgtttttaacggtccatgcctcgggtgccatggccgtgggcctacctttccgggcgcttgggtgtctcgggtgccgccggcttgcccgccccttccgcggtgcttcttttttcttggcggctgccttgggccccttggctccgggtgggtccttcttctcccggtcttggtgccgtcctccgcccccgtttgcctcc

SEQ ID NO: 77569 - DNA, 6870 bp, Oryza sativa
  Clone ID: PAT_MRT4530_77454C.1
atgggcgccggcggcgccgccaagcagatcgtcgactcgctcctcgcccgcttcctcccgctcgcccgccgccgcatcgagaccgcgcaggcacaggatgggcaatacctccgtccatctgatccaagctatgagcaagtattggattcacttgccatggttgctaggcacacacctttgcctcttttggaagctcttcttcggtggagggaaagtgaatcaccaaaaggcgcacatgacgcatcaacgttccaaaagaagaaactttggattggcctggaaaattttgtatttgattggctaattaatgcagacagggttgttagccaagtagagtatccctcgttggttgatttgcgaggtctcctcttagatcttgttgcccaacttttgggagctttatctcgtatcaggtttagttctgtgacggaaaggtttttcatggagcttaatagtcggcgtaatgatgcgcctctttctagaagtgattcactcagcattattaatgggatgcgctaccttaaattgggggtgaagacagagggtggactgaatgcctcggtttctttcattgcaaaagcaaatcctctaaatcgtcctcccaacaaaagaaagagtgaactgcaacatgctttgtgcaacatgctctcaagtatactggccccgcttgctgagggaggcaaacatcattggcctcctctgggtgtagaacctgcattgtcactttggtatgatgctgttgctcgaataagaggcgcgctcatgtattggatggataagcagagcaaacatattgcagttggatttccacttgtaactcttctactttgccttggtgattcccatacgttcaacactcacttttctcaacatatggagatcttgtataagtatctcaaggacaagaatcaccgatcaatggcattagattgtcttcacaggctagtgaaattttacttaaatgtttatgcagattaccagcctagaaatcacgtgtgggactgtttagatagtgtgacctctcaattgctgaccgttttgaagaagggcttgctgacacaagatgtccagcatgataaacttgttgagttttgtgtgaccttagctgagagcaacttggattttgcaatgaatcatatgatcctcgagttgttaaaaccagatagtttaagtgaagcaaaggttgttggtcttagggctttgcttgagatagttgtgtctccatctaacaaacaaattggattggatgtcttccaagaatatggtattgggcattatattccaaaagtaaagtcggcgattgagtcgattttacgatcttgtaacaaggcatatagcttagcccttcttacatcatcgaaagctactatagataatgtaacaaaggataaatctcagggatcactcttcagatctgtgctgaaatgtataccatacttaatagaagaggtgggacgtaatgataaaatgaccgagattatacctcagcatggtataagtattgaccctggtgttcgtgaagaagcagtgcaagtgttgaacaggattgtacgatgcttgccgaatcgtcgctttgctgtattgaaaggaatggccaactttatcctaaaacttcctgatgagttccctcttttgattcaaacatcactgggacgattagtagagctcatgcgcttgtggagagtatgcctatctgaggaacttttggcaaaagacatgcaaaatgttaagcgttctagtctaggaggcgatgcactacagaggtctccttttcatagatccagggatgtatctgaattccgtgcctcggaaatggatgcagttggtcttgtctttctcagctctgctgatgttcaaataaggcttactgctttggagttattgcgatgtgttcgagcgctaaaaaatgaactcagggattactcggcaaatgaatggggtgacagcaaactgaagcttgaaccagaacctatatttattattgacatcatagaggaaaatggggaagacatagttcaaagctgttactgggatcctgggcgaccttatgatctgaggcgcgagatggatcctgttcccttggatgtgactcttcaatccattttagagagcgcagataaaagcagatgggcccgttacctcagcgagattgtcaaatatgcagctgaactttgcccaagctctgtgcaggatgcaaggcaaggactctggggattagaggttgttaggagattagaacagatcactccggtcgaactaggtggaaaggcacaacaatcacagcgtcctgaaactaagctcgatcaatggctgatatatgcaatgtttgcatgttcttgcccacctgatagcagagaagaatttgccctcagagcagccagagagatcttccatatagttttcccatcactgcgccatggttccgaatcatatgctcttgctgctacagctgcccttgggcactcacatctggaagtatgtgaaatcatgtttggtgaacttacatctttccttgaggatgtatcatcagaaacagaagcaaaaccaaaatggaagcctctttacacaattttccacaagaagaatcctaggtcccgccgtgaggatctgcgtacgcatgtcgcaaacatacatagaatgatagctgagaagatttggcctggaatgcttagtcgaaaacctgttctccgtttacattttctaaagttcattgatgaaacatgccgccagatcctgccaccatctgataactttcaagatttgcagcctctccgatatgcactagcatctgttctgagatatctagctccagaatttattgatgcaaagtctgagaggttcgacagcagattgcgtaagaggctttttgacctcctccttagctggagtgatgattctggcagcacttggggacaggaaggcaacagtgactatcgccgtgaaattgagcgatataaagctagccagcataataggtcaagggaatcacttgacaaacttgcatttgacagggaaatggctgagcagttggaagctatcaattgggcttcaatgaatgccattgcttctttactatatggtccatgctttgatgataatgcaaggaaactgagtggtcgggtaatatcgtggatcaatagtttgttcatggaactagctccaagagcaccttttgggcattcaccagttgatccccgaacgccatcatattcaaagcacactgatgggggacgttttggaggaagggacaaacagaaaactagtcacttgcgagttctgttagcaaaaactgcattgaagaatattttacagacaaatttggatctgtttcctgcttgcatagatcagtgttactctccagattctccaatatcagatgggtatttcagtgtccttgctgaagtatacatgcgtcaggaaattccaaagtgtgagatccagagaattttgagcttgatcctctacaaggtggttgatcaaacaaaactgatccgtgatagtgcccttcaaatgttggagacactctctctccgtgaatgggcggaagatgatgctgatggtgttgggcattaccgggcttctgttgttggcaacctgccagattcctaccagcaattccagtacaagttgtcctcaaagcttgccaaggaccatcctgagctcagtgagcatctatgcgaggaaatcatgcagcgccagcttgatgcagtggatattattgctcaacatcaggtcctcacatgcatggctccttggatagagaatctcaactttgttagactaaaagaatctggttggagtgagagattgctgaaaagtctttattatgtgacgtggaagcatggtgatcagttccctgatgagattgagaaattgtggagcaccgttgcaagcaatactcgtaatatcattcctgttctcaacttcttgatcaccagagggattgaggattgtgatgccaatccatcagcagagattactggtgcatttgctacctacttttcagttgccaagcgtgttagtctgtatcttgctcggatttgcccacaacagaccatcgatcacttggtctgtgagttatctcagagaatgcttgaggatgatgaggaaccagtcaggcctggaaaggttgatacttctgcaaatgtcgtgttagagttttctcaaggacctagtacctcccaggtggcaacaatagttgatagccagcctcacatgtcccccctgcttgtccgtggttccctcgatggtgcaatcaggaatgttagcggaaacctaagctggcggacatcagcagttactggtcgaagtgtatctggcccactgagcccattggctcctgaagtaagcattccaaaccccactacaggccggtcaggccagctccttccagcattaatgaacatgtcagggccattgataggtgtccgaagttcagctggaaatctgaggagccgtcatgtttccagagacagtggtgattactacttagataccccaaactcaaatgatgatattttacatcaaggtggcagtggtgttcatggtatcaatgccaatgagctccaatctgcattgcaggggcaccagcacttgctttcacgtgctgatatagctttgattctccttgctgaaatcgcatatgaaaatgatgaggactttcgcgaaaacttaccactattgttccatgtcacctgtgtttccatggatagttctgaagacattgtgcttgagcattgccaggatttgcttgtgaatctcctctattcactcgctggacgccatcttgaactgtatgaggttgaaagcagcgaacgggagaataagcagcatgtcgtgagtttgataaaatacattcaatctaaaagaggtagcctgatgtgggagaatgaggatcctacccttgttcggactgaactacctagcgcttcactcttatcagcacttgtgcaaagcatggttagtgcaattttcttccaaggtgatcttcgtgaaacctggggttctgaagcacttaagtgggctatggagtgcacatctcgtcacttggcatgtcggtcacaccagatatatcgtgctttacgccccagtgttaaaagcgatagctgtgtattgcttatgaggtgcatccacagatgcttgggtaaccctgttccagctgttctgggttttgcaatggagatattgttgactcttcaagtcatggttgagaacatggaacctgagaaggtgatactttacccacagctcttctggggctgtgttgcactgatgcataccgattatgtgcacatatattgccaggtgcttgaattgttctgtagggtaatcgatcgcttgacgttccgtgatcggacaactgaaaatgtgttactgtccagcatgccacgtgatgagtttgacatcaatgggtatacaagcgacctccacaggctggaatcgagaaccacgtcagagagattgctatccgtgacagagactgggaaagttcctgatttcgaaggggtgcagccattggtgctgaaagggcttatgtctagtgttagccatggatctgcaattgaggtgttatctaggattaccatcccaacatgtgattctatatttgggagtcctgagacaaggctgttgatgcacatcacaggtcttcttccatggcttgggttgcagctcaccaaagatgcatcttccctcgggtcatcttcacctatacaagagcagaatcagaaagcttactatgtggcatccaacatttcggtgtggtgccgtgtcaaatctttagatgatttagcggaagtcttcagagcatactcctttggagaaatcatctccctagaagatctttttgcacgcgcttcgccgccaatatgttccgagtggttccctaagcactcatctctggcatttgggcacctgcttaggctccttgagagaggtcctctggattatcagagagtggtgcttctgatgcttaaatcactgttgcagcaaaccccagtggatccatctcagatacctcaagtgtacaatgttgtgtcacagctcgtggagagcgcactatgtgcagaggcattgaatgtgttggaggcgctcctacggagctgcagcggtgtaactggtggtcaaggtgatgatattggatttggcgagaatggtcacgggatgggggagaaggttcaccaaagcatgcttcttcctcaatcatcattcaaggctaggagtggacctcttcaatatgctgctgccggttcagggtttgggactctaatggggcaaggcggtggcagcgctgcagatactggagtggccacccgagatgtggcgctgcagaatacccggttgctgcttgggcgtgtccttgatacatgcgctcttgggcgtaagagggatcataagcgccttgtgccgtttgtggcgaacatcgggtagaaaatgcagttgagtgacctatgtaaaatgtttggtggctatatgtgctaactgaatgaatgaatgcagccaattttgtacagctaggagcgtgatccagaaatcgctgtgcacaggttgacaagatagaagaagcagcacttcccgccaccgaaagactaccctaaccaaactcaattttgactgttgtaatatcggaatgtgtttatttatcctgcaacctcacagaggtcgcaggtttgaagtatggttgtagctgtagactgcaattcattggatgcacatacacatacatacagcatgagcgagtggcacaagctcttttcttttctttttttcttggctagtgtgtatattggaattgcttggtgacatcccgaaggggaagggactccagtgtagtgtttgattcattattattgttacctgttgtgttcattt

SEQ ID NO: 77570 - DNA, 462 bp, Oryza sativa
  Clone ID: PAT_MRT4530_77455C.1
atgctgatttgtagatccaacagagtcttcgtcaacaacaaccgcgtctattttgtcttttccactccactcgaccacgcccttgttggaatttcgtcgaacaccttggtggcgtcgctggcgtcgccgccgccgctcagcccacgcgccgcctccgccgccgccgccgccgctcagcgcctcagcccgcgcgccgccaccgctgccgccgccggtggtcaggttgcgggccgccgccgccgcggccaccacgcgcgcccgcgcctcgccctgccgccgccggccagcgcctcgcccagccacctccgaccccgcgccaccgtccgcacgtcgccgcccgctcgccggcgaccccgcgccgcctcccgcgcgctaccgccgcccgtgcgccaccgctgctcgcgcgcctgccgcgccgcctccgccgcccgcgctcctcccgccgccgaccgcctctgctga

SEQ ID NO: 77571 - DNA, 421 bp, Oryza sativa
  Clone ID: PAT_MRT4530_77456C.1
atccaatgtcttaaagatgtactattcatcgatagattaaaacatccctttgaccatcatgtgcaggaatgataaggatatactaaacagacccgataccatgctagctgtgtagatgtacttctaacaaaaaatattgctattgtagataaccgggatagcaccaggaatttaacagattatctgctgaacaaatgaacattattgcttatctggtggcgaacaaaaaaccgccccttggatgaccacccattatataagtagcatgcttccctaggatttgttagcgggttcggcctataacggtagctaagcatcactctgtttattgcactgctcatagacatcacattcaaatgtgaccttaccaggttggacagcgcctacatcaagatggtcctccttcacgtttccacccata

SEQ ID NO: 77572 - DNA, 972 bp, Oryza sativa
  Clone ID: PAT_MRT4530_77457C.1
atgaccagaacaatgaatcaaaggttgtctaatgcaatggaaaggagacctaacggtgatctggagttctcatggaagagggcccggttgcatggccagcacatactaccggaggttcgtgatcaaggtaacgagccaacttgcgtcttccaagccgtctgtgctgctgcggagatgacgatgatgagaaatcttgctgatcgtaacccccccagctctaccgataccaggtttgatgctgaactgctagcgcatgactatgaggtagaggttcagcggtctcttggtaaggaccatgacctgggtcacaccgtgcgggcagatacagccttgcgtttgtttggaagtattggggcattggcaacgtcatcaggttgggaaggccatcaaagggtcagactcagaaactatcgctctctgagtatatcgaacttcgagagggttgcagagtacatcatccagggcacacctctacttggcacactgccaaccggtgatgaattcaggacgatgcttcccgatgaaatatttgagtttcgtcggggacttttgccagctggaactgtggcatcaacccatatggttctcttcatgggctttggctacaggaatggccgcccatacttggtgttccttaacagcaacggcaagagcttcggagacgagggtttgggcagggtgtactttgatcagatctacgctgagctgttttatgcactgaatgccagagcccctgatgcctcagtacggacaagtcatcataatgaagatgccagcgcctctacctcggcgaccattcagcagtttacactgtcttcatctgctagacctggaccagcacacactgatgccagagcctccacctcgtccaccaccatgcagctatcatcttcatccactccaccgactgcaccccgacgccgagatgatcagccgtctcctccccggccggcacagcgccgtcggctgtga

SEQ ID NO: 77573 - DNA, 2316 bp, Oryza sativa
  unsure (1)..(2316): unsure at all n locations
  Clone ID: PAT_MRT4530_77458C.1
atggcggccgtgtcggaggtggaggtcgacggcgtcgtgttcccgccggtggcccgcccgccgggctccggccacgcccacttcctcgccggcgcaggtgtgaggggagtggagatcgccggcaacttcatcaagttcacggccatcggcgtgtacctggaggagggcgcggccgtgccggcgctggccaagaagtgggccggcaagtccgccgacgagctcgccgccgacgccgccttcttccgcgacgtcgtcaccggcgatttcgagaagttcacgagggtgacgatgatcctgccgctcaccggcgagcagtactcggacaaggtgacggagaactgcgtcgcggcgtggaaggccgccggcgtgtacacggacgccgagggcgcggccgcggacaagttcaaggaggccttcaagccccacagcttccctccgggcgcgtccatcctcttcacccactccccgcccggcgtcctcaccgtcgcgttctccaaggactcgtcggtgccagagggcgccgtggcggcggcggcgatcgagaacagggcgctctgcgaggcggtgctggattccatcatcggcgagcacggggtctcgccggcggcgaagcggagcatagcggcccgcgtctcgcagctcctgaaggcggaatccaccggcgacgtggcggcggcggagcccgcgccgttaattatcctgatcgaacgtcgttttcaaaagatgctaccaattcagatcgttttcacttatacgaccggtgagtacgggatattttctgcgattaggaaagtaatttggtgccgaaaaaggaaaccatctgaagagaagggggagcgcgctggggcgatcgctgggggcgatcaatcgccccttagcctttccgaagcgaaagcgggcactgtttctgctaatatggtccggcccaactggagcagtgtgggcaaggcaagggaggatgtctgcttgggccgacctttacaccggtgccgaaaacgaagggaaaaagtacaccgaaggtccctcaacttatcatcgagtttacaagatcgtccctcaaccacaaaaacagatactgacgtccctcaactaacaaaaccgttcactttagatcttctggtggtttttatcccggttttgtgtggcttgagtcagcgtgggacccacgtgggccccacatgtcagaatgccagttcatctctctcctcccctcttctctcctttcctcatgtctatctgacttctccccgatttgacggcgacgcggctgcggtggtggcggcgacgggcgacgcggcagcagtggggggaggacctgcgggcgggcagtggtggaggggcgcnggggtaggancngntcncgggctcctcttcggccgccacccacgaggcccacgaccacgaggcggcgtgtgcagcgtcaagttcggctgctccaccacgacggccggctcgttcccggccgacgggctggtcgggctcagcggcgacgcggtctccctcgtgacgcagctcggcggcgaggcgtcgctcggccggagattctcctactgcctcgtcccgcactccgtcaacacatcgtcggcgttcaacttcggcaccctcgccaacgtcaccgagctcggcgcagcgagcacgccgctcgtcgccggggacgtggacaccaggaagcaaaccgaacaagcgagtccggacttgacgctggagttcggcggcggcggcggccgcgcggcggtggcgctgaagccggagaacgcgtccgtgacggtgcaggaggggacgctgtgcctggtaatcgtggcgacgacgaagcagcagccggtgtccatcctcgggaacctggcgcagcagaacatccacgtcggctacgacctcgacgccggcacggtcaccttcgccaccgccgactgcgcggggagcggccggccgacggagcagacgagcggcgggcaggcgcgctgcgggagaggaagagagcgccgacggggagcggggcggggggagcgaggacgtcgccgccgtcgtcatccatggccgcagttctcgcgcccgcgccgtcagcggcgtcgccggcgggagtgtgtgagcgcggggcagcggcgggcgaagcaggcggtggagggcagagcgggcacgacgccgaagacagcttcttcccgcgccggcgccaccggccgcctctcccttctcaagcgtcgccgccgccgccgcctcccgggcctctccgacggtccgaccccgaggtcgcatgcgccgccgccggctgccggacctcctccctacccgccagcggccctgcagagaggagagaaatga

SEQ ID NO: 77574 - DNA, 324 bp, Oryza sativa
  Clone ID: PAT_MRT4530_77459C.1
aaaaaaagggtttaaggggggaacatgccaagttgaaataagttccaagagattggtgttttttggacaacaataactaattttttgttaaacagtttagttggtggggaaaaattttacaacttataagcaatccatgcctgccgggggccctttaccagtttttaaaggccattcgcagaatttttaatcgcacagggggttttttataaaacttaaaagagggtcatcccaaaagagggttacataaagaagggcctagtaaaaagggacatggcccctagcaggggctccccctccaaacaaaaatggcaaaagaaaagg

SEQ ID NO: 77575 - DNA, 601 bp, Oryza sativa
  Clone ID: PAT_MRT4530_7745C.1
caaagaaataattacatttcgttgactccatctagggcaatagatggccataaggcccgaggcccgaaggcccggctaatggcatggctttttggcccggcccaagcacggcccggccgtacctgggcctcccctccgacacgctgggctggcccggcacgatgggccggcagaccaggcccggcacacaaagtatagggagatgggccgtcgtgccttcgggccagcccggcacggcccgaggcgtgttgggccgtgcctgggccgtgagtgcggcacgtgggctggcatggtacggcccggtgcgtcggtcgggccgtgccggcccgacaagcctcggcccaggcacggccgggcctgggccgtgccgtgccaggcggcccacatggccatctatagcagtggcaacgaaggcggctcgcggtggcggctggcacgagctttgcgcggagcagataagacggcgacgaggtcagcgaaggcggttcacggcggtggaaggcacgagcttcacccggcgagcaaatccggcggcggcaaggtggggacgatgacatcgggcgagccggcggcctccagattccggcggcggtggaggtag

SEQ ID NO: 77576 - DNA, 1182 bp, Oryza sativa
  Clone ID: PAT_MRT4530_77460C.1
atgtcacggcggcggaggaacgacggcggcgaggccgatggccgcgccagcaagacggcgcggcggcggccggcgcagacgaagatgaagcacctctacctggtgctcgacgacggcgacgaggctactactacttacaccatccacaagctcgacgtcgacgacgacgcgggcattatccacgcgcccgacgtcgaccggccggcgactcggttcgcggcggcgccagcggccggtggtggccaaatgcacttcctcgccatggccgggaagaacatcgtcgcggtcgacggccagggtggcggcccgacggccgtgtacgatacggaggcggccgcgctgacgttcgcgtcacccctcccgggccgtctctcctcctccggcgccggcctggccgtcgtcgtcgaggacggtggccacggcggcggcgaggcgctttacgcgctgacgtcgctcggcgagcgcatgccggcgtcgttcgaggcgctgtcgtgggcgcgcgacccttgcgcatcgccgtcgtcgttgctgttctcctcctcctcctcgccggggcgccactactactggtcctggaagaacgtggccgatacgccgccgccgttcgccgaggaggaggccgtcaccgcctacgcggtgcaccccgacggccgcaccatcttcgtgtccaccaccggcggcggcggcggcggcacatactcgttcgacaccgagcggcgcaagtggcggcgccacggggactgggtcttgccgttccgtgggcagggctacttcgacggcgagctggacgcctgggtcgggctccacagggaggtccacggccgcgtctgcgcctgccaggtcgcgtcccgcggcggcgcgcggcccccggagtacagagagacgctcgactacgacagcgtgtcgtcgtcgagaagcaagaaccggcgccaacgcgccacgctcacctacatgggcgacggcatgttctgcgccgtggagacctgtgagacgccgccgacatcgtcgtcgtcgtcggaaggaggtggcggcggcggcggcgtggaggtccatgtcacggtgttcgggctcaagtacaatcgccggggagagctgcaggcgagggttcgccgcgccgccggcgcgttcccactgcccaagcaacatgtcccatcgttttctcctgtagccttctggatgtag

SEQ ID NO: 77577 - DNA, 1179 bp, Oryza sativa
  Clone ID: PAT_MRT4530_77461C.1
atgcctgctgactctcaggatgacagattcaggaccttggtacaggttgattggtataattctgtgatcatgggaagatctcatccagtggtagagatgaagtggctagactggcagtacatgttctcgaagaacaacttagttttcaatgaggtgcgcaagctctactccaccgctttctttggcaccaccaagaagggccatgattttgtgaagtggaccattcaggtgcagcagtatagggtctctatggcacagtttgctacagctttggggttagatgatgatgacctgaatcgtccacatatctttgtagaggatgctttgtcaccgaccagcactactttcttctatgagaaggatgctcccaaggattgtttggggactactcgtgggttgcgtccatactatagagtgttgtattctatcttcaggtggcctttgctccccaaagtgggagatgctacagcccttccaggtaggcatgcgctcctcctcagtcgtatgcgctacaacaagccagatttcagcatcatgaagcttatctggagtgagatctatgagacagtgtgtgagccaaagaggggctgcatctatgctccttatatcatgaagatgattaaggcaaagactgggatttgttatttcaaggacaaccaacacaagcctttccgtcctcatgctcccactacttcagctactccttctaccagggcaactcgtgcttctacctcagctgctccttcttcctctgctgcaccacagtgttctgagtcttcttctcccataaagaaggctctccgggctatcttttgtatgtgtgctaagaccgctaagaaggtgaagaagatagagaggcgtcagaaggaagattggattgcagtaggcaaggatgtctctgatatttttgatgatgaggagtttgttgatccttttgctgcttatgagactgctcgagacattgctagtggtgagggtccctctggcatttctcattccttcaatgaggagtcctcccactccgaggagagcagtgatgatgaggagtctgatgcacctactgagaatgtacctacagatccagatgaggcagtggacgccgccgggcaagacatcgactctcctcactccggcgacaccgagatcattccttctgatggcgatgatgatgaggcttga

SEQ ID NO: 77578 - DNA, 359 bp, Oryza sativa
  unsure (1)..(359): unsure at all n locations
  Clone ID: PAT_MRT4530_77462C.1
gctcacccgatcctgtatccatggcggccgtgtcggaggtggaggtcgacggcgtntgttcccgccggtggcccgcccgcnggggtccggccacgcccacttcctcgccggcgcaggtntnaggggagtggagatcgccggcaacttcatcaagttcacggccatcggcgtgtacctggaggagggcgcggccntgcggcgcttggccaanaagtgggccggcaagtccgccgacnagctcgccgccnacgccgccttcttccgcaacgtcgtcaccggcaatttcaagaagttcacgagggtnacgatgatcctnccgctcaccggcnagcagtactcggacaagntgacggagaact

SEQ ID NO: 77579 - DNA, 930 bp, Oryza sativa
  Clone ID: PAT_MRT4530_77463C.1
atggggaggggggaggcggccggctcggctcggctgggaaggagggggagggtttctatggctcagtttgctgcagctttggagttagatgatgatgacctgagttgtccacatctctttgcagaggatgctttatcagtgaccagcactactttcttgtatgagaaggatgctcccaaggattgtttggggactacttgtgggttgcttccatactatagagtgctttattctatctttaggtggtcattgctcctcaaagtgggagatgctacagctcttcctggtaggcatgcgcttctcctcagtcgcatgcgctacaacaagtcagattttagcatcatgaagcttatctggagtgagatctatgagacagtgtgtgagccaaagaggggttgcatctatgctccttatatcatgaagatgattgaggcaaaggctgggatttgttatttcaaggataaccagcacaagtctttccgtcctcgtgctccctcttcttcagctactccttctgccagggagactcgtgcttctacatcagctgctccttcttcttctgctgctccacagcgctctgagtcttcctcccccataaagaaggctctccgggctatcttttgcatgtgtgctaagacagctaagaagtttgctgatccttttgctgcttatgaggctgctcgagacattgctagtggtgagggaccctctggcactgctcatttcttcaatgaggagtcctcccactctgaggagagcagcaatgatgatggtggtgatgatatccctgacccagagtccgatgcacctacagagaatgtgcctacagatccagatgaggcagtggacgccgccgggcaagacattgactcacctcactccggcgacaccgagatcattccttctgatggagatggtgatgaggcttga

SEQ ID NO: 77580 - DNA, 1365 bp, Oryza sativa
  Clone ID: PAT_MRT4530_77464C.1
atggcggccatggcgccttcctccgtgctcgtgctcctcggcgtcgtcctcctcgtcgccggcgggaggctgtgcgagtgcgcggcgagcggcggcggattcagcgtggagttcatccaccgtgactcacccaggtcgccgttccatgacccggcgttcaccgcccacggccgcgcgctcgcggcggcgcggcggtccgtggcgcgcgccgccgcgatcgcgggctccgcctcctcctccgcctccggcggcggcgcggcggacgacgtcgtgtcgaaggtcgtgtcccggtcgttcgagtacctcatgacggtcaacctcggctcgccgccgcgctcgatgctggccatcgccgacacgggcagcgacctcgtgtgggtgaagtgcaagaaggggaacaacgacacctcatcggcggcggcgccgacgacgcagttcgacccgtcccggtcgtcgacgtacggccgcgtgagctgccaaaccgacgcctgcgaggcgctcggccgcgccacctgcgacgacgggtcgaactgcgcctacctctacgcctacggcgacgggtcgaacaccaccggcgtcctctccaccgaaaccttcaccttcgacgacggcggctcggggaggagcccccgccaggtgcgcgtcggcggcgtcaagttcggctgctccaccgcgacggccggctcgttcccggccgacggtctggtcggcctcggcggcggcgcggtctccctcgtgacgcagctcggcggcgcgacgtcgctcgggcggagattctcctactgcctcgtcccgcactccgtcaacgcctcgtcggcgctcaacttcggcgccctcgccgacgtcaccgagcccggcgcggcgagcacgccgctcgtcgccggcgacgtggacacgtactacaccgtggtcctcgactccgtcaaggtcgggaacaagacggtggcgtcggcggcgagctcccgcatcatcgtggactccggcacgacgctgacgttcctcgacccgtcgctgctggggccgatcgtcgacgagctctcccgccggatcacgctgccgccggtgcagtcgccggacgggctgctgcagctgtgctacaacgttgccgggcgggaggtggaggccggcgagagcatcccggacttgacgctggagttcggcggcggcgcggcggtggcgctgaagccggagaacgcgttcgtggcggtgcaggaggggacgctgtgcctggcaatcgtggcgacgacggagcagcagccggtgtccatcctcgggaacctcgcgcagcagaacatccacgtcggctacgacctcgacgccggcacggtcaccttcgccggcgccgactgcgccggctcatcctag

SEQ ID NO: 77581 - DNA, 363 bp, Oryza sativa
  Clone ID: PAT_MRT4530_77465C.1
caaaccctcacatcacacgcagaaatccgcattaacagcccgccatggcgttcacgctgaccaacgtgggcctgtctaccccggcggcggcggacatgctcctcgttaggccggtcgctcggagctggacccgtggtgtttcccacgtgttggccgcgccggtttcgcggtggtgaggccgagcgggccgtcaaccccgacggacatgtacatcatgatgtcggggagcatctacaaggctaatgaggcgtgcgcagtggacactgccagcgtcgagtgcgcggagcaatgagacgaggtgaaggagctgctcgcgacaggcatccactcgcgcgacatgctcaaggagaccttctatcctct

SEQ ID NO: 77582 - DNA, 1308 bp, Oryza sativa
  Clone ID: PAT_MRT4530_77466C.1
atgccgtcattcaggatatttgcgctggatgttgcatttgagtcagacgatggtggcaatgaggatgagcctggttctgagagcaatcctttgaggctttacaagacgagggctgttgatcttgatcctagacgtccaagggtgaactatctgaagaatctgctcaagtgtggaaaggacagaatggtgagtcctgacacaattcctgctgactctcaggatgacagattcaggaccttggtgcaagttgattggtataattctgtgatcatgggaagatctcatccagtggtagagaagaagtggctagactggcagtacatgtcctcaaagaacaacttagttttcaatgaggtgcgcaaggtgtgtgagcgcaagtacgtggcagatctgttggccttgcaatatacctggaatgaggaagtcattggtcagttctactccaccgctttctttggcaccaccaagaagggaattgattttgtgaagtggaccattcagggacagcagtatagggtctctatggcacagtttgctgcagctttggagttagatgatgatgacctgagtcgtccacatacctttgtagaagatgctttgtccccgaccagcactactttcttgtatgagaaggatactcccaaggattgtttggggactactcgtgagttgcgtccatactatagagtgctttattctatcttcaggtggtctttgctccccatagtgggagatgctacagctcttccaggtaggcatgcgctcctcctcagtcgcatgcgctacaacaagccagatttcagcatcatgaagcttatctggagtgagatctatgagacagtgtctcctccttctaccagggcgactcgtgcttcttcctctgctgctccacagcgctctgagtcttcctcccccataaacaaggctcttcgggctatcttttacatgtgtgctaagacagctaagaaggtgaagaagatagagaggcgtcagaaggaagattggattgcagcaggcaaggaggtctctgatatttttgatgatgaggagtttgttgatccttttgctgcttatgaggctgctcaagacattgctagtggtgagagtccctctggctctactcatttcttcaatgaggagtcctcccactccgaggagagcagcgatgatgaggagtccgatacacctacagagcatgtgcctaccgatccagatgaagcagtggacaccgccgggcaagacattgactctcctcactccggcgacaccgagatcattccttctaatggagatgatgatgaggcttga

SEQ ID NO: 77583 - DNA, 3816 bp, Oryza sativa
  Clone ID: PAT_MRT4530_77467C.1
ctattcaggcataccaaaacctgacattgggttggaagaccatggagatggcatcattgtttcagagccaacaaccgtcacgacgatctgcgaggagttcatgacagaccgcctgtttgtagaactgctagatcccattggaggcatggattgctgctgctggctcttttgcgggggtgacttgggacggaggctctcgatctctggagttgtaacgacaaggtgaggagcatctggaggtggattccgcccgccgcctccctgccatatttttccatccctgtccatgaagttcttgatgtatgcctctttatggaagtttgatgaagataagcctttcccaagagttagccagcccggacggatattatggtcctcaccaaagagttcgaggcgcctccttccaagagcaaaatgctcgatgatcctatacatgtcttctggcttttttgttgaaccatcagtaggttcctcagctattattatatcagtatcaatatttgcatggataatatgcccatcagtgctgcgccggacagttccttttatgcccatcaagcaatgctcctttgaatgctggaataatgtattagagtcatggcgcagacctggtgttgcatttttcttgttggttttaatccaacatatatcctcacacctacgaaatccccacttcttcaagcattggcggccttgttcaagaccaacaccatcaccaacccagaggaagataaatgagggtgtatcagctatggcctcaattttcaaattcataatctcatcaggagtccaatactctatatgatcagtgataccaggagcacgatgaacatattcctcccatggaggatctataagaataacatcaaattttgtgccgaaaaattctggggaaagcatatgatctttcaggtcacacttgtagtacattggtgctgaagctgagttagaaacaatatcatctttcctctgtatgagttctctaagcttaggatagtcctccactacacttgtaagctccagttctctgataaaattttgaggtcgcatgccagtatccacaaagttctgtgagtaatcattttgttcaccccgtgaaggagcttttccagcaggcccccgctgcggtgtccaacccgcaggtggtttatcttgcagtatttcatgatttggtgtagacaatggattaaaaccagttcctggtgcattcgctggagatcccaacccactgcctgtttgatttaagtgaatgctatgattggggccagctgctacactggaagtgaaactaggtcccgctactggagggataggaaggttggttggaacagaaagcatattcacatcaataccccgcgccccaggccaaacaagatgcccgggaaatggtggaatgaaaacaccaggtccaagaggaccgggagaatgggacatgtttggtccaattggttgcataggacctggtggcagaccaagaggtccaaatggtggaggtggcatcagcggcactggaagtcccattctttgagggtccctcacatttggtcttcctcgtaaacctctagagggcctactaccttttggcccttgctgaggagttggagaaattatactcccactgccacttggaccggctcctgaattatttgatgctattgctcctcctctcccagtatgagaatcggaaggaattttaccatccatgttttggacatcatcatagtatctctcctgtgcatcctcaccatttccataatttcttttgttctcctcagatggatcacttgttccaggtgttaaatcctgaagggatcccatgttgattcttcttccagaaacagagctctcccttccaaaatcaaggttcctattaggccgaatttctattgaatcagaactgtcatatcgatttccatatgatgaaggacctttgctgctctcatatctgcccctggaatctttcctgtacccagaccttccatgaaaatttcccccatctaacctttcttgtccatgcctccattctgcaccaacatcatagtcgttaggctccttcgaatcatgcctttgacgactcccccaatgttctttagatccttccaactctctatttctgtccctccctctataggacttataatctccatgagcatccactcttattttttctttcatgcttatgtttctttcattatctgagtccgaatgaccttggtcgccatcatccttttctctatgatgtctagcttctttgtttcttccatcccttgacaatgcatgcccatccttgtctacataaggcagcatatcctttgtttccacattatcacttattctatttgtaccttccacttgatccatgcatttctcatcgctctcttcagactttgcattgtaatgcaatgtattttgtctagtattatcaacagaatcaactatcctatcatctctagctggaggtgagtcgtaccttggatcaattgatcgtctatcttgatcattcttatcagttctggctgaaccctttctcctctcagtgtcttcccatctttcactcaattcattcctgtaatcatgagcctctcttgcgctcctgttcttactttgatcagcagaggacctactatctcttgtatcagctctatcagaactggtccgatcagaggacctgcttttactacgagagacatcatgaccggaagttctggagccagatcttcttgaagaatcccaatcattattgtcctctcttctcctcctgctgctatccccatctctgtccttgtacccgtcggacaatctcctctcacttctctcttctgggcttctccttgggaccttggacacccgtgattcccttcttacatcgtaatcatcctcatcaccttcatcatcatagatgtaccttgttgacttgccagaacgattttttctgtcttcgacatcctcatgttcgtcatcttccttccaactgctcctagcatcaacatcgtcatcagcatctctcttgtcacgacttcgactagaatcagacccttccattgcagaagctcggccgctccccgcgcagtcggcggcggcgaaggtgaccgtgccggcgtcgaggtcgtggccgacgtggatgttctgctgcgcgaggttcccgaggatggacaccggctgctgctccgttatcgccacgatcgccaggcacagcgtcccttcaaagcttatttttgcatttctgtatcttactatcctttctacataagtactgtgattatctgaacaagattccacgatggagtatagatgtttatcgatgtgatttgtgattctctctccggcttccacctcctgcccggccacctcgtagcacagctgcagcagcccgtccggcgactgcaccggcggcagcgtgatccagcgggagagctcgtcgacaagtggtcccatcagagctgggtcgaggaatgtcagcgtcgtgccggagtccacgatgatgcgggagctcgccgccgacgccaccgtcttgttgccgaccttgacggagtcgaggaccacggtgtagtacgtgtccacgtccccaacgacgagcggcgtgcttgccgctccgggctcggtgacgttggcgagggcaccgaagttgagcgccgacgaggtgttgacggagtgcgggacgaggcagtacgactgtaggagaatctctggccgagcgatgccgcgccgccgagctacgtcacgagggagaccgcgccgccgccgagcccgaccagcctgtcgcccgggaacgagtcggcccgtcgcagtggagcagccgaacttgacgctgcccat

SEQ ID NO: 77584 - DNA, 440 bp, Oryza sativa
  Clone ID: PAT_MRT4530_77468C.1
gcaatgttgtatgctgcgagaggtgctcatttgttatgctatcccggtgcatttaacatgactacagggcgcattgcactgggagttgctgcaaagggcaagggctgcagacaatcagctgtttgtggcaacctgtgcaccagctcgagacaccagtgcaggttatattgcttggggacattccactcttgttggaccttttggggaagtgattgctaccgctgagcatgaggagaccactataatggcagaaattgattattcattgattgatcagaggaggcaatttcttcctctgcaatatcaacgccggggcgatctctatcagttggtagatgtccagagatccggctctgatgagtagccagcctggatgcattgcgccactaggcgtgatccgtgaaaatattattcgtccgcgagatgcatgtgcccaccct

SEQ ID NO: 77585 - DNA, 2652 bp, Oryza sativa
  Clone ID: PAT_MRT4530_77469C.1
accagcacgggtccatagataaattcatagtgggctgaaactgtttatgagcttagctgttcattacatacgagataacgcaacatcagatgcaagcaaatactcctacctatacatagcattgctattagtaataccaaatgtttgagattgggactaatcacctcggtgattaattcagctcttccttccacgcacagccctgaggagatcattcatcaccagcggcgagctcgccatgagatgcttgtaaccctcggtcgccatgacggcgtcgaggttcgcggcgacgacctcgacgcacctcgccttgagccgcgggcacccatgctgctccgccagcgccagcgtcgtcgccgccgtctccacggtggcgccagcgatgagcttctcctcgcacatgatcttcagcccgtcgagcccgcacatgtccgccgccgccagcaggtgctgcgcgacgacgacgccgtcttgttgatcgagctccggcaccgagtcggtgtagatgaagccgagcattgctccgaacacctgtggctcgatgtccctgatctcgacgctccgggagctcttctccttcatgtcgccgaacaaggaggccatgaacaccggcgacctcgacgcgagtattgccctgtgcgccgggaagcacttgccggacaccaccagcgtgacgtccgcccccgtcccgcggcgcaggagctcgccgaggtgatggctcaaggacagaccacggccggagaacgggggcagaacattcgccggcgctgccggcgccgccgcagcgacattgtcaggtatctccgtgatcaccgtgatggtgcactcgacggtgaaggcgtcgtcgacgatggcccccgacgcctccagggcgctccggcgaaggatcaggacccacgcggagctctcgccggcgcgcttgaacgcgtgcgacacgtggccgtcgacggcggcagaggtggtggcactattgctgatgaggcggcatcggagcgcggccttgacgtcggcgcggcgaggaggacgagcttgagggcgacccagtggttggagtcggcgatgaggctggcggtgtagcggagctcccagtggtagccgccgacggggaggcgccgctctcggctcgccgccgctagtgcccaggaagccaaacgccgccgccaagctccccttcgtctcccgcgccgcctccggccccatcttgctcagctcttctccttcagctccggcgacgccttcttctccaactctggagaccccgccgaaggcattggaactagggtttagggtcccggcatcccgggtttggatagggtgtgaggcagagggaaggtagggggaagtataagaaggaggatcgccaggcttagagggattgccgtggaaggcgacggtgtttagatcctccggtgttttgaccccggttttgtctgaggtggtggccgagtcagcgtgagacccatgtgggccccacatgtcagaatgccaggtcatctcttcctcttcttctctcccttcctcgtctctccctctcacttctctcctctctgcagggcggctggcgggtggggaggaggtccggcagccggtggcggcgcgtgcgacctcggggtcggaccctcggagaggcccgggaggcggctgcggcggcggcgacgacgacgacgacacgagataagggaggcggcggcggcggcgacgcttgagaagggagaggcggccggtggcgccggcgcgggaagaagctgtcttcggcgtcgtgcccgctctgccctccaccgcctgctttgcccgccgctgccccgcgctcacacactcccgccggcgacgccgctgacggcgcgggcgtgagaactgcggccatggacgacgacggcgtcgacatcctcgctccccccgtccccctccccgtcggcgccatcttcctctcccgcagcgcgcctgcccgccgctcgtctgctccgtcggccggccgttccccgcgcagtcggcggtggcgaaggtgaccatgccggcgtcgaggtcgtagccgacgtggatgttctgctgcgccaggttcccgaggatggacaccgactgctgcttcgtcgtcgccaccattgccaggcacaacgtcccctcctgcaccgtcacggacgcgttctccggcttcagcgccaccgccgcacggccgccgccgccgccgaactccagcgtcaagtccggaatcgcttgttcggtttgcttcttgcaatttgcaggagtaacaaagcttatttttgcattgccggagtccacggtgatgcgggagctcgccgccaaagccaccgtcttgttgccgaccttgacgaagtcgaggaccacggtgtagtacgtgtccacgtccccggcgacgagcggcgtgctcgctgcgccgagctcggtgacgttggcgagggtgccgaagttgagcgccgacgatgtgttgacggagtgcgggacgaggcagtaggagaatctccggtcgagcgacgcctcgccgccgagctgcgtcacgtgggagaccgcgtcgccgctgagcccgaccagcccgtcggccgggaacgagccggccgtcgtggtggagcagccgaacttgacgcaccaccgcagccgcgtcgcccgtcgccgccaccaccgcagccgcgtcgccat

SEQ ID NO: 77586 - DNA, 1215 bp, Oryza sativa
  Clone ID: PAT_MRT4530_7746C.1
atgaagatcagcttggcaaaggcatcccaaaaaaaccctccagtgcgatatgatgcgctctcgctacacaagtctcgacaggcactctctcgctccacacgaagaagctggcacatggacgtgacggacctgcctgcagtgtctgtcagtgcagcagctagtttgaaagctcgagctagctcgttatgctcgcgaaccaatccaacaagacaacaagctccggaggaggggacctgcgagtgtaacctgcgccttcttgcggctggcgccggctggggaagtgcggtggcggcgactggcggcggcggccctagcgacttgcagcggcggcggcgcgagtgcctagcgatggcgcgcctgctggggaagtgcggctggcggcggcggcggctagggaagtgcgacggcggcggcagccctagcggcttgcggcatcggcggcgcgagcacctggcgacggcgttgacgcgagagtcggcgcttcgacacctcggacggtggggcaacaagttcggcaagggcagttgtgcgctagcgaaagtcaaggagaaggtgcgcgctggcggaggccgaggaggagctacctccgctgctcgagctcctctgccttcactcgctgcgggcttcacctcggccggggtatacaacatcgtcctctccactcatcgtcctccacctactcaccattctccactcatccgtagcaatggcgtcctccaatccaccaccacccacgcgccccggcggccggccggccacgcagacgcatcatcaggagccgagccggagcgcatgtactttgtcctcctgaagccgcgagcagacgcccgcatgatggacgacggcgagctgcggagctggcacatgtcgttcctccccggcgacatgacagcctccggcaagcggcgcgcggctcgtgcactcgtaccagcacgtcttggatggctttgccgcgtggttgacggaggccgagctggaggcggtgtccatcaagcccggcttctccaagtccattccggacgagccgatgtacctcgtggtgatgccagacagaacaggggtcagggggggtgggtcaccgactccggcagtggggtgatcatcggagtgatcgacaccgggatcaattcgcgtgcaacaacaaagttatcggcgcccgatcccactgttagagataagaataaaagtaggatcgagtataagtttagcaagttg

SEQ ID NO: 77587 - DNA, 1275 bp, Oryza sativa
  Clone ID: PAT_MRT4530_77470C.1
ttttttttttttttttttttagagcatttaatttcgactttttattattaccatgataatgtttatagtaaatcaatttggcaaggtacgtgttacaggtcacctcttcacacacgaagtcaatgttcctgggtgaactgctgcggataagggtgggcacatgcatctcgcggacgaataatattttcacggatcacgcctagtggcgcaatgcatccaggctggctactcatcagagccggatctctggacatctaccaactgatagagatcgccccggcgttgatattgcagaggaagaaattgcctcctctgatcaatcaatgaataatcaatttctgccattatagtggtctcctcatgctcagcggtagcaatcacttccccaaaaggtccaacaagagtggaatgtccccaagcaatataacctgcactggtgtctcgagctggtgcacaggttgccacaaacagctgataacaaaatgtccggttactatttgaaaccactaaattggcaacatgaataatgagtttctgattgtctgcagcccttgccctttgcagcaactcccagtgcaatggccctgtagtcatgttaaatgcaccgggatagcataacaaatgagcacctctcgcagcatacaacattgccaattcctggaaacgaatgtcataacaaatacctataccaatccggcctacatctgtgtctacaacagtaagatcctgcccagcagtaagagtcttcgattccttgaatgtaatctttccaggaatgtcaatgtcaaaaagatggatctttctgtgcttgcccttaagctcgccatctgaaccaaagacacagcatgtattgtacaacttgttaccagaacgttctgatatggatccaccaacaagagtaatttgcaagctgcgagcaacctctgacatcattgaaaatgaaggagctgcatcaccaccggcttcgatgtcttcggcatattctggaaagctgtcatttgaatatggaccattccatatctccgggagaagcacgagcttggcgccgcccgccgcggcagcctcgatggcctcgcgcgcccgcgcgatgttgcgagccttgtccgccgtgaccgacagctggcacagcgccaccttgaaccaactcagaatcacccggactccactcgaaaaccagggaaagcggagtacgaccttggagagcggcggcgccgggggctggacggcgggaggcgaccgcgcggcctccgggcggaaggaggcggccgtggccat

SEQ ID NO: 77588 - DNA, 816 bp, Oryza sativa
  Clone ID: PAT_MRT4530_77471C.1
agcatgctactcacgtttttatattttcgctcgatgctcacacgtacgcttgggtacaacggacaactgaggcactgaccactgacggagaaatttaccggtcaatggccgtcgtcggcgtgggcagcgtcaagttcggctgctccactgcgacgagccggctcgttcccggccgacaggctggttgggctcggcagcggcgcggcgtcgctcggccggagattctcctacagtcatactgcctcgtcccgcactccgtcaacacctcgtcggtgctcaacttcggtgccctcgccaacatcaccgagcccggcgtggcgaccacgcagctcgtcgccggcgacgtggacacgtactacaccgtggtcctcgactccgtcaaggtcggcaacaagacggtggcgtcggcggcgagctcccgcatcatcgtggactccggcacgatgctgacattcctcgacccagctttgatgggaccactcatcgacgagctctcccgccggatcacgctgccgccgatgcagtcgccggatggcctgctgcagctgtgctacgaggtggccgggcgggaggtggaagccggagagagaattccggacttgacgctggagttcggcagtggcggcggcggcgctgaagccggagaacgcgtgcgtgatggggcaggaagggacgctgtgcctagagatggcaacgacgacatctcccacgcccacatcgacgcctgcaggcgccgggcagcacgaagttggcggttcccggtggcgcgtcgacggagggagcaggagagcggcggcccgcgcgagaggaggcggc

SEQ ID NO: 77589 - DNA, 898 bp, Oryza sativa
  unsure (1)..(898): unsure at all n locations
  Clone ID: PAT_MRT4530_77472C.1
caagtaatacaagagcaatatacagctagcagccgcatctacatgctagcagcaacaagatgctatagacccatagcgagtagagttacagtaagagcagacagatagcagcacaagatagagcaacccccttactataccaaatacacaccngtagttatcaaactagaagaaaactagcacaaagatacatagccaaacagacaagtagcatagcacaaacaagcctacaagagaatagaatacagccaacacaacaagatactccaacatagcacaagagacacaatataacgacacagtagataacaaaaggcataatatagatagccaagacacgacatcaacagagacacaacacaacaaaatatataggcataaaaacagatacataaacatatacagnaataccaagaaagatacaaaaagacatacaaaaagacacacaaaaagacatanatagatatagagacaccatcacaaaacaatagcacagatacaaaataatagacagagatgatacataacacacaaaagacataacaacaacaacataggcatcacacctngataaagaccantatacacaccaccacagataacaagatngngataatttcttagggattattattgaacaatanngtgaagacacgataatataatatgataccacgggagaagaaaaaaatataagtcatagcatcatcgtgtgtgacaagattgaaacatcgcgggtgatacacaatctganatataaaaatgtcaatagcacagataataaaaaacaaaaaaaaaaaaaaaaaaccggggttccgccggggcccacccgccggggtggaagcctccagcctttagtaccctttaatgaggtaatacacacaagatataagctacc

SEQ ID NO: 77590 - DNA, 111 bp, Oryza sativa
  unsure (1)..(111): unsure at all n locations
  Clone ID: PAT_MRT4530_77473C.1
tnatcacgttcgttgtcatgcactctgtcaccatcttcaaaggctggccgttcaaccctaaagacctgtatgcaaatgagcacaccgtatactgatagctatatttactga

SEQ ID NO: 77591 - DNA, 710 bp, Oryza sativa
  Clone ID: PAT_MRT4530_77474C.1
tacgtgagaaatgcgcgggttgtttcagcaagccgaacattttaaaattcgagcaagctgcaaacatagagctacagagattacatgagatcttacaatctttcaccccgagagacgaaccagacaaacgaagaaatgagaaaggctcaacgttaagtttaacaactaaacagatatatgatgctaattaagctacctcccggagctgtctctccactatgggatgctatctggaaatgcagagccccactgaaagtgaagttgtttgcgtggctcctggtcgaagacagtctgtccacaaagaaaaatttacagaagaagaacattgttcccactggcacctgtgacatctataacgaaggaaccgaaacgaccagccacttttgttttctatgcccgtttgcaaaaagtttccgggacaaaattggagtgcaaccgatgattcaagatgtgcatctgtttcattagctgaagctagtacatggagtgcctatacttcattttcagattttctacctcctatgtttctgggcaatgtggaatcacagatatgatgttgtttttagaggtcaagccccctcgattgcttcctggctgcaacgttgcatgcgtgaggctgctctgtggacagaaaacataaagactgaagatcgacatgtaatttctgtttggaaagaaatcttatcttccccctacaaactctcaattca

SEQ ID NO: 77592 - DNA, 258 bp, Oryza sativa
  Clone ID: PAT_MRT4530_77475C.1
gctactgcaaggccgtcaagaccttgacccgtgaccgcctatagatctgccaggaggaggacgactggaagcgcatctaagaccggatgccctgcacccacttaaaggagctcataaaagaagcccatgacaagcataagctgatcgtcaagactatcaaatcggacccatggagtgttactcacgactatcaatgcaaggttattgaagatgacacacttatctcgaaacatggttcgtaaaataactctgttgcac

SEQ ID NO: 77593 - DNA, 239 bp, Oryza sativa
  Clone ID: PAT_MRT4530_77476C.1
gttttgctttggctcacggtcttacacgctcgcgctggtgttttgatcaaagatgacagcggtacatagctttaggggcaagtgaggacgctggtgctagagctatagaactaccaggtgatacgggcggacccactcatttatgaatggatcattgcaaaagaaagaatgatataaggatgactatgaggaggacagagagcgtgaatggagagacataaatgaacaagacggacgtg

SEQ ID NO: 77594 - DNA, 418 bp, Oryza sativa
  Clone ID: PAT_MRT4530_77477C.1
gttcgaccattgttttcattacatacgagttccaggaagcgtgcatcatagattctgccctgtgcaccttgtgcaagactgaagcgtctactcagcagtatataactgagggcccacctaaaccaaagcactgtataccgacacgcaactacatgttacaacacaaggatgccttgggcatatacaaactggctacagccactctcatggtcctctaggaaccggtcagcgacactggtgccactgtggacctgagacaaacacagatagctgggggaacctacatcacacacctctcagttgttgaaggataccagcgcatacaaagaagacctctagccgaaatatgatgaggaaaactagactctattcagcctgaggcatataacaaggctgatcctgacgtaggcgaaatgac

SEQ ID NO: 77595 - DNA, 563 bp, Oryza sativa
  unsure (1)..(563): unsure at all n locations
  Clone ID: PAT_MRT4530_77478C.1
ccccacacgaaccttgcgaccacggccggccattagtgaagtaggactaagagcctaagacaataagtgatggaatagataagggacaccacgaaactaaggtgaaagcttgagtttctcagtaagataaaaaaataaatgaaggggagacctaaatttagatggactcaaatcatcaatgtcgttaagaaattttttcttacgactaatgactgtatggtaccatatgacccggccggctgctatgcctcttgaccctataagtgttttcttcttaacttgtagatgacgatgatcagtagttgaagtacatcctgctgctcagtggctcgagccattaagatcggagtaactcgcttagatccattggaaaattcaaaaagtgaaaacgaagaaaacctaagtgcctaatcagaaattttggaccactaatatacataggaccataatagtaagtagacatataatgaatgtagatgtatataataactaagaggcatcaacactagatagtatctaataacagcctangatgaagatagatgcatttgatgaacgatgat

SEQ ID NO: 77596 - DNA, 159 bp, Oryza sativa
  Clone ID: PAT_MRT4530_77479C.1
atgcatcaaggaatcaaggaatagaaggaattatcaatgacgagagtgcaggtgaagatacagaaccagaagcttgaggagctgattgtccatcatgtatctggcgtgatcgtggagtttctggttcttcaatttgattccgaacgactgtcccactga

SEQ ID NO: 77597 - DNA, 555 bp, Oryza sativa
  Clone ID: PAT_MRT4530_7747C.1
atggcggggctcgcgcacctcgtcctcgccctcctcctccccctcgcgctgctcccgccggccgcgcgcggcacggaggagacgccgcagtacacgacggtgcacgccgagtccgacttcgaggtgcgccgctaccgcgacaccgtctggatgtccgccccctccgacgacatctccttccacgtcgccaccaagctcggcttccaccgggccgctacactcgtctgcctactttgtgcggctctacttaccagcgaagttccaggcttccctcctgtgcctctccccgaactgaacctccacccggataggtggccaagccactgcattgcagtgaggagcttctcgggttatgcacgggacaacaatgtcgtcgaggaagcggagaaacttgcgttgagtttgagccggtcaccatgggctaattccacaaactaccctagcaagagcgcctactcaattgcgcagtataacaacccctttcgcatcattggccgtctcaacgaggtatggttcgatgttgattgcaagtctactggtgttgaggcatactaa

SEQ ID NO: 77598 - DNA, 495 bp, Oryza sativa
  Clone ID: PAT_MRT4530_77480C.1
atggccgcacgacctgatgaggacatcccagctacacttgacgtaaacaagggtgatggtttacgtcatacatcacatgaagaaaatgaagatgacgtaaaccaagttgatggatcacatctccgcaagaacgatcaagcatatcatggtccaatcatgcgcagctgtactaggataatacaacaagagttgaactcgctctttgctcaacttaacccaaattttagtgagaattttatactacctaaatgctctatctttgtattaccaaggtttacgcccaaggacatcatcactatgccaagaaggatgagttacgttgaggacgacaagggtaacatcgaggaggaatcaacccatgcccaaccagcagctgtttacgccaacaagaagatggtttatggtgcaaaggctcaaatttcaaggcttgtacgacccagccagtcgagagaccgggtgcatggcatacatggttggaaagagggaaaagtctag

SEQ ID NO: 77599 - DNA, 111 bp, Oryza sativa
  Clone ID: PAT_MRT4530_77481C.1
caaggacataaagaagcaaacatccataatatcgacgtaaagcacaaccattgtactgtaaatgttcctgcttccagtggtacattcttcaaccatgtcaagaacagctga

SEQ ID NO: 77600 - DNA, 1572 bp, Oryza sativa
  Clone ID: PAT_MRT4530_77482C.1
atggcacaaatcaagttggacttcgcattggagacatccaataagtggcagatcactagtggcccattgctacgttggcagaagaagctgaagcgtgctactgaagagtgcgatgacacaatacgcatgtgcaggcagcgtgtccaggaagaacaagaggccgaacaagtagcaaggaattccttctttcctaggcgaattgcgcatgccaccaagtcactgatatcatccatcttccatggcaatatagacgagccgagtagatcagttgttcgaagatttgagtggtttgcagatggagctaatgactttctgagatctgtggagtatggaggcacaccacgtcattacttgttcttcgaccctcttattgggcatcttcttgcagtgatggcactgcatctgaggaatgcaaaagctagagtgtaccagatgctttggaagtctaaacatggcggtgcatatcttgaggttgtgaaggcaaccatgaacatgacgagcacacggagaaccattcgaggagccaagaaagcaaagctgctgcgtggaatggatcagagaacgcagaggcgcacagttgtgacctgtgacttcatctgtgacttccttaacctctgggctgctcatgcgcctgtccagctgcagggctctatccttgattggattcagaaagaaaaggaaacagagaaggggtttatcaacaagaacatcctgatgtctgaagtagttgtttccgcggtaatcagcgaggctgtgagcagggtctccaccttcttcatcaacaagcataaacggaaattaaacgaggaagatggcatggagaggctggagatggcacgcatcagaatggaggcagccctggagatatccagcaggtggcctccggtcacagacgcctcactcctgcgttggaggaagaagctgaagcgcacatctgatgagtgcagccaagtcatggaaagatgcaagcgtcgtgccatggaagatgatgagatggagcaggaggtcaggcagtgcgccttccctaaacggatcgcccatgccacaagatcattcttatcatctttcactggacagaagaaagttgatagcctgatcaccacttcaaccattcagaagtttgaaaggctcgctgatggtgccagcgagttcctgagattcatggaattcggtagcataggcaggaggatcaactacatgctcgttgatcctcttaccgggcaccttcttgcaggcaaagctctacggtatgaaatttctcaaggaaatcagcactacctagcagcatggccaatgagtttcgcagagcgaggactagaagccggggtgttgctttggtaccagaaccatgagaggccggagaagaacttcattttcggaattctactacgtttggcagcaagcacgaacgtgaccgggattgtggccaggtgcttggagttgttaccacccaatttcaagcctgttgctgaagctgcaaagcaggagctcactcagagactcaccatgctcgcccaaactccgcatgctgccaaggacacaatcaccatggtagatacccggagccggtga

SEQ ID NO: 77601 - DNA, 476 bp, Oryza sativa
  Clone ID: PAT_MRT4530_77483C.1
agctgtaacaaaatataatcaatttttctcttaacacccttagattttggtgtagtcagcagttactccagaataagataataaattgcctatataagccactgatctatgctttctgttgccgtttagtgaacagttgttctgctgcacacaccattaacccgactccagtagagaacgcgaccagtttgatccatgttcagtgaagtcctccagccgcttggcataattatcttctgtcgtcaacccatgcaatgtacaattatatttacggcatcgtatatgttttctttctgaaaatgcggttatcaggcgaatgctaaaaacactcgcaaaaccctgaatgttgttagactcatgcaagtttgtcgcggctcttcaatgatctgattatactcgtcaagaactgcttttcaccacggtatatctcgagtgatgagaaacccaggcacattatgcctatcgccatgtgaatg

SEQ ID NO: 77602 - DNA, 111 bp, Oryza sativa
  Clone ID: PAT_MRT4530_77484C.1
actagtggcttctacctttctagtgtgggtccgtttgtgcataaatggggagcatgggaaaattctttgcggcggcgcatatagctgccatggtggtcatatcagagcgca

SEQ ID NO: 77603 - DNA, 102 bp, Oryza sativa
  Clone ID: PAT_MRT4530_77485C.1
atgtcgccgcctcctgtcgcaaacgccggtctgaccgccgcgatgccgtcggtcacccgccggtctgaccgccgcgatgccgccggtctgaccgccggttag

SEQ ID NO: 77604 - DNA, 560 bp, Oryza sativa
  Clone ID: PAT_MRT4530_77486C.1
agtggatccccgggctgcaggctcatgctacttttgtccaaatgtccatcaattcatccctgattgcatctgatctaccacgacagaaaaaggtcaacgtctatctggatacagagctagctaaccaagagccacatcggttcacctaataagctaaatcaaaagctaaaatttgaatttctgaacttgatttaattttggagttcattttaagatatttttagcattatttctttttagcgttggcttttaagtcggtacgaacaaatatataaaaaatttacctataaattatttattattccttaataagccgggcttattagggaatatgggtaaccgatgaggcccaatattccagctagctatttgtagttttggagcgtccgaaatctcaaaaaactttactcaatatcaccatcaaagatggcatgccactaaacagaggcaccactaagcaaccactaactaatgcagtatcgctagacaaggtctgttgtctcaacctctttactcgttgacctcaatcaaatctgcgtgttgtgtgcggcagaggatcg

SEQ ID NO: 77605 - DNA, 234 bp, Oryza sativa
  Clone ID: PAT_MRT4530_77487C.1
atgggtggggagggaacagctccccgtagctctgatttgatgttccggcgcgacaacatcgtcttcagcttgctagtcgactgcctcgtcttccggacagcagttcattcgccaccattcatgttcttgggtctttatggatatcctgattccgaccatgcgtcgccaccagaggcagtggtggtaggtgacaccaggttcatgccaccgacgccgcagctggagagtgcctag

SEQ ID NO: 77606 - DNA, 1632 bp, Oryza sativa
  Clone ID: PAT_MRT4530_77488C.1
cgagtccactttctcaagcgctaatctaatctacttggggcagtggtaacagggggaggccaacgcgggggaaacagctgacgcgctccgctccgttccgctgccgccgttggccggccgggcggtcgctgttgctgacttgaccagagacgagcagcaagggggcagttggattggattagagggtgcttttatatagaggagcacgaggaggaggaggaggagggccatcaagcatatccatctccgattcacagattctttctggagatccatcatccagcgagagcgagagcgagagggagaggaagagggaaagccgccaccgccatgttggggcatctggttgggctggtgaaggtgcgggtggtgaggggcgtcaacctcgccgtccgcgacctccgctccagcgacccctacgtcatcgtccgcatgggcaagcagaagttgaagacacgagtcataaaaaagactaccaatccggagtggaacgatgaactcaccctctcgattgaagatccagcagttcctgttagactggaagtgtatgacaaagacacattcatcgatgatgcaatgggcaatgcggagctggacatccgcccattggtggaggttgtcaagatgaagattgagggtgttgctgacaacacggttgtgaagaaagtggtacccaatagacagaactgcctagctgaagagagcacgatatatatctctgaggggaaggtgaagcaagacgtggttctcagactaagggatgtggaatgcggggaaattgagctccagcttcagtgggtcgacatcccaggttctaagggtgtatgaactctgtactctgcctattgcttacagtcttgcatagctcgcaagtccaactctaagtttatcagtggacaatcaaataagcaacagcttatattgatgagattcttttactgtccttgaggaggcagatacctcccagtgcctcctcaatggctgtaaaatcattcttatgttgacacagcaagtgtctcgaagatcccccactaggtgtttgggcagagcaaagttgtacaatatgtctgcaaagtatagtttggtgttaccctgtctgtagaaaaataatcagtggcaggggttgtaactattgaaactttgtctgtctttcttcttgtacgccaaagaccaatgctatctgcgattaatcttcctaacttacatgcaaaattaaaatgtggatggtcagccagtttacatgcaattttgccagcaatcatgtcatgttatgtggagaacatgttagtgctattggtctcagcattggaataactgcagtcaagatacactacaggacgaccattttactagtggtaaatttagagttttgaactaggaacatccgaacagacgagtataagacagtatgacacctaactactgcagacacccttcacaatatcaaacccgggtcaacacatgagacggcaggacaataaaatcagtggtaatacttagaaagttaccttctgtttcatacgtatcaaatcatacaaattttaagactggccaaattgtataaaaagttagtaaatatctataacaaacggtggcgctaattagcgcgttgggagcaaaaaaaaaaaaaaa

SEQ ID NO: 77607 - DNA, 1680 bp, Oryza sativa
  Clone ID: PAT_MRT4530_77489C.1
atggcgccagctcgagtccacagcaatggccgcctcctcatgcttctcctcctgctcgccgtcgccggctttgcggcggcgcagccgagccaggacaatcctccggcgggctactacgcgaccaacttcagcccgtccatggccatcgtcatcgtcgtcctcatcgccgccttcttcttcctcggcttcttctccatctacgtccgccactgctacggcggccgcggcgactactcgaccaccccgctgccccggtccggcgccgcgcggtcgcggcggcagcgcgggctcgaccagtccgtgctcgcgacgttcccgaccatggcgtacgccgacgtgaaggcgcacaagtccgtcaagggcgcgctcgagtgcgccgtctgcatcagcgagttcgacgacgacgagacgctgcggctgctgcccaagtgctcccacgtcttccaccaggactgcatcgacacgtggctcgcgtcgcacgccacctgcccggtctgccgcgccaacctcgtcgacggcgcgtccgagccggcgagcgatgtcgccgccgagctaccgacggcgcccgctccgcgcccggaaggcgcgacgccgtccgaggcagcagcgccagggggggaggcgccggcggcggcggcggcggcggcggtggtgatcgacgtggaggagaccgaggaagagaggatcataagagaggaggcggccgagctaacgcgcatcggcagcctgaagcgcgcgctgcgctcgaagtccggccgcgcgcccgccgcgcgtttcccgcgctcgcattcgacggggcactcgctctcctcctccgccgcggcgagcgccggcgccgagaggttcacgctgcggctgcccgagcacgtgctccgggaggtcatcgcggcggggcagctccagcgaacgacgagcctcgtggcgttccgcgccggccgccaggggagcacgcgccgtggcctcaggtcgggaggcggcggcggcggcggtgaaggcagcagccgcgccgggagaagcgtccggctcggccagtctggacggtggccgtcgttcctgccgcggacgttctcggcgaggctgccggcgtggggatcaaggtcgacgcggaggggcgacggcgacgggtccagcaagggcggcaggactgccggctccggcgccggcgccggcggcaacacgacaacatgctcgccgcggatctcctcaccgtgctcgccgcggacctccccaccagtgccgccgcacctctttgtcatggaatgctacctcggcggcgccgacgcgtgcgccgagctcaccgagaacggccaactgctagtgatggcaaagaggctgggggaggaggggctgatgcaggagttcgctagtagggtccggctgctcatggacccggcatggacgacgccgtggaggcggccgggaggagaagcggggcacgccgtcgatgcggcggcggaagaggaggaggacgccggccaccgtactgcggcgggatccggcggggacgaggaggacgacgatgctgacaaggaggagaggatcccgtcgggaagagcgggcacggggcacgccgatgctgatgaccaccgggagaagggagagaacaggggaaataaggagaggaggctaacgtggataaccctaacatgtagggcccacggtaactcagccgccacgtag

SEQ ID NO: 77608 - DNA, 1008 bp, Oryza sativa
  Clone ID: PAT_MRT4530_7748C.1
gcagtggaaacatcacattagccacacaatgacatgcaagatcagtctgaatcgagcactcgagcttgcaagatgtgagtacatagtggatcattacaattgacatctgctgtgtcatttcatcactgatggattgacacaccacaaacaccccccagctttatcatcagaattcatcaccatgaacacatatatacaaagatgtacatggcttatgtggtactaacacacaataagccttttttttttttggggtgatggtgcacagtaaaaccttcgttttagtatgcctcaacaccagtagacttgcaatcaacatcgaaccatacctcgttgagacggccaatgatgcgaaaggggttgttatactgcgcaattgagtaggcgctcttgctagggtagtttgtggaattagcccatggtgaccggctcaaactcaacgcaagtttctccgcttcctcgacgacattgttgtcccgtgcataacccgagaagctcctcactgcaatgcagtggcttggccacctatccgggtggaggttcagttcggggagaggcacaggaggggaagcctggaacttcgctggtaagtagagccgcacaaagtaggcagacgagtgtagcggccctgcacctgggacgatgctagttaggatgggagttgtcatcctgatcctggaggagttaaggttcgcgcccatcaggtactggaacaatcggtggaagccgagcttggtggcgacgtggaaggagatgtcgtcggagggggcggacatccagacggtgtcgcggtagcggcgcacctcgaagtcggactcggcgtgcaccgtcgtgtactgcggcgtctcctccgtgccgcgcgcggccggcgggagcagcgcgagggggaggaggagggcgaggacgaggtgcgcgagccccgccatggtcgccgccgcctcagtcttcgctccgagcggctgcttgcttgcttggggaggcgatcggcggtggatcggacccggccgg

SEQ ID NO: 77609 - DNA, 1041 bp, Oryza sativa
  Clone ID: PAT_MRT4530_77490C.1
gtgtgtgtttttttttttttttttgtacagaactgcatcatatatatatagagtacatgcagccagaccagctaacaataagcaataaccagagcacgtacataatacactagctaaaggcagataattgaggagtacagagtacctttttttttaattcgtaatgtactgtactaggtacctgttcctcctctgcatcctctcgttgatgatctacttagtcaaccagattaattactaagtaattcagatcgagagattaatctgcaatagctagctgggcgtggagcgaggagctgtagccgacgacctggacggctgcctgctgctcgatctcccaacgcagcttgggcgtctccgggtcgccctcctgctacaccggcacgtactcctcgagcttgtggacgagggagggggcgtcgggggcggagacgaagaggtggcggtgggaaggggggatgaagccgtcggcgacggccttgtcgaccaaggcgaggaggaagtcctagtagccgtcgacgttgaggaggccgacgggcttggcgtggatgcccaactgcgcccacgcgatcacctccaccacctcctccagcgtcccgtaccctcccggcagcgccacgaacgcgtccgacctcctcgccatctccgccttcctctcgtgcatgctccccacctcccgcacctcccccaccgtctctcccgttacctccttgcccatcagagtggtaggtatgacgccaatgacgtggccgccgccgttgcgcacggcctcggcgacctcccccatgagacccaggctgcctcctccgtacaccaaatccaccttcctcgccaccagctccttgccgagctagcaggccgcgtcgcggtagctgcgccgcttgccggagctgctcccgcagaacacgcaaacccgccggaaccgggactgatgcacgccgccgttcatgtccgctgccgccgccgcctcttccatcgatcgatcactctcgctaactactgcgggcgatcgatcgatcgaggtgaagttgaagcgaaagc

SEQ ID NO: 77610 - DNA, 867 bp, Oryza sativa
  Clone ID: PAT_MRT4530_77491C.1
atgaatggggatcggaagagaggaggagatggaggcgtcgatttatacgcatcggacggccacgacgccgattccgactcggaccctttctttattttggattcggactccgactcgcacttggtgagtaaaggagacgtgagcgtgacgtttacggaggacaggaacccgtccttgctggcggcgtccctgcgtctccacctgcgcggctatgcttccctgcacgtaaccacgtcttttcggcgaagatctggcaggtcccgcactggcagtgagacgccagcgaagaccacggatggctctctctcctccgccatcggcgatggcgatgaccacttcgaccgcctccccgacccacttctactcgtcatcttcaacagtcttctcctagatcgcacgcatcgtgctcggcggcatcgtcaagcccatccaggcgcttggccagatactctgcccagccaactccgcctccgtcctcgcgacatccgtaccctccacctgcagatcgagctcctcgccggtgagatcagcatgggagaatgtgttctgctcaaatggaaggcggacttcgggtccacacttggcagctgcattatcctcggcgcgtcctctgccagtagcaaggatagcagctacgtaatcttcggcgtgccctccgccggcgaggacggcagctgcgtccacgtcgccttcattctctgccgttgtgggctacggcgccgtcatcctctgccgccgagggcatgccgccatcctcccccggtgtcgcgggccacgccgccgtgcactctacgatgggaggaggggagaaggagagctggagaaggggaggagagggagaagagaggggacgaaggggagagctga

SEQ ID NO: 77611 - DNA, 365 bp, Oryza sativa
  Clone ID: PAT_MRT4530_77492C.1
ggccatgccagcttgctgcctgcgggggtgatgagaacacaactagctcggatataaccataactacattatgtattcatcaaccaaagcctgacattcaaatggatctagatgctgatctagaaggaattttagggcccatgagtacttgttgtaaagcttatgaagtttactttcaaatggatttcgtcccacgtcaaaactcccaccaagctatcggaaatctacaaaacaagctacggattagccttctcagtgatgtcaaccggatttcggtacagctgataaccaggggagaagtagtgctgcgattgtagggtttaattgcgatgaatcttttaagcctaattgctctatgatttgac

SEQ ID NO: 77612 - DNA, 330 bp, Oryza sativa
  Clone ID: PAT_MRT4530_77493C.1
atggcgggtcgcatcggcgtccacgtccaaccgcggctcagcaggagccagatcggcaaccacgagttccctcacatgactaataaaatatacatatcagttcgcgtgaacgactccacggcgggaggtggctcaactgacagcaaggcggtggctcttggggcatgggttgatgagttcatgaacacatatgacatcgaccattggaagaagcagtgcgaaaggcaggcacatggcatcgagtggatttatctcggctgagactttctcaggaactccgtagctccggtgctcacggtggatgttgcttggttcatcgcgtagagacat

SEQ ID NO: 77613 - DNA, 471 bp, Oryza sativa
  Clone ID: PAT_MRT4530_77494C.1
atgaggaggaggaggctacgcattggcaaggtgctggactgcttctccttctccatgtgttgcgcgagaagcagcggctgcctctgcttgcgcgcgtcggaggaagacggcgacgaggaggcggccatggagaggaagtccctggtgagcagtagtagccaggtcgaccaggtgatcaggcttcgcgatcttgttgatggcacgaggacactcgggttccatctagaaccaaagactgtggagctcaaggtgtccatgcactgcaatgggtgtgctaagaaagttcagaagcacatctcaaggatggaaggcgtgacgtggttcgaggtggatttggagaagaagaaggtggtggtgacgggggacgtgacgccattggaggtgttgcagagcatctccaaggtgaagttcgcgcagctgtggccccttcccccccaacctgctgcaccagccaccgtctcctccgcctag

SEQ ID NO: 77614 - DNA, 658 bp, Oryza sativa
  Clone ID: PAT_MRT4530_77495C.1
ggtacgcctgcagtaccgtccggattccccggccgcgaacaccggcaaccgactaactctgtctgaaggaagctaagattattaatcagtgagtagctagccatggctgaggagaagaagcaccaccacctgttccaccacaagaaggacggggaggaggagagctccggcgtggtggactacgacaaggagaagaagcaccacaagcacctcgagcagctcggcggcctcggcgccatcgccgccggcgcctacgctctccacgagaagcaccaggcgaagaaggacacggagaacgcgcacgggcacaaggtgaaggaggaggtggcggcggtggccgcgctgggcgccgcggggttcgccttccacgagcaccacgagaagaaggacgccaagaagcacgccgccgaccaatactagatcgatcccgatcgaatgaacgcaagaacgaacggtttatatgcttaattactttctccccataattacatgtatgcatgtggttgatggcttaatttgcttcttcttgttcgtcgtcatacgtcgtcgcttttacttcgtgttcatgtacattaattctgtatccgcactgagtattaaataagtgcgtttgtgctgcacacagaaattttggtttcgttttaaaaaaaaaaaaaaa

SEQ ID NO: 77615 - DNA, 403 bp, Oryza sativa
  Clone ID: PAT_MRT4530_77496C.1
gatctccatacagttacgagctgtctcgacatgatccgcactatcgttacacatcagtggacaacgatataagtatctggaactacaagtgggtgtcgactcggcatcgagccgtgctggtggcacagcgtggcgctgcatagcgaggatgtctagctcgtcgccgctaacgatccctatcatgaccacctagtccatgacatacatggtcaagtatgacaccgtacacggacagtggtagcatcatgaggacaagcgtcaaggactacaagaccctcatgtctggcacgaaagacgccgcacagatcaggtggaaggacactgaggagataccatgggctcgcgttggcgctgaatacgttgttgaggatacaggtgacatgaccgacatggacaaggcgac

SEQ ID NO: 77616 - DNA, 417 bp, Oryza sativa
  Clone ID: PAT_MRT4530_77497C.1
atggtaaaagaagaagagggaacacatcgtaacgatgcctcaaaggaggggaacggcgccgaaggcgttgccatcgtcaagctggccataagacacggcaagtctttcgcctacagttccctatcctctcctacacaccgaaccaaatcgcacacgatcgtcgaagaatgccgcactgccccgattcaccgaccttcctacgaggtgacgaccgagcaccccggagctccccgcgggcacaacctcactgacgggcgcagccaaccacctccaccatcaacattgggcgccggcgccgcaaagccgcctcggctcctcgcacgatgccaccaccaccaagcacgccggcggcattcgtcagctgccagcctcaccgctggcaagccgtgtcgtcacccgcatctcccgcaccactag

SEQ ID NO: 77617 - DNA, 1756 bp, Oryza sativa
  Clone ID: PAT_MRT4530_77498C.1
atggcttctatatctactaatgcactccatatctcaggatatttcatcacaatgtgggatgtatgcctcaggaaaagaatcataagagcttcagcaagactttaccacttcttagcagcaactgcctcttacttcagcagtgctgtcaaggtttgctgtagtgtttcatgctcagatgctttagggtcaccaaatgggtgtattccatgctcgcacctgcgccatacaggagactgtactgtggcttcccttgattgcatcctgctcaagttcccttacaaggaaaggaacactatgagtatgctccagatatgttatgatcaacatgaacacagtaagtattggcattgaagacaggaaatgctcggtgatatgggcggcatccggcatattgagggaaacaaacccctccctcccaccccgcacttcgtcgtctcctcggaaacctcaccgcctccctcccctccattccccaccagatgcggcgatgctccgccgtgcaataggcttacccgccgccgccggtcgcgccgcttcctctcggtggcgtggcttcctcactgtctcattcgatctcgaggatgggaagcatgagcgcgcagagttcaagctctccgtaccgtggggaagcacatcggcgtctccctccggcgatgcgatcgagagggctgtatcttctgaaggctgcaaagtagacacatctcgcttgactatgaactccatggggaaaggaggagtcatcgcttcatcggtgctcatgaccgccaccaacttcgacgccagcaaggccaggtcccgtcgaggaagaggaaggcagatgaacttggtggacattcacatctggcctcaggagtcccgggcggctgcaacattgatgcggaaaaatgataaatctagattggcttggcattctacttggagctttgatatggaatcaacaaattcaccacgtgggaaaagtcttttaacaagcaatctatctgacaaaacacaggacctgcaatataaaggattcatttgcaatgaaattgcgaatgaatttgaggtttctttgaaaaatcacttctcaatccaccagaccctaggaaggggagcggaaggtcaagtgctccgatgcagtactcagaaaggtgcccatagatctgctgttaagagatgtgatgttccaagaaagcatgctgatgaagagctcaggagttgtgcaaatgtacttttgatgattatttggaccgaaaaaaaaatggagacattgatgaagcttgagtttttcaaggaggcagttcttggcataaactatctccaccaaaaaggattcattcacagagacatcaagcccagtaatatatttcttgataatttgaacaatgttaagattggagatttcggaagtggtgctttcatgggatctgcttcttgtttgggaaggggcaataggttctggggtactcagttccatgcgtctcctgagctgtggaacatgcatactcacaacgagaagactgatgtgtttagtctcggaatcctgtacttcgagctctttggaggtcccacgagcagcaatggaagatacaaaagactggaaaaacttgaaagcattttgaatagcagcaaatggaagactaatccacttcaaacatggctaaactgcaatatttctaaaggatggggtggaaaggtgccagtactaatccggatgctacagatttcaccaagactgcgtccagcatgtcgcgatatactgctgatgcttagttga

SEQ ID NO: 77618 - DNA, 1538 bp, Oryza sativa
  unsure (1)..(1538): unsure at all n locations
  Clone ID: PAT_MRT4530_77499C.1
accctctgcgaaacgctcctcctccggacctccgcccacccncccccaaaacctgacctcgccgacaacacccggcggcggcggcggaggcggagatgatcaagcggcggtacttccgacaggaccacggcgacaagagcggttcctcatcgtcctcttcctcctcctcctcgggttcggactcggacagggaacctgcggaggaagcggcccccactgaggaagtagaggaacagcaggaagaacaagaagatgagcagcatgtgggggaggaggattcgggagaagagcaggaagaggagctagagccagtggtcgaacaagagagttcagggtaccaaagtgagtacagctccggtaacgatgttgatgaaccttctgcagatagtgatgagcatatcatcctaagacatgaagaagatcctgagataaattcgtctgttaagagagcctcaagtggtaaagctgattcaaccaaagatgcatctgacacggatgatgctcttgaggttgatttcaataactacattctgaagtgcaaatctgtgtacaagtgcaagctttgtcctagaatcatctgcttaaatgaggagatggtcagggtacatcttaaatcaaagagacatgctcgatcaaagaaattgttaggagaaggtaggcttaagttgatgcttaatagtgatggtgagttggaggaagagcaagagacacatgctgaacgacatgctcgaactgtagctcttgctcaggcagcgccaaaaccgaaggaggaagaaggtgagcagcggcgtaacgcacagtcggcgcgacagctcgagccggggcggctcggcgcgcggccagggaagcggcggcgcaacgcaggggacccaccaccaacgatgacgaggcgcagtggccacccggcgcacgacgcgacggcaagcggtggcaccgagcacacgagcacggcggcggcacaatggagcacaacggtggcacaatggcgaccgggccgacatggctacggaggcgcctgcccgaaatcaagggggccaccggcttctaggtcactaggtgaggctcgcgacgtgcgacgtggtgcggggcggtgcagaggcgaaacggcgtcggcgcccgattcttggcatctgggatgcgacattgggagcaagattccagcggtggcgatggcgagggcggtgcggcggagcaaggccgggtcgagctcgaggccgacgaggaaaaggaagaacgttggcgtcgtcgaggactccgacggcgtcgtcgaggactccgacagcggcgtcagcgaagtacgccgtcaggtgtggaggatgagttgtccaccaccgaccctcggccgcacgcccgccgccgtccctcgccagcttgcctgccgcccctcacctgcccgaccaccgccgacactcggtcgcccgcccgctgccgtccctcgccagctcgcccactgccccttgcccacctggccaccgtcgaccctcggctccacgcccgccgtcgcccctcgacagctcacctgccgtcatgcctgctag

SEQ ID NO: 77619 - DNA, 538 bp, Oryza sativa
  Clone ID: PAT_MRT4530_7749C.1
agcatacgttttgctgatcaagaatacatcatatgccaccaaacagatcgttacattgactcgatcaatagtagtactagtagagcgatcattgactcgatcaatagtagtactagtagagcgatcattgactcgatcaatagtagtactaggtaaagcgtagagagacatgcgcagaaccaaaacaagaaacccgtcaccgccatcgtcgccgtcaccaccgtcgtcatcgccgccttgcctaaggcccgccgccgtcgtccccgctgtcgccggcgacggatcccctcgcggtcacaggcgatggatccatcctcactgcggcggccggcaacgaatccgctccgatgctgccgccgtcgctgggagatgggaggagtgggaggagggggcggatagggagagggaggagtgggaggaggaggcggatagggagatgggaggaggaggcggagagggagatgggaggagcaggcgtctgatggggtcgcacgtgaaaatggagcacgattttcgcagacgcaactacttacacgcc

SEQ ID NO: 77620 - DNA, 4855 bp, Oryza sativa
  Clone ID: PAT_MRT4530_774C.1
ggcctgtacaatctctcctgtaaaaacctgagggcaccacagatacacaaggggggaaagaaaaagaaagacaaatcctccctaatttcatcttctgactaattctgtatcctatggctaaaggaatgaacaaaggtgggagggaggggtgaaaaagggggtgggagtcatgatcttctccacagcaatgtttacaaaatttctgcatcgctacaaagagatgaacatgtccacaacacaaaatggcgcctaaagatgcatgttaatcatcaaggcgatgaatctcacccatcatgatgcggttgctgtggaccttgaagccaagaagagacgggtcaatctgttttcctttcttcgttttcttctttgcacccttgccgcccgggccaccatctgcagattcagaggcatcatactgctgcaatgccggcttcttcgtgctcttcaccatttccctgaaggacggaccatcgacgcttgttcctgatggcgagatgaaagagcctgcctctttgttagtggagacagggatatccacaggttgggctgccgaggtgactcctcctgattccaacttatgatcatcagaagacgcatggcctgctttcttcagcctaatggttgaagatatatccgtggacaatgcctgagttgcagaaccgtgttggcttggtgggcgcttcagcaaggaatgagtgcccccttttggcatggtagcttcaggccagttgctaccagcttcttcagcaaagttagtgtcatcccctaccaagctcgcgcttgaaccctgcctttttcctcttggtacctcattggcaagtccaaccaattgattacctgatgcaccaccccccataatacctgaaaaatcacccctttgcatatcaagcattgatcctgagcttgatctcaggcccaactttccactgttctcaatactgctagtcaaactctccaaatttgctgctccctcttgtcctgcctgcccagctttagcaaaaagggacctttctgcaagaggatcatcaaaagacaacctgtccgcaggtgatcttaaagggttatctgcagcaggctgtgcaaagagcgatgaagggtctttacgtccaaaggatgccggtactggaacatcaggataaccacgagattgttgtgactgaactagtttttgatggaacaagtcgctcaaatcttgctctgtgctcctctcgttgttcctaagtgatgcccatgcatgtgaattgtcaacggcaaggttcatttccacattccttcgctgtttctgtgcttccatttgcatctggctgatgcgtgaaggttccataagtgtgttttgcaactgtccattggcatctgaccagtgcctatccagccttgccaagttaccagaaagctgttcctgaagcctgtgttgctgcggatgaacccctgaaggaaccataggcatttgtcctagagaatacaaatctccatgtgtttctaactgaccaatgccatgatggcgtgctagggaatttacaacatccaggttaggtagaggagcgccaccaggcaaagagccagatctctcaagggagtggataccttgacctcctctatgcaaccgctcatgcaaagacaagctccgctcgagatgttcatgctgctccaccgatgaggatctctgaagggactgcagaagatcaaaatgtcctagtctagaggcatggccttggttcggactagttcctgagcggataaaatgacccgattcatccattggccaacccccgctcaaatgtctttcttcctctctgcctgcatgttgacgaagagcgtttgccaattgttgtgactggagctgatcatggtgaagacctaacagaatttgttgctctaaaggaagcatttgcctctgatttgaacgtgagagaacatccatcagatcattgtgatgctccctatggataccttgcccaaattttgcttgaatgagttgctcaatcgctgcatcatgctgcctttgcaaatggtggggctggtgatgcaggtcattcaatacatgttcccgaagtaatacttgatcaaccatgttagttggtccaaaatttgaagcttgcaactgttgctgcaacatttgctctagaatcagctgttgctgttgctgttgttgctgttgctgctgctgttgaagaagctgctgggcttgacgctgctgcagttgcctctggtgctgctcttgctggagctgttggcggcgttgctgttgctcaagctcaaactggactctcaaaagatgctccacctcaggaaccggttgattcatagactgcctgtgttggtgcaaagaatcaaacacctgtcctggaaatggtccaggaaactccagattgttccgagccatcaactgctcctgctgccgttgctccctccggatctgttggagaagcatttgctcctccatattcaaatgattcaagtcaggttcaagctggggaagtcgacctgaaatgtttgtgtcagtcacattgtccagacgcccaaagttggcaggccactcgtctcgaacaacaggagcttcattcatcctgccaagctgcccatgcctcatgctcacaggcggaatgtccttaggggctgcaggcttgggatttcttcgctcatttacaccgagtacgttagatgagagaggttgcttcgggtgcattccttctaactcagaccaaagcaagccaagaggactgagctcactctctcggggaacatcatgctggggcaaattagcttctcccattgcagcacggtgatcacgtgatcccaactggaaatctgaacggtcattttcaagatcccgtagagactgaccagtgctgctgttaggcctcgctgtgtacaaaatttcttcagcatccagactcactgattcaggaatgtgctgctggcggatatcaacattagatgcggtcttttctgtttcatgtgaagggagccaactcatatgtgactgaacagctgcttcctgctcacctcttttaagatcaagaacataactttcagaatcccgtttagatgtttgatcattcttcccaaaagaaccagaagcaggaaccttgtcatcaaaactattatgtacagagtctggagattcactagtttcaccatgggatacaggtgggagaggttggggcttttgtccaaggtgtggcattacttcaaaaagtggccggaaaggagaatcgtctggagaattagccaaacgcactggtaactccaaaccaaaatatccatcttcgtaccaagagattatgtcagcacctaggaatggaccctgcatgcccccttggggatccaaataaaacagagttaagtcctctggatagctagcctggccactagcttttgtatccatgtcattattttggtacagcacaggaggttgttgaatatgctcaaagggtgattcaagaaacagagagcttgagtcgttgggtagctttacaccaagatcaagatcagcacttgagttgacttcattaattttcgcatcttcccgtatgccagaaagcccaaattcattttgttccatagtaaggtcctttgacggaaatgtaataccagcagagattacccctccgtcatagaaggcatccttctctgagattaaagtggatgattcttcctgacccaatccactaaaagcaacagagcttgtatccttcttgccatcaataccagaagccaatccttcaagctcttttttcctatctctttgcattccagttgtattggctacttcactgctgatgaccttacccttcataatatcttccctaacagcctcctcatcagtatcaggtgcaacaaaggccagaggtttcacaggagaagatagtacgacagaaggaacttcctccagcttacagtgtacgtcatcaaaggatggcattgccttttgttgcctgtatatatcaagaagtttgccccgtgggtagcaaaaggtaacagcagatgatgcacattttccatgtgtagcaggagcaccaattggtccagcagaagatggccgggtgaaggatgggatggagttggggtttgccctgcctcttccagcggaaaaaccaacattggactccttcgcacgtcctttctccaatccaaatcccggagcagcgcggtacgttcctgttccagctgagtgactttcctgccggtgacgaggtctccatttgtcacgagagtctgtctcagtcagcagccttccagtaaatgtctgtttttcagcatggctttcatccttctccgcatcaagcttcttttccgatctggagtccttctccttgtcatcaggcccccatcttgatgaccatttgccatcacgccgcccttcattccctgaaccacgggtggatccatcgttccacctttcagatgggggtgctcgtgaatcacctccatccctcacagaaacattatcagatcggcgatcatttttacggctctccatatcgcggtccacttccttcttgcgctccctcctcccaggtaggcttgtttccctctcctcttctagccaacgaaggctactgtcagcatcaaatacattccgcctgcgttctttcttgtcggcagctccttccggcatccttacttctttttcagaagggtcaagcaaggaaccatgacccaaaatctttgcatcagttggtttagcataaagccactgaggagacagaggaatgctgttatccaggtgctgctgatctttggattcgtcgacgaaacctattgcggcggcggcggccatgtcgtcgtcgatccccagcgagagcacatctttgccgagcgccgcgaatcgatccatcttcctctccgacat

SEQ ID NO: 77621 - DNA, 234 bp, Oryza sativa
  unsure (1)..(234): unsure at all n locations
  Clone ID: PAT_MRT4530_77500C.1
acacattnntgtcatttgcagacatgatgaggaggaagatctcannnctgctcatctgatgtatgacgncaaggacgacaacttgttcgagcatttcagcgctgtggcacagccggctnggtgtctacactgcaagagactatgccgcatncntgagttctttgtcngaggntganagtcgagatctaccaggctgtcggagangggagaggcnatnnttcgctgacgtggngc

SEQ ID NO: 77622 - DNA, 448 bp, Oryza sativa
  Clone ID: PAT_MRT4530_77501C.1
caaaattgtgagacctgttcgttcgaagcattgttctacatgtgatcgctgtgttgagcagtttgaccatcactgtccttgggtatctaattgcattggcaagggatggtaagagatccggcttctccagcatcctttattccttggctcagctattctgcttttaaccatactggggcactttcctttttcataatggacctcttccttttcttcggtgttgcagttctagcagtagtccaggcatctcagatagcgaagaacattacaacaaacgagatggcaaattccatgagatacagttatctaagaggtccaggtggaagattcagaaacccatttgaccatggagcgcgcaagaactgctcagaattcttgttaaatggatacaatgaggacattgaacgtcttgatcatacgtcacacactgatgaggaaatgggaatga

SEQ ID NO: 77623 - DNA, 492 bp, Oryza sativa
  Clone ID: PAT_MRT4530_77502C.1
aaacccgaaacaaaaaatattcttttttcccgggtaaaaagaccccatttgtgatccccgggaaaaaaaaaaacgggggggaagggccccctatactcatccccgacaaggggggggaaagcgcaaaaaagaaaaaaaaaaaaaaaaaaacccaacgcaaaaaaaaaagggggcccggggggaaaattatacacaatttcccgggggtaacacaatacacaggggggctaaaaaacacgcgcacatatggggggggttttggggtttgcaaaaaacacatcgggggttttttgggggtctggggcaaaacccgggggcccgggtcacaaatctgccacaagattggacaggggccgcgcccaatatcatggggggaaaaagaggggggaacacgggacatgcacatgcgctgtggcaaaggaaaaaggggtttttacagaaaaaaccctatatgggggacaaaaaaagagctcaccccccacacaggggggg

SEQ ID NO: 77624 - DNA, 2365 bp, Oryza sativa
  Clone ID: PAT_MRT4530_77503C.1
cttatctctccccaactccgatccccacccccatggcgtcggagatcgaggtgctcgaggacaccaccaccacgatggccgcctccgccgcccccgtggcgcccgcgtccccatccccatcccccgccgccgctgccgacggcgaggagggggaggggccggcccctgcggcggaggacgactcgctgaagaacgacgtgtacacggcggcggcgtacggcgatctggagaagctgcagcggctagtggagggggagggccacccggtcacggagcccgacggtctcggctaccacgcgctccagtgggccaccctcaacaaccgcgttgccgccgcgcagtacatcctcgaggttgtcccccattgtgcttcgcgcccgagcgtggcgcgatttggctggccttcgagtagtcgttgtttgctagctagcgagggatttgggtgggggtttggtgtattcacttttagctcattggctggtgttttggataggctccattatttatttagctgcttgtgacatacccatggagcagatgtaaatgctgtggaccacactgggcaaacagcacttcactggagtgctgtacgtggacacatccaagttgctgagcttcttctgaaagaaggagctaaggtggatgttgctgatttatacggttatcaggcaacacatgttgcagcgcagtatggccagacagcatttatttatcatattgttgcgaagtggaatgctgatccagatgtccctgataatgatggaagaagcccactgcactgggggaacctggaggcatgcactgtgctagttcaggctggcaaaaaggatgacttgatggtgaaggataagactggtctaactccagcacagcttgctgctgataagagtcatcggcaagttgcattttttcttgacaatgctaaaagggtatatgatagaggatgtgatgggaataccaattttggaaagctatcgaaactggggctagctcctgtactttggtgtattattgttggcttgcttgctacatatatacactctgttatatcaggtcaatatatcatggatatgacagcaccatttgggctgtttgcatggtcaggagttttccttgcaactgctggcctagtcatgttctataaatgtagcaggaaagatcctggctacatcaaagcaaatatacgagattcacaaaatcaaagggatgatgaacctttgttgaagttggagttagacaatcccgcacttctgtctggtaactggtcacagctttgtataacatgcaaaattgtgagacctgttcgttcgaagcattgttctacatgtgatcgctgtgttgagcagtttgaccatcactgtccttgggtatctaattgcattggcaagaagaacaaatgggaattcttcatgttcatcactctagaagtttttgcaatgatcattactggttctgctgccattataaggatggtaagagatccggcttctccagcatcctttattccttggctcagctattctgcttttaaccatactggggcactttcctttttcataatggacctcttccttttcttcggtgttgcagttctagcagtagtccaggcatctcagatagcgaagaacattacaacaaacgagatggcaaattccatgagatacagttatctaagaggtccaggtggaagattcagaaacccatttgaccatggagcgcgcaagaactgctcagaattcttgttaaatggatacaatgaggacattgaacgtcttgatcatacgtcacacactgatgaggaaatgggaatgatacagatgacaaacgcagtctctcagaatggcgagggcccttcccaccatggtaacggcactggccattcttgtgctgaatcacatgctcactcaaaatctcacagtcaaattgtatgtgttcatgctgaggctccattatttatttagctgcttgtgacataccacataggtttcgctagcttacgttaatattgttggggtgctagctgtgtgaaaattcagatctattagatccagtattttttgtggtgaatacataggagatgaaggtagcaaggtgctcatgaatatccgctgatccgcagttcagaaatgtcttgtcgctcctgaaaagagggcaacaattttgtgcagatgcagcagcatgaaacatcttcattgctgtgtcccttggtgtcaatataactccagcattttagcttctggatcttacatctgtgggaaaatgtagttgtaaactaagataattgtaaatttattagcaaattctgaatttagatactcttgttgtgatctatagctgtactgacagtccagaaagttgtaataac

SEQ ID NO: 77625 - DNA, 565 bp, Oryza sativa
  Clone ID: PAT_MRT4530_77504C.1
ccacgcacgcgtccacacgacagcccactcgtaccccgcccgtacgtgctcaaccggatggtcactggccgggagaagatcctgacgacgtcccgtgcctcccacacactaagtctgtagatacaatgctgacagcaggtgcaagacgtgagccaatagtgccggtgcgccgccatgcgacggatagtgaggagctacgaggagagcatgccgatgcccctgcatccaggctgtgctgcatattggtcggaatactactgtatggaggggtcggaggagaagcatgggtacttcttggaggggtcgtttgaggagggctactacggcgagcagcatcagcagccgtggatgacccgcgtgaggctgaccagggcgaggcagtacgcggcgcagctgccgaggatgtgccggattgagccccagcagtgcagcatattcgccgtcggccagtactaggcttagctggcttgcctcatagctagtaagatcacaccggtgctgagtcgcatgcgaccagatagtgatcaaaacaaataatgaataatgaaatgttttgaaaacaaaa

SEQ ID NO: 77626 - DNA, 163 bp, Oryza sativa
  Clone ID: PAT_MRT4530_77505C.1
gtgcaagctgcaaatgaagcactgcgagggctggggaggttgggtgaagtgacaagccaacgtttgtggcacattgagtgagtgaggaaaaattgatagcaagaaacctggctggtgtgttgagatgtgttcaggcaaatgtgggttctttcaggcctgtgag

SEQ ID NO: 77627 - DNA, 133 bp, Oryza sativa
  Clone ID: PAT_MRT4530_77506C.1
ctctgaactgtgggattagtacgcccaagaacgtgaagctattacaccgtcagatatatccagaagctgcaggcggagcaagagcaatgcgcacagaaacggtccaggcatgcctgctctccctcctgcttgt

SEQ ID NO: 77628 - DNA, 401 bp, Oryza sativa
  Clone ID: PAT_MRT4530_77507C.1
agtccatgcaaatatcaaatcaatcacaatttttttcatacggaaacattttcagagtctacattcacaagttcagaactcgtaacaaaaaagagaaagcagaattacattttgtatttacaaagacaccacaaagaactcctcacagtattaactgtaagtctgatgtttgactgaacctacagaattgtgtattacaaatctacagtaagcaaaatgttggatctttttaaagtatttatagtgataaaaaagttgactaatggacctacctttacaagcacatcagaataatacagtcaagaacaccaactcttgcagaagtttatgttggagttggagcagcagcttgccttatgagcatgaatctcctcctcgcaatattgttgcattttcaccta

SEQ ID NO: 77629 - DNA, 662 bp, Oryza sativa
  Clone ID: PAT_MRT4530_77508C.1
atgactaaaagtataaggggcaagaaatgttcatctcgtcagctcagatcacataatcggaggctcttcagccaatgcaatttcaagagagttgctaacaaggaattggcagcaacagagaaatattcgcggagaagctcaaaagattgtgaggacctagactccatagagcttacatgccccctttgccgtggtgaggttaagggatatacattggttgaacctgctcgggaacagttgaaccaaaacaagaggagctgtatgcaagatggttgctcatacatgggtagttatggagagctctgcaagcattttgaggagttgatggcatctgtttggcacgaaggtcctcatggagctatgcaaatcaatgaaatgaacttggctgatccatgatcttccatatatatgtgcaaccatttgccaccattcaaacagtattgaatccttcctagactcgccatgaattcaaaaaacctggtcaaattgtgggtggaatgtggaatggcgttgaaggcttttgttgatactatctcattgtagtcccccctttgtgtcgtgtgatgaattgatcctgtgcatcccttttgcactgtattgacattacattctattcggaaatgcagagttcacttgctcctgtgtaagaaagaagcatccta

SEQ ID NO: 77630 - DNA, 4280 bp, Oryza sativa
  Clone ID: PAT_MRT4530_77509C.1
tgttcgccgacatgggcgacgtactgccgaggtcttatgcccgccccgccggcatgctgccgccgaacaatgagttcgggatcagggagatcacgcctggcctcgcctgctccgggcctggcggggcgtacgagctcgtcgagaggatggagtacctgtacgtgcgcgtcgtcaaggcgcgggggctcaagtggagcggcgaattcgacccgttcgcggagctgaggcttgggggctactcctgcatcacgcgccacgtcgagaagacggcgagccccgagtgggacgacgtgttcgcgttctcgcgggagaggatacacgcgccgttcctggacgtgctcgtccggggccggggcttcgccaaggacgactacgtcggcagcacgcgccttgacctgggcatcctccccgacgcgccggcgagcgtccagcccgacagctcgcccgcgccgcagtggtaccccgtcttcgacaagaaaggggagttccgcggcgaggtgatgatggccgtgtggttcggcacgcagaaggacagctacttcgactcggccgtccacgcggacgccgcgttccccgtggacgacaagctcgcggcgcacatcaagcacatacggtacgacgtgccgcgcctgtgctacgtgcgcgttaagttcaccgaggtccgcgacatcgtcttcgcggacaaggcccgggtcggtgaggtgttcgtcaggtcgcgcatactgggacaggtgcacaggacgagaacgtccatggaccaccgctggaaagacgaggaaaatggtcacctgtttgtggccgccgcgccgttcaaggactacctcaacatgtccgtcgtgggcgtcaagaacggcaaggaggaggtcatcggccatgtcaacgttctgcttgacagcttcgaacgccggtgtgacgcccgcccgattagcccaagatggtttagtttgatgcagccagagggagccgccaagattgacaagtactctgccaagataagcgtcgttctttgcctcgaatgcgggtacaaggtgctgtcagagccggtccactacctgagcgacgtccggccggcggcgcgtgagcaggagcgggagcggaagtgcatcggcctcgtcgagctcggcatccgcgaggccatcctcaccgcgacgcgcacgcgcgatggccgaggctcctgcgacgcgtactgcgtcgccaagtacggggtgaagtggtaccgcacgcgcaccgtcaccgacagcatctcgccgcgtttccaccagcagtaccactgggaagtgcacgaccactgcaccgtgctcaccgtcgccgtcttccacaattctcagataggcgacaagggcggcctcgtggccggcgaccccgtcaaggacgtcctcctcggcaaggtgcggatccggctctcgacgctcgagaccggccgcacatacgcctacgcctacccgcttatgtccctccacggcggcggcgtcaagaagatgggcgagcttcgtctcgccgtccgtttctccagcacgtcgacgctgggcctgttccagacgtacgcgcagccgcatctgccgccgatgcactaccaccggccgctgaccgtcgtgcagcaggagatgctgcggcgggaggcggtcacgatcatcgcgcaccggatggggcggatggacccgccgctgcgccgggagtgcgtcgagcacctctgcgagtcgcacgcgctgcggtggagcatgcggcgcagcaaggcccacttcttccgcctcgcggaggcgctggagcccctgtccgcggcgagcgcgtggttctaccacgtctgccgctggacgaacccggtcaccaccgtcgcggtccacgtcatcttcaccatgctcgtgtgctacccgagactcgtactgcccaccttcttcctgtacaagttcatgctcggcatgcggaactacctgcgccggcccaagcacccgtggcacgtcgacatgagggtgtcccacgccgacacggcgcaccctgacgagctcgacgaggagttcgacgagttcccgacggcgcggccgcccgaggtggtgcggatgaggtacgacaagctgaggagcctcaacgcgcggatacaggagatcgtcggcgacatcgcgacgcacgccgagcgcgcgcggtgcgtgatgacgtggcgggacccgcgggccacgggcctgtacctgctgggctgcctgtgccttgccgtgatcacgttctcggtgccgttccaggcggtggcgctgttgactggtttctacctgatgcggcacccgattctgcggcagaggctgcctgacgttgtggcgaacttcttccgacgactgccctgcaagaacacggctccgcttgctcccgccgccgccgctcaactccacgcgctcctcctcacgtccggccacctcctccgctatcacggcctccatccgctcttcatggtgtattgcgcatgtggccgtccctccagcgcccacaacctgctcgcgcaaatgccccaaccaccaccggtttctttctccaactcactgctccgttcgtacaccggcctcggctgccaccgggaggccctcgcggtttactcggcgatgcgcgccttcgaccacctcaccttccccttcgccgcgaaggcctgcgccggccttcgtctcggccgccatgggcgtgccgtgcactgccgcgcgctcgccgctggtttcggcggcgacacgtacgtgcagaacgccctcatttccatgtacatgagctgcggcgacgtgggcgcagcggaggcggtgttcggggcgatgcggaaccggacagtcgtgtcctggaatgcggtcatcgccgggtgcgtcaagaacggctacgcggagagggcgctggaagtgttcggcgagatggccgctgatggtgtcgggatcgaccgtgccacggttgtgtcagtgctgccagcttgtgcgcaagccaaggacttgaacactgggagagccgtgcaccggcttgttgaggacaaaggcttgggggattatgttgcagtgaagaacgcattgatcgacatgtacgggaagtgtaggagcttggaggatgcacgaagggtgtttgatcactgcaaacatgataaagatgttgtttcttggacagcgatgattggcgcttatgtgctgaacgaccgtgcttttgaggccatttctcttggttgtcagatgctgatgtctggggcagcatggcccaatggagtgacaatggtgtatctgctctcagcatgcgccagcatgccgtcagggaagcatgccaagtgcacacatgcactctgcattagacttggccttaaatcagacattgctgttgaaactgcgcttatcgacgcttatgcgaggtgcggtaagatgaagctgatgagattaacacttgagaggggctcatggcgtgcagaaacatggaatgcagccttgtctggttataccgtcagtggacgggagaagaaagctatagaattgttcaagcggatgattgctgaatcggtgcgcccagactctgcaacaatggcaagcatcctgccggcctatgcagaatctgcagacctgaaagaagggaagaacattcactgtttcttactgactctcggattcctcagaagcacagagatcgccactggtttgattgatgtctattctaaggctggtgacttggatgctgcgtgggctctcttccagtggctacctgagaaggacgttgttgcctggacaacgatcatcgccgggtacggtatacatggtcacgcccgaactgccatcctgctctacgacaggatggtggagtcaggagggaagccgaatactgtgaccatcgccactttgctgtatgcatgcagccacgccggcatgatagacgaaggcattaaggtgttcaaggacatgcgcaacgtccatggtttgatgccaaatggcgagcactactcgtgcctggttgacatgcttggccgtgctgggaggattgaggaggctcatcgtctcatccaagatatgccattcgagccgagcacctcggtatggggtgctctgcttggtgcctgtgttctacacaagaatgtcgagtttggggaggttgcggcaaagcgattatttcagcttgatccggagaacactgggagttacgtgctgcttggtaacatatatgctgcagctgacagatggagggatgttcaggatgtccggagaatgatggtggaaaggggcctcctaaaagaaccaggatctagtttggttgaggcaagatctgtacaatgccgaacagcaatgccatag

SEQ ID NO: 77631 - DNA, 298 bp, Oryza sativa
  Clone ID: PAT_MRT4530_7750C.1
ataataacgaaccatgattaattcggacatccattgagatgctgggctgaggttaacattgaagcgcgatccaaagaagcagagatgatcgccagaccgacaacccgtaggcgccgggagggacacggagggttccgcaataggcataggccaccagggctgtggcggccctggcttcggcttcggcccgggcttcggcggcttcggcttacgataagggcccggcatgggaggctgggggttcggcttcggccctggcttgggaggcttcggccccacgcgtacgcggacgcgtggg

SEQ ID NO: 77632 - DNA, 351 bp, Oryza sativa
  Clone ID: PAT_MRT4530_77510C.1
atggacggcagcgacgacaacaaccagacgcgggcagcgctcctacgtgtggaggagcttgagaacctcctcagcgacgtgccgcggaggctgtcgcggcttgacaccaatcgcggcatgctcgaggggcagatcgccgcggcgtcccgcggccacagagtagctgtgccatctgcacgagcagcaacggggagagggggctcgtcggcctccccttccccctcctccacgagaagctgtcgccgccgctgccgcacgcggtggggaagggagcgaccgccgctgcagctcgtggtgggcgagggcgccgatgccgcatgcggaggggaagagcgtcgccgctgctgctag

SEQ ID NO: 77633 - DNA, 1146 bp, Oryza sativa
  Clone ID: PAT_MRT4530_77511C.1
atggcaatgtcaccatgtgaagttagagaaggggctagggacagtggcatcgatgggatgctagcgaaggaggcatggcggctagagagaagtgaatggctagaagaggttgagagtaatgacgatgagtctatggattctcaggccatacctcgaatgaggaagatttcgaccaaagtcaaacataaagtgggatggactgatgatattcctcaagtgtccgacttggaaaatgacatccttactgctgaattttcagaaaaggaagtcaaagaggcaatttttcaaatggatcataactcctccccaggtccatatggctttcctgcagagttttatcaggtcttttgggagattgttaagaatgatctcatggctctatttagagaatttcataaagggacattacccctttataacctaaactttgggatcatcgtgctactgccaaaaaaggctgatgcaaaacaaattcaacaatataggcctatttgcctactgaatgtcagctttaaaatttttacaaaagttggcaccaataggattgcaacggttgctcacaaagtcattcgcccaacccaaacggcgtttttgccagatagaaatatcatggaaggggtggtgattttgcatgagactgtccatgagttacacacaaagaaaatggatggtatcatattcaaaattgactttgaaaaggcttatgacaaagttaaatggcagttccttcagcagacattacgaatgaaagggttttcacaatcgtggtgcaattggatttccaactgggttgaaggaggaactgaatccccatacactatcgaaaactcagaaattctgattggaaatgtgtggaggataggtttcaaagaaaacttagcacatggaagggcaaaaacaactcctatgccaaaagatcaaggtggactgggtgtcctaaatcttgatatcatgaatagatgtttgttgagcaaatggctattcaagcttcttaatggtgatggcctatggcaaaaccttctgcgcaataagtacttaaagggtaaacccctctcccacatgtcacacaaactaggaacatcccaattttgggctggcctaatgttatcttcatttgttccaattggctccactcttggtgtatga

SEQ ID NO: 77634 - DNA, 284 bp, Oryza sativa
  Clone ID: PAT_MRT4530_77512C.1
gattctgagaggatcatcgtgaggtccaacctggaccaaccggatagcaacagagcgcgagctttgcagcacatggcggagatccaaaaggggctgcctcctggaaccatacttgatcaagcttatgactctactagatcagggtcaatagtagccaagaggaaatcaacctagaggacacacgggtgagcatcctgatgctgacgtgcaccgttgtggagaaagtaccaactctcatgatgcagttattgatatataagttaagcgataagcatgacttgatg

SEQ ID NO: 77635 - DNA, 1898 bp, Oryza sativa
  Clone ID: PAT_MRT4530_77513C.1
atggcaatgtcaccatgtgaagttagagaaggggctagggacagtggcatcgatgggatgctagcgaaggaggcatggcggctagagagaagtgaatggctagaagaggttgagagtaatgacgatgagtctatggattctcaggccatacctcgaatgaggaagatttcgaccaaagtcaaacataaagtgggatggactgatgatattcctcaagtgtccgacttggaaaatgacatccttactgctgaattttcagaaaaggaagtcaaagaggcaatttttcaaatggatcataactcctccccaggtccatatggctttcctgcagagttttatcaggtcttttgggagattgttaagaatgatctcatggctctatttagagaatttcataaagggacattacccctttataacctaaactttgggatcatcgtgctactgccaaaaaaggctgatgcaaaacaaattcaacaatataggcctatttgcctactgaatgtcagctttaaaatttttacaaaagttggcaccaataggattgcaacggttgctcacaaagtcattcgcccaacccaaacggcgtttttgccagatagaaatatcatggaaggggtggtgattttgcatgagactgtccatgagttacacacaaagaaaatggatggtatcatattcaaaattgactttgaaaaggcttatgacaaagttaaatggcagttccttcagcagacattacgaatgaaagggttttcacaatcgtggtgcaattggatttccaactgggttgaaggaggaactgaatccccatacactatcgaaaactcagaaattctgattggaaatgtgtggaggataggtttcaaagaaaacttagcacatggaagggcaaaaacaactcctatggtgggagattggttcttcttaactcggttctttcgagccttcccatgtttatgttatccttctttgaaatactttgaggtgcacttcaaagactggattactcccgatcgagatttttctagagcagtgatagccaaaaaaatatataggttaacaaaatgggaatatatatgccggccaaaagggtggactgggtgtcctaaatcttgatatcatgaatatatatttgttgagcaaatggctattcaagcttcttaatggtgatggtctgtggcaaaaccttttgcacaacaagtacttaaagggtaaacccctctcccacacgtcacacaaaccatgaacatctcaattttgggctggcctaatgaaagtaaaagatcattttttttttagtatggatcttttaaacctggtaatgggatggagataagattgtgggaagacacatggttggacttgcaacttctcaaatatcaatacccttctttgtacaatgtggttcgaaagagacattctactttggcagaggttatgagcacaacaccgttgaatgtttcattccgacgatcaattgtaggaccaaagttagttgagtgaaatgattcgatttctcgactagctaatataaccctgtcaaatgaaaaggattgctttatttggttgctacataataatggccaattttcggtcaaatccatgtataatgcgatcattaattctaatgtaaggatccgcaagaggatcttatgggagataagtgtaccaccaaaaatcaaagtatttatgtggtttcttcaaaaaaagtaatcttaacgaaagataaccttataaagagaaaatgaaggggaaacaagcaatgttgtttttgtaatacacaacagaccatccaacatcttttctttgattgttatgaacaacaggatactatgcggaatggtgctacacggttggaattggtagccaaggaacttttattccagtttggatgg

SEQ ID NO: 77636 - DNA, 1261 bp, Oryza sativa
  Clone ID: PAT_MRT4530_77514C.1
atgaaggccattcttgttgaacatctctcggggctgaaaataaactttcataaaagtgaaattttctgctttgggggagctaaggaaatgaaggatcaatataaacaactgtttggttgtaattctggttcctttccattcagatacttaggaatccccatacactatcgaaaactcagaaattctgattggaaatgtgtggaggataggtttcaaagaaaactgagcacatggaagggcaaaaataactcctatggtgggatattggttcttcttaactcggttctttcgagccttcccatgtttatgctattcttttttgaaatacctcgaggtgtacttcgaagactggatttctaccgatcgagctttttctggagcagtgatagccagaaaaagaaatataggttaacaaaatgggattatatatgccggccaaaatatcaaggtggactgggtgtcctaaatcttgatatcatgaatagatgtttgttgagcaaatggctattcaagcttcttaatggtgatggcctatggcaaaatcttttacccaacaagtacttaaagggtaaacccctctcccatatgtcacacaaaccaggaacatctcaattttgggttggcctaatgaaagtaaaagatcaattttttcagtatggatcttttaaacctggtaatgggatagagataagattttgggaagacacatggttgggcttgcaacctctcaaatatcaatatccttctctgtacaatgtggttcgaaagagacattctactttggcagaggttacgagcacaacaccgttgaatgtttcattctgacgatcaattgtaggaccaaagttagttgagtggaatgatttgatttctcgactagctaatataaccctgtcaaatgaaaatgattgctttatttagtcgctacataaaaatggccatttttcggtcaaatccatgtataatgcgatcatcaattccaatgtaaggatctgtaagaggatcttatgggaggtgaaggtaccactaaaaatcaaagtatttatgtggtttcttgacaaaaaaaagtaatcttgatgaaagataacttcacgaagataaaatggaggggaaacaagcaatgttgattttgtaatacacaagagaccatccaacatcttttgtttgactgtcataaacaacaggatactatgcgcaatggtgctacacgcttggaattggtacgtagccaaggaacttttattctagtttggatagcgta

SEQ ID NO: 77637 - DNA, 502 bp, Oryza sativa
  Clone ID: PAT_MRT4530_77515C.1
cgctacattaaacataaagatattggcagaggttatgagcacaacaccgttgaatttttcattccgacgatcaattgtaggaccaaagttagttgagtggaatgatttgatttttcgactagctaacataaccctgttaaatgacaaaaaaaaattgctttatttggtcgctacataaaaatggccaatttttggtcaaatccatgtataatgcgatcatcaattccaatgtaaagatccacaagaggatcttatgagaggtaaaggtaccacaaaaaatcaaagtatttatgtgtttcttaaaaaaaagtaatcataacgaaagataacctcgtaaagagaaaatggaggggaaacaagcaatattatttttgtaatatacaagagaccatccaacacttttttttctttgactgtcatgaacaacaggatactatgcgcaatggtgctacacgtttggaattggtagccaaggaacttttattccagtttagatggcata

SEQ ID NO: 77638 - DNA, 3735 bp, Oryza sativa
  Clone ID: PAT_MRT4530_77516C.1
atgggggtggcggagcttccgcgggtgatggacgcgctggcgcggcgggcgagcacgctgcgggacgcgctggggaggagccaggggaacacggagagcacggtcgccatcctcgggtccttcgaccaccgcctctccgcgctcgaggccgccatgcgccccacccaggtgaggacgcacgcgatccggatggcgcacgagaacatcgacaagacgatcaaggccgccgacgccatcctctcccagttcgaccttgcccgccgggctgaagctacgatactgaggggcccccatgaggatctggagggctacctagaagctgtggatctgctgaaaagcattgtttgcttcttcgcctcgaacaagagccttaagaacaacgatggacttctgaatcgcgtcaacaatatattgtccaagtctgctctcaagattgaggaggaattcaagcagctgatgactacatacagcaaacctattgaacctgatcgcctatttgattgccttccaaagcctccacgagcaccaaaagatgacaatgatgctgatggaggacacactcactctgaacatccatccaaaggcttggagactggtatatgtaggactccaaccctgatgcccccaagaatattaccacttctgcatgatatagctcagcaactcgttcaggctggaaatcagcagtcatgctatagaatctacagagactctcgcggttcggctttagaagtgagcttacggaaactgggcgtagaaaagcttagtaaggatgatgtgcaaagaatgcaatgggaagccttagaggctaaaattggaaactggacccagtttatgcgaattgcggctaacagattgtgcttcaatcaggtcaaattattacttgctggagaacggagaatttgtgaccaggtttttgatggtattaatttcaacaaggatcaatgttttgctgaactggcaggaagtagcgtattgacacttctcagttttggagatgctgttgctaaaagtaaaagatcacctgaaaaattatttgtattgctagacatgtatgaagtaatgcatgaactccagccagaggttgaagaaatttttgaaggcagattttgctctgagatgcgggaggctgcattaggcttaactaggcgcttggcacagacagcccaagaaacatttgctgattttgaggaggcagttgaaaaggatacttccaagactattgtgcaggatgggacggtccatcctttgactagctatgttattaattatgtcaaatttctatttgattatcagtcaacactgaagatactctttcaggaatttgaaactggcagtgagactgaatctcaacttgcagttgttacaatgaagataatgcaagcccttcagaataacttagatgggaaatctaagcagtataaggatcctgcattgacctatatatttcttatgaacaacattcactatatggttagatctgtccgcagatcagaagccaaggatatactcggtgacgactggattcagaggcaccgtagggttgtacagcaaaatgccaaccagtacaaaagggttgcatgggcaaagttgttgaagtgtagtaatgatgcatatagcaatttactgatagcggatcaaaatggtcaattggttttatctcagctaaaagtgcacttgaagccaactgcagagattcttcagacactctctgttcaagctactggttcatcaccagctgaacttagtagcagcggagtttcaagagctatgatcaaagagcgatttaagtccttcaatatgcaatttgaagagcttcatgctaagcaaactcaatggactatacctgatcaagaattgcgagaatctctgagacttgctgttgctgaagttctcttgccagcctatcggtctttcatcaaacgttttggaaatctcgttgaacatgggaagaacccaaataagtatatcagatactccccagagaatatagatcaggctctgggcactgatgctcttcctacatcttctgataagcagggtattgtgaaggttgaacacgagattgcgacggttggcacggagcgtccaaaaaatgatcataatcatatatccatgacagagggatggactgatgatattcctcaagtgtccgacctggaaaatgacatccttactgctaaattttcagaaaaggaagtcaaagaggtaatttttcaaatggatcataactcctccctaggtccagatggctttcctgcagagttttatcaggtcttttgggagatcgttaagaatgatctcatggctctattcagagaatttcataaagggacattactcctttatagcctaaactttgggatcattgtgctactgccaaaaaagactgatgtaaaacaaattcaacaatataggcctatttacctactgaatgttagctttaaaatttttacaaaagttggcaccaataggattacaacggttgctcacaaagtcattcgcccaacccaaacggcgtttttgccagatagaaatatcatggaaggggtggtgattttgcatgagactgtccatgagttgcacacaaagaaaatggatggtatcatattcaaaattgactttgaaaaggcttatgacaaagttaaatggcagttcctacatcagacattacgaatgaaagggttttcacaatcatggtgcaattggatttccaactgggttgaaggaggaaatgtaagtgtcaaagtcaatgataatgtaggaaaaaaatttcggacatgcaaaggcttgagacaagaggatccaatgtccccaattctttttaacatagtggctgatatgttagccattcttattgaaagagccaaagccgatggccaaattagaggggtaattccacacttagtggatgatggtttgtccattctccaatatgccgatgatacaataatatttcttgaacatgattttgaacaagcaaaaaacatgaaggccattctttgtgtgtttgaacatctctcggggctgaaaataaactttcataaaagtaaaattttctgctttgggggagctaaggaaatggaggaccaatatagacaactgtttggttgtaattctggttcctttccattcagatatctaggaatccctatacactatcgaaaactcagaaattctgattggaaatgtgtggaggataggtttcaaagaaaacttagcacatggaagggcaaaaataactcctatggtgggagattggttcttcttaactcggttctttcgagccttcccatgttcatgttatccttttttgaaatacctcgaggtgtacttcaaagactggattactaccgatcaagctttttctggagcagtgatagccagaaaaagaaatatatattaacaaaatgtgattatatttgccggccaaaagatcaaggtggactgggtgtcctaaatcttgatatcatgaatagatatttgttgagcaaatggctattcaagcttcttaatggtgatggcctatggcaaaaccttttgcgcaacaagtacttaaaagtcaaatctatgtataatgcgatcatcaatttcaatgtaagaatccacaagaggatcttatgggaggtaaaggaaaaacatgatactatgcgcaatggtgctacacgcttggaattggtagccaaggaacttttactccagtctggatggtgtagtacctacaaaattccgtga

SEQ ID NO: 77639 - DNA, 1458 bp, Oryza sativa
  Clone ID: PAT_MRT4530_77517C.1
atgaaggccattctttgtgtgtttgaacatctctcggggctgaaaataaactttcataaaagtgaaattttctgctttgggggagccaaggaaatggaggaccaatatagacaactgtttggttgtaattctggttcctttccattcaaatacttaggaatccccatacactatcgaaaactcagaaattctgattggaaatgtgtggaggataggtttcaaagaaaacttagcacatggaagggcaaaaacagctcctatggtgggagattggttcttcttaactcggttctttcaagtcttcccatgttcatgttatccttttttgaaatacctcgaggtgtacttcaaagactggattactaccgatcgagctttttctggagcagtgatagccagaaaaagaaatataggttaacaaaatgggattatatatgccggccaaaagatcaaggtggactgggtgtcctaaatcttgatatcatgaatagatgtttgttgagcaaatggctattcaagcttcttaatggtgatggcctatggcaaaaccttttgcgcaacaagtacttaaagggtaaacccctctcccacatgtcacacaaaccaggaacatcccaattttgggctggcctaatgaaagtaaaagatcatttttttcagtatggatcttttaaacctggtaatgggatggacataagattttgggaagacacatggttgggcttgcaacctctcaaatatcaatatccttctctgtacattgtggtccgaaagagacattctactttggcagaggttacgagcacaacaccgttgaatgtttcattccgacgatcaattgtaggaccaaagttagttgagtggaacgatctgatctctcgactagctaacataaccctgtcaaatgaaaaggtttgctttgtttggtcgctacataaaaatggccatttttcggtcaaatccatgtttaatgcgatcatcaattccaatgtaaggatccgcaagacgatcttatgggcggtaaaggtaccactaaaaatcaatgtttttatgtggtttcttcacaaaaaagtaatcttgacgaaagataacctcataaagagaaattggaggggaaacaagcaatgttgtttttgtaatacacaagagaccatccaacatcttttctttgactgtcatgaacaacaggatactatgcgcaatggtgctacacgcttggaattagtagccaaggaacttttattccattttggatggcgtaccctcatctctgggccttctgctcttcgacaagagtaacctttggaaaacgagttgcacggacgcagccatatgcttctcggacgccgcaagacaaagaacaaaatggacatcaagtaaaaatgtaatttgtattacaatattataataataacaatgcactatttatctttgacatcgcggcaacacctcaaagac

SEQ ID NO: 77640 - DNA, 2110 bp, Oryza sativa
  Clone ID: PAT_MRT4530_77518C.1
cctaccaaaaatatggtgagattcatatatttaaaaatgagcaacgcaatcatctatccttcacccataagaagtgatatcaaaaggttcatttcagcacatagaagtgacaaaaaattgctactactttgctagattccttctttctagatacaggagggcaacttgtctgtccttttggcatctatggtgaatggtatattggtatgatgccagctaaaatatcttcgtttaagactggcgatttacagtgtacggtgtggaactatggagtatgcatggtgacaaggcgaggtttaatattccagctggggaaaataataggccccaggctacccagatgtattgcacatgaactttgggatgaagccggaggcttgcaaattgcagtagctcatggagcttcagaaggaattccatgataagcaacggccgggtgtgggtggtctgaacttgaaggaactgcgtggtactgaccatagccggcatagacacccacagcaaggagactaaggatgacaaatctataccaagcttcttcatgcagctgagcaaagagaagcatattgaagaaaacagagaccattggaacaataggaactccaggacaagaaaagccaggtggatccacatatacctgtcgaaactggagagcaaaaccagcagcaacagctatgagaagagctattatcatgaaggcaatggcatagctaaaccgatagcacattcctgctacgaaaccacaaagagcaattatgacaagacatagaacaccctcctgccagattgacatatttccaagggagcgacaactggtggtcttgtcattccatcgaagtgtgattacacaagctgatacaactgaataaccggtcagcgtgccaactgagagaatatgagagagttcatgcacattaaagagaccagccaaaactgctgcaacacaaccaacccagatctgagaatgcagaggagtatgacgcgttgggtgtactttggcaaatattgaaggtagcaatccatcccttccaagtccaagatacaaacgtgactgaacatacaaaccaacaagaagtgttgtagtaagaccagcaacagctccgatgctgatcaatacagtaacaaatttcagccccttagcagcaaaagcctcagccaaaggagcatcttcaccaagtaaagtatatggcaccattccagtaatcaccaagcatacagcaacatataataagacgcatgctagaaggctccctaggatacctatcggcaagtccctctgtggttttttggcctcttcagcagaattagcaactgcatcaaatccaacatatgcgaaaaagaccactgtagctccggttacaacagatttgaaaccatttggcataaacggtgaccaatttgatacatccacctcaaagacaccagcaaatacaacaactataacaatcactatcttcaatgtagtcataaaggtatttactgctgatgattctttgaccccatagcagagaattgtagttaagatgatgagaagaattggagctaatatattaactgatacaacaccaccaaagaactcttctccatgacctatccaagttggaatatggcccttcaagaatggaattagctcaaggaattggacaaaatagcttgccaagctacgagctatgcttgccgccccaatatgataatcaagcatcaactgagtgaaaaccaggaacgcggtgagctcgttaaacgccgcatacgtgtacaagtatgctcccccaaccacagcaggaaatcgagatgcgagttcggcatagcacaaggcattgagcacacatgcggctccagcaagaacaaaactgattgtaacacctgggccggcgtcgcgggcaaccgttccggtgacgacgaagatcccggcgccgatggacgcgccgatcccgaggagcacgagctcgaagacgccgagctgccgcacgaggccctcgccggaggcggcgtgggccgcgtgggcggagatgggcttgcggcgtagcgcggcggcgcagaggccggagaggaagccgcggccgccggaggaggaggaggggggccggtggtctgcgccttcttcctccat

SEQ ID NO: 77641 - DNA, 4197 bp, Oryza sativa
  Clone ID: PAT_MRT4530_77519C.1
atgcgggcccagccgcctaatgggctccagtctaagggccctggcgatggcctctacaagcgacaaccaaaggcgctgcttgccctagctcgtaaacagcgtcgaccaatcaaccccaagcgatcttttgcggaagtggtgcgagcgggtgagatggctggtggtggaggacgatatggcggcggccgtggtaccggcagcggcggcgatggccaggatggtgacggccgtggcggcgtgttcaatccaggcaggggagaagcggctaccgggaatggcagtggtggtgcttccggccgtggtcatcaaggccgtggcggagacagtaacagaggtccggatggtcagttcgctgtgaatctgaatgcagcaacagcatcaggtactgatgttccaagaggagagtctagggttgacatagtgactgcagaggctggcacttcttcaaaggcgtcaaaagggcgttgtttcagatgcaaggagaagagccatgctgtttcagagtgcacaaagattttgtgtgatatttgtgaagcacctgaacatactgcactttcatgcccgcttttactcgctcccaaacccacagcaagcatgtgtggatggggagttgatggtggaggctttttcatgatccccacgccaacaacaggggcagtgaaacccagggaacacaacaaaacagcaattatccgggtggagaatggccacatttctgtggacaacttgatcattgaattgcgaaggttggtgccggttaggttccaatgggatgttaaggagactgctccagacacttatatggttcaatttccctctgtgatcgaattagacaggttgcgtagggttggcagtgttcctagttttgactttaatgtgaacctagtcattgacaagtgggagcaagagattgaagcgaagtttgttctaaagaaaacttggtttaaagtttatggagtgtcatatgagattagagactttctcagtctacatgctgttggttctgtcattggtcaaacaacaactgtggacatgatttatctcaggaaaaatggtgtggttaggatgcaggtggcagttgatgagttagcagatttaccacctagtgtttacgttgttgtccgaaaccatggctatgaaatcttctttgaaccggaattgcctgaggtggatgggaaaggaaagaagaagattgatgatattgaccaggacggagaaagaaaaaatggtggtgatcatgatgttcacatggaagatagggacccaaaacgccaaaagaatggttctgatgggtcgctaaggatggaaataggaggcttagcgccagctaagctgccctcaacgcgcaccaataatatggttctagataatgaagcattttcaccgtctcctagctcagatacgcctgctacaacaacggagttggaagcgtttgcctcatactcctccgtggtgttggaaacgcccatgagtcaattgggagcccaagggacaggaaactccgagtcaaccaaggaggctgtcggtgaggtggtgtactccgacgaggtttcgacacagctagcgaagttggcaacgactaaggtactttctactgaggttgctgtgcagctagcaggaacagatgaggtggttacgaatggcaaagagcaacaacaagaacctgtcagcatggcacaagaattacagcatgtttcagctagcttcttgtctcccgtggagcatgtattggactgcaacgtgcagtctgaattgctccccaagaatagccagcttgcaggcgatggaagagtaacatcgactaagaacttgatggcagtactagcaaccaatgaagaccaacttagtgcctccagtgctgccacatctaaagcccaggatgcagcacaggcagttggagctcgatccccgacaagaaggcgacctcgtcgcccagtggaccctattccaactaggcaaagtgaaagacagaaggcgatggcaaatgcagatgcgccggtggcaaaccgggcagagctgcttaaaaaggttcataacctcgagacgctaacaggggtttctctaggaaagaatgatttagaaataaaggagtccattaaccagattaaaatttcagaagtggatagatttgctactctttatagtagtgctgtagcgtctactagtaatgtagataaaagcaatgatgaattgttaaaattgtcttctctccagcacttatgtagtgactggctagaagaggctgagagtaatgacgatgagtctatggattctcaggccatacctcaaatgaggaagatttcgaccaaagtcaaacataaagtggtcaaaaatgatttggcaaaactgttaagggacgaagagttgtattggtaccagcgatctaagacaaatcatttactccaaggggatagtaatactaaatattatcacttgatagacaatggtaaacatcgtaagcagatgattttccagttggaacaagaggacactataataacgggtgaggggaatctcaaagaatacatcaccaattattataaaggattatttggtcctccagatcataatcatgtatccatgatagagggatggactgatgatattcctcaagtgtccgacttggaaaatgacatccttactgctgaattttcagaaaaggaagtcaaagaggcaatttttcaaatggatcataactcctccctaggtccagatggctttcctgcagagttttatcaggtcttttgggagattgttaagaatgatctcatggctctatttagagaatttcataaagggacattatccctttataacctaaactttgggatcatcgcgctattgccaaaaaaggctgatgcaaatcaaattcaacaatataggcctatttgcctactgaatgtcagctttaaaatttttacaaaagtggacaccaataggattacaacggttgctcacaaagtcattcgcccaacccaaacagcgtttttgccagatagaaatatcatggaaggggtggtgattttgcatgagactgtccatgagttacacacaaagaaaatggatggtatcatattcaaaattgactttgaaaaggcttatgacaaagttaaatggcagttccttcagcagacattacgaatgaaagggttttcacaatcgtggtgcaattggatttccaactgggtggaaggaggaactgtaagtgtcaaagtcaatgataatgtaggaaaaaatttccggacacgcaaaggcttgagacaaggggatccaatgtccccaattctttttaacatagtggctgatatgttagccattcttattgaaaaagtcaaagtcgatggccaaattagaggggtaattccacacttagtggatgatggtttgtccattctccaatatgccgacgatacaataatatttcttgaacatgattttgaacaagcaaaaaacatgaaggccattctttgtgtgtttgaacatctctcggggctgaaaataaactttcataaaagtgaaattttctgctttgggggagccaaggaaatggaggaccaatatagacaactgtttggttgtaattctggttcctttccattcaaatacttaggaatccccatacactatcgaaaactcagaaattttgattggaaatgtgtggaggataggtttcaaagaaaacttagcgcatggaagggcaaaaacagctcctatggtgggagattggttcttcttaacttggttctttcgagtcttcccatgttcatgttatccttttttgaaatacctcgaggtgtacttcaaagactagattactaccgatcgagctttttctggagcagtgatagccagaaaaagaaatataagttaacaaaatgggattatatatgccggccaaaagatcaaggtggactgggtgtcctaaatcttgatatcatgaatagatgtttgttgagcaaatggctattcaagcttcttaatggtgatggcctatggcaaaaccttttgcgcaacaagtacttaaagggttatcttcatgtgttccaattggctccactcttggtgtatgatgctttcacaggaacaacaggatactatgcgcaatggtgctacacgcttggaaatagtagccaaggaacttttatttcattttggatggcgtggtacctacagaatttcgtgatagactctacgtga

SEQ ID NO: 77642 - DNA, 6243 bp, Oryza sativa
  Clone ID: PAT_MRT4530_7751C.1
cggagtccacagatagaaggagtcctactcggacagaactgggtcgttactgtatcgtgtagggtccgatgtctccgagttctacttggagaccaactgacctgcggtataaaagggaccccccgggaggacctaaggcatcgaatcttatcgccaacacatccaccacaacctacgaaatcctcgtaccagcgtaccccaataccctctatatccggtctacgggtatcccccgtcgacagtggcgcgccaggtagggggacttggtgctcaaggttctactactatgtcatcaagcttcgtcgacaacagcgccaaccctggcatcaaccaaggagtttctactttgacaatgctggtgtggactcaagtcggcgaaattgtcttcccggtttacaccacggtgtcgatctcgactggtccatcaatgatcggaagcgagaacgccgtggttacaaccctggacggctccatgtcgaaggatcctctcgcagaagtggagaacggaacgtcgacaacatccgagcccgagaaggatcctagtgcggccaaatcttgtccttccgacgagaatcacgagctgacaaggacaacttccgaggcgacaaggtcctgttgtcctatccacaaaactaggaaacataccttgcaagcttgttgggtttttctcgacgtacaagctgagatccgtgtctgcaaagagcgtggaattcaacgcacttctctgacccgtgatgttcattgtcctattcacaagacgaagaatcatgacctctctagctgcaaggttcttctcagcgccatgaagacgtcacctcctatggtccagcagtcacgaatctctcttacagatgtagacaaggaacgaggagtgacagttatctcagaccgattcgttggggtaatcgacatcgatccccacgagccatcagtcctacacttgctcgaagaccagggcttatcgttgacaagcacaccacgcgatgtgtttgctatcgatgggaccagcacatccgcgcgtgctaacgcagaagaggagaatcaagtggttacaccggcccagcacattggggccattaacgcaatactgagggaaatcccttatgatcccgttctgaacgatgaccttgcacggtggacggaagactacgggaatcagtggccaatctcggtaacgcgtttgaggaggccgctgccggagcacagccagaacaaccgacagctggcggtgccgattgcgaacctcctgagtagcggacatcacctcgacgagccactcctccacctcgcggcaccagcgatctccatgaccatttgaatggtcgccgagaagcacgacgcacgcaagacaatgaaaaatcgttcccgacattgcgtctcctcacgacgtcgaggaaacgaggagcgaggaggacacccgagcgagaaccaagaccgcgatgatcgtgaacaacgggtgccaggcgatactgctcgaggacgccgcaataacgatgacgacgacggagatcgacgccggaacaacaacggggagcgtcgccaggattctcgagaacccagacgtcatcctcggaatcgcacaccggaaccaagtgactcatcgtcgtcgtcatcatcctcattgtcagatagacatccacgaaggacatacgatcgccgacaacccaccgcccccggcggcgggtgtagagctttcagccattctctacgttatgtccgatggcctgagagattccgaccgggagcaatagagaagtacgatgggagcaccgacccagaagaattcctttaggtctactccatggtactctacgctgccggagcagacgacaacgcattggcgaattatttactggcggcgttgaaaggttctgcacgttcatggctagttcacctcccgccatactcgatttcttcatgggcagatctgtggtagtagtttgtcgccaacttccaaggaacttacaagcgccacgtgatcgaacaggacctacacgtgttgacacagaatctgggcaaatcattgagggactacgttcggcgctttaatgagtgcagaaatactatccccgatatcaccgatgcttccgtaatccgcgctttcaagactggtgtcagagatcgctataccacccaggagttggcgacaaggcggatcacgattgctcgaaaactattcgagattgtcgatcggtgcactcacgcggacgacgctctgagacgcaagaacgacaagccgaagacaggaggagagaagaaaccagccaaagacgcacctgaatcaagcaagaagaagagtcgcaaaagtgggaaaaggaaagctcaaacggaagtcctcgcggcagagtacgcagacccacaaggcaacgacacaaaaaaaatatggtgccctatatacaagtcggacatacagtctctggaagattgcttcgtcttcaaaaagtcgctcgcaaagcaactggcattggagaagggcaagcgagtacgtgtagtcgagaaggtcgctgaggcagctactcaggactcggactcagcatacccagatttcgatctccatgtcttgcatatcttcggaggctccacgacgacgatatccgatcatggttgagcccactattcggaatatcaaggtcgcgcgggttctcatcgatggcggcagctccatcaaccttctcttcgccagcaccttggacgcgatggaaatcccacgaagcgagttgatgcccactgatcaacccttccatggaattactcctcaatcatcgtccaagccattgggcaagaatacattgcctgtgacttttggccaagcaaataacttccgaacagagcagatcacctttgatgtcgctgaatttgatatagcatacaatgccatcatcggaagaactgcactcgcgaagttcatggccgcatctcactacgcgtatcaagtgctcaagatgcccgggccgaagggaacaatcactatttaagggaacgcaaagctggcggtgcaatgcgacaagcagagcctcgacatggtcgagcacacgcccagcccacctgccacagctgaggcacccaagaaagtgagcaaaacgaacaagacgccaaaaccagacggcgcaatcaagatcgttccgctctctagtgccaacctcgacaagaccgaactcgcgctcatcaccttcctccgcgacaatgcagatgtgttcgcttggcagccgtccgacatgccgggggtccctagggaggtgattgagcacaaactcatggtgcgacccgatgccaagctagtaaaacaaaaactgcggagatttgcactagatcgaaaacaggccatacgagaagaacttgacaagcttctcaaagctggcttcatcagagaggtactccatccagagtggctaccaacccagtcatggtgtggaaagccaacgggaagtggaggatgtgcgtcgacttcaccgacctcaacaaggcgtgtcccaagtatcatttccctcgtcctcgaatagaccaactggtggactcaacagctggttgtgagttgttaagttttcttgacgcttactccagctaccaccaaatcagcatggcgaaagaggacgaggagaagacagcattcatcacgccgttcggtgtattctgctacgttaagatgacgtttggactgataaccacaggaaacactttccaacgaacggtccaaggggcacttaacgatcagcttgggaacaatgtcgaggcctacgttgataacattgttgtcaagaccaagacaagcgactcattgattgacgatctacgggaaacgttcgacaacctctgacgatatcgtctcaagctcaatccagagaagtgcatgttcggagtaccatcgagcaagctgctcgggttcctcgtctctggtagaggaatagaagcaaatcccgagaagatcaaggcaatcgagaacatgaagtcgcccacaagactcaaggaagtacagaagctaactgtatgcatggcggctctaagcaggttcgtcgctaggatgggagaacgaggacaacctttctttgctctgcggaagaaacaagataaatttgtatggacacaggaagctgaagaggcattcatcgcactcaagcgctacctgtcaaatcaccctatacttgttgctccccaacctaatgaagaattattcctctatattgccgccacgccatattccgtgagtactgacattgttgtcgagagagagaaggtgcaaagaccagtctattacgtcagggaagctctccacgacgcgaagacgagatacccatagatccaaaaactgctttatgcagtaatcatgatgttaagaaagctacgccactacttccaagcccacagggtcacagttgtttcctccttccctcttggtgaagtcgtgagaaacaaagacgttgtcggccacattgcgaaatgggtagtcgagctaagccagtttgatgtccactttgtgccacgaacagccatcaagtcctaggttctcgccgacgtcgtagccgattggactatgcctgagcaggtcaaacagtcaaaccgacaacgaaacatagacaacggcgtttgatggcgcactcaacagccaaggagcaagggcaggattcatcttgacatcacctttgggagatcagttcaagcatgcaattcacctcaacttcaaggcgaccaacaacactgccgaatacgaaggactactcgctaggataagagcagcagccgcacttggagtcaagcggctgatcgtaaaaggggattccgaactagtagcaaactaggtgcacaaagactacaagtgctctagccccgagttatccaagtacctcgcagaagtcaggaagctagaaaaaaggtttgatgaaatcgaggtccgacacgtataccgcaaggacaacatcgaaccggacgatatagcacagcgtgcgtctagacgggagccactcgaacccggcacatttatggacgtcctgacaaagccatcggtgaaagcggcaaacgacgaggatagcacagtcgcccccgacatcagctcgggggctatagaggcagagcgcgtcgttgccgacatcgagaccatagacgactggcggatcccactcattaaattcataagtagcgacgagttgcccgcggatgatgctgaagtcgagaaaataatctgtcaagccaaaatctactgtatgatcggcaatgatctatacaagaaggcgccaaacggggtacttctgaaatgcgtctcgtccgacgatggcaaacatctcctcctcgacatacacgaagggatctgtgggtcacatgccgccgatcgcacattggtcagaaaagcttttcgacaaggatttttctagccgactgccctcaaagacgcttgtgacatgtaaacacacaaagctaccagcacaagcgctcaaaactatccctctcacttggctgttctcgtgctggggcctcgacatactcggaccattcccacgaggacagggcggtcacagattcctgttcgtggcgatcgacaagttcaccaagtggatcgaagcgacaccaacgggggaaatcaaggctgacaacgccatcaaattcgtcaaagggatattctgtagatatggattgccccaccgcatcataatgaacaacggctcccagttcatcagtgccgacttccaggaatactgcatcaggctgggagtcaagatctgtttcgcctcggtttctcaccctcagagaaatggacaggtcgagagggcaaacgacatagtactacaaggaatcaagactctattatgggccgtgcgtaccacaccgacaacgtccaacaaggagacacccttcttcctcgtgtatggcttagaggccatgcttcccactgagctacgacatcagagtacacgagtacagaagtactccgacgaggatcaagaggagcagcgaaacgacgacgtgaatctgctcgaggaacatcgagaaagagttaccgtcagagcagccagctaccaacaggcccttcgccgataccacaagaagcgcatcagagcatgcacactttcgatcggcgactatgtcctccgatgggttcaaagccaaacagagcgtaacaaactcacatccaaataggagggaccgtacacgatcacgcaagtcttgcggtcgggtgcattcaagatcgcagacggcgatggtcgcgagttagcaaattcttggaacattgatcaattacgtaaattctatgta

SEQ ID NO: 77643 - DNA, 1460 bp, Oryza sativa
  Clone ID: PAT_MRT4530_77520C.1
atgaaggccattctttgtgtgtttgaacatctctcggggctgaaaataaactttcataaaagtgaaattttctgctttgggggagctaaggaaatggaggaccaatatagacaactgtttggttgtaattctggttcctttccattcaaatacttaggaatccccatatacgatcgaaaactcaaaaattctgattggaaatttgtggaggataggtttcaaagaaaacttagcacatggaagggcaaaaacagctcctatggtgggagattggttcttcttaactcggttctttcgagtcttcccatgttcatgttatccttttttgaaatacctcgaggtgtacttcaaagattggattactaccgatcgagctttttctagagcagtgatagctagaaaaagaaatatcggttaacaaaataggattatatatgccggccaaaagatcaaggtggactgggtgtcctaaatcttgatatcatgaatagatgtttgttaagcaaatggctattcaagcttcttaatggtgatggcctatggcaaaaccttttgcgcaacaagtacttaaagggtaaacccctctcccacatgtcacacaaaccaggaacatcccaattttgggctggcctaatgaaagtaaaagatcaattttttcagtatggatcttttaaacctggtaatgggatggaaataagattttgggaagacacatggttgggcttgcaacctctcaaatatcaatatccttctctgtacaatgtggtccaaaaaagacattctactttggcagaggttatgagcacaacaccgttgaatgtttcattccgacgatcaattgtaggaccaaagttagttgagtggaataatttgatctctcgactagctaacataaccctgtcaaatgaaaatgattgctttatttggtcgctacataaaaatggccatttttcggtcaaatccatgtataatgcgatcatcaattccaatgtaagaatccacaagaggatcttatgggaggtaaaggtaccactaaaaatcaaagtatttatgtggtttcttcacaaaaaaaagtaatcttgacgaaagataatctcataaagagaaattgaaggggaaacaagcaatgttgtttttgtaatacacaagagaccatccaacatcttttctttgactgtcatgaacaacaggatactatgcgcaatggtgctacacgcttagaattagtagccaaggaacttttattccagtttggatggcgtaacaaaattgccaaaaatatttttgctagtcgtccgtataacctagccaccagtgaaactgattttggtaagcgggtgaggtctccctgcgatgatcatcatctattgtcactgacccatgatcgcaagcagctaggtggtcccctggtgaaaatgtgtagttatatactacctccgttttttaatagatgacgccgt

SEQ ID NO: 77644 - DNA, 727 bp, Oryza sativa
  Clone ID: PAT_MRT4530_77521C.1
ccgggctgcagcacgtcgggcgaggcctcgctcgcttactcggtgtttaggcatggacgtttctgctgcgctcagcagcgactactcgtcggggacgccgtcgccggtggcggccgacgctgacgacggctcctccgcctacatgacggtgtcgtcggcgccgcccaagcggcgggcggggcggaccaagttcaaggagacgcggcaccccgtgttcaagggcgtgcgccggaggaaccccgggaggtgggtgtgcgaggtgcgcgagccgcacggcaagcagcggatatggctcgggacgttcgagacagcagagatggcggcgcgcgcgcacgacgtcgccgcgctcgcgctccgcggccgcgccgcctgcctcaacttcgccgactcgccgaggcgcctccgcgtcccgcccatcggcgcaagccacgacgacatacggagggcggcggctgaggcggccgaggcattccggccgccaccagatgagagcaatgcggccaccgaggtggcagccgccgcatcgggcgccactaattcgaacgccgaacagttcgcctcccacccgtactacgaggtcatggacgatgggctggacttggggatgcagggctatctcgacatggcgcaagggatgctcattgacccgcctccaatggccggtgatcctgccgtaggtagcggcgaagacgacaacgatggcgaggtccagctatggagctactga

SEQ ID NO: 77645 - DNA, 282 bp, Oryza sativa
  Clone ID: PAT_MRT4530_77522C.1
atgtatgtggtccccttcgaagctcattgccgccatggttgtccccatcatcacctttttgctaaaaccgtggaactgccaaggtcctttaggtggggtgaccagatcaggccaccattagctctagggtggccagatctggttgcatctgacttcagggtagcccgatctggtgcccctaaggtggcggtgatcgaccccgacgccaagtgggcgaagacaacgccgatgatggaggtggaggcgcgcagaggagatccgatgaacgggatagccacataa

SEQ ID NO: 77646 - DNA, 452 bp, Oryza sativa
  Clone ID: PAT_MRT4530_77523C.1
attttgtgtgtaaatgacaatgggtcccacatatatttcttaaagagtaaagttcatcaccggtctttaaacttgtaccgctgtgttatccctgtccctaaactcgcaaatcgaccgttcaggcccttaaatttgttcgactgtgtcatcccgatctctaaacttgcagatcactcgtttaagttctccaaatcgtttagttgtgtcaccccggtctctaaacttggatttgaatatcatctgggtcaaatatgacgggaccggggtaacacaactgaacaagttggaggacctaaacgagtgatctgcaagtttaggggccgggatgacacagtcggacaagtttgaagacctgaatggtcgatttgcgagtttagggaccgggatgacacaacggtacaagtttagagaccggtgatgaactttactctttcgtaaattgtaatgctacg

SEQ ID NO: 77647 - DNA, 2071 bp, Oryza sativa
  Clone ID: PAT_MRT4530_77524C.1
atgggggacgagacctccacctccgtcgccacgcagtcgcaggaacctgcagcagtgggagctgggagtgtgaagcaacagctctccaagttggttattgcatcactccggactacggttcccgaagtggaagtcgatcctatggttgaagtctgcacagcaaagtttggtgactaccagtgcaacaatgcaatgggattatggtcaagaattaaaggatctggaacaagtttcaagaaccccaatgcaattggacaggccattgcgaagaacctgcctccgtctgatattattgaatccacatctgtcgctggacctggttttgtgaatattgtcttgtccaacagctgggttgcaaagagaatacaagatatgcttgtgaatggtatcaaaacatgggcaccaatcctgccagttaagagggcagtgcttgatttctcatcccctaacattgccaaggaaatgcatgttgggcatttaagatcaacaatcattggagacacccttgcccgcatgtttgaattttccaatgttgaagttctccgccgtaatcatgtcggggactggggcacacagtttggaatgctcatacaatatctatttgaaaaatttccaaattgggaggaaattggtagccaggctattggtgaccttcagactttctataaagcgtccaagaaccgctttgatggtgatgcagaatttaaagacagagctcaacaagcagtcgttagacttcagggaggggaagagagataccgtgctgcttggaacaagatttgtgaaatcagcaggaatgaatttgacatggtttacaagctcttgaatgtaaagcttgaagaaaagggagagagcttttataatccttttattccacaagtcttggaagagttgaataacaaaggtttgatcaaagaaagcgagggtgctaaagtgatattcatagaaggccatcaaatccctttgatagtggttaaaagggacggtggctttaactatgcctcaacagacttagctgctctatggtaccgtcttaatgttgagaaggcagaatggataatatacgtaacagatgttggacagcagcagcactttgacatgttctttaatgctgccagaatggctggctggcttccagatccaaaagaaaagaaatatccaaaaacgaatcatgttgggtttggtcttgttcttggatcagatggcaagcgtttccgaactcgtagtaccgaagttgttcgattgatagagctacttgatgaggctaaatctcggagtaaatcagaacttctccagcgactaacagaaaatggtaaaattgttgattggactgaggaggaactggaaaagacttcagaagcagtaggatatggcgctgtcaagtatgcagatctgaagaacaatcgtcttaccaattacacatttagctttgaacaaatgctgagtgataagggaaatacagctgtttaccttcagtatgctcatgctcgcatttgctctataatcaggaaatccaacaaggatgtagaagagctgaaaatgagtggtgccatttctcttgatcatccagatgagcgtgtcttgggactgtacctgatccgatttgcagaggttgtggaagaggcgtgcaccaacctacttccgaatgtcctgtgcgagtacctgtacaacctttctgaaatgttcacaagattttacaccaactgccaggtggttggatcgcccgaggagacaagccgactgctgctctgccaagcgacggcggtcgtgatgcgacaatgctttgagctgctcggaattacaccagtttacaagctgtgattgacatttcgatatccatttttcatacaaactttctttcatggttgcagtttttgttatgtaacctagatgatgcttctaacatattctagtcttggttgctgtattcgaagacaccaaagaaagattttatttgatctcacttgcattgtctctgttgtctctctacgactcaccagtgttctttcgttgacgctgggttctactatgtactagtatactatttgtagtttaaaaaaaaaaaaaaaaa

SEQ ID NO: 77648 - DNA, 1023 bp, Oryza sativa
  Clone ID: PAT_MRT4530_77525C.1
atgaagtgcatccgctcgtaccgagacgactgcggggagctcgtcgaccgctccgacttcgaccgcgaggtcgccgccatggaggtgtgcaggggccacccctacatcgtgcagcctcgcgcgcacggccgatgcgacgatggcgaggccgtcctcgtcatggagttcgtggggccgacgctgcgtcaagtcttgaggcgcgagcggggcgggaggacgcggcggtcggagctcgaggtccgcgtcgccatgcggcagctgctctccggcgccaagaggatgcacgacgccggcctcatgcaccgggacctcaagccggacaacgtcctcgtcgacgcgcgcggcaacctcaagatctgcgacctcggcctgtcgcagagcaccgcctcaccgccgccctactccaacccgatcggcacgcggtggtactgcgcgccggagatcctcctcgggtcgacggactacgacgagcgcgtcgacgcgtggtcgctcggctgcatcatggcggagctcctcgcccggaagccgctgttccgcgggagctcggacagggagcagctcggcgagatcgtcgacgtcctcggcgtgaacgacatcaagcggtggcgaggctacaagggggcagcggctgctgggaggatgcgggccggacagctttcttcgtggcttcttcccatctccggccgacgccaggatgctccgccggccgccattgtcggaggctgggttcgaggtgttgagtggacttctgacgtgcaacccggagaagaggatgacggtggcgcaagcactccggcaccggtggttcaaggaggccgacagtgccagcctgcgacatcgccgggggaggcggagtcctgcgagcggaaggtgccggagattcttccaaggcaggaggtggaaggggaggcggggggcgggacggggggcacagggaggtgggctgtgcaccgcgagcggccgcggacggcgccggggaaggcaccgcgagtgtgccttcgaaggcgagcgcgcttgagttga

SEQ ID NO: 77649 - DNA, 1009 bp, Oryza sativa
  unsure (1)..(1009): unsure at all n locations
  Clone ID: PAT_MRT4530_77526C.1
atgaggacaagtgaagtgccaccaaccaagctgcggctaggtcggccagcgtccgaaggtcgcggggcagcggatccgtcggccgtggagccggccgctggcgacgacgacggcggttgtggtgacgccggatgcggcgagctcgaccggtggcatggcctagggaggagctcgcggcactcgacggcgacggccatggtgcagagtttgccggctcgaggagcagcaggaagaaggaagaagatggggacgtggatgtcgctggtgtggttcttgatgttcccggcgaagaagtacaagatcgtcgtcgtcggcctcgacgatggcaagaccaccacgctctacaagctccatgctgcccaaaccaatctcccccaacccgacctttctcctccctggcagtggcagccaaggggcttggagctcgttgggtggcgttactagcgcgatggccgaagggcgtggagctcgagggaccccctccacaaccgctcgccaccgccatcaccttggccaccacctatctcgtgtnccgatctcaacccgctatggaggagggcagatttgtggcaggaaagcggtgggagactgcttgctgggggctggagggagtgaggccagtggaaaacgggatggaggctgagacagagggagctcgtcggcaacttcggctgctccattgagattttcagggaggaaggggaaagagcagagaggaaggaagaagaagaaaggggtgtactgactagtgggaccccctctccctcttggtgacgtggaattcttttttagaggtggcatccgacgtggcatccaattgtaccaaaaccagcctaaaattgctttgggggtaaagtgtccggttttaatagttcgagggtgttagatatccggttttacagttcgagggtgtgttttagacaaggtaaatagttgaagggcgtaaaatggacttatccttttttttaaaataagacgaatgatcaaacgtaaaaaaaaaaaaaaaaaa

SEQ ID NO: 77650 - DNA, 612 bp, Oryza sativa
  Clone ID: PAT_MRT4530_77527C.1
cggcacgaggcgcaaaagcagcagcgaaaaagcgctacatacatcgcccccaccccctcgcctcctccaccgactccgacgatggcggcgacggcgacagccaccggccgccgcgccgccctgacgttccgccgcctcttctcttcccactccgccgctcccgctcctccccccctcctcggccacttccaccaccccgcgccggtgcctcccagaggctgccctccccgcccgcacacgctgctcaccgtccccgccttccaacccctgatcaccgccgcctcctcctccccgcgccgcctctccctcgacttcgtccccgacctctcccacttcgtcctcctctactcccacctcgggctcctcctcctccgccaccgcgaacgccacgacgccttcctcgtctgcgaccccgtctcccgccgccacgtgctgttccacccgccgccggtggacgagtactccagtggcgggatattcagcgccgcgctcctctcccgcgacgacgcggcggcgggggaccccggcggcgacggcggggggctgcggttcggggccgtctgcgtcgccgtcaacctcggccgcccgtgcgcctgggtcggcacgtaccgc

SEQ ID NO: 77651 - DNA, 641 bp, Oryza sativa
  Clone ID: PAT_MRT4530_77528C.1
ttttttttttttttttacccaagataaaacatcactctagaatttaatttttgttctcagacacaaacctgcatgaaaaacatacaaaggctacgatataattgcagtgcagctgcttatttatactacagttcaggcccatttggggggtccattcaaagcccaaatccagccccacttcagtctccccgagatcagtgcttcgcacacggcttgcgccgatctcaaacgaggcggcggcagagggtgatgccgtcggagaccgggagctgcacggcctccacgcgcgggtcgccggcgatcttggcgttgaaggccacgatggagcggcggatgtcctggtcgaactcctccagcacggagtcgtcctccagcgccacggacccgccccagagcgtgttgtcgtaggccagcacgccgccggcgcgcaccagccgcagcagccgctcgtggtactcgccgtagttccccttgtcggcgtccacgaacgcgaagtcgaacttcccctcgttctcctcgttggcgaggaggttgtcgaggatgggcatggcggcgccctcgcggaagtcgaccttgtgggcgacgccggccttcttgatgacggggaggccgaggtcgaagtactcccggctgacgtcgat

SEQ ID NO: 77652 - DNA, 181 bp, Oryza sativa
  unsure (1)..(181): unsure at all n locations
  Clone ID: PAT_MRT4530_77529C.1
caggaccccctgtgcttcccaataacacccaagcaagctccatggcggcattntccgttcgcataggcttggccatcagcttctcacgggggatctccaccaaagaggcacttatgcacaacaccaccacgaacgcagtcctctcctgccctaggccaccgagaacatataacagcatagt

SEQ ID NO: 77653 - DNA, 544 bp, Oryza sativa
  Clone ID: PAT_MRT4530_7752C.1
cccatgcctctgtctcggccccgcgccccccggcttcctgctttacacccgcccacgccggtatccgacgcgctcagcgccgacgagaagatctacttcaacggctgccggagcttcctgctctggcagaaggcggcgcgcgacaccatggccaagggcggccggcctgagctggcgaatgtcgcgacctgcaatccctgcaagaaacggggcggcggcggctggaagggccggcctgaacaagttcctcctcagcttcagcttcaaggtgtgagagccaccgatgcctccgtaatccggatcgagctgatctcctcctgccggaatcgttgtccccgagttcatcactacagctggtcgggttgcgcgtaataattcgacgatgcttctttttcagtcgtcagtgtcagttgcttggttatttcgttcagttttgtcaatctagtcgcattttctcgtcctgttgcaaactcctatctacatgtcagcatcaaaattatgaataaaatcaccgtgtcccgatgatatttttgctaaaaaaaaa

SEQ ID NO: 77654 - DNA, 1209 bp, Oryza sativa
  Clone ID: PAT_MRT4530_77530C.1
atgagccctagctcccacaaatcaaagcaaatccgccatcagagtccgagaattttctcgatcgcagaaaaaaaaagggggggtaggagcacgggagcaagcgaacgcgcacggggagactaatccgcggacggaaggggggagcacgcgcgatccaggggataggggggagcggaggcgatggcggcgtaggtacctgacgccttggcgaggagatgagggagggtgtggcggaacaggcggaggcggcgcgtcgtcgagcaggtggagacctcggccgcggcggtgcgcagcgcctcctccgccgacgcctcctgcgcgcccattccgcggggggaggggcggctggcgcggcggcggcggcggcgcggggagagaccgagattggactagcgagtggtgggatgaggcggcggcggaggaggaggggggcaacgcagcgcagggcccctctctggccacggtctcggcggtgccggggacgacgacctcaaggagactccgccggcgcgtccgcccgccgctgccccactccgtcccgtcggcttcgcgccgccgttcgcccgcccgctccgccccgccccgccagcttcgcgccgctgcgcgccggaagacgacgacgacgaggctggcgccctccgcttggctccgccggccgccgagtcgcagcggcgcgcggacgggagctcgacaccgcccaccgccgccaccgcggaggaggaggaggataccacggcggccggctgtgctggcgggagagggggaagaggaggccggcgagccggttgccgccgagtcgcagtcgggtgcggaatctggagcggcggcggcggcagggtgagggctggcgcgaaggaaggaacttgagcgggtcgagcggcggcttcggcggcgacggcagagagtcggaggagaggtggtggagcggcgacggcctcagctcgctggagaaggcgggggcgtctggccggtggcctcccccatgatggtgccgcgccaggctgggacgaacgggagggctaatgtagacggcgaaacctgagatgccgccggccctagccgtgcctcccggtctgcgccggcagggggtgccgcctctgtttctttctggggttcaactacaccggcatgttcagcgggtgcggctgcaggagaaaagagagagaagggagagagaggggggaggaagaagggttggagagagaaagg

SEQ ID NO: 77655 - DNA, 339 bp, Oryza sativa
  Clone ID: PAT_MRT4530_77531C.1
atggaggcggcggacgaaaccacagaagaggaggggaggatgaaatcgctccccctgcacggacgtatctcctccgtcggttcgtccctcgcggctaatccaacgctccgggagtgccctgtcctgtggctggtggtcaccatggagcatgcaccttcctcctcctcctctcgccctgcagaccccactctgaatcccaaatacattgatcgatttatatttctaatccagtacattgatggtatcaagcttaaaaggcagagacctgcagctgctggccatgctgtcataatggcctgcaaggagacagacatgccaatggaggagttagatgacatt

SEQ ID NO: 77656 - DNA, 172 bp, Oryza sativa
  Clone ID: PAT_MRT4530_77532C.1
tactacaccgtaaccgccactttggattccagggtgggtacatccaatgccgaggggaatccatctccccgtctcggactagcgctcctcttcctccctcgcggtgtctcggatcggaaatggctatcttggtgcatcctttctatgggatgtgtaacctatgtgatgtcta

SEQ ID NO: 77657 - DNA, 762 bp, Oryza sativa
  Clone ID: PAT_MRT4530_77533C.1
atgaacggccgctgcctcgccggccgccggcgcgccgcttgccgcgccgcccgccgcgtcgccgcccgccgccgcgccgcccgccgccacgaggccgccaactgccagcgcgctgcctcgcccgaccctccacacgccgcgccgccgcgaggccgccagccgcccgcgcgctgcctcgcccgacccttcgcacgccgcgccgccgcgctggctggcagccgccgcgcaccggccgatctagatgacgagtccgcacttcctcatgttcccggctcctgctccacgcttcccgaatcgatgatggcgccgacgaagcagacagcctgcctgtgggaggttgggccatcgggaggaagacggagggccgccatcgaggtcgccgccaccttgcctccgcctagatctcatcttcgtggcatggagtcacagtcggtgcccgaggacgacgagctcgatgaggcgaccgaggtcgggttaatcacgttcgttgtgcggctcaagaaggccaccggcattttcgctcttcttgtcccggcttgcggccatggaggacttcaccggcattctcatcgatcggggtctcttgtacttgctgggttccccttcaacgcctacaactaggagttccgctgatttgctcgggtttggagacttgtcctctagcccaagaagaagaaggttgcgccggccgcccagttcttctctggcgagcttcttgcattggtgttggccatcttcttcgtctccggcgaaaggattcat

SEQ ID NO: 77658 - DNA, 438 bp, Oryza sativa
  Clone ID: PAT_MRT4530_77534C.1
ggactaaacccccccctaaaaaaaaccccaaacagaggggggggggacaacaaattttttccaagggggagcccaggggacaaattcatatgggccccggtttggacggccccggcccaaacggcccatttgtccattaaaagggggacacaccgttaattaaaacgggggggggaacctttgggcaacgaaaaacccccccaaaaaaaaagggtggcccccttgacaaatttaacccccgccaaagccaaaaacagggcccccctagcgacgaattagaggttccttcacctttccgaggtcaaggggggggtcccccattttttaaaaaaaatttttgtttaccccggggtccattgaaaaaaaaatgggcattgccttcggggtcttggtcccgggcgggaaaaaggctttaaccccaaggccgggggccaaaaa

SEQ ID NO: 77659 - DNA, 663 bp, Oryza sativa
  unsure (1)..(663): unsure at all n locations
  Clone ID: PAT_MRT4530_77535C.1
ccacgcgtccgccatgctcagggacggagtggctcccaacatgtacactttctcgtccattctgggtgcttgcagcacgcccagggtgctcgcggcgatgcacgggagcatcgttaaggattcgcgcagagcggggatggtgtcggggcgatagagctttttatgaggatgaaggaggctgggttcttgtccaaccagggaaccttgaccagtgttctccgggcatgcactggtttggtcacacttgaggtggggaggcaggttcatgctcatgttctcaagtatgacaaggacctgattttgcataatgcacttcttgacatgtattgcaagtgcggtagcctgcaggatgcagatgccttgtttggcaggatgcctcagagggaccgtgatctcttggagtaccatgatcntctggtttggcacagaatgggagaagcattgaggattgaaggtttttgacatgatgaaatctgaagggcctagaccaaaccacataactatgtttggnagttctctttgcatgcagccacgccggtctagtggaaagagggttggtactacttntagttcaatggagaaaactctttcgtattcaacctgagagagaacactgcaactgcatgggncgatctactttggtcgggcagggaagcttgatga

SEQ ID NO: 77660 - DNA, 246 bp, Oryza sativa
  Clone ID: PAT_MRT4530_77536C.1
atggcgaggatgacatatgatcattacatcttggtggatttttatcccaaaggctattgtgctggtgcagttgtgcagcagtgcaggtatgcttgtgagttgtgtcaggttgatctgggattacattcagcaatacttctctctcatttcctggtgaattggcaatctatcctaactgttgctggttttccttctcaggtaagagcacctttcatacaaaaacacaatgtgcccggtgaaagataa

SEQ ID NO: 77661 - DNA, 441 bp, Oryza sativa
  Clone ID: PAT_MRT4530_77537C.1
tgccaaaggagagggtgctcctgagtgtgaaaaatttgccaaaatattatcgatcactttgcccaagtgaatggattgagcgttggaacgaacaacgtgagaatggcacattccctggacccttgtaggccataacaaagaaaaacccatgctatcatcccaccaaattcccaaccaatctttcatgaataaccggaccaaataaccacagagctgatgctgtcagtcacttgtttctattgaacagttcttacaaataaaagtcctgactggttctaagtcgaagaaggcgcttctgtatttaggtaacacagttgttacggaattgttcaaataattcacctttggaaccatggaatgtacccagcttgctgtcccacccgtgcaatgttcatatgatatgacgtgcaatgttcatatgaaaaaaaaaaaaaaaaaaaa

SEQ ID NO: 77662 - DNA, 2048 bp, Oryza sativa
  Clone ID: PAT_MRT4530_77538C.1
atggaagtagacgaaatcgatgataccgataagatcgtagtcgaggtattcgacgagatctcctggcaacttggcttcgcgtactctggcttcgtaaactatggtggctcctccgtctcaggcgacgtcggaggcagagctccagtcctcgatcgtctgctcgctgctccggcgggaggacgaagaggagcggcggggttgggggtgctcccgcctgcccgcccgccggccagccagtaccctatggcagcagcttccctactatgccatgttattgctagatccgcccctgctggccggagccgcccgtttcctcctccactccgacccccacaccgcgcaccccctcctcgtcgccttctcccgcctttggggcccacggcccgctccgcgacgcgctcgcgctgctcccggacctcgccgcggccgggctcacagcggaccccgtcgccgtctcccgcctcatcaagctctgcgtccgccacggcacacccagcgatggccgcctcatccaccgccacgttttcggcggcggcgatgtggcggcgccctcctgcagcagcctctttgtctccaactccctcgtctccttgtacgccaagttcggcctgctcgacgacgcactcaggctgttcgacggaatgccgcacaagaatgtcgtgtcctggacgaccgtcgtcgctgcgctggccaatgcccgcgggaggaaggaggacgcgctgcggctttttgtggccatgctcagggacggagtggctcccaacatgtacactttctcgtccattctgggtgcttgcagcacgcccagggtgctcgcggcgatgcacgggagcatcgttaaggttgggttggattcggatgtgtttgtgcggagctccttgattgatgcgtatatgaagtttggagatttggacggtgggcgtcgtgtctttgacgagatggtaacacgtgatttgatcgtgtggaattcgatcattgcaggattcgcgcagagcggggatggtgtcggggcgatagagctttttatgaggatgaaggaggctgggttcttgtccaaccagggaaccttgaccagtgttctccgggcatgcactggtttggtcacacttgaggtggggaggcaggttcatgctcatgttctcaagtatgacaaggacctgattttgcataatgcacttcttgacatgtattgcaagtgcggtagcctgcaggatgcagatgccttgtttggcaggatgcctcagagggacgtgatctcttggagtaccatgatctctggtttggcacagaatgggagaagcattgaggcattgaaggtttttgacatgatgaaatctgaagggcctagaccaaaccacataactatggttggagttctctttgcatgcagccacgccggtctagtggaagatggttggtactactttagttcaatggagaaactcttcggtattcaacctgagagagaacactgcaactgcatggtcgatctacttggtcgggcagggaagcttgatgatgctgtgaagttcatccatgagatgaactttcagccggactcagttatatggaggactcttcttggggcttgcaggatgcacaaaaacgccgatcttgcagcatatgcagcaaaagagatccttagactggagcctgacgaccaaggtgcccgcatattattgtcaaacacgtatgctgatttgcgacaatgggcagatgctgagaagtcgtggaagatgatgagagacagaggggtaaagaaagatcctgggcgaagctggatcgagctgggtaagcaggatctggcaactgagcagaaggaagatctattgaaatatcatagtgagaagctggcaatagcatttggaacgatgaacgcgatggaacggaagcacataatgatcatgaagaacctcaggatctgtggtgactgtcatgcatttgcgaagctcgtctccaagagcgaaggcaaggtgatcatcatcagggaccctgttcgtttccaccatttccaggatggagtttgctcctgcaatgattactggtag

SEQ ID NO: 77663 - DNA, 441 bp, Oryza sativa
  unsure (1)..(441): unsure at all n locations
  Clone ID: PAT_MRT4530_77539C.1
naaaaaaaaaaaaaaaaaaaaaaaaaaaaaaaaaaaaaaagggggaacgctctataggggtccaaacttacatacacagtgcatacgaaagaggactagctcttttatagggtcccctcttatttaaatctctgtggccccgtttttcaccgtgtttgactgtggaaaaaccttgtggtttcccaaatctggggggggggggggcgcatccctcctttttcccctggtggtgcctatccgtagagggccccgccgatttcccttttcaacacttttgcgcttctgtgtggggaggtggggcgcgccctgtgttggcgccttttccgcgcccggtgtgttgttttcgccccccctgtgtcgcttccctcttgggcgccctcttgcccgcgctttttcctttttttcccttttctttgtcccccttcttcggttcttcccctt

SEQ ID NO: 77664 - DNA, 598 bp, Oryza sativa
  Clone ID: PAT_MRT4530_7753C.1
ctcgccggcgcatcaatggcggccggatcttccgcggccgattccccctcatccggccgacctttctcactcccgacgctatataaacgtttcccgtgcctccctcctccgtttccgccactcgccactctctctccccgtcggattcgagctcgcgccgtcgccctctctctccgccgtcgccgccgagctccggttcgccgccgtcgtcgccccggacctcctcccgcttcggcatcgcctccttcggcttcgccgcattctcgtcgacctcgtccacccctccgtttcgcccgccgaccgccggaacgccgccgtcctcgtcgacccgagccgcgccgccgtcttcctccgctccggtcgtcgtttccgccgccctcgtcgtcccggggtgagccgtggaccgcccctttcgcttcccccttccctcctctccctcgggtgccgctccgccgcgccgttggtcgccggcggcgaccatcggggcgcgggcgcgccgcatcccgtcggccgtgccggcgaggtcaccttcgggtgcgccccgcggctgccaggtgggcccggcccgtcagccgcccgcgcccgcgggtgcggctga

SEQ ID NO: 77665 - DNA, 1024 bp, Oryza sativa
  Clone ID: PAT_MRT4530_77540C.1
ttttttttttttttttttttatgtaacctctaaacttcagcattcaaaatctgtctggaaagtgatgttttacagcttgcttcgtcgcgctcatcttatgtcgaatacaaaaccaaaaccaaaataacaaaaacaaaaataaattcccctaggagatgtatttacaagtaagaggaagccatgctccgcacatccgttggcatgaaggccagcacaaccagcaggatgagcaggcagactggcagcagcagcagcagcgatggcggcggaggcaatgggggaagcaccaatggaagtatgagcaatgacatggtgaggaagacgagcacgaggaacgcctcgatactgaagtaattcgatgtcgcggcggtcttcttctcggcagcatttggctgatgctgatgctgcagatgcctctttgaaccgtttggtctgggtatcagagggttcctcctctgcctagcacctacaccttccattgcaacaaaccccaaattcggctagatgttttgatctgtgattttgtctagatcagttggcaatccaagaactgagatgtgtatgagagttcttgtgatttctgatcagatctgaagtctctgttgcagacttgcccatcatctgaactgcaggcaaagtgacaacatcttcgatcctgaacttggcattgctcccatgtccggacttcgcgtctctcccaagaacgccctttctcgctccacccaacaagccaagaactcctctcctccctcaaaacccacaacacccccaaccaagaagcaaatcaagaactgcacagcccaagaactccaagcggcagggtcgcaaagatgtcgtcgcaggaggaggaagaagaagaagaagaggacgaagaggtggatcctcccctgatggcgaagcagaagatatcctcgaccctttcggtgatgttgcggtgatgaggaggaggaaagattagcatggtgacagggaaggtggagccgattttatgagtggggtagggtttggataggcttcaaatcat

SEQ ID NO: 77666 - DNA, 528 bp, Oryza sativa
  Clone ID: PAT_MRT4530_77541C.1
atggccgggacggcgcgagacgagctgacggcggtggcacgagacggcgacggcgtgaggggacggcggccggcagcgccagatctggcgcgtggtgtcgctgccgccactgcaaatcctcacccggcggctgtgtctctcactctctcggctaaagaatcgtgggaaaaacaagagaggaagggtagagactcgaaggaggaggacgaggcggcggcagcagggttcatcgccagagacggcgaggaagcggcggccagggcgtcggcgaggaaaccacgaccacggccatcctcacgccgcgccccgacgagccgcaccgttgtccacgtcgccgcagtgaaggatgagatggcgcaacaaaagctccggtaccgggccattgatgcaattctgcactggatgatgcctttcattgccaacacttgcctgcatcagttgggcatcctgacacccatcatttgcaacttcttggacagcttgatcaggttcagggttgctgtcaacaacaatctgaagtggtcttga

SEQ ID NO: 77667 - DNA, 564 bp, Oryza sativa
  Clone ID: PAT_MRT4530_77542C.1
ctcacctcgtgaataaattcacctcgtcctgcgctttcggagctgaactgctcgtctctttctcatacagacagaaacaaaataccccaccacaaccacatcaagcgatacccaaccttccgaggtcaggaaacctgacggaagcagccctttcctttcatccttcgggccacaaacgccaggtgatacaatattctgcgacggcacacgcatacgcatacgcatacacaactcacgattaccaccaccaacttacaccttgattccctgttttccaagtccatcgttttcactactcaactaccgccatcatgaactcccgcatggacttcacggaccgggcccagaaggctgtggaggatgccatggccttggctgagcagtacgcccactcccagcttgtcccagtccaccttgcagtttccttgctcgaccctcctccggacccctccaaggatcagcaaaatgctcccccagtcgtcagcaccttgttccggcaggtcatcgagcgagcccatggcgaccctcagctcttcgatcgagcactcaagaagaccctcgtcc

SEQ ID NO: 77668 - DNA, 3267 bp, Oryza sativa
  Clone ID: PAT_MRT4530_77543C.1
atggggatcaggcagcgtcgccgtctgctcgctgttgctgctgctttcctctcgctgctcgctctccggaatgcggcggcggcggcgtcgccggcgccggtgagggtgggcgtcgtggtggacatgacgagcggcgaggggaggaggagcctcgccggcatttccatggcggtggaggacttccaccggcggcgacatcgtccgggctccgccgcggtggtggagctgcgggtgagggactcgcgtggagacgatggtgctgcagctgcacgcgccgccgaagaccttatcaagaacgcacaggtgcaggccatcatcgtcaccacggaggcggatacggccgtggttgcccgccttcgccgccaccaccgcgtccccatcctcaccttccccatctccggcggtgctcctccgccgtcatcacatcatccaccccaccatgcaacggcgacggcgccgccgttcggcgccgatcacacttcagccagggcggcgctcaccggcatcctcaccgccatattctcatcagcacggcgcgccgccggctcgccgccccatggccgccgctacaacgccggcgctccgactggtcgtcgtctcgaccgccggcgattggcggggagaaggtcatcatcaggcgaggtgctgcggatcgccgtgccgcggaagaccgggttccaggctttcgtcgacgtgagaatcgacccggacaccaagaggcagaacatcaccggatactgcatcgacgtcttcaacgccgccatggctagagtgcggcctcgccggaagtacgagttccacgtctttgacggatcgtatgatgatcttgtacgcaatgtatcttcagggaagttcagcgcagcagtgggcgacgtgaccatcacagccgaccgagaaaacctcgtggaattcacgatgccatacacgtcgtccggtgtgtcgctgctggtgccggaggagaacgactccaagccaatccaatggattttcgtgaagccactgaccagggatctctggcttgccaccatcggcttcttcttctacaccggcttcgtcgtgtggatgattgagcagccaagaaacccggagtaccaaggatcaagtgtgaggcagctcagcactgcttcctactttgctttctccaccctgacgttttctcatgagctacacggcaagcttgtcatccatgctaactgcaaagaggctccgaccatcggtgaaaagcttggatcagctcctccttaccgccggtttactgctcttgctcattgttgtttactgctcgttttgctgctcgcgtcgtcgtcgtcgtgtgggaacgcggcgccggtgatggtgggcgtggtggtacacctgcggaccgaggcggggaggaggagccgcacctgcatcgagatggcgttggaggagttgccgcaggcccctcgcgccgtcgcgcggctcgccgccgcccttggggcagcagcccgcctcctctactcatgggtcacgtacgccctccctccccgtcctcctcccccgggccccggtgctgcactggtcggcatcgtcctccgccgcccccaaatcgctctcaccgccaacggatttgagccaccaagattcacaccattgcctaccgaggcgccgttcctgccaaaatcacaactcgatcctgttccaactggaccaaatcagtttgtcaattccgcattaatcaaggaacctcagaggttaaataaagaagtcaattttgctgctttcctggataatccgaacatcgatgatgtgcacaaccaaagtattctgctctggtcatacaatgtaataccagccactgccacatcaactgagatatgcaggctcttcagctcagtggtccagacaatagagagagaattgggtcagggtggtgtgcttgtagccagaagaacacatgccgactcagcggacaccatatcattttatcagcttgctgagaagctcaagctatcatcgtacgagattgtaaccatcactggtgaaggtgcgaggggagtatgttctaggacatcatattctgggctcccccaaaatcgaagcaccagcaactatagctttgacattagcagcaatggcaatggagctgtaacagaggattctcaatcagcttctgtaggccacaatagggttggattagcagtaacacatggcactaaaacaccccttaatccaaaaactcagagaagaaatgctattgaatcaaaggacaaatgctcaaaaagtagttgtggaagtgggagtgagaaatctaacgagacactcaggattgctgtgacacgaaaatatggttttcaaaattttctgaacattactgatcttcctaatggcaagataaatgccactggttttagcatcgaagtatttgagaacgctatgaagaagttagatcatcctccatgctatatgttctgtctctttgagggttcatatgatgatctagtaggcagcgtctcttctgggagttacacggctagtttgtcatccatgctaaccacatcgaggctccgcccctcagtggttgatctcgaccagctccgtcacaataatgactatgttgggtatcaaaataaatcatttgtgtactccttgttaaatcaaacgttcaaagaagacaggttaaagccttatgcaaatggaaaagaatatgcagaagctttgagaagggggaaagtatctgctattgttgatgaaatcccctatataagatcttttatgtctgaccagaataattctaacgagttctgggtgtttcctcagacatacaatatccttggatttgcttttggattccctataggttctccattggtccataatctttcagtagccatcttggacatgacaagaattaccaacaagactgattcacagttgacagatgatcatggcagccattccacgcctctcactttggaaaatttctccggtctgttcgtcatcgttggatctgtttcaactctcatgctgctgataagcattgtgaggttggttgtttcgagatgctcagagacggcaaacactaatgctccaagcattgatgacgacaatggggatgaagaatcgaatccacagcagaatgacaccgaagaacccctccttgaagccagagacaacgattcccggagtgctgaccagaatggcagttttgctgctgaccaagagcctagtcaaatgcagagtggcacatccaatggccatgttcctgcacaagcacaacacattcagattgagatgagccctgcctga

SEQ ID NO: 77669 - DNA, 957 bp, Oryza sativa
  Clone ID: PAT_MRT4530_77544C.1
tcaaggccacttcatattgtcattgacagcaaccctgcacctgatcaagctgtccaaaaagttggaaacgatgggtttcagggtggtgatgaaaggcctcatccaataatgcagaatggcatgcacaatggccctatgccggagcttttgttgcgccatctcatccttcactgcggcgacgtggacaacggtgcggctcgtcggggcgcggcgtgaggatggccgtggtcgtggtttcctcgccgacgccctggccgccgcttcctcgccgtctctggcgatgaaccctgctgccgccgcctcgtcctcctccttcgagtctctacccttcctctcttgtttttcccacgattcttctgacaaaagctggtttctttcgatgaggttatcggagccaaacgaggtagccgagagagtgagagacacagccgccgggtgaggatttgcagtggcggcagcgacaccacgcgccagatctggcgctgccggccgccgtcccctcacgccgtcgccgtctcgtgccaccgccgtcagctcgtctcgcgccgtcccggccatcgccccctacgcttcgtcctcgccagtcgccaccgccgtctcgcgccgtcctcgaccccgccgttgctcgccatccccgcccccaacgtctcgcgccgtcccggccaccgcgtctcgtgtagtcgctcgccgtccccgtccccgcccccgacgtcttgcgtcgtcccgggcaccaccgtctcgcgccgtcctcgtcaccgccgccgactcaagccccactggtggagtggtggtgactggtgaatggagaacctggagcgaaatttttgtgccttggtgtccctggtttgtgcttgttttactaacatatgtttatatagtggctgactttatacttctactatttgctgaactatgtaattctcagcaatgtttagtgatgaaccatgtactatggct

SEQ ID NO: 77670 - DNA, 213 bp, Oryza sativa
  Clone ID: PAT_MRT4530_77545C.1
atggcctctgttgaggtgttctcaacccagttggtatcagctgcaccatctgctgctgaatcggctgaaccgtttgttgttgaatcggcgaaaccgtctactgttgaatcggctgaactgtctgctgttgagtcggcgtcgacaacactggtccggcagttggctgagttggtaggaacattgaggcaatctagtcttgggacagccgactaa

SEQ ID NO: 77671 - DNA, 2109 bp, Oryza sativa
  Clone ID: PAT_MRT4530_77546C.1
atggggatcaggcagcgtcgccgtctgctcgctgttgctgctgctttcctctcgctgctcgctctccggaatgcggcggcggcggcgtcgccggcgccggtgagggtgggcgtcgtggtggacatgacgagcggcgaggggaggaggagcctcgccggcatttccatggcggtggaggacttccaccggcggcgacatcgtccgggctccgccgcggtggtggagctgcgggtgagggactcgcgtggagacgatggtgctgcagctgcacgcgccgccgaagaccttatcaagaacgcacaggtgcaggccatcatcgtcaccacggaggcggatacggccgtggttgcccgccttcgccgccaccaccgcgtccccatcctcaccttccccatctccggcggtgctcctccgccgtcatcacatcatccaccccaccatgcaacggcgacggcgccgccgttcggcgccgatcacacttcagccagggcggcgctcaccggcatcctcaccgccatattctcatcagcacggcgcgccgccggctcgccgccccatggccgccgctacaacgccggcgctccgactggtcgtcgtctcgaccgccggcgattggcggggagaaggtcatcatcaggcgaggtgctgcggatcgccgtgccgcggaagaccgggttccaggctttcgtcgacgtgagaatcgacccggacaccaagaggcagaacatcaccggatactgcatcgacgtcttcaacgccgccatggctagagtgcggcctcgccggaagtacgagttccacgtctttgacggatcgtatgatgatcttgtacgcaatgtatcttcagggaagttcagcgcagcagtgggcgacgtgaccatcacagccgaccgagaaaacctcgtggaattcacgatgccatacacgtcgtccggtgtgtcgctgctggtgccggaggagaacgactccaagccaatccaatggattttcgtgaagccactgaccagggatctctggcttgccaccatcggcttcttcttctacaccggcttcgtcgtgtggatgattgagcagccaagaaacccggagtaccaaggatcaagtgtgaggcagctcagcactgcttcctactttgctttctccaccctgacgttttctcatggtcaaattatcaagagccctttgtcaaaaattgttgtggtgatatggtgctttgtagtgctgatcctagtgcagagctacacggcaagcttgtcatccatgctaactgcaaagaggctccgaccatcggtgaaaagcttggatcagctcctccttaccggtgactatgttggatatcaaaatggatcatttgttggctcactcctgaaaaaacgagggttcatgccatccaggttaaggtcttatggaacacaaaaggagtatgctgaagctctgagaaaggggtccatgaatggaggagtgtcggcgatcgtcgacgagatcccttatttaacttcttttttatccaacccccaatatcagaaagaatttcagatggttaatcgattctacaagacccccggatttggttttgtatttcctctaggttctccactggtgcatgatctctctacagctatcttgaaccttacaggagagactgaaggttcaaaaattgaagagaagtggtttggctcatctgaacagtccacaggaggtgatgcaaaccctagcagcagcagcagcagcagtgactcaaaccctctcacactccaaagtttctctggcctcttcatcatcagtggctgcatctctgctctgatgctcctgataagcgttgtgaatagggtaatttgcgccaaatgcgcaaaggaagctcgtgttcatgatgtggagcatggaggcagtactagtagcagttccactgaacaatcaagaccacttcagattgttgttgacagcaaccctgaacctgatcaagctgtccaagaagttgcaaatgatgggtgtcaggatgcccaactgatgcaggcaagtgttggcaatgaaaggcatcatccagtgcagaattgcatcaatggcccggtacctgaacatcatcctcagatggagatgaacactggatga

SEQ ID NO: 77672 - DNA, 453 bp, Oryza sativa
  Clone ID: PAT_MRT4530_77547C.1
atgacgagaatgccccctctactcatttccttcttcgcgatgcagctgcgggagaggatggcgaggacaagctgggagagcttgactttgacggccgcgggagttgcagccacgggagaggatctcggcgatgcggcgacagttctcctccccggcgccaacgatattcccgaccagcgaagggacgtcgacatcgtccgtggcggcgaagctgcagaggaagagaggcagcgggtgggtgcgcatggggaggcagccaaggagcggcatgggcggagctgcctcggcgaagacgcggctaatgacgaggtcattgaggatggagatgggggccttgtcagtggaggtagagacagagggaagcctgttgagggagacggcggcgctacgggcacaagccgagggcgtcgtggaggaagggaggcatgggcggggcgaggagggaggagatga

SEQ ID NO: 77673 - DNA, 240 bp, Oryza sativa
  Clone ID: PAT_MRT4530_77548C.1
ggctctaaactagtggatccccgggctgcaggcaacggctgatgatgcgtgcacgcacgatcgatacatacatgcatagaagggatcgacacaatgtatgttgagaatgatcgatattcgatttgttcgttgttgttgctgttgatctgtttgtagtagcagcttggttgttttttttctccatgctctggtctggatggtcatgatttagcgaaaggagagtgacaaattaagtgatct

SEQ ID NO: 77674 - DNA, 486 bp, Oryza sativa
  Clone ID: PAT_MRT4530_77549C.1
atgcagctgcgggagaggatggcgaggacaagctgggagagcttgactttgacggccgcgggagttgcagccacgggagaggatctcggcgatgcggcgacagttctcctgcccggcgccaacgatattcccgaccggcgaagggacgtcgacatcatccgtggcagcgaagctgcaaaggaagagaggcagcgggtggcctcggcgaagacgcagctaatgacgaggtcattgaggatggagatgggggccttgtcagtggaggcggagacagagggaagcctgttgagggagacggcggcgctacgggcacaagccaagggcgtcgtggaggaggggaggcgtgggcggggtgaggagggaggagatgaggtggtctgtgcgtggacgcggctgcggcgtcgagggtggggacggcggccaacgagaagcgctgcctcgtggcggccaccggagtgggcatcgctaactatctcgctggattga

SEQ ID NO: 77675 - DNA, 223 bp, Oryza sativa
  Clone ID: PAT_MRT4530_7754C.1
gatctctgtgatcagtaggtcataaagataggaatgaaatggcacagtaaatcctttgttttctggaatagatttgctgcagtagccacaagttgggtgattcattttgatgttgccgctagctgtgtcattctcttagactattttggataagttggcaaagcattagtgcaatgctttatttgaggtattgactacatttttcgattgctcgtgtcttttt

SEQ ID NO: 77676 - DNA, 687 bp, Oryza sativa
  Clone ID: PAT_MRT4530_77550C.1
taatgcagccgacatgtgggcccgtgcacagtgtcgtcgtccacctgtcaccagcgcttgacgccaaccgacgccgctgcatccattccaaaatccgatcaatccagcgagacagttagcgatgcctgctccggtggccgccgcgaggcagcgcctctcgctggcctccgtccccaccctcgacgctgcagtcgcgtccacacacagaccatctcatctcctccctcctcgccccgcccatgcctcccttcctccacgacgccctcggcttgtgcccgtagcgccgccgtctccctcaacaggcttccctctgtctctacctccactgacaaggcccccatctccatcctcaatgacctcgtcattagccgcgtcttcgccgaggctggattccgcagtggggacattaagctagccatcctctgaccagctccgcccatgccgctccttggctgcctccccatgcgcacccacccgctgcctctcttcctctgcagcttcgccgccacggacgatgtcgacgtcccttcgctggtcgggaatatcgttggcgccggggaggagaactgtcgccgcatcgccgagatcctctcccgtggctgcaactcccgcggccgtcaaagtcaagctctcccagcttgtcctcgccatcctctcccgcagctgcatcgcgaagaaggaaatgag

SEQ ID NO: 77677 - DNA, 540 bp, Oryza sativa
  Clone ID: PAT_MRT4530_77551C.1
ctactcatttccttcttcacgatgcagctgcgggagaggatggcgaggacaagctgggagagcttgactttgacggccgcgggagttgcagccacgggagaggatctcggcgatgcggcgacagttctcctgcccggcgccaacgatattcccgaccggcgaagggacgtcgacatcatccgtggcagcgaagctgcaaaggaagagaggcagcgggtgggtgcgcatggggaggcagccgaggagcggcatgggcgaagctgggcagaggatggctagcttaatgtccccactgtggaatccagcctcggcgaagacgcagctaatgacgaggtcattgaggatggagatgggggccttgtcagtggaggcggagacagagggaagcctgttgagggagacggcggcgctcgttttgcgtatctctccaatctcctcaatccccttcttctcaaacacaccttcactccactccactccaccgtttccccgtttccctctctcgatcctcctcctccaaatctcccacctcaactccat

SEQ ID NO: 77678 - DNA, 330 bp, Oryza sativa
  Clone ID: PAT_MRT4530_77552C.1
atgttcgagggcaacttcttcctctccctcgccatccacatcaacttcggcaaccctgccaccgagcccatccgctaccccgacgaccgcatctgggagttcgacatggcacacaggtccaacttcctcgttgacgtcgtgcccggcaccgtctttgtggcctccggcgagctcccgccgcagaaggtgatgcagatcgccgtgggccgtgcagcggagcactttgaaatttcaggggtacagaagggatcgggcttccccttcgggactaggatcccagccttttcgctgtcagccgaacgaagcctcaggggttatgcctcctggtag

SEQ ID NO: 77679 - DNA, 526 bp, Oryza sativa
  Clone ID: PAT_MRT4530_77553C.1
ttaccttcaaatttgacggatcgcggtctgaccgaaggtgttgcgccggtctgaccgcttgggagccctccgtctggctcgcggtgatcgtccggtctaaccgcccgaagaagctgcagtcgcttgaacctgccgccggtctgactgccgtgtacccaccggtctgaccgctgcgatgccgccgatctgaccgttggtgtctcgctgattagaccgctgaacccgagaaaacacaaattgaagaactctagatgtagatgataactttattacttctctgcatagtatccatctagaagccaacataaaacaatcacgaatatccaaacaaacaacccgaaaccaaaaccgacacagagttggccagcccgacgcgagctggccggtctgaccgcgcgatacacgccggtctgaccggcaaccacttcccggtctgaccggacccaaatcacagcagtacctgtaaatcacctgtaaaatccaatcatctccaaaaccacttcgccgataatctctaaatatcaaa

SEQ ID NO: 77680 - DNA, 772 bp, Oryza sativa
  unsure (1)..(772): unsure at all n locations
  Clone ID: PAT_MRT4530_77554C.1
tacggtggtaccaagctggctcaaatatgtcatgtagatagataattttcatggcaatgaggaagcattggtggaagccttcctatgaatccaggggtgttccttgatttnccggcaactcgaccaatgatttcaccatttcatgaccgaccaccagtttatcaagcaacctgtgacctgagcaggatgaataacttttttgtgctgacaggtaaagggacaaaagtgtgcgccagacatagtagcagttcttgatagtaccaagacactgcagaaaattcacattgttgcggaaatccacaatgtgctgacgctgcttctgtaaatgattctaaagagtagaattctggtgttacttcatcatccttgtcctactgccacagttaattttgcccttctcccagttagattattgcattggggagagtatttccccaacatgtaactgaagtattatgagcttagcaaatgtagtacttgaagtaaaaaaaaaagcctaacaatcagcttgaagcaatgggtgactgtagctgcgagtctggttcgtctgtcccatggcgttgaagttgaacccagagggacgcgtcgtatatgatgctattgggtcatcacgtgcagctcacgtaatttctggaattgtttttccttcacctatgttggcattcatgatggatgcttggtaactgggaggaaatatgtagtggtaactgttggagtaagtattgcattcaacgtttcctactgtgttcagacctaaaaaaaaaaaaaaaaa

SEQ ID NO: 77681 - DNA, 786 bp, Oryza sativa
  Clone ID: PAT_MRT4530_77555C.1
ttcggcacgagggccttgcacaatctccatggatcaccaattcaccggagcaaattaattgagctatctagctagctgcctgtccaagaacaatccagtgatcgatcgatcatggcgtctcccgcagtcgtcaggcagaggccaacggtaggtaagcaagctggagaaggagagagcgctgctgctgccggcgacggcggtggtggtcgtccgccggcagcaaggcggccgtcgctgttgtcgcaggcgctggcgtcgacggcgagcctggcgaacctgctcccgacggggacggtgatggcgttccagctgctggcgcccaccttcaccaacaacggcgcctgcgacgccaccacctcgctcctcaccgccgccctcctcgccctgctcgcgctctcctgcgtcctcgcctccttcaccgactccgtcaggggccccgacggccgcgtctactacggcctcgccacgccacgggggctctggctgctcgactaccctcccgccggcgccggcgcgccgccgcagccggacacgtcgaggtaccggatgagggccatcgacggcgtacacgcgttgctgtcggtgggcgtgttcggggtggtggcggcgagggacaagaacgtggtggggtgcttctggccgtcgccggcgaaggggacggaggaggtgctgggcatcgtgccgctgggcgtcggcgtcatgtgcagcctcctcttcgtcgtcttccccaccactcgccatggcatcggctaccccgtcaccaacaacactacttcttcttcttag

SEQ ID NO: 77682 - DNA, 358 bp, Oryza sativa
  Clone ID: PAT_MRT4530_77556C.1
aggatccccccgcgctgctcgccgccattgttggcctactctgagaagttcttcatgatgttttttccgtcaagagctacaagactagaagcggagccactgagacgtggccaaaatgcgtcgcccggctcggcctggccgggacacgactaaccatgtcgcgccgtgcccatccacggggggcgcctacaccattgagcccgtgcggcctgcgggagcgaggtaccgttgagccgtgttgtgcccgggacggcacgacgttgtcgtgcaaaggaagaggctgggctgggccaaatctttgtgccgtgtactgagctgtcgagctgctggccttttggcccactatactatcacccat

SEQ ID NO: 77683 - DNA, 3068 bp, Oryza sativa
  Clone ID: PAT_MRT4530_77557C.1
atgggggaggggataggcgccacggccggcctcgctgcttgtcggtctgccgctgccatcaccgcagtcaggtaccgcctcgccgacaaggacctattggtgttggtcacctccgacaaggagctcgtccacatgcacgatgagtacgaccgcctcaggccagcaattctggcccatccctgtggtaggcccaaatctcgacccgtccacacagatgggctggaatcacaagcccatgtaagcgaggcccaacaagcaggcaccaggcagcgaggctctttctctctctcgccgtcccaccgcaagcgcaagcagcggcggcctctcctctccagccccgacgacgcatcgccgctcgccgccgatccactcgtctcgcgccaccccacgatggccaccggcggcggcggcggcggggacatcggcgccgactcggagcggcgcctcaagaaggccatggacaagctctaccacttccccaagcccaaggctggcacggggcccggctcctccaagccctcttccgcatccacctcctccgctctcagcatcgggagggcggggaaggcggctggcgcaggggggaggaggttcgggatggtgcggggctcgcggctcccgtcgcagctcgcggccatgtcggcgatctcgccgccgccgccgtgccgcccgtgggaccgcgccgacctcatgcggcggctcgcgaccttcaaggccatgacctggttcgccaaacccaaggttattagtccagttaactgcgcaaggagaggatggattaatattgagcccgatgttataacgtgtgaggcatgtgaggcacggcttctgttctccactccttcctcatgggcaccgcagcaagttgaaaaggctgctgctgtttttagcttgaagctggacaatggacataaactactctgtccatggattgacaacatatgtgatgaatcacttgccttatttccaccaacaccacctcctgttttagttgagaattaccacgagggtttctcctcacttctacgactctcagcacttccaagaatctcgtgctcttctctggagagcatgaagaagaggagcccacagctagagcagtttctattgaaaccgttctcttcatcagttgtccttaaagggggatttatacttactgaagattcaacaattaaggatttggatcacacttttcaagatgctgacacatattatcaggcattgaagataataagtttgtgtggttgggaaccccgcttgctaccctatgctgttgattgtggaactaaatctcattcagatgcaaactcttcctctacattgacccaaccagggctaataaataactcaatggaagatcgggttgttgtttatgcacctaatgaagttgatggttcaacagtaattgcagatgctcgtcaagcatatcagcattacgatccattatcagttgttttagattgtcaattttgtggagcttgtgttgccttgtggcctttttcacttgtagaacgacctcttcaactctttaagctgatatcagattctagtaggcaagatgagcaaactgaggggcatgctggcagagtcagtggcgcaggaccttcaaagactgcgaatattggttttaatttcactattgctggtggtcctccgccaactagacagaattttcggccaagagtttccttacctgttgtcagtcgacatttgaaagctgacttaagctcccatgggcattttatttcctctggaagtgataaccacatggttcctgttactttgcatgcttcagggctgaccaaacgcaaaagaagcatggatgagtctcatatgttggaaggcaacaatacaatctcaactgatgctggcacaaccaccaatggagcagatcatcaaagagagaattctgtaaatggcacatcaaacttggtagcaaaccctgaacaccaacaagggggttcacattcagatacaagtagggttaccagcacaggagaagtttccaatgaagaatcagaaacaggtcatgctgcaatcaaaagtcacacaagcacagatgaacttggccaacatggatcagatcctaaatctttaccagttgaagattcttctaatgctcatgatttggcaaagacttgcacgaacaattccaggccagttcaggctgccacactcacaaaatcgtctaacgatggggaaaagggcgcatctcaaccatcaggaagccaaggcctgtatgacaaattgaatgaatttgatcctatgaagcagcacaggactttctgcccttggatatgccctgatggtggtgaaaccttgcctggatggaggctgacactgccggcattactttctcaggacaaaagaattgatgaggattcacaagtggagcctcagattagccttcttagtgaggaggatgaccctgttacgtctgttagaaagcttttcatgacaccaccttcaaagaagttgaggatacatcgggcagagaagggctgataagtcagaactgtattggccagagttgggtgttcaggcgagtctcttccaatctgtctaaacatgtttgggacactggtcgcgagctctccacctgtggccatgagtactgtgatagaagccaaactgttttcacgggttccctagaaccagatttgttggcgagacggctgaaatcatgagacacgaccagccaaccaggtctgctgaaatctgtctgtatgcattgtataaatgtcgggtggtgggaacaaggaaagaaaagcgtaaggatttgtggtttgttccaacggcatgcttgattaggacgaacactgcctggaaatcttactgtaaagaccattggttattccttcctttcatggtggtttttttttttaaaaaaatatggagggcattcatttcctctccattggaatttttgtagcttagtaggagtactagtaatgtttgtggttccagcacctgtgtaaactgttgctccaaaaagagttaagctttgcagctgtttgatgcaataaaataaaaaaaaaaagggcaggccctcctactctatacgatcc

SEQ ID NO: 77684 - DNA, 3406 bp, Oryza sativa
  Clone ID: PAT_MRT4530_77558C.1
atggcagttgtgttctccaatcccatggttcatgctagacgcttcctgcagacaggactagacattttcagttttggtaactgtgaagattatggcattgttttaccaagagaaactgctgcattgatggatggacatacaaatggcactaatggttcctgctctaagccatgcgagccattaacagactactgcatccctgattacattctgaatcctgactctgaacaagtcctcgttgatcaggcaccatgttgccctgtagtagtattcatcaactctagaagtggcggccaactcggaagcagtttgatcaaaacgtatcgtgagcttctcaataaagcgcaggtttttgatttatcagaagaggctcctgaaaaggtgcttcacagattgtattgcaactttgagaagctcaagtctaatggcgaccctattgcttttcaaattcagagcaacctaagactaattgttgctggtggtgatggcacagcaagttggctgcttggtgtagttagtgaccttaagctctctcacccacctcctattgcaactgtgcctctgggaactggaaacaaccttccattctcatttggatgggggaagaagaacccaaccactgaccaagaggcggtgaaatcatttcttggacaagttaaaaaagcaagagaaatgaatattgatagttggcatatcatcatgaggatgcgagctccacaggaaggtccatgtgaacctattgctccgttagagctgcctcactcattgcatgcattccaccgtgtatcaggaagcgattcacttaatatggagggctaccacacataccgtggaggattttggaattactttagtatggggatggatgcacaagtgtcttacgaatttcactctgagaggaagagaaatcccgagaagttcaagaaccagctaacaaatcagagtacatatgctaagcttggacttaaacaaggatggtttgctgcttcactaactcacccatcctcgaggaacattgctcaacttgcaaaggtgcggatcatgaaaagacctggtggccaatgggaagagcttaagattcctcgcagcattcgatcaatcgtctgtctgaatctgccaagtttttctggaggactgaatccttggggaacacctggcaccaggaaagtacaagatagagacctgactgcaccatttgtcgacgacggccttatcgaggttgtcggctttcgcgatgcctggcacggtcttgtcttgcttgcccctaatggccatggaactcgtctagcacaggcccatagaatccggttcgagttccacaaaggagcagccgagcacacgttcatgaggatcgatggggagccatggaagcagcctcttcccaaggacgatgacaccgtggtcgtcgagatctctcacctccgtcaggtcaccatgctcgccagcgacccgtgcaagtcgaagagcgtcaacgacccctcgtcgccgatgtgctgtagcaaccacgacgacgacgagcgcaacagcttggaggacgaagatgagtgggaggaggggaggaagaagtttggtgcagctgatacgttcaagttccctgatgaggttgatgttgctcaccttagctgagctataagtgattcagagttcagatttcagaatgttcgctactactgttagcgatactgcctttttgggggtttatatatactactagtttattagttatcagccctgtgtagattcgaccggctgtattcgagaactgcaaaattttccgagtaatgtcatattttcatgcaacgcaattggtctgttcccaaaaaaaaaaaaaaaaaaaaaaaaaaagccgccgctcccgtccaccccgcactgcgccgtcgccctccccggcaccgcagtcgccgcccgatgccgcccactccgccgcaaaatccgcaccaccccgcccctcccgctcgcatccaacgacgtgggcacgatcccctccacgtcctccaccgtttcccccatttcccccccaagaaaacggcgccggttggcctcgccacgagctccacgtcgacaccccgcttcccgccggttgccgccccaaattcacctcgctccggctctctcccaccctctcgaggctataaaaacgatccccgggctcccctcatccatttcccccattttccccaagccgccgcgccctcccccgctctccccgcgtcgagcccttgcaccgccgctctccggcgaactccagccgcgccgcgccgccgctcccgtccaccccgcactgcgccgtcgccctccccggcaccgcagtcgccgtgcgcaccccgtccaccgctcctcttcgccaatccaccgccgcaacgccgcttccaccgccaccccgagccaccttcgcctttagccacctccatccgctccccgccgctccctccgtcggccgcctctctccgacgtcgccccgtggtgagcaccccggtttcctcctcctctccctcctagcgccgtgcgctgccgcttccgtgcgtgcgtcgccgccgtgccgtgtgctcgaccggccggctgccgctgccctgctcgcccgggccgatcggtcccccccgcgtcagtgcctctgtggcgccacgtcggcgccacctccgctagccgtccgtcgtggccgccacttgtctgccacgtggtgcgcccgcggaccagcgcgtgcgtggactcggtccacgagtttttcctcgttttgcgtgccagcgtgtagtttccgtcgtttcggaagtccgcggtcgcgaggaaaagagttcggaagatcaaagtgaagaagcaaggcaacggcggcggaaaagcaacggacggcgccggcgacgaggaagaagcggcggcggagatcgggtcgacggtggcgacggtactccagcggtcttcggcggcggcgaaggggcggacgaggacggcggcgacttggcgatcccgacggtggccttcccgagtgacgacgacgaccgtagcgacggcggcgcacggctggagcggcggcgacgacggtggcacgaggtggcacgacgctagggcgcttccgacgacgagagccgaaggcgagggtggcggcggatagaggagagctcgggggtccttttaaaggggcaaggaggcggcggcagaggcccacagcgaccggtgacggcgaaggaaagctagggttcggaggagagaagtcgatccgatttgagatcgaatccatgagtttccaaaccgaattaggtgatgattccaaaagagaaaaggaagaggagatcgagaggatcatttcccctctatcgattcggccagagaaggaaaggagcggccggatttggaaggaaacggcgacggctcggctagggtttcgggcggcggcggcggcgcgagaaggacgacg

SEQ ID NO: 77685 - DNA, 276 bp, Oryza sativa
  Clone ID: PAT_MRT4530_77559C.1
atgaagatttgccaactttgggtgctccacctccacctccggaacaacctcctcattagggttcaacctgggatgaccaagaggagccaccacagcaagatgaaggttggggcaattggaatcaccaagcagaaaaccagcaggcaactggtgaatctggggcacactgcacaaggcctccaccagttggccaccgggttccgccgccactcgccacctgaggagcagggcctccaccgcccgccgtgcgtcgcgtcgccacccctggtcccctag

SEQ ID NO: 77686 - DNA, 852 bp, Oryza sativa
  Clone ID: PAT_MRT4530_7755C.1
atgaacaaagttaaaaaggcgggcccgcccgccactctcgctgacgggtggggcccacctgtcatcgccctcctcccgccgcgcccgccgccgcgtccgtgccctagcgccgccgccgccgcgaatcccgccgctcccgtccgccccgcgtgcaatcaagagggggaaattattccccgcgtttccctctcccgattccccctcttttccctctctctctccctcggattcgttcgaatcgtgcccgcattcatcgccggcgcaatcaatggcggccgagatcttcgcggccggtttccttcctccccggccgcgctctccccctcccgttgctatatattcgttgcccgagctccgctcttccgtttccgccgctcgccgctcgctctcgccgtcggaatcgtgctagcgccgtgctcctctctctccgccgtcgccgtcgaccttcggttcgccgccgccgtcgctccggtcttcctcccggctcggcgccacctccctcggcatcgccgcatcgccgtcgaccccgtccgccgctccgtttcgctcgccgaccgccggagcaccgtcgccctcgtcttcccgaaccgcgccgccgtcttcctccgctccggccgccgtttccgtcgtcttcgccgtctcggggtgagccgaggaccgtccttcgtttcccccttccctcctctctctcgggcgccactccgccgcgccgttggtcgccggcggcgaccatcggggcgcgggtgcgcgtcctctcccgtcggccgcgccggcgaggccgccctcgggcgcgccctcgcggctgccaagtgggcccggccgtcagccgcccgcgcccgcgggtgcggctga

SEQ ID NO: 77687 - DNA, 3444 bp, Oryza sativa
  Clone ID: PAT_MRT4530_77560C.1
atggcgagcccgcggtcggcaggtggggtgggaggaggaggcggaggaggaggaggaagtggtggcgcagccgcgggggacgacgcgatctggagtaagctccgggaggccggcttcgacgaggagtccctcaagcgccgcgacaaggcggcgctcattgcgtacatctcgcggctcgagtccgagatttatcaataccaacacaatcttggtcttgttttgatggagcggaaggagttaacatccaagcatgagcaacttagagctgcttcggaatctgctgagattatgcacaagcgtgaacgtgcagcccagcagtctgctttagctgaagcaaggaagaaggaagaaaacctgaaaaagagtttaggcatccaaaaggagtgtgttgctaatcttgaaaaagcattgcatgatatgcgtggggaaacagctgaaacaaaggtttcatatgaatcgaaattggctgaagctcttcaattgatggaggctgcacacaagaaatttgatgaggcagaagagaagcttcttctagcaaaatctttggaggcagagtccatacggactcataatgcagcactgagaagtttacatgacatcgatgatcgcgaagatcagcttagaagagaccgaatttcttgtgagctcgagaatgaggccaaagagaaggaaattagcctccagaggaaatcgttgaacgatatgaagaaaattttgcatgaaaaggaggaagtattactaaaggaacaagctctactcaatcagagggacgagaacatccttgagagattagcttatgttactcactcagagaaaagagtggaagaagaaaagaatattcttgaagctgaacggaaggttttgttagaggaaaaatataagttggagctgaaaatggaggcaatagtttcaagagaggaagctctgattcagaaggaatccctgcttgacaaaagggagagtgaattattaattttgcaagagacaatcgcaagtaaagaacgggccgagattgaaaggttgaatcaggaacaagctatagccttggagaggagaaaacatgattttgaatctgagatggcaaacaaacaaatgtcttttgatgcagcaatggaggtgacaagaaatgcgctgcatcagagagaatgtgctctcagtgagcaggaatctgtggttgtgcaaagatcccagaatcttgaccttcagctagctgaattagcaagcaaggaaaaggcgttggcagggagatcagatgagttgaaagaggaggaggaaaagctcttgttacacagagaagccatacacaatgaacttcaaaaagaaagggaagaaatacaaaggattaaatcggatttggagaaggaaaaggctttctttgaagaggagaaacgggaagcaattcaagcccaacaagatctagcaataacacaagcagatagagatgagttgcttactctgcagatgaaacttaaagaagaaattgacagcctcagagcccaaaaaagggaactcatggctgatgcagataggctgcaagccgaaaaggaaaggtttgagattgaatgggagctgattgatgaaaagaaagaggagctacaaaaggaagcgatcagaattgctgaagaacgaagagcaataactgagtatctgaagaatgaatctgatatcatcaaacaggagaaggataatctccgtgttcagttcaaaagtaattcagaaacactctctcgtgaacacaaagagttcatgagtaagatgcagcaagaacatgcaagttggctgagtaagattcaacaagaaaggcaagatctgaagagagacattgatatccagagggtggaattgctaaattctgctaaggcaaggcagatggaaatagattcttatttgagggaaagggaggaagagtttgagcagaaaaaggccaaggaactcgaacacatcaattctcagaaggagatgatcaacacaaaattagaacatgttgcagttgaattgcagaaacttaaggatgagagaaaagaagctactttggaacgtgagaggagagagcaagagttgtctgagataaaaggcactattgaagccttgaataatcaacgggagaagctgcaagagcaaagaaaactattacattcagaccgagaagcaattacagtgcaaattcaacaacttaatgtgttggaagaactgaaaattgattctgaaaataagcaactgtctttgttacaacatgataagtcaaagcttggaagtgatataaatgtgaaagacaatcatcatgataactcccattcttcaccaaagcaacgttttggaaggaaactagacctttctccagtctcaacaccgatttcttgggttcgaaaatgtgctcaggtgatattcaaacggtctccagagaagagcgctagccatgatcaatttgcccagaatggtgtgccaaagaaagttggagactctgtggatgttgaagatgtgaatttggactttgcaaaagttggtcaaaagaggcttaatcatttggtttcttgtgaccaaactgaagttttagagccaaaacgaaagcacagaaggagtactattcagaaagttaatggaggggaaatcacttccaactgcctgtcagctctagaagagaaatgctccaagaatgaacatgatgaagccccacttggtttatccaacacctgcaaggaacatgaatacggcgataaagggccagagaaccttacaaaaccaggagaaccagcttcatctgttgatgtgccttacgtgaacggaatagtggataattcagattctgtccaagaggaaccttcggtggaggctacagtgtctgcaactgaaacatctaatgtagatggacctgaggacaacaatgactctgacgaggaagatgaagaggaagaggaagagaaaacatcttcagcgaagaagctgtggcgtttcctcataacttgatggagattagtttcacctctgatagataatacagagctaactgtaggctgacagttacctctcttataaagataatcactttagctgtattgctttcggcattgcccccctctcggattgaaaggggaagcctttgtgtctagttgtgtgtgcatgtggtattgtgagcagcggcagttttggaagccgctgctgagctgaatcctccactgtgttttccatcttcttgcctctgttgcttcttcgacttgtaaagtggttgtgtaaaaaatgatgggggcgccctggtaacctcttgctgttgtgcgaagtggaagcaaagttaacgtagatggtttgatattcatttgattcgtcttattggcttaaataccgttatgttataagtaaggccgtgccaaatttctcagtgtcgggtccatgtttcaggatgtctgtttcaactgaagattaatgaggatgtctgtttcattatttccg

SEQ ID NO: 77688 - DNA, 428 bp, Oryza sativa
  Clone ID: PAT_MRT4530_77561C.1
gattgttgtcgcgagaactcgattccggatcggggggggtgcattctgtgtccgcaggggtgccccctgcgctcgtggaatgcaataataagcgccgcttctgtgctcgttgataacctgctgcgaccggtggctgacagagggatgcatatgtggcgcgggcgtgtcagacctaccggcggtgatggaggccgtaccacaggttcatggccgtccccggctgggcgagctgccgcagctaagcgcctgcaaggggctgctgcacctggacgcgcgggagatatgccggctcgcgcggttgatccgagcgatccgcggcgccgacggggccgacttactaggggaagcgaaactgccggagaattacagtgattttctggactttggctatggcgccatagatggctttggaagatgaagacagagga

SEQ ID NO: 77689 - DNA, 315 bp, Oryza sativa
  Clone ID: PAT_MRT4530_77562C.1
atgagcaagggcaagaaggacaacggcggctggggcggcggcgacaacaaggaagtccatggcggcgcccgaccgcgatgtgctcctctacatgagtcgcgggggagcccggtgcggcatggcgccatccacggtggagacgtccgcgacgcgaagacggcctcggacgcaacgaccgctgacgtcgcacgcctcttcgccctctacccgccggcgcttacctatggcatccacaccaacctcctcctccgcctccccttctcccgcgtcgccgccgccgacctcatcctctcccgcctcgcgcccaccagctag

SEQ ID NO: 77690 - DNA, 702 bp, Oryza sativa
  Clone ID: PAT_MRT4530_77563C.1
caagccaacaaaccactgatacgataatatttgcatccaggcaggctgcagtatgatgcatatatgtcactgggttcgcacattctactcggcggcttctgcatcctcctcaggtcgtccaactcttgtgtctgtggtagtgttgaggcgtttggagatcccagttgcaaggtagcatcgcatggagtagagggtgttcttttcggggtcaagcttggccactcctcgcagctccttgttcctgacgtcaacagcgaccatcattcctcccgtcttagcaccccttgagcctcctccctgtgttcatcaccgctgttgctgagcatgaggctatgaagcaactcgtaatggtgacttgggttggtgtcaagatggacttcacgcgattcagcagtgcagtcacggcgccagtcgtcccacgaagtgaccgggataggcatgctccatgtagtgattctccacgaaccagggtggaacacggagcgtcgccgtgtcggctgaggttctctgctgcggcgaacccattcaaggtatgaagtaggatctgcagaggtggaggtgggtatggtggtggtcaccgttcttggtgaaacgatctccatctccagatacttgatggaatccttgtgttggctgatggcgatgtcccgacaaaaggacacatctccattgaggtacatcctcccaattgcccttggccgg

SEQ ID NO: 77691 - DNA, 2101 bp, Oryza sativa
  Clone ID: PAT_MRT4530_77564C.1
gctgcaggaattcacgcgtccgccttccttacccccaaaatcgaaatccctaattcgacgccatggccgcgactggcggcgccgccggggagaagacggccagcagcctcctgctcggcgtccggggctacacgtccaccctcaagaacgcctccaccgccagctgcaggttgagcgccggccatcccatcgaggtgactttgtgggaggcgtccccgcctgccctctcccacttctccgtccactgccccgatctcccatccttcaatggcaatctgcttggcgcgcctaaagccatcgccgccgccgtcgacgacgccgacggccagctcctcctcctcctccgagtccccatcgatcagcttggtgccccgcatgacaacgactacttggtctaccatccggatcccccgtctccgaaactggatctgctccccaacccgcctccccctaccctcggtgaccaccagctcgccatactcagctgcggcgacgaccgctacgtcgtggccgccctccacgtctggagtgagttcacttccacgctgcgcctgtacagatcttcttgttcgtctgggagttggacatcggaggaggtgtccgtggaggagccggtgagggacaggctgtgcccgatcccggactcagccaagaggcagctgtaccacgtcaccaccaagaccatcacgctcggaggtgcgaagggcaccgtgggctgggttgatctctggcgcggcatcctcctctgcgacgtgctcgacgaaatgtctccaaggaagctccgcgacatgccgctgccgtggccggccaagggcaattggaggatgtacctcaatggagatgtgtccttttgtcgggacatcgccatcagccaacacaaggattccatcaagtatctggagatggagatcgtttcaccaagaacggtgaccaccaccatacccacctccacctctgcagatcctacttcataccttgaatgggttcgccgcagcagagaacctcagccgacacggcgacgctccgtgttccaccctggttcgtggagaatcactacatggagcatgcctatcccggtcacttcatgggacgactggcgccgtgactgcactgctgaatcgcgtgaagtccatcttgacaccaacccaagtcaccattacgagttgcttcatagcctcatgctcagcaacagcggtgatgaacacagggaggaggctcaaggtcaaggggcaacctcttccttgtccctaggtcgcctgcgtttgtgttacccggccttgagttgcatcgatgatgatgttgtttacctcttgggcaacgctgctggcaggggtgctaagacgggaggaatgatggtcgctgttgacgtcaggaacaaggagctgcgaggagtggccaagcttgaccccgaaaagaacaccctctactccatgcgatgctaccttgcaactgggatctccaaacgcctcaacactaccacagacacaagagttggacgacctgaggaggatgcagaagccgccgagtagaatgtgcgaacccagtgacatatatgcatcatactgcagcctgcctggatgcaaatattatcgtatcagtggtttgttggcttgaatgggggttaaggagttgtgctgttgctgggcatatatagttttgtgacaagaatcttatccaggttgcttactttgggttgatgataaaagtaggagtagacgtgaataacattaatatatgttggcttattttttgaggggatgttggcttatttatgtggcactaattgtctttatgcctttgagttaaacacaaaacaatgatccaactctttgaacctgtttgtttcaagtaatgagttgatgaatttttcccttgtactcaatgtggacaacatgaatgctcttcctcttgagtactaaaaaaaaaaaaaaaaaaaaaaaaaaaaaaaaaaaaaacaaaaaaaaaaaaaaaacaaaaactggcatacgcttaaaagcaaccaagcttacctacgctagctatcccaaaaaatatactttactatccgttcacatacatccaatatataggccaaaacctataccaacacccaaactgaaaa

SEQ ID NO: 77692 - DNA, 1758 bp, Oryza sativa
  Clone ID: PAT_MRT4530_77565C.1
gcacgaggcaccactagccctagagtgaacggttttcactattagtaatccttcttagtttgttttggtgcctcacatgtgcggtcggccagccggctccgggccccttcgctatttcgcctcccggcgtatggggggatgtgctgcatcgcgcctatgtggcgctgcgccgggtttcccccagcctcggcggtgctgtacgccggcccccgcgcccgctggttacgacgcacgatagggcgtagtgggctccccgcccccctgtaactctcagcgtcagcgagaagcagccaaagtgaaagcgaaagagagctgaactcagtggaggctggagagtgagcttaccaatggagcttcctcggggtgccctgctgctggtgctgctcgccgtcgccgccgccgcctcctccgccggtgccacactcgccgtcaaagctccagttccagttccagttccagctcctgcccctgcccatgcacctcctcaacctaaagatgctgaaggcctcctcatcaatggcaacttcgagacggcgccgaggaaggtgaacaagacactcatcgtcggccgccactcgctgccggggtggacgctgcgggggcacgtcgagtacgtctccggcgggccgcagcccggcggcatgttcttcgcggtgccgcacggcgtgcacgctctccgcctgggcggccgcgcgtcggcgtcccagaacgtgtccgtgcgccccggcgcgctctacgcgctcaccttcgccgccacgcgcacgtgcgcccaggacgaggcgctccgcgtcgccgtcgcgccgtcgctctcgccgcccgccgacgtcgccgtccgcacgctctacagcgccgacaccgccgacacctgggcgtggggcttccgcgcctcctccgccgccgcgcaggtcaccttctccaaccccggcgtccaggaggacgcgtcgtgcggccccctgctcgacgccgtcgccatcaaggagctcccaacgccatacccaaccaaagacaacctgatcaagaacgagggattcgagatcgggccgcaggtgttcaagaactcgacggtgggcgtcctccttccgccgaagcagaaggacgcgacgtcgccgctcccgggctggatcatcgagtcgctcaaggccgtccgcttcatcgacgcggcgcacttctccgtcccggcggggcagtacgccgtggagctcgtcgccggcagggagagcgccatcgcgcaggtgatccgcacggtggcgaaccgcgcctacaacctatcgttcgtcgtcggcgacgccaagaacggctgccacgggtcgatgctggtggaggcgttcgccgggaacgtgacgcagaaggtgccgttcgagtccgtcggaaacggcgggttcaagccggcgagcttccggttcgtcgccgccggcgtgcgcaccagggtgaccttctacagctcgtactaccacaccaaggtgagcgacggcgtctcgctgtgcggccccgtgctggatcaggtcaaggtccagccattgaaggcgtgatgatccccctacgattcagagctctcctttcggatcatggtttgctaattgctctacttagacgtcgtgtctgtaaaactctgcattggtgatttgggttttggacattgaactttcgtgtgatctagctaaacattgtgtcatggttattgttgcctgtaatgtcgctatcgatcgttgatgatgttatcaaccggattggccaccaaaaaaaaaaaaaaaaaaaaaa

SEQ ID NO: 77693 - DNA, 219 bp, Oryza sativa
  unsure (1)..(219): unsure at all n locations
  Clone ID: PAT_MRT4530_77566C.1
ccggttcgacccagcgttctccccgcgtccgctttgcagcatttttgttagaagctcnactaagnaggatagtaataactaaaagtggatggttttatttctggcattaacaaagatcccttcttngaaaaaaaaaaaaaaaaaaaaaaaaaaaaaaaaaaaaaacaatataaaaaaaaaaaaaataaaataaaacgtgcggtgcggaggggtaaactt

SEQ ID NO: 77694 - DNA, 538 bp, Oryza sativa
  unsure (1)..(538): unsure at all n locations
  Clone ID: PAT_MRT4530_77567C.1
gcnacgcntccgcggacgtntngcntgtnatcnatncctcccgtngctatcctcccttgcnctngcngctgcgcctggnagtaaggaggacgggaccagtggatgcagcggccccccccgcgcgcctcgctcccccgtcatcgtctctgcggcngtgctcctaccatncgcaatcctcnctcttgctcccgccgcggcgcccaccaagcactcaggcaggatgggataccgtctgccacctgctgcctggcgccgccactcctttccgttttcctctgcatcctcttcctccgtgtgcggcaacagcggcgggcgtccacggcgacgccgtcgacgaaggcggggaaacgctaggcacggccttctcttgccttcttgccttggtgaacttggtctatgggtatagcgtgcctgacttgtggccctcctgcttgctttttcttttctacccaccatacaataggtttatgttttgatggatggttttaatgtcagtttttttttgtcttcaaaaaaaaaaaaaaaaaaaaaaaaaaaa

SEQ ID NO: 77695 - DNA, 334 bp, Oryza sativa
  Clone ID: PAT_MRT4530_77568C.1
tcagccatcttcgcacatgggaagcaagaggatggcgtggccagcgaggtcaaggcgggacgtggggaggcgggaggacggtgtggacagcgaggtcgaggcacaactgttgctacctattgctatcgcctttccaccgcctacccgccgctgccgcctttccgccgacgagtgggcgagctcgagcttgctggccggtccgcgtcgctcccgccctacccctcccctccggtgccgctaccgcctatctcatatccgccgcctttctccttgccgaccgtcgccggtcacgcgcatcgccttctcacatcgggcgtgcactggaaagagatga

SEQ ID NO: 77696 - DNA, 122 bp, Oryza sativa
  Clone ID: PAT_MRT4530_77569C.1
atgagtgcggcacggggaagggcagcttactgccagactgtaggaagctcatcggttttgataggttcagacgcggacgtgatgctgagtctccaaggtggagtgctcgggctgaaagccac

SEQ ID NO: 77697 - DNA, 477 bp, Oryza sativa
  Clone ID: PAT_MRT4530_7756C.1
ttgcgaatttcttcatttaaattttaattaaaaatctcatttattgcgtcagccgagagagagggcgcgcggaccgggtccacgggagcggggcccacgcgtcagcctctcggtccacggtggaccgggagcacgcggttggcggcggtcggcgccgtgggtcccacgcgtcagccgcacccgcgggcgcgggcggctgacggccgggccccacctggcagccgcggggcgcgcccgaaggcggcctcgccggcacggccgacgggaggcggcgcacccgcgccccgatggtcaccgccggcgacccggcgcggcggagcggcgcccgagagagaggagagaagagggaagcgaagcgacggccttcggctcaccccgggtcgacggcggcgacggcaacggcgaccgaagcgcaggaagacggcggcgcggttcgggatcacgagggcgacggagctccggcggtcggcgggcgaa

SEQ ID NO: 77698 - DNA, 398 bp, Oryza sativa
  Clone ID: PAT_MRT4530_77570C.1
atcaaaccattctaattttgcacggggaaaaaaaaataataattggctgtctatttggggagttaagtttactgctgttgcaaatacaaaaccgtttacagtttgcaggagcaggaaaggcttttatgatctacaaacattcttaaaattttttgagttcgaaacaggaaaccggggttgccggttaaaggaatcaaattacttacttttccaacaccgcccatgaatcaacattttgattccctggatgttaagcaaactgtaattcgatccaggtagagactttgccggcaatagggttggggggtcttgctattatccccacctgttcatgaatcttatgccattcctccactttgttttatatctgggcatccatgcaacacacgttaataaca

SEQ ID NO: 77699 - DNA, 241 bp, Oryza sativa
  Clone ID: PAT_MRT4530_77571C.1
gaagttgagcaggaaatcaatcatcggctaaagaaaacaaagccgaagcaggaatggcgcgttaagaaacaagcttctgtaaccgatgaagctgtggctgatgaagcaaagagattggccaaagagaaaagcattgtgattgcgtcggaagttaggcagaaacgccgaagatctcatcaaaacaaacatggcaatccatcagaaaccaagggtgttctagatgtggagctgacagtcggca

SEQ ID NO: 77700 - DNA, 468 bp, Oryza sativa
  unsure (1)..(468): unsure at all n locations
  Clone ID: PAT_MRT4530_77572C.1
gtggtcgccgagactacggctttaaagccagcgaggcgaggaggagttcccccaaacacttcagtagctgctactgtagccagcagcggcggccatggaggacacggcggcggcggtcgagacgccggtgacggtgtccacattcggtgtatccaggcacccggacacggccaggctcgtgctgagcagccccaagccgccaggcgtgcgcgaggagttcgtcggcgtcgtccgcaaggcgttccggccgcgggcgagcggcggcggaggagcaggccgtacgccgcggcgcgggggngggtgggccctcacggcgctgcagaccgtgttccccgtgctgcagtggngggaggacctacaacttcaagttgttcaggagttgacgtcatggcaggcctcactcttgccagccttggaattcctcagagcattggattcgccaatttggccaagctggaccctcagtat

SEQ ID NO: 77701 - DNA, 4269 bp, Oryza sativa
  Clone ID: PAT_MRT4530_77573C.1
atgctcttccgccccggcaccgctgtgtgggtggagcacccggaccatgcgtgggccgaggccgtggtcacatcccccgcctcctcctcgccgtcctccgttactgtcaccctcgccggcggcgccaaggctgtggtcgatgggaagaaagtcctgccgagggacacggaggccgacctcgggggcgtcgacgacatgaccaagctggtctacctccacgagcctggggtgctctgcaatctcgctcggcggtatgggttcaatgaaatctataattcaactgggaaaccatctataccaggagttttattatgctccattgcaaagattgcttccgttatttctttttccgagaaaggggcaacatacacggggcgtattttaatcgcagtaaacccctttgcgaagctacctcatctttatgatatgcacatgatggagcagtacagaggcgtgcagtttggtgaattgagtccacatgttttcgctgttacagatgcatcatacagagctatggttagtgaggaccgcagccagtccatattagtcagtggagaaagtggtgctggaaaaacagagaccacaaagcttattatgcgatatcttacttttgttgggggccgttcaacaggtgatataagatctgtggagcaacaagttctagaatcaaatccactgttggaggcatttggtaatgcacggacggtgaggaatgataactccagtcgctttgggaaatttgttgagattcaatttgacaaatcaggtagaatatcgggagctgcagttcgaacttatcttctggaaaggtctcgtgttgtacagatatctgagtctgaaaggaattaccactgtttttatcaactttgtgcatctgggcaggatgcagataaatacaaacttgctcaccctaggaactttaactacctaaatcaaagccatacatatgagttagaaggtgtcaacgaagcagaggaatatttgaaaacacggagagcaatggatattgttggtataagtttttctcaccaggaagccatattccgaactgttgctgctatccttcatctaggaaatattgaattttctcctgggaaagagtttgattcatctgctatcaaggatgaaaagtctaaattccatctccaaatggctgctgatttgctcatggttgatggaagccttttgctttcaactctgtgctatcgcacaattaaaactcctgaaggaaacatcgtcaaggcagttgacagttctgctgctgcaattagtcgtgatgctttggcaaagactgtatatgctcaattgtttgattggcttgttgacaatattaatatgtccattggacaagacatggagtcgagggcactaattggggtattagatatctatggttttgagtgttttaaatataatagttttgagcagctgtgcatcaactttgcgaatgaaaaacttcaacagcactttaataagcatgttttcaagatggagcaagaggaatacaaaacagaagaaatcaattggagctacattgaattcgttgataatcaagacatattggatctcattgaaaagaaaccaattgggattgtttcacttctggatgaagcatggctctttgctttgcaacaagatgacccatcaaaatcatcttataagttttcttctatagcttctcggtttaagcaacaactccaagcgcttatggaaacactcagctcaacagaacctcactacattcgttgtgtaaaaccaaattctctgaactatcctcagaaattcgagaatggaagtgtactacagcaactacgtagtgggggtgtgcttgaggctattagaataagtcttgctggttatccaacaaggaggacatataccgaattcattgatcgctttggacttcttcttccagaacatatggatgaaaggtttgatgagaaatcgctgacagaaaaaatactaaggcaattacatcttgagaactttcaacttggcagaacaaaagtttttctcagggctggccagattgctgttttggactccaaacgtaccgagattctggaaaaggctgccaggatagttcagggtcgctttcgaacctttgttgcttgcaaggagtttcattctactaagaaagcttctgtttctctccaagcatattgccgagggtgtttggcacgaaatttgcttgatgctaagagacagatagcagcagctgtttcagtagaaaagtatgctcggagatggttctgtcggtgtgaatatttgcatctccgttcttcagctcttgttatccagtctggtgttcgctatatgctagcaatccagaaattgctgcaattgaagaataataaagctgctaccattatccaggttcagagtatgcaccagaatatttattcacatgtagcatatactgttaaaactatgttctacattggtgctcttagtccatattgcctagtggaaaatttttcaaggactgaacttattttcaaggctgcatatgagactggagctttgcgtgaagcaaaagggaaacttgagaggagcttggaagatcttactttgcgattcaccctagaaaggaggcagagggtagctgcagaagagtcgaaggcactagaagtctctaagcttctcaaaatcgtggaatcattaaaatgtgagttggaggcagccaatgaagaaaaaattaatggttgcaaggaagttgcatcaatgcaacaacagttagggttatcaatcaaggatcaagaacttcttcacagcaatcttgctcagatagaagaactaaagagggaaaatactttactaaaggggaagaatgcagaaatggaacaagagctcttgaaagcccaaaaatgcagccatgataatatggacaagcttcatggcgtggaaagaaattatctgcatcttcgggacaacttgaaaaacttggaggataagatctcaaatttagaagatgagaaccatttattgaggcagaaggccttaagcttatctcctaggcatagccgcaccatgagccatcctattgggtcttccccatgcagcccaaagtcattgattgaatcttcacctgtaaagatcgtgcctctcccgcacaacccgacagagttaagaagatcaagaatgaactcagaaagacatgaggagtaccatgaacttctacagcggtgcatcaaggatgatatgggattcaagaagggaaaaccagtcgctgcatgtgtcatttacaaatgtcttctccattggggagtattcgaggctgaaagaacaactattttcgacttcataattcagaacatcaatacagttctgaaggctctcagaccacctttgaaagcttttggacaacggaatagcatgtcgcatatagatgctaaatacccagctatgttgtttaagcaacaactaactgcttccttggagaagatatttggcttaatccgtgacaatcttaagaaagagatatcacctcttttgagcctctgcattcaagtgccttcttttttcattcgcaagctagtaactcaagttttctccttcataaatgtacaattgttcaatagcttgctcctacgacgggagtgttgcacattttcaaatggagaatatgtgaaaactgggctctgtgtactggagaaatggattctggatgctacagaagagcatgcaggtgcagcttgggatgagctaaagtacatcagagaggcggttgaatttctgattattgcacagaaaagcagcgggacgcgtgagccggttatgtcgtctatgtgcccggttgttgccaaaatgagggacatggtgagcagcgatgcacaaaatccagtgtcaaattcatttctcttggatgacgacttgagcattcctttcacgacagaggagatagcagaggaagtaccggacatagacatgtcaaacatcgagatgccctcatcacttcgtcatgtacactctgctcagttcctgatgcagcaccttcagacaacgtacccgctaaaatgaaagtttagactagagaaagatgacaaaattacagatgacgataattgcttagttaaagaggaattttaagtcagtaatcatcatgtggtttgcctaaatttttctcagtatgactcggtgatccccttaaaatggggcattgctttgttgccatgcctagcacaaacctaaaattgcagaatctaaggataaaaatgtgaagtctttaacatggtgaaaaaaaaaaaaaaaaaaaaaaaaaaaaacaaa

SEQ ID NO: 77702 - DNA, 908 bp, Oryza sativa
  unsure (1)..(908): unsure at all n locations
  Clone ID: PAT_MRT4530_77574C.1
gcacgagggtnntttttttttttttttttttttttttttttgtggaaaggaaattaaactgatttattacttgttccattaaaaccatcacactcgggtacgtggtgaaaccgtgaaagtaaaaaaaaaaaaaacaggaagaacgaaccacagttgttaggtgaggccctgctcgctgttacatgagaggggcacgaagaaccagcacacgagcagagcttccatcccacacccagcaaggaaacggttgggatgccgccgccgccggccgatccgccgcccggggatgatgcgtcgtcgttgtcgttcaggtgcacccggaggcggaacggcttgcggtgcggcacggtccccggtcgaaaggtgatgagtaattgacccggaacaaatatatatggatggatggcgtcgtctgcggtcggacaacggagaggtctcgcgcatcacgcgcgggcttattttcgggcaaagtgggcggcacggaggtccgcgggtttagcttttccggcaaaattggagggccggttttggcccgttacggggttgggcaccaaagaaacctttctttgcgccggtgaagaagaacccgttcttttgcttgggttaatccccgcggggcctttttcttttaaccggcgggcggctgaaggcttatttggctaaaacagcccgcgaagcccggttaacccctttttttttgtttactgtaaccttttcccaaaagccgcccgcgcccggggggggaatcatctacctaaagtgtggaaaaggcaaaaaccttttggttcacttctatcgggacgggttttggcgccccccactcctctcttttattaaatttggattgggggcaacacaaattggggctatgcccaacccctttaccttttgtttttgggataaaccct

SEQ ID NO: 77703 - DNA, 1686 bp, Oryza sativa
  unsure (1)..(1686): unsure at all n locations
  Clone ID: PAT_MRT4530_77575C.1
ttagatctgttccaccacaggtccaaccggagttataactttagattctaggccgtcgacggcgaaggccacgtcgtcgcggaagcgagacggcagaccgcccggcgggtggccgcgccaccgcaccaggccaccaccacaacacctcggtggctcggtgcgcacgcactcgcgcttgcggccacgcgcgatgcgacgcgacccgactttttccccctgcgctgatctccggcatcggatttcggagagggtggggtgttctctccgctcggggttgttccactcggttctcatgcactcaagaactgtggatatctgaatgaaggcaatcgtcatccagaaaaacaccattggtttaccctgataaacaatgcttggattccagttgcacatggtcgccagagcttgagaaccagtatcaaggagaatagccaatatgacgtgataccgcaagaagtgtggcaaccacttccgcctgaccacaaagaagtagacggtcatgaagatcatcagaaagagccatcctgggactaacgccattgtgtcgatgaatgcatagaacaacccaaactgctgcaagtatggatgaagctggtacacagcatctgcaaaggaccacatgttgtgcagcggcagaagataggggacacacgctaaggtcctccaccaccatctaggtttggtctccaactcagggaagctgaatgatgataaagatgctcgacagccaacttgagttctaggacgtaacttgtcaattgacagcaatggtttgatgcctttgataggatcatactttgtgaataatgaagaggcagcaccaactctcaaaggatgctttttactgtcatgacgaagtgcgggagcacgcagattcagaaacgccggcccagcacgcgatcctacagggccaccatggcggctggcggcaggaaaaccgagcacccgaccattcgcggtcgcagtaacttgagccattgaattcagctgggcattccccagggacgggccggcgagagcgaggaggcggcggatgatgcaggggttttctttccgggaagttgcaacatgtctcggtacaactgaaattcataccagaccaacagaatatggcaggaactaagcgcgacgataatttaatttgtaatattccattgagtaactgcatatatgatggaaagatattttcagctgtgatgttccgtaacggcgagagcgaggaggcggcggaaggagcagggggacgccgacgccggagccggcgccgcggaaacagggcagctgacatcggagacggccgtgaggtcgcataaaaccgcccaactcggtaacggtggagaagagagggacggcggcgaggtcactcccttccctcttcctccagatccgcgcatcattccgccattgccaacggtgtcaacaagcatgatgatgtggtcgatcaagcggcattccgacgagctcatagtgcgggagcacgcagattcagaaacgccggcccagcacgcgatcctacagggcctccatgncggctggcggcaggaaaaccgagctcccgagcattcgcggtcgcaggtaacttgagccattgaattcagctgggcattccccagggacgggcctgagatggggtatggatgatcatttcaaccccaatttgacggggaacaaacggcgagagcgagg

SEQ ID NO: 77704 - DNA, 233 bp, Oryza sativa
  Clone ID: PAT_MRT4530_77576C.1
atggcggttgcaggcatggtcggtgtattgatgactaacacgcacgcagccactgcatatgcacctatacatgcagtcgacatccaccagatcccaaatctgcgaaagaagaagcccagaatccaggcaccaacttgcatcgcagggattggaatcaaggtggtctctgctctccacatcaactctcaagccgggattcagaatattttacctccagccctcactgaaaaggc

SEQ ID NO: 77705 - DNA, 2944 bp, Oryza sativa
  Clone ID: PAT_MRT4530_77577C.1
cccacgcgtccggtggtggtgagccggtgatcgatcttgcatcttgcgagcacacgggattccagatcgatcgagctatagctagctagctaattagttaccacgtacgaacgagtactttacaactcgatcagttcatcaaattaactcgatcagtggttaagtttcgcacgacacacgcgcgcggatcggaagccatcatgcagatgcaggtgctcaccgctgcttcttcgctccctcgcgcgaccttgctccggccggcggctgccgagccatggcgccaatctttcctgcagctgcaggctcgtccaatccagcgaccaggtatcatgctacactgcaaggcccagctacaggggcaggaaacgcgcgagcgtcgtcagctcgacgacgatgaacacgctagaccaccacagggcggcgacgacgacgtcgcagcaagcaccagcgagctaccctacatgatcgagtccatcaaatccaagctgagggcggccaggaacagcctcggcgagaccaccgtctccgcctacgacacggcgtggatcgcgctcgtcaaccgcctcgacggcggcggcgagaggagcccccagttcccggaggccatcgactggatcgcccggaaccagctgcccgacggctcgtggggcgacgccggcatgttcatcgtccaggaccggctcatcaacacgctgggctgcgtcgtggcgctcgcgacgtggggcgtccacgaggagcagcgcgcgaggggcctcgcctacatccaggacaacctctggaggctcggcgaggacgacgaggagtggatgatggtcgggttcgagatcaccttccccgttctcctcgagaaggccaagaacctgggcctggacatcaactatgatgaccctgccttgcaggacatatatgccaagagacaattaaagctcgcaaagattcctagagaagcactgcatgctaggccgaccaccttgctccatagcttagagggaatggaaaacttgggcacgagaaggttgctacagttcaagtgtccagctggctccttacattcctcacctgctgcgtcagcttacgctctcagcgaaacaggtgacaaggagttgctcgaatacctggaaacagccatcaacaattttgacggtggagcaccatgcacctaccctgtcgacaactttgaccgcttatggtcggtcgatcggttgaggcggctaggaatatcgaggtacttcacgagtgagattgaagaatacttggagtacgcctacaggcacctgagtccagatggcatgagctacggcgggctctgtccggtcaaggacatcgacgacacggccatggctttccgtctcctccgtctgcatggctacaatgtctcatcatcggtgttcaatcacttcgagaaggacggggagtacttctgcttcgcggggcagtcgagccagtcgctgacggcgatgtacaactcctaccgcgcctcgcagatcgtcttccccggcgacgacgacggcctggagcagctcagggcctactgccgcgccttcctcgaggagcggcgagccaccggcaacctcatggacaagtgggtcatcgccaatggcttgcccagcgaggtcgagtacgcgctggatttcccatggaaggcaagcttgccgcgagtcgagacgagggtgtatctggagcagtacggcgctagcgaggacgcgtggatcggcaagggactctacaggatgaccctagtcaacaacgacctgtaccttgaggcggcaaaggctgacttcaccaacttccagaggctctcccggctcgagtggctcagcctgaaaaggtggtacatcaggaacaatctgcaagcgcacggcgtgaccgaacagagcgtgctgagagcctacttcttagccgcggcgaacatcttcgagcccaaccgggcggcggaacgcctgggatgggctcgcacggcgatcctcgccgaggccatcgcgtcacacctccgacagtacagtgccaacggcgccgccgacggcatgacagagaggctcatcagtggactcgccagccacgactgggactggagggaatcaaaggattcagcagcgaggagcttactgtacgcacttgatgagctcatcgacctccatgcgttcggcaatgcttctgacagcctacgtgaagcgtggaagcagtggctcatgtcatggacaaacgagagccaaggatcaactggtggggataccgcattgctgctagttcgcacaatcgagatctgctcaggacggcacggttcagccgagcagagcctgaagaacagtgcagactacgccaggcttgagcagatcgcctcttccatgtgcagcaaacttgccaccaaaattcttgctcagaatggaggaagcatggacaacgttgagggtatagaccaggaagtggatgttgagatgaaagagctgatccagcgtgtctacgggagcagcagcaacgatgtcagcagcgtgacgaggcagacatttctcgacgtggtgaagagcttttgctacgtcgctcattgctcgcccgaaacaatcgatgggcacatctccaaggttttgttcgaggatgtcaattaggaaaatggttgactactagaaaggcaataaaaacaagagttgtgtctaccagcatggctcgtaaagtgatgactgcgaaaattttctcaaagtgagatgaatttagtcgatatttgtttcacttgatggtacaccagatacacatgttgttataagttgtctgatagctagtatactatatatatatatatatatatatatatatatatatatgaatatgttctgaagtgagacgtcagctatatgaattgtcttatttcagaacaaaactttgcacatcgatatgccattaaaaataaatatgtaaatatgtgaacctttttttcaaaaaaaaaaaaaaa

SEQ ID NO: 77706 - DNA, 1779 bp, Oryza sativa
  Clone ID: PAT_MRT4530_77578C.1
atggatctcggcaaatcatcctccactagcgcatcactgaagaagcttcaggaggacggcgcccttcccggtcgtggaaccatggaaagggaagcaggaggtactgaaccccagcctgtcttaggtcgcatggttgcgatcgaggactacattctctgcggttttctccctccaccttccaaatttcttctcttagttttgagcttctatggtctttctttgctccatctgaaccccaattctatagccttccttagtattttttcacatctttgtgaggcctacattggggtagagccctttctcgatctctttcgcttctactacgagttgcattggatggaatccaacagggtatctggatgcgttggattccgacttcgggatggcctaaagtcgcgttatatccccttccagtgtgcctcctctcgcagcaaatggcggacgaggtggttctaccttcagatagaagattcggatcctgtcttcgttgttcctgaggaacaaccagacaagatttcgtattggaccgcaaaaccccctttgaccccttctcttcagtcattcatcgatgttgttgacgatctccaagtacgaggtctgagcagcgaagccatgggacgtcgtgtcggccaggtcatgatcagtggcccgacgacggcgggtaatgtccccgttcccctttgcgagaagggggtggccgaacgcgatgcagccatcaatgctcttcctctgactgacatcatcgggccgctcgcggaccatcaggtggcggcgtcactgaaagagaaggtcgccaaggaggcatccgatgctgctactgccgctgccaccataagtggtggcaatgttccaacaaaggggaggaagttctcctctgtaagtggacatcgtcgcaaggcatctaccccctcggaggagctccaggtcgaaatggggcgtctcctcgaggctggtgctcgcggcattggtcgcgagattgcggaggcgaggtcggcggcggtgtcgacaaacgagcgcgccgaccggctggcacacgagttggcggaagctcgtgaagacctcaagaagatgggggagttggtggccggcaacgagcgacaacggcaagggctcgagcaccgtatgtcggagctcgggaacaatttgtcggaaatccgtggctcgttgcgggtcacctatactggtctgcaccagctcgccggggagtgcggcatcaagtctaccatcccggcgaatcccgatgagttctcgctgagatcttctcttgcggagctagcggcggcgatggaggagattccctccaagcatgtggcccggatcgaagaggagacgtccaacgggatctacaccggggcgtgccacgtccttgcgtgtgtgaggctggcgcatcctgaactcgatctgcgcgagatcttggatcagggggcggctagcggcacgcatctcgagagtgctcttgctgggcaagatcgtcgtatccaatattggaagacgaaatttgaagtagcagaactcgagagaaccatgctggcagtaaagaaggagcaagctgtggaaatgctccgaggtcgtgaggtgtggttcaactcgtacttcaagagttgctgcacgtccatggccaaggtctgtagagagctccgagtaccccgtggggatcccgaggagtcggcggccggatatatctcgtggctgaacggggcctgtgctcagctcgaaggcgtcggcaagggcatcgacgaagccttgaagcaggagtgtcatcgatcgagccgataa

SEQ ID NO: 77707 - DNA, 627 bp, Oryza sativa
  Clone ID: PAT_MRT4530_77579C.1
actactcgtccttcaaagttatgatcatacagtactgccctgaacttgatggtttactagaaaacggcatgcctatgacccttaactttttgtatttgagcggatgccatccattgctagaggagcagtatgcatggctacatgttgttgagtgggacaagtatgcgatcctgccgtactgcttctatgccggtaaatcgatgtaagacactgaattatatagctgacgaagtgctttttgaaaatgatatgattgagtggtcaacccaaaccagtctactgcatcctactgattctggagcaagctcttccagatgtctatagtgaattatgtgcatagatcaagacttctgtatggccattgggcacaccgtgcacctacgctgttggccatgttggcacggctggacattcatgcctgtgcagctcatgctccctggcatgaaattcatatgcatattacattttaatcgggccaacttatcatgagggacaaaaagaacgaaattatgtgctcgtgaaaacatggtccaatttagcaattctgtttgctgaatgcttccatatttgcagaggttatctatagttgacaactaaaacatacccttgaacggaaaaatggtagct

SEQ ID NO: 77708 - DNA, 224 bp, Oryza sativa
  unsure (1)..(224): unsure at all n locations
  Clone ID: PAT_MRT4530_7757C.1
ggcacgaggtcacccacnncnttgnctcgtangctcagcanccnncaccatnacngcccgngtngcctgccgangcagnntactgccttcaagctttnnncnncatggtgacntcgntcgntttcgttggcntcttgaaggagatcgnnncggctatcctcggggttcacggtnntgtanaananngntccnanccccgtaaaggtgaatttnggggttggtgg

SEQ ID NO: 77709 - DNA, 2010 bp, Oryza sativa
  Clone ID: PAT_MRT4530_77580C.1
atggatcttggcaaatcatcctccaccaacgcgtcgctaaagaagcttcaggaggacggcgcccttcccagtcgtggaaccatggaaagggaagcaggaggtactgaaccccagcccgtcttaggtcgcatggttgcgatcgaggactacattctctgcggttttctccctccgccttccgaatttcttctcttggttttgaacttctatggtctttctttgctctatctgaaccccaattctatcgccttccttagtattttttcacatctttgtgaggcctacattggggtagagccctttcttgatctctttcgcttctactatgagctgcgttggatggagtccaacaggatcgaagatttggatcctgtcttcatcgttcctaaggaacaaccggacaagattttgtcttggaccgcaaagccccctttgaccccttctcttcaatcgttcatcgatattgtcgacgatctccgagtacgaggtctgaacaatgaaaccgtgggacgtcgtgtcggccaggtgatgatcagtggcccgacaacggcgagtaacatccccgttcccctttgtgagaagggggcggccgaacacgacgctgccatcaatgctcttcctctgactgacatcgtcgggccgctcgtggaccatcaggtggcggcgtcattgaaagagaaagtcgccaaggaggcatccgatgctgctgctgctactgctgctactacaagtggtggcaatgttccgacaaaggggaggaagttctcctctgtaagcggacatcgtcgcaaggcatctaccccctcagcctcggacgcgtctcccccgcctccacgacgacaacaacttgtgacacatggcgagaaccgcgaggcgacaccaagtggcccagccagcgatctcgcggctggtcgtggtccatcggctgctgtcctcacctgggaggagctccaggtcgagatggggcgtctcctcgaagctggtgctcgcggcattggttgcaagattgctgaggcaaggttggcggcggcatcggcgaccgagcgcgctgaccggctggcacacgagttggcggaggctcgtgaagacctcaagaagatgagggagttggtggccggcaacgagcgacaacgacaggggctcgagcaccgcatgtcgaagctcgggaacaatctgtcggaaatccgtggctcgttgcgggtcacctatactggtctgcaccagctcgccggggagtgcggcattaattccaccatcccggcgaatcccgatgagttctcgctgacatcttcttttgcggagctggcggcggcgatggaggagatcccctccaagcatgcggctaggatcggggaggagacgtccaacgggatctacaccggggcgtgccacgtccttgcatgtgtgaggctggcgcatcctgaactcgatctgcgcgagatcttggatcagggggcggctagcgacacgcgtaagggggtgctggaagaagtcggcgatctgggggaatctgttctccctctttttgaagaagatgttgatgacgagaatgtccagcagcgtgggcaacctgagtcaccggcgatcattctggctctcgcgtttgaaccacatgcgtcgccagacaatgtagaccagatcctagctacggggacggggatggcgacgacttccttagatctcgagattgctcttgctggtcaagatcgtcgtatccaatattggaagacaaagtttgaagtagtggaactcgagagaaccatgcttgcagtgaagaaagagcaggctgtggaaacgctccgaggtcgtgaggtgtggttcaactcgtacttgaagagttgctgcacatccatggccaaggtttgtagagagctccgagtaccccgtggggatcccaaggagtcggcggccggatacatctcgtggctgaacggggcctgtgctcagttcgatggcgtcggcaaacgcatcgacgaggccttgaagcaggagtgtcgtcgatcgagctaa

SEQ ID NO: 77710 - DNA, 1767 bp, Oryza sativa
  Clone ID: PAT_MRT4530_77581C.1
atggatctcggcaaatcatcctccactagcgtgtcgctgaagaagcttcaggaggacggcgcccttccgggtcgtggaaccatggaaagggaagcaggaggtactgaaccccagcccatcttaggtcgcatggttgtgatcgaggactacattctctgcggttttctccctccaccttctgaatttcttctcttgggtatctggatgcgttggattccgacttcgggatggcctaaaatcgcgttatatccccttccagtgtccctcctctcgcagcaaatggcagacgaggtgttctatcttcagatagaagattcggatcctgtcttcgttgttcctgaggaacaaccagacaagatttcgtcttggaccgcaaaaccccctttgaccccttctcttcagtcgttcatcgatgtggtcgacgatctccgagtgcgtggtttgtcggggtatgaagtcgctgttgacttcattagtagacgaatccagccactccaggctcaagcccacctagcctttgactattctggaccggaggatgcgacccgggtttctcctcggggtctgagcaacgaagccgtgggacgtcgtgtcggccaggtgatgatcagtggcccggcgacggcgagtaatgttcccgttcccctttgcgagaagggggcggccgaacgcgatgccgccatcaatgctcttcctctgactgacatcatcgggccgctcgcggaccatcaggtggtggcatcattgaaagagaaggtcgccaaggaggcgtctgatgctgctgctgctgctaccacaagtggtggcaatgttccagcaaaggggaggaagttctcctctgtaagcggacatcgtcgcaaggcatcagccccctcgctgtctcatagggcggcgcgggcgaaggcggtgcaggatgagtctggagggacttccggtgcgtctcccgctgtagcctcgacggatgtcgtgcttgcgcccgggagccgcgaggtgacaccaagcggcccagccagcgatcccgcggctggtcgtggtccaccggctgtcgtcctcacctgggaggagctccaggtcgaaatgtggtgtctcctcgaagctggtgctcgcggcattggtcgcgagattgcggaggcaaggtcggcggcagcgtcggcaaacgagcgtgccgaccggctggcatacgagttggcggaagctcgtgaagacctcaagaagatgagggagttggtggctggcaacgagcgacaatggcaggggctcgagcaccgcatgtcaaagctcgggaacaatttgtcggaaatccgtggctcgttgcgggtcacctatactggtctgcaccagctcgccggagatgttgatgacgaggatgtccagcagcgtgggcagcctgagtcattggcgatcattccggctcttgcgtttgaaccacatgcgtcgccggacaatgtagaccagatcctacccacggggatagagatggcgacgacttccttagcatatctcgagagtgctcttgctgggcaagatcgtcgtatccaatattggaagacgaaatttgaagtagcggaacttgagagaacaatgctagcagtaaagaaggagcaagctgtggaaacgctccgaggtcgtgaggtgtggttcaactcgtacttgaagagttgctgcacgtccatggccaaggtctgtagagagctccgagtacctcgtggggatcccgaggagtcggcggccagatacatctcgtggctgaacggggcctatgcttag

SEQ ID NO: 77711 - DNA, 383 bp, Oryza sativa
  Clone ID: PAT_MRT4530_77582C.1
caacacatcatatctatggggctggggcacattcgaacacaaatgtgcatcaacgtaagagggcttccaattaatcataagcaagccatatggtcacatgcccacatactaggagtccaaatcataaacgaaggatgggagcatgaactgatcaacactccatcctgcttagatacatacgagaggctattcacaggctacaaaccagccaagctcaagctcttcaagtaaagcctaaacagagttccagcatgatcagaccatgcgcattactttcactgcttgaactagccaccaccaaacatgcccagcccatgcttgacatgcttgaacttgacatggtggcccaacttgccatgcttgaacttgcctgcacggtgacc

SEQ ID NO: 77712 - DNA, 1812 bp, Oryza sativa
  Clone ID: PAT_MRT4530_77583C.1
atggatctcggcaaatcatcctccaccagcgcgtcgctgaagaagcttcaggaggacggcgcccttcctggtcgtggaaccatggaaagggaagcaggaggtactgaaccccagcccgtcttaggtcgcatggttgcgatcgaggactacgttctctgcggttttctccctccaccttccgaatttcttctcttggttttgaacttctatggtctttctttgctccatctgaaccccgattctatagccttccttagtatttttttacatctttgtgaggcctacattgggggtatcaggatgcgttggattccgacttcgggatggcctgaagtcgcgttatatccccttccagtgtccctcctctcgcagcaaatggcggacgaggctcttcctctgactgacatcatcgggctgctcgtggaccatcaggtggaggcgtcactgaaagagaaagtcgccaaggaggcatccgatgctgctgcgctgctgctaccacaagtggtggcaatgttcccacaaaggagaggaagttctcctctggcggcgcgggtgaaggcagtgcaggacgagtccagagggacttccggcgcgtctcccgctgtagcctcgacggatgtcgtgcttgcgcccgggagccgcgaggtgacaccaagcggcccagccagcgatcccgcggctggtcgtggtccaccggctgccgtcctcacctgggaggagctccaggtcgagatggggcgtctcctcaaagctggtgctcgcggcattggtcgcgagatttccgaggcgaggtcggcagcggcgtcggcaaacgagcgtgccgaccggctggcacatgagctggcggaagctcgtgaagacctcaagaagatgagggaattggtggccggcaacgagcgacaacggcagaggctcgagcaccgcatgtcggagctcgggaacaatttgtcggaaatccgtggctcgttgcgggtcacctacactggtctgcaccagctcgtcggggagtgcggcattaagtctaccatcccggcgaatctcgatgatttcttgctgacatcttctctagcggagctggcggcggcgatggaggagattccctccaagcatgcggtcaagatcggagaggagacgtccaacgggatctacaccggggcgtgccacgtccttgcgtgtgtgaggctggcgcatcctgaactcgatctgcgcgagatcttggatcagggggcggctagcgatacgcgtaaggaggtgatggaagaagtcaacgatctgggggaatctgttctcccagatcttgagggtgctcttgctgggcaagatcgtcgtatccaatattggaagacgaagtttgaagtagcggaactcgagaggacaatgctggcagtaaagaaggagcaagctgtggaaacgctccgaggtcgtgaggtgtggttcaactcgtacttgaagagttgctacacatccatggccaaggtctgtagagagctccgagtaccccgtggggatcccgaagagttggcggccggatatatctcgtggctgaacggggcctgtgctcagcttgaaggcgtcggcaagcgcatcgacgaagccttgaagcaggagtgtcgtcgatcgagccgatatgccggagggcacgtgttggcctgcatacgagaccatcgcccgcgactggacctcgattttctccgtgaaggttttgctcgttctcggaggactccggcggagatagaccacctggcgaagtcgatggtgtcgttggcggagaaggtcttacaatctatggactggcgttggccttcttggtag

SEQ ID NO: 77713 - DNA, 330 bp, Oryza sativa
  Clone ID: PAT_MRT4530_77584C.1
atgcggcctcgtcgccctcctcctactataagctactcaagggcaggctcgggggcagctcttgggaggcaccttgtctccggcgacggaccaagcgaagacggaggaggtgaagaagggcgtcggtcgaggctgcgacgggagcgggggtggtggtgggctcggggcggctcttggtcgggcaccccgtcaccaacggtgatggatgcggtaggcgtaggcagcatcggcctttcttgcgcggggcgccggtggctactcactcgaagaggaggggaagggtacgagcgtagacagtgggaagagccgaaggggaagagacatggatga

SEQ ID NO: 77714 - DNA, 160 bp, Oryza sativa
  Clone ID: PAT_MRT4530_77585C.1
tgctatgggatatatggtggtgtttgtggtgatgtgattcctgaacgattgttcgagattcgagacagccgtgagggatgttttacacttgggcgtaactgctcccgaataataggggtaattagaaaactccccgatgcagcttcttccatagaaaaaa

SEQ ID NO: 77715 - DNA, 1578 bp, Oryza sativa
  Clone ID: PAT_MRT4530_77586C.1
atggctagaaagaaaaggttgaacatagtacatagcagctgtcaccatggaaatggagagggaagtagcagcggacaatcattgccacaagtcgagcctcctctaccatatgaagacgaggtgattcatgttgagcagcaagatgatgagcccctcaacatgcctgtacaagatgaagaggtgaagaagcgcaaggggacaaccttgcgatatgtttgggatcttccacctgggaaacgtatagttgtaaaatgcaacagattagggcaacctatcggggatgaaggtggattgctaggacagtttttgggcacattagcaagaaatggagcttactgtccattagataagatgacctggagaaagatcaaagcagatgaaggagatttaacaatactacaatttgtccagacaaagttcctataccctccatcatgcgttcaatggatactgaaatcaattggaagagattggaggcgatacaaggctgcactaaaagataaatattttaacccaaagaagaagcgttctgctctgtataagctttgtccagacgatgtagaaaaagaccaatggattccacttatcaaatattggaagtcaaaaaaaggaaaggccctcagtgcaaagaacaaaagaagtcgttcaatgttacagaaccctcactcagcagggacaaagagttatgctcgttggtctgaggacttggtcacattggagaacctcatcgatgaacaaccagagttggcacaaaatgatcaaggaagagttgcatgggaaggtgatgcgctaaataaagtattgggcaaagaaaaacctggccaagtgcacggaatgggattacttcctgttcctaagcaggtttatggtcgtacatcacatcatctcaagaacataaacatcactacagtgaatgactcatcatcggatgaagagacacatgttagaggggaagtgggggaattaaaaaaattagtcaaaacactgggtcagcgtattgaggagttggaaaacaaaggaacaagcaatgggaatagtgaaccaactatggcaacatctcagagaacttttgatgatggtattgaagagggagtagtacggactaatagaaagaacaaaagaagatgtgaggaacagcaaaatatgcaccatgacaatattctggatctttgtggcaaaaagcaccaggaggctgataacaacataggatcaccatgtcaagatgattcatcatcacagccacaccttgctcatgatcttcggtgggagatgaataaaaagaagcaccgaaatttagagaaatttgcaaagactacagaaaaacaggacactcagaagaagactgcacatcacatggcccaaaatagggtgcattcttcttcagtgaaggttggtaccacaataatcttggtgactgcaaaatatcctaacaaagaaactgtggcatatgctacttatttgagtagtaacccaagagacaaagtggatggtgttgagattggtaacgagttcactaaagtggttgtcaatcatccacttaaggaagatgaagagctcgttcaaaagatcaatggttaa

SEQ ID NO: 77716 - DNA, 1845 bp, Oryza sativa
  Clone ID: PAT_MRT4530_77587C.1
atggatctcggcaaatcatcctccactagcgtgtcgctgaagaagcttcaggaggacggcgcccttccgggtcgtggaaccatggaaagggaagcaggaggtactgaaccccagcccatcttaggtcgcatggttgtgatcgaggactacattctctgcgtgtccctcctctcgcagcaaatggcagacgaggtgttctatcttcagatagaagattcggatcctgtcttcgttgttcctgaggaacaaccagacaagatttcgtcttggaccgcaaaaccccctttgaccccttctcttcagtcgttcatcgatgtggtcgacgatctccgagtgcgtggtttgtcggggtatgaagtcgctgttgacttcattagtctgagcaacgaagccgtgggacgtcgtgtcggccaggtgatgatcagtggcccggcgacggcgagtaatgttcccgttcccctttgcgagaagggggcggccgaacgcgatgccgccatcaatgctcttcctctgactgacatcatcgggccgctcgcggaccatcaggtggtggcatcattgaaagagaaggtcgccaaggaggcgtctgatgctgctgctgctgctaccacaagtggtggcaatgttccagcaaaggggaggaagttctcctctgtaagcggacatcgtcgcaaggcatcagccccctcggcctcggacgcgtctcccccacctccacgtcaacagcgacttgtgacacttggcgagaaggcggcgcgggcgaaggcggtgcaggatgagtctggagggacttccggtgcgtctcccgctgtagcctcgacggatgtcgtgcttgcgcccgggagccgcgaggtgacaccaagcggcccagccagcgatcccgcggctggtcgtggtccaccggctgtcgtcctcacctgggaggagctccaggtcgaaatgtggtgtctcctcgaagctggtgctcgcggcattggtcgcgagattgcggaggcaaggtcggcggcagcgtcggcaaacgagcgtgccgaccggctggcatacgagttggcggaagctcgtgaagacctcaagaagatgagggagttggtggctggcaacgagcgacaatggcaggggctcgagcaccgcatgtcaaagctcgggaacaatttgtcggaaatccgtggctcgttgcgggtcacctatactgcggagctcgcggcggcgatggaggagattccctccaagcatgcggccaggatcggagaggagacgtccaacgggatctacaccgaggcgtgccatgtccttgcgtgtgtgaggctggcgcatcctaaactcgatctgcgcgagatcttggatcagggggcggctagcggcacgcgtaaggaggtgatggaagaagtcggcgacctgggggaatctgttctccccctttttgaagaagatgttgatgacgaggatgtccagcagcgtgggcagcctgagtcattggcgatcattccggctcttgcgtttgaaccacatgcgtcgccggacaatgtagaccagatcctacccacggggatagagatggcgacgacttccttagcatatctcgagagtgctcttgctgggcaagatcgtcgtatccaatattggaagacgaaatttgaagtagcggaacttgagagaacaatgctagcagtaaagaaggagcaagctgtggaaacgctccgaggtcgtgaggtgtggttcaactcgtacttgaagagttgctgcacgtccatggccaaggtctgtagagagctccgagtacctcgtggggatcccgaggagtcggcggccagatacatctcgtggctgaacggggcctatgcttag

SEQ ID NO: 77717 - DNA, 290 bp, Oryza sativa
  Clone ID: PAT_MRT4530_77588C.1
atacgactttctatggggaaagctgacacgcctgcaggcaccgatcctgtatagtcggcgcgatccacgcgttcgtttgaaggaagaggaggaggaggaggaggaggaagagaagcttctagaaggggagcggggctgtatggtggacttgagccggacggaggccatcgaagagacgcggatctccttctgcggccaggaacaccgagtgctaaccagatatggctcagaatctgactctgaatttggagatgaagacaagccggagctcatatcatacccggatgcag

SEQ ID NO: 77718 - DNA, 4474 bp, Oryza sativa
  Clone ID: PAT_MRT4530_77589C.1
atggctggaaagaaaaggttgaacatagtacatagcagctgtcaccatggaaatggagagggaagtagcagcggacaatcattgccacaagtcgagcctcctctaccatatgaagacgaggtgattcatgttgagcagcaagatgatgagcccctcaacatgcctgtacaagatgaagaggtgaagaagcgcaaggggacaaccttgcgatatgtttgggatcttccacctgggaaacgtatagttgtaaaatgcaacagattagggcaacctatcggggatgaaggtggattgctaggacagtttttgggcacattagcaagaaatggagcttactgtccattagataagatgacctggagaaagatcaaagcagatgaaggagatttaacaatactacaatttgtccagacaaatttcctgtaccctccatcatgcgttcaatggatactgaaatcaattggaagagattggaggcgatacaaggctgcactaaaagataaatattttaacccaaagaagaagcgttctgctctgtataagctttgtccagacgatgtagaaaaagaccaatggattccacttatcaaatattggaagtcaaaaaaaggaaaggccctcagtgcaaagaacaaaagaagtcgttcaatgttacagaaccctcactcagcagggacaaagagttatgctcgttggtctgaggacttgagacaagatgatccaaataagaagcagccacatagagcaatggtttacttagcaactcacaaaaaaaaggataaagataaaaatcaacacgtggtcacattggagaacctcatcgatgaacaaccagagttggcacaaaatgaccaaggaagagttgcatgggaaggtgatgcgctaaataaagtattgggcaaagaaaaacctggccaagtgcacggaatgggattacttcctgttcctaagcaggtttatggtcgtacatcacatcatctcaagaacataaacatcactacagtgaatgactcatcatcgaatgaagagacacatgttagaggggaagtgggggaattaaaaaaattagtcaaaacactgggtcagcgtattgaggagttggaaaacaaaggaacaagcaatgggaatagtgaaccaactatggcaacatctcagagaacttttgatgatggtattgaagagggagtagtacggactaatagaaagaacaaaagaagatgtgaggaacagcaaaatatgcaccatgacaatattctggatctttgtggcaaaaagcaccaggaggctgataacaacataggatcaccatgtcaagatgattcatcatcacagccacaccttgctcatgatcttcggtgggagatacgagaggctgcgcgacgactaacagatgcagtggaagcctcctctcagggcacgttccgaccagacagagatagggacgagctgacactcgccctgcagactccagagcatccaggacgaacacgagggaaaggggtgattccttggaagattggtttcaaggaggacatccacacgtacaggagtcggatgaggagcaagagagataccgaggcgaagattgcagacctagagttccgggtatcgagctacgaactcaacatgcaagaggaggtggcaaggaaggttgatgaacgcatggccgcacatcggtcccatgatccccagccgaccattcctcctgcaatggtgagcccgtcaggaaaccgtagcagctgcgcctcaacggggcaggtggcgtcgggcatggccatcccaacggacccttcaggtacttaccactgcaggccgattccagcaggatactcgaaggtcgaagttgagttggtcgaaggcgcgtacgaggacctcgagctggattaccctggaggagacggcggtacatcatcctccctgggcgacaagcggcgtctcgatcctgcaccgactcctcctcgtgctcctacacctactcccccgcaagctcctcttccggcaccttcaaagtcaagggcccccccagctccaccgcctgcccacacaagggcaacgaagaaggcgaaagttgacgccgccaagaacaaggacccggggtacgattgcacgcaagaggagcttgacgcttacgttgcatcagaagtcaagagacaattcaagcctcgaagtccagaaaagaagattcctatagaccccagtgtcaggaacttcttcaggggtatgtctgcatctgtcaaggaggccatcaagctatcggactatgagcgaacgctgaagaaagcatcttctggaaagtccaaaccagtccctcagcttggagagcaaccaaaccaggagatcgagccgttggtgaccggtaaagaaatgacgatagaacaatttattactgacaccggtctaactacggatcaattgctaggagtcgcaccaatcgaaaaggcggaagtgaaatacatgtacgaactcggtaaaccgcttgtcaagcctgagctgctgcagtccctacccacacaaatgtacaagttccatcagctgtacatggagatgagcgccaccggtagagagatgatcggagcgaggatcagggacacggacttcttgcaaggagatgacattctctggatcaatttcaggggaatctacgaactataccagctggacgccctcgacgtctctattatgagttgctggattttaatggagattcaaagggcccgacggcggagggttttcgatactggattcatcgaccctcggaaagtaaacgtcgcaatgctcgaccaatatccacaagaaacagaggacaatctcgtccatctcctgaaggcgcagcattacaagacgttcatactgttgccatacaacacagaattccactgggtgcttttactcttcgacctggaggcctgcaccgtcaactgcgcaaagcaaaagcagggaactaacttgtgcggctattacgtgtgcgagtattgccactgccttgcagaccaaatcatcaccacaagagagctcgattttattcgcatgagggataacctgaccacacacaaggaatttatcgcggcggttcaagaacaactcatgggattcatcaacgaagaaatccttgatcccaaggtggatgacgcggcctcgaggcggagcgatggcatggctcgacctcgacacggagcgatggcggtgcggccctcgagagacgccaaggttgaggtattgggggctgaggctttgggctcgttctttttccccacgacgaacgggctccagccagcaggtctccaggtcccaggatgggaacaccatgaccatgtccctgtctacgagtcaggcaccgaggtgttccaaaagcttcaggagaaatggaattccaccaagcacaagcgataccgcgcgatgtactccagcgtcgtcggcggaatcatcctcgatccatcgatgatggtcatccccatcgacgatcacatggtccacagaggccatggcgtcttcgacaccgccatgctttccgacgggtacctgtatgagctggattcgcacttggatcggctgctgctatctgcatccaaagcaaagatcagctccccattctcccgcgaaacacttcgcgccattttggtgcagatgacggctgcgtccaagtgcaggaatggctcgatcaagtactggctcagcgccggccccggcgacttcctcctctcgccaaagggctgcactgcgccggcgttctacgccgtcgtcatcgcgtccgccgccgccgccgccgccggcgggcacccgcggctcagggagggcgtgagggcgatcacgtcgacggtgccgatgaaggacccgttcttcgcggcgatgaagagcgtcaactacctggcgaacgcgctggccatggcggaggcagaggagcgcggcgcgtacgcgtcggtgtgggtggacggcgacgggggcgtggcggagggcccgatgatgaacgtggcgttcgtcacgggcggcggcgacctggtggtgccggcgttcgacagggtcctcagcgggtgcacggcgaggcggctgctcgcgctggcgcccaggctggtggacgccggcgtgctcaggagcgtcggcgcggcgaggatctccgccgccgacgcgaggaggtgcgccgagatgatgttcgtcggcagcggcctcccgttgctgcccatcgtcgaatgggacggccagccggttggcgatggtcaagtggggaaaattgcccttgccctatctgacatgctttgcgaagacatcaaggccggtctcgacagagtacttgttccttatgatcaagcgagctagacgacgactcatagagctttggaagatcaactttgtataataataataataatgtaatacttccatttatgtgaacgaaatttttccgtattatgagtggaggatccgtcacattgacagaattgaatatagacttattttataaaaaaaaaaaaaaaaaaaa

SEQ ID NO: 77719 - DNA, 1259 bp, Oryza sativa
  Clone ID: PAT_MRT4530_7758C.1
acattagtactccgagtaaccaagcactctcatcacaacgtagcccctctgtcagaatagagattcaaggagtaccatttctggccaaccttattctgttagaatccaaagatcttgatgtcatcctagggatggactggttagccaaatataaaggtgtgatagattgtgccaacagaaaagtaactctcaccagcaatgatggtcaaattgtaactgttcatgcattgccctctgaacctttaaggtcgagtctaaaccaaataactttggaagagattcccatagtacgggagtaccccgatgtgttccctgatgatttacctggtatgccgcctaaaagggatataaaattcagaatagatctgataccaggaacaactctgatccataagagaccttatagaatggtagccaatgaactagcagaagtcaagaggcaagtagatgatttgcttcaaaaaggatgcatcagaccaagttcgtctccatggggagctccagtaatttttgtggaaaagaaagatcatacctagaggatgtgtgtggactatcgtgcactaaatgatgtgactatcaagaataagtacccgctgcccagaattgatgatttgttcgatcagcttaaaggtgccaccgttttctccaagatcgaccttcgatcagggtatcaccagttgaggattaaagaggaggatatacctaagacggcttttaccactaggtatggattgtttgaatgtactgttatgtcttttagacgtaccaatgcccccgctttcttcatgaatttgatgaacaaggtgtttatggaatacctagacaagttcgtggttgtctttattgatgacattctcatttactcctgaaccatagaagagcatgaagaacatcttcgtcctgcactagagaagttgcgagaacatcagttgtatgccaagtttagcaaatgtgaattttggttgtctgaagtgaagttccttggtcatgtcatctcaactggaggagttgccgttgatcctagtaatgtggaatccgtaaccaactggaaacatccgaggacagtttcagagatccgcagtttcctgggtctcgcaggttataactggaggttcatagagaatttttccaagattgccaagcccctgacacgactgcttcagaaagatatgaagtacaagtggtcagaagagtgcgagcagagttttcaagagttgaaaagtcgcctaatatcagcacccattttgattctgcctgat

SEQ ID NO: 77720 - DNA, 2235 bp, Oryza sativa
  Clone ID: PAT_MRT4530_77590C.1
atggatcttggcaaatcatcctccaccagcgcgtcgctgaagaagcttcaggaagacggcgcccttcccggtcgtggaaccatggagagggaagtaggagagccctttctcgatctctttcgcttctactacgagctgtgttggatggagtccaacagggtgtctggatgcgtcgggttccgacttcgggattgcctgaagtcgcgttatatccccttccagtgcccttcctctcacagcaaatggcgaacgaggtggttctaccttcagatcgaagattcggaccctgtcttcgttgttccagaggaacaaccggataagatttcgtcttggaccgcaaagccccccttgaccccttctctccagtcgttcatcgatattgtcgacgatctccgagtacgaggttgttctgggtatgaagtcgctgccgacttcgttggtagacggatccagccgctccaggctcgagtccatccagcttttgactattctggaccggaggacgcgacccgggtttctcctcggggtctgaacagcgaaaccgtgggacgtcgtgtcggccaggtgatgatcagtggcccgacaacggcgagtaacatccatgttcccctttgtgagaaggaggcagccgaacgtgacactgccatcaatgctcttcctctgactgacatcatcgggccgctcgctgaccatcaggtggtggcgtcactgaaggagaaggtcgccaaggaggcgtccgatgctgctgctgctgctgctaccacaagtggtggcaatgttccgacaaaggggaggaagttctcctctgtaagcggacatcgtcgcaaggcatctaccccctcggcctcggacgcgtctcccccgcctccacgacgacaacgacttgtgacacttggcgagaaggcggcgtgggtgaaggcggcgcaagatgagtccggagggacttccggcgcgtctcccgctgtggcctcgacggatgtcgtgcttgcgcccgggagccgcgaggcaacaccaagcggcccagccagcgatcccgcggctggtcgtggtccaccggctgccgtcctcacctgggaggagctccaggtcgaaatggggcgcctcctcgaggctggtgctcgtggcattggtcgcgagattgcggaggcgaggtcggcggcggcgtcggcgaacgagcgcgccaactggctggtacacgagttggcggaggctcgtgaagacctcaagaagatgagggagttggtggctggcaacgagcgacaacggcaggggctcgagcaccgcatgtcggagctcgggaacaatctgtcgaaaatccgtggctcgttgcgggtcacctatactggtatgcaccagctcgccggggagtgcggcatcaagtctaccatcccggcgaatcccgatgagttttcactgacatcttctcttgcgaagctggcggcggcgatggaggagatcccctccaagcatgcggccaggatcggggaggagacgtccaacggaatctataccgggacatgccacgtccttgcgtgtgtgaagctggcgcatcctgaactcgatctccgcgagatcttggatcagggggcggctagcgatgcgcgtaaggaggtgatggaagaagtcggcgatctgggggaatctgttctccctctttttgaagaagatgttgatgatgaggatgtccagcagcgcgggcagcctgagtcaccggcgatcatttcggctctcgcgtttgaaccacatgcgtcgccagacaatgtagaccagatcctagctacggggacggggatggcgacgacttccttagtgaagaaaaagaaggctgtggaaacgctccgaggtcgtgaggtgtggttcaactcgtacttgaagagttgctgcacatccatggccaaggtttgtagagagctccgagtaccccgtggggatcccaaggagtcggcagccggatacatctcgtggctgaacggggcctgtgctcagctcgatggcgtcggcaaacgcatcgacgaggccttgaagcaggagtgtcgtcgatcgagccgatatgccggagggcacgtgttggcttgcctacgagatcatcgcccgcgcctggacctcgattttctccgtgaaggttttgctcgttcccggaggactccgacggagatagaccaactggcgaagtcgatggcgccattggcggagaaggtcttccaatctatggactggcgttggccttcttggtag

SEQ ID NO: 77721 - DNA, 588 bp, Oryza sativa
  Clone ID: PAT_MRT4530_77591C.1
atgggctcgagcctggagcggctggatccatctaccaatgaagtcagcagcgatttcataccccgacaaatctcgtactcggaggtcgttgatgacatcgatgaaggactgaagggaaggggtcaaggtgggctttgcggtccaagacgaaatcttgtctggttgttcctcaggaacaacgaagacaggatccgaattttctatctgaagatagaactacctcgtccgccatttgctgcgagagtaagggcactggaaggggatataacgcgacttcaggccatcccgaagtcggaatccgacgcatccagataccctattggactccatccaatgcaactcgtagtagaagagaaagagatcaagaaaaggctctaccccaatgtaggcctcacaaagatgcgaaaaaatactaaggaaggcaatagaattggggttcaaatggagcaaagaaaggccgtagaagttcaaaaccaagagaagaaattcagaaggcggagggagaaaaccgcagagaacgtagtcctcgatcgcaaccatgtgttaacaaccaaatttgataacatcggcatcaggaaagaagactag

SEQ ID NO: 77722 - DNA, 180 bp, Oryza sativa
  Clone ID: PAT_MRT4530_77592C.1
atggagtggacgggcggcggcgccggagcccgccgccggcgagagccccgtggaggccttgccactgggctgggcactgctgtgctttgtagtcgaggactcgaaggccgtatgcggtgcgagttgaagggcccgatgggttgggccgggcctgcgcctgttgggctgagagagcaggcg

SEQ ID NO: 77723 - DNA, 636 bp, Oryza sativa
  Clone ID: PAT_MRT4530_77593C.1
ccgggctgcaggccccttctcacaaaggggaacggggatgttactcgccgttgtcgggccactgatcatcacctggccaacacgacgtcccacggtttcgctgttcagacctgtgaatcgagaaccaaatttcgataaatcaggaggaacatgaacacgagcctgtcaggataaatgcaagaaagataccccgaggagaaacccgggtcacgtccttcggtccggaatagtcaaaggctagatgaactcgagcctggagcggctggatccgtctactaacgaagtctgcagcgacttcataccccgacaagcctcgtactcggagatcgtcgacaatgtcgataaacgactgaagagaaggggtcaaggggggctttgcggtccaagacgaaatcttgtccggttgttcctcaggaacaacgaagacagggtccgaatcttcgatctggaggtagaaccacctcgtccgccatttgctgcgggaggaagggcactggaaggggatataacgtgacttcaggccatcccgaagtcggaaccctattgggttccattcaatgcagctcgtagtagaagcgaaagagatcgagaaagggttctaccccaatgtaggcctcacaaagatgagaaaagata

SEQ ID NO: 77724 - DNA, 521 bp, Oryza sativa
  Clone ID: PAT_MRT4530_77594C.1
accacgcgtccgatttattcggttgtacaatcagagactggtcaggtagcagccgtgtactgttgtgtacagttgttaacgctcgtgttgaggcagtagtaggtcagcattggtgtacatggtttggtgttaatctgcggcctcgttccgtttaaaaaaaaaaaaaaaaaaaaaaaaaaaaaaaaaaaaaaaaaaaaaaaaaaaggaaaaaaaaaaaaaaaaaaaaaaggttccgtccaaatagcatgcaacataataacactcttgttggggcacataaattcatttaattggccgccatttaataatgtttgaaacggggaaaatccaggcgtttcctaactaaaaaaactttagggtatactccgcctttcgccagttgtgataatagcgaattaggcccatgaccatttgaccctaacgaacatttgctcaacctaattggcaaatggaaccccccctgaagcgaaaaataaaacgccatggttgtggggtttatgcccacctggattgatacattt

SEQ ID NO: 77725 - DNA, 273 bp, Oryza sativa
  Clone ID: PAT_MRT4530_77595C.1
atgcccgcgccttcccgccgcccacgacgcccgcgcctccccatcgacacccttcagcccgacgcgggagaggtcctaaaggtcgacgtcgaggtcacggagggacttgacaaaggaggcgaggtcgacggtgtgatccagggaaggaaggagcggcttgtctcccgcgtgctcgcgctcgacttcctccgaccccgccggttgccaccgtgtttccccatctttggctgcctctttctcttcatcgggctgtcgccaccgccgccgtcgtag

SEQ ID NO: 77726 - DNA, 496 bp, Oryza sativa
  unsure (1)..(496): unsure at all n locations
  Clone ID: PAT_MRT4530_77596C.1
agctaaaattaacccnactaaaggaataagcttgggccgctctatttgatctttcttacatttttttgctttgtgctttctgcgaactaacccaactgggaaatctgtagcgccacctgctttattgaatactgaataacccagtgctaggacgcaagccattggggaactttttggaaacacgggcccaaaaaccttgcaaactctatggttgggccaaaatgaccggttttgcattgctatcccgatggttaaacaccgtccgcaaaaattaaggatgtcattgggctcggatcgggtcccttcgaaagggaaaagacattatccatgcaattggcctgaatttcgagaagcaatatacgattcgctcccttgtggggcatgccatgcaaaatgacccagctggaaaaacgatagtccctgccccttaaaaactaatatgggcttagccgccattaattttctgaggatgctgtacattaaccacccaaacctt

SEQ ID NO: 77727 - DNA, 512 bp, Oryza sativa
  Clone ID: PAT_MRT4530_77597C.1
agctgatacatccaccaaatatggttgcatataagaaagccgtttaggcgttaacacaagcccaacctgaaaccaaacacgccacacaaggatacggttacactcaggagtcaacaaaatacacacaatcccgaccagtttgacatgcagaaaccatatatagttccgttgaactgcaagctaaatctctagtctgtaattccaaagaaaaacaatctatttttaccgagtgcgcttgtgattcactcacgagtcaggacaccctgaggcactgatgcttgaacatcttgagtggtatgatgaccgctggcctagtactacacggttaggtcctgcgttcctaagcacatgttgatcaacctcattttgacggacccgttcctgcgtgccggtatttgcgccttcgcgtaccttattcactgacgaccccaagctttacgggttattcatggagacatcatggactttgccgataatgaccatgtgcttgattttgtcaaacattgaaccaa

SEQ ID NO: 77728 - DNA, 450 bp, Oryza sativa
  Clone ID: PAT_MRT4530_77598C.1
atgagacatttgtcacgtgcactgagcgcctcgcgccagacttgcgccagacattggcgtgcatcatacagcattatgacgcgcactaaggccgctactagcgccgcgctctacatgccgtactatgcaccaactagcaaccccgttgtgctggcggactggacgaattatgccgcgtcaacacgcgtcatgcaactcctaccatgcgccatagttgcactggctacataccccgtggtcactctggtcgcgcataccatcgaacatcggatgcgtgccaaacatcgaccaccacatgaatttcgacataccttgaaagagcatgactcagttgcattacccgaatataatgcaccggaggaggatgaaataccgaagaatgcaaaggtatacctcatcttgtccagaggcctcgagaaaaataatgggacaagaacttcggctccttaa

SEQ ID NO: 77729 - DNA, 411 bp, Oryza sativa
  Clone ID: PAT_MRT4530_77599C.1
ttagggtcgcttataaataaattttggctgggaggagaacttcggggtgtgacaggtggtgagcatgatgttcgttgccatcaggagcccgatccaggtttggtctgacgagacgtacatgccctgggctcggcccacgggcttggatctcgaattgggccccacagttagtaggtcgtcgaggaccacaaccatcccgaacaaggtatttgacgtgttgtccggcgggttcaccatcgtgaccgccgatggggaaggctaaaaatccttctcgtagaagtagaagtgtaggtgtgtcggctcggagccatggcctgaggggctaggcccaggcccaccatgtgtgtggcccttacaactggctcccagcacaaggaagatcataagcattagtgctaatctctttgccat

SEQ ID NO: 77730 - DNA, 3105 bp, Oryza sativa
  Clone ID: PAT_MRT4530_7759C.1
atgacaaccgacccagaagaattccttcaagtctactccacagtactctatgctgccggagcagacgacaacgcgctagcgaactatttaccaaccgcgttgaagggttctgcacgttcatggctgatgcatcttcctcccttttcaatctcttcgtgggcagacctgtggcaacaattcgtcgccaattttcaaggaacgtacaagcgccacgcgatcgaagacgacctagaactcagaaacacaatccctgatatcgctaacgcttctgtaatccgtgccttcaaatccggtgtcagagatcgttacactacccaggaattggtgacaagacccatcacaaccactcggaggctattcgagatcgttgagcgatgcgcccatgtggacgatgcgctaagacgcaagaacgacaagccgaagaccgggggagaaaagaaatcagccacagacgcatatgagtcaagcaagaagaaaaatcacaaaaacgggaaaaggaaagctcaagcggaagtcctcgcagcagaatacgcgaacccccccaagtgcccagacccacaaggcagcgacacaaagaaatcttggtgccccatacacaagacggacagacattctctggaagattgccttgttttcaaaaagtcgctcgagaagcacatggcgtttgaaaaaggcaaacgaggggctgcacccaagatgaagtggtctgaggagaaaatagagttctcggaagaagaccaccccaagaccgccgttatcccaggacgatatccgatcgtggtcgaacccactattcggaacatcaaggtagcgcgagttctcatcgacggtggcagctcgatcaatcttcttttcgccagcactctggacgcaatgggaattccgcaaaatgagttaacaccaaccgatcaacccttccatggaattactccccaatcatcgtccagacctttgggcaagattacgttacctgtgactttcggccaagccaacaacttccgaacagagcagatcacctttgatatcgctgaattcgatacagcttacaacgccatcatcgggagaactgcacttgcgaagttcatggccgcatctcactacgcgtatcaagtgctcaagatgccgggaccgaagggaacaatcactattcaggggaacgcaaagctggcggtgcagtgcgacaagcggagcctcgacatggtcgagcaaatgaccagcccacccgccacgactgagccacccaagaaaccgtctgacatgccgggggtccccagggaggtgattgagcacaaactaatggtgcgacccgatgccaagccagtaaagcaaagactgcggagatttgcaccagaccggaaacaagccatacgagaagagctcgacaaacttctcaaagctggcttcatcagagaagtacttcatccagagtggctagccaatccagtcatggtgcggaaggccaacggaaaatggagaatgtgtgtcgacttcaccgacctcaacaaggcgtgtcccaaggatcactttcctctccctcgaatagatcaattggtggattcaacagccggttacgagctattgagcttcctcgacgcttactctggctaccaccaaatcagcatggcaaaagaggacgaagagaagattgcattcatcacgccgttcggggtattttgctatgttaagatgccgttcggactgataaccgccgggaatactttccagcgcatggtccagggcgcacttagcaaccagcttggcaacaatgtcgaggcttacgttgacgacatcattgtcaaaacaaagacaagcgactcattgattgatgatctgcgggaaacgttcgacaacctccgacgatatcgcctcatgctcaatcctgagaagtgcacgttcggagtaccgtcgggcaagctactcggattccttgtctctggcagaggaatagaggcaaatcccgagaagattaaagcaatcgagaacatgaagtcgcccacgagactcaaggagattcaaaagatgctctatgcagtaatcatgacatcaagaaagctacgccactactttcaagtccacagagttacagttgtctcctccttccccctcggtgaagtcgtgagaaacaaagacgttgtcggccgcattgcaaaatgggtagtcgagctaagccagtttgatgtccactttgtgccacgaacagccattaagtcccaggtactcgccgacttcgtagccgattggactatgcccgaccacaagttagacaaccaaatcgacaacgaaacgtggacaatggcgttcgatggtgcactcaacagccaaggagcaggggcaggatttatcttgacatctccctccggagatcaattcaagcacgcaatccacctcaacttcggggcaaccaataatactgcagaatatgaaggactactcgccgggatacgagctgcagccgcacttggggccaagcgactaatcgtcaaaggggactccgagctagtcgcgaaccaggtgcacaaagactataaatgctctaaccttgagttatccaagtatctcacagaagtcaggaaactagaaaagaggtttgatgggatcgagggcggctacaggttcctattcgtggcaatcgacaaattcacaaaatggatagaagcagtgcccacgggggaaatcagggccgacaacgccatcaaattcatgaaatggataatctgcagatacggactaccgcaccgcatcataaccgacaacggctcccaattcatcagcgccgacttccaagattactgcatcgggttgggagtcaaaatatgtttcgcctcggtctctcaccctcaatgcaacggacaagtcgaaagggcaaacggcatagtactacaagagataaaaacccgcatctacgacaggctcatgtcacaagacaaaaagtgggttgaagaactcccatcaatactatgggccgtacgctccacaccgataacgtccaataaggaaacacccttcttcctcgtgtacggctccgaggccatgctccactgcgagctacaacatcagagtacacgagtacagaagtactccgacgagaaccaggaggaacagtga

SEQ ID NO: 77731 - DNA, 353 bp, Oryza sativa
  Clone ID: PAT_MRT4530_775C.1
ctgttgtttacgatagaatgtgtacccagctacggttcgatgatgtaaccattacagccggttggtccctggctcgagccactaatggatttcaccaggccggccaccgtcggcgaggatcttccggacataccccgtataactgcgttaccccttcgagatgcagacatttgtctagcgctctgtgcatgtgggaaagcttaaagactactacatggacttaaaggagaacactactgggccagacaagtagttggacgccgcctaacacaacgggttgtgattgccacctacttacctgcgaacacgttgtgacgcatgctatgcaaaaattgatggcccgtctgacatgc

SEQ ID NO: 77732 - DNA, 523 bp, Oryza sativa
  Clone ID: PAT_MRT4530_77600C.1
atggcgagtcgccggtcgcgtcggctcggctcgctcgtgcccttcgccgccgcggtggtcctcctcctcctcatcgcttccgccgccgccgccgccgcgggatcccccgatcgggccggccccgcgcggccgccgctggtgctcccgctcacgctcgcctaccccaacgccacccgcctccccgcctcctcggccaggcgcggcctcggcgatggacacaaccccaacgcccgcatgcgcctccacgatgatctcctcaccaacgggtattacacgacgaggctgtacatcgggacgccttcgcaggagttcgcgctgatcgtggactccgggagcaccgtcacctacgttccctgcgccacctgcgagcagtgcggcaaccaccagagtgaaccacctaacctgattgaggcacatgtaaatgttcaagtaaaatgcaatgttgattgtacctttgtgataatgagaggagttcatgcacttatgagaggcagtatgctgaaatgagctccagcagtggtgt

SEQ ID NO: 77733 - DNA, 4686 bp, Oryza sativa
  Clone ID: PAT_MRT4530_77601C.1
atggcggcggcgagcagagcacggcggtggagcctcgccggcaagacggcgctcgtcaccggcggcaccaagggcatcgggcgcgcgatcgtggaggagctcgccgggttcggggtgagggtgcacacgtgttcacgccacgacgccgacctgcaggactgcctccgccggtggaacgccgccggcgaaggtggcggcgcggcggcgctcgtcacggggtccgtctgcgacgtgtccgtgcgcggcgacagggaggcgctggtggccgcggcgcgcgccgcgctcggcgggcggctcgacatgctcgtcaacaacgccggccaggtggtcgtcggcccggccgcggagaccgcgccggaggagtacgcgcgcctcatggccaccaacctcgagtcctgcttccacctcgcccagctcgcgcaccatctcctccgcgacgcggcggcgggcggcggcgccgccgcgagcgtggtgaacatctcctccaccgcggcgttctacgccgcgccgcacctggcggtgtactcggcgaccaagggcggcatgaaccagctcacccggtgcctcgccgccgagtgggcgcgcgacggcgtgcgcgtcaacgccgtcgcgccgggggccacccgcaccgacatctgcgacaccagcggcgtggcgctgggcgagaagacgaggcgcaggctggcggacgccggcgccatggaccgcgtccccatccgccgcatcggcgagcccgaggaggtcgccgccgccgtcgtcttcctctgcatgccggccgcctcctacatcaccggccaggcccaaggtctgtggggcgcggtggagccggagggcgatgatctcgtcgactaccggcaggaccggcaggcgctcgccgcgatacttcgcgccgtgcccgccgagatgctcgccacgcttgctgtcaaggagacggcgcaggaggcgtgggaagcgatcaagactcgccgtatcggtgtgcagcgcgtgcgtgaggcgaatgcacagcagctggccgagaattcggtgatatcctcttcaaggacggttgtcccagaacatctccagcaaatagccatctcgattgagaccttgctcgacgtcaatgagctgtctctcgaggaggttactgggcgtctgcgctccgtcgagcaacgcaagcagcgcaagactgcggcggcatcgagtcgggtcgatgccaatggccgtctcctcttcaccgaggaagaatggctggcgaaattccgcaaggcggcctctctgcaagacgccgctcactcctccggcggcaacggcgaccgccggggtcgagggcgtgggaagaaggacgatggagccccgaaggaggcccagcccaagccagccaacccgggaggccgtaacctgggaaattgcaagaattgcggcaagaggggacattgggccaaagactgtcgcagcaagcccaaggcccagcaagcttacgtagcccaggaggaggacgaagagcctgctctgctcctggccaaggtgcagctggatccgccgcgtcctcgcgtcgctgcaccgacaaacgtcgtctcgccaccgagcgcgccgagggcgctgtcgccgatgggcgaactcgccgtggtcgaggccaaggtcttcgcgcagctagacggcggtggcgaacatgatccggcgatgtggatcctggatactggcgcaaccaaccatatgaccgggtcccgctccgctttcgccgagctcgacacggcggtcaccggcactgtcaggtttggcgacggctcggtggttcgcatcgagggccgcggcaccatcctgttctcctgcaggttcggggaacaccgcggcatcgccggggtctactacatcccgcggctcacggcgaacatcgtcagccttggacagctggatcgttccggcagcaaggtactgattcatcacggcgtcctgcgcgtgtgggatcctcgagggcacctactcgtccgtgtccgacgctccgacgactgcctctacaccatcaagctggacatcgaccgtccggtctgcctcgcggcaaggagcgccgagccggcgtggcggtggcacgccaggtacgaccacctcaactttcctactctccgcaagctcgcgcaacaggaaatggttcgtgggctgccgctgctgcaacaagtcactcaagtctgcgatggctgtttgctcaggaagcagcggcgagcggcgttcccgacgcagtccaagtaccgcgctgacgaacacctggagctcgtccacggcgatctctgtgggccgatcgaacctgcaacgccggctggtaatcggtattttttgttgcttgtcgatgacatgagccgctatatgtggctaaccttgatcaggagcaaggatgagtccgcgaacgccatcaagcactttcaggcccgtgcagaggtggagtccgggcgcaaactccgtgcactgcgcacggatcgtggcggcgaattcacctcaatcgaatttggggaatactgcgccaatctcggagttggtcggcagttgacggcgccctactccccgcagcagaacggagtagtggagcgtcgaaaccaaaccatcatcgccactgcccgcagcatgatgaaggcgaagggtgttcctgggcggttctggggagaggccatgtccacagcggtctttctcttgaatcgttcgccgacgaaaagcttggacaaccagacgccctatgaagcatggtatggccaacggcccgctgtgcatttcctgcgcactttcgggtgcgtggggcacgtcaagatcaccaagcctgggctgaagaaactcgatgaccggagtgcgccaatggtgctcctcggctacgagcaaggctcgaaggcctaccggctctatgatccagtcagcgagcgcgtccatgtgtccagggacgtggtgtttgatgaagacgccgcctgggactggggaccagtggtgacgaccaccatcgggacggcacctgcttcgtcgccgactccgccctcgccaccatcgccggctccgtcggcccccacgacgccggcacctccgtcacctccgtcgccggaggcggttgagtttgtcacgccgcctacccaggattccatcctggacgtcgacgcagatgacgacgtcgtgcctcgctaccgcctggtggataacctgctggggaatgcctcaccgcccggacacgctccgcgggtgctggaacagctcgagctccatgttgtgagcgccaacgaacctgcttcactggctgaggctgaggcggatccaaactggcgtggcgccatgcaagatgagcttaacgcgatcgtcgacaacgacacttggtcgctcactgacctaccccatggccaccgtgcaattgggctaaaatgggtctacaagctgaaacgtgacgaacagggggcgatcgtgcgctacaaggcgcgcctcgtcgctaaggggtacgtccagcgacagggggtggacttcgacgaggtcttcgcacctgtcgcccggctggaatcggtgcgcctccttctcgtcgtcgccgtgcaccaagggtggcaagtccaccacatggacgtcaagtcggcattcctcaacggcgagctgctcgaggaagtttatgtctcgcagccgccgggtttcgtcgacgacaaccacaagaacaaggtgtatcgcctgcacaaagctctttacggcttgcgccaggcgcctcgcgcgtggaatgccaaatttgatagctccttgctgtcactcggctttcaccgcagcagctccgagcatggtgtgtacacacgcaccaggggaggaagacgactgacggtgggcgtctacgtcgatgacctcatcatcaccggcgatcatgacgacgagatccgcagcttcaagggagagatgatgaagctcttcaagatgagtgatttgggggcactcagatactacctcggcatcgaggttacccaggacagtgatgggatcacgctggggcaagccgcatatgccagcaagattcttgagaaggcaggactcaaggactgcaatccctgtcagactcccatggagcttggttgggagtctgcgctatctcgtcaacacgcgacccgacctggcattctctgttgggtatgtcagtcgcttcatggagtcacccagggaagaccatcttgctgtcgttcgacgcatactgcgctatgtggtgcacggtgcgctttgccaatgctggttggttactctgagagtgatctggctggcgatccagatgagcgaaagagcacgtccggccagattttcttcatcaatggcgggcctgtcacttggcagtcctccaagcagaaggtggtggcattgtcctcctgtgaggccgagtacatcgccgcagccgccgcaacatgtcaaggagtatggctcgcgcggctgttagcggaggtgctgggcgacgagatcgccacaccgctgctgaaggtggacaaccagtccacaatatcattgataaaaaatccagtgcatcatgaccggagtaagcatatcgatgtcaaatatcattatatccgggagtgtgcagaaaagaaactgatcgaaatgatgttcgtgggaactgcggagcagctcggtgatatattcaccaaatctctgggcagaaccaggtttcaggagcttcgttcaaagatcggtgtctgttctcttgacaagagcagtcagacttaa

SEQ ID NO: 77734 - DNA, 4440 bp, Oryza sativa
  Clone ID: PAT_MRT4530_77602C.1
atggcgacgcgattacgaccgaagatgacggcggcggcggcggctcggaagcggtccacggcggcggcggctgctcggatgcggtccgtggcggcggcggcggctcggatacggcccacggcggcggcggctgttcggatgcggtccatggcggcggtggcggcggctcggttgcggcccacggcggcggcggctgctcggatgcggtccgtggcggcggcggcggctcggatgcggcccacgacggcggcggctgctcggatgcggcccgtggcggcggcggctgctcggatgcggcccaaggtggcggcggcggctcgaatgcggcccgcggcggtggtggctgctctgatgctgcccacggctgcgctgttgctgtctctggcggcgatgactgcgctgttgtggcctacgtcagcatcggtggcccaaggtctgtggggcgcggtggagccggagggcgatgatctcgtcgactaccggcaggaccggcaggcgctcgccgcgatacttcgcgccgtgcccgccgagatgctcgccacgctcgctgtcaaggagacggcgcaggaggcgtgggaagcgatcaagactcgccgtatcggtgtgcagtgcgtgcgtgaggcgaatgcacagcagctgcgccgagaattcggtgatatcctcttcgaggacggtgaaaccgtcgacaacttctcgatgcggatcggcggcctcgccaacaaccttcgcaccttaggtgataatatcactgaagctgaggtcgttcagaaattgttgcaggttgtcccagaacatctccagcaaatagccatctcgattgagaccttgctcgacgtcaatgagctgtctctcgaggaggttactgggcgtctgcgctccgtcgagcaacgcaagcagcgcaagactgcggcggcatcgagtcgggtcgacgccaatggccgtctcctcttcaccgaggaagaatggctggcgaaattccgcaaggcggcctctctgcaagacgccgctcactcctccggcagcaacggcgaccgccggggtcgagggcatgggaagaaggacgatggagccccgaaggaggcccagcccaagccagccaacccgggaggccgtaacccgggaaattgcaagaattgcggcaagaggggacattgggccaaagactatcgcagcgagcccaaggcccagcaagcttacgtagcccaggaggaggacgaagagcctgctctgctcctggccaagctagacgacggtggcgaacatgatccggcgatgtggatcctggatactagcgcaaccaaccatatgaccgggtcccgctccgctttcgccgagctcgacacggcggtcaccggcactgttaggtttggcgacggctcggtggttcgcatcgagggccgcggcaccgtcctgttctcctgcaggttcggggaacaccgcggcatcgccggggtctactacatcccgcggctcacggcgaacatcgtcagccttggacagctggatcgttccggcagcaaggtactgattcatcacggtgtcctgcgcgtgtgggatcctcgagggcacctactcgtccgtctccgatgctccgacgactgcctctacaccatcaagctggacatcgaccgtccggtctgcctcgcggcaaggagcgccgagccggcgtggcggtggcacgccaggtacggccacctcaactttcctgctctccgcaagctcgtgcaacaggaaatggttcgtgggctgccgctgctgcaacaagtcactcaagtctgcgatggctgtttgctcgggaagcagcggcgagcggcgttcccgacgcaatccaagtaccgcgctgacgaacacctggagctcgtccacggcgatctctgtgggccgatcgaacctgcaacgccggctggtaatcggtattttttgttgcttgtcgatgacatgagccgctatatgtggctaaccttgatcaggagcaaggatgaggccgcgaacgccatgaagcattttcaggcccgtgcagaggtggagtccgggcgcaaactccgtgcactacgcacggatcgtggcggcgaattcacctcaatcgaatttggggaatactgcgccaatctcggagttggtcggcagttgacggcgccctactccccgcagcagaacggagtagtggagcgtcgaaaccaaaccatcgtcaccactgcccgcagcatgatgaaggcgaagggtgttcctgggcggttctggggagaggccatgtctacagcgacgccctatgaagcatggtatggccaacagcccgctgtgcatttcctgcgcactttcgggtgcgtggggcacgtcaagatcaccaagcccgggctgaagaaactcgatgaccggagtgcgccaatggtgctcctcggctacgagcaaggctcgaaggcctaccggctctatgatccagtcagcgagcgcgtccatgtgtccagggacgtggtgtttgatgaagacgccgcctgggactggggaccagtgacgcccgatggtgctccccagctcgagccgttcaccgtcgaacaggtggtgacgaccaccatcgggacggcacctgcttcttcgcttactccgccctcgccaccatcgccggctccgtcagcccccacgacgccggcacctccgtcgcctccgtcgccggaggcggttgagtttgtcacgccgcctacccaggattccatcctggacgccgacacagatgacgacgtcgtgcctcgctaccgcctggtggataacctgctggggaatgcctcaccgcccggacacgctccgcgggtgctggaacagctcgagctccatgttgtgagcgccgacgaacctgcttcactggctgaggctgaggcggatccaaactggcgtggcgccatgcaagacgagcttaacgcgatcgtcgacaacgacacttggtcgctcactgacctaccccatggccactgtgcaattgggctaaaatgggtctacaagctgaaacgtgatgaacagggggcgatcgtgcgctacaaggcgtgcctcgtcgctaagcgcagctccgagcatggtgtgtacacacgcaccaggggaggaagacgactgacggtgggcgtctacgtcgatgacctcatcatcaccggcgaacacgacgacgagatccgcagcttcaagggagagatgatgaagctcttcaagatgagtgatttgggggcactcagatactacctcggcatcgaggttacccaggatagtgatgggatcacgctggggcaagccgcatatgccggcaagattcttgagaaggcaggactcaacgactgcaatccctgtcagactcccatggaggtacgtttgaaattgagaaagggttcaaattttccacttgtggatgctacactgtatcgcagcttggttgggagtctgcgctatctcgtcaacacgcgacccgacctggcattctctgttgggtatgtcagtcgcttcatggagtcacccagggaagatcatctcgctgccgttcggcgcatactgcgctatgtggcaggcactcgctgctggggaattcgatttggcccaggtgcacggtgcgctttgccaatgctggttggttactctgacagtgatctggctggcgatccagatgagcgaaagagcacgtccggccagattttcttcatcaatggcgggcctgtcacttggcagtcctccaagcagaaggtggtggcattgtcctcctgtgaggccgagtacatcgccgcagccgccgcaacatgtcaaggagtatggctcgcgcggctgttagcggaggtgctgggcgacgagatcaccgcaccgctgctgaaggtggacaaccagtccacaatatcattgataaaaaatccagtgcatcatgaccggagtaagcatatcgatgtcaaatatcattatatccgggagtgtgcagaaaagaaactgatcgaaatgatgttcgtgggaactgcggagcagctcggtgatatattcaccaaatctctgggcagaaccagggtggctggatctgggacccttctttctctttgtctccgggcagtggcatccacgctgggtgtgccattcgggttgagttcaagctcctcagattcaatggtgaactccgtgtttctgtggaggcgaccgacggggattaacggttcgtcaagcggtctgcatgctaaaggagacctaagacttacagaagaagacggagcaaactcactccacacggcggttcaaggttcagaaacccataaaagaacatggaattgcaatgcaagagtgaagaagaggttttatccatcgagtcctcaccattgtgaatttgtgatcatcgacaacagtaacagggtcttggcttggggactggggaagaaggcagcagccagcatgatgattcgtgagatctgcatggaagagctggtttag

SEQ ID NO: 77735 - DNA, 3852 bp, Oryza sativa
  Clone ID: PAT_MRT4530_77603C.1
atgccgatgacgcggcgctcaccccatatccctcgcctccttttcctccacgagctcgaatccgagagtttcgattcggcagcgacgacgttggagtgggtggtgcttgaggcgatcatggtgctgcttctgacgctgccagtgctggacaggctcccggtgcgggatgatctccgtggtgcggagcgcgctgaagacgatgatgttgatggtgctcttctgcctcttcctgctgatggacatctactggaacgtgtcgattggcccgaccgtgacccgcccaccgccgacttgcacccgcgccagacgacgcaaggagagagaaagaggggggaattggggaagaggagggtgagctatgtctggtttcaagttcagggagagccagccgacgctcagccgagcacggacgcgagctgcgccttgaaggaagaggaaggcggggtggccatgggcgccggcgaggagctcaaggaaggaggagggaaggcccaaggtctgtggggcgcggtggagccggagggcgatgatctcgtcgactatcggcaggaccggcaggcgctcgccgcgatacttcgcgccgtgcccgccgagatgctcgccacgctcgctgtcaaggagacggcgcaggaggcgtgggaagcgatcaagactcgccgtatcggtgtgcagcgcgtgcgtgaggtgaatgcacagcagctgcgccgagaattcggtgatatcctcttcaaggacggtgaaaccgtcgacgacttctcgatgcggatcggcggcctcgccaacaaccttcgcaccttaggtgataatatcactgaagctgaggtcgttcagaaattgttgcaggttgtcccagaacatctccagcaaatagccatctcgattgagaccttgctcgacgtcaatgaggtgtctctcgaggaggttactgggcgtctgcgctccgtcgagcaacgcaagcagcgcaagactgcggcggcatcgagtcaggtcgacgccaatggccgtctcctcttcaccgaggaagaatggctggcgaaattccgcaaggcggcctctctgcaagacgccgctcactcctccggcggcaacggcgaccaccggggtcgagggcgtgggaagaaggacggtggagccccgaaggaggcccagcccaagccagccaacccgggaggccgtaacccgggaaattgcaagaattgcggcaagaggggacattgggccaaagactgtcgcagcaagcccaaggcccagcaagcttacgtagcccaggaggaggacgaagagcctgctctgctcctagccaaggtgcagctggatccgccgcgtcctcgcgtcgctgcaccgacaaacgtcgtctcgccaccgagcgcgccgagggcgccttcgccgatgggcgaactcgccgtagtcgaggcaagggtcttcgcgcagctagacgacggtggcgaacatgatccggcaatgtggatcctggatactggcgcaaccaaccatatgaccgggtcccgctccgctttcgccgagctcgacacggtggtcaccggcactgtcaggtttggcgacggctcggtggttcgcatcgagggccgcggcaccgtcctgttctcctgcaggttcggggaacaccgcggcatcgccggggtctactacatcccgcggctcatggcgaacatcgtcagccttggacagctggatcgttccggcagcaaggtactgattcatcacggcgtcctgcgcgtgtgggatcctcgagggcacctactcgtccgtgtccgacgctccgacgactgcctctacaccatcaatctgtacatcgaccgtccggtctgcctcgcggcaaggagcgccgagccggcgtggcggtggcacgccaggagcaaggatgaggccgcgaacgccatcaagcactttcaggcccgtgcagaggtggagtccgggcgcaaactccgtgcactgcgcacggatcgtggcggcgaattcacctcaatcgaatttggggaatactgcgccaatctcggagttggtcggcagttgacggcgccctactccccgcagcagaacggagtagtggagcatcgaaaccaaaccatcgtcgccactgcccgcagcatgttgaaggcgaagggtgttcctgggcggttctggggagaggccatgtccacagcggtctttctcttgaatcgttcgccgacgaaaagcttggacaaccaaacgccctatgaagcatggtatggccaacggcccgctatgcatttccggcgcactttcgggtgcagggggcacgtcaagatcaccaagcccgggctgaagaaactcgatgaccggagtgcgccaatggtgctcctcggctacgtgcaaggctcgaaggcctaccggctctatgatccactcgagctccatgttgtgagcgccgacgaacctgcttcactggctgaggcggatccaaactggcgtggcgccatgcaagacgagcttaacgcgatcgtcgacaacgacacttggtcgctcactgacctaccccatggccaccgtgcaattgggctaaaatgggtctacaagctgaaacgtgacgaacagggggcgatcggggtggacttcgacgaggtcttcgcacctgtcgcccggctggaatcggtgcgcctccttctcgccgtcgccgcgcaccaagggtggcaagtccaccacatggacgtcaagtcggcattcctcaacggcgagctgctcgaggaagtttatgtctcgcagccgctgggtttcgtcgacgacaaccacaagaacaaggtgtatcgcctgcacaaagctctttacggcttgcgccaggcgcctcgcgcgtggaatgccaaacttgatagctccttgctgtcactcggctttcaccgcagcagctccgagcatggtgtgtacacacgcaccaggggaggaagacgactgacggtgggcgtctacgtcgatgacctcatcatcaccggcgatcacgacgacgagatccgcagcttcaagggagagatgatgaagctcttcaagatgagtgatttggggcactcagatactacctcggcatcgaggttacccaggacagtgatgggatcacgctggggcaagccgcatatgccggcaagattcttgagaaggcaggactcaaggactgcaatccctgtcagactcccatggagcttggttgggagtctgcgctatctcgtcaacacgcgacccgacctggcattctctgttgggtatgtcagtcgcttcatggagtcacccagggaagatcatctcgcagccgttcggcgcatactgcgctatgtggcaggcactcgctgctggggaattcgatttggcccaggtgcacggtgcgctttgccaatgttggttggttactctgacagtgatctggctggcgatccagatgagcgaaagagcacgtccggccagattttcttcgtcaatggcgggcctatcacttggcagtcctccaagcagaaggtggtggcattgtcctcctgtgaggccgagtacatcgccgcagccgccgcaacatgtcaaggagtatggctcgcgcggctgttagcggaggtgctgggcgacgagatcgccgcaccgctgctgaaggtggacaaccagtccacaatatcattgataaaaaatccagtgcatcatgaccggagtaagcatatcgatgtcaaatatcattatatccgggagtgtgcagaaaagaaactgatcgaaatgatgttcgtgggaactgcggagcagctcggtgatatattcaccaaatctctgggcagaaccaggtttcaggagcttcgtttaaagatcggtgtctgttctcttgacaagagcggtcagacttaa

SEQ ID NO: 77736 - DNA, 2046 bp, Oryza sativa
  Clone ID: PAT_MRT4530_77604C.1
atggccttggtgtgtgcggaatgccgtcttgttgacatcgtccgggtgcatgcgaacctgatggtacccgaaatggagatccagcttggagaagaagtgggcgtcgcaaagttcatcaagcaattcgtcgagaaccaaaatgggaaacatgtccttggcagtcaccgtgttgagggctcggtagtccacgtagaagcgccatggcttgtggaccaacagaaccgacgacgagaatggcgacgtgttggggcagatggagagcttgtcagcgcattatttctccaattcgtcgttttgaagctgtgggtagcgatacggtcgaaccactaccgggggcttgccgggcttgaggtggatgtgatgattgatggatcgggtcggtgggaggccggttggagcgcgaagaggtcgtcaaattccgccagcaaggacggaaggagatcgtcggcgtgcagtgcagcgcagctgaggtcgagggcgaagcagtcgacgtcgaacacctcggtggccacctacaggcgaagcccgtgcacgacacccgcgccgcggatgcgatcgttgtcagccaccaccacgcggagaccttggcgtaccggttggagaggtaggccgatgcgctgggccagcttggtggtgatgaaattgtgtgttgaagccggagtcaacaagggccatcacctgctcggccgcgatacgcgccacgaggcacatcgtgctagtgccattgacaccgaaaatcgcgttgagcgagatgtgtggttcatcggtgtcgtctgtgtcgtcccattcgctgaaattagccgtggtgtcgtcgtactcaagaggccttgtttacagcgctctggtaactctgctggcgagagacaacgaaattggtgtcctggcacgagccaaggccatggcctcctggaaatcctcgggctgttggagctcgacatcgatgcagatgtcgtcggtgagccccgctgtgaagagctgaacttgttggcggtcggtgaggaggtcggacgtgcggctacccaacgccaaaaggcgctgctggtacgtcgtcaccgtgccaacctgagtgagatgcttgagttcacccagggaattgttgcggatcggcggtccatactgaccgtaacagagctgcttgaacgtatcccaatccggaggacccatgtgctgctcataatggaagtaccattcctgtgcagctcaagtgagatgaccaggaaacgtccatcaactgattttatggaaacaatccaaaaggatgtaaacccaagcatgagagcgatcctgatagactggcttgtggaagtcgctgaagaatatcgtcttgttcctgatacattatacctgacagttaactacattgatcgttatctttctggcaatgagatcaatcgtcaaagactgcaattacttggagttgcttgtatgcttattgctgcaaaatacgaggagatatgtgcacctcatgtagaagaattctgctatataactgacaacacatacttcagagatgagtgctggaatgaatcgaactctaataactctcttattgcctacaacaggagatttgtccgtgttgcacaagtatcggatgagcttttcatcgtgcaggatccagcattgcatcttgagttcctagccaattatgttgctgagctatcactgctggagtacaatctactttcttaccctccttcactagtagcggcatcggctattttcttggccaaattcatactgcagccaacaaagcacccttggaattccacccttgctcactacacacaatacaagtcgtcagagttaagcgactgtgtaaaggcattgcaccgcctttttagcgttggtcccgggagtaaccttcctgcaatcagggagaagtatacccaacataagatactgcatgcagctgatgtgatcgacttgaacatggcaaatgcatttaagaatgtgaaaatattatgtcaatgtccctgtcaatgcaaccttcttgaagaagtcatgctcaagctatttccatactggaagctaagcacagctgtttag

SEQ ID NO: 77737 - DNA, 4236 bp, Oryza sativa
  Clone ID: PAT_MRT4530_77605C.1
atggctcaaggaaaaatgataggacttgcaggcaagcttcggcgagtttcagcaaaaacagaaaaaccgaactggcagataagctcaacggagcgcatcaacacgaaaataggcacacctccaagttacagctcaatcggagttgatatgtggcctatggaattttctgaaaccactataaacaagattgtgggcttgacgcacgctgcgttcgtgcggagtctgttggagccgtgcgcgagcctgcggcgatcgccggggttcctgatgtcgctaccaacgccgcgcgtctcccactcaccgccgtgtcatcgctggcgtttgccgtctccgcgccgtggccgtcatggcggccgcggccaagtcgtggtgcatcgcgtcgtccgtgaggtgaccacgagcagcgtcgtctacccgacactcacccgcacaaattaccaagactgggtgctggtaatgcgggtgaacatgcaggcccaaggtctgtggggagcggtggagccggagggtgatgatcttgttgactaccggcaggaccggcaggcgctcaccgcgatacttcgcgccgtgcccgccgagatgctcgccacgctcgctgtcaaggagacggtgcaggaggcatgggaagcgatcaagactcgccgtatcggtgtgcagcacgtgcgtgaggcgaatgcacaacagctgcgccgagaattcggtgatatcatcttcaaggacggtgaaaccgtcgacgacttctcgatgcggatcggcgtcctcgccaacaaccttcgcaccttaggtgataatatcactgatgctgaggtcgttcagaaattgttgcaggttgtcccagaacatctccagcaaatagccatctcgattgagaccttgctcgacgtcaatgagctgtctctcgaggaagttactgggagtctgcgctccgtcgagcaacgcaagcagcgcaaggctgtggctgcatcgagtcgggtcgatgcatacggctgtctcctcttcaccgaggaagaatggctggcgaaattccgtaaggcagcctctctccaagacgccgctcactcctcctccggcggcaacagcgaccgccagggtcaagggcgtgggaataaggacgatggagcctcgaaggagacccagcccaagccagccaacctgggaggccgtaacccgggaaattgcaagaattgtggcaagaggggacattgggctaaagactgtcgcagcaagcccaaggctcagcaggcttacgtggcccaggaggaggacgacgagcctgctctgctcctggccaaggtggagctggatccaccgcgtcctcgtgtcgtcgcaccggcaaaccccgtctcgccaccgagcgcgccaagaacgccgtcgccgacaagcgagctcgctgtagttaaggcaaaagtcttcacgcagctcgacgatggtggcgagcactatccggcgacgtggatcctggataccggcgcaaccaactatatgaccgggtcccgctccgctttcgccgagctcgacacggcggtctccggcacagtcaagtttggcgacggctcggtggttcacattgagggccacggcaccgtcctgttctcctgcaggtctagggaacaccgcggcatcaccgggatctactacatcccgtggctcacggtgaacattgtcagccttggacagctggatcattctggcagcaacctggacatcgaccgtccggtctgcctcgcggcaaggagcgccgagccggcgtggcggtggcatgctaggtacggccacctcaactttcctgctctccgcaagctcgtgcaacaggaaatggttcgtgggctgccgctgctgcaacaagtaactcaagtctgcgacggctgtctgctcgggaagcagcggcgagcggcgttcccggcgcagtccaagtactgcaccaacgaacacctcgtgctcgtccacggcgatctctgtaggccgatcgaacctgcaacgccggctggtaatcgctattttttgttgcttgttgatgacatgagccgctatatgtggctaaccttgatcaggagcaaggatgaggccgcgaacgccatcaagcactttcaggcccgtgcagtggtggagaccgggcgcaaactccatgcgctgcgcacggatcgtggcggcgaatttacctcaatcgaattcggggaatactacgccaatcttggagttggccggaagttgacggtgccctactctccgcagcagaacggagtagtggagcgtcgaaaccaaaccatcgtcgccactgcccgcagcatgatgaaggcgaagggtgttcctgggcggttctggggtgaggccatgtccacaacggtctttctcttgaatcgttctccaaagaaaagcttggacaaccagacgccctatgaggcatggtatggccaacggcctgctgtgcatttcctgcgcactttcgggtgcatggggcatgtcaagatcaccaagcctgggctaaagaaactcaacgaccggagtgtgccaatggtgctcctcggctatgaggaaggctcgaaggcctaccggctctatgatccggattccatcctggacgccgacacagatgacgacgtcgtgcctcgctaccgcctggtggataacctgctgggggatgcctcgctgcccagacagactccgcaggtgctggaacagctcgagctctatgctgtgagcgccgacgaacctgcctcgctggctgaggcagaggcagatccaaattggcgtggcgccatgcaagacgagcttgacgcaatcgtcgacaatgacacttggtcgctgactgacctaccccatggccaccgtgcaatcgggctaaaatgggtctacaagctgaaacgcgacgaacagggggcgatcgtgcgctacaaggcgcgcctcgccgctaaggggtacgtccagcgacaagggggtggacttcgacgaggtcttcacacctgtcgcccggctggaatcgattggcaagtccaccacatggacgtcaagtcagcattcctcaatggcaagctgctcgaggaagtttatgtctcacagccgccgggtttcgtcgacgacaaccacaagaacaaggtgtatcgtctgcacaaagctctttacggcttgcgccaggcgcctcgcgcgtggaatgccaaacttgatagctccttgctgtcatttggctttcaccgcagcagctccgagcatggtgtgtacacacgcaccaggggaggaagacgactgaccgtgggcgtctacgtcaacgacctcatcatcaccggcgatcacgacgacgagattcgtagcttcaagggagagatgatgaaactcttcaagatgagtgatttggggcactcagatactacctcggcatcaaggttaccctggacagtgatgggatcacgctggggcaagctgcatatgccggcaagattcttgagagggcaggactcaaggactacaatccctgtcagactcccatggaggcactcgctgctgggggattcgttttggcccaggtgcacagggcacttcaagaaagctgttgtctattctgacagtgatttggctggtgatctagatgagcaaaagagtacatcaggccagattttcttcgtcaatggcgggccggtcacttggcaatcttccaagcagaaggtggtggcattgtcctcttgtgaggcagagtacatcgccgtagctgccgcgacatgtcaaagcgtatggctcgcgtggctgttagcggaggtgatgggcgacgaggtcgccgcaccgctgctgaaggtggacaatcagtccacaatctcattgatcaaaaacccagtgcatcacgaccggagtaagcatatcgatgtcaaataccattatatccgggagtgtgcagaaaagaagctgattgaggtgatgtccgtgggaactgcggagcagcttggggatatattcaccaaatctctgggcagaaccaggtttcaggagcttcgctcgaagatcgagtctgttggagtcgtgcgctgtatgctccagtgtcgcgaccgggaaaatttccttttcccgaacgctagtgtattaatccccgtcccaggaaaagccgggactgagccacaaactaagccttacccactagacatgtggaagtacggtagtgctttgcaacagaggcccgaagaccggtccttatatggccgaggtgctactatcaaaaccatgcaccccgagcccagcctaaaaccattttag

SEQ ID NO: 77738 - DNA, 289 bp, Oryza sativa
  Clone ID: PAT_MRT4530_77606C.1
atggcggatgtgttgagcagcatttcgctattggcttccaaaagcgacctcgccgacctcagtcgttccgtcgcgtggccacttcgcacatcacggccctcgagcagtcctccaccaccttgtccgcgcctcgcctgggcggcagcggcatcttgcctgccgccaccaccaccacctccgccgtcgactggaaccggctcggtgcacgacaccaattccggcaacatacgccggacacggatcgtgtctggatggccacataccatctcacttgagctgcacaggaatg

SEQ ID NO: 77739 - DNA, 329 bp, Oryza sativa
  unsure (1)..(329): unsure at all n locations
  Clone ID: PAT_MRT4530_77607C.1
cggcgttctacgccgcgccgacctggcggtgtactcggcgaccaagggcggcatgaaccagntcacccggtgcctcgccgccgagtgggcgcgcgacggcgtgcgcgtcaacgccgtcgcgccgggggccacccgcaccgacatctgcgacaccagcggcgtggcgctgggcgagaagacgaggcgnaggctggcggacgccggcgccatggaccgcgtccccatccgccgcatcggcgagcccgaggaggtcgccgccgccgtcgtcttcctctgcatgccggccgcctcctacatcaccggccaggtcatctgcgtcgacggcggcc

SEQ ID NO: 77740 - DNA, 154 bp, Oryza sativa
  Clone ID: PAT_MRT4530_77609C.1
gacggcgggagtggcggtggtggtgtcctcggacaccttgtggggcttggtgtggtgaatgcgagatccaaccagagcgatgagctcgagggcagcgaatccggtggcgcagccctcgggaggggtggatctgccactctcagccccgggaggg

SEQ ID NO: 77741 - DNA, 1990 bp, Oryza sativa
  unsure (1)..(1990): unsure at all n locations
  Clone ID: PAT_MRT4530_7760C.1
atggacatctctcacctcctcctacgcttcttcctcctcctcctcctcctcctcctcgccttctcgctcgacgatgctccccatcaccattgcactgaagctgcagcaacaactcttcctccaccaccaccaccaccattctccttcaaattcgacttctccaacacctacacctaccgcctagaagacctccgattcgagggcacggccgccgtgcacggcgccaccgtcgacctcacctgcaacgtcgcccagtgcacgacggggcgcatgtcctacggccgcgctgtgccactctgggacagagccaccaacgaggtggccagcttcgccaccgagttcgccttcaagatcgtcaccccggacaacgtggccaggggagacggcatggccttcttcctctccagctacccctcacgcgtcccccccaaccccagcggccagagcttcggcctcatcgccggcgacgccgaccacgccggcgacggcccggaccggttcatcgccgtcgagttcgacacatacgatgacaccttcgaacggccgaggccggccggagaccacatcggcatcgatgtcagcagcgtcgccgactcgattaacacgacgagcttgaacttcagcaggaacggggccatgagggcgtccatcaccttcgacaatgtcaccaggatgctggtcgccaccgtgcagtttactgatcagactactgcttcgcgtgctgcccctgttcaggtgagtgcgaaacttggagatcccagggcgttgctgccatcggaggtggccgtgggattttctacggcgaacggcgcaacattccagctcgatcagatactgtcatggtcgttcaactccactcttgcgtctccacatcccgtaaccaaaggtcatcacaaaaagaaaggggcagcaggaaagtttgcgattgttggagctcccatatttttgcttctggtgtggtctatcctatcatggtggaaatggagaagctcaagccgcgacattgacaagagaactggaggtgttaggcagttcaagtacaacgagttggctgctgcaacgaatcagttctcctctgagaataggctgattggagctggtccgttcggtgaaggctacaagggtttcttcaaggaaatgggccgtcatgttgcgattaagaagatttcgaaggagagcagatcagaaggaagtaataaggacttctatgacgaagtgaaaaccatcagcagtgcaaagcacaagaatctcgttgaacttgtcggttgggagaaggcccataccattttcttggtgtatgaatttgtggataacagtaacctccgtgttcacctgcacgagaaggaggctgtgcttccatggacaacgaggtataaaatagtgaaggacatttgcgcagctctggttcacctccaccatgaaagacgtccattcgtccttcacagaaatatcaaaccaaacaacatactcctggacaaagagttcaacgccaagctagcagacttcgggctgtccagaactgctgacaaggtaggcaaggccagatacctggatccagaatgcaaaaagacgggaaagttcaagcgcagctcggatgtctacagctttgggattgttctgctagagattgcgtgcaagaaggatgaaaatagctttgcgaaagtgtggagccggtatctagagaagtctctgatgcaggtagctgatgacaggttaagaggtgagtttgatgagaggcagatggagcgtgtcatcatcttggggttatggtgttgtcagcccaatattgacatgcggcctaccgtgcaacaagcaatggatttcctggagagtgatgggccattgcctgaattggctgaaccggagacctcctcaagtaaaattggtaactaagagtagtattagtcctgctctaccagcaggntcaggcgaagaactnctggacttagttaataaatgcttgggnttaatacgngcataattttttatt

SEQ ID NO: 77742 - DNA, 4875 bp, Oryza sativa
  Clone ID: PAT_MRT4530_77610C.1
ttaagtctgactgctcttgtcaagagaacagacaccgatctttgaacgaagctcctgaaacctggttctgcccagagatttggtgaatatatcaccgagctgctccgcagttcccacgaacatcatttcgatcagtttcttttctgcacactcccggatataatgatatttgacatcgatatgcttactccggtcatgatgcactggattttttatcaatgatattgtggactggttgtccaccttcagcagcggtgcggtgatctcgtcgcccagcacctccgctaacagccgcgcgagccatactccttgacatgttgcggcggctgcggcgatgtactcggcctcacaggaagacaatgccaccaccttctgcttggaggactgccaagtgacaggcccgccattgatgaagaaaatctggccggacgtgctctttcgctcatctggatcgccagccagatcactgtcagagtaaccaaccagcattggcaaagcgcaccgtgcacctgggccaaatcgaattccccagcagcgagtgcctgccacatagcgcagtatgcgccgaacggcagcgagatgatcttccctgggtgactccatgaagcgactgacatacccaacagagaatgccaggtcgggtcgcgtgttgacgagatagcgcagactcccaaccaagctgcgatacagtgtagcatccacaagcggaaaatctgaaccctttctcaatttcaaacgtacctccataggagtctgacagggattgcagtccttgagtcctgccttctcaagaatcttgccggcatatgcggcttgccccagcgtgatcccatcactgtcctgggtaacctcgatgccgaggtagtatctgagtgcccccaaatcactcatcttgaagagcttcatcatctctcccttgaagctgcggatctcgtcgtcgtgatcgccggtgatgatgaggtcatcgacgtagacgcccaccatcagtcgtcttcctcccctggtgcgtgtgtacacaccatgctcggagctgctgcggtgaaagccgagtgacagcaaggagctatcaagtttggcattccacgcgcgaggcgcctggcgcaagccgtaaagagctttgtgtaggcgatacaccttgttcttgtggttgtcgtcgacaaaacccggcggctgcgagacataaacttcctcgagcagctcgccgttgaggaatgccgacttgacgtccatgtggtggacttgccacccttggtgcgcggcgacggcgagaaggaggcgcaccgattccagccgggcgacaagtgcgaagacctcgtcgaagtccaccccctgtcgctggacgtaccccttagcgacgaggcgcgccttgtagcgcacgatcgccccctgttcgtcacgtttcagcttgtagacccattttagcccaattgcacggtggccatggggtaggtcagtgagcgaccaagtgtcgttgtcgacgatcgcgttaagctcgtcttgcatggcgccacgccagcttggatccgcctcagcctcagccagtgaagcaggttcgtcggcgctcacaacatggagctcgagctgttccagcacccgcggagcgtgtccgggcggtgaggcattccccagcaggttatccaccaggcggtagcgaggcacgacgtcgtcatctgcgtcggcgtccaggatggaatcttgggtaggcggcgtgacaaactcaaccgcctccggcgacggaggcgacggaggtgccggtgtcgtgggggccgacggagccggcgatggtggcgagggtggagtcggcgacgaagcaggtgccgtcccgatggtggtcgtcaccacctgttcgacggtgaacggctcgagctggggagcaccatcaggcgtcactggtccccagtcccaggcgatgtcttcatcaaacaccacgtccctagacacatggacgcgctcgctgactggatcatagagccggtaggccttcgagccttgctcgtagccgaggagcaccattggcgcactccggtcatcgagtttcttcagcccgggcttggtgatcttgacgtgccccacgcacccgaaagtgcgcaggaaatgcacagcgggccattggccataccatgcttcatagggcgtctggttgtccaagcttttcgtcggcgaacgattcaagagaaagaccgctgtggacatggcctctccccagaaccgcccaggaacacccttcgccttcatcatgctgcgggcagtggcgacgatggtttggtttcgacgctccactactccgttctgctgcggggagtagggcgccgtcaactgccgaccaactccgagattggcgcagtattccccaaattcgattgaggtgaattcgcttccacgatccatgcgcagtgcacggagtttgcgcccggactccacctctgcacgggcctgaaagtgcttgatggcgttcgcggcctcatccttgctcctaatcatggttagccacatatagcggctcatgtcatcgacaagcaacaaaaaataccgattaccagccggcgttgcaggttcgatcggcccacagagatcgccgtggacgagctccagatgttcgtcagcgcggtacttggactgcgtcgggaacgccgctcgccgctgcttcccgagcaaacagccatcgcagacttgagtgacttgttgtagcagcggcagcccacgaaccatttcctgttgcgcgagcttgcggagagcaggaaagttgaggtggccgtacctggcgtgccaccgccacgccggctcggcgctccttgccgcgaggcagaccggacggtcgatgtccagcttgatggtgtagaggcagtcgtcggagcgtcggacacggacgagtaggtgccctcgaggatcccacacgtgcaggatgccgtgatgaatcagtaccttgctgccggaacgatccagctgtccaaggctgacgatgttcgccgtgagccgcgggatgtagtagaccccggcgatgccgcggtgttccccgaacctgcaggagaacaggacggtgacgcggccctcgatgcgaaccaccgagccgtcgccaaacctgacagtgccggtgaccgccgtgtcgagctcggcgaaagcggagcgggacccggtcatatggttggttgcgccagtatccaggatccacatcgccggatcatgttcgccaccgtcgtctagctgcgcgaagaccttggcctcgaccacggcaagttcgccaatcggcgacggcgccctcggcgcgctcggtggcgagacgacgtttgtcggtgcagcgacgcgaggacgcggcggatccagctgcaccttggccaggagcagagcaggctcttcgtcctcctcctgggctacgtaagcttgctgggccttgggcttgctgcgacagtctttggcccaatgtcccctcttgccgcaattcttgcaatttcccgggttacggcctcccgggttggctggcttgggctgggcctccttcggggctccatcgtccttcttcccacgccctcgaccccggcggtcgccgttgccgctggaggagtgagcggcgtcttgcagagaggccgccttgcggaatttcgccagccattcttcctcggtgaagaggagacggccattggcgtcgacccgactcgatgccgccgcagtcttgcactgcttgcgttgctcgacggagcgcagacgcccagtaacctcctcgagagacagctcattgacgtcgagcaaggtctcaatcgagatggctatttgctggagatgttctgggacaacctgcaacaatttctgaacgacctcagcttcagtgatattatcacctaaggtgcgaaggttgttggcgaggccgccgatccgcatcgagaagtcgtcgacggtttcatcgtccttgaagaggatatcaccgaattctcggcgcagctgctgtgcattcgcctcacgcacgcgctgcacaccgatacggcgagtcttgatcgcttcccacgcctcctgcgccgtctccttgacagcgagcgtggcgagcatctcggcgggcacggcgcgaagtatcgcggcgagcgcctgctggtcctgccggtagtcgacgagatcatcgccctccggctccaccgcgccccacagacattgggcttgcatgttcacccgcattaccagcgcccaatcttggtaatttgtgcgggtgagtgtcgggtagacgacgctgctcgtggtcgcctcgcggacgacgcgttccaccacgacttggccgcggccgccatgacggccacggcgcggagacggcgagcgccagcgacgacgcggtggtgagtgggagacgtggagcagaagcaccagactaacaccaccgatgctgacgtaggccacaacagcgcagtcatcgccgccagagacagcaacagcgcagccgtgggcagcatcagagcagccaccaccgccgcgggccgcattcgagccgccgccgccaccttgggccgcatccgagcagccgccgccgccacgggccgcatccgagcagccgccgccgtcgtgggccgcatccgagccgccgccgccgccacggaccgcatccgagcagccgccgccgccgtgggccgcaaccgagccgccgccaccgccgccatggaccgcatccgaacagccgccgccgccgtgggccgtatccgagccgccgccgccgccacggaccgcatccgagcagccgccgccgccgtggaccgcttccgagccgccgccgccgccgtcatcttcggtcgtaatcgcgtcgccatcaccgagtcgggatcaggtcgggatcaatcaggattgtccatcagatcagacggccccaacttctcccgcgtcgcgctgggcgccgttctgtaa

SEQ ID NO: 77743 - DNA, 390 bp, Oryza sativa
  Clone ID: PAT_MRT4530_77612C.1
atgatcgcctcaagcaccacccactccaacgtcgtcgctgccgaatcgaaactctcggattcgagctcgtggaggaaaaggaggcgagggatatggggtgagcgccgcgtcatcggcatgggcgcaagtcgagcggcgcgcggccccatcccctacacctccccgcgcgccgccctccgctcctcctctctccctcccgcccccatcccctcctcctccatctccacctcctccgactccctccaccaccgcgcactcctggccacccactctgtcctggccttctccacctctgcctcggcagcggcggtggcagccgaggggcccaccgcctccgtgtcttgtgcgtcgaccgcccgctttcgcgcgctgccgtgcgccgctgggtaa

SEQ ID NO: 77744 - DNA, 5264 bp, Oryza sativa
  Clone ID: PAT_MRT4530_77614C.1
tcagtcggtcgcttcctcactttctttgtcgtgtcgcttcctcgaatacgtgatgccgaccatgacatgtctcccctccttcgcaaacagctcgtcctcaagctggaacgtaggataggtgcgacaaaactcatcttcgtcttcccacgttgcatcgacagccggtttgccggcccattggatgagcacatggcatactccggcgcgtcaattgaccatgaacagccgtagctggaagcgggagcactctttcgttcgagagcgccgacaacgcaggcagctggtctagcggtgtgtccttgaacaccttgaggagttcaacgtggaatacatcatgtatcttggcaccggccggcaacttgaggcgacatgccacatcgcccacgcgagtgacgacttggtagggaccgtagtagcatggtgccaacttgttgcgacagaagccgggaagggatgctgcttggtgatggagtagacgcacctagacccagtcacagacctagaaggtgacatcacaatgcttctcttcgtagtagagcttccaataatcctgtgcttggaggaggtgttcccggatttcctcaaggaattcgtcccgctcgacgagggcttgattgacagcgcgcacacgtgctgtgccgtgatcatacacacagacctggaatggcgtcgtgcgcagcgagctctggaacaccgtgttgaagcagtattctgcccacggaagccatcacagccagtgacgaggatggtctccggtcaggcacctgaggtacatgctaatgactcggttggctgccttggactggccgtcgcactgtggatgaaaagctgaactcaggttgagcttgatgtcggccaggtgtaatagttcggttcagaacgtgctggtgaacagggtcccgatcggcaatcgctgacaatggtatggcgtggaggcggaccaccttgttgaagaacacacgcgccactatcttcaccgtggaaggggggcgaagcagattgacttgggcgtgctaggagaggcggtaaacctcagtgaagatggtgttatcttcctggcagtgagataaatcgtcgatgacttcaatggctatgagttccttgtatgctgattgctgcaaaatacgaggagatatgtgcacctcatgtagaagaattctgctatatcgctgacaagacatacttcagagatgaggttctggaaatggaagcttctgtcctgaattacctgaagtttgaaatgactgcacctacagcaaaatgctttttgaggagatttgtccgtgttgcacaagtatctgatgaggatccagcattgcatcttgagttcctagccaattatgttgctgagctatcactgctggagtacaatctactttcttaccctccttcactagtagcggcatcggctattttcctggccgaattcatactgtaggcagcaaagcacccttggaattccacccttgctcactacacacaatacaagtctgcagagttaagcgactgcgtttaaggcattgcaccggcttttctgtgttcgtccacggtggtgcgacccggtcgatattctataataaagtcaaaactaaggacatagcttaccaccaccgatgttgcgagactttgaaaaggcgttaattcttgagaaacttcacgctgtaatggacggggctgaagaaagacgtccttaccctgagttattgaagccatcctcgaaaggctcctatgacgggtattgccgcatgccgttcagataagcttgatgcaaggcatgctgcttgtccccccctgaagaaggcttgtttgtttcaggtggtttggcggagtgtacaaagatcggtgctccacgtgtggtttgtaacgtctatcgtcctgatgtgctttcgtctatctactattccatgtacctagatgatccatggttttcagtactttgtacatcggagtcctgcagcaaagctttaaacatcttgtttgatattagctgccaacctgggcgtctcctaggttgatgtatgatagagtctctgttctatccagccaggctgaggaagctgcggacggctcccacggagagggttgcgaccagtatgccattgcgcacaccttctgcacatccatggccaccctgtttgcgaacaccacatggccgaggtagttgatctgctgttcgccgaagtggcacttggagcgcttcaggatgagatgattggcgcgaacgacgctgagcactgcccgaatgtgctgaaggtgttggcccatgtcccgctgtagatcagtatgtcgttgaagaacaccaggacgaaccggcgtaagaatggggcgagtaccatgttcatcagcgcctggaatgtcgccggcgcgttcgtcaagccgaatggcatgaacaagaacttgaaatggccttggtgtgtgcggaatgccgtcttgttgacatcgtccgggtgcatgcgaacctgatggtacccgaaatggagatccagcttggagaagaagtgggcgtcgcaaagttcatcaagcaattcgtcgagaaccaaaatgggaaacatgtccttggcagtcaccgtgttgagggctcggtagtccacgtagaagcgccatggcttgtggaccaacagaaccgacgacgagaatggcgacgtgttggggcagatggagagcttgtcagcgcattatttctccaattcgtcgttttgaagctgtgggtagcgatacggtcgaaccactaccgggggcttgccgggcttgaggtggatgtgatgattgatggatcgggtcggtgggaggccggttggagcgcgaagaggtcgtcaaattccgccagcaaggacggaaggagatcgtcggcgtgcagtgcagcgcaggtggatgtgaatcggttgtcgaggataccatagagtgtgacccggcaaccgcaccagatcgccatgcgcatgttgacgaagtcccacaggattggtcccaatattcgtagccactgagtgcccaagatgatgtcgacgcagctgaggtcgagggcgaagcagtcgacgtcgaacacctcggtggccacctacaggcgaagcccgtgcacgacacccgcgccgcggatgcgatcgttgtcagccaccaccacgcggagaccttggcgtaccggttggagaggtaggccgatgcgctgggccagcttggtggtgatgaaattgtgtgttgaagccggagtcaacaagggccatcacctgctcggccgcgatacgcgccacgaggcacatcgtgctagtgccattgacaccgaaaatcgcgttgagcgagatgtgtggttcatcggtgtcgtctgtgtcgtcccattcgctgaaattagccgtggtgtcgtcgtactcaaggtagatcaggcgagtgcacttgtgacctaatgaacttctcgtcacatttataacagaggccttgtttacagcgctctggtaactctgctggcgagagacaacgaaattggtgtcctggtgtgtcagccgccgtggttggtgatgaggttgcgccagtcatcggagttgacgccggggcaggagcgcgcgacgcgttttgctggcccttccgttcgtaggcacgagccaaggccatggcctcctggaaatcctcgggctgttggagctcgacatcgatgcagatgtcgtcggtgagccccgctgtgaagagctgaacttgttggcggtcggtgaggaggtcggacgtgcggctacccaacgccaaaaggcgctgctggtacgtcgtcaccgtgccaacctgagtgagatgcttgagttcacccagggaattgttgcggatcggcggtccatactgaccgtaacagagctgcttgaacgtatcccaatccggaggacccatgtgctgctcataatggaagtaccattcctgtgcagctcaagtgagatggtatgtggccatccagacacgatccgtgtccggcgtatgttgccttcaaaagaactgctcacaatgattaatccaattgagcggatcatcggtgcgatcaaacttgggaaactccaatttgtgaaaaggaggaacggcgccaccggaattggtgtcgtgcaccgagccggttccagtcgacggcggaggtggtggtggtggcggcaggcaagatgccgctgccgcccaggcgaggcgcggacaaggtggtggaggactgctcgagggccgtgatgtgcgaagtggccacgcgacggaacgactgaggtcggcgaggtcgcttttggaagccaatagcgaaatgctgctcaacacatccgccatggactcctagagcttggccagtgcatcagcactaggggatggctgcttggaggaagaagtttcctcaagaaccatggtctatgataccaagttgttacgagcaccagcaagcgaacgaagtgggtatgaatgggacacaggaggtcgaggcttcgaccaggaaacgtccatcaactgattttatggaaacaatccaaaaggatgtaaacccaagcatgagagcgatcctgatagactggcttgtggaagtcgctgaagaatatcgtcttgttcctgatacattatacctgacagttaactacattgatcgttatctttctggcaatgagatcaatcgtcaaagactgcaattacttggagttgcttgtatgcttattgctgcaaaatacgaggagatatgtgcacctcaagtagaagaattctgctatataactgacaacacatacttcagagatgagtgctggaatgaatcgaactctaataactctcttattgcctacaacaggagatttgtccgtgttgcacaagtatcggatgagcttttcatcgtgcaggatccagcattgcatcttgagttcctagccaattatgttgctgagctatcactgctggagtacaatctactttcttaccctccttcactagtagcggcatcggctattttcttggccaaattcatactgcagccaacaaagcacccttggaattccacccttgctcactacacacaatacaagtcgtcagagttaagcgactgtgtaaaggcattgcaccgcctttttagcgttggtcccgggagtaaccttcctgcaatcagggagaagtatacccaacataagatactgcatgcagctgatgtgatcgacttgaacatggcaaatgcatttaagaatgtgaaaatattatgtcaatgtccctgtcaatgcaaccttcttgaagaagtcatgctcaagctatttccatactggaagctaagcacagctgtttag

SEQ ID NO: 77745 - DNA, 983 bp, Oryza sativa
  Clone ID: PAT_MRT4530_77615C.1
ataatcctgacagtaaagtaattggggaccttcttatgcaagataaagatcacaagagcatgtggacagtgatggagatggagctctccctcatgtatgacatcttgtacaccaaggcatatgtgattcacactagcttaggatacatcatccgcatcatggcgccgatcaccatcattgcctcactcttactgtttcatttcagtggcaaagcattgctgtcaaatctcgaaattccagacaaggtcaagacaactttgcaagatatgcatgagagatttgcaccaaatgatttgaacactatgggcttactgaggcataactgggggatgctggcaatgggtgaggacatgggcagcgggactcgccctgagcagttcaagaacctgaagaggtttcatggtgttgacttccatgagagcatccttatttggcacatcgccacagacttattcctcgctaaaatagggaaggaagggccaactgtagaggcaatcagggcgatgtccaactatatgatgttcctctttgtggatcgcccagaaatgctaccgggactcccacataaatggctgtacgagatgacaaaaaaaaacataatcgaatcatgcagagcatctaatggtttcactaatgaagtgaagcatggtgggcaaagatcccttaggctcaaacagacagagcaggtagctggcaaactactcaatattgacaaaagggaagtacaacctggccctaaagttcctcgtctcaggtatgcaagaattgttgctgacacactgtacaaatggaaggatgaagatccaattgatgtgttgtttgacctgtggatagattttctgatgtatgcagccaaccgctgcaatagggaatcacatgccaagaagctcaacgctggcggtgagtttttgaccatcgtctggctaatgattgagcactttcaacaattagcaaaagcaaaaaaggagcacggcaatgaataa

SEQ ID NO: 77746 - DNA, 518 bp, Oryza sativa
  Clone ID: PAT_MRT4530_77616C.1
aaagatcccaaacccctaaatcacccgctccccacctcctcctcctcctcctcctcccgctggtgtctcgggtggcggcgcggcgcaccacctcgcggcgagatggcgagctcggcgctgaggcgatccctccgacgcctcctcccttcgagcccccctcccccgtcccccgcctccgccgccgacgccgcgaccttccgccgctccttcctgatcagggccgatgacctcctgctagagagcgtggaagaatttcagaacaggatgctgactggcttggatgatgtccttgagaatctccgcggacgatctgactggaatacgaggcatgtctacccgaacaggcagaactctagcagcgtcttggttgactagtaccacgaacttcgattacttagaagactggatggatgagaaggagtatgatgcgcgccacacctgtcatgtgcacgacgagtatgacagacgatgactatgcctacaagccagatgtgactttcacccgaggctcgacttat

SEQ ID NO: 77747 - DNA, 255 bp, Oryza sativa
  Clone ID: PAT_MRT4530_77617C.1
atggggaaaaggagagtggcactggttgtgggggataggggggacggcgccgcctcctgccaccgagctcccgctgtcccctgctaccgagccaccgacctcgccgtcccccgctaccgcgccaggccccgccgctggtgggctgtcaatgtagagctccacgcgcggggaacatcacgccatgtcaccacccatgcgtgtgcatgcggaaaccggcgatggaacggcagcatctcatgcggcgtgaacgcatga

SEQ ID NO: 77748 - DNA, 865 bp, Oryza sativa
  Clone ID: PAT_MRT4530_77618C.1
cccatggagaagacggcggcccctctcctcctcgcggcggccttgttcctcgtcgtcgccggcgacggatcggagccgacgccgacgccgacgccatggccggcccagttccacgcgaagctcctgatggagttccacggcaacctgtcgctggcggacctgtggtacgactggccggggggccgcaacctccacgtcatccgctaccagctcgccgccgacgagcccttctacgacaacgagtggaacaacggcacctccttcttctacaccccggcccgccgcgcctgccgctccgccgccgtcggcgtcggcatcctgcccccaaactggctcgtccctggctccgtctacctcggccgccaccccgccgacggcttcgactgccacgtctgggccaaggccgacttcatcacctactacgaggacaccctcaccaaacgccccgtcaaatgggtcttctacaccgggaggactagccatgtgatgagctttgaggagggtgctgtgctggaggacgcagaatggcaggcacctgaatactgcttcggcaagggtgatgagactgaaacatccaacgacaacgccctcatctctgaacctgttgctgggcatgataagggcttcttccccaggagagaattctgagaggctagctgtattctactattatctggtgagacccaagaccttaattagtatggccaccatgctgctaatcgtctgtctgtattgtgctcaagtatcacattcaaaacattcactgtgcgagtttgcgggatgtacagttttgtgcaaacaggtgaaactaatctggaccatatatcatttgtgtaataaatttggatcatgtgtttcttacaaa

SEQ ID NO: 77749 - DNA, 1485 bp, Oryza sativa
  Clone ID: PAT_MRT4530_77619C.1
atggcggatcgtctcaccgatgagcagatcgaggacgtgctcgcgctcttcggccggaacgatcgtcggacggcggcggcgtcggcgacggcgacggtgacgaaggtcatcatcatggaggcgcccgagacgggaccgagggcggtggcggcggcggtggtggccgcggcgaggagaagcacaaggccgatcatctcctacctgcgcttcctcctgaaccgcctcagggacacctccgatgagcaggtcatcaaccgctcgaacgacgcctggaatctgtaccaccgcctgacagggagcagccgccgccccgccatcgccggccacggcgccttccctacgggagataccctcgattgcctgctccgtccgcgctacttcatccccagaaggccgctctttcagaattgcagcctctaccgagttctctgtcaggtgaggcgggcgtctccatcctggaaggagctcgccatcggattgggattggccgcggctgtagtaggtgctactttgctcgtgaggtactacggggaagaggcaaagagaagactcgtcgctgatctttacaccactgcctatctcaagggagagttcgacaggttcgaccgcaacgacgatggcttcattaccagtgaagagcttggagaactgttgagctgcttagggctaaaccacactgaagctgaactacaggccatgattgaagaggctgctcccgatggaaatggggcaattgattttcatgagttcttgacgattgcacataattgggttattaggtccatgcaacaatactttagtgatgagcagctccaccaccgcctctccctcttgctcttacgcggccgctccccgcgccacccgtggcctcccgcggcggccgacgtcttcctcgtcgtcctcctcttccgccgccgccacggcgggccgggagaagagctcgaggaggacgttggcgtagcgtacctgctaggcgttgcggcggcgatggtcggcgcctcctacgcgccgtcccgctctaccgccgcttctgccaggccaccggctacggcggcggcaccatttccctatcgtaataatcgcggcagcaccgcggctcctgcctgcctggccttgccgttcttgagcaagatcacgagcaactatacctgcaatctcccggtgctccttgttgccgagctcaccgacgagggggtgtgggttggacaactggccgatctcctccacctctacgccagcctcatccgtctgagcagtaacggcgttagatcggtgtggagaaaattttcatcggacacatttgcccttcgttccccacattccccaccaggtctcctcttccgctctctcatggtcggcggcgcggcggccatcggcgtgccgggcgactgccttgtctctccgtcaccgccgagcgagctgcggcgcgcgctcttcaacgacgtggacgcgtggctcgccgtcggagaggtggaccccgtctag

SEQ ID NO: 77750 - DNA, 472 bp, Oryza sativa
  Clone ID: PAT_MRT4530_7761C.1
agcttgacctgattacattcggctcgcatttcatagtcgtcagccacagagtgaccctgatttgctgtcacgactggaaataacccaacgggcattccttacgtgcgtgcattaatccttgtcccaggaggcaagactgagccacaaactaagccttacccactagacatgtggaagtacggtagtgctttgcaacagaggcccgaagaccggtccttatgtggcagaggtgctactatcaaaaccatgcaccccgagcccagcctaaaaccattttaggggattttgaatagagggggcgatgatgtgacttgccttgctcgctttcccaaccgacggcttcgacttccacgaagagcggatcttccgaagctgcagcgtctacacaaccaacggaaaagaaaaaggcttttactctaataaactccacataacagcagaaacaaagcacaaaaatgggttcttgacttct

SEQ ID NO: 77751 - DNA, 323 bp, Oryza sativa
  Clone ID: PAT_MRT4530_77620C.1
aaaacggggcaaaaaccccaaacccctgggggttttttaaaacatcaatggaaaaattataacataggccccccggaatatggggaaaaaccacaacccaaaacaacccctgggaaggtaaaaacttcaacaaagggaaacaccttaaaggggaaaaggaaaaaacatgacattgtaaggcggggctggccgggggggaaaaaccaaaaaaaagggccccccccggccaagaaaaaggaacagagggggagggcccacaaaataaaaacaggccgggtccgggggtggaaaataagccacacctttatcagggaataccccgg

SEQ ID NO: 77752 - DNA, 209 bp, Oryza sativa
  Clone ID: PAT_MRT4530_77621C.1
atgtgagtcttcagtcgggaagcagaggctgccaccacctccaccaatcatgacatcctttctcacatgcttgggcatgacaagcttctcgtgatcgatcatcatcccactctagcaaaggagtacgttgttggtagtacaggcgagccctacgccccccacgccttagccggtgccagtgttagccagcgatgcacgcctgatccctt

SEQ ID NO: 77753 - DNA, 345 bp, Oryza sativa
  Clone ID: PAT_MRT4530_77622C.1
atggacgtacgtcgggtgatggcgacggtggcagggcgacgtgcatgtccaaagctcgccttcgggtatgctagcgtgccagtggatttgatcctgcaatcaacaagaaataaaggcaaagaaaccgcggttaaatctataaatgatagccgattggctaggactctatccacgcgtggcaatcatcttgaagcatatcgacccaacccaatatcgtacaccaagtcgtattgtcggaatcggctgcatcaccaaaccaagtctgactcgaacttagccgatccaatcgtagctgatccggactccagccgatttttactctgtttccgcgataatccttatctc

SEQ ID NO: 77754 - DNA, 566 bp, Oryza sativa
  unsure (1)..(566): unsure at all n locations
  Clone ID: PAT_MRT4530_77623C.1
gaagctctccatccagtcattcgcccgggggctctccctcccgtcgccgatgcggacgtggagcagcggcggcggaagcagnttgagggatggtggcctgtccaagaacgggagcggcgtgaagcgggccctctcccgcagcgaggcgtgggggggggcgtcggcgtcgtcggagtcggagtcgtcctcggacgacgcgctgttggcgaggncgacaccgaggtcggtgctccccgcggagatctcgcggcgggagctggaggccgtgctccggcggctcgggcccggggagcccgacgacgaggagctggacgccgtcgtgggcatcgccgccgtggccgtggcggtcggcggtgaggacgagctgctggaggcgtttctggtgttcgacgccgacggcgacggtcgcatcaccgtcgaggagctccgcggcgttctggtcgccctcctcggcggcgacggtgacggctgcagtcttgactactgtcgccgtttgattggtggcgtcgtcgttcgtcggtcgccgtgttcgtcgggctccgggactttggccgcttgatgatggc

SEQ ID NO: 77755 - DNA, 479 bp, Oryza sativa
  Clone ID: PAT_MRT4530_77624C.1
ttttttttttttttttttttttttttttttttttttttttttttttgttttttttttttttttttttgtttttttttttttttttttttttttttttggcccggggggacccggggaccaaacccaaagggggaccattggcccgtgcaaaaccaaaaaaaaattaatccctacccgggaaaaaaaggcccaaaaaagggcccctacccccaaaagaaaaaaacaccccaatttcctggggcggggttaaactaaaaaaacacccctccgggggggaaaaaagcgttttcccttgttaaacaaaggggaaattaaaaaccccacaaaggctaaagcagggcccctgaaaaaaaccgccaaaaccttggaacgagcggaaggtaatttttttcgaaaaaaaagctatttcggcccctggggaaaaaaaaaaaaacttcttttccatccgagaaaaggtttttattttggaaccccggggg

SEQ ID NO: 77756 - DNA, 3772 bp, Oryza sativa
  Clone ID: PAT_MRT4530_77625C.1
atgacgatggccgacggtgcggggcgtgatcgctccggcctcgggccggggaagaggaaggagagggtgcgcccggagtccacgtcacgcgtcctcgctcgtgccggctcctccgacacaacaggcctccagtgtccatacgggcagtatgaggccccgaactgtgcagtcgcggtcagctgtcggctgtcgagcgggcaccgcgcggggagaactacaacaaggttttcacccgccagctataacagaaaaaagggatggctcgacaacgtcctcaagaaggaagatgatactcgaagtgccgtcgttgtcgtccgggcggtggccggcccggagctcggcggggcgaggcaagagagactgcgcgagctcaagacgtggttctccggaccactccacgcggagtcggcgccgggctgcgggcggagcgcggcgggcgagagcggcgatgggcgggcggcgggcaagctccaggtcgctccgtgcgagtcacgtcaccgggggcgcggcgactggtgggtgtgggcggccgccctcctccgactttgccccctactcctcgcacatcacctcctgccggaggcaggcaggcgcggactgggcggcgatgacgacgactcgccctcctcatctccccgtctcccgccggcctcctctcccacttctcccgccggtgaagaaggcgacaggcgggaggaaggccggcgggcgaggaagaaggcggtgacgcgctccgtcaaggccgggctccaattccccgtcggccgtatcgggcgctacctcaagaaaagccggccggtcgatctcctctccgccgctccttccccatcggccgcgccgaccctcttccccaccgcgtcggtcacgccgccgaccctctttcccaccgcgtcggtgacgccgccgaccctctttcccacacacgcacctcaagatattcctctctacccatcctcagcagacatggcgagaaaggagggggaagggctggatctggtagcgatggaagaagagctggatctgtattcttgggaacccgtggtgacgcttgccatatctttgctggacagagccatatcctacttgggtgaggacactagctgggcggaggggcggaacaagaacagatttggtggtttcagcagtcaaatgttttattatctccaacctgccagaggaaggtttcaagacttccgtctgcgtctgattaattggccaaagtcgtactgttgtggctatgaggaaatctggaagttcaggattgcggttgagctattggaggatttgatcgaggagatcgaacaccgccggctggaggaagatggtcgcattcctgccttgttcatgaatgctaaggcaaagatcgccttcaagtttgcgacaaatgattatttcagggaggagtgggacaggctgttccaggagttcacaaccttcaggctagaggacttgatcacggatatcgaacaccttagactggaagagagtggaaaaaagatctccaacaagaagtttgcgagatctcctgatcagtataaacaacaggctaggctatttttcctgctagagagaggtgtatcacgtttacgcgaccaattaccagcggtggtcgaacatgtggttagccaagatagggagctggttgaccttgagaaggaggagttgcatgcagagctggttggccgagatagggagaagaagcagatagtgcagtgcctcatcatcagcacagcaggcgcagaaatcaagcgtgtagcgagcgcaggccacatccaggagtatctttcagtccggatctcgaggcactgtcacaatggtaaaacccccgtcatcgccaacgagcctggctccgcgggggcggacaccgccgccggcgccgcggcgagcattgcccgcgcggaacttccgctccccgaacccgagcgcgtctccgatcccgcggttcccctccctccgcctgccctcgtctcggagccgccacctaccaccgctactgtcgccaaagtggaagatgaggagaagcccacggccgtcgcccaccaggaggcggcgcccagggattacgcgttccagcgagcgctcaagaccgcggagaacaagagcgacccgtgcggcggccggtacatctacgtgcacgagctgccgccgcggttcaacgacgacatgctccgggagtgcgagaggctcagcctctggaccaatatgtgcaagttcatgagcaacgaagggcttggtccgccgttgggcaacgaggaaggggtgttctccaacaccggctggtacgcgacgaaccagtttatggtggatgtcatcttcaggaaccggatgaagcagtacgagtgcctgaccaaggactcgtccatcgctgccgcggtgtttgtgccgttctacgccgggtttgatgtggcgaggtatctttgggggcacaacatttcgacgagggatgccgcgtcgctggatttgatagattggctgaggaagaggcctgaatggaatgtgatgggcgggcgtgaccatttcttagttggcggcaggattgcgtgggatttcaggcgcttgacggacgaagagtcggattggggcaacaagctgcttttcatgccggctgcgaagaatatgtcgatgttggtggtggagtcaagcccatggaatgccaatgattttgcgataccatatcctacttacttccaccctgccaaggatgctgatgttttgctttggcaggatagaatgaggagcctggaacgaccatggttgttctcgtttgctggggctcctcgtcctgatgatcccaagtctatcagaagtcagcttattgatcaatgcaggacatcaagtgtctgtaaattgctggagtgtgatcttggggagagcaagtgccattcccctagcgcaatcatgaatatgttccagaactctttgttctgcttgcagccccaagatggcgtccgtaagggaaatgtcagcattgaggacaggcttaaaagtatccatccagatatggtcaagaagatgagggaagaggtcattagtctcatcccaagggtgatatatgctgatccaaggtcaaagctggagaccctgaaggatgcattcgatgtttctgtagaggcaataattaacaaggtgacacagttgagaagagatatcatcgaagatcatgaagataaagattttgttgaagagaatagctggaagtatgatctgttggaagaagggcagaggacaattgggcctcatgaatgggacccgttcttctctaagcccaaggacaagggtggagattctactaatccatctactaatgctgccaagaactcctggaaaaacgaacaaagaggtcagaactaaaatacaggtagttagatatgtgatcgaggaaaggaactagatatcctctctagagaagctccttgcaaataccttgcccatatgtcaaagatcctccaacgcagtagctctgatgatcatgtatgttcttgatgatctagcccctacaggtgtaagtggtggtagaaaagatgcttggggaaaaaaatgcacggccttcgagttgcccttataaataccatttcacactctatttttgttttgctttgctcaataatcctttgtaagtccttacgggatttataggtatatcaattttgctgttgtttctgttttgtttgctttgatctgtatgtgtatggtttagaatttgtgtatactacctttttatactcacaattagtaagcaatcaaagagatttttgtagataaaaaaaaaaaa

SEQ ID NO: 77757 - DNA, 323 bp, Oryza sativa
  unsure (1)..(323): unsure at all n locations
  Clone ID: PAT_MRT4530_77626C.1
gcaacttaaggataaagctttgaagagagcagggttgactgaagaactgttgcaggagcaaattgagcagagaactgctgcanaggaaaaacaagcagtttgatgtgtctgaccaaatcaggaaacagctaggcagcaaaggcatagccctcatggatgaacctactggtacagtatggagaccatgcgagccagagtctgaatagtcacatgattgatttgtgctttggttaacaggggtttaagttcactggccaactgaaacttgcgtttctcgtggtgtaagaagcaaaaccccatatactgatatactcgaggactcc

SEQ ID NO: 77758 - DNA, 2064 bp, Oryza sativa
  Clone ID: PAT_MRT4530_77627C.1
cgggcttcgcggattgccgggatgcggccccatgcaaagagtcccatcgcttctcaagttctacccctgctgtggctgttgcttctgcccccgccgccgccgccagttctagggttagctcgtcggcgtccagccctctcactcttcccctccgctctcacgatggcggagagcgcgaagccgacgccgcagctggagctcttcaactcgatgacgaagaagaaggagctcttcgagccgcttgtggaggggaaggtccgcatgtatgtgtgcggcgtcacgccctacgacttcagccacatcggccacgcccgcgcctacgtcgccttcgacgtcctctacaggtatcttaaattcttggggtacgaggtcgaatatgtgcgcaacttcactgatattgatgacaagattatcaaacgagcaaatgaagctggtgaaactgtaactagcttgagtagccggtttattaatgaattccttctcgatatggctcagctccagtgcttacccccaacttgtgagccacgtgtgacggatcacattgaacatattatagagttgataaccaagataatggagaatgggaaagcctatgctatggaaggagatgtttacttttcagttgatactttccctgagtatctcagtttatctggaaggaagttagatcataatcttgctggttcgcgggttgctgtcgatacaagaaagcggaaccctgcagactttgcgctgtggaaggctgctaaggaaggcgaacctttctgggatagcccttggggccgtggtagaccaggatggcatattgaatgcagtgcaatgagtgctcattacttaggacatttgtttgacatccatggtggagggaaagatctgatatttcctcatcatgagaatgaacttgctcagagccgggcagcttatcctgaaagtgaggtcaattattggatgcacaatgggtttgttaatgtaaacagccagaaaatgtcaaaatcgctgggcaactttgtcactatacgaaatattatggaactgtaccacccaattgctttgaggttgttcctgattggtacacactacagaggagatgtcaatcactataccatagaacttaatgtagcatctgacagagtgtactacatttaccagacactacatgactgtgaggaaatgttgtctcaacagcgccaaagcaaggctggagagaatatctctgtcccgttacctgttaatactacaaattgtatccagaagcaccattcagaattcttggaatctatggcggatgatcttagaacaacagatgttctggatggctttactgacttgctgaaggcaattaacagcaatttgaatgattttaagaagttgcaacagaagctagagcagcaaaagaagaaacaacaacagcagaagcagcagaagcaaaagcagcagcaggcacagaaacaaccagaagaatatattcaagctatgtttgcacttgagacagaaattaaaaataaaatatctatccttggtctgatgccaccttcttccttggcagaggcactgaagcaacttaaggataaagctttgaagagagcagggttgactgaagaactgttgcaggagcaaattgagcagagaactgctgcaaggaaaaacaagcagtttgatgtgtctgaccaaatcaggaaacagctaggcagcaaaggcatagccctcatggatgaacctactggtacagtatggagaccatgcgagccagagtctgaatagtcacatgattgatttgtgctttggttaacaggtgatggtacaaactggaaaatttaaccaagcacatctgctgaattggtgtaaattgatgcagatcaacatttttttttgtaattttgtaggggtttaagttcactggccaactgaaacttgcgtttctcgtggtgtaagaagcaaaaccccatatactgatatactcgaggactcccttgttggatgttatgctttggatttgaatattgaagtcaaatcataattacatttgcatgatcaaaaatttgggatttcaaaaaaaaaaaaaaa

SEQ ID NO: 77759 - DNA, 299 bp, Oryza sativa
  Clone ID: PAT_MRT4530_77628C.1
tcttttctaccattagggtaaggggaggagcggcgatctcgattgagacaacgacgtcgaggtcgaggcggtggccgaagaacatggccgacggacaggaggacgcctcgggtctggacgatgaccttgttcttgaggatgagctgccaggtcgagaagagggcgaagactgcggctgtggttgtggcgaggaagaggaggaggacgacgtcgactgtcttgccagctttcttgaatcggagatcctctctggatctagcggtgacgaccctaccgctcgggaggaaggggatgagaag

SEQ ID NO: 77760 - DNA, 1580 bp, Oryza sativa
  Clone ID: PAT_MRT4530_77629C.1
gtgcactatgttgtttcgaggcaggagagaggcaacctgcacctgcccatggaggactcggattagactagagcacaagatggcgtgcttgaccaagtatcagcacgccacgaatgcaacgaattaacgctagagtttttgtataagtagtgtgatttgatgccaagttcttgcatcttgtcaaatagtatttgggcgtgttgatgatgagcgtgcaaatggcggcgtcgctacgtgtgatcgttgtgttggtgtgtgtgacggcgggcgccgccctcgccgacgcggcggccggcggcgtccgcgtcgggctgacgcgcatccactccgagcccggggtcaccgcgtcccagttcgtgcgcgacgccctgcgccgcgacatgcaccggcgcgcgcggttcgggcgggagctcgcgtcgtcgtcgtcgtcgtcttctccggcgggcacggtgtccgcgccgacgaggaaggacctgcccaacggcggggagtacatcatgacgctggccatcggcacgccgccgcagtcgtacccggccatcgccgacaccggcagcgacctcgtctggacgcagtgcgcgccgtgcggggagcggtgcttcaagcagccgagcccgctgtacaacccgtcgagctcgccgacgttccgcgtgctcccgtgcagcagcgcgctgaacctgtgcgccgccgaggcgaggctggccggcgcgaccccgccgccggggtgcgcgtgcaggtacaaccagacgtacggcaccgggtggacgtccggcctgcagggctcggagacgttcacgttcggctcgtcgccggccgaccaggtgcgcgtccccggcattgccttcgggtgcagcaacgccagcagcgacgactggaacggctcggcggggctcgtcggcctgggcaggggcggcctgtcgctcgtctcccagctcgccgccggcatgttctcctactgcctgacgccgttccaggacaccaagagcaagagcacgctcctcctcggtccggcggcggcggcggcggcgctcaacggcaccggcgtccggtcgacgccgttcgtcccgagcccgtccaagccaccgatgagcacgtactactacctcaacctcaccggcatatccgtcggcccggcggcgctgcccatccctcccggcgcgttcgcgctccgggcagacggcaccggcgggctcatcatcgactccggcacgacgatcacgtcgctggtcgacgcggcgtacaagagagtccgcgccgcggtgcgctccctggtgaagctgccggtgacggacgggtcgaacgccacgggtctcgacctgtgcttcgcgctgccgtcgtcgtcggcgccgccggcgacgctgccgagcatgacgctccactttggcggcggcgcggacatggtgctcccggtggagaactacatgatcctcgacggcggcatgtggtgcctggcgatgcggagccagaccgacggcgagctcagcacactcgggaactaccagcagcaaaacctgcacatactctacgacgtccagaaggagacgctgtcgtttgctccggccaagtgcagcacgctctga

SEQ ID NO: 77761 - DNA, 4611 bp, Oryza sativa
  Clone ID: PAT_MRT4530_7762C.1
atgtctttcgtgattagtctcacccttctcaccatagtaaatgatgctataactggtaataatttgattagctcctggtttggaatgatgccgcgctacaagcctgagtacttgtttggtgtggagggttttgtccaggagttgcgtacaatgtcctttgtcattggatttgggactgcccctttttatgcccagattcctcatgatcgtcatgaagagaagtgccgagtcaaagtcaccttgaacagtaatagtgaagatattccctcagtgatgttcgaagctggaggaagaaactacatccatgcgtgtcaggaggtggcaaggatcgccataggagagcttcgcgatcgctacagtgatcagttggccgatacggagtatcgctaccatcctcgtcaaccacagggaagtgaccgtggcaattaccttgagactgaaggaattgagaatgatgctaccacaaggcatttggttgagatgctgtgggctatggatgaaagtcgtgcggagactgtattagcggctcaagatcgtgaagaccggaatcgtggtaagatttgcaagctagaagacaaggtggatcgtttggagaaggaattagccgcattgaagggagaagcaccgccgcagaaggccaggattcgtctcactgcaatgaagagagctctatttgtccctcgctatcaattggcgccaaagatggtgaacactcgcagcaatgggaatggccccaacaacaacaacaataacaacaacaacagtggagagaatcccacacttgcccaagtcctggctcaacagacacagcttatgaacatgatgatgcagcaactccagaaccagcaaaaccaaggaaataaccatgcacctccccagaacaagttagcagaatttctgcgtttgcatggccctgcctctgaatggtgggatcactttcgcctgaacaggattactgctgaacctatcacttggcttgaattcaccgctgctttccggaagacgcatataccatcgggagtggtgtctctcaagaagaaggagttcaggtcgctcactcagggatctcgctctgttacggagtatttgcacgagttcaatcgtttggctcgttatgctcctgaagatgtgcgcaatgatgaagagcgtcaggagaagttcttggaaggacttaatgatgagctttcttacccactcatgactggagattatcctgatttccagaagttagtggataaggctattcgtcaggaggacaaatacaaccgcatggagcagaagaagcgccggattgctcaattcaagacacaacaggggaataatcagaggccgcgtcttactttaggaccccagtccgtgccacagggaggttcttcgtctattgttcgtccgcagcgtcagttcttcaacaacaatgctggcaacaacatccgtaatcaagttccacgtcctgttgcagctccaacacagcaacaacctgccaagagggagcaaggcagcaaacccgtggtgtgtttcaactgtggagacccaggacattacgctgacaagtgtccgaagccccgacgcgtgaaggttgtccctactcagagcaactctaccgcaccagcatcaaaggcccgtgtcaatcatgtcgctgctgcagaagctcaagatgctccagatgtgattttgggtacgttccttgttaacttagttcctgccacagtgcttttcgattctggtgctacacattcattcttatctatgagttttgcgggaaatcatgggatggaagtagaagatcttagacatcctttgatggttagtaccccaagtaatcaagcactctctttgcaacgtagcccctctgtcagaatagaaattaaaggagtaccatttctggccaatcttatcttgttagaatccaaagaccttgatgtcatcctagggatggactggttagccagacataaaggtgtgatagactgtgctaacagaaaagtaactctcaccagcaatgatggtcgagttgtaactgttcatgcattgtcttctgagtctttaaggtcaagactgaaccaaataactttggaagagattcctatagtccaggagtatcccgatgtgttcccagatgatttacctggtatgccgcctaaaagggatatagagttcagaatagatttggtaccaggaacaactccgatccataagagaccttatagaatggcagccaatgagttggcagaagttaagaggcaagtagacgatttgcttcagaaaggatacatcagaccgagttcatcaccatggggagctccggttatttttgtggaaaagaaagaccatacccagaggatgtgtgtggactatcgtgcactaaatgatgtgactatcaagaataagtatccactacccagaattgatgatttgtttgatcagcttaaaggtgctactgttttctccaagatagatcttcgatcagggtatcaccagttgagaatcaaagaggaagatatacctaagacagcttttaccactaggtatgggttgttcgaatgtactgttatgtcttttggacttaccaatgcccctgctttcttcatgaacttgatgaataaggtgtgtatggaatacctagacaagttcgtggtggtctttattgatgatattcttatctactctcgaaccaaagaagagcataaagaacatcttcgccttgcactagagaagctacgagaacatcaactgtatgctaagtttagcaagtgtgaattttggttgtctgaagtgaagttccttggtcacgtcatctcagcaggaggagttgccgtcgatcctagtaatgtggaatccgtaaccaactggaaacaaccaaagacagtttcagaaattcgcagttttctaggcctcgcaggatattaccggaggtttatagagaatttttccaagattgctaagcccatgacacgactgctacagaaagatgtgaagtacaagtggtcagaagaatgtgagcagagttttcaagagttgaagaatcgcttgatatcagctcctattttgattttacccgatccaaagaagggtttccaagatgggaaggtggttgcctatgcatctcgtcagttacgtccgcatgagaagaactaccctactcatgatcttgagttagctgcagtagttcatgcgttgaaaatttggcgtcattatcttttcggtactcgtacagaggcaaatgttgtagccgacgctcttagcaggaaaggctattgcaatgctaccgaaggacgacagttgccattggagttatgccaggaatttgaaagattaaatttgggaattgtcagtagaggtttcgttgcagctttagaagcgaagcccactctaattgatcaagttagagaagcccaaattaatgatcctgatattcaagagatcaagaagaatatgagaagaggaaaagctatcggtttcttggaggatgagcaaggaactgtttggttgggcgagagaatctgtgtccctgacaacaaagatttgaaagatgtaattctgaaagaagctcatgatactttatactccattcaccctggaagtactaagatgtaccaggatctcaaagaaagattttggtgggcaagtatgaagcgtgaaatcgcagaatacgtagcagtatgtgatgtttgtcagcgtgtcaaggcagaacatcagaaacctgccggtttgctgcagcctttgaagattcctgaatggaaatgggaagaaatcggtatggattttatcactggtttacccagaacgtcatcaggccatgactctatttgggtaatagtcgatagacttaccaaagtggctcattttattccggtaaagacaacttattccggaagtcggttggcagaattgtatatggcaaggattgtgtgttcgcatggcgtccctaagaaaatagtgtctgatcgaggcagtcagtttacctcaaatttctggaagaaacttcaggaagagatgggttctaagctgaactttagcactgcttatcatccgcagacagacggacaaaccgaaagggtgaatcagattttggaagacatgttgagagcttgtgctttagatttcggtggaagttgggataagaatctaccttatgcagaattttcgtacaacaacagttatcaagctagtatacagatggctccttacgaagcactgtatggtcgtaagtgccgcactccgcttttgtgggatcaaacgggagaacgtcaggttttcgggacggatattctaagagaagcagaagaaaaggtgaaaatcattcaagaaagattgcgagtggctcagtctcgtcataagagttatgccgacaatcgccgtagagatttgagttttgaagaaggagattatgtgtatcttcgtgtcacgccttttcgaggagttcatcgttttcataccaaaggaaaattagcaccgcgttttgtgggaccttataagattgtcagtagaagaggagaggttgcttatcagttagagttacctcaatccttggcaggagtccataatgtgttccatgtgtcgcaattgaagaagtgtttaagggtacctaccgaagaagctaatcttgaatag

SEQ ID NO: 77762 - DNA, 560 bp, Oryza sativa
  Clone ID: PAT_MRT4530_77630C.1
gtggatccccgggctgcaggctccgttatccgttacgccgtggtcggagccgccgagcgccgccgtcgcgcctccctccaccgtcttgccgcgccgccgcgcgacggctgcggcggtcgtcttccccattcgtcccatcgatcctcctccggctcagttccacagaagcgccacctcatcacgaaggcaattttacagttcgaacattaggaagcatgagctatttccaggctacaaggtacaagcctcataatgggatcattgtggacaaggtagcaataggtcttgggagtacttgcaaattgcttcatgaaagggccaaatgttcgtattccaatagattcatcaagcttcaagagcaagtatacccaaggcttcttcttgttgctgcttgccataacaggattggtcctgtgtatgcctcaagtgggaaaggaaactctgagcgtgtcaatgatccctactccatggaatctttgaacaaagctatagctggaactaaaaagcaatggcccatacaagatatgctgatagatcaaatttctaaagattagagggtc

SEQ ID NO: 77763 - DNA, 468 bp, Oryza sativa
  Clone ID: PAT_MRT4530_77631C.1
ggcaacactttcgacacacattccactaccaatatgctccaatcttcaccaaattcatgtgctagcgttccccctccacgttgctttcagatccagagagaaaaaccctaaaccaagccattcccaatctcaccattggtggaagagagataaatcccttttaaccggtggatggtctcggacgttaaggagacagatctgaaagatatggtgaatgaaagtgtgttgccagtgaaggagatcatcagatatatcatctgaaccctaattccctcctccacattggcatctttattcacttttgtgaagcttttcttggaatctggcctcatttcaacctctttcatagtatgttctacctcaaagcccaactgattaaagaaaacccctgtcaccagcttttgcgtatgaaggccaggcgaatcccaaccccgaagttccgactcacttgactacaaaatcatctgc

SEQ ID NO: 77764 - DNA, 1375 bp, Oryza sativa
  Clone ID: PAT_MRT4530_77632C.1
gaaaaatatcaaagcgacttattataagatgaaacgaagggagtatatcacagtagtagtctcttctgcttatgtttgtcgagagagatcatatacatgtgcatgacaaaggcggtcacaggtgacatgtgcaaatgttgcatggctagagcacgccaatgcatatggttgccgccccctggtgagccacacccacacaccgggtataatacccccatgtgttggtggtgcctcgatcgcttgctgctcggcaagaagtgcacttcaagtcatctcctgtccctgtcaactcccatctagcttagcttgatccccctccctagatctctctcacttcatatcgagacatgcatgcttaactgtctccatcatcacgtgagctccacttgatctcccctaacccctagccgtatatataaacggcgcagccaagcttctccccaacctccatccatcctagcttgtcttcttgtaggcgtgccgacgatgggcggcgcgccggcggcggcagtggtggtcgtgttggctttcatggcggtgatggtggtggtgccggtgtttggtgccgatggtggtgacggccgggttcaggtgcagagcttggagcggccggttggtggtggcggcggcggcaatggcacgtcgtacaatgcgaccagcgtggccggccggaaggatggtggcggtggcggtggtggaggagggggaagcagtggtgggagttcttggagctatggatgggggtggggctggggcactgacagcggcggcggtggaagcagtggcggcggcggaggaggaggagggggaggtggtggcggtggtggaggtggtggcggcggcggcggcggcggcggcggcggaagaaggtgctggtggggatgcggcaatggtagacggcgccacaaaggtggcaaagaaggcggcggcggcggcgagggtcgcaagggcataaggacggagcgggagagggagggcgtcggcggtggtggcgcggggaggaggcacgggcggcggccaagctacagctcgagcctgtaccgggtgggggagtacgcgcggtgcacggcggcgacggggcggtgccgaggggcgtggtcgaggaccaggagtaggcatatctcaatcacctgaagatgaatttttaggtggtgagagatcgctatgatctactggccaagaaccaggtgtagacgtatctcgatcacccgaagacgaatttttaggtggtgagagatcgctacaatctactggtcgagaaccaggtgtagacgtatctcgatcacccgaagatgaatttttaggtggtgagatatcgctactatctactggtcaaggaccaggtgtaggcgtatcttgatcacctggaggggcg

SEQ ID NO: 77765 - DNA, 313 bp, Oryza sativa
  unsure (1)..(313): unsure at all n locations
  Clone ID: PAT_MRT4530_77633C.1
taggtattcggatcaccttcgccaaacttggttagcattttattcgattttgatgcataattganngtcaatggttatttctttgttnatgatgtttgtctgtgtcttcatgagcaactgatcttagatattagcaagtgtgagtaataatgatttatgttcnccaacaaagatgacgaactgactgctacaagcccatcattccgtatttcccataattccattgtaccatatcacctcgtacatcccattcattgatattgagaatgaaagatcaccaattttgcagaatgaaaaaaaaaaaaaaaaaaaa

SEQ ID NO: 77766 - DNA, 171 bp, Oryza sativa
  Clone ID: PAT_MRT4530_77634C.1
atgatcaggtacagtaaaaaaaaaactggcaagaatctgtgggatctggctaaggcgaagaccagggatattggaagtgtacaaatgttgtgttctgcaaagacagagcaagaggagatggttggctgggagcaatggctggcggtagctagagagggccagcgagtgtag

SEQ ID NO: 77767 - DNA, 806 bp, Oryza sativa
  Clone ID: PAT_MRT4530_77635C.1
ctaagctaataagagcaagcttagaacaagaacacatcactgtctcctagctaagctagccaattcaattcaaacacacagaaattcagacgacggcgacgacgatgtttcgccgcgccgccatggccgccgccgcaccctccgacagcgaggtgagggttcagaaggtggacaagctggacctcgtcttcaacatcctgacaaagccgccggtgtacggcgccggcaaaggtaacaaccctccaaaagctccagcaccaaggcgaccggcggctaccggcggcgaccatggcagcggcggcgccgtcgccggcaggaagcagccgggcgtcgtgtcgatagaggacatcaacaagaggtctgaaaactacatcagggacaggaagaggatgttctttggccaaaattagtccaaattagtttcgagctcgatcatggaaattaattgaagtgttaagatccggtctgcatgatgtgatatttgcactgtattacgtacgtatatacggatgtatgcatgcataaatatggggaaaataattagcccctgatcgatgggcgcttgtgttgtaaaatatttacctgaaatatatgaatagcttgctatatgttgactgtgttttcaagagatttttaattttcagagactgaacttcataggctatagttagtgcttatataaggataaggacgactgtaaattaaattttttttgtgaggattttctagctaggttgcctactgtaagaaattgtacaattttcaatacaaacattacacattattaatcaaaaaaaaaaaaaaaa

SEQ ID NO: 77768 - DNA, 412 bp, Oryza sativa
  Clone ID: PAT_MRT4530_77636C.1
ataacttggccattcatttataaagatcccgaacttggtttttttttttttctggttccccctttggttttagactttaaaaaggccctagaagtttaccaaaattacaaacccccttattaccattttaccccccaaaaaaaccccaaaaaaattccgggggggggtttctaaaacaaaataaaaaaccccccccaatttggtcacccaacaaaaacgacagagaccagaaaacgacgaccactaacgctaggcttaggtgtacaaaggtggtcccgattcccaacgatcgaacgatttacccccgcctttgggggttcacccgagaagggctgaacgcgactccctgagcttttttgctgatgcttggggaaaaaaaacctcacctttttcttttttaaggtcacggggg

SEQ ID NO: 77769 - DNA, 714 bp, Oryza sativa
  Clone ID: PAT_MRT4530_77637C.1
atgacggcgacggcggcgcaaggcggcgacgcacggcgcggcggctccggggcgacggcgcggcggcttcgaaggtggcggcgcggcggcacgacaacggcggcgcggcggcgcgacgacggcggcgcgtggagaaggggaagagggagaaaaggagggaatggagtggggtggagaagggggggattgggctggagtctttatagggaagaggggaagaaagagaggggaaggaggaggaagggtgaaacgacggcggcgcggcggcgcggggcgcaaggcggcgggctcgcggcgcgaggcgacgagacggcacgcggcgcggcagcggcgatgggacgcgcgcggcgacgggacgttgatggcgacggcgacagcggtggcgcgcggctcggggcgggatgcgatgggcggcgacacgacggcacggcgcgacagcgacgatgggacgacgcggcgcggcgcggtgcgggcttgacggcgacggcggcgacgcggcgacgggacggctgctcggggctcgaggcgacgcggcaacgggacggcagcacgcgcggcatagggttggcgatgtcggcgcgggctcggggcggctcggcgacgtcggcgcggcggcaggcggcacgcgcggtgatggcgacggcgacggcagaggggaggtggagcggcgcgcggcgcgcggggcgcgagggcaacgcggcagaggagggctag

SEQ ID NO: 77770 - DNA, 929 bp, Oryza sativa
  unsure (1)..(929): unsure at all n locations
  Clone ID: PAT_MRT4530_77638C.1
cggacgactccattccacaggcatccttgacggcagcgacgaaaccaacctcttcgagacatcttcaactgagaaggacttcaactctggtgtgggggaaaagagaggaagactgagtactacccacttggcacaaggcgggaggggcgcggctggtggctcggctcggcttcaaagccggcaggccaagcatggcgagcgacggcggcacgcgcggtcgccggcgacggcaactggcggcgcggacggcgacggcagacggcgcgaaaagcggcggcggtggccgaagacgatggtgcgcgcgcggaggacggcggcgcacacgagagagagggaaagagggaggagggggaggaacaaaatgggaaggattagagggagaggggtggntcnntacggcgggcggaaaccatggccgaaggcggcggcaatggtggtactcaccggcgcgcggggagaagcgggccccgacggtggatttgccgggcggatggtggacgcgacggctcatgggatggtgaatgcggcggcgtcgacgcggcgcgggagcgatagagggcacgagagggagcggtggaaagaggaaaaaggtggaagggagtgcggggaagctttattggggctcgggagtggcggacgtggccggggtgctcccgatttcgccggctacgtgggaggtggagagagagagggaggggggattcaaaccgtaccccgcccttgcggggcacgcgcgagagcgggaggagcggagagggggcgacgacgtgggcgcggcacggagtggggaggagtgggcgcgggaaggacgggaaacggcagcagcgcgcgcggtttcggcggttgccggcgtgggcggatggaggaagaggaaaggactgacaggtgggccccacctgtcagcgcccgagagggagagggaggccggg

SEQ ID NO: 77771 - DNA, 893 bp, Oryza sativa
  unsure (1)..(893): unsure at all n locations
  Clone ID: PAT_MRT4530_77639C.1
ctcaaacctagcactgctccggcggcggcggcggcggcggcgcgttgcgatggctgacgacgcggcgagtgagcaagccacggacgtggccgcggccggggccgcggntgangggcagcctccggcgttgtcgannngcgcgaggangangctgctgntgcaggagaggcnggcggcgcngagggcggctcggaaggcggcggtgaaggagcgccggcgcgccgncntngngaggcgnnggcgcgagtgggaggaggcgctggccgcggcgccctcggngggggcccgcgccgngntggtggaggcgcggcggcngacgcggcgcgggcgggtggggcggcgcgcggnggtgcgcggcgcccgcgccgngcggctccgccgcgcggtccgtggcgccgggcngnctgtggggctgggccctcgggttcggngntcttctgcgggccctcttggtttcccgcctctcgcgcttcttcttgtcctgttttccctttctgggtggttttctcttccttcttctctttggtctgctggtttgttttggctttttgctgtcctctgtttccttgctttcttgtgtctttcttgttcgtttaccttccttgcccgcctccttctnctttccgccccccccccccccccctctgcgnccctttctcccctccccccccccccctccccccgccctccccctcttcccccccccnccnctccccctcccncccacctcccgcccnccccccncntcnnncgcnccccctcccccccgcccnccccccnncccctcccccccccccgcccccnccccccntcccccccccnccnccccccccnnccccccccctgcncccnccccccnnnccccccccccccgccccccccccccnccctcc

SEQ ID NO: 77772 - DNA, 426 bp, Oryza sativa
  Clone ID: PAT_MRT4530_7763C.1
ttaaaaaatcataatatcggggctatgtctttatgtacgcatctacataactacaataagaaattagttttgaactgttttctgttaatttcaggcattatattcattgtggactcgaacagattttcaagccaggtgtgacaacgagctggtgaacagtttagggaacttcatcaattgagtactaagctttatcgggaaatcatagggaactgagatatggttctgatgtgcctcattgtggtgatgtggagagagatgctctgactcagacattggttgagactagagggaaatagattgatcaggacatggatgtgatggacagggtcaaattaaaacaagggctgaagaacgcaatggtcatttctagcgaaggaaatgggtacctacaagagagtcagtttttgaagctttacaacaaga

SEQ ID NO: 77773 - DNA, 471 bp, Oryza sativa
  Clone ID: PAT_MRT4530_77640C.1
atggcgtccaaggctttgctcgtgttcgctctcgtcctcgctggtgcctttctcgtcaactgcgcccagcagcctcagccctacgccgaccccagcaacgacgaccccaacgccggctacggcagcagcggctacggctacccgtcgcagcagggacaaaacccagcgcagcagggacctaacccggcgcaacagggaccaaacccggcccagcagggacagaaccctgctcagcagggaccaaacccggcgcagcagggaccgtaccaggcgcagcagggacagaacggcggcgatggcggcggcggctatggcggcgccggcggcaatggtggcggcgccggcggcggtagcggaggcgccgccggcggcggcggcggcggctacggcgatccgtggtggaatcatcctcgccgctgccggtatggttgctgcgagtgcggctactaccgctgcaaccgctgctgctaa

SEQ ID NO: 77774 - DNA, 1534 bp, Oryza sativa
  Clone ID: PAT_MRT4530_77641C.1
tcctgccttatctctttcttccttccctgctctttcttccttcctctcttctttttggatcgggcgggccgggcggcgggcggcgcggccgacgtggcggcagccggcgcggcggcgcgcggggccgcgcggcggggcggcggccggcgcggcacgcggcgcggagggccgcggggaggcgcggccgacggggcggcggccggcgtggcggggcggcggccggcgcggcacgcggcgcggagggccgcggggcggcgcggccgacggggcggcgcggccgacggggcggcggccggcgcggcggtggcgcgcggggccgcacggcggggcggcggccggcgcgacgcgcggcgtggagggccgcggggaggcgcggcggcgggcggcggcgcggagggcggagggcggcgcggcggcgtgcggcggcgcggcggtggccggatggcgcggagaggaggcggcagcagccggccgagcggcgccttcgcggttgcgggcgtcgacgaaggcgcgcagcacgtgagtgaacaggaagacgagctgtcgcggacgaacagggagcagtcgcgctaagcgcttcccaaaaaccttattgccgccttctcccagttgtagacccccgtttttataacagaaatcattcgtgtaaacagtaccatttccctggatcaagtagttgagcgccatcgtcttcatctccctcctggtagtaggcatagggatcctctgaagcttcatctcccgcttcggcggcggcgacgacggcgacggcggcgcaaggcggcgacgcacggcgcggcagctccggggcgacggcgcggcggcttcgaaggtggcggcgcggcggcgcgacgacggcggtgcgtggagaaggggaagagggagaggaggagggaatagagtggggtggagaagggggattgggccggggttttttataggggacaggggaagaaagagaggggaaggagggggaagggtgaaacgacggcggcgcggcggcgggcttgcggcgcgaggcgatgagatggcgcgcggcgcgacagcggcgatgggacgcgcgcggcgacgggacatcgatggcgacggcgacagcggtggcgcgcggctcggggcgggatgcgatgggcggcgacacgacggcacggcgcgacagcgacgataggacggcgcggtgcggcgcggcgcgggcttgacggtgacgggcggcgacgcggcgaagggatggctgcgcggggcttgaggcgacacggcaacgggacggcagcacgcgtggcacgggggtggcgatgtcggcgcgggctcggggcggctcggcgacgttggcgcggcggcaggcggcgatggcgacgggcgggcggcgaggcgacggcggcacgcgcggtgatggcgacggcgacggcagaggggaggcggagcggcgcacgatgcgcggggcacgagggcaacgcggcagaggaggggctagggcccaactcatcgcaccttccggattcgccggtttcgcactgcgcggcggcggcatgatccgcat

SEQ ID NO: 77775 - DNA, 1593 bp, Oryza sativa
  Clone ID: PAT_MRT4530_77642C.1
atggtgacacgctctcagagtggctccctgcggccagtcgaccgcctgacatacacggctacacaagccgccgcctctcctgtcccggccaactatcacagcgcgttggctgatcccaattggcgcgctgccatggccgacgagtacaaggagttggtcgacaatggcacttggcgtctcgtctctcgcccgcctagggccaacattgcgacgggcaaatggatcttcaagcacaagttccactctgacggctcccttgcccgctacaaggcccgctgggtggtccgtggttactcgcaacaacacggcatcgactacgacgaaacatttagcccagttgtcaagctggccacaatacgggttgttctcagcattgctgcctcccgtgcttggccgattcatcaactggacgtgaagaacgcttttcttcatggtcacctcaaggagactgtctactgtcagcaaccctctgggtttgttgatcctactgctcctgatgctgtctgtctgttgcaaaagtccctctatggcctgaagcaggctccccgtgcgtggtatcaacggttcgccacgtacattcgacagatgggatttatgccttcggcgtccgatacatctctctttgtttacaaagatggagatcgcattgcctatcttctgttgtacgtcgacgacatcatcctcaccgcttcgaccacgacactacttcagcagcttacggcccgtcttcactccgagtttgccatgacagaccttggtgacctccacttcttcctcggcatctccgtgaagcgttcccccgatggcctctttctctcgcaacgccagtacgccgtggatcttcttcaacgcgccggcatggccgagtgccactctacctcgacaccagtggacactcatgccaagctctcagccacagatggactgcctgtagccgacccttcggcgtacaggagtattgctggtgccctacagtaccttacgctgactcgaccggatttggcatatgccgttcagcaggtctgcctcttcatgcatgatccgcgagagcctcatcttgccttggtcaagcgtatcctccggtacgtgaagggtagtctctccatcggcctccacatcggctccggcccgattcaatccctgacagcatactccgatgcagattgggcgggttgtcccaattctcgtcgttctacgtccggctactgtgtttaccttggagacaatttggtttcttggtcctccaaacgccaaactactgtctcccgttccagtgctgaggcagagtaccgtgcggttgcccatgccgtcgccgagtgctgctggttgcggcaattgctccaagaacttcatgtcccgattgcttcggctactatcgtctattgtgacaatgtgagtgctgtttacatgacagccaatccagtgcatcatcgtcggacgaagcatattgagatcgacatccattttgtccgtgaaaaggtggctttgggacaatctttgcgttcgtgctcctcccgctgcgactgcgggcaggccgcagacccgcagaagagaatggggatgcaggagcagtgctttagcggctcagcgtga

SEQ ID NO: 77776 - DNA, 705 bp, Oryza sativa
  Clone ID: PAT_MRT4530_77643C.1
agagggaaagagggaggagagggagtttctcaccgaggttggccagcgcgagtggagacgacggcgaacgacgacgacgagcgacgggaggacgacggcgacgggcggacgatctccgggacatcctagggaacaaaatgggaaggattagagggagaggggtggtctacggcgggcggaaaccatggccgaaggcggcggcaatggtggtactcaccggcgcgcggggagaagcgggccccgacggtggatttggccgggcggatggcggacgcgccggctcacgggatggtgaacgcggcggcgtcgacacggcgctggagtgatggagggcacgggagagagcggcggaaagaggaaaaaggtggaggggagtgcggggaagctttattggggctcgggagtggcggacgtggccggggtgctcccgatttcgccggcgacgtgggaggtggagagagagagagggaggggggattcaaaccgaaccccgcccttgcggggcgcgcgcgagagcgggaggagcggagagggggcgacaacgtgggcgcggcacggagtggggaggagtgggcgcgggaagggcgggaaacggcggcggcgtgcgcggtttcggcggttgccggcgtgggcggctggaggaaggggaaaggactgacaggtgggccccacctgtcagcgcccgagagggagagggaggccggg

SEQ ID NO: 77777 - DNA, 1074 bp, Oryza sativa
  Clone ID: PAT_MRT4530_77644C.1
atgttgggagcggcgagacagtggccggcggcgggcgtgacgcgctcgagcgaccttcgcctcccacgccgggggaggccgaggaggcagcgcaccctggcggtggtcgatgacaagctcaacttggcggggaagggacggctagccgtcggcggctcccctccttctggatccggtggaggggagagcgttgccgccgcctcccctcccgctagatccgccggcagcggcggcggagggcgctctccagtggtgggggagagtgccgccgccgccgtcgcccctcctctgccgcgttgcaatcgcgccccgcacgccgcgtgccgccccgcctcacctctgccgtcgccgtcgccatcaccacgcgtgccgccgtcgcctcgccgcccgcccgtcgccatcgccgcctgccgccgcgccgacgtcgccgagccgccccgagcctacgccgacatcgccacccccgtgccgcgcgtgctgccgtcccgttgccgcgtcgcctcgagccccgcgcagccatcccgtcgccgcgtcgccgcccgtcgccgtcaagcccgcgccgccccgcgccgcgtcgtcctatcgtcgctgtcgcgccgtgccatcgtgtcgccgcccatcgcatcccgccccgagccgcgcgccaccgttgtcgccgtcgccatcgacgtcccgtcgccgcgcgcgtcccatcgccgctgccgtgccgcgcgccgtctcgtcgcctcgcgccccgcgccgccgtcgtttcacccttccccctccttcccctctctttcttcccctctcccctataaaaaccccggcccaatcccccttctccaccccactccattccctcctcctctccctcttccccttctccacgcgccgccgtcgtcgcgccgccgcgccgccgttgccgtgccgccgccttcgaagccgccgcgcctgcgtcgccgccttgcgccgccgtcgccatcgtcgccgccaccaccaccgccggtgcgctacggtgggacagctgttgaggtagggccgagaggcgagccctacatcggtgtcgccattgataggactgccatgagtctgtga

SEQ ID NO: 77778 - DNA, 1013 bp, Oryza sativa
  unsure (1)..(1013): unsure at all n locations
  Clone ID: PAT_MRT4530_77645C.1
gctcaccacttcacctctctctctctttcttctccctgtaacctcccaattcaaaaacaattataaaccaaacttgattaatatatatttctttatatcatctcttcgaaatgcaagatattcatgatttctccatgaacggagttggtggtgggggagaggagtgaagggaagnccgccgccgccggccgggaaagccttgggctcgtcggagagacaagtagagagcagcgtagtcgccgcacttagccatgctcgcctcgccggcgctcgccggcgcgcgcgccttcgcggcgaccgtgtccgggagcctcggcatccccattccggccatctccgcgccctcgccctcgcaggcgcggcggcgggcctctctcgtcgtcgttgcaaaggtcaaggtgtccactccccaggccgaccgcatcgcccgccatgtccgcctccgcaagaaggttagtggcaccacggagaggccaagactcagtgttttccgctcaaacaaacatttatatgctcaagtgattgacgatacaaagtcatgcactctggtttcagcttccacaatgcacaagtctctttcaaaggacttggaatactcggcagggccaacagttgaagtggcacaaaagattggtgaagtgattgccaagtcttgcttggagaaaggaattaccaaagttgtttttgaccggggtggtttcctctaccatggtcgcattaaagctctggctgatgctgctagagagaatgggcttgatttctgaaacctccaaatgtttgttcatatctccagaatcacttgttactttctttttcgcccacctgtcgaacagagtttttctttgtagtaatttgatttgctctgcaggcttggctactctttaattgtatatcaccccactatcagctcaccagttattgagtttgtctgcttcatgaagtttcttttaacaaaaaaattttcagtttaatagatcaatctgttgccatcctaaactcgagggggggccaaa

SEQ ID NO: 77779 - DNA, 174 bp, Oryza sativa
  Clone ID: PAT_MRT4530_77646C.1
gaaggacccgtgtttgaatggtcggcgccctcgcgatcggaacgcccgctttggggccgaggactggggcccgggggtgactgcccgtggggtggccctgggaagaccgtccccggttttttctgcccggacacggtgcctgccggttcactgctccgttcctgcgagatttaa

SEQ ID NO: 77780 - DNA, 2166 bp, Oryza sativa
  Clone ID: PAT_MRT4530_77647C.1
atggtcgccggcggcggccataggcacggcggagcggcggccgagagaggggaagggaagggggaaaagaggcggcggtccacggctcacccaaggtcgacggcgacgacgaaaaaggtggccggagcggaggaaggcagcggcgcggctcgggtggacggggacgacggcgctccggcggtcggcgagctcggcgaggtggtggacggggttggcggcaatgcggtgaagccggaggaggcgacgccgaggcgggagacggtcccggcgagcggagaaggctggccagaggtcatcggcgatggaggagagagagggcgagggcgcgagctcgattctggtggggagacggtaacccttgacggcagcgatgaaaccaacctcttcaagacatctccaactgagaagaacttcaactctggtgtgggggaaaagagcaagactgagtactacccactgtactcagcaagtcataccggaagaggagggctgacgtcagcagggggggaggcgccggcatgcgggccccatgagtcagcggctcaagagagagagagggaggggcgccggcacatgggccccactagcagtggcacaaggcgggaggggcgcggctggtggctcggctcggcttcaaagccggcaggacaagcatggcgagcgacggcggcacgcgcggtcgccggcgacggcaaccggcggcacggacggcgacggcagacggcgcgaaaagcggcggcggcggccgaagacgacggtgcgcgcgcggaggacggcggtgcacacgggagagagggaaagagggaggagggggaggaacaaaatgggaaggattagagggagaggggtggtctacggtgggcggaaaccatggccgaaggcggcggcaatggtggtactcaccggcacgcggggagaagcgggccccgacggtggatttggccgggcggatggcggacgcgacggctcacgggatggtgaacgcggcggcgtcgaagtggcgcgggagtgatggagggcacgggagagagcggcggaaagaggaaaaaggtggaggggagtgcggggaagctttattggggctcgggagagacggacgtggcagccctagcccctcctctgccgcgttgccctcgcgccccgcgcgccgcgcgccgctccgcctcccctctgccgtcgccgtcgccatcaccgcgcgtgccgccgtcgcctcgccgcccgcccgtcgccatcgccgcctgccgccgcgccgacgtcaccgagtcgccccgagcccgcgccgacatcgccacccccgtgccacgcgtgctgtcgtcccgttgccgcgtcgcctcgagccccgcgccgccgtcccttcgccgcgtcgccgcccgtcgccgtcaagcccgcgccgcgccatgccgcgccgtcctatcgttgctgtcgcgccgtgccgtcgtgtcgccgcccatcgcatcccgccccgagccgcgcgccaccgctgtcgccgtcgccatcgacgtcccgtcgccgcgcgcgtcccatcgccgctgccgcgccgcgcgcagtctcgtcgcctcgcgccgcgagcccgccgcctcgcgccccgcgccgccgcgccgccgtcgtttcacccctccccctccttcccctctcccctataaagaccccggcccaatcccccccttctccaccccactccattccctcctcttctccctcttccccttctccacgcgccgccgtcgtcgcgccgccgcgccgccgttgtcgtgccgccgcgccgccaccttcgaagccgtcgccccggagccgccgcgccgtgcgtcgccgccttgcgccgccttcgccgtcgtcgccgccaccgccgccgccgtcgcggagtgcggccggggtgctcctgatttcgccggcgacgtgggaggtggagagagagtgggaggggattcaaaacttgaatccaccccttgtgggctcgcggcgcgggtgggaaggcgagggcgtgggcggcgtcgtggcgacgtgggcacggggcgcggagtgggcgcgggagcagcgggatacgcggcggcgtgggtggtggtttcggcggtggttggcgcgggcgtgggcggccggaggttagggaaagggctgacaggtgggccccacctgtcagcgcccgagagggagagggaggccgggtga

SEQ ID NO: 77781 - DNA, 640 bp, Oryza sativa
  Clone ID: PAT_MRT4530_77648C.1
ttttttttttttttttttttaaaagcaaccatgagttgtttccctttggcctccattgattcatcaataaataatgttacatgtaatattctccgtgtgttatatggtggctatagtttagtggtagaattcttaccagccacaaattaacgaactttgtacatttttctcacaaattaggagaaaagcaggagtaaaacagagccacgatcaaaaccaggagtaacccggagctcgttgttatggcttctttccctggatctttttaaggtatttcctgtgaagtttcaatgcaacagcgcaagcctttttcgcatccaaattcccattaacatcattcaaaatcctaataacatcatcaatccctcgagcttcctgcaggagcttcgcactgttctccttcagaacactagcaaccaggaaaacagaaatcggaacaggaccatcgttgtcactagtagccccattcttcatattgtctctctcgtacttgccaaattggcgaattgattttactttttgcctatgtcctggagttacaccagttgcagcatcaatatgttcatatgtggagaagatgtcaggatcatattctagagcccacatcatccctcgtgccgaatctgcagcccggggatcc

SEQ ID NO: 77782 - DNA, 258 bp, Oryza sativa
  Clone ID: PAT_MRT4530_77649C.1
atgcccctcgggccctcgcgctgccctgccccgaggacctcgcccgactgccatgtggcagggggagcgagcggggaggggacccaggctgaaccgctatcaatgcgcgcggcgccccaactgcccctcaccgcatttaatgcgcggagtggagggctgtcccccgtgttaggaagggggcggcgctgggtcccactcaaggacgggccgctgcttagcttccgggtgaaggcacagatcgtggcccggtcaaggtaa

SEQ ID NO: 77783 - DNA, 6282 bp, Oryza sativa
  Clone ID: PAT_MRT4530_7764C.1
atggaatctacagacgggaagaatcctactcgggcagaattgggtcgttgacgtatcgtatagggtctgatatctccgagttctacgtggagacctccagatctgcgatataaaagggaccccccggggagggtttaagggattgaatctcagagccaacacaacctacacagcctacgagatccttgtaccaacgtactccaataccctctatatccggtctacgggtatcacccgtcgacagtggcgcgccaggtagggagccttggtactcaaggttctactactacgtcatccagcttcgtcgacaacaacgtcagcaccagcctcagccaagtactccctgcttcaacaatgctggtatggactcaagtcggcgaaatcgtcttcccggtttacaccacgacgctgatctcaaccggtcctccaaggactggagacgagaacgcagtggctacaaaccaaggcgattccatgtcgaaaaatcctcccgttgagacggagaacggaacatcgacgacatccaagctcgggaaggattttgatacggccaaaccttgtccttccgacatgaaccatgagccgacaaagatgacttccgaagccacaaggtcttggtgtcctatccacaaaaccaagaaacacactctgcaagattgctgggttttcctcaacgtccgtgctgaaattcgcgcctacaaagaacgtggaattcggcgtacttctccaactcgggaggtctattgtcctattcacaagacaaagaatcacgacctctcgagctgcaaagtctttctcggcgccatgaaagctccgtctcctaagttatatgtccccatcagggataacggcaaggaacaaggagcgactccaacttcagatcgattcgttggggtaatcgatcctcacgaaccatcggtcttacatctcctcgaggactatgggtcatcgacaacgagcgcgccgcgggaggtattggctatcgatgacgttggcacgtcagtgcacgccaacgcagaagcggggaatcaatcgactactccagcccagcacatcagggccgttcaagcgatactgagggaaactccttacgatcccgttctgaacgatgacctcgatcgttggacagaacgactacgggaatcggtgactaacctcagcaatacgtttgaagaagccgctaccgcagcacacaaggagcagccaccaactggcgatgccaatggtgaagatccggaacggagggaatcacctcaacgagctacccctccacctcgcggcactagcgatcttcgagatcaaatcaacggccgccgagaagcacgacgcacacgagacaacgtgaatcgctctcggcgtcatgtctcttcacagcgccatgataacggaaatcgaggagaccgctcaaacgaggaccgggaccacgacaaccaccacgatcacaatgatcgcgaacgatgggtgccagacaatactggtcatggctgccgccgtaacgacgacgacgatggagatcggtgccgagacaacagcggaagacgacgacaggattcccgagatccaggccgtcatcctcgtaatcgtacgccggaaccaagcgacccatcgtcatcgtcatcatccgcgtcctcctcatcgtcagacagacatccacgaaggacacacgaccgccgacaacccaccgcccccaacgctgggtgtagggctttcggtcgttccctacgtgatgtccgatggcctgagagattccgacccggagcaatagaaaagtatgatgggagcaccgacccagaggagttccttcaagtctactccacagtactctatgctgccggagcagacgacaacgcgttagcgaactatttaccaaccgcgttgaagggttctgcacgttcatggctgatgcatcttcctccctactcaatctcttcgtgggcagacctgtggcaacaattcatcgccaatttccaaggaacatacaagcgccacgcgatcgaagacgacctacacgtgttgacacagaactcgggtgaatcattgagggaatatgttcgacgcttcaacgagtgcagaaacacaattcctgaaatcaccgacgcttctgtaattcacgccttcaaatccggtgtcagagatcgctacactacccaagagttggcgataagacgcatcacaaccactcggagatgattcgagatcattgagcgatgcgcccacgctgatgatgcgctaagacgcaagaacgataagccgaagaccgggggagagaagaaaccagccacggacacatctgagtcaagcaagaagaaaaatcgcaaaaatgggaaaaggaaagctcaagcggaagtcctcgcagcagaatacgcgaaccctcccaaaagcccagacccacaaagcagcgacacaaagaaatcatggtgccccatacacaagacggacaaacattctctggaagattgccttgttttcaaaaagtcgctcgagaagcacatggcatttgaaaaaggcaagcgagtacgcattgtcgagaagaacgaagagacggctcctcacgaatcggattcagcatattcagactctgacctgcacgtctcacacatcttcggcggttccacaacgacgatatccgatcgtgatcgaacccactattcggaacatcaaggtagcgcgagttctcattgacggtggcagctcaatcaatcttcttttcgccagcactttggacgcgatgggaattccgcaaagcgagttgacaccaactgatcaacccttccatggaattactccccaatcatcgtccagacctttgggcaagattacgttgcccgtgactttcggccaagccaacaacttccgaacagaacagatcacctttgatgttgctgaattcgatacagcttacaacgccatcatcgggagaactgcacttgcgaagttcatggccgcatctcactacgcatattaagtgcttaagatgccgagaccgaagggaacattcactattcaggggaacgcaaagctggcggtgcaatgcgacaagcggagcctcgacatggtcgagcaaacgcctagcccacccgccacgactgagccacccaggaaaatgaccaagacaaacaagacgccgaaaccagacggcgccatcaagatcgttccactctccagtgccaaccccgacaagaccgaactcgcgctcatcaccttcctccgcgacaatgccgacgtgttcgcttggcagccgtccgacatgccgggggtccccagggaggtgattgagcacaaactcatggtgcaacccgatgccaagccagtaaagcaaagactgcggagatttgcaccagaccgaaaacaagccatacgagaagagctcgacaaacttctcaaagctggtttcatcagagaagtacttcatccagagtggctagccaatccagtcatggtgcggaaggccaacggaaaatggagaatgtgcgttgacttcaccgacctcaacaaggcgtgccccaaggatcactttccactccctcgaatagaccaactggtggattcaacagtcggttgcgagctattgagcttcctcgacgcttactctggctaccaccaaatcagcatggcaaaagaggacgaagagaagacagcattcatcacgccgttcggggtattttgctttgttaagatgccgttcggactgataaccgctgggaatactttccagcgcacggtccaaggcgcacttagcaaccagcttggcaataatgtcgaggcttacgtcgacgacatcgttgtcaaaaccaagacaggcgactcattgattgacgatctgcgggaaacgttcgacaacctccgacgatatcgcctcatgctcaatcctgagaagtgcacgttcggagtaccgtcgggcaagctgctcggattccttgtctctggcagaggaatagaagcagacctcgagaagatcaaggcaatcgagaacatgaagtcgcctacaagactcaaggaggtacaaaagctaaccggatgcatggcaacactaagcagattcgttgctaggatgggaaaacgaggacaacctttcttcgctctgttgaagaaacaagacaaatttgtatggacacaggaagccgaagaggcattcattgcactcaagcgctacctatcaaacccccctgtacttgttgctccccaacctaatgaagaattattcctctatattgccgccacgccatattccgttagcactgtcattgttgtcgagagagagagagaaagtacatcgaccagtttattacgtcagcgaagctctccacgacgcaaagacaagatacccatagatccaaaagctgctttacgcagtcatcatgacatcaaggaagctacgccactactttcaagcccacagagtcacagttgtctcctctttccctcttggcgaagttgtgacaaacaaagacgttgtcggccgcattgcgaaatgggtagtcgagctgagccagtttgatgtccactttgtgccacgaacagccatcaagtcccaggtactcgccgacttcattgccgattggactatgccagataacaaatcagacaaccaaggcgacaatgaaacatggacaatggcgttcaatggcgcactcaacagccaaggagcacgggcaggatttatcttgacgtctccctccggagatcaattcaagcacgcaatccacctcaacttcagggcgaccaataacactgcagaatacgaaggactactcgccgggatacgagctgcagctacacttgaggccaagcgactaatcgtcaaaggggactccgagctagtcacgaaccaggtgcacaaagattataaatgctctaactccgagttatccaagtatctcgcagaagtcaggaagctagagaaaaggttcgatgggatcgaggtccgacatgtctaccgcaaggacaacgtcgagccagatgacctagcacgacgtgtttccagacgagaatcgctcgagcccggcacttttctcgacatcctgatgaagccatcggtgaaagaggttagcggcgaagtcagcccgaacacccccgacattagctcggaggtcaccgaggcagaacgcgccattgccgacatcgaaaccacagacgactggcgcatcccactaatcaaattcatcagcagtgaggagttgcccgaggacgatccagaggccgagaaaataacccgtaaagcaaagatctactgtatggtcgacaatgatctatataagaaagtgccaaacggggtacttctcaaatgcgtctcgaccgacgacggcagacacctcctcctcgacatacatgaaggcatatgtgggtcacacgccgccggtcggacattggtcggcaaagcttttcgacaaggctttttctggccaaccgcccttaaagattcatgcgacatgtaaacacacaaagctacccgcgcaagcgctccagactattcctctgacttggccattctcgtgctgggggctagatatacttgggccattcccacgaggacagggcggctacagattcctattcgtggcgatcgacaaattcaccaaatggatcgaagcaatacccacgggggaaatcaaggccgacaacgcaatcaaattcatcaaagggatattttgcagatacggactaccacaccacatcataactgataacggctcccagttcatcagcgccgatttccaggactactgcatcgggctgggggtcaaaatatgcttcgcctcggtctctcaccctcaaagcaacggacaagtcgagaggggaaacgacatagtactacaagggatgaaaaccctactgtgagccgtacgcaccacaccgacaacgtctaataaggaaacacccttcttcctcgtgtacggctctgaggccatgctcccaggcgagctacaacatcagagtacacgagtacagaagtactccgacgagaaccaggaggagcagcgagatatcgatgtaaatcttctcgaggagcatcgtgaacgagttgccgtccgagcagccagctatcaacagatcctccgccgttatcacgagaagcgcatccgtgcacgcatactttcgatcggcgactatgtcctccgacgagttcaaagccaagcagggcgaaacaaactctcacctaaatgggaaggaccttacacgatcacacaagtcttgcggccaggcgcattcaaaatcgcagacggcgacggtcgcgaattagcaaattcttggaacattgaccaactacgtaaattctatgta

SEQ ID NO: 77784 - DNA, 453 bp, Oryza sativa
  Clone ID: PAT_MRT4530_77650C.1
atggccgacagcgcggggcgtgatcgctccggcctcgggccggggaagagaaaggagagggtgcgcccggagtccacgggtggctatgtcggttcgggaaccgacctcggagcagtgctggggcgagggagcttcgaggagaagggctcacgggcgcggggtcaaacggcatgggcgacggctggcgcggcgcggctgctcctctgcgtccaggcgctggaatcgagcgagggaacggagggagggcgaggcgtcggtccgagagaggaaggcgggaaacgggaggggagaaatgaggtgcgcaccatgccaatttggggagggagagggatgggagcgggagctctgtctccgggttttggacggacgagggcggcgcggctcgggcacgcgcgctggctcgcgggtccgagcggcagcgcggccactggtgcggcagagccgcagggctag

SEQ ID NO: 77785 - DNA, 206 bp, Oryza sativa
  unsure (1)..(206): unsure at all n locations
  Clone ID: PAT_MRT4530_77651C.1
tgaagccgattacttnccttgtcanattgcanaaaannggtttntcanaatagaannggatntctaactactaaccccttcatcagcctgttcagcgatgaaaatgtacagccncatacatcatacaacatacattgagagagcatcaggatncctnaaaancaaaaaaaaaaaaaaaaaaaaaaaaaaaaaaaaaaaaaaaaaaa

SEQ ID NO: 77786 - DNA, 654 bp, Oryza sativa
  Clone ID: PAT_MRT4530_77652C.1
atgtcatattgtgataataatgctgaaatttcttacattaatgaagacggggataggcgtttgcttgctaagccaatcaagtacttttatgagatgcaagagcttttctcaggcagtaatgccaatggctctcttgccatagaccagcaaacatgctacaacattgatagaaaatttgatagcagtgaccatgaaggcttgaatgatatgtccacctatgcacatcctatcaacattgctaaagaagactctgacacgttaccgtcgccaacttgtcctgataatttttctccaggaacatctcgagttagtaaaaagagaccaagagatgtaaagtccccaagtaaaaggcagccaaagcctaagagtcgtttcacagatgtcactgagaaaattggcaatacaatggaccgtttggtgaaccagcttgctagtcctcctccacccccaatgccacaacttcgtgacccttatgctacaatgtggaagaggatggatgcattacccattggttccaaagataaggttgttgttggaaattatttgggacgccaggagaaagagggggtgcgaggatttcttgctgcttcttgtgacacaactttggagacaggtgtaccatttcatgtgcgaccgagatggtgtgtaggttaa

SEQ ID NO: 77787 - DNA, 361 bp, Oryza sativa
  Clone ID: PAT_MRT4530_77653C.1
ccataagaaatacgtacatcactagacagtatccatgaagagctgagtgaaatctggtcttgaagaaagaggatgtgcacacttgatgcgctcaagggaggatcatgcaaagagcgttgatgttgcagatcttggagtaggcttacagctacaatcgccagacattcctaaagataaacacgctgattctactttagcagacacgctgaagaactattttgcaagctgcgagctttcgatggcatgttcctacattgccatgtcagatgatgacgaattgccagaagcaatgctatcttggtcttgctgagaattgcaacaatgatattaggagattatcatatctcctacacaggcacct

SEQ ID NO: 77788 - DNA, 1931 bp, Oryza sativa
  unsure (1)..(1931): unsure at all n locations
  Clone ID: PAT_MRT4530_77654C.1
atgattaggtgacactatagaagagctatgacgtcgcatgcaccgcgtactagcttggatctctagagcggcgctgagattccgtcgacgccattgcttgcttgtgcttccattccattccattccacacacgagtgaacgagcggggaaggttctagaaggttcagttagagttttctggtctgccatggcgtccactgtgacgacgccgagccggccggtatccgccgggtgccaccggcgctcgccgcggcggtcagcgcccgtcgtgctctccctcggcggcgggccgcggcggcgcacgccgtcgtccaccagctgctcggcgctcgcgtcgccggcgaagcagggcacggccaagctccctccgccgcagccgacggcgtcgaggaccgcggcggccgacgcggagcgggagcgggagcggacggactacaacgaggtggccgccgcgctggagagcatctacaagctgagccccgccgtggtcgaggagaaggacgccgacgaggaggacgagaagagcaaacagaccaagcggaagagaaaaggcagagtggggaggagccggaacgcgacggtgaccggtgaggagcagccggagaaggaggcggggacagaggatggacctggggaagagggtggagatgaggaggagggaggaagaagaggccggcggcggcgccggcaaggtggaagacgaggagcgggggttcgaggagatgctgctccgggagcacgccgtgtccaccgacatgggcagcctcgactggaagcggatgaagatccctcccgtgctcacctccgcccagagcatccgcctcttcaggatcatgcagcccatgaaggcgatcatggaaatgaaggagaacctggagaacgaagtgcagagcgagccaaacgacgcacagctcgccgaggccatgaacatgtccgttcttcagatgaggcgccatctcgaggtcggccgagctgccaggaacaagctcatcaagcataatctccggctggtgctgtacacgatcaacaagtactacccggacatgtccaacgacgagaggttcgacgacatctgccaggcgggcgccaacggcttgatcacggcgatcgaccggttcgagcccaagcgcggcttccgcatctccacctacgccctcttctggatccgccactccatcgtccgcgccatcaccctctccaacttcacccgcttccccttcgccatggaatccgagaggcaggagatccacagggctcgggaggagctggcgttcgagctggggagggcgccgacggaggaggaggtgatgaaaaaggtggggctgtctccggcgaggtaccgcgacgtggtgcggatgacgaggcccacctactccctccacgcgcgtaacagggtcacccaggaggagctcatcaacgaggtcaccgacgacgacgccatcggcgtcgacaccagcagccacaacaccctcaaccgcttcgcaatcgacgacctcctggattcgctgaagcccaaggagagcgtggtgatccggcagaggttcgggctggacgggagggggaagcggacgctgagcgagatcgccggaaacctcaacatctcgagggagatggtgcgcaagtacgagctcaaggcgctcatgaagctcaagcaccccacgcgagtggaatacctgcgcagatacatgtgaaaaccaccatgcaatcgtctcgtctctctgctgtgcataaaacatgtagtacaagcatgtattcctagcaatcttactaattccccaaacctgcatagcattagcaaataccaacaaccacaggtattcattttactctgcatattctcggtatataatttcggcaggatcccctctgcatgccagattacagataccaaataccactgagatgatttccgngttaaaaaaaaaaaaaaa

SEQ ID NO: 77789 - DNA, 735 bp, Oryza sativa
  unsure (1)..(735): unsure at all n locations
  Clone ID: PAT_MRT4530_77655C.1
ccttgtgcacccccttaccagactaatagtacccagattagtttataagcccaggtcagtgggtaagtagcgtgtacgtaccgcgtaggtgtgtgtgtttctgtaagtagttgtgggctggtcccgtagatgtagttagtcgtagtaagttgtacgtgtgttagtgtctgtaagtaccttagaagtatattacatgcgtaaagtcagtcagtntcttcagaagttagtttttttagtaggtagtttgtcagtccacaagttaggggtcagtcaggggtcgtccacgtgtagtcgtaaccagtagtagtgtaaagtcacgtgtcgtgtagttcgtcaaagtcagtgtgtcagataagtagtgtgtcaagtgtcaaagtcaggttgtcagtcagtgtgtcgtcgtagttagtcgtaaccagtagtagtcccgcagcaaagcgcggagcatttagagaatgagcaagaccaaatgctcctgaagaaatatgtcaaactatcagttttgtcgcatattttagtcaaattttcatcgcatattttataggaataaagtgaaacaaacagtgtcaaaaaaaaaaaaaaagaaactagatcaaatgagtaagggcatgaatgatattttttcctaattagttaacatcctttaggctgaattcttatctccacttttcccaactcanctcccccgttttccacgcgtacgattttcaaactactaaacggtactttttttac

SEQ ID NO: 77790 - DNA, 132 bp, Oryza sativa
  Clone ID: PAT_MRT4530_77656C.1
gatctgtggatgagaaaaatattgtacagtgaatgacttattcgaacacaaggcggggaactttcaagagacaaggtgacacaaagctaaggagccaaatacatacctactaaacatgtgaacaagggaaca

SEQ ID NO: 77791 - DNA, 491 bp, Oryza sativa
  Clone ID: PAT_MRT4530_77657C.1
cacgagggacgactgtccctcgccctctccctcaccccgtcggctcgacggccgtccctccctgtcggcctctttgtttctatcggcgacggcaccctctccaccctcaagatccagcggcgttgacggcaacgacgccggcggcttcctgcggcggatccaacggcgacgtagacatcgccgatccggcttcaccgacggcgccggcagcttcccgtggatggattcgattttattttttaccgcgtcacatgtaatcagattcgattttatttctcccgatttttttcacctttttttcacggacggatgacggaaacctttctaattttctaagtaggagagatagagatagagataaattttattatcaaccctgtctaaaggaacacgacgatgcaaaacaagagtatgaaaagaatgttctagactcttccactgaggaatctgaaaattctgaaaatcccagatacccagtatcccacattccc

SEQ ID NO: 77792 - DNA, 699 bp, Oryza sativa
  Clone ID: PAT_MRT4530_77658C.1
atgccgaagaagatgggagtcaacaccaaggcggaggcggcgcgcgagcgacgaagcgccgccgaggcggatcgccgcgaccgcgacgctcgcgccaaggaggaggcctactggcaggcggccgagggccccaagtcgcgctccgcgcgccgccgcgaggaggacgccgagaagcgcgccgaggcggccgcacgccgcgcggagaaccgccgcctcgccgagctcgagcagcagcagctcgccgccgccgcgcggcgccccgaccgcaaggccgcacgcgtcggcggccccgtcgtccccaaggtcaccgaggccgagctgctgcgacgccgggaggaggagcggatccgcctcgagcgcgaggctgaggccgccaagaagcgacaggcccgcaccgccgaagaggaggagtacgagcgcgtcgtgctcgtcgccaacaccaacagagacgactccatcatcgaggcacggtcagtggaggacgccatcgtcaagatgtccatcgctgccgagcctgcgctaccaccggatcgccaccccgagcgccgcctcaaggtctcgtacaaggcttttgaagaagcagagctagccaaactcaaggaggaaaagcctgggctgactctgcatcagtacaaagatatgatatggaagttgtggaagaaatctccagacaaccctctcaatcaggttcaaccttaa

SEQ ID NO: 77793 - DNA, 399 bp, Oryza sativa
  Clone ID: PAT_MRT4530_77659C.1
atggcggcggcgccggatttggccgccggtttcttccttctcctccctccctcttctcgcatgatcgacgtaccaccggcagcggtggatgccctcccatccccatgccgcgacggtgaggggccaccggcggcggggaggaggagttctcgacgcaagctcgggagaggcgaaccctccgccggcgggcctggggaaggtagacccgacaccgatgtgctagggagaggtgtatccagacatgccacgcgattccctaggtggctaggtggggcgatggtgctcagtggtggggtgtgttggtggtggtcgatgagcgccagtgttggtgggcctcagcaattgcatgacgacaacgtccgctatggcggttgcgatggagggtgccggatatggtga

SEQ ID NO: 77794 - DNA, 1410 bp, Oryza sativa
  Clone ID: PAT_MRT4530_7765C.1
atgaacgacgccgtgcccggccaccgccaccaccacccgcttagcgtcttcctccgggacgccaggttggcgttcaggtgggacgagctcgggagggagatcatggggattgcggtgcccggcgcgctcgccctcatggctgacccggtcgcctcgctcgtcgacaccgccttcattggccacataggcccagttgaacttgcagctgttggtgtatctattgccgtgtttaatcaagtatcaaggattgcaatatttccccttgtcagtgtcacgacatcatttgttgcggaggaagatgctacatccagtgacagagaaaaatatgaaataaatggcgagaatgaattcaatgtttcagacagtgaaatggaagagctggtttctcatgaagaggctagtgctgctcccagtaagtcgtctttcgaaactgactcaagtgatgtcaaaattgaacataagcggaaaaacattccatcggtgtctacagcattactacttggtggggtgctcggccttttacaagcactgcttcttgttatttgcgcaaaacctctcttaggctacatgggtgtgaaacagggctctgcaatgttgatgccagcactaaagtacttggtagtcagatctcttggtgctcctgctgtgcttttatctctggcaatgcaaggggtatttcgtggacttaaagatacaaagacacctctttatgcaactgtggctggagatgcaaccaacatagttttggatccaatatttatgtttgtcttccagtatggtgtcagtggtgcagcaattgctcatgttatatcacaatatttcattgcatccattctcttatggaggttaaggctacatgttgacctacttccacccagctttaaacatatgcagttcagtcgattccttaaaaacggtttcctattacttgccagagttattgctgcaacatgctgcgtgacactatctgcatcaatggctgcacggctaggttcagttccaatggctgcatttcagatttgcttgcagatctggctggcttcgtctcttcttgctgatggattggcttttgcaggacaggctatacttgcaagtgcatttgctcgtcaagaccattctaaggccgcagccacagcttctcgtatattgcagctgggattggttttaggacttctcctaagcatttttcttggcattggcctccgtttaggatcaaggttatttactgatgaccaggatgttctacatcatatttacctaggcataccgattcttgtggcaattgtcagcatcatcttcatagtcacactagcaagttacaatggttttgtcggaatttggatagctttgacagtctacatgagcctccgaatgcttgcaggattcttaaggatcaacaccaccctgtga

SEQ ID NO: 77795 - DNA, 171 bp, Oryza sativa
  Clone ID: PAT_MRT4530_77660C.1
atggagaagaccgatcttaagggtggcggccttgatgaccttctttctttactttgcaacttcaagagacaacagcaatttgattctaccaaaatttcatatgttctgctcaccgccggtgattcttgctcaatgtgcgacggccgttccaagtcctcatcgctgcactag

SEQ ID NO: 77796 - DNA, 278 bp, Oryza sativa
  Clone ID: PAT_MRT4530_77661C.1
atggccatggcgtcgaaggaggaggtggccgcggagactgtggagggcggagcggtcttcctcatccccctgctctgggacccctcgtccgatgccactcgtgtactccaatgacactcggctacgtgggcgctacaaccgtcgaggtgatctatataaactaggggatcgcatgatggaggctgctacatagagcagcagtcacgcgggatacagggacagagaaccacatcggccatcggcaaccatgtcgcaccgtcgacaagctccaatcatcc

SEQ ID NO: 77797 - DNA, 413 bp, Oryza sativa
  Clone ID: PAT_MRT4530_77662C.1
gacaagttagacatcgacattagatattagcctagacaaacccaatcagttgcttgcggaggccgataacaaggatctagggctatttctgatctcaatgagttcatattcgagtagtaagactaccctctcgtcgactacgtgttggtgaataaagagcaataccggcttcagccaataggagtagagctattacctatcagataaggggcccgaacttgtataaaaatccttgtctccatctcttttaccacaatctcgcatataccctggtaccaacgatctccataccatgcaaataccatagtcgtaacctcaaacgtcgacacctctctttttttccaacatcctcagcgggcggtggccgaggccagcgtggcgccaggcggcggcggccgaggcccacgccaggg

SEQ ID NO: 77798 - DNA, 936 bp, Oryza sativa
  Clone ID: PAT_MRT4530_77663C.1
ccaattggccatcagttttatttttttttttttggaatattgccataactcaacaatagcaaaaattgtgatagaactaatatgagctccatagatctgtaatagaactaacaaaagatctatggaggacataataacacaaagggtccatttatttttttattcagtaacatcgaaagaagttttcattcagaaaaatggtgcacgacgaggaattcccttccgtcggtgacgaacaacccttgttgatgatagtatttccttattcttgctagcatcactacatatttcatcctcatttccagtatttgcaatagtaccgttgttgccacaaatctctatgccctttccagtaccattggtgtttgcagtaccattgctgccatcaatctctatgtctttatcattgtgggcaataccatcgttagctacaactgtctccacatcattttttatgcctatgagattgcaaccaagtgagcagaagcggaatgcatcaagaagaacacggctacaagtctcacaattataagaggacaatgaggatggcgatgattttattgccaaaacaccacaaccacgtagctgaggtcgctcattcaaaaacacaacccttgcactgttgattacataggtttgtacatcgctgatatcaaggatatcctctaactcagatacttttaccacgtcgtggtatgatgatcgcctaatctggattacacgatgagaagaatgatgacatgaacgacagtaatagcaaaaggcagcttctggtgcttggcaatcgatgcaaaacaggttgcattcattgcgaggggagttgtgatggctagtgcaggtgttaaaaaactgtgtggaaagcaagagctctaaccatggaggcacaaattctcccttcatggtgaacacaagaggattcttaggcctcccggccgg

SEQ ID NO: 77799 - DNA, 276 bp, Oryza sativa
  Clone ID: PAT_MRT4530_77664C.1
ccccactcgatgcccctctgctctgatctgccgtggctgaacagggatgggtaaatgctgcttgccctgctttttttaggagctatagattagataccagctacatctgcaggccagatcgaaggtggctgtggatcgctgcgttgatgaatttaatgagcttcttgccacgcacccaaacctcgccattttaatgcgcatttgctataatcagggggatcctgttcaggcgcactgggcatagcgcccaccagtctgtctctgccttaatgcttg

SEQ ID NO: 77800 - DNA, 333 bp, Oryza sativa
  Clone ID: PAT_MRT4530_77665C.1
atggtggtcatgattttcacgctcccagtgccatcagttgagctcatctctgaggagctggtcgacggtttccattttgacgtcaccttagggatgaagcggtatgtcctttgttgcctgccaccgagtggtttttcgcagagggacgcccagacagctcttggaagacgtcgtggtcatcatggctttgtctttgttgagggtcggagtcacctggtggtcgggtatggcttcaagtacaaggtccaacagcatgactatcgcaacaacattgtgccgtggggcgacgaacattacgatcttctacctccttacgaagggtggtcggactag

SEQ ID NO: 77801 - DNA, 1153 bp, Oryza sativa
  Clone ID: PAT_MRT4530_77666C.1
atggcgacctccgcgaccgcaggggcagcagcagcagtggcctccccggcggtggccccgcgcggcgccgccgtcgcggcggtggcgcggcgagggttcgtctcgttcggcgcggaatgcttgcggcgcgcgctcgcgcgcggtgcggtccggcggcttctccggcgtgcagacccatgttgcagctgttgagcaagcacttgtgcaagatgctacaaagttggaagctccagttgttattgtgaccggtgcctccagggggattggaaaggcgactgcattggctcttggaaaagctgggtgcaaggtcctggtgaactatgcccgatcctcaaaagaggctgaagaagtctccaaagagatcgaagcatgtggtggtcaggctattaccttcgggggagatgtttcaaaagaagccgatgtggattctatgatgaaagcagctcttgataaatggggaacaattgatgtgctggtaaacaatgcaggaattacccgagacacattattaatgaggatgaagaaatcacaatggcaagacgtaattgacctgaatcttactggtgttttcctctgtacacaagctgctacaaaaataatgatgaagaagaaaaagggaaaaatcatcaacatagcatcagttgttggtcttgttggtaatattggccaagctaattacagtgctgccaaggctggggttattggtttgacgaaaacagtagctagggaatatgcaagcagaaatatcaatgtgaatgcaattgcacctggtttcattgcatctgacatgactgctgaacttggagaggatcttgagaagaaaatcttgtcaaccatcccattagggagatatggcaaaccagaggaggttgctggcttggttgagtttttggctctcaatcctgcggccaactacatcacgggacaggttcttaccatcgatggagggatggtgatgtaggtcgtaacgcttgacagagaaaggattgttttacataatgtttgcaaatgattttggactacagagttaggtctttcgtcccttgatttgtaaacaccagtgaataaaattaggtgttggaagttcagatacgtgtttgaaggatgttctgatgtgccaatttctgtagcgaaatcagtaagatttcttcct

SEQ ID NO: 77802 - DNA, 386 bp, Oryza sativa
  Clone ID: PAT_MRT4530_77667C.1
ccggccgggctcgtgctctctttgaggtgggttggcttctcctccccctctttaccttttcctcctcggttcggttccgtggttcgtctagggtttagtgggttgagatggcggcgccggatgtcgagtaccgctgcttcggcggacagctcggctgggccaccgacgaccgttacctagaagtagtattgtccggcgggggggagatgctactcaggaagaccagacgcgagcgcgtatcgtgcgagtacggacgctaacaagccactgccgaggcgtgagaagtatggttggactgccttttgcggaccagttgggcctagtagccaggctgtaggtggtaagtgcctcctggtgacaaacacggtgacgtgggcccacatcac

SEQ ID NO: 77803 - DNA, 1137 bp, Oryza sativa
  Clone ID: PAT_MRT4530_77668C.1
atggctcgtcggcgaatcgccgcccatggtgaaagcgcggcgaccggttaccggcgcagtgccagccgagtgctggggttgccgaggtccaagcggcggcagaaggcgggcggcgcttgggattgggaaggaagcgggccgtcgcggcaactagggcttccgcggctaggagcgcagtgcagcgcgttcctttatccggtctgtgaccagtcacagaccggtcagatcacggggaattgctctgcagatctaggatctgaagttgtgaacatgaagagagttctgatgccttttggagtaaatgcttttgatcagctgtacaagtcgtcgtcttctcccaccaattcaattgcctggaagctcagcctccagttgccgccgtcagctgtcctgccgccgctgccatcaacaatcctcctcctcctccggctgcaccatcccatgacagtgatcgtgctccacggggtattccacacacgcctactattgacccgattcacaaccctcctgatcctcgacatcctcccccaggtcccccaggtcccccatgacaatcccaaccccgcctctgcgcggttgggacagagaataaagacgtagccggcgtcgtcgaccaggggcggaaacaattatggggcagtaggccttcagccttatgcagcggcggatccagaaaatagagtcattgaggtcactactcaaatatagtgatgtcaatacatataattcttgtttctagagtgtattagcaaagagattagcgagaagttattggtgtcagctgaaatcaatgcttacactatggatccgccactgaccttatgcctggttccataatccttaattgctcgttataatcttaaaaataccatgtaatttatggaaatatttaaactcctatcagttcagcacttgatgtgaagattttctagctccgtcactgatgaagacaaacggtgaccttccacttcccacgtcgcgtctggtagaaaccgtggaagagggatatggaagcgccggcctatccacttcgtccaagatgaggaaactcccgtgatttatatgccatatatgtaaacttggtccgatttatatatatgtggacagtaatgttattaaaaaaaaaaaaaaaaaaaa

SEQ ID NO: 77804 - DNA, 2270 bp, Oryza sativa
  Clone ID: PAT_MRT4530_77669C.1
ggaatcataacttcttttcctgtactcagcagtgtagcaatgctagtcaataaagctaatttcacctttgaacgggaatggggaagcaatggagtagagaattacaggagaaggtggcagctgaggagagaatcaggagctgtcacaaagctatatacaagttgggaagctgaacgagaagagagcatatgcttccctcctacaggaagcattatgacttgttggtgctgttttacaaatctgggtgattatcggaagatcgtcatgcggtagcagctgcagcttcttctgcgacttgggatccctgtagtatccgtatgtatcaatgctgtgatttcctgttcctcttgtactgtatatgtatagaaatgtacatgaatgtttgttagtacagactacagctttgagtcagcttgcagagctacaaccactgatcatcatcatcttcttgcttggtcttgttcttcttctttcaggacggtgaagtggaactcgatctgcagccggcggtgcggcgcgtcggcgcagcccttcctctccatctccagctcctccctcagcgggatggccgccaagaacctcttgatgaactccctgcagcactccttcccggtgacgatcacctcctcctccggcgacggcgacgacggcggcggcgacaccgagcgcatctccgacgtggcgtcgaaccggagcatgtacgccttgtcgcagccctcgaagagcctctcgccgagcgtgtccacgacgtggtagcagtcgccttccaccttgagcacgaagaagtggtcgttccagctcacgatgtacacgtcggcgcgccccggctcgccgccggcggcggcggcgatctctcgccagatgtcgtcgaacgacatggcgccggagagggaggcgaagctctcgggctggaagaagccgacgaaggccctgtcgtgctgcacggcgatgggcctcgccctcgccgcgagcaccgtctccaggtcgaagtgcctgttcgggaacgccgccatgtgcgcctcgtcgtcgcagagccgcctccactccgacgagccgtccctgatgagcgcgtccagctccggccgcgtcggcatcgtcgggtggttggcgtgcagcgccgccgccagcacggccaccagcgccgtgcacgcgctctccccgccggcgctgtcgtcgcgctggtcgatggacgcgaagaacaccggcgtcctcagcttcgtctccgagtccctgctcgtgaactcccgagtctcccagcttcccgccagatcatcatccatgtatttcatgggcaattcttgggagagcgactcgctgctcctcttgtcgaagtcccggctcttcctcctccacggtagaagccggcgtttcgacgacaggccgggctccgggctggcgccgccgctcgagctggcgctgctgatgctgatggtgctgctgctgctgacactgctcatgctgctgacgctgctgctgtccgaattcctcttgctcctgctgtacacagccaccttgtgctccctgtcagccagatcaagcagctgcttcaggtcaaggacctcatggtacgtccctgcctccaagctcttcctattgtcccgcattgtcggtgccggagtcgtcgtcctcgccctgctctccctgaatgaaacagtccttccgatgttctcagaaggcgtgttcgcgtccacaagctccacattcacataaagcatggcatcacttgcccatccatctttcctcaccctgatggggacaaccaccagctgctgctgagttgccccccttttctgctgctgctgcagttgcatctcccagcagcattcctccaggcttatcatggctgtcccaatctcctcaagcttcaccacgtccttgcctcttccttgttcttggaatcccttttctttttcttcaactccgcaatagaggatggagaaggacacgccgcgctccgggcgggcggcgcgcgcggcggcggcggaaggctggtcgaggtcgaagcggaagcggttggcgtcgccggcgccgtcccagcggacgacgccgtcgccgccgacgggctcgacggcggtgaccccgcggccccagcacctcccgaggatcatctgcgagagcgcaccgccggagacgggccacttggccttgaccgccgcgacggccggccacgccgccggcatgccctccagcctcgtcggccccaccctcaccccgcacctccgcctcccccccgccgccgccgcagccggcgacgccctcctctccaccat

SEQ ID NO: 77805 - DNA, 3285 bp, Oryza sativa
  unsure (1)..(3285): unsure at all n locations
  Clone ID: PAT_MRT4530_7766C.1
atggcgagacgcgcgcccctacgctgtctcttcctctccctcgtcgcgctcttcgctttgctgccattcccgcccgctgcggcggcgccatgccacccggaagacctcctcgcgctgcgggcatttgcggggaatctctctgcgggtgggggcggcgccggactccgcgccgcgtggtcgggtgacgcctgctgcgcctgggacggcgtcgcctgcgacgccgccgcccgagtcacggcgctgcgcctccccgggcgaggtctcgaggggcccatcccgccctccctcgccgccctcgcgcgcctccaggacctcgacctcagccacaacgcgctcaccggcggcatctccgccctcctcgccgccgtctccctccgcaccgccaacctctcctccaacctgctcaacgacacgctcctcgacctcgccgcgctgccgcacctgtccgcgttcaacgccagcaacaactcgctgtccggcgcgctcgcccccgacctctgcgccggcgcgccggcgctgcgggtgctcgacctctccgccaacctcctcgccgggacgctctcgccgtccccgtcgccgccgccctgcgccgccacgctccaggagctctacctcgcatccaattccttccatggcgccctaccgcccacgctcttcggcctcgccgcgctgcagaagctctccctcgcctccaatggcctcaccggccaggtcagcagccgcctccgcggcctcacaaacctcacctctctcgatttgtccgtgaaccgcttcaccggccacctccccgacgtgttcgccgacctcacgtcgctgcagcatctcaccgcgcactccaatggcttctccggcttgctgccgcgctcgctctcgtcgctctcatctctccgtgacctcaacctccggaacaactccttttccggcccaattgctcgtgtcaacttctcctccatgccgttcctcgtgtccattgaccttgccactaaccacttgaatggctctctcccgcttagcctcgccgattgcggcgacctcaagtcactcagcattgccaagaacagcctcaccggccaattgcccgaggagtacggccgcctcggctcgctctccgtgctctcgctgtccaacaacaccatgcgcaacatctcgggggcgctcaccgtgctccgcgcctgcaagaacctcaccacactgatcctcaccaagaatttcgtcggcgaggatctccccgacgacggcattgctggattcgacaatcttgaggtgttggcccttggtgattgtgctctcaggggaagggtcccggaatggctgcatcagtgcaagagactggaggtgcttgatttgtcctggaaccaattggttggcaccatccctgaatggatcggtcaacttgataacctgacctacttggatctttcaaacaattccttagtcggcgagataccgaagagtttgacgcagctcaagagccttgtcaccgcccgacgttcgccgggtatggcgttcactaacatgccgttgtatgtgaagcataacaagagcacaagtggccggcaatacaaccagctctcaaacttcccaccgtcgttgttcttgaatgataatggtctgaatgggactatctggcccgagtttgggaacttgaaagagctacatgtgctggatttgagcaacaatgccatatctgggagcattcctgatgtgctgtcccggatggagaatttggaggttcttgatctgtcatccaataatctcagtggatcgattccatcgtcgctgacggacctgaccttcttgtcaaagttcagtgtggctcacaatcacttggtggggccgatcccaaatggaggacagttcttcaccttctcaaactcaagttttgaaggtaaccctggtctgtgcaggtcaagttcttgtgaccagaatcagcctggggaaactcctaccgacaatgacatacagcggagcggcagaaacaggaaaaacaaaattcttggagtggccatctgcatcggtttggtacttgtagtactgttggctgttatcttggttaacatctcaaagagggaggtcagcattattgacgacgaagaaattaatggctcctgtcatgactcgtatgattactggaagccagtgctattctttcaggattctgccaaggagctaactgtcagcgatctcatcaagtcaacaaacaactttgatcaggccaacataataggatgtggcggttttggccttgtgtacaaggcctacctcccagatggaacaaaggcggcggtgaagaggctatctggagattgcgggcagatggagagggagttccgtgctgaggtggaagcgctgtcgcaggctcaacacaaaaatcttgtttcactgagagggtactgccgctatggaaatgataggctgctaatctactcatacatggagaacaatagcctggactactggctgcatgagagatcagatggaggctacatgctgaaatgggagtcaaggctcaaaattgcacagggttccgcaaggggactggcttatctgcacaaggactgtgagcccaacatcatccaccgagatgtgaagtccagcaacattcttctgaacgaaaatttcgaagcgcacctggctgattttgggctagcaagactgatacagccatatgacactcatgtcacaactgatctggttggtacattgggatacataccgccggagtacagccagtcggtgatcgccactccaaaaggggatgtctacagcttcggcgttgtcttgctggaacttctgacaggcagacggcccatggatgtgtccaaagccaagggatcaagggacttggtctcctatgttcttcagatgaagtccgaaaagaaggaagagcagatctttgacaccctgatatggagcaaaacacatgagaagcaactgttttcggtccttgaggcggcgtgtaggtgcatcagcactgaccctcggcagcgcccatcgatcgaacaagttgttgcttggcttgacagcgtataatcattaataattctgtgtttttaagttgtctgctgttcattttggattgcaggctaggcctgacatgagaagtagacagngggtntaggagcaatctgagtgctaataatctttagaagatgcagtctatgtgatgtacatagcttagtgtcgttttgttatattatatccaggaatagacctgtatctttgttttgttgtcaaaaaaaaaaaaaaaaaaaaaaaaaaaaaaaaaaaaaaaaaaaaaaaaaa

SEQ ID NO: 77806 - DNA, 468 bp, Oryza sativa
  Clone ID: PAT_MRT4530_77670C.1
atggggtggctgacggcgagcggcggcggagccctcgaagcagaccccatggaagttggtggcggcgaccctggaagcgtcaaatccggtgcgtcgtgggtggatctcaccgccgcccgtcatcaccgcctctctctcccgtcaccgccaacggagagcgacgcgcgcgacgcgttggctgcggcgagcggcgtgaggggtctgtcggccggcgacgagtggcgtgagcgacgccagatccgctcatcgccgcactttcccattctcttccccgccgactccggctcgtccaccacctcgccgcctccagctttgaccaagggtggaaagggaatacgggtgtggggagcagtgtccacaagctatggcgtgcccaacgcggctccttgctcggtttctttgccaaaaatcgctgaggggcgcgtccccctggaagaaaacgcgcgcctctctcaggagcccgcttga

SEQ ID NO: 77807 - DNA, 951 bp, Oryza sativa
  Clone ID: PAT_MRT4530_77671C.1
cgggcgcgggcctccccgctcgatcagatagctactctttccatctctccacacagtccagcaatggctgcagcaggtagagtgctagctctcctcgcagtcctcatggcggtcgccgcccatggcgaggcggcgtcggtcgtcgtcggcctcgccaagtgcggcgactgcaccaggaagaacatgaaggccaaggccgccttcaagggtctccgtgtggcgatcaagtgcaagaacggcgccgacggcgagtacgagacgaaggcagccgggaagctcgacggcgccggcgctttccgtgtgccgctcgccgccgacctccgcggggccgactgcgtggcgcaactccacagcgcggcgcataacaacgcggcgtgcccggggcaggagccgtcgagggtcatgcagctgtcggagcgcaccttcgtcgccgtcgccggcaagacccactatgtgtcgccggtgtgcgcgtcggcgaccatctgcgagcccatcaagaagcacttcttcgaccacttccaccacaacaagccggcgcccgccgcaccgtcgaccaagccagcgcccaagccgcaccccgaccagccgccgcaccctaagccgacgccgacgtacggaacaccgagcccgtaccacccgccggcgaggaactaattgagccgtcgatcgagctcacacattattatgattctttttaaattcctgctctgcgttagcttaatgccattatgatatattgttgtcaaggttggagtagcgcagacagctttgtgttagttgattttgagtttcttgggtcgatcgaataaggtttcaggttgatttgtgaggtttgagtcaatacaggtgtgttagtatcaggtagatttgtctcaggattcgtttgcttgtttgttggaattaatttaattaatatgatatttatttgtgtaaaaaaaaaaaaaaaaaaaa

SEQ ID NO: 77808 - DNA, 2120 bp, Oryza sativa
  Clone ID: PAT_MRT4530_77672C.1
ttttttttttttttttttagagattaataagtgcatcgagcatttttttttttttttttttttatactagtcattatttttcacatacatacctattaattattatttactggtttctacttattatcacagatcccacccggcgccgcagcggctagcgggagtacttgtgctggcgcatatcacgacggagttgcccccaagagcggcggggaggtataggtcaagacgacagcgtgttgttattggctctatatctgattgagcaatgcaagaagtgcagcaggttgaggacgctaacaacagccatcatccagaagaagtagtccaggtgcccctcgtcgaggttgtccgggatccagccggccccgccgccgcgcgtggtggccgccgccaccacgacgagcacgccggagttgaggtagttggcgaccgcgatggcgagctgcccgagcgccgtgcacaggctcttcatcgactccggcgactgctcgtagaagaactccatcatgccgatcacgctgaacgcctccgccacgcccagcaccaggtacgacggcgcctgccacatgatgctcaccggcgctggcgccgtccccagccgccgtgcctcgaccaccgccgagtacgccatggccaccgcggcgagcgcgaggccgacgccaatgcgctgcaggtgggagatgccacggtccttgccggtgacgcgccgtgccagtggcaccagcacggtgtcgtagacggggacccagacgaggacgctgatgacgtcgaaggtggcgattgaggcggccggaagggtgaacgggccgacgcggccgtccatggccatgccctgctcgatcagcgtcgacgtaatctgcgcggtcaccacgaagaagacgaccatggacacccagaccgggaacatccgcagcaggatcttcagctcctccacctgcgaaaccgtgcacagcctccacgggctccactgcgccggcgagatctcgtcggacaagatggcagccttgtcaaagaacctgaattgagtggtgagttgagtcctgtaatcatcttcagtcacttttgaaacctcatgcaggagtgagctatcgtcaggcaatttcagcctatgattccttacagctgcaaccaccacctgggacacccttgtcagtggactccctccctgtttcttgtacctgtaaaccttcctaccagcgaaaaacagggcgaggccgaaccccgagagtagcatcgggatcgcaaaaccgacgctccaccctatgttggcccccccccagaccagcagagtcgtcgacagcagtgagccgacgttcattgagaagtaataccagttgaagaatgagcccttcgccagccgttccaccgggtcagcactgtcaaattgatcggctccaaaggctggaatgcagggcttcatacatccacttccaacggcagtaaggtagagccctgtgtagaccgtggcacggcaaatgttccaattgtagtaagaagaattcaggaacaatggtgatgatgaaaccgtcacaatgagcattccgatgatgataataaagagggaaataactgtcgtccagtatcttccccaatatgtatcagccaagaaggctccaatgagtggtgtgaagaaggaagtgccgatccaaatagacacactttgtgcagcgtcgatgttgctttcgtgcagcgcactcgtgaggtacatgactaagttcttcgaaaccatgaagaagcacaaggtttcagcgaattgagcacctaaaatgaagaagcatgctctccaatgccctgtactctgcttcagtgcaggctttttgtcactattaactgttccatcacatgtgtattttgaacattgttcctgtggaggcaggtgatgaatcagtggcctgtcctcatcagatgcctccatttgagcctctggcttcttcagcaattttgttggaagaaaaccgacgactctaagctacttgcaattaattcagtataatcttgcacctaaggaatttttcgtaagccatctgaggagagtgagcgatggacgattggagagggaagggcaaaagcggcggtgggaggtcggtctgggagggagatgcatgcggcccgcgggc

SEQ ID NO: 77809 - DNA, 230 bp, Oryza sativa
  Clone ID: PAT_MRT4530_77673C.1
cggtccggaatttctggcaaactatatcacgtttgattatgcccgtgtaaaagctgtggaactgggggtatttgatgctcagctgagcgcgcttcatccctgcccaacgggcaacatcaccatccttttgctcacagaatacacaatatagctattattttaccttgaaaagattccaaagcagctgtgcgtgctactgctggcctgcctggcaacactagcagttgttt

SEQ ID NO: 77810 - DNA, 124 bp, Oryza sativa
  Clone ID: PAT_MRT4530_77674C.1
ggagcatactatttgcaggcgcagacgatttgcaaactttgcagcttaaaagaatatgttacttaaaagcaaatgaaaatcaaacagatactgaaaccgaaccactcctgaaactgatccaccc

SEQ ID NO: 77811 - DNA, 2841 bp, Oryza sativa
  Clone ID: PAT_MRT4530_77675C.1
atggggtcggtggatctgatcgccgcctgcctcgactccatccgccagattggagatgagattgcagatgcactagtgtaccttgatgcaggcactctggaggcgtttcagtttattggagctttccccttgcttcttgagcttggtgctcgtgcaatttgcagcttggagaatgcatctccgcttgatgctgctgctgaatggcactcaagttttgcacatccagcaaggaagatagtagtgattacatcacgcctgcttagtgatgcacatcggtatattttgcgctgcctgggaaaccatggaactatttcacattgtactgtgttgacagctatttccgaggttggtcactcagcatatgktgattccccatttggaccagatgccttccgggagtatgagacattacttactcaggaccatgaggaacttctgaagaagtatgaaaagtcagatgagcacaaagataccactttttacacaggaaaagatttcacatcggatggtggtagatactccaattgggaatctggggtgcattatggctctaattctgaatctagcccaacaaaaaaggatttgtttgctgatgagtcaagccagctagaaactaaaggaaaaagattatctgtaactgtgactcactttccgatgattttctctcctatttcctctaggacttttgttttgccatctgaaggcacaatggctgaatcatgtttatcaaaccatcatgaagattcccttagtccagggctacctcccatatctactggtagatcttttgatggtgatgagattccccccggagtgacattgactgcccagttcctttaccatctggccagtaagatggacctaaagctcgatatattttcacttggagatacatcaaaggtcatcgggaagctgatgatggatatgtcaagtctatatgatgttggtcgtaataagagatctgctggcctgctgatcgtagatcgtacacttgatctccttactccttgtttccacggtgactcatttcttgataggatgctgtcctccttgacacgcaaggaagggacttcatcctattttgtgtccaaaaatccacaaactccaagcaagcattctgaagctactgttaaacgtatcccactagatataaaggtcccttttgaaaaggtcttcagcaaggaagaacctaagagtaggaccagtatgttacccgaaagtatcatgtcatttgtgtctggatggaactctgctgaagttgaatctgaagtaacctggctacctgattacgcggataaagctcatgatgacaaactcagcagtcaacatggtagtttaaatggttcattcctatccaattatgctggagtgtgctacttggaatcattactcgacagaggagcaaaagatgggttaatgttgattaagaaatggcttatggaagctttacaacatgagaagttatccttcccatccaaaggtcggcaaggagctgcctctgtttcagagcttcattctatggttcaaatgctctctcgagaccagttatccttagtaagaaacagaggggttatccaattggcactggctgctgaaatggctctccaggagcctcaaagttctcgctgggatgcctttacaagtgcagagagaatattaagtgtaacatctgcagagacaactcaaagtcttgccattgaatctcacaagcaagctaataaaactgagtcctctcagggccttctaagtttccaggatgttttgcttctaacaattatcgggtatatcttggctggtgaaaattttcctacatcgattgctggtggtccattctcttgggaagacgagcggtctttgaaagatattgtggtggactctatccttgacaggccatcatctgtgaagctcagatttcttgttggcttggagaatgagcttgaagctaaagctagacctaaagatggtgacaaaagtaatgactccatcgaagcttctaagagtactgatgattttgatgaccaatgggatagctggggtgatgatgatgataatactgatgatcagaaggatgaagcttatggggacatgcaacttaagttggaagtacgagacagagttgaccagctttttaagttctttcacaatttgtccagtatgaggttaaggaaccaaactcttggagaaggcctagcagcactgagcagatttgagactgacatatactcaagaaaaggcttgctctataagttgctattagctgtcttggcaaggtatgacattcctggccttgaatatcactcatcagctgttggacgtttatttaaaagtggactggggaggtttgggctaggacagtctaaaccaagctttggcgaccaaagcattctcatcgtttttgttgtgggaggcatcaatgcccttgagtgtactggtagtgtggcactttcagaaccatcagttggtacacgattcctatcttcaaaatatcaggtccgggaagtcatgaaggcaatatcagacagcagcagacctgatgtggagcttattcttgggggaacaacccttcttaccccagatgacatgtttgagttgatgttgggctcatccagctttagagtggaggcaacaatagaagttgccatatcagaattggtcagtggttttgatttgtctgtcagatgtgatcttccaatgctcgagggacatggagaagttcagcttttcagtggcattattggtgagccatgcagcttaaggaggtttgtgatggctttcagcttggatatagtgatgcatttgaagttcattcatggtagatcaaaagggctccaattttgttga

SEQ ID NO: 77812 - DNA, 2877 bp, Oryza sativa
  Clone ID: PAT_MRT4530_77676C.1
atggggtcggtggatctgatcgccgcctgcctcgactccatccgccagattggagatgagattgcagatgcactagtgtaccttgatgcaggcactctggaggcgtttcagtttattggagctttccccttgcttcttgagcttggtgctcgtgcaatttgcagcttggagaatgcatctccgcttgatgctgctgctgaatggcactcaagttttgcacatccagcaaggaagatagtagtgattacatcacgcctgcttagtgatgcacatcggtatattttgcgctgcctgggaaaccatggaactatttcacattgtactgtgttgacagctatttccgaggttggtcactcagcatatgttgattccccatttggaccagatgccttccgggagtatgagacattacttactcaggaccatgaggaacttctgaagaagtatgaaaagtcagatgagcacaaagataccactttttacacaggaaaagatttcacatcggatggtggtagatactccaattgggaatctggggtgcattatggctctaattctgaatctagcccaacaaaaaaggatttgtttgctgatgagtcaagccagctagaaactaaaggaaaaagattatctgtaactgtgactcactttccgatgattttctctcctatttcctctaggacttttgttttgccatctgaaggcacaatggctgaatcatgtttatcaaaccatcatgaagattcccttagtccagggctacctcccatatctactggtagatcttttgatggtgatgagattccccccggagtgacattgactgcccagttcctttaccatctggccagtaagatggacctaaagctcgatatattttcacttggagatacatcaaaggtcatcgggaagctgatgatggatatgtcaagtctatatgatgttggtcgtaataagagatctgctggcctgctgatcgtagatcgtacacttgatctccttactccttgtttccacggtgactcatttcttgataggatgctgtcctccttgacacgcaaggaagggacttcatcctattttgtgtccaaaaatccacaaactccaagcaagcattctgaagctactgttaaacgtatcccactagatataaaggtcccttttgaaaaggtcttcagcaaggaagaacctaagagtaggaccagtatgttacccgaaagtatcatgtcatttgtgtctggatggaactctgctgaagttgaatctgaagtaacctggctacctgattacgcggataaagctcatgatgacaaactcagcagtcaacatggtagtttaaatggttcattcctatccaattatgctggagtgtgctacttggaatcattactcgacagaggagcaaaagatgggttaatgttgattaagaaatggcttatggaagctttacaacatgagaagttatccttcccatccaaaggtcggcaaggagctgcctctgtttcagagcttcattctatggttcaaatgctctctcgagaccagttatccttagtaagaaacagaggggttatccaattggcactggctgctgaaatggctctccaggagcctcaaagttctcgctgggatgcctttacaagtgcagagagaatattaagtgtaacatctgcagagacaactcaaagtcttgccagtgagcttcgtgattttatcaacactagcacttcagttgaatctcacaagcaagctaataaaactgagtcctctcagggccttctaagtttccaggatgttttgcttctaacaattatcgggtatatcttggctggtgaaaattttcctacatcgattgctggtggtccattctcttgggaagacgagcggtctttgaaagatattgtggtggactctatccttgacaggccatcatctgtgaagctcagatttcttgttggcttggagaatgagcttgaagctaaagctagacctaaagatggtgacaaaagtaatgactccatcgaagcttctaagagtactgatgattttgatgaccaatgggatagctggggtgatgatgatgataatactgatgatcagaaggatgaagcttatggggacatgcaacttaagttggaagtacgagacagagttgaccagctttttaagttctttcacaatttgtccagtatgaggttaaggaaccaaactcttggagaaggcctagcagcactgagcagatttgagactgacatatactcaagaaaaggcttgctctataagttgctattagctgtcttggcaaggtatgacattcctggccttgaatatcactcatcagctgttggacgtttatttaaaagtggactggggaggtttgggctaggacagtctaaaccaagctttggcgaccaaagcattctcatcgtttttgttgtgggaggcatcaatgcccttgagtgtactggtagtgtggcactttcagaaccatcagttggtacacgattcctatcttcaaaatatcaggtccgggaagtcatgaaggcaatatcagacagcagcagacctgatgtggagcttattcttgggggaacaacccttcttaccccagatgacatgtttgagttgatgttgggctcatccagctttagagtggaggcaacaatagaagttgccatatcagaattggtcagtggttttgatttgtctgtcagatgtgatcttccaatgctcgagggacatggagaagttcagcttttcagtggcattattggtgagccatgcagcttaaggaggtttgtgatggctttcagcttggatatagtgatgcatttgaagttcattcatggtagatcaaaagggctccaattttgttga

SEQ ID NO: 77813 - DNA, 308 bp, Oryza sativa
  Clone ID: PAT_MRT4530_77677C.1
cccacgcgtccggtgccgcctcttgcttcctcctccttatcgtccggcatgggttcttttaccgatcttgtcaaccttaaccttttcgacaccacggagaagaacatcggcgagtacatatggatcgggggatctggcatggatcttaagagccagggttggacttttttcgggcctgggaatggacccaagaaggtggccaagggggactaccaagggttcaagacccggccaggccccggggaagaccggggaggcattccggacccaccaggtttttttaagggaccatttcaggaggggaacca

SEQ ID NO: 77814 - DNA, 1415 bp, Oryza sativa
  Clone ID: PAT_MRT4530_77678C.1
atgggcctagaaagttccgccaccttctctggctcgagccggcgagctagtgcgcagccttgtgccggcctcccggcggcggcgccggcggcgccgacggcgtgccggctgacagctccacttcctgcatcccggcatgccgcctacacttgcaaaccgcttcagcagcagcagcagcagcagcagtcaggttcccttggcttcccattgatcggccaaagcatctccctacttcgtgccctccgcagtaatactgattaccagtggtaccaggacaggatcaagaagtatggtcctgtgtccaagatgtcagtgtttggctcaccaacagtgctgatggctggccctgcatccaatcactttgttttcagcaaccaggacctcattttcacccagacaaaggcgatcaacgtccttatcgggtgttccataatgacactctcaggtgacgagctaaagcaagtccgcagtgcactgcagggctatctgagtccggagatggtgacaaaatatgtctggaagatggatgaggaagtaaggaggcacattgacctgaattgggttggtcataagactatcaaggtcgcaccgttggcgaagaggctcacctttaatatcatctcctcagtcatgtttggacaaggggcagctcctttcagagaagcccttgcaatagattttgagaaagtggtgagggctgcgttgtcgattccagtgaatatacccttcaccaagttcaacaagggcttgagtgcgagccggaggattaggaagttgctcaggcagattgctcacgagagggaagcagcatttcagcaaggctattgcagttcagctgatgatttctttacatacatgcttgctttacgctccgaaggaaaacactctctcacagtggaggacattgtggacaatgcaatcttactcctgattgccggttatgagacgtcatctgttcttatcaccttcttgatccgacagctagccaatgagccggacatccttggcaagataactgatgatacaagaggagatcgctaggagcaaaggacctaataagcctttgacctgggatgatgtctcaaggatgaagtacacatggaaggtggcattggagacgctacggacagtttctccaatttttggaagcttccgaacagctaccaaagacattgaataccggggctatcacattccaaaaggctggcaagtaagtatttttctattgaccaattccccttttttgttactggatatcttttccatcccagttatgacatacgtgtcactatattttccattcccaagtgctatatttatttttttaccctcccaatcttgcgatgcaggtcttccatgctcaaagtatcacacatttggacgggaaagttttcaacgatccgatcaaatttgat

SEQ ID NO: 77815 - DNA, 1405 bp, Oryza sativa
  Clone ID: PAT_MRT4530_77679C.1
gcacgaggccacgactccgtacgcccacgaggcacaacacaaggcgttactccggcacctcccgcctctctctccctcgccatggacgcggcggggaggaggctcgcccgcgtcacggcccacctcctgcccagctccctcccgctcccgctcgcctccgcccctaccctcgcgccttcccccgccgcgtcgccagcgtcggacagctaccgacgggtccacggcgacgtgccgtcggagcccccggagtggcgcgcggcgacggacgagtccgggaagggcttcgtggacatcctctacgacaaggccgtcggcgagggcatcgccaagatcacaataaaccgccctgatagaaggaatgcattccgacccctgaccgtgaaggagcttatgcgtgctttcgaggatgctagagatgatagttcaatcggagtcatcatactaacagggaaggggacccagtccttctgtagcggcggtgaccaggcgttaagggatgctgatggatatgttgattttgatagctttggcaggctcaacgtcctagacctccaggtgcaaatacggcgccttccaaagcctgttatagcaatggttgctggttatgctgttggaggaggccatgtgttgcacatggtgtgtgatctaacgattgcagctgacaatgcaatttttgggcagacaggtcctaaggttggaagcttcgatgctggctatggcacttcaattatgtctcggttggtaggaccaaagaaagctcgtgagatgtggtttctgtcacggttctacacagctgatgaggcagacagaatgggtctcgtcaatgtagtagtaccactcgctgatttggagcgagaaacggtgaaatggtgccgaaaaatcttgaggaacagtccaacagccatccgggtgctgaaatctgcactcaatgcagctgatgatggccatgctggccttcaggagctcggtggcaatgcgacactgatcttctatggaactgaagaggcaaaagaaggcaaaaatgcatacatggagcgacggcgccctgatttctcaaagttccctcggaagccttaaaagttgaacttgtgcactactagtacagatttctctacaattctgttgtatgtcatgacgcagactgaaatgctactcaaatctccgtttcctcgtcaactctgccggaagcataggtgggcgtcccaatgattgccagccccggtggacgggtgtagaagcgagatcgttatcctttacatgtcatttgttagttggcatttttataggtgtaaattgcagtgcttacgtatatgtgaatattcatcccgacatatcatagccgctggaaataaatggccttgtggtgccttagttatttgatcctaaaaaaaaaaaaaaaaaaaaa

SEQ ID NO: 77816 - DNA, 1056 bp, Oryza sativa
  Clone ID: PAT_MRT4530_7767C.1
acggaaaagaaaaggattttactctaattttaaaagggtttattgcgtcagccgaggggagggggcgcgcggaccgggtccaccccacgcggcagcctcacggtccacggtggactgggtgcacccgggctcaccggccgacgccgtgggtcccacgcgtcagccgcacctaagggcgcgggcggctgacggccgggccccacgcggcagcaactcggcgcgcccgagggcggccaagccggcgcagccggcgggaggcagcgcccgcgcccctatggtcgccggcggcggccataggcacggcggagcggcggccgagagaggggaagggaagggggaaaataggcggcggtccacgactcaccctaggtcgacggcgacgacgaaaaaggtggccggagcgaaggaaggcggcggcgcggcttgggtcgacggggtcgacggcgttccggcggtcggtgaccgaaacggaggggtggacgaggtcgtggaggatgcggcgaagccgaaggaggcggcgccgaggtgggaggtggtccggggcgacgacggcgacggaccggagctcgacggcgacggcggagagagagagcgacggcgcgagctcgattccggcgaggaggaagggcggcgagaggcggaaacggacggaggaggtgcggggagggtttaaatagagccgggtcgagagagggtggcccgggaagggaggaaaccggcgcgggaggtccggccgccatcaatggcgccggcgagatttgcgggggcaaatccgcccgtttgaacgcgagagagagagggaaaaaatggggggaaaggaagaggggatcacgtggagtgatttccctctctttattgcacgcggagacggcgggaggcggcgggattcgcggcggcggcggcgctagggcgcggacgaggcggcgggagcggcgggaggaaggggatgacgggtgggccctacccatcagcgagggtggcgggcgggcccgtccgtcagcggcgggcgcgcggggagaggccggatgggccgcggggagaggagagggaggggga

SEQ ID NO: 77817 - DNA, 351 bp, Oryza sativa
  Clone ID: PAT_MRT4530_77680C.1
ttatattctaccgaggatactggggggggaatatctaacacggttaagcctattatgtatggttgcacatgtgatcatcagatgcagtggaattgacaggtatgatcacatgctaacatcaaatataaaatctgcaatcagcttctatacaagagcttgagatgtgagatgtggcacatatagagatgccatgactaactggaggaacatgctgaacgagatgacttgaaagaacaagggtgaaaaatggattgctccggtttgatcaagtgtgactgatgcctgcagacacatacaacgtgaatggcatactgctggaactactatctatgcttttgtaatgcaagccac

SEQ ID NO: 77818 - DNA, 452 bp, Oryza sativa
  Clone ID: PAT_MRT4530_77681C.1
gatactgttcaagtccgaatggtaactgctggatatcaagaagagttgtcaggctatcagtttggtgagcaacagatggcctatccggaacagtacatgcaacaaagcagacccatctatatcccaggaaccaaagcttgataactcaagcagataaagagttctttggttctgtttcaaacatgataattgaaggcttgagcggctaaaggaagaggatgcactggatggagaaagatcctaattttatttcagggagcgatgatgaggatgattagtcgaagatggacatgggtgggactgaggagtgggccaaatataacgaccggaagccatgccaaaggctgcattcctgtttggagggaaatgcaggattgcaggaagacgaggaagcagaacaaggaccagaagctcacaaatgatctccacaaaattaataagatacttgcgag

SEQ ID NO: 77819 - DNA, 247 bp, Oryza sativa
  Clone ID: PAT_MRT4530_77682C.1
atggccatctggaccgtccggcacggcacgacccaagcccggccatgcctgggctgaggctagtcgggccggcatggcccgaccgacacaccgggccatgccgtgccagcccacgggcggcatacacggcccaatactactcgggccggcccgaaggcacaatggctcatcatgtttcctcatagaaaaagtctatttttggtccctcaactctgtgggttaaaaatgtacttcctccatcctaaaa

SEQ ID NO: 77820 - DNA, 496 bp, Oryza sativa
  Clone ID: PAT_MRT4530_77683C.1
aaaaggggcgtcaactactacatctgcggcgtcaactctcggccacggacgcgtgggttccacagtaagctaattatgcattcttttatggctttcttttctcaggaagagctgcattcctggttctgctgtaactgagggttgatctgcctgatgttgatggagctactgcctgacgttgatgtgctgttcagctgttgctgttatgaagtgggaagctctattaccaaatgatacctttcttattgttgcctcctctgatggcgtatttgagaaagtgactatgcaggatgtctgtgatctgatgttgtacgtgaaacttggtgttaagcaagaattaggatcctttgcattaacacaacagaatttggcagattatgttgttgatctttctttatagatagggacaacagacaatgtagaagctgtgattgttctattgggatctcagtatagctttaaagttacactaaaagattgggacatatgctttaag

SEQ ID NO: 77821 - DNA, 779 bp, Oryza sativa
  Clone ID: PAT_MRT4530_77684C.1
aacataaaacaatggattgaagtattatttacagtaccacgtacttatgctttggggtgaagttgagagttaagttgttgtattgaatcattgaacttcgcaagtgtggccagtggtgtagatgcaagtccttatggcatcggaaattggtcttccgtaaaatctgaaatcacccaaagaaaattgaccttccctcccgaaaatagcgttaggacgattaaaatcagtgggacgttccaaacaagcgctaacactgggtcgtagcgtggttgtttgtaagtcatactcatgccaagtaactgttactcctggccgggtgttggtttgtacgcaagccacgttggtgttcataatagtccagtgggtccacctgttctttccgactgaaagtagatcgaaggaagataggaacgtagagttactgatgcggaaagtaaatctgtctgtgccagattcttgtaatatgatgtgattctggaggttggtatcttgccaagagaagatattttgattgctgacatcaacggctctgtttatccaaaaagtgaaagtgaaaccagtgattgatagggaagtaggaatcataccaacaggagcttgtacaaaagtagaacctgggacggtgtttgcaaaggatagagcagggaaagtattaggtagaatcggtccaataacttgagagagagatgtgtaagcaggagttgctaagctagaaacaattttcagccactcaaagtaagttccattttgagggacctctaagccccacgcgtcaaaga

SEQ ID NO: 77822 - DNA, 162 bp, Oryza sativa
  Clone ID: PAT_MRT4530_77685C.1
gttatagaacctatatggatcaaatagagttatttgtacatcgctataaaaagagcgtggttggtcattgcaaagacgggctaagcaaactattttgcgctgtcggagcctggtttgaacatctgatcttgcatggagaaactagagctacagcttgccggc

SEQ ID NO: 77823 - DNA, 453 bp, Oryza sativa
  Clone ID: PAT_MRT4530_77686C.1
ttctttaggtggtcctcaaggcctctggccacgtggaccgcttcactgacttcatggtcactgacgagaagacgggcgactgctaccgtgctgatcacctgttggaagcagcaattgaggccgcgctggaggacgcaaagaaccccctcagcccagaggcacgcaaggaggctgagcagttgctggctggtgtgggtgagctgggcctggaggcgctgcatgaggccctcaccaaattcagcgtggtggcaccggacaccaagaaccccatcagcaggcccttccccttcaacctgatgttcaagaccagcattgggcccaggggagacctggtgggctacctcaggccagagacagctcatggcatctgtgataacttccgtgacctgctgtacttcaacggccgcaagctgccctttgcagctgcacagattggcaatgcatacaggaatg

SEQ ID NO: 77824 - DNA, 2518 bp, Oryza sativa
  Clone ID: PAT_MRT4530_77687C.1
tcggtcagctccagccactgctcccatggcgaccgttcctacgccgagcgaggcccacggcggcgcgacgccgacggccgccgacgtggagatggtggaggcgagcgagctccgtcggcggggcaagcccagcggcgaccgtgcgacggggccgtcccgagacggggccgccgcggcggcggaggaggcggcggcgccgtcggtggagcgcgtgttcgcggacaggcccgtgccgtcgtggcgggagcagctgacggtgcgcgcgttcgtggtgagcttcttcctggtcatcatgttcagcgtcatcgtgatgaagctgaacctcaccaccggcatcatcccgtcgctcaacgtctccgccggcctcctcggcttcttcttcgtccgcctctggacggcggccatcgagagggtggggctcctccggcagccgttcacgcgccaggagaacaccgtcatccagacctgcgtcgtcgccggctacgacatcgccttcagcggcggctttggtaactacatattgtccatgagtgaaagaatcgctgggctgggaaccgaggcaaataatgctcaaaacataaaaaatccccatctaggatggataattggttttctgttcttggtcagcttcattgggctctttggtcttgtgcccttgagaaaggttatgatcattgactacaagctaacttatccaagcggcactgcaactgccttcctcataaacggctttcacacgccccatggagccaagattgcagcgaagcaagtaaagaaactcggtatattcttcatcctcagcttcttctggggtttctttcagtggttctacacagctaccgatgattgcggattccataaattcccatcactaggccttcaagctttccaacacaagttcttctttgacttctcacctacttatgtcggagtgggaatgatttgcccacacattgttaacgtatctgttctccttggagggatcctctcatggggcatcatgtggcctctcatagccaagaaaaggggagattggttttctgctgatctccctgacggtagtcttcatggaatgcaagcgtaccgggtcttcatagccattgctttgatccttggggatggtttatacaacttcctcaaggtgcttatccgcacaattgcaggctttatatcaatggttcagaacaattcaaaaggcatgcttcctgtttcagacaatggcatgtccatgtccactgctgaagaggtatccttcgatgatgagcgtcgcactgaaatcttcctgaaagatcaaattcctaagtcagttgcatatggaggctacgtcgtagttgctgctctatcgattggcacccttcctgagatcttcccgcagctcaagtggtactacattttggttgcctacatcgttgcacctgtgctggccttctgcaatgcctacggaagtggtctcactgattggtctcttgcctccacctatggcaagcttgctatcttcgtgttcggcgcgtgggcgggcctttctcacggtggtgtgctcgtaggacttgccgcttgcggtgtcatgatgagcatcgtgtcgactgcctctgacctgatgcaagacttcaagactggatacttgactctggcatcaccgaggtccatgttcatcagccaagtgattggcaccgggatgggctgtgtcattgctccctgtgtgttctggcttttctacaaggcctttgataatattggcatcagtggcagcgattacccagcgccaaatgctgtcgtgttccggagcatagcgatactaggtgtcgatggcttctcctcgcttccaaagaactgcctcaatctctgttacgcgttctttgctgctgcaattgtcgtcaacctgataagagatcttgtgccacacaaggtgtcaaggtttataccgatcccgatggctatggcgatacctttctacataggatcgtatttcgcgattgatatgttcatcgggagagtcatcttctttgtctggcaacgagtggacagggcgaaagcagacgcgtatggacctgcagtcgcttcaggcatgatatgtggtgatggaatctgggtttttcctcagtcggtgcttgctcttgccaaggtgaagcctccaatctgcatgaagtttctgtcgagatggacgaatgacaaagtggatgcctttctcggtgagaatccttgatctggggcattctatacgagagtagataattaactgtgtacagcgccaagtatgggaataaattatcttgtttacgctagaaaacttgattaaaaaaatacaacattgggaaaataagttgcaacaacgattctgatgaagaaaagattcagttgaacattattacattagcccgtgtatatattggataattttctttttttttccagcagatccatgtcagtaagaatccaatgaagtgtggcatactatacgatagtagataaataagtgtgtacagagacaagaatgggaataaattatcttgtttacgtt

SEQ ID NO: 77825 - DNA, 3543 bp, Oryza sativa
  Clone ID: PAT_MRT4530_77688C.1
atggcgagctcgtcccaatctccggccgttggctctcttggagggatcacggtcacggagaaactaggcaaggggaactacctgatctggaaggttcaggtccttgcggtgattcgaggagcacggcttgacggctacctcaccggcgccataagagcgccatcgccgaccaccatcatcaagaagagtgacaaagatgttgaggtccccaatccagcgttcgacgaatggatcgcgaacgaccagcaggtactaggatatctgctaaccactatgagtagagatgttctctccaaggtggcgacgtgcggatctgctgccgcgctttggagcgtggtcgaagggatgttctcctcagcgacaagggcacgctccatcaacaccaagattacactgacgaacacaaagaagggcgacctcagcgttgccgaatacgtcggcaagatacgggcgctagctgatgagctagcgacctccgacaagctcgtcgacgaagaagacctaatctcgtttatcattgtgggattggatgaagattttgaacccatcatttcctctttggtgtcaaaatctgaacatgtgagcctaggggaggcttactcccagttgctcagctttgagcagcgcatgaaactccgtcaggagcactcggcgaaccttgctcacagagggcggggtcgtggacaacaacaacaaggcagaggttgcggcaatcaaggtaatcagcagcagcaacaatgcggtcgcggcggaaaaaattgcgggagagggcgcggcaacacctcctaccagcgacaaggtggaaacaacaccgacaaccgtcccaagtgccaactgtgctacaaaagggggcacactgtgattgattgctggtacaggtatgatgaagactttgtacctgacgaaaaatatgcaggaacagctgcgtcctatggtgtggactccaattggtatgtggacacgggtgctacagaccatattactggagaacttgagaagctaaccattcgggacaagtacaagggccaagatcaggtgcaagctgcgaatggtgcagatcaggccatgaaggagatacttcttagaggacgctgtcgtggccggctgttcccgcttccatcttcatccccttcagctcatcaagacaaggaagccctagctgccactacaccgtccctcgagcggtggcattgccgccttggtcatccttcctatgctatcgcagaaaaagtagttcgtaatcatgatctaccagtgtcagctgagtccaataaaatgttgttggatgatcatgtgagttattatcctgcaattcctgctaatctgtctcctgcagaaaatttggagcaaaacgcaacagcaaatacagaaaatgatgcagcagaagatgcagccgattctggtgcagccgaacaccaagcagctgacaatatctctgatgctgcacaagaggacagtagtcctctgtccgccgcgcatcattctgcacacgaggatgctgccgatgaatcatctgcagctccgtcgccggctgaccagtcttgtcaaccacaggcgcaaggttcctctgcgccagggggagagccacagcgtccagctactcgaccagtcacccggcttcaaaaaggtatcagaaaagaaaaaatatataccgatgatactgttaagtatggttttctcaccactaccggagaacctagagatttagctgaggctttacatgatacaaactggaagcatgctatggatgcggaatttacagctttattacacaataaaacttggcacttagttcctccacaaaaaggaaaaaatgtcatggattgtaaatgggtttataagattaaaagaaaacaagacggcagtctagacaggtacaaagttagactagttgctaaaggtattaaacagagatatggtatagattatgaggacacctttagccctgttgttaaagctgctactatcagacttgttctgtctattgctgtgtctagaggctggactctaaggcaattagatgtacataatgcttttcttcatggaatacttgaagaagaagtctacatgaaacaacctcctgggtatgaagacaaagcaaatccaggttgtatttgcaaacttgataaggctttgtatggtttgaaacaggcgcctagagcatggtatgctaggttgagtcagaaattgcagcaacttggatttcagggatccaaggcagatacctcattattcttttacaacaaacaaggtcttacaatctttgtacttatttatgttgatgatataattgttgctagttcgaggcaggatgcagttctaactctgttgcaagatcttcagaaagaatttgccttaaaggatctgggagacttgcattacttcctgggtatagaggtaaataagataagtaatggcattattcttactcaagaaaaatatgctaatgacttactgaagcgagttggcatgattgattgtaaacctgtaagtgcatcgttatcgactagtgagaagctcactttgcatgaaggagatttgttgggtctcaatgatgcctctaattatagaagtgtagttggagcacttcagtatttaactctgactaggccagatattgcttttccagtgaacaaggtatgtcagtttttgcatgctcctactacgattcattgggctactgtgaaaaggatactaagatatttaaaacagtgtactaaacttggtttaaagattagtaagtcaaagtctatgcttgtaagtggatattcagatacagattgggcaggaaatgtagatgatagaagatctacaagaggttttgcagtgtttctaggagataatttggtttcttggaacgcaagaaaacaggccacagtttctaggtctagcactgaatcagaatacaaggtattggccaacgctacagcagaaatcatgtggatacagaccttattggcagaactgggtgtttctagtcctctaatggccaggttatggtgtgataatcttggtgctaaatatttgtcatctaatcctgtttttcatgctaggactaaacatattgaggttgattatcattttgtacgagaaagagtacaacgcaggttgcttgaagtggattttgttcctacaggagatcaagtagctgatggattcacaaaggctttatcggaggtgacgatcgcttcctgtcctctgactttcttcttctcccttctcctcgccaacgcctgcacgccgcccacgctgccagagaccgggagggtggtggaggttgagggccagatcaccaggtttcatgcgccttcttttccatcttgccgcgcacaggccacgacgctgtcctgctcggccgctggccacgctaccatcctccgctgccgtgggccacgccggctcctctcccccgcggcgccacctagagttgctgcggttgtcgcaaccgttgcaagaagctgcagccgccaccaccaccgaaagctcctgcaggcgttgtcatcaggcgttgtcatcgccgtcgccatggtagggcgtggttga

SEQ ID NO: 77826 - DNA, 285 bp, Oryza sativa
  Clone ID: PAT_MRT4530_77689C.1
atggacgctgattggcattttggtccattttctgtattttggaacctgggcattgctgatcgactaccggaaagccaatggaaatttggtgtgctctgcctgtctgcaatagacttcttaaagcatgctgcagatctgaatacaaggtggctgaagaggttaccttccaatttttgggctacatgggtgcaccctttaacatacaaggtccatgtaaagagcttatggatattaagttgtgttggtggttcatggggtatagcttttgtggagaacaggaaatga

SEQ ID NO: 77827 - DNA, 467 bp, Oryza sativa
  Clone ID: PAT_MRT4530_7768C.1
actctactctcttcctattctagtatacaatatagtacaatagagtctcttataattcagctcaagcttggaagtgtgcgttcaagtgagtgaagtgaggtatatttataagaccttgtccgaagagccccttaaccatcattagggagtgttttatcggggtgctagccgataagttatctagacattgcatcggcttacaaggattacatccgattggtttctattggattatattattgttatattttactatcatcagccgattacctttatattgttatttgcttcaagtgtcggattctacatcagaattatagccgatagttcaaaaaccctattgctatcggcttgatcaaactgactggcacgcccgcatctcatcaacctttggacctacactagagctaagcagatctcctaggctagtgtgtgtttttcgcgtcaacactagtccaccttcccca

SEQ ID NO: 77828 - DNA, 660 bp, Oryza sativa
  Clone ID: PAT_MRT4530_77690C.1
cggacgcgtgggttcttcgccagttttgccttgggctgggcaataactacgttctctggagcctgcgcctatccatttgatacactccgtcgcagaatgatgttaacttctgggcagccattgaaatataagaacgccttccatgcagcaaaacagatagtttctactgaagggttcttcacactattcagaggggtcggcgcaaatattctctcaggaatggcaggagctggagttcttgctgggtatgaccagctccaccggtttgcaggtcaacatggttacaattttgagagcaagatgaaaggggcattgaaatgatgtgcaaatggggataaatagaggcatatccttggttgaagtttggattggccaaatgggatgtatgagcttggataatcaagcgggcgaaacagaactccagatactcctgcagttgataggattgacggcgaagagaacagcttttgcaggatgtatactttcaaggagcggagatgaagtcagaatcaaaagatagctcttgcggtagaaagaatgtcaataattctgaaacctgattcttgaagtgtgaatatcgatcgaaagttagatcgtactcgcgctaccaatgccttgatgtgaactgtaaatagaacttgtggaattgctccattgaat

SEQ ID NO: 77829 - DNA, 452 bp, Oryza sativa
  Clone ID: PAT_MRT4530_77691C.1
aaaatcaatgtaaaattcctgtgttcaaagcaggcataacaaagctgtgagatgccggtttcagaagttcagccataacagcattacaacgcagtcattcttcagtactgcactcctcatccaagttgcactatccaaaattgtcaggggatggggcaaactccaaagtccatagtggtcagcaagttccattgagtacataaacagccatcaggttcaatagttcacaagcccacaacaagactacataacacatcccatgcatccccagggcaacacaaaacaacaagcacttgtgcggcagcagccagccatgctatctaagtctgcaacaagtcatacaatggtgcaacctcatggcctctgtcatatccaatccctccaactgcaccaaatgcccaacatccatcagcaacttaattccacccttcgggcaactcctgtcctagcaa

SEQ ID NO: 77830 - DNA, 1548 bp, Oryza sativa
  Clone ID: PAT_MRT4530_77692C.1
ttttttttttttttttttttttttttttttttttttgatgcaagtataacatttcatttatatagataatgagtacagcttaaatgaagtaacatgagttagtgcctataacatcatcactgctatctgttcgcgctggcggcgctcgtcccctgcggttcccccggctgccgggtggcggctcgtccttatgtgctggtactaacctaagaattggcacctcccctcatcgtaagttagtagcgacaaataatcacctgactattcgaagatcttctccccagttgagaaaatcaagaaaatgaaggagctgaaaatacaaaggtatcctggaacaaagaagactgtcctccaactttccgagcttgtcaggtccatgttagatgccttcgctgcctccagaattcttcctgtgagaccaacaccaactattcctgccaaagtcccagctgtgtttgagatccccatcacaatcccagcaaattttggagccacatccatgtggtttacagcaaatcctgcccttcctagagccagaaaaccaagagatactgatgagcagaatattgcccctgaaggtgttctgaataatggaagggccatgagtgcaatggctgagacgacaaacccgactgtgttcagaagtttccttgtcttggtaacagataatatctttcttgtaatcaggtgatcagcgaggaccccaccaatgttcgagaataaaaacatattcaaataaggaagcatctttgaaaaccccatgtcctggaggcttagttgaagtcctaatttgaagtatgtcggcagccagttcatcagaacatacagtgcatagtggaaggtgaagttgttcacaacaattgcccaaatcggcaagctaaaaagtatccttgcccatggaatcttcacagtgcgaggagccataatcccaccggtttgtaccttcatcttatctttggaggccacctttggaagatcagtgcgaggcgggtcactggcaaatttgaaccatattaaaagccatgccacacccaacattgcttcaacagagaaaactgactggggtcccatgttcttcaccagacttggaagcaaaagcataccacacgctgcaccaagatacatccctgaggtagttagggacaccgagcgagaacgctcctggggtggcacccattgcgccaggacagtgtgaatggaagggaatattaagccttgtgcaacacccaccagaaggcgagaaagaacaagcagaattactctgtttgggtctagtggaacaacagcacagatcgaagaccacagcacaaatgacagtagcaggacaagtctacctcccagcctctgagctgcccatccaccaggaatctgtgatagaacatacccatagtagaacatagatagtatcatgcctttgtttgcttggtttgtgccaacagcatcagctgccacagtgtaagcgattgagaagcccacccgctcaatgtagcacacattggtgcacataaatgtcagtaacactatggcatagcgttttggaaacttcat

SEQ ID NO: 77831 - DNA, 407 bp, Oryza sativa
  Clone ID: PAT_MRT4530_77693C.1
gggatttatttcttttttttttttttgatgcaagtataacatttcatttatatagataatgagtacagcttaaatgaagtaacatgagttagtgcctataacatcatcactgctatctgttctgacaggcaaaatttgtccccttcttttttgcctaaaatctattggcaggtagtccaaaagttctggaaaaaacctaagaattgacacctcccctcatcgtaagttagtaacaacaaataatcacctgactattcgaagatcttctccccagttgagaaaatcaagaaaatgaaggagctgaaaatacaaaggtatcctggaacaaagaagactgtcctccaactttccgagcttgtcaggtccatgttagatgccttcgctgcctccagaattcttcctgtgag

SEQ ID NO: 77832 - DNA, 132 bp, Oryza sativa
  Clone ID: PAT_MRT4530_77694C.1
atggccaggcttgggtgcctgggtcttggcttacggatgatggtggcgtcttcagcgccactaccgtcccggaggcttcgtctaggaggtcctgtttcaccacctttacctccttggttcctcttagtttag

SEQ ID NO: 77833 - DNA, 891 bp, Oryza sativa
  Clone ID: PAT_MRT4530_77695C.1
atgcccattccttcccccggcggcgctccaccaccaccaatgcatcggcgccccagcagcaggaggaaggatcccttggagtacaaggagtacatcgtcctcctgaggccgtggccggacgctgccaccaccggcatggacgatgacggcgccactgctggcggcaagccgcaactggtccgctcgtacaagcacatcgttgacggcttcaccgcaatcgctgtgtccaagaagcccgacttccgacgctgcttccaggacggcatcgcttgcttgcattgctggtttaaacaggaaggaggatggcaaccttgcctgatccggccatgggtggacgacacggtggacaaaagtggatcctatcccgtcccgacgggatcccgctgtttagcatttatgttgcggatttatcggcagcatcaagtattagccattttggactcgagattggaaattttagaggataatgacaaggagggcctatacagccattcgctcgcccgcgtagcctcccgcacaggtgacccgggtggaaaccctagccgccgccgctgccgcccccctcccccaacccatcccttgcctcaccgccgcttgagcgagtggctggcaaagccgacggcctgcaaggacagcggtagcagggctcgcggctgcgaccaccatagttccagcgcgggcaagtccatggtggaagctggccgaaaagacgacagcgtcgaggcgggccgtggcgatggcgacagaggaccagtggcgctggcggcgaccgtggctgcggcggctgtctggcgtcgtggccgtcagatctgggccacgacgttgactgcggcgcggcggtcgttcacgcttagcagcggctggtccggtgctagccttctcctgtatctg

SEQ ID NO: 77834 - DNA, 682 bp, Oryza sativa
  unsure (1)..(682): unsure at all n locations
  Clone ID: PAT_MRT4530_77696C.1
ncnnnnnngnnnnnnnngnaattgtaatacgactcactatagggcgaattgggtaccgggccccccctcgagttttttttttttttttttttttttttttgaaaccnacnaggattnctntctcccncanangtacatcgacnattcncggaatacaacaccagcaatatctatancaatataataaaacgcnnacggtaaattatattntagcaacagggttgatactccntatcaagcaagtgaccacaggtgnggaganttcggnnctacaancaaatncacattgatgtgcggcagggganagtnnctcctccaaagcnttncggctatccncttctcctgctgcctatcacgcaatggagcncagattgctcanagagcatctgtaccagtccaacttnntnaaggcctgannctgaanggngncttcattcagtctncaagcnntgttcgctgcgtcnataaaaacttcgattgtttccacctcctgtnctccccnggtgcatnggcctattaccnccgatnaacncntaacangccaatctccccccnattanantaaggccttctttctgggtaatcggcgntgttgaagactaaacagcanngcttaatgtctgntttcganaagtgttcnaggtcggngtcncctgccnaaanngaattttngnnggtannc

SEQ ID NO: 77835 - DNA, 299 bp, Oryza sativa
  Clone ID: PAT_MRT4530_77698C.1
cccacgctgtctcgggaaatcgatcgagtgatcacacgagataattaatatcagtctcggttcagtgcgcgtgatccagcagcagcaatggcaggcaaggcctcgatcgcgctattactctccgacaactctggtggtcttctcgctgggcatcgcctgctgcggtcactgaccgacgcctacgccgtcgaccctgtcgacgcccacccagactcccgacgcattcggcaagtgcccacgcgacacgctgaagctgagcgtgtgcgccaacgggctgggcctcatcaaggccaaagggg

SEQ ID NO: 77836 - DNA, 687 bp, Oryza sativa
  Clone ID: PAT_MRT4530_77699C.1
atgtgctaccacctcactggctccacctccaccagcctcacctcccgctgcggaggccctcgcgcactggccgtcctcggcgtgccatggccgcacctcctcactccgcggccaccggccactcctcctcgcgctgcaccgctaccggccacacctccttcgcctagccggcgccggccgagtctccttcaccgtgttggccgccagccccaccggccagcacattcgtcgcgcctgctgccggccaggcgcctgctccttcgtgcgccgccgtcgctcctgccgccgcctaccgcaatctcccacgcctccccgctgatgccaccacccgcagcttaccgccgcagtcaacgtcgtggcccagatctgacggccacgacgccagacagccgccgcagccacggtcgccgccagcgccactggtcctctgtcgccatcgccacggctggatccgacgtggggggtgccagatccaggtgccccgctagcgccggcaccccgcctcgacgctgtcgtcttttcggccagcttccaccatggacttgcccgcgctggaactatggtggtcgcagccgcgagccctgctaccgctgtccttgcaggccgtcggctttgccagccactcgctcaagcggcggtgaggcaagggatgggttgggggaggggggcggcagcggcggcggctag

SEQ ID NO: 77837 - DNA, 321 bp, Oryza sativa
  Clone ID: PAT_MRT4530_7769C.1
atggcttctacatccgccagcccgccgataagctcctcctcctcctcctcctccaccgccgccgccgcctcacgctactgggaggaggagaagctcgaaacagagctcgccaaggtgcacggcctcatcgccgtcgagatggcaactgggtggagcatgtgccccatcggcgacgcgcggcggcacatcagcgccgagcttgccgccgtcgtgccggagtccctgacggaggaggccgcggcagttgatgctgccgtggagcaacgtactgctgctcgctcgccgcccacatccacccctagctgcgtcgcgtcccactga

SEQ ID NO: 77838 - DNA, 582 bp, Oryza sativa
  Clone ID: PAT_MRT4530_776C.1
atggcgtgggacgtcgggatgaagacgatgtcttctaaaggccttgtctcggggtcacccagctgcgccatgatgcccgaaggcggcggcggcagaaggatctctgcgagagagccactctcctgccagtaccgcggccttgtcgccatgaatcgggccggtggtcgggacttgaatgttctccccctctccgcctgcgacaggatctcaccactgtccatcccggctcagggggcatcgcgtcgaggcgacggcatagtaaatgtagacttcaattttgcccgcggcggtggttgggcgggaggcgagcttgcgttgactctggcgggggagaggacgacctcagcaaacgagcgtgggcgagttggagttgcaaaggcaagggtgacgctggtcggtgaccaggtggagcgagctggagtcgcggagacgggaggggcggactgcggccaagagacggcggaaatgggcgcccaaacctgcgaccggcggagaagcgtgggcaccgtcggttggagcaccggcggcggcggtggtgaagcgcgctgcggcatttcaaaaaaatatgtgaagtggtggtaa

SEQ ID NO: 77839 - DNA, 181 bp, Oryza sativa
  Clone ID: PAT_MRT4530_77700C.1
gttgcctcaggttagcaaaagtgggttacaattagaacaaacttcgtattttatttggtagaacttcatataggtactaagtgttattactccttttattacagtatacacattggttgtagcatttggaggtttcttttggttgtgttggcacatagtgctcggcactttatatatatat

SEQ ID NO: 77840 - DNA, 533 bp, Oryza sativa
  Clone ID: PAT_MRT4530_77701C.1
actagtggatccccgggctgaggttttttaaaaagaatgttggattgttttattcatggaaatggtagcattatgtatcagcaccacaaaccagcagcagaagcagcaaaatgacaccaatctttcttttaacaccaacccctaaacccatcctgcaccaattaacaagctctcttgattcgctaaaatgacagctagcctctcctgtactaacctcctccaacctccaaaatttttttgataccaccatttctccagggaagcaatccttcaattggatttctgatgtttttgctatatggtatttacatgtaatgaaaatctcaaccatcatccctctctaactccctctccccctccctcctctcctctatgataatatgctactaatctaaacaacattacaaacttgcccttcttgagaagcagggttggctggttctattggactataaggtggggcgaaatgtatcaaatacaagaggtgaaagagcccagaaggtgaaagaattgaatggggtcggcatatgaac

SEQ ID NO: 77841 - DNA, 1031 bp, Oryza sativa
  Clone ID: PAT_MRT4530_77702C.1
aagcacaatacatcacagtagtcttttatttatatataatcatatataaaccacgtacatatgtagcgaatgtagcacaacacataaatgtatacagcactgagagaaacataacggggcactagtgaggtaaacttttgggcctaggccacatacacatgcacactatatatgtataggtatatagagtgattgaaagaaatgtcacccttaggacttaggtcttgtgcgattcatccccaagagagagattggaggggaggtgtagaattaatctcctacaaatctccttcaacctcttgtgtgagggattatacaaacaagactttagcggtgaatttatcatgagcactgatccaacatatatccaattggatatattcatatgtagatgacatatatcatatgtggacataaactccgatagagtccacaagtgcgcccgagcgaccaaagaaaccaaccacactgccgctctgcagcgggaggctaaaagcagttccaccaccttgtccaaaattataagtggtgacattggtgacaatttgaaggtttgtcacgacgttggtaaatgttccggagattcccttcacgaattcctgagatccaagtgttttcgtagttggatttccaccaccaccaccccaaggacctgcaagatgttcattcccgtccgtgccaacgtatgtaaaggcaatagcatcaatggctgctccactacggatcgtcacgttcttcaggctatttgggggtacagatatgtctacagaacctcctccatttccaccccatggaccaatcttaacaagctttgtgctcttatgatactttggaccaacctcaacttttttatccatctcgccgctgtcgtcacgcacgagggctccggctactacgtcctcaccgtcctccgccgcgccctccgtcctcgccggaagcaggaaaggtgccgccagggtcgtcatgcgcgccgcccattctctccatcggccgccgctcgtcggtcgtcctccccattggtcgccgcccat

SEQ ID NO: 77842 - DNA, 825 bp, Oryza sativa
  Clone ID: PAT_MRT4530_77703C.1
atgagctcgaaggatgtctccttgaggttggattcggaatggtctagagtagagatgcagttggttgaatatgggacaagttcaatttcagcagtttcagttctagcttcagaatgtctagatagttgtacaagtgcgcctttatgtcttgagtatggggcgatttcagaaccagcagctccaactgttggtggggtgatttcagaactagcagctccaactgttggtgtagaacaaccaccaattcattatgttgattgggatagcttggagatagatggaacattagatgatgagggaaggattcacgaggaccagaaggtaactctctcttaccatacagtttggcatggaatggagaaagcaaagaaagaattgtatggatgttgggaggaaagttttcaattgttgtatagttggaaggaagagaaattcagggcttcatatgagagagagataccagcaattccagacaagtcacattggccaaaggtgaaaatgcctttcgatttgggcgcaccactagagaagaggggtgttgggagacagaggaaattgaggattaaaggatgccttgagaatggtggcaaaagtagtgcgaagagtgatggcaagaacaagaaaatcataagaggtctagttacatgcaaaagatgtggtgagaaaggtcataggcaagctagctagctacaagtgcccattgaatggaacaaaaaacgcatgaaaaggaagcctaggaaaagcaaccaaaagaaccttccacctgaaccttcgacaccaaaaagaacaaccaatgaagctacaataatgcaagaaagcccggga

SEQ ID NO: 77843 - DNA, 651 bp, Oryza sativa
  unsure (1)..(651): unsure at all n locations
  Clone ID: PAT_MRT4530_77704C.1
cggacgcgtgggcttgccgccggcttcaggctaagcccttaaacccgcgtctccccccttctccgagtctccggcgcggagtctccgtccgccccgcgcgccaggtgcagctcgccggctggggctcggagccaagagcaccccctcgggaatttgtgatattagttggaaggaaggacatttggctgtggtaaaactggtattgataaatagagcaccgatgcggctaactgttggccaagtgcatcgacatgtaccttgcatttggcatcttctcggtcatgcctttcgtcctttggtgaatcacctttccattcagaatgctttcacttccacgagtggtaagatttcaccaaaccgcttggcatgatattcaaactgtggaaataagaatggtccgctaactctagcttagtcttgaagtgcaaaacaaagttgaatatgttaagaaagaaagaacaacacgtactggaggcataaagccatcttcaagggcttcagctcttaatatgaaaccaaaagtttcttcattcaatgccaaatcagtaaagagtgccttgnccgaatcagcagtactgaagaagactctgaagatagatgaatctcttttttctgcanaatcatttaagaaactcgtttgccacctttgct

SEQ ID NO: 77844 - DNA, 567 bp, Oryza sativa
  Clone ID: PAT_MRT4530_77705C.1
tcacttgagggggctcgcctgtcggaggtgttcgccacgctcatcgacctcaagtgcaacatcgtccttgctgatcagctcgatggccatttgcgtcgcctctgcctccaccccacctccaccctgaccgaccgttccggcacccgaaaactcagcgacccagctcccagcaattcgcctctgccccagcctcccacttggctcggttccctcaccctcacagccgcactccccactcctcccgctcgcgccgcccgccttcgcctccaccgcgcctgcgccgcctccgcctccaccgcgccggcggccggcgccgcctccatccgccctcggcccactgcgtcggcgccggcgccgccctcggcccaccgcgtcggcgtcgcctccgcccgccctccgcctccctcgcgccgtctccacctccaccgcgccggcgccgtcattttctttcttttcctttccttctcttctctttatctcagcgatgggcgggcagcgtgcgagcactgaggcacggcagccgagcgacggcgggcggcggcagctgagtgcggccacaacagccat

SEQ ID NO: 77845 - DNA, 396 bp, Oryza sativa
  unsure (1)..(396): unsure at all n locations
  Clone ID: PAT_MRT4530_77706C.1
tgagttttccccatgaatcaattaccagaacgcctcaggngtaagttccttcctccttgctgctgcttcccctctcaattcctattctctagtcccaatctcctgcttcctcttgtctaatctctcttcccagactatacctctctttctcctcaattttgtatccctaaacacttatattcttgagtggattgcaatatatcggtggcatttgtgtgagagatttggtgtgattgtgttggttcgtgacaatatggtatcagagtagtcgattcgtgggggtttctggtgtngagatgaagtgggagagcgctnggtggcaagagggactgccagcaactttggtggtggtgtcttttgaggagatgccacaacctntcgatgaaatatcgtcct

SEQ ID NO: 77846 - DNA, 237 bp, Oryza sativa
  Clone ID: PAT_MRT4530_77707C.1
ttgtcccacatgatgagcaagcctgacagagcccagagcggcccgagcgtgcacatcatcatcaggatcaagacgagaggattctacctgacggggctgaaggtcatgaacgtggttaggtcctttgcacaaaccctctatgccggccctttcgactagcccattcttcctagatgggtggagaacatcatctatggccccataaaggcaatggtactggaagggaaggatgttctt

SEQ ID NO: 77847 - DNA, 1960 bp, Oryza sativa
  Clone ID: PAT_MRT4530_77708C.1
ttaagaaacgcacatatgtttgcaccatgcaccaacgacctgcatagagagatcgatcagcttctgggttgaaaccaggcggaaacaaaggaagatataaaaagaattgcttctatttcctcctcccattggcattgatgttggtaagagtgggcaatacatagttcaaaaagaaaaaaaaaatgaaagaatggataatacatcggtgatctacgagactacatacaacaacaaagggctcttctatattgttctacgatgggcccaagcttcgcttcctaccaggggaaagctttcaacactaaattgatttgagggcatgtataaacaaaaacctatgctcccgtgagatcatgcctgcaggactgcaacaatcgccatttctgcttattgagcagcctcactagacacatccttgatcagtcatggcttgtgcaatattaagaaacgcacatatgtttgcaccatgcaccaacgactctgggttctctttcatgattccataatcttgagcagctttgatagatctgtcatatgtttgtttcaccgcatcctgtatatatttcatgtaatcaaacccttccgtgtctaacaaataacccttcgaatctgaaactgtaacaggaatagcttcacatgacagaagcttttccaatacatgcattgctatctttccagaaccacttatcacacatcttaatcctttgagttccttgttcatatcagcaagcactacacgtgcaaagaataccagtccgtatccagtagcttctgttcggaaactagaaccagaccagaagattttaggccctgtaaaattcccctgaaaatgaccagaaaggcgtctatactgcccaaaaagataacccatttctcttggacccacaccaacatcttcagcaggaaaatcctgatcaggccccaaatatctatacagctcatccatgaaactttgacaaaaacgcattatctcactttcacttttacccttgggatcaaaatcactccctccagcagctcctccaagtttatattgtgacaaagcattttttagagtctgctcaaaagctagaaattttgctacgctcaaagtcatggaagggtggaaacgaagaccacctctgcatggacctaacgcttgactgaactgcacacggaagcctcgatttacatgtgcttcacctctatcatcaacccatggcactctgaagataaagcatctctcaggttccaacaaacgctccaaaatttggacatgttgggagttcttcaccaaaactggttccaaggaatgaaccacctcttggatagactgtataaactcagcttcatgagggtccttctttaggatagattcaagtatagaggctgcagttttcgacagagctttgacatataccggcctctcgatctcagggggctgcgcgttctccttggacgccgtctgcaaccgcagcgcctccttgtgcagcaagctgttgttgtgctcctccagcgcgctcatctgcatgttcctgctcccctcgttcccgtagggattccggcggtgcttccgcccgtactccttgcacacggtgcagaagatcctgctggtgttgtcgtgcacggcgacgtaggcccacttgtaggtgtccgcccactcctccctccatttcttcaccaccttcttcttcttcttggtttgccccggcagccgtagcagcccgtcgtgctcctccacctgcggcggcgtcggctgcggctgcccctcggcgacgggctgcgagcacgggatgaggaggctcttgtggtcgtccgcggggtcgtgcgcgccgggggtgacgccgacgagggccgcgccggggaaggaggggtcgtcgcccgggccgatctcgaggtcgatctcctcgccgaggccgcgcaccaccaggtggtgctggtgctggtgctggtgctgccgcaataggttgagctcgtccat

SEQ ID NO: 77848 - DNA, 610 bp, Oryza sativa
  unsure (1)..(610): unsure at all n locations
  Clone ID: PAT_MRT4530_77709C.1
ggtcaccagcttccttngcgccgcccgcntccgncgcgcggcggcggcggngntgttgcggcggntgccntngatggcggncngggnctggcggtgggngctggncntgganncgccggcnncantngaaggcgcggcncgcccngtcccnggcgncccgctgccgctcggcctntngcgggggccccgggtcacccgcacgnagcagctcnncttnctccnccgcttnntggcctngccgctcgtcccctnctnctccgcctccggcgccggcctntnngtcnnccacgcccacctngtncncntngcccgcngcttgtcttttactntcttggnccgcttcgtgtacngnngcttntngctgttgtgnnggngnagttntncnntcggccngaggtntnctggtncctgnatatncagnggccctgccctgntgttgttgtctctgngtgttggcnccnnactcttgnttncccnnntanngctttgctgctggagcngtacnatctgaanaaaggggntccgggcnnaccatattncnccccagctncntccnnntgttncttggagctnttngctnnnatatncttgtaaaacnggttactggggt

SEQ ID NO: 77849 - DNA, 415 bp, Oryza sativa
  Clone ID: PAT_MRT4530_7770C.1
tttttttttttagatcaaaggctttcgccagctttactaacaaagcataaaggttgttcgatacaggcagaaaacaaaaacagcaggaaaaaaaaaaacgatgttggggtttccaacttaaccagaagtacaaaaatttgatcacaagctaacagagacacctaaccatttaggtgcccaaatttgatcataatctcgtaagcatcaacatctcaaaaagaaggtgaactctatgacagtaaagatggctcggaacaaaaaaactggagaaatttcctgacaactgttctgctggtattagtttggtgatggaaggagcttcctcagtgtaattgaagttcttatctgctgctcaagctccctgccaccccattgctgagcacctggcttgcggtttatctcatgtttccataag

SEQ ID NO: 77850 - DNA, 283 bp, Oryza sativa
  Clone ID: PAT_MRT4530_77710C.1
atggtggtggtggggcccaatttatcccggtggttcatcgactctgctgtggaggaggaggtacaacacgtgtcaaagcggtggtgcacccgaccagggaggccgatacagctggacatggtcggggtgacgatagcaagaagccaactcatgaggaactctattggtgagacgatagtggtggtagctgaggaagaggacactctagcatcgcagctttgtgaagggatggcatttctgcaagaggtggtgttggcttgcactatagacccgacgaaggcgg

SEQ ID NO: 77851 - DNA, 446 bp, Oryza sativa
  Clone ID: PAT_MRT4530_77711C.1
tttttaaataaatttttttttttttttttttttggaaaggggtgcatttttttattatcattaacattctcatatacaaccactacaacttattgggacctcaggtttctgactgtagatatacacaaaaatttgtacttatcataggtttgggatccttattttgactgcagaaactaggcaagagcgctctttgattcaaatagaacacaagtatgcgcttccacatgataagaggataatcctggcacttgttgcaccttgggattagattcggttgcaaagaaacctggaaatgcaagggatgtgtcaaccaagcgcaaccacacggatccttctgcaagagcaggcaaggcagcactcactgattcctcgtttgcattgaaacagatgtacaggtcgcctttgaccgaatctgccgccatttcatctacctttgcatttat

SEQ ID NO: 77852 - DNA, 1570 bp, Oryza sativa
  Clone ID: PAT_MRT4530_77712C.1
ccccggcctctggatgagccgcgccgagcgcgacctcctgtgcctcgatggctccatctgccctgcgcctcttatcgtttctcgccactgccgccccctcctccgcagtacagcagcatggcgtagcggtggtgggcatggcggcgcaccaggtgaatggcggcggcgacggcggcggaccagttgagcgtgccgatgatgccggcgccagcggccagccgcctcgcagctgcagccctcgggcgagtccgcggtgaacgccaggagcccgttcaccgacgacacctccaccgacctcgacgacagcgccgacaagcaccacctccacgctcccaccggcgtcggcgacggcgtagacgccgacaacggtcaccaactccatgggtcagctggccattccaatggaagaggaggggatgctgaggtacagcgtagacctgcgcagaatcacgaggcggggcggaagagccgtattaggaagaagggatacattcagctgttggagagcggcaggtccaagctgatgcaccttgagcaggagctcccaacggggcaagagcaggggatcttcattgcaactggaggctccggcgatcacgggcactcgatcggctcgctgtggctggcgcggccgagggacgcgcgtcacggcatggcagagcgcgcatcgcaccgaccccgcccccggcggcacggccaggtacgcgccgcagccaccgcctacgagctgtgcgagctcgtcgacgccgtgatgatgcactacgaccaggtgttccgcctcaagagcttcgccaccaagtccgacgtgttccacgtcctctccggcatgtggatgagccccgccgagcgcttcttcatgtggctcggcggcttccgctcgtcggagctcctcaaggttcttgccagccatcttgagccgctgacggatcagcagctgatgggcatctgcaacctgcagcagtcgtcgcagcaggccgaggacgcgctgtcgcaggggatggaggcgctgcagcagacgctgggggacacgttggtgtcggcggccgccaccgtggtcagcggcggcggcggcgccgacaacgtcaccaactacatgggacagatggccatcgccatggccaagctcaccacgctggagaacttcctccgtcaggctgatctgctgaggcatcagacgctgcagcagatgcaccggatcctgaccacgaggcaagcggcgcgggcgctgctcgtcatcagcgactacttctcgcggctccgggcgctgagctcgctgtggctggcgcggccgagggactagactgactaaagaggatcaatatcatttgcctgagttctgagttctgacgatggatggaggtgaacctgttttttgattgctgaatcctgagagagcgttaactgcgatcggcattgtaaaatcagttgctttggtgatgaagcagtagtagtaggagaatattttagattgggctcttgggcctgtaacgtgttgtagtgttagcgtagtaagaactaatccgcgtacaatgtcaaaaggagaagttttattacaggcctatttccaatc

SEQ ID NO: 77853 - DNA, 565 bp, Oryza sativa
  Clone ID: PAT_MRT4530_77713C.1
aattcggcacgagctttcttvcaagctgagctcccagctcacttcttcccatcaaatctcctccaaacacttgagatccatccctgcatgtcacaccacaacaatctcaagtatccaagcctcccatccatccaaatatcttgcacatgcatggattcgtgagggagatcgggaagaaaataggtggagcttgctgctggttgcagcagcaaaacaaccatgtttttcctccacttggtcattgatgcaagattttagagcaaagaacagctgcaactcgtctctctccactccgacgattacaacccctatctccctcggtttactcagattcggagaattcggagtacgtggagcaagactctgaggttgagtgtgtttccacgcagcagcaaggagaggattccggttatgagttatgtttcttgtgtggtcattgctttgccaagggcggcgagggcaataaggtgatctattgcagcttggctcttscccggttggtttsccctagtggggttgtggcaccaccggttttatcttttkcttatgaactctaattgagact

SEQ ID NO: 77854 - DNA, 1619 bp, Oryza sativa
  Clone ID: PAT_MRT4530_77714C.1
atgtcgtcgggaggaggccgtccgccggcggcgcagcacatcgtgcggtcggtgcggcagcggttcgtgccgctgccgccgccgctggcgcgggcgcccttcgcggcggcccccggcgattaccaccgcttcgcggcggcgtcccggggcggcgagatcgaggaggggattgtcatcaggaggacaccctcatgtggtattgacgccaaagtggaaggctttgtgaaatgtctgtcttctggttcacctggaaatccatccactcctgccagttctcgctatgacaattcattaggactattgaccagaaaattcattaatttgctcaagcagactcaagatggcattctagatttgaatgatgctgcaaagatattagatgtatgggttcggaaacggcgcatatatgacataacaaatgtactggaaggaacaggtttgatagaaaagaagcttaagaacagaatccgttggaggggttcggatgactcaggaactaaccttgatagtgatatttcatgtctcaagaccgaagttgaaaacctttacatccaggagcaagctttagatagaagtataagtgaaatacgggaaaagatggaggagttaactgaagacgaaagcaaccataggtggctatttgttactgaagatgacatcaagggactgccctgctttcagaatgaagcattaatcgcaataaaaggacctcgtggtactacagttgaagttccagatcctgacgagcttttgcctcaaaagaaattatctgatgaacacccttactatattatcagtcaatataagaaaatggaggagctaggtgaaactgcaacacctccaaggcatgcaagtgttgtagagcctccctccatagcaacagaagctggacatagcagcaagcagaccatgccgttgaatgttcagcaggatatccaggaaactccggagcttaatgcttcacgtgcttttggaaggatgaagaagattactccttcagatgttgatactgatgctgattactggcttctcaccgatgatgatatcagcattactcatatgtggacaacagcatcagaaatgcagtgggatcagattgacaccaacgacttcttagctgaagaaataagtgacaccccatgtgcactcaaccagccgtctgctgcagccagtgaacctacaggcgtgggcttcaaccatggataaccagtaaggtttactgctagaccagatctactggtgtcgattgaggttattcggtatgacttaattcctccggtggtttccatgggagtctgcatcctttcccagagaacaggaagtgcaggcgcagcgtgaagatgtacatactgagatagtcagatagccatttttttctggattggcggtatggatctgaaaacatatttgcttatcactccacttatgatttgattaccctcctgttccaatggtgatcgatatgattgtacatagaggcgctgcttcgttgtgttatttttatagctcactcaggttctttctcccagcttaagctacttggtagggtcagtctgtaaatagttcgactagggtgtacagcatatgagcaaccattgttctatgcaagtttcatgcag

SEQ ID NO: 77855 - DNA, 266 bp, Oryza sativa
  Clone ID: PAT_MRT4530_77715C.1
gttctagcccagtcctgagagcctcaacaactatagcactgatctcattgctgtacaaattgtcgaaaagcccatctgtgccagcaataataacgtcgccaggagcaactggaaagtggaatgtctacataaccaaatatgagacatcaataatattattgatgataaagaacgtaggagtcattcaacgaagattcaaagatgtttgctcaaaccagacagttcaaaatttcaagaagggtgattactcacctgagcagaactag

SEQ ID NO: 77856 - DNA, 221 bp, Oryza sativa
  unsure (1)..(221): unsure at all n locations
  Clone ID: PAT_MRT4530_77716C.1
ttcttttttaaancccgccttattgaacgcggggttcgtgggtgtgtgcgtgtgcgtctctctctcagtctcactctctgtgtgagtgcganacagtgagacactgcagcctttctcctctcccttcttcttcctcctcttctagctatggctttcttggtggaaaagtgcggggagatngtggtgtccatggaaatggggccgcacggngcctcngntgt

SEQ ID NO: 77857 - DNA, 327 bp, Oryza sativa
  unsure (1)..(327): unsure at all n locations
  Clone ID: PAT_MRT4530_77717C.1
cttgattgtatatttaaaaagaataagtcaaaatcgaactagtttttttttttgaaaggaacacagcagggaggcccaaaaaaatcgaactagtggaatatttgaatcagcacaatgctgcaatatttaaatatgaaactgctgtagttcatatattgggtggattatgtgtcaatgatctaatttaagctatagtaggattcaatctaaacacaaactataatttaaattgaaattaaatgagaataatgtgctcagtcactgcaatcttccttttgggttttaggtgggcaatttcgacccggtgacacgagagcctctgaangg

SEQ ID NO: 77858 - DNA, 1204 bp, Oryza sativa
  unsure (1)..(1204): unsure at all n locations
  Clone ID: PAT_MRT4530_77718C.1
acttnnnnacgtgcggtggttttatcggtgtgctctttcgaccttctactcgggtgttctcttgtttatatttcttctgtcgtttcgtactttcctcgttcgtttctcgtcttatattgttcttttgngttcgttgttttctcgntttttttcttctctgtgtttttcttctattttcttttttgttgtttcttcttctttttgtccattggttttcttattggtcctctagtcttttttttatttcctctgtcactaatctcctatggtcattagttccttcgtctaaggatagtttttaggtgtgttgttatttttttgattattctttcatatctatttttgaatccatcttttttgtataagttgtatgtgttcattttattcttgtttgtgttgtattttgtatttatcttttttttttttatttatattatattgtatattttattttttctattttttttactttgtttttacttttttttttttgtttttcttnattgttgtttctttttttagtttcttttatttgtttttttttttttgtttttctttttctgttttatctactatttattttttttcttttttgttttttttgtttttttatttttcttttttctatattgtttagtatttttttttttttgtttttttttttttttttttttttttttttttttttttttttttattattttttattttttttatttttttttttttttttatttttttttttttttttttttttttttttttttttttttttttttttttttttttttttttttttttgtttttcttttttttctttttttatttttttttttttttcttttttttttttttttttttttttttttttttttttttttttttttttttttttttttttttttttttttttttatttttttttttttttttttgtctttttttttttttttttttttttttttttttttttttttattttttaatttttttttttttttttttttttttttttttttttttttttttttttttactttttttttctgtttttttttttttttttagttttttttagttttttgtttttttgtcttttttatcgtttttttttttgcttttatttttttttcatgttttttttttttttttttttttttgttgttttttttttcttttttttttttttttggttttttatttt

SEQ ID NO: 77859 - DNA, 693 bp, Oryza sativa
  Clone ID: PAT_MRT4530_77719C.1
atggcgattgtgggtgtttatccgacatacaactgtcataagccacctataaaaggagctcagtccctcacttgtgtgacccaggacgccatcaggctccgcctgtttctgttctccctacttgggaggggaaaacagtggttctactccaagaggggtgccatagacacttgggagaggtgctcaaatgcattcctccgtgataacaacaaaaggccgcagcccaccacggagatcgtcaaactaacagaagagtgtagcgcggctatactcaaccgacttcctaaaaagaagaaagatccggggtgtcccaccatcaactatacaattgggacacaacacttcgaccatgccctatgcgaccttggagcaagcgtcaacattccggtgagaatccggggttgcttcattcctatggattttgtggtgctggatatggacaccgacaaggacaccacacttatccttgggcggtcgttcctgagcatgacagacgcatgcatcaatgtgggagccgaagaaatccgaatgcacatcaatggcaagttatacacttttgaaacaaggcccaacaagaaagtcctcggccaaaattggaggctagaggggccggcccaagttcggctggaccaggggttcgaccgaaccctagctgcggcatctcatcccggccttccatgtgaacgtccatga

SEQ ID NO: 77860 - DNA, 114 bp, Oryza sativa
  Clone ID: PAT_MRT4530_7771C.1
atgaatggcgaatcgagggaggaatatggtaaaagctatgctcaaaggaagagaaagatggacttaaacactatagatcttcgcgtgatccgcttcccccagaccagccaatag

SEQ ID NO: 77861 - DNA, 1998 bp, Oryza sativa
  Clone ID: PAT_MRT4530_77720C.1
atggcggcagggacagaggcggcgcgggactacggcggcggcgtgacggccagcgtcgtggtgacctgcctcatcgccgcctcctgcggcctcatcttcggttacgacattggcgtctcaggtggtgtgacgcagatgcaatcgttcctgaccaagttcttcccggaggtggtgaaggggatgcgtggcgcgaagcgggacgcctactgcaggtacgacaaccaggtcctgacggcgttcacctcgtcgctgtacatcgccggcgcggtggcgtcgctggtggcgagccgggtgaccaggatggtgggccgccaggccatcatgctgaccggcggcgccctcttcctcgccggctccgccttcaacgctggcgccgtcaacatcgccatgctcatcatcggccgcattctgctcggcgtcggcgtcggcttcaccacgcaggcggctccgctgtatctcgccgagacagcgccggcgaggtggcgcggggcgttcaccgccgcgtaccatatcttcctcgtcatcggcacggtggccgcgacggccgccaactacttcacggaccgaatcccgggctgggggtggcgcgtctcgctgggcctcgcggcggtgccggccacggtcatcgtggtgggcgcgctcttcgtcccggacacgcccgctagcctcgtcctgcgcgggcacacggagaaggcccgcgcgtcgctccagcgcgtccgcggcgcggacgccgacgtcgacgccgagttcaaggacatcatccgcgccgtcgaggaggcgcggcggaacgacgagggcgcgttccggaggctgcgtggccgtgggtaccggcactacctggtgatggtggtggccatcccgacattcttcgacctcaccggcatggtcgtcatcgccgtcttctcgccggtgctgttccggacgctcgggttcaacagccagagggccatccttgcctccatcgtacttaccctcgtcaacttgtgcgccgtcgtcgtgtcttccttcaccgtcgaccgcgtcggccgcaggttcttgttcctcgccggcggcaccgccatgctcctctgccaggtggcggtggcgtggatactggcggagcatctcgggaggagccacgcggcggcgacgatggcgaagagctacgcggcgggggtggtggcgctgatgtgcgtgtacacggcgagcctcggcctgtcatggggaccgctcaagtgggtggtgccgagcgagatctacccggtggaggtccggtcggcggggcaggcgctgggcctgtccgtctcgctcacgctctccttcgcgcagacgcaggtgttcatgtccatgctctgcgccatgaagtacgccatcttcctcttctacgccggctgggtcctcgccatgacggccttcatcgcgctgttcctcccggagaccaagggcgtcccactggaggccatgcgcgcggtgtgggcgaagcactggtactggaagcggttcgccatggacgccaagctggacgcccaagtgaactgcctctaagactgtcattgttacagcggtgtgcgcgcgcggaaaacgattctaaactctcgacgagacatccctgtgtctatatggtatcaaaacagttatgaaaattttaacttgcatgcatgccatctaagaaacgagggacttttccaggagagtttagaagaattcagtgtgtgcgagctcatccatgtcttggttggcatgcagcttatgtgtcagtgtgacagtgtgtgacttcattgttctgctgaaatcttcaaactgtggtttcggttgacaagcatgcatgtggtaaacaatgtgtcaagttgtaaacagatatagcttatggccaactgaacatgtcggcgtgagttggcaataagagcgtccatggagtgtacaccaaccagctagatgcgtgtttgcatgtttttgttgattgattaatctgtaaagggaaagaaggagatgaatgttgttgattaaagattgctccag

SEQ ID NO: 77862 - DNA, 405 bp, Oryza sativa
  Clone ID: PAT_MRT4530_77721C.1
atggcttggttggaggggtttctccaaatgctgctgatgtcccaacgcttcttggatcaagttccttctcccttcttgcatactgagattgtttctgtttctgcagctacttttgatcgaacgggacgttatgttattactggttctgatgatcgccttgttaaaatttgggcaatggaaacagcattttgtctggctagctgccgaggtcatgaaggtgatattactgacctcgcagtgagttccaataatgctgtggtagcatcttcatccaatgatttcattattagagtttggcgtatacctgatggcctgcctatctcagtgctgaaggggcatacaggggttgtaaccgccattgcatttagtccaaggcccggtgctgctttccagctgttgtcgtga

SEQ ID NO: 77863 - DNA, 492 bp, Oryza sativa
  Clone ID: PAT_MRT4530_77722C.1
aaattttaaaaatatttgaaaaatatcacatgtgggtaaggtgatattagacaatcatacaaaatatcaagatgaaactcctctccatctatgagataggaaatcgagaaacagtgaaaaacaaaataacaaaaaaacaggtatagtgtttcttcattgccattgttaattttatatctcacaaacgaagtctgaatttgttgttaaaaattttgtatggttgtctaattacatcttccctacatttgtgattttccttatatattttctgaacttccatgcaaaagtttccagctaagttgtaggttccactacatattttcccatatctccattactcttctgcaatatccaattcgtgtggaaaagttggcctgcacatttaccatagacctctgctttacagtcacctctgacccaatatagtgtttatggcccagataagaataatatctggccattctactatattggctgaaaattgtattgcaa

SEQ ID NO: 77864 - DNA, 288 bp, Oryza sativa
  Clone ID: PAT_MRT4530_77723C.1
tgatgtagggaaatgggggtcgggaagaaacggggggataaacgtattccaggaaagggatacctgcacagttcggggacaacattacaagctgagaaatgcgagctgcgaagggcttaccaagaacattaagtgatggccaagagataagggctccatcattatgacatatcctggtgattgtggcgtgctcctctgatacatggataccaaaagacacccacggaatctggaataaatacatgctgaacagaccttgtgctctgtattgctgttcctgatcgcttt

SEQ ID NO: 77865 - DNA, 340 bp, Oryza sativa
  Clone ID: PAT_MRT4530_77724C.1
gcccgtcctgaccggctcgacccacccacgcggttttatattgccctcgcacgccacgatggcggggggggttattattgcatgtggggggggttcaccccaatgcccgcctgggctactcacaacgcgttctgctcaatatcggatacatagggcttgagggccaactgcctgatgaactgataggcaacaacaatactggagcacatatacaaacagatccagcacatatgggacggggacccctcatcggagaggtcacaaggggtagaaaaacatgttcaattcgggactgcggttaagacagcacaagaacacgtacacactgaggcatgtggtg

SEQ ID NO: 77866 - DNA, 237 bp, Oryza sativa
  Clone ID: PAT_MRT4530_77725C.1
tttttatatcaacccgctccacaccaacctggtgcggggccttttgaaccacttcacgcgtacctcccaccccccggagatctcggccaataaggcctaccactagcagccctccctactggagatcaccattagcgccttcgagccttccttcattatggccaagagcgacccgcgccacagcaaagtcatggcgtgcttcctgacttaccgctgccaccatgtcccccatggtac

SEQ ID NO: 77867 - DNA, 1596 bp, Oryza sativa
  Clone ID: PAT_MRT4530_77726C.1
atgcacccactcaccctctcctccaccgccctcctccgcctcatcaagtcgctctcgccggcggtgcgtagggcccacctgtcggcgtcctctatccactgcctcctcctcaaggccggcctcctccacgtcggcgcgcacctcccgacggcgctcctctccgcgtatgccgccctcggcagcccggatcacgcgcgcaggctgttcgacgaaatgcccgagcaaggccttgtcccgcgaaccgccatggcccgggcgcacgtcgcgtctgggcaggcggctcaagcgatcgccgtattcggggacatggtggcggatggtgtcttcccggacaatgtcgccctggcagtcgcgcttggggcatgccatggcgctggctcttggacggctaggaggaatccaggcaagaagatccatgctctcatcgtgaccagcggcattgagccagatgtgtttgtctccaccgagctgataagggtctacggtgagtgtggcaagctggcggtttctaggagggtgttcgatgacatgccgtcgaggagcaccattacatggaacgccatgttgcatcagtatgccaggcacgggaaagttgacacggcttatgagctgttcctcgcaatgccgaggagagatgttgtgtcctggaacacggtgttggccgggtactgtgttgctggccggtgcagggaggcacttggcttgttccgtcagatggtgtcgccgtcatcgtgtgcggtgcatcctaatgtgcctacgatgagcactatcctcggtgcttgtgccggcgcgggttgtttggagaccgggatttgggtccatgcatatattgagaggaacaggatgaatgatgatggctatctggatcggtgcctgatagacatgtactgcaaatgcggaagcatcgataatgccctacaggtgtttgagaaggcacctaggaagagggacctgttctcatggacaaccgtgatctgtgggctggcaatgcacggccgcgccactgatgctttgagaatgtttgacatgatgcaggataatggcatatgcccggatgatgtcacgcttgttggggtcctaaatgcttgtgcacatggaggtttggtagacgaaggtcttggctacttctactccatggaggcaaaatttagaatcacacccaagattgaacactatggttgcatgattgatcttcttggccgcgttgggcgactgcaggaagcatatagcatgataagaacaatgccaatggatcccaacacggttatttggggtgcattcttgagcgcgtgcaaagttcatggcaatatggaactcggcaagattgcggcagaagagctcaccaggttggatccagatgacccttgggggagagtgatgctgtccagcatgtacgcgaaagcacaggattggattggtcttgcccgggagaggagggagatgaacagcatgcaggtgaagaagactcctgggtgcagctcgatcgagctcaaaggcgaggtgcatgagtttgttgctggtggcagtcagcatcctcagtatgctgagatttgcagtgtactgcaagatgttgaagctcaaacaaatgtaggttga

SEQ ID NO: 77868 - DNA, 452 bp, Oryza sativa
  Clone ID: PAT_MRT4530_77727C.1
ctaaagccccaccgtgaatggggtccaaaagtttcctgttggtccaatggacaccaatacgctgattgcgaaacactctgtgcgcaaacatgaccgggatttgccttggatgttgcaagttgcattgatgcaaccctggatgccacaaatgtgcaaatgactggttgacactttggaaatggtgttgtggctgggagtgaaggaatgcttggctgcggaagacttgcgtggaacacacacggatggatggaatgccccactgcaaaaggatgggatgagtcgcaacgcaagaacacctgggtgctgcctgtgaagctgcttggttgtgtaacttgccataacgcaacaagttggagaggtttgcatttcctggcctggggctgaaaatgtgttggtgcagaagtggcgtgggtataatgttgcaatgagggtgagatgttggaccccacacg

SEQ ID NO: 77869 - DNA, 494 bp, Oryza sativa
  Clone ID: PAT_MRT4530_77728C.1
gtggggacttgctcatgaatccagcaactgctagcgacaataatacttccagcacctgattgtatagtaaatataaactagtaccagatcataaaaacaagcacctagtgcttgggtatatgatacttagaaaaaagaagaaaaaacagagtatgaaagtgatatatgctgattccaaatttcctatagataatgcattgtttaaccttcacaaacaaaagaaatgaagaaggcacgtgaattttctatatcatttaaaagtaagaaatatataccttcagccattcgatttttatgcatttccggttatctctaaaagaaaaacagaactgagcacccatcaaaggcggacagaccaaatttacaaaggagagtgaatatcacattttcttcacctgtgctttctgcctggtaaattattgttcaaacactccattttgtccttcaggcctaatttacaatacctaaactagaaaggtacaaattatttttat

SEQ ID NO: 77870 - DNA, 285 bp, Oryza sativa
  Clone ID: PAT_MRT4530_77729C.1
ctagtgctgcaggcagacgtcgatctggacgacgccgccggtggcgaggctgtagtcgtagttcttggtgaccatgtacccgcgcgcgagccgaaaccgccccgtgccgccgatcaccaccgactcgcgctccccggcgtccatgtcgatgcggcccttcgccgtcaccgagctgccgcggtgctcgccggcctccagcaccatgtgcaggctcaggtccgacaccacgcgaagtgaaaaacgtctcttcgtcttccccgccgagactctcgccactttccccat

SEQ ID NO: 77871 - DNA, 306 bp, Oryza sativa
  Clone ID: PAT_MRT4530_7772C.1
gcgtttcgtttgtctttagtgcatgacgcactcgggcaagagggagtcttcctgctcctgctgctagaagtcgtggtgcttgtgtgacaagctccagagaggttttgacagacggccggtgatccagactttgcgacgactcggtgtgcgccacaggcaggaccactactgtggtggcaggacaccttgaaggacaccagaaaagcagtctgcgaccactacgactcacggatcaagcccaccgaagccgatgctgccacccgcagaaggccaagctccgagaacggacatgcttgcgaccggggt

SEQ ID NO: 77872 - DNA, 618 bp, Oryza sativa
  Clone ID: PAT_MRT4530_77730C.1
agttcggcttggtgaggccaagaatgtgagccctaaattcacctgacaaaggtgccagtggggattcatctgtcgctgcaaagcctttggaagttaaagaggccggcttagcataaagccccagggtgattggttcatactgaaaattctctgatccatgctcttcctctttgaaatactaagaaatgggcgaagacaatgtccagcgcttctgtctggtgaagcattgtacactaggataggatggaagcctagctccttaaatagtttctttttttacctttcttttgttccttatcttttcctgttggtaatatttttcgttgcgtttatatgatgatcgattccttagtggctagccttaaggagagctgcagtttttgtgcaagcctctgtaaatttcccagttcaatcgatctcaagatgaataaggccttttgcctcctccagtaaaatcctctttaatctacttgtcttatactgaacaaggtgtgtctggaaaacaacataacatctgtttgggtgacctggtgatggtaacaataacaacttgttaataataaagagagtgtgaccttgtggtggtcgcttatgtgaaaaaaaaaaaaaaaaaaaaaa

SEQ ID NO: 77873 - DNA, 469 bp, Oryza sativa
  Clone ID: PAT_MRT4530_77731C.1
aattgggtggaagcggtgggccataacaaaggacccaagggcacagggggtggaatttttccgaaccaggctggaccggccggttttttcaaagaggaaaaacataaggttcttttttacaaaaaaaaaaaaaaaaaaaggtaccaacggtcccctttttggccaaagccacaagcggcccaccgggaaattcgggaaggaccaaaggcaatttttggaaagcagaaggcgggggggtcccagttgaaccaggaaaagggggggggaaccaaggggctcaccctaaaaaaggcaaaggaaaaaaaggttttggcgggcccccataaattatggaaggaaagctcccggccggcaagaaattggtgggggaaaagggccaaaagggagtttaattcactttccgaaaagaagtccctcaaaaaaacacacggtagacctgtggcaagggcaaagggattttttccaaagg

SEQ ID NO: 77874 - DNA, 331 bp, Oryza sativa
  Clone ID: PAT_MRT4530_77732C.1
caccgcctccgcgtcagcccgtgcgccgccgtcgccgccgcaactccagccgtgcgccaccgccgctctggtcgtcgtcgtcgctcgggatggtcgcagtcgggttcgccaagttgttgccgtcctcgtcccgtcctccgtttccgccgaagatcgccggagcaccgctgtcgccgtcgacccgaacgtctccgccgcctcgacctcgccgacgtgctgtccgtttgcaccgccgcgccgtcattcgccggcgagcacgaggtgccgagccgccatcggcaatgacgtcatcgtcgacgtcagcgccacatcagccgtagacccgtggtag

SEQ ID NO: 77875 - DNA, 558 bp, Oryza sativa
  Clone ID: PAT_MRT4530_77733C.1
atggacaccgggaacaaaggcacggcgacaccggtgctgctcaacgtctacgacctgacgcccgccaacgattacctctactggctcggcttcggcgtcttccactcgggaatcgaagttcatggcatggaatatggatttggagcccatgatttcccatcaagtggtgtttttgaggtggaatcgaaaagctgccctggctttatatatagaaagacggtgtggctaggcacaactgacatgtcccatggagagtatcgctcgttcatcgaaaagcttgcagggaaataccatggcaactcatatcatttggtttcaaagaattgcaatcacttcacggatgatgtgtgttcattttttgattgtcttctaccagaaagtgtccaggtttctcctgttgggcgtgtcccaactcttcgtccagtagctgatgatgatttggattcaatatccacagttagtgacaacaatgaggaggacaaacacttgctgccagcaccgtcgaatgacctacattccgtagatgtaccattaaagttagccaaagatgttctttga

SEQ ID NO: 77876 - DNA, 121 bp, Oryza sativa
  Clone ID: PAT_MRT4530_77734C.1
cggccccggcgcgccaagaagctcgccccgatcactgccgcccgcgcacagacatgaacgcgtcctcggagtcctgcagagcgcataggtcgccggagcaaggccggcaacctcggcgagt

SEQ ID NO: 77877 - DNA, 891 bp, Oryza sativa
  Clone ID: PAT_MRT4530_77735C.1
ttatttttgaaaaggaaaaaggatttattgcgtcagcggggctcgggttcacggtggaccgagtgcacagaagcagtctcggaacgaacggctgagatctaatctaaacaaaacgaaaggccgagatctaaccgatctaccacgggtctacggctgatgtggcgctgacgtcgacgatgacgtcattgccgatggcggctcggcacctcgtgctcgccggcgaatgacggcgcggcggtgcaaacggacagcacctacgggtagagggcgacgcggcgaactcaccggtcggcgaggtcgaggcggcggagacgttcgggtcgacggcgacagcggtgctccggcgatcttcggcggaaacggaggacgggacgaggacggcaacaacttggcgaacccgactgcgaccatcccgagcgacgacgacgaccagagcggcggtggcgcacggctggagttgcggcggcgacggcggcgcacgggctgacgcggaggcggtgctacaagcgacggcgggctagggcgaaggtggcggcgggggctaggaggcggcggctaggcccacggcgactaacggcggcgatgcaaggtttagggttgcagggaagaaatcaaatccgaatcgaactcgaatccgatgatttccaaacgaaattagctaaagtttctataggggaaaagatagaggagatcgaagggatcatttcccctctatcaatttgatcggatcgggaaagatgcggtgggccccacctgtcagcgggagaggagggaaagaggggcggactgggccggcttgagccgggcgtgcacaggccgggggagagagagagagacttgggctgactttcgcccaaaaccaaaaaaaggatttttaaacctttttccttt

SEQ ID NO: 77878 - DNA, 2574 bp, Oryza sativa
  Clone ID: PAT_MRT4530_77736C.1
atggatctggagatcgtgggccggcacgcgctgctgttcgacgacgacccgacggcggaggtcgtcaactccggcggctccctcgtcccctgggccgccgtcggcgcggacgacctcctcctcgaccgccacgacgtccggcacctgctcgaccgcgtgcctcctcgcccccgccgctcctactccgcggccctcctctctgccccctctctggatggcgtctccgaggctgaactcgaccgcgagcgcttcctcgacctcaccgccgacgatttcggcggcgagggctctcaagatgcggtctcttcaggaaatgggacagatacaggttgggctgattataattctgtccctttctcatatgggagtactgctggttcagatgatccaaataatttgagcacatattattgcccatcttttcccgtgcctgacagattgttgaataagctgcctccttctgagaaggttcatcaaattattgcaagaactgctctatttgtcagtgagcatgggggccagtcagagattgtgttaagggtgaaacagggtagtaatccaacatttggtttcttgatgcctgaccatcatctccacagctacttccggtaccttgtagatcatcctcagttgttgaaagatggtctagatgctgattcaaacaagggctgcaaaactgccaatagtgagagtgggcatgatgcatcatcaggcggggctttgtcattgcttggggctgtctatgagtctggagatgaggatgaaggcatgcttccgcctagtccaaaaagcacggttcctggaaaagacgtggttgtgcatgagcaaggtcatgaaagctctgtatctgctatacattgcaacgaagaaacacgggatggtcagaaagcaacggcagcagctactgttgcagctaaagataaatctattttgactaagaagaacccaatgattactggcagcagccttcttgctgctcgcctagagaaggccaaagatgccatgatggcatcaagtacgtcagatgtttctgacacaaaagttgtgattctggaaccaccatctttcttgaagcgtacaatggagaaaatagttgaatttattatcaggaatgggaaagagtttgaaggaaaactcattgagcaagacagaacaacaggaaggtttccatttcttctgccatctaatccatatcacccgtattatctgaagcttctcgaggaaactcaagagtccaagtcccgtggtggttcttcagagcccaaagacagaaaaagctcttcagagcacaaagaccgaagaagctcttcagagcagaaagacagaagaagcccttcagagcgcaaaggtagtaatcatggtaagggagaaagtaaaagcaagaaacggtcaagtactagcaaggatgccagttctcctgatagaagctctgctgagccgtcagagaagcagctctatgacaaacacaaacaagggaagggaaagttccacatgatcattagtggggccaagaaggaacctcctcggaatgtcactgcagatgaagctgctgctattgttatggcagctactcgtggatttggccctgccaatattcaaacaaacacactgaaggacactagtggaattggacccagatgtaccatccaaacctgtttaaatagtgaggcatgtacctcactcacaagtagtggtcagcctaaaaatgaaggcactggaataattgatgatgattggattgcaaacactatcgcaaaagctgctgctgttgcagcctctaaagaagctgattcttctgaagcatccatgacaaaagagcagaagctgaaggctgagaggcttagacgtgcaaagatgtttacctctattattaagagtggtggcagcaagatggctgatttgtcaacttcagctgatcaaactaatgaagctggaagggcctctcctggtgatttgaacttatctgagtctgatccacaaccatcagctaaggaacgtgaaggtagctctgtgccatttgaacgtgaaggctctaatctggccaagcaggagaaagactctgatgacgaacggaacagggcaaggaagtataggaaaaaacatcacccagaatctgacgaggagaactatgattcagaggagagctataaacactctaggaagaagcaccgttcagaggattcaagagctcatactagtgatgttcacaaacataagctcaagagacactccaaggatctggaacccaggcatcataggcaccgtgatagctcttcagaagatgagcatgagcacaggagctccaagtcaaggcatcgtcacagggatgactatcactatcacgaggatgatgagcataggagttcacatagacaccagagggaccaccgttccagttcaaaaaggaaaaaggacgatgaccgagataagagcaaacaaactatagttctcccagaagtctcccagaaccaggaaaagccccctggtgacactgctcaatcctcccaggcaacaactgaagtgccgagtgagttgagagcaaaaatcagagcaatgttgctagaaacactgtaa

SEQ ID NO: 77879 - DNA, 2879 bp, Oryza sativa
  Clone ID: PAT_MRT4530_77737C.1
ttttttttttttttttttttaggatccaactcatccaaggccccatgtggatggccttggtaccgagggggggacctagtcgcccgttgcggtgcgcactcgttatcctgttctctgttctcttttttcaaatgagagagataaccgaacaagtacacttcttgataccctgagtcggtgctgaacaaggagagttggctacattatcccattgtacagcataatccccacagggtattacagatttacagtgtttctagcaacattgctctgatttttgctctcaactcactcggcacttcagttgttgcctgggaggattgagcagtgtcaccagggggcttttcctggttctgggagacttctgggagaactatagtttgtttgctcttatctcggtcatcgtcctttttcctttttgaactggaacggtggtccctctggtgtctatgtgaactcctatgctcatcatcctcgtgatagtgatagtcatccctgtgacgatgccttgacttggagctcctgtgctcatgctcatcttctgaagagctatcacggtgcctatgatgcctgggttccagatccttggagtgtctcttgagcttatgtttgtgaacatcactagtatgagctcttgaatcctctgaacggtgcttcttcctagagtgtttatagctctcctctgaatcatagttctcctcgtcagattctgggtgatgttttttcctatacttccttgccctgttccgttcgtcatcagagtctttctcctgcttggccagattagagccttcacgttcaaatggcacagagctaccttcacgttccttagctgatggttgtggatcagactcagataagttcaaatcaccaggagaggcccttccagcttcattagtttgatcagctgaagttgacaaatcagccatcttgctgccaccactcttaataatagaggtaaacatctttgcacgtctaagcctctcagccttcagcttctgctcttttgtcatggatgcttcagaagaatcagcttctttagaggctgcaacagcagcagcttttgcgatagtgtttgcaatccaatcatcatcaattattccagtgccttcatttttaggctgaccactacttgtgagtgaggtacatgcctcactatttgaaacaggtttggatggtacatctgggtcctgtaaagaggagaaacttccaaagcttgaagtatgtccattatctccacgggtctgaccaattccactagtgtccttcagtgtgtttgtttgaatattggcagggccaaatccacgagtagctgccataacaatagcagcagcttcatctgcagtgacattccgaggaggttccttcttggccccactaatgatcatgtggaactttcccttcccttgtttgtgtttgtcatagagctgcttctctgacggctcagcagagcttctatcaggagaactggcatccttgctagtacttgaccgtttcttgcttttactttctcccttaccatgattactacctttgcgctctgaagggcttcttctgtctttctgctctgaagagcttcttcggtctttgtgctctgaagagctttttctgtctttgggctctgaagaaccaccacgggacttggactcttgagtttcctcgagaagcttcagataatacgggtgatatggattagatggcagaagaaatggaaaccttcctgttgttctgtcttgctcaatgagttttccttcaaactctttcccattcctgataataaattcaactattttctccattgtacgcttcaagaaagatggtggttccagaatcacaacttttgtgtcagaaacatctgacgtacttgatgccatcatggcatctttggccttctctaggcgagcagcaagaaggctgctgccagtaatcattgggttcttcttagtcaaaatagatttatctttagctgcaacagtagctgctgccgttgctttctgaccatcccgtgtttcttcgttgcaatgtatagcagatacagagctttcatgaccttgctcatgcacaaccacgtcttttccaggaaccgtgctttttggactaggcggaagcatgccttcatcctcatctccagactcatagacagccccaagcaatgacaaagccccgcctgatgatgcatcatgcccactctcactattggcagttttgcagcccttgtttgaatcagcatctagaccatctttcaacaactgaggatgatctacaaggtaccggaagtagctgtggagatgatggtcaggcatcaagaaaccaaatgttggattactaccctgtttcacccttaacacaatctctgactggcccccatgctcactgacaaatagagcagttcttgcaataatttgatgaaccttctcagaaggaggcagcttattcaacaatctgtcaggcacgggaaaagatgggcaataatatgtgctcaaattatttggatcatctgaaccagcagtactcccatatgagaaagggacagaattataatcagcccaacctgtatctgtcccatttcctgaagagaccgcatcttgagagccctcgccgccgaaatcgtcggcggtgaggtcgaggaagcgctcgcggtcgagttcagcctcggagacgccatccagagagggggcagagaggagggccgcggagtaggagcggcgggggcgaggaggcacgcggtcgagcaggtgccggacgtcgtggcggtcgaggaggaggtcgtccgcgccgacggcggcccaggggacgagggagccgccggagttgacgacctccgccgtcgggtcgtcgtcgaacagcagcgcgtgccggcccacgatctccagatccat

SEQ ID NO: 77880 - DNA, 461 bp, Oryza sativa
  unsure (1)..(461): unsure at all n locations
  Clone ID: PAT_MRT4530_77738C.1
aaacaaaccacttcaaattggtcggagaagaagagggcgttcgcgcatggggaaggcggcgagcatgagggtggcgctggtgtccgtggtgctcgtgggcctgatcctggtttccacgacccacgccgcgcggcccgagaagctgcccgccgtcgtctccccctccatcgcccccgccgtcgccgaggtcgtcgatgccgccatcaacgccgtcgacctcctggcagggtttcaaaaaccgccgggggcccggttaccgccacccggcgttacggnggttaccggcggtaaccgcgggtaaccgcgttaaccacgcggtttggcgcggttaccgccgaatgtgtaatgggttncacagtaacgggccggccatttttttttctttttccaattttcaatttattctccgtttgctctcaaatttgataatattaatctttttgagaattctcaccataaaa

SEQ ID NO: 77881 - DNA, 415 bp, Oryza sativa
  unsure (1)..(415): unsure at all n locations
  Clone ID: PAT_MRT4530_77739C.1
cattgtcacaactccaattctgatcatactccaagtatatagtacaacaactggatcacaaagccatccatcccatgatcgcatgtcgccttnccgatcatgaacttaattaatgtctacatgctagtnataatatatagggagaacatatatgtcatccagatgttgccactttgttggtaggggggatatgatatgtgtctacacggtcacggattggaccacggggaggaaccacagatattatgcttgttgtgtttctcattctttccttcatccatagattaactactttgatttgatgcccgttggctagtcttggggttaaatatttcaaggttataggagagtttgatttctcctaaagtaagaaatgttatggaaaggagttcttctggtcttcccaaaaaaaaaa

SEQ ID NO: 77882 - DNA, 419 bp, Oryza sativa
  Clone ID: PAT_MRT4530_7773C.1
tgccggggcaaaaagaatggtctgaggcggacgaagaagtggtggctcccatcacctcgtgtgccagatatagggttgtctcaatttcagagaaataggcttgtttttcaggctaagctggttcatcaaatcctcaaagctgcgatgtcaatcaatgaagaagtcctgcttcagatacctattcctccagctgtcacggatgctcttcctaagtctggcagagctagcttgggtgaagacctgtaccatgctataaccacagagtacattcccatagaggaaattttcctctctcttagtttaaaaacggagcataccgtgcttgagactaggaaccggttggaggctgcagtttttgcatggaatcaaaggatctcagaggaaaagagcaagaaatccccaggaaggcattcctggaa

SEQ ID NO: 77883 - DNA, 2098 bp, Oryza sativa
  Clone ID: PAT_MRT4530_77740C.1
tgcatataattgattgtacatctctttgtggatccccggggaaggaagggcaaggccgcaagggaagacacggatcggcggccatggcggcggccatcctccgcttcttcttcttcttcttcttcttcatcctgcccgcctccctcaccgccaccgcctccacctccacctcatcatgccctgatggttggcaaatcactcctgctctcgacaagtgtttcatctacatacctacacccctttcttgggacagatccgaggctctctgccgcaacaacttcaccgctcatttggctgccctatcatcacttcaagacctcaatcttgcaaagtctctctgtggaccttccccctctggatgctgggtcggaggtcatcgcaacaacactgcctcggcttttgcttggaaatggtccgatgattcatcttcttggaatgatactgccttccctgctgacccattgcgcgccaactgcagcactactgggtgtgctcttgctaccaccaatgatgcatgcactttggttaccaatacccatgccgcacttaccgcaaaaagatgcagcgactcacatggactcatctgtatgatcaatcatgaagaccgatgctaccatgatcactgccacaaggagtatttcatagtgctcgtcgttgtaagcggattcattctcttgaccactctagcagtagtagtttggctacttgtctataggcgaagcaagaggaggagaagatcgcgtgaaggttccagtacttcagctaccgcgttagttccaccgctatggaaagtgttcaccagtgaagaacttagatcaatcacaaagaacttcagtgagggcaaccggcttcctgggaatgcaaagactggtggaacctatagcggaattttgccagatggatccagagtagcaatcaagaggctgaagagatcaagcctacaaaggaaaaaagatttctactctgagattgggagagttgcaaagctgtatcatcctaatttagttgcagtaaaaggatgttgttacgatcatggtgaccgctttattgtttatgagtttgttgccaatgggccgttggatgtttggctacatcatgtccctagaggagggcggtgccttgattggccaatgaggatgagagttgctacaactcttgcacaagggatcgcatttttgcatgacaaggtgaagccgcaggtcgtgcaccgtgatatccgtgcaagcaacgtgctacttgacgaggaatttggttcccatctgatgggggttgggctgtccaagtttgtaccatgggaagtaatgcacgagaggactgtgaaggctgcaacctatgggtaccttgctcctgaattcatatacaggaatgaactgacaacaaagagcgatgtctacagctttggtgtgctccttctagagatcatcagtggccgtcggcctactcagtctgtcgagtctgttggatggcagactatatttgagtgggcaacacctctagtccagtcacaccggtacctagagctgttagacccactgattcaggagttgccagatgtaggtgtcatccagaaagttgttgacttggtctatgcctgcacccagcatgtcccttcggtgcgaccaaggatgtctcatgtggtccatcagctccagcaacttgagctaaagtcagcagcatcagaacaactgagcggcacaagcactagcgctacatctccaatgttaccattggaggttcggactcctcgctgaaatccactgctagaggaaaaccaattcagtagtttccgatgtcagtcagctggcagcacatctattgaagtgtctgcttaactagtactaggagaagtacttgaggggagaagttaggacccccataggccaaaccaaattaacctttgtgtagcaatgggctgtttgttgttaaaatggtcattgcccatgtgtacttgagttggcctctatgtagaagatatcagtttagtgagcacaaatttctgaatggttgtaatagtgaccttatctatatatctacatttgatagaaagaaaaaaaaaaaaaaaaaaaaaaaaaaaactcgagactagttctctctctcc

SEQ ID NO: 77884 - DNA, 340 bp, Oryza sativa
  Clone ID: PAT_MRT4530_77741C.1
atggacgaggatgacgacaccgtggcggttgacggcggtgaccggcggcggttgaggcgaaggcacagcttaatcggcaaggaggtgttcacctgggtcaagagcaacaaccggcggctgctccacatcggcgacgttgatagaacaagcaagtatggaaatgacactccgatttgcatctgcatactctccttcaacttcacatcctacatttgcacatcgtgctccatgtggctggccgcaggacaaggtggagtccgccagtgatggagatgatggatggctgctactgcgcaacgtcgagcccatctctataccatgctgctacatcctcccttga

SEQ ID NO: 77885 - DNA, 609 bp, Oryza sativa
  Clone ID: PAT_MRT4530_77742C.1
accgcaaagcctcttctcctcttcttctcctactcgcttactcaatcgctcgaggattcttggattggattattgggttggattttgagttgatcaatggcggcagcggcgcaggctccggcggcggcgaaggtggtggtggcgacgtcgccgagggcaggcggaggcggaggcggcggcggggacaggaaggtggtgccggttgtggtggcggcggcggccggcgacgaggcgcagagcgagatgcacgtgctggcggtggacgacagctccgtggaccgcgccgtcatcgccaagatcctccggagctccaagtacagggtgaccacggtggagtcggcgacgagggcgctcgagctcctctgcctcggcctcgtccccaacgtcaacatgatcatcaccgactactggatgcccggcatgaccggctacgagctcctcaagcgcgtcaaggaatcgtctcagctcaaggagatcccggtggtgatcatgtcgtcggagaacgtgccgaaccggatcagccggtgcctggaggagggcgccgaggacttcctgctcaagcccgtacgcccctccgacgtgtcgcggctctgcagccgtatcagatga

SEQ ID NO: 77886 - DNA, 1530 bp, Oryza sativa
  unsure (1)..(1530): unsure at all n locations
  Clone ID: PAT_MRT4530_77743C.1
cagcttcagctccncccccaccatctccctcctcgccgccggcccccatttctcccgcgtccacttcgagcggcggcgcgcgtgccgtaccgatggctatggtcccctcgggctcgggcggtgggccgccggtgattgcggaggtggagatgaacggcggcgccacctcgggcgccgcaacggtcagggccaccgtcgtgcaggcctccaccgtgttctacgacaccccggccactctagataaagcagagaggttgatagaggaggctgctgggtatggttcacagttggttgtgttcccagaagcttttgttggcggctatcctcgtggatccacatttggctttggggccaacataagcattggtaatccaaaagacaaggggaaggaagaattccggaagtatcatgcggcggcaatagaagtgcctggcccagaggtgacacgcttggctgctatggctggaaaatataaagtatttttagtgatgggagtgattgaaagggaaggttacactctgtattgctcggtgctcttctttgatcctctaggacggtacctaggtaagcaccgaaagctcatgccaacagcattagaacgaataatatggggatttggagatggatcaacaattcctgtttatgatactccacttggaaagatcggagccctaatttgctgggaaaataaaatgccactgttgcggacagcactttatggtaaaggtattgagatatattgtgctccaactgctgattccagacaagtttggcaagcctccatgactcatattgccttagaggggggatgctttgtcctgtcagcaaatcaattctgccgtagaaaggactatcctccaccaccggagtatgtattttctggtttaggtgaagagccttctccagacactgttgtctgccctggaggtagcgtcatcatttcaccatccggagaagtcttggcaggtcccaactacgaaggggaggcgctgattacagctgatctagaccttggagaaatcgtgcgagccaagtttgattttgatgtggtgggccactatgctcgacctgaggtcttgagcttggtagtgaatgaccagccgcacctccctgtgtctttcacttctgccgctgagaagacgacagccgcaaaaagtgacagcactgcaaagccctactaagcaagataatcagagtcaatcgcaaaactgattactgtcactagacggtgaatcattggctccgatcgttcatgcttgacgtccctgtcatccccttgcttgtaaattgcagtccagaacaaacttctgaggtctgtagaacttgccccttttatgctgtgtatctatcaaggtaggtgtcagatcaaacttggttcccctccatatcaaatatgagtagtgcatgaactggcactacgatggtttcactgtcacacatgtggttattttacgttctactcccttggtgccatattacagattattttagttttatcataagttaannttntntaaaaaaaaaaaaaaa

SEQ ID NO: 77887 - DNA, 1059 bp, Oryza sativa
  Clone ID: PAT_MRT4530_77744C.1
aacacaccaaaccaaaataaaagaaaaccaaacaattttcgtaattgtgcccactaccggagccaatatgttgccctgaaaattacctgcatataggaaacatatggtgatttatcaagaaccctatcattactgctcaatcatagagcctaacataaggcagaggctccaacaagtataagtttactctttttcttgtcaacccccagaagccaaccatcaaaaatatcatatatgctactagaaaggtatagtcgaaaagagaactgaactgttctccaaataaactttgcataatgatattccataaaataaatgttgaatagtatcatttttcatacagaaaaacattttagactaccattctaatttcgtcttgccaaattgtccttggttaacaccacccctttaagtaaataccacataaatatcttgatcttaagcagcaacttaagcttctaataatcttatttctgtcaatgtaaccattattaattagagataagtacattgacctaacagaaaaaccaaccactctgatgataactccatctaaaataatcagaagagttattcaactggatatgaacaatagaaacacacaattcatatcaatatgttagattctgaccaactaaagctatgttaaaagaaacattaagcggaacagaacccataacactagcaatagaagaacttctccttctaacaatagcatataaagatggatatttatttctaaagaccaagtttcctaaccatttatcttcccaaaatcttatttgttctctattattcacaatccaagaacgcatacttaagaaagtatttttactttcataagtcctgaccaaaaatgagaatcacattgtttcctatcaacttgagttataaacttattataaagatattttctcttcaataagtcttgccaaacaccattctcgtttattaacttatacaaccacttactcaaaaggcatttattttgaatctctagattaagtaccccaaaccatcctggtcttcgggttggcaaataatatcccatctagtaag

SEQ ID NO: 77888 - DNA, 204 bp, Oryza sativa
  Clone ID: PAT_MRT4530_77745C.1
atggtcaagaatgaccggtctgtgactggcctgatgccggtcacgtctgactggacggacaaccgtgctcccacgttgcatctgcttccggcggagtggagggatggtatttacggatggaaggagttctactcggacaagactgggttttttacatatcgtgaagggtccgatatctccgagtcctacttggagatcaactga

SEQ ID NO: 77889 - DNA, 360 bp, Oryza sativa
  Clone ID: PAT_MRT4530_77746C.1
gctcgatagaaatcagataaatttacaattccaccattctttcttactaaggagaaggaacaaatttgattggactttgcactttggcagtatgtgaccaggcgccccagcggtacaccaacagcgcgcgcaatgaggtgtggatatgcaaggttttcaatttcgatttcttccaaaattttggccattttggttctactgtaattcctaaaaattcaggattttttggcattttttgaccggttttttttttaaaatcttaacatattttaactgaatttgactatattttgatcaaatccgtaaaaaaatgagaaaaaccaaaaaaaattggccgagataatctcttgccgtgggggg

SEQ ID NO: 77890 - DNA, 2309 bp, Oryza sativa
  Clone ID: PAT_MRT4530_77747C.1
cagaggcaatgcttacattctgtactttattcatttcaagatctgtctaaactttttgacagaattattcgagttcagaaacaatgttcatttacaagttttagcctactacaccagattatagactgagggccatgtattgcagcctgaataaactacatcagtacattggcaaattttggtaggctaattaatttggagtctatagtaattggcagagcacgctatttcatttacaactctgttattccagcttctttacaggatctgaatcgaatgcttttgcactactttttatcatgatgcttcagtaaatactatgattgttgaaagaatgacggtgttatttccacgccctttttggcagcaaagaatgattggatcaaatctgaccaagactgacgagaagaatgatccgtgttgaattttgttccgaacttgatatgtgcaggagagcagcttcatttgcacatgatttctcgtaattctgcatgtcagttccatcaatgactaccttattctgctcaaggagggcacacgccgatataatcaaaaccgacaatgaggaaagctaggccttgaatgaagaggaatatgtagtatcccttctttgcataaagcacatcgtagaaaccagacagaattatgcagatgccaacaaaaatttctgaatagtggtacttgtcccagaatctcgttcgtctcttcttgagctttggtattagaggcgttgttagctccacatcaatcactttcacagcatctgatccattggtgtctggctttgtcttgttggcgtctcccaacttctcggtgacaacccactcattgactcggccagcctccaaaataccagttactgccgcctttatccggtgcaatgacatgacattctcgaataggacccagaggatcacaagatgaaatgaactgggtgttccaacagccttgcagagggtgatgactgtaggaacatagacaaccccccagagaggaatttcgatttcaggcaaccaaacggacaccgggatcacaaagcagtagtagatgaatgtcactgtgtgagcagcaatcttcccaacaaagaagaaatcgtaccaaaggtggattttgttccaaaatgacactttcttgttttctaaaatctctaccatcattttcttgaacagatttgctggtccacatgaccatctgtgctgctgaaaccggtatgccttgaatgtgcttggtagctcgctcttgactttgacatcaccaacatatacgaatttccatccctgcaatgttgcacgaaccgcaaggtccatgtcctccacagttgtccggtccttccagcccccagcatcgtcaattgctgcaattctccagacaccagcagtcccattgaagccgaaaaaagagtacaccgaagacccagcctcttgttcgtacttaaagtggtagtccaacgacatttcttggaaccttgtcaacaggcactcattagcgttaacaaatttccagcgagtctgaacaagggcgatctccgagttgtgcacgaggaatggaacggtcctaaggaggaaatcagactcgggctggaagtcggcatcgaacatggcaatgtactcgcactctttcacatagtcgtgcttcaacccttccttgagcgcgccagctttgtaacccttcctgttccctctgacctcgtacttgatgttcacgcctttgccctgccatttctggcactccttctccaccaaatctttaattaccaaactactagtagatctgataattctactggagatatccgtaaaataaatcacgataaaaacctttacaacgaggtcagtggagtcgtcgagcacctgtatgacgacgcggtcggacggccagtccagcgagcacgccgccccgatcgacagcttgtacacctcgcgctcgttgaacatggggatctggacgagcaccatggggaacgcggcggcggcggcgacaaggccggactcctcgtcgtcctcgctggaggcggcggcggcggcggcgccgatggggagccacttgtagcggcggtcgggcctgaggcggaacgcgcgcacggcgaggcagacggcggcgacgaacagcttctcggcgaggatcatcaccgtcatggcgagcgacacggcgaccagcgcccgcacggcgggcaccaccaccgccgccctcgccgccgccgccgccgccgcccattgcgccgccaccgccgcccagaccacccgcaccggcagctccccccacagcctcgccacctcctccgccaccccgccgccgccggacgacgacat

SEQ ID NO: 77891 - DNA, 480 bp, Oryza sativa
  Clone ID: PAT_MRT4530_77748C.1
aacatcttacaagatttatagggtataggaagagagggaggggggtataccatgatgtgcagggttatatggatttggatattggaagtgtatgtggcattttggccaatcacagtaatttcagtattggttttgggatattgtaatctagattcttagtataatgtagcactagcactttacttcaatcctcttgctccatgagaatgatgaagtggcatatatgtttttgttaagctcaaaatcatttgtgctgcatgtcaaacaagaatatactttttttaactgcaacaataccacttgatgatttcttgctcaagaaaaaatattataaattgtattaatgtttttattaatatttttctgtctatttaatttttttatttttttttgataattataattaataatcttttgggggggggccgttttagatattcaaatttatcttcccggttgtgtgatattattttttttttt

SEQ ID NO: 77892 - DNA, 289 bp, Oryza sativa
  Clone ID: PAT_MRT4530_77749C.1
aggacacaccacgcgtgtgacgcgagtccacggaatgcgcccgtcgcgcgtgtccatatgcatcgtgcgtgtccgcgcacagcagaaagacgtacatgagggagtcggagaaacattgacaatcgcccataacgcgcgctcgcgcgcgcccaatccatgctcaatccgcgttctctctgctcggtgcacccctctagcaaaagacagtctacggcacccaccacgccgcaccggcgccccttggttggccgagttcagcggccccccgctcaagaaaggtggtcagtga

SEQ ID NO: 77893 - DNA, 297 bp, Oryza sativa
  Clone ID: PAT_MRT4530_7774C.1
atggggattcattgccaccgctccaccgccatcattgggattcgccgtctccgctcgcagatgagggggagaccggtgatgctgggcccttccaccattgccgctcgcaaagaagatgagggagacaagccagaggtggaagtgaagttgcggagcaggaggagtgccgctgctgcagcaaaagaggaggcagcgtcggcgcggtggcggaaaaggagtggcgcggtggggcggaagaggaggagcggcgtggttggtgggaagaggaagcggcggcgtcgagagaaggggatgtga

SEQ ID NO: 77894 - DNA, 1501 bp, Oryza sativa
  Clone ID: PAT_MRT4530_77750C.1
tgcaggaattcggcacgaggcgctccggtcgccgcgccgcgccgccgctgccgccggcggcgtggagacgtgctccgccaccccctcttcggctcggatccggagggggcccctttcctccgccgccgccgccgccgccgccgccgcagccgcagccgcgactccctttttttacttttctagggcactactcgccgccgcaggcggccgcgggggacgggggagcgcctctccgtgtcccgggtgcccgcgccgcgcagagggggctcacatggctggaaggaaggaaaatccggtgcttactgcttgccaagcacccagtggtcgaatcacacgagctcaagctgctgcaaatcgtggacggtttgggtttgctccctccgtatcactacccgcaagaactgaacgaaagcagacagcaaaaggaaagacaaaaaggggagctttggatgaaatcactagtgcaagtactgcaacttcagctcctcagcctaaacggcgcacagtgctcaaggatgtaaccaacatcggctgtgccaactcatccaaaaattgcaccaccacgagcaagctgcagcaaaagtcaaagcccacccaaagggtgaaacaaatcccgagcaaaaagcagtgtgcaaagaaggttcctaagctaccccctccggctgttgctggaacttcatttgtgattgattctaaaagttctgaagaaactcaaaaggtggagcttttggcaaaagcagaggaacccacaaatttgtttgaaaacgaggggttactgtcattgcagaatattgagcgaaacagggacagtaattgccatgaggcattctttgaggcaagaaacgccatggataaacatgaactcgctgactccaagcctggtgactctagtggtttaggttttatagatattgacaatgataatggaaatcctcaaatgtgtgcttcctatgcttcagagatatacacaaatctgatggcctctgaggtttctgaagaatataagcttgtgccagacacactctacctaaccattaatcttattgaccgatttctttctcaacattatattgaaagacagaaactccaacttcttggaataacaagcatgctgattgcctcgaaatatgaagagatatgtgctcctcgtgttgaagaattttgtttcataactgacaatacatacacaaaagctgaggtgctgaaaatggagggcctggtgcttaatgatatggggtttcatctatctgttccaacaacaaaaacatttctcaggagattccttagagccgcacaggcttctcgtaataatcatactcttgagcactacacttcttacaaaagctctgatattcaaatatgtgtctgtgctctacgggaactgcagcataacaccagtaattgccctctcaatgctatacgtgaaaagtataggcaacaaaagtttgagtgtgtagccaacctgacatcaccggagctggggcagtcactcttcagctga

SEQ ID NO: 77895 - DNA, 1338 bp, Oryza sativa
  Clone ID: PAT_MRT4530_77751C.1
tcagtggcagcccacgtgtcctccaacgtggcgcgccccccgtctccacgtgtccgccgccgccgcatcgccgctcgcaacgccgcatataattcgagctcctcgatcgagctcgaacgaacggccggcaagccatggcagccctggcgcagctcgccggagcggcggtgcgggtggcgctcgccgccttgctggcgctgctcctcccggcctaccgcgtctacaggctcaccgcctccttcctcggcgccctcctcgccgccgccgccgacgacgacgtcgccggcaaggtcgtcctcatcaccggcgcctcctccggcatcggcgagcatctggcttacgagtacgcgaggaggggggcgtacctggcgctggtggcgaggagggaggagagcctccgggaggtcggcgacgcggcgctggcggccggctcgccgggcgtcctcgtcgtcgccggcgacgtctccagccccgacgactgccgcaagttcgtcgatgacaccatccgctacttcggtagattggatcacctggtgaacaacgcgtcgatctggcaggttggcaagttcgaagagctcaccgatgtcaaccacttcaggaaactgatggacatcaacttttggggccacgtgtatccgacccgccacgccatccctcacctgaagaagacgcgtggccggatcgtcggcgtcacctccaactcgtcctacatcttcatgccaagaaacaccttctacaatgccagcaaggcggcggcggccaacttgtacgagacgctgaggatggagctcgccggcgacggcatcgccattaccgaggtcatcccgggtgtggtcgagtcggagatcaccaaggggaagatgctcaccaaggagggcgacatgagagtagaccaagatgaacgagacgcgatcctaggggcggccccggtggagcgcgccggcgagttcgcgagggcggcggtgcggggcgtgttcggcggggaaaggtacgtgttcgagccccggtggtacagggcggcgtacacgctcagggtgtgcttcccggaggccctggagtggtgcgcccggctgctgacggtgtggcggctcggtccggcgacgacggacacggtgggccggtggctgctcctcggcgtccccggccagcgatggctctcccagccggcgtcgctccggtcgccggagatcaaggctcggtgaaggctggagttgtgtgctgcccggctttggctagctagctagcttcgtcgtattgagttttggtcttctctttctcaacagcagcctgcagtctgtatgtaataaacgtgttccagggtgattttcatttgttagg

SEQ ID NO: 77896 - DNA, 3008 bp, Oryza sativa
  Clone ID: PAT_MRT4530_77752C.1
gccgccgaatcgagctcggtggcgcggggattttgcggtggggcggagcgcccgcggcggtggggaggcttcgggtggcctcggcctccgtccggctcgatccgatcggcacacagccataagttggtgttccatgagcttataagagtgatgccattattggcatgtttctatagcatctagcatctcccaatgttatgcatgtactgggctcccttaaaagatggaaattcagaagtctgatcatcatgagcagaatcttacttcaccaagagggctaatccataaagtgctgcgtcgcacaagtagcaggcgttctccaactgcagcagaccataacccttctcctgtattcctggagacaagcaattcaaaattcttaaagcaaaaggatattgatgatgccatcaaggatccagagaaggcaggcacacacgacaacagaattgaagatgagaagtctgatttgttagggtatgaaatttgttctgggaagcttacattggataacaaagccaaaagtgcatcaggtgaacagtctggatcagggtccagtagcaattgctttgatgctagactcactactgaagccttggtatggggttctaatatccttaagctcgaggacattgtatctgtatcatatcattccgggctccgtcacttcactgtgcatgcatgccctcttgaaaaaagatccagtggactttcctgctttatgaagcctagaaaaattcaaaaggacttacgtttcctatccacttctccacacgaggcttttcggtgggttaatggttttgcagatcaacaatgctatgtaaatctattacctcaccccatggcatctagcaagaagcattcatctgaactcattccatttgataatatgtttgatccatgtgttaaatgccggtctcccccaaagatacttgtcatcttgaatcctcgatctggacatggtagatctagcaaagttttccacggaaaagtggaacctatattcaagcttgcaggtttcaagatggaagtggtcaaaactacacatgctggtcatgcaaaatctcttgtatcaacaatagatttcagtacctgtccagatggaattgtatgtgtgggtggcgatgggattgttaatgaggttctcaatggtctcctttgtagagatgatcaaaatgtggctgtatctgttccaattggtataataccagcagggtccgataactcacttgtttggacagtattgggtgttaaagatccgatttctgcagcaatgtcaattgtcaggggaggttttacacccattgatgtttttgccgttgaatggattcaaagtgggactatccattttggcacaacagtctcatattttggttttgttagtgatgttcttgaactctcagagagataccagaagcgttttggtcctctccgttactttgtagccggttttctgaaattcttgtgcttgccaaagtatagctttgaattggagtatcttccaatatcagatggtggtggtggtgagcataaaattgtggaagggcaagataaagttgatgcatcagacctctatgatgatgtagttcggaggtcgcgagtagaatgtctacctcgtgcctcaagtttatctagcattgattcaatcatgtctacaggaataatgtcaggtggagatctagaggtttcgagtccacatgctaataatgaaccctctgaacttgttcgtgcacttgacccaaaatcaaagcgcctatcattagggagaacaagtactttcaaagaaccagaagaagtgatccatcctcaggctcatgtttcatcgactcccaactggcgtagatccaaatcgaaatcaaggacagaaaaggcatggccaggctcgggtgctacaaatgatgcaaattcctctcgtggtaccacaacacatgacaaagaagacgcctcctccacaatttcagatcctgggcctgtgtgggattcaggacccaagtgggatgatgagcctaaatgggataatcaacctaactgggaaccagagactcccattgacttacctggtccattggatgatattgaacttggtctgactaaggaactagtcccaagcttagatgaaagatggacagttaggaaggggcggtatcttggtgtactggtatgcaaccattcatgcaagactgtgcagagtttaagctctcaggttattgctcctaaggctgaatacgatgacaattgcctggacctactgttggttggtggaagtgggaggctgaggttactgaaatttttggtgcttttgcagtttggaaagcatatttctcttcccaatgtggaatatctgaaggttaagtctgtgaggctcaaggctgggcccaacacacatgatggatgtggtattgatggtgaactattgcatgtcaaggggcaagttcgatgcagtttgctgcctcagcaatgtcgattaatcggcaggccagccaaaaatcctgtacagtagctgtaaatacatgactccaaagtctgcacagttctcaagtttgcccgatatcctgttcatgtacaatcggcaaaggtgtggattatttttgtccacgcccacagattcatagctacagtcagaggtcagaacagctttgctggcaccctgcttcagaggtgtacatcgtgtgcttgatcatagctaaagtcagaagtcagaacagccttgctgacacccaacttcagaggtgtgcatcgtgtgcttgacgagcaaaagtgcctggtgaggtgatgtctatccaaatgtaaaagcctatccggagtctggactgcagcttgttgtgtagtacatctcgtggtttctcctttttaccttgctgatatctaatacaactactatagagtaatctcgaatcggtgtacttgcattcgaaacaacacagtggctgccacccccagtgtgcgcggttgttggaggtccctgtttgtgtggttgttttgaggtccctgatgccggccacttgatgttc

SEQ ID NO: 77897 - DNA, 192 bp, Oryza sativa
  Clone ID: PAT_MRT4530_77753C.1
tcgtggacgcgtggctggatgacctaatgaaatgaaagggcggcaaaaagaaggatagcatgctcattgtggtagatggctgaagatcacctagagtacagaattgacgacgattaaccagacgaaggctgcaagaaatgataatatgataggcactcaagctgagatactaatacattgtgagagtgcttt

SEQ ID NO: 77898 - DNA, 663 bp, Oryza sativa
  Clone ID: PAT_MRT4530_77754C.1
atggcggcgtggatgaaggtgcagagctccggcggccggcagctgctgtccgtcgtctacctcgtggccgccgttgtgatcatcctgccggccaccagcagccggtggcggccgcaatgtctgtggcgcgaggaccgtggcgttgccacccacctgcacttgttcatgcacgacgtcctgaccggcccggacgcgacggcggtggacgtggtgaacggcacggggcgtgccttcgacgtcgccggcgggctgcggttcgggcaggtggtggtgatggacgacgtgctgacggaggggcccagccggtcgtcgccgcgcgtggggcggacgcagggcttctacgtcttctccgacatgaacgtgccggcgctgctcttctgcatgaacgtggtgctcacggcggggccgtacgccggcagcaccgtcaccatcctcggccgcgaccacatcacccagccgctgcgggagctctccgtcgtcggcggcacgggggccttccgcatggccaccggctacgtgctgtggaggacggccagctggcagttccgcgccgacgctgtcctggagctcgacgtcttcgtccacacgcgcccggagtacttgcagtcgccgccgccgccgccgcaccaccgccctcctcctcccaccgtcgtcgttacatga

SEQ ID NO: 77899 - DNA, 1272 bp, Oryza sativa
  Clone ID: PAT_MRT4530_77755C.1
atgctcggctcatcaccagctcgcgatcgaggcggcggcgacgacgccgaggcctccgagcagccgcagccgcagccgcagccgccattgtcgccgcgcgcggggggcggcgaggcgagggggctcgtgctcgcgtgcgccgacctcgtccaccggggggacctcgacggggcgcgccgcgtcgccgaagccgtgctcgccgccgccgacccacgcggcgaggctggcgaccgcctcgcccaccacttcgcccgcgcgctcctcgctctccgcggaggaggcaagggtggtcatggcggcggcggcggtggcgtggtgccgtcgtcggcggcgtacctggcgtacatcaagatcgcgccgttcctgcggttcgcgcacctgacggcgaaccaggcgatcctggaggcggcggcggcggacgccggcggcgcgcaccggcgcgtgctgcacatcgtcgacctcgacgcggcgcacggcgtgcagtggccgccgctcctgcaggccatcgccgaccgcgccgaccccgccgtcggcccgccgcccgaggtgaggctcaccggcgccggcaccgaccgcgacgtgctcctccgcaccggcgaccgcctccgcgccttctcgagctccctcaacctccccttccgcttccaccccctcatactcccctgcaccgccgagctcgccgccgacccgaccgccgccctggagttgcacccggacgagacgctggccgtcaactgcgtgctgttccttcacaagctcggcggcgacggtgagctcgccgccttcctcaggtgggtcaagtccatgaaccccgccgtggtgaccatcgccgagagagaaggagtcctcggaggtgacgtcgacgacgacaacgtcccggacgagctgccgcggcgggtggcggcggcgatggactactactcgtcggtgttcgacgcgctggaggccacggtgccgccggcgagcgcggaccggctggcggtggagcaggagatcctcagccgggagatcgacgcggcggtggcggcgcccggcgccggcggcggcgggcgcgctcgcgacttcgacgcgtgggcgtccgccgcgcgcgccgcgggcctcgcgccgcgaccgctgagcgcgttcgctgcgtcgcaggcgcggctgctgctgcggctgcactacccgtcggaggggtacaaggccgacgacgacggcggccgcggcgcctgcttcctccggtggcagcagcggccgctcatgtcggtgtcgtcgtggcagccgcagccatag

SEQ ID NO: 77900 - DNA, 979 bp, Oryza sativa
  Clone ID: PAT_MRT4530_77756C.1
atggccgaggagtctcgggaagaaggcggcggcggcggcgtcgtggaggacggcgacgaagccggtggacggccggggaaggacggcggcagcggcggcgccggcagggggagagatgggaacaatggcatcagcacgtgggagatcgaggagatggaggatgaggcagggccggcgtcgctggctcctcctgccgccggccgccgccgccgacgtgtacgtggcggtggggaagggcgggtcaagcatggaggcgctgtcgtgggcgctgcggcggctggcctcgccgcggagcttcgtctacctcgtgcacgtcttccccgtcgtcatcagcatccccaccggatttggtaagatcacaattgggtcccagcaatctttggttggagattggcctgcagcattgttgaaatcaaggtctctgagatgccggcgtgagcagggcgagtactttgttacacttccactgaaatgtgaacagaccagtacaacaggccattctttggcatggccagataggggagctgagaaggacgactgcctagagcttaggaaaacccagggctttctggttaatgttgatgtgtacctcatcgagagcgatcatgttaccaatgcgatcctcgaacttattccggtctttcatgtacaacagctagttctgggggtttcaaaatccaaattgcggaagttcaagagaggaaacacaatagcaggacaggttcagaagaacgcacctctatactgtgaagtcaagattgtctgtgatggcaaggaggttacaactgtgccaactgctgatccaacaccaccaatttcaccttctcctgtaaataacaagagtaattctatcagcccaacgccactatcacctgcaccagatcataacaatcgcgctgtggctgatgatgacaaaaaggagactaatcccaatgaaaggaataaaatcacaaaatatttgaaatgcttctcattttga

SEQ ID NO: 77901 - DNA, 432 bp, Oryza sativa
  Clone ID: PAT_MRT4530_77757C.1
acaaaaaacttttttttcattttatacttggggttttttttttattccgggcccgggaaaaaaacaaccaatggtttaagcccacaaaaggcaggtccccttccacaacgggagccccaccaacactgggggttttgcccacctcctccaggaatggcccaatttccttgaacccctaaaccggctggaaaagctttgcaagaaacacattttcctaacgcaatgcctaaaggggcgaaattttccctcacctttggtcttaaaccaaaacttaacttgaccttggccccttttctttcttcttcccccgggggctttcccttgggtttaccaaagagactgattttccaaaccccggcggaatttgcccgctgcgcctgggggaaccccggaaaatcgggggaaaaagcggttaaaaaaggccaggaccgg

SEQ ID NO: 77902 - DNA, 362 bp, Oryza sativa
  Clone ID: PAT_MRT4530_77758C.1
gcacgaggtgcacacgcgcggagatatgcctaccggagaccgcatgaatatctcggagctgagtacgcctttccaggaagcggagcgacgcgcgcacgaccgggcgcgccgcatcaccgagtgggtattgcgggcgagcgagcgcgacccggaaggtttctgcgcgctgctgtgggccgacgactgggtgcggttggccgatcacgcctgcatcgagccgcgcaacacgaaggccatccagcgccggttcatgaaaatggacccggacgaacgccggtcggtgctggaatcgttcctgtgggattcacccgaggggcggtgaatccaggccggcgacatggcgtcgccggccgcgcaacgcg

SEQ ID NO: 77903 - DNA, 220 bp, Oryza sativa
  Clone ID: PAT_MRT4530_77759C.1
gatcatgcattcccaggcaacttttttgcgatgaatacgtgcaatcaaatcttacttttttagaattttgtccaagggggagattgggagactagaacagcttttctgcttgaaacatttttttttgaaaaaaatatgtttgtactccgtactacaccgaaactttatctgcttgctggacacggaacctggatgctaaaaactcaaaacaccctcaaaa

SEQ ID NO: 77904 - DNA, 402 bp, Oryza sativa
  Clone ID: PAT_MRT4530_7775C.1
tgactatctccttctggcgagcagagcaagggaggggaggtgaggggatcctgctgatactatgcccttgacgtcctctgctacttgactcgtctgtaaccagtcatctgcctcgtcaattacctttgtgatccttcaaacaaaaactcagtattacttgcactctattggcaaaattagtcaagatagatgctctttgctgcatcatcgctaggctccatgggacacagacaaatcttgcatgcagatactggtctatccatcctaatgaaccttgctggaagcttaaatcaacactttcttctccaatgtcatcgagatggtactgcaagaatccatttgatagattgccacaccatatctatgatgctcctccttatgtatcaatcactgtcatcccat

SEQ ID NO: 77905 - DNA, 491 bp, Oryza sativa
  Clone ID: PAT_MRT4530_77760C.1
gaagagtacctgcaatacccacctttttcactcaattatagatgtaggtgacagaagtaaataaattatttaacacctagatatttcagggttctgaatatacaggagaaatacttcttttctcagccagaacttgtattgaaactcagctgggtatgcagaactgatatgagtgccagacaaagtcagctccatatgcagaactgatatgcaagcgccaatagcatttccatgcacatgtatcaattagtatcagttgcctctaccaaaagttcaatcatgtgaaacgtttactgtaactgctaacatctgtatcctcctatgaatttggtgaaaacaggccattcatgttctaccatccataaataaaatgagaataattactcaatgcagcattgaaatgacgtggggaatggaaggaacatgagaggaacaaaaaaacaaacgcagtacaataactaaaagttacgcaaacatttcaccttttcttt

SEQ ID NO: 77906 - DNA, 264 bp, Oryza sativa
  unsure (1)..(264): unsure at all n locations
  Clone ID: PAT_MRT4530_77761C.1
caaagaagaggtttatttaggaagggataaattttccctncccttcttttttttcaaaaacaccccaagtttcttttcatttacaaagggaaacaaacacgcttaatttttcttaaagtccaaaagaagggcccaggaagaaaccggaaatcaaggtcagtcccctctatttttacaccatatactttggcgttgcccttaacttttggtaacccttgatcaccttattcaccccgttcaaaaaaatcttctctttcacccgct

SEQ ID NO: 77907 - DNA, 214 bp, Oryza sativa
  Clone ID: PAT_MRT4530_77762C.1
atctaaaaacttttagagaagttctccaaaaaaaataatgtgtttttaacacaagagtctttgcagtttgtatgtgaggtttcaatagaagaatgaaaagaaaatgtctttcacacatatatgtgccagacggacggggtcatcttcctgagctagtcaaacccgttcacccgccagccgccgtacgccggcgaaaaccagtcgcgcgcccgca

SEQ ID NO: 77908 - DNA, 1143 bp, Oryza sativa
  Clone ID: PAT_MRT4530_77763C.1
atgcggggagggagggtgcgtgccgccgcactgatgtggcggatgatcggatggatggcgtgcaaacggccaacgccgctaagaccgggggtggtgtgtatggggtgttacggcaacaacacggaggggagagaatttcgtgtggatttcggttcgcattgcgctcggtgctatgaggagcaccttttgctctggttgagattcgagatgaggacaagaggtgggatgaacgtacagcagcggcggcgacgctcttccccaccgcgtacggcggcggcgacctcccccaccgcgagcagcggcggtgatgctcttccccaccgcatgcgtcagcggtgccctcgccttccacgagctacaccggcggccgctcacttccccaccgcgtacggcggcggcggcggcaacttcccgtggaagagggagaaggggaggccggcgatccggagggggaagaggagctttggctcttttccagcttttcttgaaagcagctcgcactcaccggtccaggggaccgagtcatactatccccaaaaacccaccacctgctatcaagtactcctcttaggagggtataccaaagtggggaaaaagaagaaggcaccaccaccgagaactgactacacaaccgagaagcgtgtcagctttccttattcaatcaactctaatttagtactagtacgatcaagaaaagtgatgtctcgggaagcgcttcgacaacaattcgttagcctaaaacaagggagtgaaagctcccagtctaccttcagtggccccaggcggataagcctagatttggcggctatagactcaaagggcacagacaggctgctgcaactgggtctaagctgcttgtggtcaaatctgccgccactgggtggccgctggggaaacacagcccggccgcctcaaagtccagaggaaaggaagattgtttcacgcctgcatagacaacctaaatgtaaagcggaacatgaagcttaccacccacaaacagatgttccacgggttcagaaacctctggcaaggcgattcatgaaggattcctctcctctagttggtctatttctcgaggatgtaggccagataccgaacctcgttaacaaaacaaatatcgtctatccggtcttgcctgctgct

SEQ ID NO: 77909 - DNA, 482 bp, Oryza sativa
  Clone ID: PAT_MRT4530_77764C.1
gttgtatccttgcagctgcaaggactcaaggaaatgtagccttaggagaaaaggctgcagaagaattgtcaaagcttgacccaagccatggagcatccaaaatagccttgtcaaacctctatgctgatgctggtcattggagcaatgtgtcagtggtgaggaaggaactccagaatgagaatttggaaagacttacaggaagcagtggaattctacaattataggtttcactcttttggtgacaactgcaaaactgctcttatgtcggtgaactaattgcgacaagcagtttattttcgtgcttgatctgttctgttagccaacacatacaatcattattttgctcttttagactaaacaatatgtgaactaaagaatctctaacatgacatggcaactattcatattggaaagttgattggctgttagactgccaagaagatagcttggaaagtagattagcatcacttattgaggcccct

SEQ ID NO: 77910 - DNA, 282 bp, Oryza sativa
  Clone ID: PAT_MRT4530_77765C.1
atggcactcttgctcttcgacgtgatctgtggctgcggcaaggatacaatgattgagaggcccaaccccatcgccggctacaccacctccatgaccacgaccatggagatgtcagaggccaccacgaacgtgctctccgccacctactggatgctcagcgaccctgtgcagcaccagtgtcacaaaccgtcgctcgtcgagcacccagtgtcacagaccgtcactcggcagtgtggcagccccagccactgcggcgagcagggagagcaggagacaggttga

SEQ ID NO: 77911 - DNA, 2694 bp, Oryza sativa
  Clone ID: PAT_MRT4530_77766C.1
atggctaccttctcgtgtaagtctggcgtcatccgccgctcccccgaccacaggaggacaaggcatatggcgtttcccttccttcctgacgagtttttggtgttcgtcttccctcccgcgcccgcgccttctcgctcgcgcgcccgcggggacgcggcggctagggcgatgcagctggtggacgacgccgacggggccctcgactcgtgggcccgcttctgcgacctctccgacgagctcttcggcggcgccggcgacctctcggcgggcccgcgcctggcccccgtcgtcgcggacctctgcgcccgcggcctcgccgagctgcttcgggaccaattcatccgctccctagagggaatatttagaagcaacgcggttaagaagttctggcagcagtttcatccttattgcaattcctctgcagtggaaagaattaaattctgtgttcaagaaaactggcctgaggatatcttaagtaaagcattggaagacatatgtttggaaaagaattaccaggaaaagtgtgttctggctctagttcattctttacaatcttatgaggataggtcaccacacagaaaatctaaagcactggattgtagttccagcttaatgcctaggtaccagttaatggtatcttcagtacttctgacaacactaccattgagttttcctgagatattaaatgtatacttcaagaagaaactggaagagttaaatatcatgatggctggattggatgggagcgatccatttgataatcatgatctttttgaaaggaacagtacctctgcttggcattctgaaatggacattgatggtcaagaacctgggatttctgaaagtagaaatttggttaagaacattggaaaagttgttcgtgatctaagatatcttggttttacatcaatgactgaggactcatactcttctgcaataatctggcttttaaagtctaaagttcatgaactagctggtgatgattatagaattcctgtacttgggtgtgtcaaaaagtggattcaggccgttcctcttaaatttttgcatgctcaattgacatatctgggggactctcttgacaatgaaagtggatcatctggtctcaaatcacctttggcctcacgcccttcttccttccctgggattggcgttccttcagaagcccttgtgagatggcacatgcgccttgagtattttgcttatgagaccttgcaggacctgcgaattggcaaactttttgaaatcatagttgattaccctgagagctctcctgccattgaagacctaaaacagtgtttggagtacacgggtcaacattctaaacttgttgactcatttatctcatcattgagatatcgcttgctgacggctggtgcatcaaccaatgatatattacaccagtacgtgtccactatcaaggcattacgtacaattgatcccactggtgtcttcttggaagcagtaggtgaaccaattagagattacctgagaggtagaaaggacactatcaaatgcatagtaacaatgctcactgatggatctggaggaaacgcgaacggaactggaaatgctggggacaatcttctggaagaattgaatagagatgctgaaaaccaggaaaatgttgattatgatgaccatacgaacattgatgagaagcaagcatggctaaatgctgaaagctgggaacctgatcctgtggaagcagacccattaaagggcagcaggaatagaaggaaaattgatattcttggacttattgtcagtataattgggtcaaaggaccagctagtcaatgaatatcgtgtaatgctggcagaaaaactgctcaataaatctgattttgatattgattcagatatccgcacgctggaactgcttaagattcattttggggagagcagcatgcagaagtgtgagattatgcttaatgacttgattgactcaaagagaaccaactcaaatattaaaacatctttatcaaagacatctcaaactgtaggaactgtgcaagaggagacagaattgtctcatgaggttcttgacgcaactataatatcctccaatttctggccaccaattcagacagaagacctcacagttcctgcttcagttgatcagttgctgtctgattatgcaaaaaggtttcatcagataaaaacaccacgcaagctactctggaagaaaaatcttggaactgtcaagctggaactgcaattcgaggataggagtatgcagtttactgtagctcctgtccatgctgcaatcataatgcaatttcaagagaaaccaagttggacttcaaagaccctagctacagcaatcggagtacctgtggactctcttaacagaaagataagtttctggacaagcaagggcgtcctgacagaatcagttggtccagatgcggatgaccccacatttactgttgttgatagcacatctgattttaacaaaaacagcaccgtgaaccaactctctgaaaggtttcaaattactgaagaggaaggtgaaagttcgattgcgtctgttgaggaacaacttaggaaagagatgacagtttatgagatgttctgcatagccgagccatcatatgataaatcactgcagcaattgcagagttttctttctggtctagtgtcagacgaaaagctggagatgagggatggatcatacttgctaaggaagtag

SEQ ID NO: 77912 - DNA, 608 bp, Oryza sativa
  unsure (1)..(608): unsure at all n locations
  Clone ID: PAT_MRT4530_77767C.1
cacttaagtaaaaaatttatttatcaagttgcatgtgcctcaccacatgttttacccagttctcaggacaggtaaactcagtttgtagaaccattagactcaattataagaggcagaatctaaacataatggcacaagcctcatgcaagagaagagctgcatggcacggatgcagaaacgcggcttgcgacagatttattcgctaatatctgaagacgcttgttgtgctgcttactgttcattgacagttcagagcacaagttggatgaacttgtccacacccgatggcacgtcaactggaatgtgtgcactgacatggcacagcccacaaccagttaaccactaacagggttaaaatgtcctgtgagaaatagccgataacgaaatctagagaaggggagagattatcataagagctaagaggccaggacaggcacatgaacaggcacctagcaatatacactactgtgtgcctcagtgagagggtgtttgaatttagttagcaaaatgatataagccaaggggtcatcggaanantagtctgnctcaatctcaaaataaaactcccaaaatgaatggttccaatatgtccacaggngatccctgat

SEQ ID NO: 77913 - DNA, 713 bp, Oryza sativa
  unsure (1)..(713): unsure at all n locations
  Clone ID: PAT_MRT4530_77768C.1
cggccctccgcccccgccgctttctcttccctcccccgcttctcctcgccggcgacgacgacttgccccctcgagctctcccctatcctgcccatctcctggcgctccctccctcccttcgcttgcatcctcacgccatcgtcggccccgccttccccttctcatctgttcccagcgatggcatggggatcaatctgctgacccaggcccttctcttctagcagggggagtggaccatgcggagctagctttgggggcactgtgatagagatcgatggtgtggctgtgtggggatcgatctgttggcccatcgcctgattttgggtaggtgcactcaagctcaacatgaagttctcaatccagtgcgttgcgctcgaggtcggcatagccggcgccgccgcctgtctccctcctagctctcccttacgagcgatgggggacggcctcgactcccgttgcagtctcacgcctccggcgactcatctagcatcctgtccgcgactttatgtccagcggggggcgtgcgccccggcaccttgagggccggtcgtcgttctgcctccagcgtgcttcgggggcccaagctctggagggcctgtggccgatttggcacctccttgctgcgcggtccacgctgggtcgtccccccgggccctgtctgcgcctcctttaatgntcgatccaatcatgatcttcctcccattctctggtct

SEQ ID NO: 77914 - DNA, 5206 bp, Oryza sativa
  unsure (1)..(5206): unsure at all n locations
  Clone ID: PAT_MRT4530_77769C.1
atgggtggtcgcacggtgctctccgacgaggaagatgaaatcgaggaggaagaggaggaggagaatccgcggccttcgcggagaggaagggacaatatggatcgggacgatgatgatgacgaggaggacgaagaagacgagggtcaggacgaatatgagaaggatggcttcatagtagatgatgcagatgaggaagaggaggaggaggatgagagggaaagtgatgatgagaggcggaagaagaagaggaaaaagaagaagaaaagggaatcagaagggttcatgctggatgaggatgactatgagttgcttcaggataataacatcactggcattcaacgtcctaagcctggaaacaaatttaagcgcttgaagaaggccggaagggaatctgaaatggatgagcgctctggcttttcagatgatgatgggtcaggaaaaaggcgtactgctgaggaaagagtccagtactccttatttggcgaccatcaagatgcgtctattgaggaggacattgttgaggaggatcagcaggcagatgaagatgaggatggtgatcctgaagatgaaatggcaggtttcattgtcgatgaagatgaaattgatgcaaatggtcaagttgtaaaaaggaagaagggtaaagcaagaccacgccgaccggctgcaggggtatcatcatctgccttgcaagaggcccacgatatatttggtgatgttgatgaactattagcactgagaaagcaagagcttgagagggatgctgctaattctggtgagttgagaggaaacagacttgaagatgagtttgagccatttattctggctgagaagtatatgacaccgaaagatgaacaaataagagagaatgatgtacctgagaggatacagctgtctgaagaactaactgggtatcctccaacggacaccacaatgatagaggaagaaagtgtatggatacatagccaactgacgggtgatgggtttctgtcattctttaacaatgagcatgtgaacaaggacattgaccagaaggacattgcaagtgtattgaccatgttacatgtcaacaaatttgaaattcccttcattgctatgtataggaaggagaattgcccgagtctgttaaaagatcttgatgccaatgaacagaccaatgaagaacatagtgatgaagaagatcaacgcaagatgatgtggcacaagatgctttgggctgttcagacattggacaaaaagtggctgcttcttcagaagcgcaaggttgctttggagatgtactatgataaaagatttgatgatgagaatcgaagaatagatgatgtcacacgccaggcattaaaccgtcagctttatagctccattattgaagcactgaaggatgcaaaatctgagaaagaggtggaggatgttgatgcaaagttcaatctgcatttccctcctggagaagttgaagaagaaggacaatttaagcggccaaaaaggaaatcattgtacagtatttgtcacaaggcagggttatggcaggttgcaaaccaatttggtcggagtgctgagcagttaggtcaccatctcacattgacgaagatacccgaagcaggagaacttgatagtgggaaagattctcctgaagaggttgctgcaaatttcacatgtgcaatgtttgaaacaccacaagatgttcttcggggcgccagacacatggcggcagttgagattgggtgtgagcctattgtaagaaagcatatccgtagcatcttcatgaataaagctgtggtctcaacatgcccgactgctgaaggaaatttaatcatagatccctatcatcaactatcaggtgttaagtggctgcgtgacaaaccattaaacaagtttgttgatgcacaatggctgcttattcagaaagcagaagaagaaaagctcctcaaggttactataaaactgccagaagatgcaaagaaagagctcatgtctgaggctcgtgaaaattacttaagtgactgtgtcagcaaatctgcacaactgtgggatgagcaacggaagatgattctggatgatgccttcttcaatttccttcttccatcaatggaaaaggaagctcgatctctgttgacagcgaaagccaaaaattggcttaatatggaatacgggaagcaattgtggaacaaggtatctgtggctccttggaagaagaaggatgcagacaagaaggattctgatattgatctcgatgatgaatccgagttgagggttatggcctgttgctggggacctgggaagccagcaaccacttttgtaatgcttgactcatctggagaattggttgatgttctatatgcgggttctatcagtattagatctcaaggtgttgctgagcagcagcggaagaagaatgaccagcagcgagttttgaagtttatgactgaccatcagcctcatgttgtatgtgtaggagcatcaaactataattgcagacaactcaaggatgacatttatgaggttatttttaaaattgtggaagatcatccaagagatgtgaacccacaaatggagaactttagcattgtttatggcgatgagtctgtgcctcgcttgtatgagaactcacggatatcttcagatcaactgcctggccagtcaggtattgtgaagcgggctgtggctcttggtcggtacctgcagaatccattggctatggctgcaacactctgcggacctggaaaagagatactttcatggaaactgcacccccttgagcagttccttactcctgatgagaaatatgaagttgttgagcaaattatggttgatgcaacaaatcaaataggtttcgacgttaatcttgctgctagccatgagtggcatttttcaactctacaattcgttgctggtttggggccacgtaaagcttcagctctacagaaagaattgttacgagagggatccatttttagtcgcaaagatcttgtaaaacctctaggcaggaaagtattcatgaatgcatctggctttttacgtgttcgccgtagtggtggagctgccgcgagtgctcaaatcattgatttacttgaggatacaaggatacatcctgagtcatatgcattagcaaaaactttggcaaaggatgtatttgctgaggaagcaccacatgaagcaaatgaaatggacgatgatgagcaagagatggcaattgagcatgtcagagaaaagccacgttatctgaaatcgctcgacattcgtgagtacatgaagagtatgccagaagagttccataataaagagcaaacactgaaagatataaaatgggaactgttgtgcggtttccctgattggaggaccccctatgctgagccaactccagatgaggaattctggatgctttctggggaaactgaggacaccatatcagatggaaggattgttcaagttactgttcgtagtatacaagataaccgaatcatttgcaccttcgattctggtctgaaagccatagttatggctgataactattctgatgagggctttgatctagaaactctgcagttacatgaaggtgatgtattaacgggcaaaattaagaatgtgaataaaaacaggttcatggtttacttaacatgcaaggcaagtgaattgaggagaagaccattgtccagaggtaatcatgatccgtacaatcatgaacaagacatgacttctcagaatgaacaagataagcttcggaaacagaaagaactggcaaagaaacatttcaaaccccggatgattgtccatcctcactttcagaacttgacagctgaagaagctatgcagttcttatctgacaaagaacctggtgagaaggtcattcggcctagttctaggggaccatcatttctgacacttactctgaaaatttttgatggtgtccttgcacacaaggagataactgaaggtggaaaggatcataaagatattacaagcttgcttcgccttggaaaaacattgacaattgataatgaaacttttgaagatcttgatgaggttatagacaggtacgtggatccattggtaggccacctgaagagcatgcttttgtaccgcaaattcaagaaaggatcaaaaagtgaggttgatgagatgttaagggctgagaaatcagagaatcctatgagaatagtgtattgtttcggcatatctcatgagcatccaggcacatttattttatcttacattaggagtacaaatccacatcacgagtatattgggttatacccaaagggctttagatttcgtaagagggactttgacaatattgatcgcctagtgtcctatttccagaagcatattgacaaaccaccacctgatgctggtccatcaatgcgaaatgttgctgcaatggtgcctatgaaaagttcaggttggggtaatggtggtggcactggtggtggaaatgatggatggagaggagatggtaacaacgacagggatagacctttctctggaagatcaggaggcaggtttgattcaaggaacagctctggtggtcgtggacgtgggcgcgggcgtggtagaggtaactttggcagtgatgatggtggcggcggaggttggagtggtggcggtggcggtggcggcaacagtgggggatggactgacaatattggaagtggcggaggtggatggggcacaggtggtggttcctcgtgggctggtggtggcgacggaggttctggaggtggtgatagtaaccgtggtggtggtggaggctggggaacacccgctggtggttctgatggcggcggcggtggctggggagcagcacccggtggatccaacgatgccccaggatggggcagcggcaaaaaggcggtcccagcacaggatggtggtagcgggtggggagcttccgccggcggcggcagcggtggctggaactagtcaaagaactgctagatgaaatatttttttttttgttttctggaccctcttctatatctggtaattgcgctccacgggagaaaaattgtcactgttcggggaccctagtaatctgctactgaatgccgctggttttatacattttggacggccttattttgaatgcatgtacagcttaagcaccacattttgttttttagttttcattacaaatgcacgaacccatagcccactcagattggaattgtctcaatggttgtaatgccatcgaatatatctaactttaccngga

SEQ ID NO: 77915 - DNA, 504 bp, Oryza sativa
  Clone ID: PAT_MRT4530_7776C.1
atcccctagctagctgtctccgctctaacagtaaggatcctccggagaggcctgaggcactccgtggagcccggtagtttatttcttgtccgacaaggactggtatctccctatgggtataaatatgttcacccggggtcattgtaatctatcaatctctcgatcaataaaaactactctcggtgcatcgccaccctttttaccgaggtttttacttatcatccgacggaacttggcacctaacgcggggctgcatcggctttcgatctccggcaaaggggtaagtcctacgttccgccggccctggtgaatctgttggctacattggtgttgttcaaggctgcatcgcttcgatctcttggatcgctctggtttggttgatatatttgcctacctgatatctcaattctatctctaattacattgtttttagtgacgcatcggtttagttggaactgtctcggttaggtccgatcttctgtcttaaccgatatatctctacaa

SEQ ID NO: 77916 - DNA, 615 bp, Oryza sativa
  unsure (1)..(615): unsure at all n locations
  Clone ID: PAT_MRT4530_77770C.1
cagcaatcgtagtacctgtggactctcttaacagaaagaaagtttctggacaagcaagggcgtcctgacagaatcagttggtccagatgcggatgaccccacatttactgttgttgatagcacatctgattttaacaaaaacagcaccgtgaaccaactctctgaaaggtttcaaattactgaagaggaaggtgaaagttcgattgcgtctgttgaggaacaacttaggaaagagatgacagtttatgagaaattcatcatcgggatgctaaccaattttggaagcatgacactggaccggatacacaacactctcaagatgttctgcatagccgagccatcatatgataaatcactgcagcaattgcagagttttctttctggtctagtgtcagacgaaaagctggagatgagggatggatcatacttgctaaggaagtaggagttacatggattagcctgttcatctgttagactagatatggaaggaactgaagaatggaggccccatcctgcgccattcacctcactgcgtgcagtaatattctgcactcgctgtttttgtccttgctgaggggatgacgaaagtagagaagcacaggaatcctanagctt

SEQ ID NO: 77917 - DNA, 1898 bp, Oryza sativa
  Clone ID: PAT_MRT4530_77771C.1
tttttttttttttttaaacgaaaacactaactttatccataatatcgaacgggcaagaattcactaaatacatggtcagaggatcacgtcgtaatgaactccatcaatcatcacatatacccaaagatgtcatatgatacaacaaatttacttcttctaccgttacctgggatactactgcagaaaacaacgcaactccccgtaatggaaaaggaaatcgtgtcagaacgtgaaatgacactcgctacacaaaagcctaaactaaaattggccaaaaatttgccaatatccaatgagctgtattctcctgtccaatgtccaaaaatccaacgctttgccagggaaactacatctgacaaaattcttcctgaactgatcccctcgtgggaactgtatatactatttgccatccaagtcatgactcacgacgactccggttctgacttcgaaaactcctgaggctcactgctggcaaatgctagccagacagcagtacccgtcaggtaaaaaaatatcgaaggtgcgaaaagtgatatactccaagaatgagttgtatcaagaagatagcctgttagtgcaacgccaactattccaggtacagcacctacagtgtttgtgatgcccagcagaatgcttgcatactcacgagaaatatcttgatgggtgcaataaagacctgacaatgcgaagctggagagtgccagaccacttgtaagaaaagcaacaatttcccacggtggcacaccaagatccacagaggaaagcatcatgaaagttgcaggtgacagaaatgcaattgtttgacatatctttcgtacctttgtggtgtctactccatttgatatcaagttgtctgcaaaaggtgcagcaatagatgtaatgatcattgagcccaaaggaggaaggactgacacctttagtgaattcatcagctctcccaatgatgactccgatgattttggagacacagaggacgagatgaggtcacttgatccagaaggactctgccccaaatcttgtattacttgtatatcttcattgccccttaactgttgttctttaagagattgaaaccctagacaccaaataattccaagaagtccaaatatgtaaaagacagattcccagccaaggttctgaataataggtggggcgaacaatagtcctaatacgcttccaaagctcaaaccaccaaacacaacagcaactgctcttgatcgttcttgaacagggatggaccctgctacagcagggataatggcagttgccaaagaccaagccacaactccaatctcaagtactctccttccgccaaacaattttgctagccatccacctggcagttgactcaaagcataaccccaaaagaatgacgattggactaatccagcagtcgatgagttccaaccatactggtgtgacattggtataattgcaacactcaagttaaccttgtccatgttacaaatgacgaaagcgagcgaggtggcgccgatgagcttgtaccgctcggccagtccctcccacggcggccacctcatctccaacgccgccgccgccgccacatccccctccccctcctctaccaccttcgctcccctctcctccccatcctcctcctccgccaccacccccataaccggacgcttctccagggcgcccgcgagaccaccaccaccaccacctccgcctccgcctcccccgccttcgccgggagaggccctcacggccgggggccatcggcggcgacgccggtgcgggagaaggagcagagccggcggcgcgtgcagtggcgggggcatgcggagggggagccggtgccgccggggccccgccccgaccccgacgaggaggcaccgctcggcctgcagcgccgacgccgacgccgacgccgccat

SEQ ID NO: 77918 - DNA, 537 bp, Oryza sativa
  Clone ID: PAT_MRT4530_77772C.1
gcgtgcgcgaattcaaactaacgattgactgcagacaaaaagccatggcttgcaacaaggtcatgttctcggcgtggctcgggatcatcgtctccgtgctcgacgcaacagcgaccatggcggaccaccacaaagaccaggtggtgtacagcctcagcgagcgttgtcagccacgaatgggctacccgatgtactcattgccacgctgccgaacggtggtgaagcgccattacgtgtgccactgaacaccttgcggagacgtggacgaacaactcccgcaccactgttgccggcagctagccgaagtacatgacagctgatgcagttgctgggcgctcaatcacatggtttaaggcatatacagggagctcaattccaccgatcgtgaacaccccatgaccgaggcgtttcccgggtgtcaaagaagggacttggatcgcgcaattggcgagcctcccgacgttcttgaacgtggacatccccaatgcgacacgtggtgtatgctactggttaggttattctaagacccctgataac

SEQ ID NO: 77919 - DNA, 1212 bp, Oryza sativa
  Clone ID: PAT_MRT4530_77773C.1
atgccgcgccgccgcctccctctactcctcctcctccccattaccctcaccctcttcctcctcttcccctctccccctcccccgcggccgccgccgcatcagcctcagcctcagccgctcccctgcggcgccgccccctccgacgccaccgccggccgctgggtccccacccgggagcccttgccgccgccgctctacacctcctcctgccccttccaccgcaacgcctggaactgcccccgcaacagccgcccacccgtcgccgcgctctcctgggcgcccgcccgctgcggcggcggcgccgtcccgaggatcgacgccgcggagttcctggccgtggcccgggggcggcggatcgggctcgtgggggactcgctgtcggagaacctggtcgtggcgctgctgtgcgcgctccggtcggcggacggcggcgcgagcaagtggaagcggcggggcgcgtggcgcggcggctacttccccagggatgacgtcatcgtcgcgtaccaccgcgcagttctcctcgccaagtacacgtggcagcctgtagagaattccaaagagcttcacaaggatggaataaagggaacttacagagtggatgttgacattcctgctgatgaatgggtaaatgtcaccaggttctatgatgtgctcattttcaacactggacattggtggggcctggataaattcccaaaagagaccccccttgttttctaccgaggagggaaaccaattgagccgccacttggcatctacgatggattgaaagtagtcctcaaaagtatggcctcttacattgaaagggaggtcccaagtaaaacactgaaactgtggcgctcacagtcacccaggcacttctatggaggtgaatgggatcacaatggcagctgcgtgtctgatcggcttctacaagaacacgagctcgacttgtggttcgatcccaggtttggaggagtgaacaaagaagcaaggctagtgaattcggcgattcaggaggccctgattggcacagacatccagctgctcaacctgacctacatgagcgagttccgtgccgatgcgcatccggcaatctggctcggaaagaaggacgcggtggctgtatgggggcaggactgcatgcattggtgccttcctggcgtgccggacacttgggtcgacatcttggctgcacggatcttgcatcacttcaagcaggcaaatggttga

SEQ ID NO: 77920 - DNA, 996 bp, Oryza sativa
  Clone ID: PAT_MRT4530_77774C.1
atggaggtggtcattcatcgaaccggcgggtgttcgccgttcgcggtgtcggttaggggacacatggcggcggccatgatgggcggctgccggcgaggaggatggcgcgaccggcggggagaagggtggcacgagatggccaactgggacaaggggaagggagaaggagcggcgccggcagccgatggggacaaggcgaccggcggggagaaggatggcacgcgcgccgcggccgcgtggggcgttgcctgcctccaccgccgtccgccgcgcttccgcttccgctccactctgcttcgctcgcacgccgcctccgctggccgcatcctcccgtccgcactctccgccgcggagagatcgagtgccgccacatcctcccgtccccccctctaccgactccctcctcgccgcaacctcttcgacggagagcctgacgaggccaacgggccgtcgcccaacaacatcgccttcccggtgggagatgaggagggagcgggagcggcggagtccaaggagcgtgagaagaagaagagggcatcgcccacctcgaacagcgcgacagggatgcggatggccgcgaggacaacgagctcgacgacggcgaaggggaagcagcagcaaaccgtggcgcactctaccgccgtcccgcccgccacctccccgcaccgcggctactactccgcgcccgccgccgctcccgctccctcctcatctccacggccgacgacctcctcagcctcctcgacaacatcgacgacgatgacaacccatttcccgccgccgccgacgacgccaaccccggccgcgcgcgccgccgctagtgccaacgtcggcggcaacactggtggtagcgaccacgcaagctgtgaggccgagctgctctggcttcacatcgttgtggcagcgggcaatggcgtggcatgcccgtgccgccacctcgatgcatccgtgcgcgacgcgcggcatgcggtgtgcccgacggcgatgatgaagtag

SEQ ID NO: 77921 - DNA, 364 bp, Oryza sativa
  Clone ID: PAT_MRT4530_77775C.1
tgggtattttttgtgtgcgcgctgacctgaccagcatgaccacgcattatgtgggcccaactgctgatgatgaatagagggggacccaaacggctgcggaactcctagaccacctggctgggtgcgtgtggaccatgaggacgaataaggagggaatgcctgatggtggggggttgagtatggaggccctggaatggtgaccatgtggctggagaaagaaaatgggatgctgtgctggacccaaacccccccccctggggatgatgctggatgctttgctggagaccacatgattgccaagcaagcaccatgggctgctggtttgcttgtgggcttggacaatgatgaacgtgtgaaaactgtt

SEQ ID NO: 77922 - DNA, 296 bp, Oryza sativa
  Clone ID: PAT_MRT4530_77776C.1
ctcccacgcgaggaaataacgagaaacaaacatgttgccgttgaaccatggtcatcaatatcccaacattacaacaccatatggggatcgcaaaacactcccattccacgattttacaacatatgcttcacaacacgttataaatacatggttgtaccgagctgtaaagagacagccagcacgtcccaactacaaatgcacactagccaacagaaaacataaaaactactctctggtaagtcactatatatacgcactatagtttcacatgactaaaattataaacatgacataat

SEQ ID NO: 77923 - DNA, 666 bp, Oryza sativa
  Clone ID: PAT_MRT4530_77777C.1
atgccaccgctgccaagccctgccaccgcctccgcctcgtcgccgccgtcgccgagccaccgcgacgggagagagcctccccgtggtccagcggcggtagatctgctctccccgtggcccggcggtggcggatccgccctccctacccgtgctcaagcaccgccgcccgcatcgcaccatccgacagcatcgtcattgtcgtcagctccgcgccgcccgcctgctgtcaccgccgctgcggctgctgccccctccctccagctagatctgggggagggaggggaggaggaggaggccctccagtcgtggttcatctgccccctcccgttgccacacatccgccgcccatggctcggcccgttgtggtcgccgtcgtcgccgtcgccagcccccaggcctcggtggcggctgctcggtgccgacgcgctgggcggggcggcgactagcggagcagcggcgagcgatggtggttctcctcccccgcgcgcaacgcgggctgctggcctcctcctcggtgacaccaccagcctaagggtgacctcaccgtccacgggccaggaaggcagcgaggagactggagagccgtcggaggacgaggcgcagaggaagtgggaggcggagatggcgcggcggctcaaggaggccgaggagatggaggcgctttag

SEQ ID NO: 77924 - DNA, 416 bp, Oryza sativa
  Clone ID: PAT_MRT4530_77778C.1
ggactcaaaagggcctaaggcatttttaacatcccggccttagacagaaaactccaatcacacagcccaattttacaaaccaccaagaacaggaataagggaaagaacaaactagtcaaaatcaaataaatttaaacatggagaggggaagaatgaaagaaaaggaaaaaaggggaaaaaaaggaaaagaaaagaaatgcatgcccatgggtagcttccttgaccattgggtccgaaccccggtttacaagggggagccaacaacgggggcaagcccggggaccccccagccgacggccctggccctgggggcccccgggggcttggggttctccgcgccgggggggccggaggcggcctccggggggcccccctttttgggcttgggggtcgacccggggggcccggcggcgggg

SEQ ID NO: 77925 - DNA, 341 bp, Oryza sativa
  Clone ID: PAT_MRT4530_77779C.1
ggcaggactacccgctaaacttaagccatatcactcagccggaggaaaagacaaccctcccgtgattctctccagtcagcggcgagcgaagagggatccaactcgttgccgaatcgggtctgataaggcccttgagttgtggccaaaaacgtcacctttcgtggatggtgccacggacgcggcgaaacttccacagcgcaagccaaacccgttgctacaataacctagtgctttcatttgtccacggaagcatatactacatatggtgaataaatgatgaacttcatgttcttctgaataaacaaaatcaaaaaaaacaaaaaaaaaataaaaaaaaaaaa

SEQ ID NO: 77926 - DNA, 499 bp, Oryza sativa
  Clone ID: PAT_MRT4530_7777C.1
ggtagagttggatcaattaaaggaaatttatccagaagagtccgagttcaagaaggatatggcatggcggttgaaagtttctttcttgtcctacaaggactagtatctctccatgggtataaatatgtacacccggggtcattgtaaaatatctctcgatcaatacaattactctcggcgcatcgccaccctctttcctgaggttttacttatcatccggcggaatttggcacctgacgcggggctgcatcggctttcgatctccggtgaaggggtaagtcctacgttccgctggccctggtgaatctgtcggctacgttggtgttgttcaagactgcatcgtttcgatctcttggatcgctctggtttggttgatatatttgcctacctgatatctcaattctatctctaattacattgtgtttagagacacatcgatcggctggtatcgacatcggctattatcagatatcggctggaattactccatcgacttgtc

SEQ ID NO: 77927 - DNA, 810 bp, Oryza sativa
  Clone ID: PAT_MRT4530_77780C.1
atggaacacttatctccccagaaattgatcctgccattaggtatactactatcctcacttgttctccttcatgccattgccgtgccatccatcgatgagcaagctgcagcgcttattgcctggaagaccaccctgcaaacccagcaacccctgcagtcgtgggatagcaaggcatggccatgcaacaactggcgtggcatcaggtgtggcacactacaagggcaaagggtgatcaccaagatcactctgcacggagtgaggcttagaggctcactggaggccctcaacttctcggccctgacgaccctgacaagcatcaacctttcacacaacaggcttacagggatgatccctcagagtatcatgtctctcaaagagctcagagccttgatcctgcacaaaaatcagataaggggctccttattccaactaggtttaacatctttaacaaagctgaggttcttagtgctaagcaataattttctttcgagttcaataccaaaggaaatatgtagtctaaaaaggcttgtgagcctaaacttgtcaagcaatcaactgggtggtcatataccttctgaaattgggttcctcagtaagttgattagattggatttgtccaacaacaacattattggtcgtctagacagcttgttcatgacaaacaagccaggtaaatataacaataaatcatctttgtcaaatctaaaggttttagcactatccagtaaccaattaactggtccaattccccatgagttgggagatttagtgttacgccccgaactaatcccgaccggaactagcccgtga

SEQ ID NO: 77928 - DNA, 198 bp, Oryza sativa
  Clone ID: PAT_MRT4530_77781C.1
atgggaggggaggcagcagcggcgggtggcgtcctcccctctgccagatctagcaggagggaaggcggctgcagcgacgtgcggtggtgggcggtgctctatcctctccagaggccgtcgtccatcttttttgtgtttgtattagtgttgattctggtgatgctctgggatgtttttgagttcttggatgccgattaa

SEQ ID NO: 77929 - DNA, 3045 bp, Oryza sativa
  Clone ID: PAT_MRT4530_77782C.1
atggccaactataataggcgcaaatcattcgaggagacaactaacatcatcaaggcgacaacctccatcttcaattctgcatcatcttcaacacccccgacctcgcctactccagtgctcgccaagtgttcgtgggcgtgttccaacagtgccagtgcgtacacgacaacaagtgcaagccacaacattgatgttcctactccgacagtcgccatgggcttgcaggtgagtttgaaccatggcattggtactacaacagtgacgcccaccaagtgcttggtaaattgcttcgacaatgacaccggtgtgaatcatgccattcttgaggagtcgtttgctagtaccactgctgcagccaccatggagacagtggttagcgaggacaaggcctgctctattttcatcaatactactgacctcaccaaggttatgcattcaaggtgtacgacaatcagcctcaaagacaacatcggtactattcaggccgaggttgcattcccctttccgtttcacacactgaacatgattgcagcaccaacggagcccatgctagtcatggcagaaaagctggattccattttctgcataaaattggtgatgcccaacgggtgtttgatgaaatgcctcaaaagtgaaaagaggctgctggcggggcttcccaagagaaaaccttggccacttccttggtcaggtggtgtggttagaggagggaatgtgtggcatgttccatggtctgcatttgattccgtttggacaagtgtatgtctaataccaccatggccaccgccaattagacttaagcaatgcaggtcctggaaaattggagtggcaattagtctgtttgcttggaaggcacagtgggatttcgttagttacaggagctgcaccgttgttgaaatttctagaatgcatgagcttgccttgttggtgctattaactgaagacccaagtgatgataaaagagatgacttgctaccggcatccaaaaatccattcacctcctatatgatggcacaatattttgaggttattgaaagcaggcttattagtgatataagccacttggatggcaacaatgttcaggatacttgggactgcaagggaattctagttatactagaagatggtaccagcaaatggagaatgcaagggatcaagccaagtgcaagcaagaatataatttcagcatggaagaatgtttttattccaaccatcaaatcagtcttggaaggtgacaagcaattctgcatttacaagccaaatattagcacttatttgctatgtcatgttgctatgccaactattcttggaaggctgaaaacaagaggcacaattgttaagcttgtggtaaaatatgagcactgtgaagaaggcatactaagctggagtggaatattgtcattactcattacaaggaagggcaatagtgatgggaatgacttgatcattttgattatccaagagctacaagtgccatgggatccgggtggtttgcattttcagaattttaattgccatcgacttgcggacaagtcgaattttaagaagaggggattgttaggaatcgagtgggctgccaatgggcctgtacaaccattcattcaagctggcccaagcaaacccaagtatcctaaagccttcttattctcttggcctgattatgtccaaggccagttgcaagcaacgtctctcttctgcatagccaccatgggaggcggcgacgtgtgcaccatggccgacgagcgagatgatggcacgggcacggcagcatccatggcggcgacgcggcttgccgaactctgcgccatgatcgacgaccacgccgccgcggggacgatgagcgagaagagggtcgccaccatctgcgccatgatagaggaatgcaacgacgacgtggaagaagcaagccgccggcggagcagccggaggagatcaggcaggtggcggcggcgcgtcggcggcaccagcagcacccggtgctacaggcagatcggcaggatcagcagcggcggcttcggcgtcgtcgtcaaggcggagcaccgcgacaccggccagaccgtcgccatgaagaccctcttccgccgccgccgctcggccgacgacgacgccgccgatctgctccgggaggcatccttcatggcggcctgccgcggcaacccttacctcgtcggcctccacggcgtcgcgcgcaaccctcgcaccaagcagtacagcctcgtcatggagtacgtcgggccgagcctgagcgccgccctggccgagcacgtcgagcgccacggcggcgagggctacgcggaggcgaccgtgcggcggatcatgcgccagctgctcacgggcgccgccgcgatgcacgagcgccgcatcatccaccgcgacatcaaggccagaaatatcctcgtcggcggcgacggcgacgtcgtgaagatatgcgacttcgggctggccatgtccccggccgaggcggcggcgccgtaccgcccggtcgggaccgacgggtacatggcgccggaggtgctgctcggcatgcccgactacgacggccgcgtcgacacgtggtcgctcggctgcgtcatggcgaagctcctctccggcgaggcgccgttccggggagaaggcacgagcgaccagctgtaccagatcttcgacatgctcggcgtcccggggaacaagacacgcgaggccttcaagtccaagtccgagctcctagcctacgaggtccggcgatggcaagcgctgcggcggccgcagccggagcaggaggcgcgcggctggctgcccgagctcttcccggagaagttgctgtcgcgggacgggttcgacgtcctgagggggcttctcacgttcgatcccggcgagaggctgaccgccgccgccgcgctcaggcatcggtggttcgccggagctgacgctgatgagtccggcgtcgccgcgttgctcaggaagacggcatcgatagtagctggtgcggtcatcagtgctggggcatttgttggaacttggatgataccttggtgcgactgcaggacggcaggcaccgaagcataa

SEQ ID NO: 77930 - DNA, 2355 bp, Oryza sativa
  Clone ID: PAT_MRT4530_77783C.1
atggctcacatgatgacgtcatcacccactgcctgcgttgtccttgctcttgcctttgtcctcctcgcagtgacgccgacgctctgctacgtcactgacggcgcgacgcggcggcgaggcgcgagcacgagccggcgccatggcgaagctcggacttacatcgtgctcgtcgagccaccggatgccgacggcgatgacgacgaggccgcgcaccgccggtggcacgagtcattcttgcctggcggtggcggtggcggtggcggcgaggagcgggcgtcgccgacgcgcatccgccactcgtacacgggggtggtgtctggcttcgccgcgacgctgacgcgcggcgaggtcgccgccgtgtcgaggaggcgcgggttcgtgcgcgcgttcccggagcggaggttgccgctcctgacgacgcgctcgccggggttcctcgggctgacgccggagcggggcgtgtggaaggcggccgggtacggcgagggcgtggtcgtcggcctgctcgacaccggcatcgacgcggcgcacccgtcgttccgcggcgagggcatgccgccgccgccggccaggtggaagggcgcgtgcacgcctcccgcgcggtgcaacaacaagctcgtcggcgcggcgtcgttcgtctacggcaacgagaccggcgacgaggtggggcacgggacgcacacggcggccacggcggccgggcgcttcgtcgacggcgtctcggcgttcggcctcgccgcgggcaccgcctccgggatggcccccggtgcgcacctcgccatgtacaaggtctgcaacgaccaggggtgcttcgagtccgacgtgctcgccgggatggacgcggcggtgaaggacggcgtcgacgtgctgtccatctccctcggtggcccgtccttgccgttcgacaaggacccgatcgccatcggcgcgttcggggcgatgtccaagggcatcgccgtcgtgtgcgccggcggcaacagcgggccgacgcacttcacgctgtccaacgaggcgccgtggatgctcaccgtggcggccgggtcggtggaccggagcttccgcgccacagtgcggctcggcgacggcgaggcgttcgacggcgagtcgctcagccaggacaagcgcttcagctccaaggagtacccactgtactactcccagggcaccaactactgcgacttcttcgacgtcaacgtcaccggcgcggtggtcgtgtgcgacaccgagacgccgctgcctccgacgagctcaatcaacgcggtcaaggaggccggcggcgccggcgtggtgttcatcaacgaggcggacttcgggtacaccatcgtcgtcgagaagtactacggcctccccatgtcgcaggtgaccgccggcgacggcgccaagatcatgggatacgccgcggtggggtcgccggccgcgtcccacaacgcgacgatcgtgttcaacagcacggtggtcggcgtcaagccggctccggtggtcgccgccttctcgtcgcgcgggccgagcgcggcgagccccggcgtgccgaagccggacatcatggcgccggggctgaacatcctctccgcgtggccgtcgcaggtgcccgtcggcgagggcggcggcgagtcctacgacttcaacgtcgtctccggcacgtccatggcgacgccgcacgtcaccggcgtcgtggcgctcatcaagaagctccacccggactggtcgccggcgatgatcaagtcggcgatcatgacgacgtccagcgccgtggacaacgacggccacgccatcatggacgaggagcaccggaaggcgaggctctactccgtcggcgccggccacgtcgacccggcgaaggccatcgacccgggcctggtctacgacctcgccgccggcgactacgccgcctacatctgcgcgctcctcggcgaggcgtcgctgcgggtcatcaccggggacgccgccgcgacgtgcgcggcggcgggctccgtcgcggaggcgcagctgaactacccggcgatactggtgccgctgcgcggcccgggggtggaggtgacggtgaaccggacggtgacgaacgtcgggccggcgagggcgaggtacgcggcgcacgtggacgcgccggggtcggggacgacgacgacgacgacggtgaaggtggagccggcggagctggtgttcgaggaggcgatggagaggaagacgttcgcggtgacggtcacggcgagcggcggcggcggcgcgggcggcggcgggcatgtggtggcggaggggagcctccggtgggtgtcgcgacgtcacgtggtgcggagcccgatcgtggcggacagtagcgtcggcggccccagccgcaggtcggcacaagatgcttaa

SEQ ID NO: 77931 - DNA, 440 bp, Oryza sativa
  Clone ID: PAT_MRT4530_77784C.1
atcttttctttgtgcaaatttttttttttcatctttactgataagatttgcagaaaagatccgtttgtggagatcccggtgcccaaaacatcacattttccaccagggaacagacgctttgcaaaccccgggatattaccgtccggttgctgctaacacaaaaactgttcctgtagcggatggtcttaaaacacacgaaatataacggcgtacatgccatcccaaagcagattaagtgatgtaagaattcatcacaactaacaagtcgaagtctaaaggtagaattgctgggcgcctgaagtggagccgtacacctattaatttcctaacgcttactggctgctaaacacatgtgaaatccgcggcgtcagcaccattaaaaaatcggctcagcggttcggggtgaaggtttgcaatttgggaaatccggggatgttttt

SEQ ID NO: 77932 - DNA, 951 bp, Oryza sativa
  Clone ID: PAT_MRT4530_77785C.1
cacgagacgagaagactgattcattcgctcgcgtacacgcctaggcgctccgagaattcgtgagggaatcccgcatcgccggagccgatcggcggcgccgcgggcgggtgggggggggttagggttagggttttgggggtggcccaccggggatggacgcccccggcggcggcggcccacgcgtccgcggacgcgtgggcggcgagcccgtctgggactgggggaacctcctcgacttcgccgtccatgacgacgactcgctggtcctcccgtggggggacgattcgattgggatcgaggccgatcccgccgaggcggcgctgctcccccctgccccgtcgccgcagccggcggaggcggaggcggaggccgcggggccggcgtcgctgccgtcgtctatgcaggcggagggaagcaagcggcgcgtgaggaagcgcgacccgcggctggtttgcccgaactacctcgccgggagggtgccgtgcgcgtgccccgagattgacgagatggcggccgccttggaggtcgaggacgtggccacagagttgctggcaggggcgcggaagaagccgaagggtgccggccgtggtagtggtgcggcagtcggcggaagtggtggaggggctagccgtgggacaccggccgagatgaagtgccaggtgcctggttgtgaggcggacatacgtgagctgaagggataccaccgccggcacagggtgtgtttgcgctgcgcgcacgccgccgctgtcatgcttgatggtgtccagaagcgctattgccagcagtgtggcaagtaaggctccatttcctcattccaggctgctttatgaacttgtggaagatccattgggatcagtagcagtaggagggataattaagtgctttaacacttatacaatcattgttgctatatgatttggtgtttaatgcattataccttttctaaaacct

SEQ ID NO: 77933 - DNA, 252 bp, Oryza sativa
  Clone ID: PAT_MRT4530_77786C.1
atgacgggggctcaaggcgttaagcttatcagggcgaagctccatggcgaagacaatgcagcgaagacgataaatgatgaagcctcatggcgaagagcgtgcatcctgggcgaaggtcgaagggcgaagagtatacgccgaaggaggatgacttcgccatatcgaggccagctccgggaaggcccaaggggccatcccagccgcttcggcccgttggccattgggccagcgatcgccaatttggcctattag

SEQ ID NO: 77934 - DNA, 428 bp, Oryza sativa
  Clone ID: PAT_MRT4530_77787C.1
ctcaatgtcaccgagaatgttacgggggaatttttctcatttcccctcctcttcaaaatgttgccctactcacaaaacatctggacaaatttttcaataagaaagatctcccttgggtaaatctcatttggaacaaatactactctcattcaaatttaccccctcatgcacacacagaaaagggttctttttggtggaaggacattttcagattaatcccaattttcagagcaatctcaaaggtaactgttggttctggtgaaacagctttgttttggaaagataattggactagaagcattttgcaagaggagttaagcatcctattctcattcgcaaaattggaagatatctcacttaaaggtttcctcgatctgaatagtattgagcagtcttttcatacacccatgttggtacaagcaattcaa

SEQ ID NO: 77935 - DNA, 643 bp, Oryza sativa
  Clone ID: PAT_MRT4530_77788C.1
gggtgcaatggaatccgtggtatgaagaccttcttccaggaatgtgcaccacggacaatttaagcactaatggaataattttgaaatgctctaatcataagcctagttccattgcacaacccgttgtgcaggtcgagattggccagcaatatgaccagaccaaaactttggccttttaaaagatgtgccaatccatttggtgtgagtgaattcaggtactcaaatttatagaaattgggcaaaacgtggaatattttgttccattaacctaatttacaaatcgctcctttctcagctcttctgaagatcgattgcaagaccttctttccttgaaatgataacggtatgaagttaaaacttaaaaccagcaatggattcttcacagggtacacaattttcggttatcaaatctgctccatatgcgccaactaccattctgaattcctgatacttccattacacatgtttaattcttagccttgctttagctttatccacctgaaaacttatactgaaaacttatactatcttgttctgctaccaaccacctgaggaagctcttattcttgtctattcgcgtttcttaagtgcaaaagccttcagaaatgatgtccaagaccccacgcgtccgcccacgcgtccg

SEQ ID NO: 77936 - DNA, 687 bp, Oryza sativa
  Clone ID: PAT_MRT4530_77789C.1
atggaccgggagtcggcttggagagagagaagcaataatgttgtcatctactttgagagttcttcgatttgtgtttcaccggggttcggctgtccaaccggtggcgcaccggcggtcagaccggcaataggcagtggtcagaccggcagagctaaggcggtcagaccgacggcgcagtcaggcggcggcaggcgatttcgacggttcgaccgatcgatctacatctgtcagaccgacgttaatcaggcgttcagctgcccatttctctgcaacaggggatgtccaagtgaggaagtctccctcgccatcgccgatgagatacggtgggtgctagagaaatgctacagcaacccatggctaccgctcaccggtgagaagaacaggaatacagccggatgcgccacctccatggaggacctggtcaagctcccctcctccctcctcgggacacgtcacgtacaggctttctctgccaacatgccggtagaggctgctgccgtctccgaggagccacgtaggaggtatgccataacagccctgcataggatcgtccccaccggatccagtggcgacggtgagtcatcagagatggtgacctgccatgatatgacatacccgtacgtagtattctactgccacatggctggcccggccaccagggcctacatggtggtgctggtcagctag

SEQ ID NO: 77937 - DNA, 487 bp, Oryza sativa
  Clone ID: PAT_MRT4530_7778C.1
gaaaacttctttcttgtccgacaaggactagtatctccccgtaggtataaatatgtacacccggggtgattgtaaaacatctttcgatcaatacaactactctcggcacatcgccaccctctttcctaaggtttttacttatcatccggcaaaatttggcacctgacgcggggctgcatcggttcagttcgatctccggcgaaggggtaagtcctacgttccactggccctggtgaatctatcggctacgttggtgttgttcaaggctgcattgcttcgatctcttggatcgctctggtttggttgatatatttgcctacctgatatctcaattctatctctaattgcattgtgtttagagacgcatcggtttagttgggactgtctcggttaggtccgatcttctatcttagccgatatatctctacaatcataatgttgttctgaatagatttgttatatccatcacattagacagacctatcgg

SEQ ID NO: 77938 - DNA, 1010 bp, Oryza sativa
  Clone ID: PAT_MRT4530_77790C.1
gcacgaggctctgttggaccgccgcgcccagagcgctcgaccagtcggcgggcgatggtcgccgaggtgggcgaggaggcgggcaccgcggcggaatcgcatcgggagcggaacgccatcgccagccgcatccgccgcgccgacgccaccgcagcgcgtcgcccctacatcaagtgcaacaactgcggtccggccgggatcgtcaagtgtgaccgcgccctctcgacgactggctccgcgacgacttccccaaccaccaactctgcaaggtgcttggccccgatcgatcgagctctttttctcgccgctcctctacgtctaggtgctcaacgtcgcctgaggcggccacccggggcgcgtcctaccgagcacaccgctgcacgagtggttctcgcggagtcgctcgacggcgaggataaccagctgatggtgaacagctaccactgcaccaccagggagggcgtgcaggcggcggctggcggagcggttcgtgccgatggcgttcgatctgcgctccggatgcgattctgccgccgcggcgccggcctcccgccacctccgcgcccatcgccgcggcggtcgagcggctgctgccgtagtcctcagcggtgcgctaggccgatgcgtggccaggagtgagttcgttgaagccaaccggctaaagctccactgggcatgtgggttctatgtagttttaattttttttaatttttgtttttagtgccacatcagttaaaaccaaaaaaaaaaaaaaaaaacccgcggcctgctatactaagatgaaataattggcctcactctcctttttttttttactatggtttagctaaagggccatgcattgcaatggatactataagagataaaagaaagtaaaattacaagtttatagtattggtatatttttagaggggttgtataggtagttaattagtcatataatgtcatatccaaaataaaattattcacgtgtgagaattttatgctgttagcttaaaaaaaaaaaaaaa

SEQ ID NO: 77939 - DNA, 888 bp, Oryza sativa
  Clone ID: PAT_MRT4530_77791C.1
atggggaaaaacaagattttggaagataaatggttagagccctgggctctgtggttgagtaggaatgatatggtttttgacaaatcaccatctatttcatatatgcaggtgctcgcaggatttgttatttcatgtgaccggtcagaccgggcgctggtagccggtcagaccggcgtgtattgcgcgtcgaaatttttgaaaggagtgttgttggtgcactttgtaaacacagataaaatcaataaagtcgtcatctactttaaaagttcttcgatttgtgtttcaccggttttcggcggtctaaccggcaactcgccggcggtcagaccgacggcaagcggcggtcagactggcagcgacatcaggcacggcagggattccaggacggtccaaccggaagatcaacaccgaattgctcgagctatgaataatgccaggaacaggaaaagaggtggtccaaatcgttgctttgaatgtggttcaattgatcatcttcgttcgcattgtcctaagcttgggagaggcaaagacaaagatggtgagaagtccaacaacagcaagccgaaggattcatctcaagggaggaagctggagaatctcaggaaggcttttcaagaagtttgcgccgccttcgagccactaagtgatgtagatggtgaaagtggagatgatgataagggaaagaacatctccgatgtttgcttcatggcgcgtggtgaatctgacacagagtatgaatataatgagaccggcgactggtcagaccggctacagagcgtcggtcagaccgggcaccggtcagaccggcggtacagaggcggctttggtgccaaggaagaagaacgtgtggatcgtggattccggttgttcgcggcacatgacaggtaa

SEQ ID NO: 77940 - DNA, 777 bp, Oryza sativa
  Clone ID: PAT_MRT4530_77792C.1
atggcagaggacaaattccactttcccattggagatcccgagggccgtggtaccaagaacacgtatgcatctctggtcagcagcattgtcactagaatcaccaccagagcaatggcgaccgtggagggaaagccagtttgtgggccctcggggtactttgagataatcctttttcctaaacctggcactcagttcgccgcaaaacatgctaatggccgcgtccgcctgctgtttaactaccagaatctctatctcgtcgctttcaaggtgcaaggtaaatggcacaaattcaaagacctcactccaaaaatagctccagactatgccagcatcaagaggaagaagcactgcgaggccaagaatctacccttcgagtccaactacggagtaagaggaatggcggcaaacttagcacaactcaaggtgagcagacaaactccacttcagatctataagatgctgagtttgtatgaccctgagcacaacgcgggaatggtccgattgtcagacttgcaaaagatgctcttcaagacctgtgctgtgtttccggaggtgttcagattcccattgctgaagaagcgagtcgtgtacctgatgggtaagacagcagacgaagagagtactgtcggtgagcaacacaccgatctgttccagaactggggtgattgttgcatggcactcaggatggggagacaagctttcacgccgatggctgatctagatatctacacgttcgaccagctgctctctacgatcggagccgttttgccagtttga

SEQ ID NO: 77941 - DNA, 1331 bp, Oryza sativa
  Clone ID: PAT_MRT4530_77793C.1
atggggatggcggcgagcaggagcaggccgacggcggcatcaagtagcgagcgggggaggaggtggtcggcgcagctcactgcgaggagcagggtgggcaacatcagggcggcgccggcagagcgatgtggtcgcggcgacggggatcccggtgcgcgtgaaaggctgcagctgcacgtcgctgacagccgtgcgccgccgccgttccggtcatcgtcgtcgctcgggaagaccgccgtcgggatcgccaagttgtcgcccgtcctcgtccgccccttcgccgtcgttgtagaccgccggagcaccgtcgccgccgtcaacccgaagaccgccgccgcttcaacctcgccgccggtgccgtccgttcctcttccgccgtcgctttggtcgccgcgtcgccattcgccggcgggcttgcgcgtccgagccgccgccgccggtggtgacgtcatcgccgacgtcatcgtcgccctctcccgtgagccgcatggttcattgcggagcaccagactgagaagtggcggagataagcccacgggggtcgctggggagtccatgcctctggtttttgagggggcaaaacggcaatgggcgagcacggatgcgggcggcgggctgtgtaaaatcaaagagttcttcgatttgtgtttcaccgggtttcggcggtctaaccggcaactcaccggcggtcagaccggtggcatagcggcggtcagaccggcgggagcacggtggtcagaccggctgcggcgacaggcgctgcaggcgatctcggcggtcagaccggagattcaataccgaattgctcgagctatgaataatgccaggaacaggaaaagaggtggtccaaatcgttgctttgaatgtggttcaattgatcattttcgtttgcattgtcctaagcttgggagaggcaaaagagaagaaaaagatggtgagaagaccaacaacaacaggcccaacaacaataagtcgaagggttcatcccaagggaggaagctggacaatctcaggaaggcttttcaacaagtttgtgccgccttcgagccactaagtaatgtagatggtgaaagtggagatgatgataagggaaagaacgtctccgatgtttgcttcatggcgcgtggtgaatctgatacagagtatgaagataatgagatgagtgcttttgaggaagctattaatattttgagtgcaaaaaataagaagtaccggctactgagcgtcggtcagaccgggcaccggtcagactggcggtacagaagcggctttggtggcaaggaaggagaacgtgtggatcgtagattccggttgttcgcggcacatgaccg

SEQ ID NO: 77942 - DNA, 2454 bp, Oryza sativa
  Clone ID: PAT_MRT4530_77794C.1
atgccattcgggttaaagaatgcaggtcctacttttcaacgtactactcgaatttctttgggtagccaaataggacgtaatgttgaggcttatgtcgatgacttggttgtgaagacgcgcgaccgagaaactttactttcagatctggcggaaactttcgagagtctccgctccacccgcataaagctgaaccccgataagtgcgtgttcggtgtacctgcgggcaagcttctcgggttcttggtctctgcccgaggcattgaggccaaccccgagaagatacgagctatagaacggatgcgcccccccagcaagcttagggatgtgcaatgcgtcaccggttgcatggccgccctaagtcggttcatatcgaggctgggagagaaggcgctacccttatttaagctcctcaaacgctccgggccgtttacctggacgaaggaagctgaacgtgccctcactcagttgaaggcgtatcttagctctcccccagttctggtcgccccggagccaggtgaacccttgctactctacttagcggcgaccccgcaggtagttagtgcggcgttagttgtggagcgcgatgaggacaaccctcattccgcgcatccccactctgtgttggcttggcccgggagagagcagggaggagaggctcccgagccgaacggtggcccaaggcccccgacgaccggagctggccctctgcccgcttgtcagacggtgccaggtgcccccgacccccaggatggcccgagggccactgcgggaaggccgcacctatcgccctctgaccccgaggttaaccctgtgccgactcgacccgggagagaggagggagaagaggcccccgagccgaacggtggcctaaggctcctgacgaccggggttgaccctttgcccgcttgtccgacgacgccaggagcccccgacccccaggacggccctgaggccactgtgggaaggccgcacctgtcgtcctccgaccccgaggtcgtcggcacagaagacaagtgcgccccgcgaggccgcttggacgaagagcgccccagggatgcggcccctggcgaagaaaatcggccccaccgaaaggtgcagcggcccgtctactttgttagtgaggcccttcgggacgccaagacccgataccctcaggcccagaagatgctttacgctattctgatgacttcgaggaaactgcgccattatttccaggcgcatcgggtcacggtggttacgtcttaccccctcgcccaaatcttgcataatcgagagggtacaggacgggtggtgaaatgggcaattgaactttctgagttcgatttgcactttgaaccacgtcacgctatcaagagccaggccctcgccaattttgtggcagagtggaccccggctcccgagcccgtctcagtccccgaggccagctcgggcccctcgcagctgcctcacaccgcccactgggtgatgcagttcgacggctccctgtctcttcagggcgccggtgcgggggtcacattgacctcgccgagcggagacgtcctcagatacctggttcgccttgactttcgggcgaccaataatatggcagagtacgagggactccttgcgggactcagggtggcagctggactggggatccgccgcctcctggtgttaggcgactcccagctggttgttaaccagttcactaagtggcccgaggcttatccggtcgtcaagatcgataagcactccgcacttaaattcattaagggcatcacagcccggtttggggtgcctaaccgtattattacggataacggcacccaattcactagtgagcttttcggtgactactgcgaagacatgggcatcaaactctgcttcgcctcacccgcccacccgagaagcaatggccaagtggagcgcgccaatgcggaaatcctcaagggccttaaaaccaagaccttcaacatcctcaagaagcacggcgattcgtggatcgaggagttgccagcggtgctctgggcaaaccgaaccacaccaagccgagcaaccggggaaacgcctttcttcctcgtctacggcgcggaggcggttctcccatccgagctcaccctgaagtcccctcgggccaccatgtactgcgaggctgatcaagatcagcttcgcagagatgacctcgactacttggaagagcgaaggcggcgcgcggccctccgagccgcacgctaccagcagagcctgcggcgctaccatcagcgccacgtccgggctcgatcactctgcgtcgacgacctcgtcctacgccgcgtccaaacgcgtgctggattgagcaagctctcaccaatgtgggagggtccgtatcgagtgatcggcgtcccccggccgggctccgttcggctggccacgggcgacggcatagagctgcctaacccgtggaacatcgaacaccttcgtcgcttctatccctaa

SEQ ID NO: 77943 - DNA, 1207 bp, Oryza sativa
  Clone ID: PAT_MRT4530_77795C.1
ccgggctgcaggcccagccaaaagcccggggcaacccctacgaagcttccacgaagctcactcccctcccccctcccctccctttttatctccctcctccttcgcctccttgttccgccgcctcgaggcaacctcgccaaatctctcgatctcccattcgagcgagatgaagctctccatccagtcattcgcccgcaagctctccctcccgtcgccgaagcggacgtggagcagcggcggcggaagcagtaagagggatggtggcatgtccaagaacgggagcggcgtgaagcgggccatctcccgcagcgaggcgtcgtcgttcgcgtcggcgtcgtcggagtcggagtcgtcctcggacgacgcgctgatggcgaggtcgacaccgaggtcggtgctccccgcggagatctcgcggcgggagctggaggccgtgctccggcggctcgggcacggggagcccgacgacgaggagctggacgccgtcgcggccatcgccgccgaggccgaggcgggcggcggggaggacgagctgatggaggcgttcaaggtgttcgacgccgacggcgacggccgcatcaccgccgaggagctccgcggcgtcatggtcgccatcctcggcggcgacggcgacggctgcagcctcgacgactgccgccgcatgatcggcggcgtcgacgccgacggcgacggcttcgtcgggttccaggacttcgcccgcatgatgatggccgccaccgccaccgccacggcgacggcggacggcccgagatcgtggtgatccattcctccgttcccgccaaaaagatcggacggccgtgatgcgctctgatgtggtgtgcttcaactttttttggcgcgcactagacgatggaaaaaaagccagcactactagatgcgctgctaattaagtactctactaatccaagatgaagagggaatattattattagcctaaacccaacctgtaaaatccattaagagagagtaatcccaaggcgaatgcttcgttctttcaatttttcaaattttaatcctccaacttggagttggagctgtaagcctaacgttgctgtgtgaatcggacttgtatcttgctgcgatcgagctactataaaacattctttagatcttatggattaaaaaaaaaaaaaaaaaaaaaaaaaaaaaaaaaaaaaaaaaaaactcgagggggggcccgtaccca

SEQ ID NO: 77944 - DNA, 320 bp, Oryza sativa
  Clone ID: PAT_MRT4530_77796C.1
tttctcctatgccaggggacgtgccactgagctctcgtcgctaatattaacaccttgacttctttgctagctgtgactactgcctctgactatagacagtttaatgctgccatctcagctgaatctttgtctgacgctccagcctcggctcctgaatccatgcagggttcaaaggggaagatttgccaaaatacgattgtggccatgcattttgaacggtgagactgctgtccaaatttggatgtctggacatcaatattcccggggaggttttgctataatactctctggaatcgggtcatctataaggggtggttgtg

SEQ ID NO: 77945 - DNA, 503 bp, Oryza sativa
  Clone ID: PAT_MRT4530_77797C.1
actaaacaaaaataaaatatttaaggaaagtacatgaaatactggatttgaagctcaagaattttacaccctactgtaagacagtgactccaattaaaaaccataaattacaaggtatacactttataactttaggaccatacaactggatataatacagactgaattgatataagcacgcctgaggtgatacacatacacgaccctactttgctgttctggaacgcttgataagccaatcatatgacaacttttatgtgtacagagaccttgcatagacatcatgtatcatgaaacttatcagggcctttatcaattccaggcctattggatcaaccaacccttacttggaaacagattgtgacttgcaaattatgttgccaaggactaaacaaggaattccagttaatgaatgctctgacaagatgtcaagaaattaacttttacctaaactaaagctttccgggtcatgcccttacaccacatattagattgtaaaaact

SEQ ID NO: 77946 - DNA, 3987 bp, Oryza sativa
  Clone ID: PAT_MRT4530_77798C.1
atggtggtttcccccactgtttgcaacgtgaagctggggcgtgtcctcattgatgggggagcagccctcaacatcctttcccccgcagcctttgacgccatcaaggccccggggatggtgctccggccgtcccagccgattatcggtgtgacgccggggcacacttggccgctaggtcatatcgacctcccggtcaccttcggtggatccgccaacttccgcacggaacgggtgaactttgatgtggcggacctcagtctgccctacaacgcggtcctagggaggcccgcgttggtgaagttcatggcggcagtccattactcctacctccagatgaagatgccgggccccggtggccccatctctgtccatggcgacctcaaagtcgcgctcgcttgtatggagcagcgcgcggaccacctcgccgctgcgtccaagcccgagggtggcgacgagaggcttggcacctccgtccccaccgccccgaggcagcggatagtcacgtgcgacgaggtcccggaagacgcgctcgtctccttcctgcgggcaaacgctgacgtcttcgcatggagaccggcggatatgcccggggtccccagggaggtgattgagcaccgtctcgccgtgcggccgggcgcaaagccggtccggcagaaagtgcgccggcaggccccggaacgtcaagctttcatccgcgaggaggtggcgcgacttctggaggccggattcatccgcgaggtcatccatccggagtggctggcgaacccggtggtcgttcccaaggcgaacggcaagcttcggatgtgcatcgactacaccgaccttaacaaggcttgtcctaaggacccttacccccttcctcgcatagatcagattgtcgactccacagcggggtgcgaccttttgtgttttctagatgcatactctggttaccatcagattcgcatggctagggaggatgaggaaaaaactgcgttcattacccccataggaacttattgttatacgacaatgccattcgggttaaagaatgcaggtcctacttttcaacgtactactcgaatttctttgggtagccaaataggacgtaatgttgaggcttatgtcgatgacttggttgtgaagacccgcgaccgagaaactttactttcagatctggcggaaactttcgagagtctccgctccacccgcataaagctgaaccccgataagtgcgtgttcggtgtacctgcgggcaagcttctcgggttcttggtctctgcccgaggcattgaggccaaccccgagaagatacgagctatagaacggatgcgcccccccagcaagcttagggatgtgcaatgcgtcaccggttgcatggccgccctaagtcggttcatatcgaggctgggagagaaggcgctacccttatttaagctcctcaaacgctccgggccgtttacctggacggaggaagctgaacgtgccctcactcagttgaaggcgtatcttagctctcccctagttctggtcgccccggagccaggtgaacccttgctactctacttagcggcgaccccgcaggtagttagtgcggcgttagttgtggagcgcgatgaggacaaccctcattccgcgcatccccaccctgtgttggtttggcccgggagagagcagggaggagaggctcccgagccgaacggtggcccaaggcccccgacgaccggagctggccctctgcccgcttatcagacggtgccaggtgcccccgacccccaggatggcccgggggccactgcgggaaggccgcacctatcgccctctgaccccgaggttaaccctgtgccgactcgacccgggagagagcagggagaagaggcccccgagccgaacggtggcctaaggctcccgatgaccggggttgaccctttgctcgcttgtccgacgacgccaggagcccccgacccccaggacggccctgaggccactgtgggaaggccgcacctgtcgtcctccgaccccgaggtcgtcagcacagaagacaagtgcgccccgcgaggccgcttggacgaagagcgccccagggatgcggcccctggcgaagaggatcagccccaccgaaaggtgcagcggcccgtctactttgttagtgaggccctccgggacgccaagacccgataccctcaggcccagaagatgctttacgctattctgatggcttcgaggaaactgcgccattatttccaggcgcatcgggtcacggtggttacgtcttaccccctcgcccaaatcttgcataatcgagagggtacaggacgggtggtgaaatggacaattgaactttctgagttcgatttgcactttgaaccacgtcacgctatcaagagccaggccctcgccgattttgtggcagagtggaccccggctcccgagcccgtctcagtccccgaggccagctcgggcccctcgcagctgcctcacaccgcccactgggtgatgcagttcgacggctccctgtctcttcagggcgccggtgcgggggtcatattgacctcgccgagcggagacgtcctcagatacctggttcgccttgactttcgggcgaccaataatatggcagagtacgagggactccttgcgggactcagggtggcagctggactggggatccgccgcctcctggtgttaggcgactcccagctagtggttaaccagatctgtaaggaataccggtgctctgacccgcagatggatgcttacgtacgccaagtacggcgtatggagcgccatttcgacgggatagagcttcggcacgtgcccagacgggataacacgattgccgacgaactctcacggctcgcttcctcgcgagtccagaccccaccgggcgcctttgaagaaaggcttgcccagccgtcggcgcgacctgaccccttaggggagacggacgcgcctgaccggcccccgaggcccgtcggagtccaggcctcgggacccgaggggagcgctcccagctcccttagattgattgcttggatcgttgagatccaagcatacctcacagataagactctacccgaggaccgcgaaggaagtgaacgcgtccagcgcatctccaaacgctacgtgctgatagaagggaccctctatcggcgcgcggctaacggaatcctcctgaagtgcattccttgggaacaagctctcaatgatgcggtcgacctggtccggcgatgcagagcgtgtcagttccacgccaagcaaatccatcagccggcccaggcactgcagatcataccactttcatggccgtttgctgtctgggggctcgatatcctgggaccgtttaggcgggccccgggcgggtttgagtatctgtatgtcgcgatcgacaagttcactaagtggcccgaggcttatccggtcgtcaagatcgataagcactccgcacttaaattcattaagggcatcacagcccagtttggggtgcctaaccgtattattacggataacggcacccaattcactagtgagcttttcggtgactactgcgaagacatgggcattaaactctgcttcgcctcacccgcccaccccagaagcaatggccaagtggagcgcgccaatgcggaaatcctcaaagaccttaaaaccaagaccttcaacatcctcaagaagcacggcgattcgtggattgaggagttgccagcagtgctctgggcaaaccgaaccacaccaagccgagcaaccggggaaacgcctttcttcctcgtctacggcgcggaggcggttctcccatccgagctcaccctgaagtcccctcgggccaccatgtactgcgaggctgatcaagatcagcttcgcagagatgacctcgactacttggaagagcgaaggcggcgcgcggccctccgagccgcacgctaccagcagagcctgcggcgctaccatcagcgccacgtccgggcacgatcactctgcgtcgacgacctcgtcctacgccgcgtctaa

SEQ ID NO: 77947 - DNA, 765 bp, Oryza sativa
  Clone ID: PAT_MRT4530_77799C.1
aaggagatgaacagcaacgattcggggaatcggcgatgacggcggcagatccattgggacggtgtgtccgatatgttgaacatgtaattgtcgtccatggtagaacatgtaacggtgaattgtttgttctggtttgtgatgtatttgttcttgtcttcttggtttgtggtgtgcttgcttgttgttgatgtgttcatatactcttctgttcttattgatttccaatgtagatggagaaattgcagatggggctgcttgcaaattctccaccacagtatcgacaatataccataatcctttgggccgtgcatgggcctcttcgagatgccgatccggtcgaccgggttgggcctccctccgcgcgccgcatctattggcgcggcgaggcgaccgcttcttcttcttcttcttcttcttcttctcattcctgcatcctgcatatgcttcgtatacgcgtatacacacgtacgtcacctcatcctctcctactcctccgccgtcttcgtctccggcggcgtcgccggccacggtaggagcgccagcttccggcggccggacggcgtggagaggtcggagagcgcccgccgcatggccgcgctgctcgccgccgagatgacgccgcggttcggcggcggcgagccgtctagtcccgccggcggtggccagccgcagggagggcgatcgacgtcgaacgacgacgacggcgcgcgcggtgacgtggagctggagcttctgctgatccgatgctgctccttctcgtgctga

SEQ ID NO: 77948 - DNA, 1044 bp, Oryza sativa
  Clone ID: PAT_MRT4530_7779C.1
tcagccaagccactgaggagccacttccttcacacggccagcaccagaactccttggaagagacttgattgtaaccaatggcaagacgggcccttggccaccctcgaaacgccatctatccgccacaaactttcggccgacaatgaggaagtcaccgtcacggacatcaagccccattcctgcttcacgccagcacaagccgtcgtccaccggcagaagccccctgccgagcaggaggctggccgccagcgagccgccgccgcgcttgccgtccacacgcagccgtcccgccgaccagctgccattcggcgtggaggcgatggatccggccgcggacggccagatccagccaggtacaggggatgaccagctagagcgcgccgccgcagcattaccgaagccaacaccaacgcttgacagacaccgacggcggcgccgcgaccacggcgggagcgagccgccgctgttgtcgcctgaccaccgtgacgctgcctctgcctgccggtctccgcacctcctcggcgccgaccactcccccagcccggatctggagaggcgacgcgcgttgccgctgctccacctttcccgccgcctgcatctcccttccccgcctccttgggtgccaccatcgtcccgggaggagaccggaccgccggatctggcgagggacgccaaatccggcgccgccgccgccgttccgcaccaagccgcctccgcccagctgttccgcaccctgtcgcctccgcgcgcccagcccaacgccctgacgccgacgccgatgccgccgcaccgtcgccgcccccaactggtcggggtcgtgggcaccgacccgcgccctcgagggagaaggaaggccccgccgccgccttcctcgcagccacgcggtttccggcggtctgctcgggcggcggcgaggtggaggagggaggaaggcggcggtggtcgccgcccgtgtcgcccctgcccctggttgatttggaaaaagcaaaacgcaagggtgttcgaagggatcgaggcaacgattccccagctcttttctgccat

SEQ ID NO: 77949 - DNA, 310 bp, Oryza sativa
  Clone ID: PAT_MRT4530_777C.1
gcgcggaacgcgggagcatacattgaaaattctagtcgtgctgattcatacaacccacgtgctggaatgaactacgtggggacagcccgaagaagctcctgtatccctgctgccaatgagtgctaccagagtaaacctataccagaatgctattgtttcaccattttgtaatgggaatgctcatagatgagggtatatgagtcaagggcaagatctagtataacgcggtgacaactttcgaaagactgagatccatggtgatcgttagcctggacacctattaatcactgcacaacattatgctggcttg

SEQ ID NO: 77950 - DNA, 216 bp, Oryza sativa
  Clone ID: PAT_MRT4530_77800C.1
atgccaccgtccaccggatcccctccacctcgccctcaagtcgccacggatccgtcgccggcggacagtttccgtcgacaggtcaccggcaatcgctcaccatcatccgtgatcccccctccctcagtgccgcctcaccgtccaaggcaaccgggcctcgccactgccccatccgccgaccaccgtcgcctcatcgtcaagtcatcgctcccttga

SEQ ID NO: 77951 - DNA, 357 bp, Oryza sativa
  unsure (1)..(357): unsure at all n locations
  Clone ID: PAT_MRT4530_77801C.1
ggaaatncagggacgacccacgcgaccgcgcgaacttgtattttttttgaccccaaccaccaccgnacccccacaggagagggggggctgacacacgccgacgcaaggccgccaccgcacggacggcgcgggcgcgggggagcagcagaggcagcggaacgaggaggcggagcggagccgcgcgcaacaagagaccggggacgaggcggagacggagacaccggcggcacgggcggcggaggagggaggggagaggaccagccaggcagagcggctgcagatggggagccagcaagaggacggcctgacgaacaaggagagcaacaccgagcagcgcaaccacaagggcaccaacaa

SEQ ID NO: 77952 - DNA, 141 bp, Oryza sativa
  Clone ID: PAT_MRT4530_77802C.1
atggcggtggtggtggtggaggaagtggcgattccaatatgtaaggtcaaggcgattgaagtcgagacgccgctgaccatggctgaccataggcatgggttgacgatggcggtggatgtcatgataggtgcggcgtgctag

SEQ ID NO: 77953 - DNA, 608 bp, Oryza sativa
  Clone ID: PAT_MRT4530_77803C.1
ctttcccccctcccttcttcttttttttttttttttttttttttttttttttttttttttttttttttttttttttttttttttttttttttttttttgaaaaaaccggggaaaaaaaaaagggcccaaataaccagaaaaaaaccaccaccgggggtaaaaaaaagttttgggttacccccccaaccggcccacggggggaaccccaagggcgggaaggggaaaaaaaaaaaaatcccttttggaatttggcccatttttggaaaccccaaaaagggctttaaacctaagccaaaacccaaaaaccaaaggaacctccgggggttcggaaaaaatttttaaaacaggggggaaagaaacaaagggcaaccctttggggcctttaaaaaaaaaaaaaaaattgggggggggaaaaaaaaccccagggcaaaaaaccggggttaaggcaccccagttttaatttttggccgatttggttaaccccccccggtttaaaaaatttggcaaacggggaatccccgtttcccgctaagggggcaaaagaaactggaaaccccccctttggaaaaaggggcccaattttggggggggggaaaggtttttaaaaa

SEQ ID NO: 77954 - DNA, 765 bp, Oryza sativa
  Clone ID: PAT_MRT4530_77804C.1
atgtggatgtggactggaagaccggaactggaagggaaggcagcggggaggggcgcgggtttgagacacggcttcttcatggaggggctgcgtgcaaaatatcgcgggcgtgaggtggtggcggatcgcggaggacgccagccgctcgtggaggagaggcggtgggtcgcagaggggtggtcgccgcacgtggaggagaccgatgaggcacagctgcggccgctgctcgcgaaggagatggagaagccgaggctgcggtcgccgctcacggaggagaggcagctgctgctcacagaggagaggcgacggaggcgaggttgcggctgtcgctcgcagaggagaggcggtagccgctcgcgtaggagacggaggagcggcaacgggtcgtggaggtggcggcgtctggtcatggcggagtgccggcggtcgcggaggtggcagcagccggggagagaggggaaggcagcccgacgccggtgggggaagaggcggccggcgtgggaatgggagggggcggcgggagcggccgacgggagaggggggagaggcggccggcctcgtcagtgggagcagccaccgtcccaccggccatggccatcaccggcggcgggagggttgctgctcggcttgcggtgctcgttagaggagtcggcaagatatgcggtagtattgagtcaaggcgacaccgcaatgacaagcgcccgccgcgatagggagatgctaccgttggtcgcgcacgccgtctcggtcaatcagtccttgtag

SEQ ID NO: 77955 - DNA, 373 bp, Oryza sativa
  Clone ID: PAT_MRT4530_77805C.1
gccacaatcgtgttgattacaaccacagacacaggggaagaacagggggtccaaatttttaaaaaaaatgggacacccacaaacttctggaattaccagaacaagttcagccattggcagtaaactcgtagaaaaccacacttccttgtcaaacaaaaaaaaacaaatcagaattgcaattgttgttcatgtgtcgttcacctacttggtggtttttttttttcaggaagctcccaaacttttttaaaagagggttgttctttttctgttgctgctggggttttgtcggggacattgccactttgctgggattttctgatactggcccatttggatgctcagtgttggtattcttcttgggcttcagtttatt

SEQ ID NO: 77956 - DNA, 1492 bp, Oryza sativa
  Clone ID: PAT_MRT4530_77806C.1
ggcgggtggcgcgcgccgccccaggcccccccgccgcccccctcatccttggccctactccccccgcgccgcgccatgctccactccggcctcaccaaatcccagcccctcccgctcctcgcggcggcgtcctcgccgcgacgcatcctcctcgccggccttctccgcgcagcgtgcttctccaggcccacggcctcctcgcccgcgcttcatccggtaaccaccgtcaccaaccgtgcgagcgccagagccgcggttagcccgggcggcccctcgcagctggggctgggaggtagggtttcgttctccaccgcacctgatggtaccgcatcgcccgacggcgggagcgcgctcccttggctcgccgccgcgagccgcgatggcggcgccgcccccgcggcgagggctagcgccggccgctcctcctcgtgggagacctccgcggagaagtttttctccagaggcgaccaaagcccgcgaggtgaggtattgacggatcgtggttcgggcagggagataattagagaggaagaggataatggctcgattgacaatccgaagtggggcaggatcaaggacaagtatcggcggatggtgccgagggatagagggtcccgtgctctcatggctgagaggagggacttctatgcgctgtatattcaggaagggatggattttagtgtgagcaacaagaagaagaaggacaagaaagggattgagaaagtgttgcaacgggtaatgttgatggatcttttgtaggagcagatacagacacagatggaggggaagaaggtgataattattcaggtaaccaagatatgaaatcattccttgcagtggagagcttgaatgtaagtgtcgcagcaggggttttgctttatcatctggctggaacaaatgcatcccctgtaagtgataagcctagcatccctcttatgtaaggatgtcacataattcatccatccatatcataattatttatattagttctcttttaacacttacattaagtgatgtagtgagcaaagctagtgcaggctcacttgaccattctgaactgctctcctgtaggaacatgatgcagtttttatcttcatcggctgaaaatgggtggcgagttcttggtggtactgttgctcctaaagctatacctctatctgaagttgtgccaggagaaccaacaatccttgtgttgggtagtgaaggcactggtttgaggcccctggttgagcgatcctgcacacatttggtcagaattccgggtaatgttgatggatcttttgtaggagcagatacagacacagatggaggggaagaaggtgataattattcaggtaaccaagatatgaaatcattccttgcagtggagagcttgaatagcattgctgagctgtcaactgtaaaacactggtttgacctgatagatcataagtacaccatccttatactgtttttcaacaagtacttggctagagagttggaaataggaaca

SEQ ID NO: 77957 - DNA, 345 bp, Oryza sativa
  Clone ID: PAT_MRT4530_77807C.1
ccacgcgcacttcgcattcctacttacgagcgggtgaacccggtgagggagccttgagattacaaacgcctacaactcgctccaactgtcacccattttccattggtcctcaaattaagcacatccttgcaactcaggaccacaagtttctaagccttcctatctaactgggagatttctttcaggcgaaatttatcccccttcggatttcattttcgtatggacctttacacgcttgcacatatgtcacaaactgaccttgcttggtgaatttctacctggaaaaccagaggaccaaagttggctgcaatccaattccgacttattttgttggaaattcgaaaa

SEQ ID NO: 77958 - DNA, 351 bp, Oryza sativa
  unsure (1)..(351): unsure at all n locations
  Clone ID: PAT_MRT4530_77808C.1
tttcaacaatccattcaacccggtcactgttcttaccgatcatggctgtctccaacctgctgatatttgggtggcatcatcgctgaatttggatccgagccgagcaccgagttgttnanctgaagctgctactggagcacatacccagaacataccaaatctcagctgtngtgnngtnctgtgttttgctgtgggatgataggcccatctgatgtcgcaatagtgtgtcattgctctngtgcaatctttgtaaataacgaataatattttggcagaaggatgtggatacaaatccttttgccnngtgaaaggaacaaccctngtgaacgnataaaaaaaaaaaaaaaaaaa

SEQ ID NO: 77959 - DNA, 216 bp, Oryza sativa
  Clone ID: PAT_MRT4530_77809C.1
atggagctagagctggagccgtgccaaacaggaccatctagcgcgctgcgccgggtggaatccgttgcggcggcgtacaccgtcacggcgtcacacactcacaccagcgccgcgcgccgcgggggacgtcagggactcgcgcgggccatgcaggttgggctggctctcggcctctcgcctgtatctcaagggggtagcagcccattgcgtcggtag

SEQ ID NO: 77960 - DNA, 506 bp, Oryza sativa
  Clone ID: PAT_MRT4530_7780C.1
ataaaaggaggaccatgcctaccaagagaggggacggacaaaaagactggagaagacctgagctcgtagaggggaaaaatttctttcttgtcctataaggactagtatctacccatgggtataaatatgtacacccgaggtcattgtaaatcatctctcgatcaatactactctcggcgcatcgccaccctctttcccgaggtttttacttatcatccggcggaatttggcacctgacgcggggctgcatcggttcagttcaatctccggcgaaggggtaagtcctacgttccgccggccctagtgaatctattggctacgttggtgttgttcaaggctgcatcgcttcgatctcttggatcgctctggtttggttgatatatttgcctacctgatatctcaattctatctctaattgcattatgtttagagacacatcggtttagttggaactgtctcggttaggtctgatcttctgtcttagccgacatatctctacaatcaca

SEQ ID NO: 77961 - DNA, 2005 bp, Oryza sativa
  Clone ID: PAT_MRT4530_77810C.1
atggcgggggtggccaccggtggcgtggaggacgcctacggcgaggaccgcgccaccgaggaccagcccatcacgccgtgggccgtctgcgtcgccagcggtcactctctgctgagggatccacggcacaacaaggggctatcattcacggagaaagagcgagacgcccactacctgcggggtttgctgcctccagtcgtgctctcccaagaacttcaggagaagaggcttctgcaaaatgtgcggcagtttcaggttcctctgcaacgttacatggctctgatggaccttcaggagaggaatgagaggcttttctacaagctcctgatcgacaacgttgaggaattgctccccgttgtgtacacgccgacggtgggcgaggcttgccagaagtacgggtcaatctttagacgaccacagggtctgtacatcagtcttaaagagaaggggagaatattggagttactgaggaactggccagagaagagcattcaggttattgttgttactgatggtgagcgcattttaggtctcggggatcttggttgccagggtatgggaatccctgtgggaaagcttgcactatacacagcccttggaggtgtccggccttctgcttgcttacctatcaccattgatgtgggaacaaacaatgaggatttactgaaggacgagttctacattggattaagacaaaaacgagccactggccaggaatatagtgatcttctggatgaattcatggctgctattaagcagaactatggacagaaggtgctagtccagtttgaagacttcgcaaattacaatgcatttacccttcttgagaagtaccgtgcaaacaatcttgtcttcaatgatgatattcagggaacggctgctgtagtgcttgcaggcctcattgctgctcagaaatttgtcagtgggactttagctgatcacacattcttattctttggcgcaggagaggctggtacaggcattgctgaactagtggctctcgagatatcaaatcagtccaaagttccagtggaagatgctcgcaaaaagatctggctacttgattcaaaggggttgattgtcagttcacgtaaagattctcttcagccctttaagaagcgatatgcccatgagcatgaaccagtcaaagatctactggatgctgttaaggttatcaaaccgactgcattgataggttcagctggtgtgggtcaaagtttcacaaaagaggtgattgaggctatgagttcaattaatgagagaccaatcatcctcgcactatccaatccaacatcacaatctgaatgtactgctgaacaggcatattcatggagtaagggccgtgcaatatttgggagtggaagtccatttgatccagttaaatacaatgacaagcttttcgtgcctgcacaggcaaacaatgcatatatattcccaggatttggcctaggcgtagtgatttcaggagcgataagggtgaaagatgaaatgatccttgctgctgctgaaggcttagctgaccaggtgaccccagagcatgttgacaaaggccttatttatccacccttttcctgcatcaggaagatatcagccaacatcgcagcccgcgttgctgcaaaagcctatgaccttggattggctagccatctccctcgcccaaaagacttggtgaagtacgctgagagctgcatgtacagccccatttaccgttcttatagatgaagtgatgctcaccttagtgtacagcttcatttggctacagcatgctgtcttgtattacagtaataatttgcggttggacctatatcgtacggcagtagcattttatccctgaactgtgcttgtacatatttgccctgtcatcatgtaataaataacccaagtctgctattgcagaatttggttcagtatgattttactttgtatatggcattgctcgtacgattgcaacaaaggtgtatacactatccacacacggatgaacatgtttgtttttgcatttttt

SEQ ID NO: 77962 - DNA, 1080 bp, Oryza sativa
  Clone ID: PAT_MRT4530_77811C.1
atgaggactttccaaggtcataaccccaacactatgaaagttcattctcgcaagtctcaaccttcaaaaaagaagcctcgcgagttctatgacactgttgaggtacacattattgatgatgacagtgatggtgatgcgaatatccacaaggattactcaatggaagacacatcaaagcaccttgtcatgtacaatcctgagatcacgtatgacaaacaaggggaagttgaagttactgagcctatagataactatacttcgctgaaccaaagatacatgaagccaagacacggatataacactgttttaccatctatcggtgcttacaccgtgcaatgtgctcactgcttcaaatggaggatcatcccaacaaaagagaaatatgaagagatacgtgagaatatttgtcaggatgtgtttgtatgtgaaagagctcgtgaatggaaccgtgttatatcttgcgttgatcctgaagatatatcacaggatggaagtagggtgtgggcgattgacaaggcaagcatttcccagactcctcctggctgggatagagaggtcagaatcagaggagagggttgcagcaagtttgcagatgtgtactacacttctccaactgggaagaagttgaggtcattggtagaagttgggaggtacttggcagagaacccacactacattaggcaaggggttaacttaacccagttctctttcgccacccccaagcctctgcaagaagactatgtcaggaagcatacatatgcagcaactcctgaattaccagagcttcttgagactgcgcaagtggatccactctgctgggcagcaccccctacacgcagcgaactgcttggtgagcttggtgcttcaacctcaagatctgttgatgtcagccagtctgaggtgtcataccctgtagacttgcaccagcccgaggagtctgcgccactacctccacgcacaaagaagaaaactatgaaacgagggcgagtgtcagcaacggggtctcaatcgactccacctggttcatccaaagatcagtctggaggatgcgtaagcgacgtcgagtttgtttcgctgtga

SEQ ID NO: 77963 - DNA, 2037 bp, Oryza sativa
  Clone ID: PAT_MRT4530_77812C.1
cgggctgcaggaatcggcacgaggtttttttttttatggttcaaggggtaattcctactttttctaataataatatgcatatatactaagaacatgtgcattaatcttgagcagaagtgttacttatacattataagtactcgctattagggaaagtataactgcgtacgtaagtataagccttccaccgggaaatacctcacttaaaacaatgactcgaaatagcaaacttccaataatttgtagctacgagtagtagtattatatctcacgtgctgacctaatagacaatccatcaggagagcgagctaggccccacggctcagtgtcttacgtgctctgccacgttgtatgtgcgtgcatgcatgcacgcgtcagaaggagagcttccgaggtgtgaccatggcgagcagcggccgcttcatcaccacggtgaactccaccttgtcctcgaagtcgagcggcggctgcgacgggtgggcgcgccactcgaacgcctgcaccatccgcgccaccatgagcgcgatgtgcgccgtgcccatgcccaccccggggcagatccgccgcccggcgctgaacgggatcatccggacgcccgccgacccggtgatgtccgccgtctcgccgccggcgaggaacctgtccgggtcgaactccgtcggccgctcccacagcttggggtcctcggagatggtcgggaggaagatgtccaggttcgcgtcgacggggacgtcgtagccggcgagcttgctcccgggctccacggcggcgtggctcagcgcgaagtacgtcggcgggtgcttgcggaggagctccttcacgaaggccttcaggtacggcatgccttcggtgtccctgtcgtccaccggccgggcgtcgccgacgcgctgcatgatctcgccgtggagcctggcctggatggacgggttgtccatgacgcgcgccatggcccactcgatggcggtggccgtggtgtcggtcccgccgttgatcatctccgcgcagagcgtgaccagctcctcgtcggtgggcacggcgtcgcggccctcgacgcggaggtcgagcagggagtcgaggtacgagtacggcgccgcgacggcggggtcgggcggcgagccggcccgcatgccgcggacgatggcgcggcgccggttgatgagcgggagcaccgtgtcgatctgctcgcggcggagcgcgaccgcctggcggtgctgccgccacaggaaggggcggaggaacgggaggtagtcgtcgatgcgcgccgccacggcgagcaccacgcgcttcatgacggcgtcgacgcgcacgacgagctcctcgtcgaggtcgagcaggccgaacgtcatgtcgaggaggacgcagaacatggcgaaccgcacgttgcggagcacccacacggacgccccgtcgcgcgacgccgcggcctcggcgcgcacccgcgccacgaaccgctccatggcgcgcagcctcgcggggcggaactccctgagccgcgcggcgctcagcatcccggacaccatgttccgccgcagcgacctccactcgggcccgtacaccgccgagttgacggtgaacttgccgctggagaagatgctccggatggggctctccgccggcctggtcgcgaactcccggcccttctcgacgagcgcctcgtgcacgagctcggcgctgctgatgacgaccagcgtgcgcacccccatctgcagcttcacgatgggcccgtactcccgccgcaggtcacggatgtagtggatgaacggcttcccggcgaacaccacctgcaggaggttgccgacgacgggccaacccggcggcccgggcggcaaccggaggcccctgtgcctccaggcgcgcctcgccacggcggcggccacggccacggccacggcggccgtgaacgcgacgccgacgaccagcgacgacgctgccggcatcgtggcgagccacgtcggctgcatggcgcgtgactacaaagttgttacgatcgagtgatggatggatcgtcctcgtgccgaattcctgcagcccggggat

SEQ ID NO: 77964 - DNA, 2354 bp, Oryza sativa
  Clone ID: PAT_MRT4530_77813C.1
ttccgctgcttggtcaccgacccctcggaacgccgttcatctgagaaaggatggcggtcctggcggagatcgccggcgacgagtccccgccgccgcttcctccttccgaaggcggcgaagcttccggagccccgtccacgtcttctccctccgatgccgacggcggcggcaagccttcgccgcgcacgtcgaagcccggcaggaagcgcctcgtcctcaccgcctccgtcctcctctcgttcctcatcgggctgcccttgctgctcaagtccaccgagatccaccgctcgccgctgccgtccgacgcaatcgccgccctatcccgccgcctccactccaacccgccctcgttcccctgcggcctccatgcggtcttcctccgctccggccgcgacccctccgaggcctccgtcgcaaatcgcatcgagcgggaaatctccacccaactcgtcgatctccctgacgcttccaccgccggtaaaatctccgtgtcagtcaccgttgagtccgctggtggctgctctagtagcagcaaagtcgcctcgccttggcgatgtggtgctgtgactaccgcggacttggggcgcggcgatgaggtgtttgatgaattgcttgactcggcattgggtgatggaggcggggatgggatgagggtttacactgttgtcttcgtggacagtgacgatttgaagagaattgtcattgggaaacaccggcatgcttgggtggtcgggaaggttgatgaggctgaggttgtgtccatcattgggaaggtattcgtcaagtatttcatgaatggtggtgtcgaggagggcgaagcaagcactgtgaaaagagagttcatgccagttggatcagatggcaatatagttctttcatttagcctgctgaatgctgatccaagtgattgggtgtatgattgggagtttgaaaatattggtcaaaggatgttgactcctgttattgaggcgttacgaccgattgcgaacattaatatagagagtcaggttttgtaccacacaccaaaatcatcctattcttattctgatgataaacttggtggcaattgtccttagcgtgggagacattcctttctttgttaattcaaatgagtggcacttggatacatccatttcagctacaggacgatcaaaagttcttcaatttgtggtatatattccatcagcaagggaatgccctttgtacctgcaacttccagatggggagctttccaaaactaatgcatttatatccccaatgtggggaggtgttgttatttggaacccacctggctgttcatttggttctaagccacatggggccctggacaaaatgtcatctgaggaactcatggagactattgaaatcttcataggacagctaaggcagttatttggtctaaaatcaagttatcacacacagagtatggatggtgtaactaagttcataactagtccaaaagggtttgcccaatgggaattggatttattataccggcaccatgcatgttccaatcttttgtcctgtctcaccaccttggaatccctttccagtttggtccaatcactccccagaatgattgttatggatgaaattgggaggcaggttgagctttctcttgaagctgcaagtttagctcaaagaaacgcaagcctcggaataagtgactcttcagcagtatctgcaacaagagcgagggctttggctgaggatgcattttttcatccatctgttatgtctatcagttatgcttcaatagagcactattttgcgatttacatgccattctttgcgccagtttccttgcatgtgctgttggcggtaatgaaagagctgaaacgatacatggtagagagaaggaaatattcagcatttcttgcttcccaggcgacatcttcctgatcttttggtgattatcagcagccctgtttcatgcctagtactatcatccacaccaagtctgatatagatggtagataatctgcaacggggttcagccacagctgggggacgcgtcttcttaccatcaagcaactgctgggcagacaggtagaccaaatggtgtgtgcctgtgaactcgcagaccaggtgaagatgtgagggaacccagtttttgtcacaaatacggcgttcttccatgaaaccagcttggtgaggtaactgatcgtcgggtatcattcacattttttggtgaggccttaactgatctctgaaactacagaccgctatctaaaggcaatgcatctgtaaattgttgtataatttgagagcgcttgacaaactccccgcagaccaaatgttggattagcagttaacacgaacttttacgggtttgatgtgtgtaaaaaaccaaa

SEQ ID NO: 77965 - DNA, 528 bp, Oryza sativa
  Clone ID: PAT_MRT4530_77814C.1
cccaaaaaaaccaccaaaaagaaccccccgcccccaattttttttttttttattaccattaccacaaacaaaaaaaaccacctcccaaacaggaaccggttagttagaccaaaaaaacatggttatttaattaaccaagggccaaataaataaataaacccctaaggaaaaaataaattaaaccctgcccccccccaaacatggggcaggcaaagaacccgcccgggtcctgaaggttgccccgcccgaatcccgtaagccccctccccttccggggaatgggcggggggcccacccccggggccgggggtgtggaaaataatcccggaaaccgggcccccttcttcggggaccaccccgggcacaaaaaccttaagggggtcaaaccggaattgattgggaacggggggaacctcccggaagaacggttcaaaaaacccccgggggggttgtttgggggaagcccatgcgccccccggggggggccccccaccgggcgatgtatttccggaccaagggaaccggttt

SEQ ID NO: 77966 - DNA, 499 bp, Oryza sativa
  Clone ID: PAT_MRT4530_77815C.1
cttttttttttttttttttttttttttttttttttttttttttttttttttttttttttttttttttttttttttttttttttttttttttaagggcccaaaaaaaaaacccggggggccccttttccaacggaaaaggggacatgggggaccccgccccggccccgggaaaaagccccccaccaaaaaaaaaaaagtaaaagggcccccggggcaaaatggcccaacccccccaaaaaagaaaaagaaaacccgggaaggggggttttcacccccccacccccggggggttaacaaaaaaacaaaaaaaaaggggttattcggggggccaaaacccaggggaggaccccccgccaggaggggtcacaaagttcacccaaaaattggaccccccaattttttaatttggaaacaacaaaccccccgggcccaaaaaaaacccccctaaaaaccgataaaacagggggcaaaatttaaggacggggggacgggggggggt

SEQ ID NO: 77967 - DNA, 1071 bp, Oryza sativa
  Clone ID: PAT_MRT4530_77816C.1
atggaggcagcagcccaagaaagggagctgcagctgctgcagctgcagggagtgtcctggcctttccacgcgatggaggcagcgagaagcagcagctgggacgccaccaccagcagcggcagcagcagcggcgccagcggcggcggcggcggcgattgcttcctgctcggttgggagccgccgttcgccgccggctgcctcggcgtcctcgccgccgacgtccacggcctcttcccactctgtacgtgccctgctcgctttctttacctatgttcaagccttcgaattggtgaattaatccgtgcaccggcttggagtgcagacatggagtcgccgccggcgccgccgcagcaggacgcggtggcattgccggaggagctcgacgaccttctcctgaatttctgggacgcaagcagcgaccagcagcaacaacaacaacaggtcgccttcaattccagctgcatcctgcaggagaagacgagcagcaccactgccactgcaaccaccaccaactccaactccaacttcttctacgacgacgatgatctcctgggctcgattttctcgacgggtcccacattgccagagaaaggcgtggcagagccactactcagcagctcatcctccaactgccaggcggacccacaggtcagtgaggttagtggggcccagccgcaggccactccggccgcgccagcgcgccgcgccggcggaggacgcggcggcggaggcggagtactgcagacagagcagcagcaagcggcgaagggaggcggagacgccgacgccggaaaaatcgcggcggcggcggcggcgccggcgtgcagggtgctgcgcccgttcgcggtgctgaagccggacgggctggacggcggcgcgacgctggcggacatcaacgcgcggatcctgatgcggccgtcgcggccggtgcgccaccccgtcggcgagttcgcgtgcgcgccgcgcgtgtcggcggacaagccggggctctccggcaaggccgtcgccggcttcaccaggctgcacaccccgggacgcggcaccatcaccatcatacgaaccagaggctag

SEQ ID NO: 77968 - DNA, 1119 bp, Oryza sativa
  Clone ID: PAT_MRT4530_77817C.1
atggaggcagcagcccaagaaagggagctgcagctgctgcagctgcagggagtgtcctggcctttccacgcgatggaggcagcgagaagcagcagctgggacgccaccaccagcagcggcagcagcagcggcgccagcggcggcggcggcggcgattgcttcctgctcggttgggagccgccgttcgccgccggctgcctcggcgtcctcgccgccgacgtccacggcctcttcccactctgtacgtgccctgctcgctttctttacctatgttcaagccttcgaattggtgaattaatccgtgcaccggcttggagtgcagacatggagtcgccgccggcgccgccgcagcaggacgcggtggcattgccggaggagctcgacgaccttctcctgaatttctgggacgcaagcagcgaccagcagcaacaacaacaacaggtcgccttcaattccagctgcatcctgcaggagaagacgagcagcaccactgccactgcaaccaccaccaactccaactccaacttcttctacgacgacgatgatctcctgggctcgattttctcgacgggtcccacattgccagagaaaggcgtggcagagccactactcagcagctcatcctccaactgccaggcggacccacaggtcagtgaggttagtggggcccagccgcaggccactccggccgcgccaggtgtcgcgcgggccccacctcgctgctcctcctcctcgtcgctgaagcgcgccgcgccggcggaggacgcggcggcggaggcggagtactgcagacagagcagcagcaagcggcgaagggaggcggagacgccgacgccggagaagtcggcggcggcggcggcggcgccggcgtgcagggtgctgcgcccgttcgcggtgctgaagccggacgggctggacggcggcgcgacgctggcggacatcaacgcgcggatcctgatgcggccgtcgcggccggtgcgccaccccgtcggcgagttcgcgtgcgcgccgcgcgtgtcggcggacaagccggggctctccggcaaggccgtcgccggcttcaccaggctgcacaccccgggacgcggcaccatcaccatcatacgaaccagaggctag

SEQ ID NO: 77969 - DNA, 207 bp, Oryza sativa
  Clone ID: PAT_MRT4530_77818C.1
gttggagcgagggagtgtgaataacacgggggggcgtttttctcgctccgtgattgaaacaaacgtgatgtgagcctctattgcctgaagcactcgcacctagactggtagaatggtttctcggccagaaaacatcctagtctgacaaataacctcgctgcagctatggtcgctgtgctgatggaggcgatgtgcatgagaagaaac

SEQ ID NO: 77970 - DNA, 1533 bp, Oryza sativa
  Clone ID: PAT_MRT4530_77819C.1
atgacgccgccgtcgccgtcgatctcgccaggtgatctcgtatccttcgccggcaagtgctcgacgaagcgcaagctccgcctcctccacggcgccctcctccgccgccgccacctcctcccgaccgccgacgccgtcgcggcactcgccaagctcctccgcttcgccgccgtctcccccgccggcgacctccgccatgccgccgcgttgctctccctccacctcccgttcctctcctcggcctcctcccacctcgccttcttctacaacaccctcatgcgcggcctcgccgcgtcctcctcgcccgccgccgccatcgagctcttctccgcgatgcgccgcgcgggcgccgcccccgacgccttcaccttcacgttcgccctcaagtcttgctcgcgatgcgtgtctcagcggcggttgccttccgacctccacgcccaggcgatcaaacacggctgccttggcgcgggcagctctcacgtgcatgtccacaacgcgctgctccatggctactcgtctcgggctgctgttggggacgcacgcagggtgttcgacgaaatgcctgctcgggatgtgatctccttctcagggctgctgactcttcacctcaaggccaacgatttggatgccgcacgcgtggtgtttgatcagatgcctcaccgggatgttgtttcttggactgccatgatatccgcgtatgccagggcacgacgtccgcaggaggccttggcattgtttgatgcaatgccggtgcagccagatgaagtgaccatgctgagcgttgtgtcagcatgcactgcactcggggaccttgcaactggggagcgtgtgtgtcagtatgttgattccaatggcttcgggtggatggtgtcactccgtaatgcactcatggacatgtatgccaagtgtgggagcctcactgaagcacgtaatttgtttgatggcatgaccgtgaggagcttggcatcttggaatacatttatctcggcatatgcatcgcatggtgatgtggagagcacagttgctttgtttcatcggatgctggctgatggcaaatctgtgaagcctgatgggacgacactgcttgcagttctcaccgcatatgcacacaagggctttgttgaggaggggcgtgccatgttcaatgcaatcttgagtggcaactatggtaaagtggacctcaccattgagcactatggatgcatggtggatttgcttggtcgggctgggcaacttgaggaagcatacaaaatgatagaacaaatgccaattccaagcaatagtgtggtctggggtgctttgcttggtgcatgccggacacatggggatatcaacatggcagagcgggcggtccagaagctaaggagcctgaacccggaggagggtgggtactacattttgctcagcgacatgtacgctgcttctggacgaacaacagaggccatggagatcagacggatcatgaatcaggccggggcccgaaaaactgcaggccagagcagctggagcacaccctgtctgcctcagccgtaa

SEQ ID NO: 77971 - DNA, 990 bp, Oryza sativa
  Clone ID: PAT_MRT4530_7781C.1
atgaggaagtcaccgtcacggacatcaagcaccattcctgcttcacgccagcacaagccgtcgtcccgccatttccacatccgcacatcgctgcccatcaacaacaacgagacccaccaccggcagaagccccctgccgaccgtcccaccgaccagctgccatctggcgtggaggcgacgaatctagccgcggacggccagatccagccaggtacaggggatgaccagctagggcgcgccgccgcagcattaccgaagccaacaccgacgcttgacagacgccgacgacaacgccgcgaccatgacgggagcgagccgccactgccgtcgcccgtccaccgcgacgccgcccctgcctgccggtttccgcgcctccccggcgccgaccactctcccccagcccggattggagaggcgacgcgagggagcgccgttgccgctgctccacctttcccgccgcctgcatctcccttccccgcctccttgggtgccgccgtcgtcccgggaggaggccggaccgccggatttggcgagggacgccaaatctggcgtcgtcgccgccgcccccgttccgcacccagccgccttcgcccagctgttccgcacccggtcgcctctgcgcgcctagcccgacgccccgacgccgacgccgatgccaccgcaccgtcgccgcccccaactggtcggggtcgtgggcaccgacccgcgccctcgagggagaaggaaggccccaccgccgacttcctcgcagccgcgcggtttccggcagtctgctcgggcggcggcgaggtggaggagggagcaaggcggcggtggggagaaagacggcggtggtcgccacccgtgtcgcccctgcccctggaacgacacgggggcagttctcatagctctgttatcgatcactggttgcctagaacctcaatcgaacaccttgcgggcagggactctagttgctcggcaatgccaaagaacaaagaacttaatttgtga

SEQ ID NO: 77972 - DNA, 375 bp, Oryza sativa
  Clone ID: PAT_MRT4530_77820C.1
ccttaacggccgacgtctgcggcgtcgccctggtctcgcgtcgctgtcgccccgccgcgcgtgacgattgatcgattgacggcgcggcgatctcacgtaccgatggtatgtgaagacgatctatgatctggagtcttgataaagttgttggtagcgggggagactggggagtaggtgcttatctactttacaaatggttaatattgggttgatgtgattatatatgaatcaataacaaaagttatggacgtgtcattaagtaggttttgaagtatttaaggctttattttaaaccaaaaaaaaaaaaaaaaaaaagggggcgcttttttttttttgaaagaaaccttttttgaaagaatactaagctgtaatttt

SEQ ID NO: 77973 - DNA, 390 bp, Oryza sativa
  Clone ID: PAT_MRT4530_77821C.1
ccaacccttccgaattatggaataagcattaacccgttctcttattcacaagcgatcgcctgggtgcggctggttaatagctgcttaacgggcctgtcattctagcgtgatgtgaacaactatatcactatctagaactagaacgccccgatccataatgggtcggtgtccaaagaggccagcagcgccatatattaatcgaaaagcagctggaggatggcctcaccttggctgactacaacatccagaaggagtccacccttgcccgtgctataagaggtaacgggttttatgcctatctatagagacgaccctgactgtcaagacgagtacctatagaggttgagttgtccgacactattgacagcgataatgggaaaatccatgaca

SEQ ID NO: 77974 - DNA, 442 bp, Oryza sativa
  Clone ID: PAT_MRT4530_77822C.1
atgatcgtgacagggagcaccgtgatagaagcaaaagaagataacaccgtgattatgaatattctcttgatcatgatctccccttggaccaagattctgaaagcaactacagatacaaccattgctcacatcatgaaagaacaagatgatatcaagatcaaatcctccaagtgctggaatcagattcggccacctgctacactgctgacttcaaacggccgccgaatctgcatacgacctccgttttcggcccatgagtacttgatggaaagccctcggagtcctctttccaacggatccagcctcatcgccaaacttcgtctgggaccccggcccaagtggggcccatgtggggtgcgccccaaccaggtggatcatgaccctagggtccctttggtcatcctcccacctcctcttcgatttgcttgcaggaatagtgttg

SEQ ID NO: 77975 - DNA, 355 bp, Oryza sativa
  Clone ID: PAT_MRT4530_77823C.1
tgttgtacaaacccagccaccttcgaatagaagtggtttgattaatgcccgagggggctctgcaccagaccaccatatagctagacacaggggataatcctactgaggcagtcggacgtgttggggaatacgttgtccgcatgaccttgcgcccactcggaaagagggcggccaaaagcatctggtatgaacatgaccgacacaagaacctgggcccgttgtaagaatatacgcccttgtacctgaccggagagctgctgcaagactaccgatgggacaccgtagggctatgggacaaggatgccacgattgttaggaacagggagctgaacgtgatccactactttttgatgag

SEQ ID NO: 77976 - DNA, 754 bp, Oryza sativa
  Clone ID: PAT_MRT4530_77824C.1
ccttttcctccacctccccgtcgtcgaagcgcgtcgctgggagagccaggcggcgagccgggatggcggtggcggggccatcttctctgcctccccgcgccggtggatgaggaacaggaggggatgaggatccagcgacgactcggcgacgaggagatttgggcggtggatccggtgatgtcgaggtgcgtgggcgccggatctggcagcgtcggcgtcgtccttcgctctgcctctgcttcgtcgactactcggccggcagtggcgacgtcgtggaggatgtcgtctccagctagagggcgtccacccgtgaacctgcgacgggatgggtggggatggatcagcgcctcgactgctctggccgacgacagccgctgcctgacgacgtctttagccctcgtcggcggccgccgttccgcctccatcacccacttctgtcaccttcgtccgcgcgcggctgccagacggcgagttgtgacctatgttcctggactgctcatgtgtctatatagaagattgcactcagcccctggatcgcagtagaatcttccttgactaagcttaattgtctattctttgggttgggacaaggcgcacctaagaacctgacctccgcacaaaacttgtaaggttgcaggcgcatgcatcatcctcggctataattcgtcttccgccgatgcaactagagcagcgatgactagtgtttagccctggccctccttcccaacctctgcgccgccccattgagctccat

SEQ ID NO: 77977 - DNA, 351 bp, Oryza sativa
  Clone ID: PAT_MRT4530_77825C.1
atgaggaggaagaacagaacagaacagagcatttcaaagcagaggaagaaggaaacagaacttcctcaactattagaccaatcacagctcatatactttgggttgcttcgtctggaggtgcagccggacggtagcaaggtggccgtcccggtgaagaagccgctgcgcaaggaccaactagtccgcctcaacaagtacgacgaccttgaggagttcgctgaagatgaggtggctgcagcggacgaggtggtggcggcggcaccagcggacgacgcgggggcggccgcggacgacgagggcgcggcgccggcggcgggggcggccggggacgacgagggcgcggcgccgtag

SEQ ID NO: 77978 - DNA, 636 bp, Oryza sativa
  Clone ID: PAT_MRT4530_77826C.1
atggcctccgccgccgcaccgacgccgcagccgttgctccccgtgaccaaccccgcggccgccggtggctccgcgccgtcctccggctcggcgctcaccgacgcgccgctcgccacgccggcgttccggctcttcctctccgaggccacctcgcggctgcgccgcaacctcgcctacttccgcgtcaactacgccgccgtggtggcgttctccctcgcggcctcgctgctggcgcaccccttctccctcctcgtcctcctcgccatcctcggcggctggtgcttcctctacgtcttccgagccgccgaccagcccgtcgttctcttcggccgcaccttcaccgaccgcgagacgctgctcggcctcgtcgtcgcgtccgtgctggccttcttcatgacctccgtggcgtcgctcatcatctccgggctgctcgtcggcggcgcgatcgttgccgtgcacggcgcattccgcgtgcctgaggacctcttccttgacgacccgagcgttggctccaatggcaacactaccagcaggctgctctccttcctcggggcgcccggatctggggtttgatgcggcgcaggatctggtaggattcttgggctcgtggaatttattttgagtacgaattggcat

SEQ ID NO: 77979 - DNA, 519 bp, Oryza sativa
  Clone ID: PAT_MRT4530_77827C.1
atgacatggacggcgtcgacgtgcacgacgccgatagcgcagggcgcgcacgcgttcaccgtctaccagcacggcctcgtcaagaggaccaccgccgccggcgagttcgtccggtcgggaaccttcgccgtcggcggctacgactgggccgtcaggtactaccccaacggcgacagcgccgccgaggcggcgtgccgccagccgtcggtggtcctcgagctcatgaccgccgacgccgcggcgtccgtggtctacgagctcaaggccgtcgaccaggtcaccggcgagcgcctcgtcctccgcgaggacaagacggcggcgttcgacaccaggaacggccagttcagctgctccggcgtgcagttcgtcgagacgccggcgttcctcgccggcgacttcctctcgatcgagtgtatagtcacgatcttcggcgagccacgcgtctcaaagacgaacaagatgccacagccgccgccgccgccgccgccgccgccggcggagacaagcgatgtctcatag

SEQ ID NO: 77980 - DNA, 404 bp, Oryza sativa
  Clone ID: PAT_MRT4530_77828C.1
atttcatgcttctattcaagaacgccagtttacaagagaccgagacgatctacatggggcgcggtggaagatgcaactgccatacctgcagctgccgcagaacctgcagcaagatgtaccctgacctggctcatacgatcaccaccaccaccactactgctaccactgtgccacgagctgcacctgacactgggcacatctgcagtggtcggcacgggtgctgcatctgacaaggctgcccatggctacacatctagctccagctgcaagagcaccccccgcaactgctaaagcgctggcgatctaccacctgattgccaatgcaccacccatggctcatgacgaaataatgcagacgccatccagcgtgataagccattcccgtgtgcgtgggacttgaatca

SEQ ID NO: 77981 - DNA, 675 bp, Oryza sativa
  Clone ID: PAT_MRT4530_77829C.1
ccccgggctgcaggaattcggcacgaggggttggttcatgggagagtggaggcggcacagatccacccatcgacgggcggatcccccgggctgctcccgaatctattcgctcccagaacaaacgccatggcctccgccgccgcaccgacgccgcagccgttgctccccgtgaccaaccccgcggccgccggtggctccgcgccgtcctccggctcggcgctcaccgacgcgccgctcgccacgccggcgttccggctcttcgtgagtaggttctccgacacggcgcggcgctcgctcgccgaccgacggccctggacggagctggtcgaccggtcggccatctccaagccggactcgctctccgaggccacctcgcggctgcgccgcaacctcgcctacttccgcgtcaactacgccgccttggtggcgttctccctcgcggcctcgctgctggcgcaccccttctccctcctcgtcctcctcgccatcctcggcggctggtgcttcctctacgtcttccgagcctccgaccagcccgtcgttctcttcggccgcaccttcaccgaccgcgagacgctgctcggcctcgtcgtcgcgtccgtgctggccttcttcatgacctccgtggcgtcgctcatcatctccgggctgctcgtcggcggcgcgatcgttgcc

SEQ ID NO: 77982 - DNA, 500 bp, Oryza sativa
  Clone ID: PAT_MRT4530_7782C.1
gtcggccggggtgtccggttgtccagctgccggattcaccgcggcgcaagaggggaccgcccactgccttttgagggtttctttcttgtcctacaaagactaatatctccccatgggtataaatatgtacacccggagtcattgtaaactatctcttgatcaatacaactactctcggcgcatcgccaccctctttaccgaggtttttacttatcaaccagcggaatttggcacttgaagcggggctgcatcggctttcgatctccggcgaaggggtaagtcctacgtttcgccggccccagtgaatctatcggctacattggtgttgttcaaggctgcatcgcttcgatctcttggatcgctctgatttggttgatatatttgcctacctgatatctcaattctatctctagttgcatttgtttagagacacatcggtttagtgcagatctctcaggccagtgtgtgtttttcacgtcaacagatattactatatgttt

SEQ ID NO: 77983 - DNA, 2088 bp, Oryza sativa
  Clone ID: PAT_MRT4530_77830C.1
atggcaggtgccatcttcatgtccaacaccgccacaagggagctgtgcttccgttccaacatctttggacttcccatagagtaccaaccttttgtgcggaatatcagacaaggaatgcctttgtttctgtttgatcatactgaacgcaaactctatggggtctttgaggctacctctgatggtggattcaatattatcagatctgccttttcgtcgattggatgctcatatcctgcacaggtctgcttcaaaattatttggaagtgcagaccactcaccgaagatgagttttcacctgccataaaagagaactactatatgccatggaagttctactttgacctttcctaccaacaggttgtctgcttatatcagttatttgatgagaagagggttgaacatcctattcacaaccattcaaagagtgctaatttggaaaatgatccctttaggaaagggacacaagaaagaaagagcttgagtccaaatattcctcattttcctgctgatcagccaggtctttttatgcctgcgagtacccccagattttcaacagttgaagcaagctactgtgcatccacaagcatgcaccaagcaccacatcccaatatgtcaatgcccctgggaactaatccttttggagttcaaattgcacctgtccacaacagccatcacgaccaagcagaactaccttacaacaataacatgctttttcctggatacttgccttctggacatgtagctcgggacacaactcaggaacttgggctttctgcaaatcactcatatcctccatctatgggctatgcatacggttgcttgccgcctcctggacatagacctcaggatgcaattgcaggagatgtaaactatgcccctccatatcctcaatttcctctgccaaatgaacaaggcagtgctactaacaggagagattattatgatgtccactgcaaacaatgccagtttgaagatatttatgaatcggagcatcagcacttcagcaaagcaaaagtcttagcacctccaatattaaaccaacaagatgttccagtataccctgcaattgctgaatcagcatttgatcagcggaaagaatgtttcactgaagaagactctgagaatgctcgacagaaacaaagttttaatcacactgatatggtgttttctggtcttggaaatagcaatagagcctacatgccagaccatctaaacaaaaatcctgatataagatctgaaagcaacacaatagctgttggtcagcatgcacaaagcagtgtgttttctcgcttatcacggatcccaccaccactgcatcaagaaattcctggtccttcgctcaacaagttggttctctcactttctcagagagcagaacattggggtaaccaggataaaataatcaccaatgatgtttgtgaacagttggtcagtgagcaagtaatggatacaccctatcctcttgctgagttgaaccagcaaagcggcttaattgaagaagaaattgaagggcttgcattcatgaactttaagagacgcagcgaaacaaggaacttggatgcaaatctaggaaaggaaattagggggcaagtgaagagaagaaagcttgttcgcccttcctttggagaagttaacaatgctggtagttctggaaaagagcttgaagctaaagtcttagagggagaaaaacatagcaatgatgaacatgatgaaaacaagttcagtattgacctaaataaacctgctgccatagatggtgatgtagcaaaggaggatgataccaccaccgcattgccacatccttctgttgcgatcaagatgcataaagagaaaccatctgaagaaaacatgagcaagccaaacagcccaaatacgacggaagagatgaaaaaacaagatccatcccttgacagcgccacgcatactgaaaagatttcacttgaattagatgttgcggatttgaatacaattgaccagtccaaactgcaagcaattctcagctcatctctgttgcaagcacttgacaagctcagaagagagaagctcaacaactctgaagaggctgaagaggtaaagatagcaacttga

SEQ ID NO: 77984 - DNA, 1542 bp, Oryza sativa
  Clone ID: PAT_MRT4530_77831C.1
tcaaatttcccttcccatgcgacgcgacctcctcctcggcgactagccggcgaactcgcgcacgccacctcggcccacccaggcccaggcccacctcgccgtggatcgccggagtagggggttgccggccggagcggcggctaccaccagatggtcggcggcgggggcgagtagcgcgacggcggcggcgaggacgacgagcggcggacggatctgcggcgcggcggggcggcgggggcgggggccaccatgtctgccgtagtgtgtgggaagaggtcctcctccatcttcggcgacgagctcatcccttcctcccctccctccccatcccctccccaccaccaccaccaccccgccaagcgctcccgctgctccccggcccgcgccttcgacgaggcgactcaccgccgggaggcgctcctgcaccatctcctctccctcttcccccacatggatccccagttacttgaaagagctcttgaggcatctggagatgatatagattctgctataaagagtttgaacgagctgtgcctggaatcggctgcggtaggtgattccaatagcgtcctgccagccgctcttaagttatcggctgaaggtgttgttaataatggacatttggatgtgctcactgaaaacccacatgctacagaaaactttcagacaaatcatcatggttctgagtgggttgagctatttgttagagagatgatgagtgcatcagacatagatgatgcgcgggctcgtgcctcaagagccctggaggcattggagaaatccataatggagcgagcaggaactgaagcagtgcataatttgcacaaggaaaatgtgatgctgaaggagcaactggcaatatatctgagagagaacgctgttctgaagagggcggttgctatccaacatgaacgtcaaaaagagtttgacgagaggactcaggaggttcatagcctgaaacaactggttttgcagtatcaggaacagataaaaactcttgagataaataattatgcacttagagtgcatctgaagcaagctcagcagaacaattctatgcctgggcgtttccctcctgatgtcttttaacagatcttgagggcaatattccctctcatagtcttatactcaatcataccaagatatcatatgatgcaaggggttgacctattgctcatggtgtggttagacacttagactattcacccttacgtccaaatcataaacaagcaacgatcctcaaaatggagaaaggcaagcaacggtgaagcatcaattgaggtgtagattaatgtgtgcaccaggaagcttgagtgcttgacccttctctcagaccattgattgtatgtaaagtatggtgagatgtattgtagcatgtaattcaaagtatgaaaggacctgttcactgtattgtagtagcatgtaatacaatttatacaaagcatgagaggatctgttcattgtatcgtacgtatccactgatatatttattccgataaaagaatgcttatcagatgaaagtttccattgttccgtactttt

SEQ ID NO: 77985 - DNA, 344 bp, Oryza sativa
  Clone ID: PAT_MRT4530_77832C.1
ccaagctgctactgaggaaaaattgctagccgatccagactgccgtccttgggtggacaagtaccaacgtagccgtgagacagtctcccggactgactacgaagttgacctgataggcacactcacaaagctgagctcccttggccagaagataaattatgaagcctacacataccctaagcaaaagattgacataggcaaattgaaactgtgagagatgcttgccagcatatgcatcgacatattcaggaaccagaagctcatgatctggtaggcttcagctactcggagtgatttgattcggcggtgacgttcgtgtaatggctgctcatcagcttcagact

SEQ ID NO: 77986 - DNA, 341 bp, Oryza sativa
  Clone ID: PAT_MRT4530_77833C.1
aaggcgaagtcatcttccttcggcagatagtcttcgccttgcacccttggcctgagacacctctggcctggcaagatttggtcgaagggcctcatgccatccgccaacaagcccctcacgggcaagggtgagattggagcttcggccgagaccgtgcaaaccatgtggtatggtatgcggcgccccctttcgaccgattctcctgccgaaacctacactattcctgcgaatgaagaacagtattgggctttcccttcgtgggcttttactgcgccgcttggacggtgggaagttaccgtttcgcctacccttgcgacacgtggcgctttattactggtggg

SEQ ID NO: 77987 - DNA, 2925 bp, Oryza sativa
  Clone ID: PAT_MRT4530_77834C.1
tttttttttttttttggaatggactagtatttatttgcatcaacaattaatcaatctacagttacctacatataaaaccatggacgatggtgcatacaaggagctgagcatgaattgattgtttgcctaaataattccccagtgaagtgagtgagatcgatgatggatggaaccaatcaaagtacaatagcagcggcggcagcagcagcaggtcaaagctttaactatctgagaatctgatgagagacaagaagagagatgtggcggctggctagcttattgcgcggtggcggcggaacgaggaggcctcttggagcacttggcctggacggcgagcgtgccggtggtgccggggcagtggacgtcgccgccgtagacctcgctggagacgacgagggagcaggtcttccggccgatgcaggccttctcgaccacctccttggtgcgcggcgcgtggcagctgccgacggtgtagttgccgcagatgccgagcgggttgccgtagctggcgaacaccacggactggatggtcttcttggtcgggcacgacagcaccgccgtcggcttgaggccgccggcgccggcgccggcgccggccaccgccttgggttggctgtccttgctctcccacgaccaccggacgtgcgccgggttcttctccgtcatgaaggtgcagatgttgtcccgcttcaccgtcaggatcatgatggcgtcgggcttgcccccttcctcctcgaagaacatgagcgtgttgcccttggggcggagcagcgacctcgggacgtggtagaggtactgcgacggcttgccgagggcgtggtggtaggagacccagtagcggccgaggccctcgccgttgacgaagaggaagcccttccccatgggggtgaggtcgatcaccaccgggtcggtccccgacggcgggtcgaaccgccgccggtaccacgtcagcggctggttgtccttcccgggcttccacgccaccgcgcccatcccttgctccgagtgcacccgccgccgctcgccgtcgagccccaccacgtgcccccacccgttcgtcgtcaggtccagcgtccccgtgttcagcccccggatcgtcaccgtgtacaccccggccatccggtgctccaggtatgacccactgtccatgagacccagcgtggaggagaggatggcgacgtggttgacgcccactttgagatccatcgccttctccatcgtgaacgccttgttgatcttcgtcccgtgcccgcaccctacgaaagcgtcattgacaaacgccacgatggcgtgtccatggctgctcacctccagcaccggcttgacctccttccggtacggcaggtcgtccgtctccagccggaagctggtggtgtaccagaggtagtcggtcttgtccttggtctggttgtactgctcgagtggcctctgtgtgcggatggaggtcttgctgtagcgggggatcttctcctcactgtacatctcccacacgttgtcctgcaccgtctggtcggcgaagtggaaggtgcgctggttgtgctgcgagttgacgtgctgcgtgctgaacaccaccgtcttgcagtcggcgaggatgctgatcgaccgccgcgccacgaagtacttctgccccctgaacgtcaccgtcccgtcctccttggtgttgtggttcgacaggaacgccacgcacacgttcttctccttcatctcgaacacccgagcctcgtagagtttgccgaggggctgaacggaggggttgccccagaggagggccttcttgcagtgacggagagcgtggtgcaggtccctgagatggccccatttaggctccttgtacaggccgaattcgtcgaggggggcctcgtcgtagtatctcggcatcacgaacgcggcgccgttccttccaaagttggttcctccatggtactgttgattattcacacaagtaaagccaccagtgtcagttctgtcagaaatttcatctctcttctttgtcaagaacaggttactgttgctgttcagtactaccatgtagtagtttgccattgtgccgccaacggagaagaagcgcgccacggagaaggcaatgtcctccgcagaacgttgggacggtggatcaccgaaaactctgtactgagcagtccagttttcagtccacaagaggggcttcttcttgtcagctggacccggccaagtatctccacagtgcctcccattgcaggtagggatcacttcaccaggagctttagtctgcttgcacatgatccacgggacaccagtgttggttgcgatggccatcttagctgcccagttgatgtacttggtgccagcctctttgaatgccacctccaggtgctggtactcattctcaatctgtgccagaatgatggggcctccttgtgatgcgaagagctttgcttccttgagcttgttcactatgagagtgacaaactgcttcatgtacttcttgaaaggctcattgttcgtccggaagataatgtcagggatctcccggagccaatatggcagacctccatggttccattcagcctgcacgaagggcccgatcctgacaatggcgtacatctccttctcctggatcagcttgaagaacttgatcaaatcatacctcccttcaaaattgtagacgccctgctcgggctcatggccgttccagaagacgtagctctcgatgacgttgaggccgccctccttggccttgctgatgaggtcgggccacgtgtcccgcacgctccgcgggtagtggatggagccggagaagaagatctcccggtggccgtcgatgatcagcgaccggcggtcgtaggtgatgacggtcccgttcttggtcagctcgtagcccgacgccgccgcggcgagcgctgcgacggcggcggcgacgacggcgagcaccgcggccgcggacat

SEQ ID NO: 77988 - DNA, 453 bp, Oryza sativa
  unsure (1)..(453): unsure at all n locations
  Clone ID: PAT_MRT4530_77835C.1
aagaagatcacaccaatggctttagatgaatgggatgccaaacatactntacgtgagatccgattgatgagatactttggtcatcatcccaatattgcatctttgcaaaacttgagtacttgcacagaaaaagatgagctttacctgatgatggatttagttgatacggatcttcatcgtttgattcaatcgaaaaccaagttggaggaagctcatattgctgccattatgtatcaactattgtgtggggctaaagtgcttcatgagaatggagtattgcatcgcgatttaaagccaggcaatctacttgtctccaaaaattgtgatgtcaagatcacagattttggactatctcgatacattcctcatggtggacgtggcaacaatgggacatcagggtcaggcaaagggcatgaaaagggtaaagacttgatgacggaatacgtggtaaca

SEQ ID NO: 77989 - DNA, 1604 bp, Oryza sativa
  unsure (1)..(1604): unsure at all n locations
  Clone ID: PAT_MRT4530_77836C.1
aggaattcggcacgagggattctttaaagagcacagccagcctcgccggccaattctgcaggctcgcgacgacgagctcagctagctagctgctacctagctaagaatcctacgacattgctgctgctgctgctggcgctcgtcgtcatcatcagtcgtcttcttcattggcagaggtaagcaaagttcgcttctgcattgatgaatgccgaagctatagcggttcttgatcgtatcatcgagggtggtcgatgccccggtcgcccggatcatggcattgccaaccgcggtggtagccggcattgccgccgccgtcgccacgctgctggtggccgccgccgtggccgcggcgtggtggtggcgcgtggcgcgtcgtagccgccggaactccgacaccggctcgtcggagacccctcctacactagtggagtggggcaggtgtgggcggacgttgtcggcgccggagtaccagggggcgaggcaattctcgctggaggagctcgcgcacgccaccaagaacttcagcgacgccaacctcgtcggcgccggcagcttcggcccggtctacaagggcctcctgctcgacggcaccgtcgtcgccgtcaagcgccgcgtcgcctcgccgcgccaggacttcgtcgacgaggtcaagcggctatcagaaatctggcatagaaacgttgtcactctcatcggctactgccaagaaggaggtctacaaatgctggtgttcgagtacctgcccaatggcagtgtctgtggccatctgtacgcaaacaccggcaaagagtcaatgacaagactagagttcaagcagaggctctcaatagcaattggagcggccaaaggtctgaatcatctgcacagcctcgtgcctcctttgatccacaagggcttcaagacgagcaatgttttggtcgatgagaacttcatcgcgaaggtggctgacgccggaatcgacaggctgctcagaggattcgacggcgccgcgccgtcgcatcatccgtcgtcgtcttgcagcagcatctaccaagacccagaggtgcattccttggcgcagctttctgaaagcagcgacgtgtacagctttggggtttttcttttggagctcatcactggcaaagaagcagcgagcctgatttcttcagaaccaagagaacctctggttcattggatggagtcacatttcagttcgaacaacgaggtgacggatccaaggttgggaggcagcttcacgtcggaggggatgaaggagctggtcgggctgacgttgcagtgcgtcagcacgtcggcgagacggcggccgaagatgcggctgatcgcggcggagctcgaccggattctggagaaggagatgagcctcaccaccgtcatgggcgacggcaccgccattgtcacgctcggtagccagctcttcacgtcctgaacttcgtaatcgacagggaggttggcagaattaaatttgcatgcatgcctgatatttgtagccatgcatggcaaattggcaagaacgatgtgtgtaagtaaaattgtgtttggatgtgcaatttaatctgaccacaagatgattaaagtttannnaaaaaaaaanaaaaaaaaaaaaa

SEQ ID NO: 77990 - DNA, 2133 bp, Oryza sativa
  Clone ID: PAT_MRT4530_77837C.1
atggcggtgaagaaacacaacgtcgccatgcaattacaagtggtagtactgtggcttgtaggagtagcattattttctgtgatggcgtcgtccgctccggcggccgtagcggcagcaccgccgcccgcggagtgcccgagcaagtgcggcgacgtcgacatccccttccccttcggcgtcggcgacgactgcgcatggccgggtccagatgacttcaacgtcacatgcaaccatagcttcagcccacccagaccctactacggcaacatagagatcagggacatctcggtggcggcgggggagatgcgtgtgtacactcccgtggtctaccagtgctacaacacatccgaccacgtcgactcttcaaccagcttcctgcagctcaacatcaccgactcgccgttcctggtcgctccggggagaaacgagttcacggccatcggctgcgacacgttggcgtggctgcagggcagggatgactggagcttcttgaccggctgcatcacgacgtgcgtgagcttagacgaggctgcccacgacggcgagcagtgctccgggctgggttgctgccaggtgccttccattccgcccaaccttgccctcgtagagctgaattgggggaacttaacaaaaaactatgcatggagatacagcccatgcagctacgccttcgtggctgagaaagcatggtacaaattcagccgtggagattttagccgtgccggtagcaagagctttatgaatcgtgctggagacagaagtgtcgttacagtgcttgattgggctatcaggagcgacggatcgtgctcgtcaacatcgcgggtcgctcctgcctgtgtcagccccaacagctactgcgtcaacaccaccaacggacagggatatctttgcaagtgctccccgggatatgatggcaatccctacgtcaccggtgacagtgggtgtacaaatattaatgaatgcaagcttagaagagaagaccctgccaagtacagtgaactttatccatgttacggtggtagcaaatgccatgacacagagggtgattacaggtgcaaatgccgtttgggacgtagaggggacggcaaaatcgataatggatgtcaacccataattcccccacctgtaattgggattcttgtgatagccggtgttgtgctatttggtttggtccttgtgtgcttacgtaagaaatggaagcttaaagggtgctatgaccgtaatggtggccaaatgctagagaagacgagcgttaaaatctttacaaagcaggaattggacaagataactaacaacaaaagcaacaagatagggaaaggcgccttcggtgtggtctacaagggaacccacgacgatcagccggtcgccgtcaagtactccatcgaaaagagcatatcgcggactcgtggcaaggatgagttcgtgaaggaaatcacggtgcaacttcaagtcagccacgacaacctggtgtgcctcattggttgttgcctcgaggtggaggtccctatgctggtcttcgagttcgtccctaatggtagcctcgagagcgtccttcatggggcagagcggtgcgctctcccgctgctgaaacggctggatattgccattggctctgcgaaagctcttacctacatgcactcgcattcccgccgctgcatttttcatggtgatatcaaacctgccaatattctccttgacgacaaccttatgcctaaagtctccgactttgggtcatcagagtccgtattgaaaaccaagcaccgaagcgtgtgtgccgacatgggctacatagatcctgtgtatatggtaacaggcaattttagactgaagagtgatgtctacagtttcggtatcgtggtcttagagctcatcacccgaaagaaggccgtgtacgatgggaaaagccttccgatagaatttaccaactgttacgaggatgataatgccagaaggaatatgtacgaccaggacatattgtctgcagaggctctacaacctcactgcatggagtgcctcgacagaatggccggcattgctgtccagtgccttgaatacaacatagacaagaggccgactatggcggaggcgctacaggagcttatccaattgagagcaaaggttgcaggaaaatga

SEQ ID NO: 77991 - DNA, 1261 bp, Oryza sativa
  Clone ID: PAT_MRT4530_77838C.1
gaactattctgagtatgatttattatttttgacttttcaccaagtactaattaataacgtctacattatggtggtgcactatttgcatgggacaatgaaaaaaaaacaatatcacccaaaggttacaatttgtatggagagaaaacaatatcacccagctactaatccgtattttgataatgaaatatggatacaaaatgttacaataagatcaagcagaggctttcagctctgccagttctccgattgggatagcagcaggagcaggagcaccaccagttgttggcaggccaaccataactttgaaagaatcatagatcacccactgagttccagtcagtgtaccgatcatgaggatgcgaagaggaaggccgcgggtgaaaaggccccagaggccaaggttcttgacagcatctccaacggtggcgcccttggagttgttgagaaacgagaccaagttgtcagcagggtgcgagacggcggcgcagaagactccagcaatgtagccactcccgaagctgactccaagctgcagaggcttgctgcattgctccttcggtgtggggatgagatgcttgtatgccatctccacgatgttctcgtacgtcgcaaatttcatcatagtataaggaatctgacgcccccaaagcggaaccaagcctctgaacagacctgcatagctttcgttcctgacgatctttgggaagccgtcgctgagccccctggcgtagccgggctgcgtctgcacgcggaccttgacggcctccatggggcagagcgcgacgtcggcggccacctcggcggtggccgagccggcgaggtagatgagggtcttgtacctggcggcgtactccggcccggccatgtcggcgtactccttcttgaacacctcgtacaggccgtacttgaacgccccctgcgcgctgtagccgaggaacgtcggcgcccaccccctgtagaagccgcgcgcgccctgctcccgcatcacgacgccgaacgccgacgtcgtgctcttgtacttggtcgggtcgatctgtatgttgcatttgatgacgtcgagcggggtcacggcggcgtgggtgagcccgcacgcggcggccccgccgaaggcgcaggcggagtagtatgccggcgagaacagctcgatcatcccgaacggcggctcgctcggcgcccccgcgacgaccgccggcgcgcccccgccgccgccgccgaccccgtcgtagaggaagctcgggagcagcgagttgcgcggcgccat

SEQ ID NO: 77992 - DNA, 217 bp, Oryza sativa
  Clone ID: PAT_MRT4530_77839C.1
gatggaggagacagaaaacacctgatccagcgtgtatctttgaggtcgtaggagcgtatatccagtagtgcctggtgcaagaggaggcctgggccagaatttggtgataagggcacgttaccaaatcacttgttgtgcgagatccagggccaccgccttacctgcgctgccattggcagggacgacgaaaccttaaggggacagaggcgcgccttta

SEQ ID NO: 77993 - DNA, 1913 bp, Oryza sativa
  Clone ID: PAT_MRT4530_7783C.1
aaacctaaggcggaacttagttccacacttttatatttagaagaaaagaattggcccagtttataaggaaaactaggcccaaaaatcatacaactgcacggttaattacaaacccaccgctacacaactaacaacgacggcggagcccaatcgcaggacgtcgccacaaagctaaacacaaaagcgacacaacagcttccacatcgcagaagaggtgttatcgttgccgagctagccgccccagcgacctagtagcgccgacttcacaaccgcaacaacactgaagacgaaaatcgccaaagcgaaaagcggctccggcatccaacaatagacatcagccaagccactgaggagccacttccttcacacggccagcaccagaactccttggaagagactgcaacatgtcatcgttgccaagcgtcgccgcaccccatcagtgagcaacttcgacttcatcagcagaaacaaccgaagagcgtgtcgcccaccacaagaaagaagcggacccaagaaggcgaagcctcgccgaacacaaaatatgaaagctattgaaccgaaaaggaccatcaatagtcatcgatgcattggaacttctccgaagcgacgcccccaaggagaatacgacgcgtgacgccgccgccactcgtccgaaaatcggaacaaggttttcacctggagagatttgtgaggatatgaaagagtgccatgacaacgcctccaaggagggaaacgacacccacgggcgccgtcgttgtcgaacccgccaaaagcacggcaaggctttcgccagcatcttcacatcacccatacaagcacccccacatcgatggccgcagaatagttcatgacgtcttagaagcaatcataccttgattgtaaccaatggcaagacgggcccttggccaccctcgaaacgccatctatccgccacaaacttctacagcaagccggagcctccgccctccccctagcattccccatgactagaaaagggtccggccaaggggggaaaccgaagagagggagaacactcggccgacaatgaggaagtcaccgtcacggacatcaagccccattcctgcttcacgccagcacaagccgtcgtcctgccatttccacatccgcacatcgccgcccatcaacaacgacaagacccaccaccggcagaagccccctgccgagcaggaggctggccgccagcgagccgccgccgcgcttgccgtccacacgcagccgtcccgccgaccagctgccattcggcgtggaggcgatggatccggccgcggacggccagatccagccaggtacaggggatgaccagctagagcgcgccgccgcagcattaccgaagccaacaccaacgcttgacagacaccgacggcggcgccgcgaccacggcgggagcgagccgccgctgttgtcgcctgaccaccgtgacgctgcctctgcctgccggtctccgcacctcctcggcgccgaccactcccccagcccggatctggagaggcgacgcgcgttgccgctgctccacctttcccgccgcctgcatctcccttccccgcctccttgggtgccaccatcgtcccgggaggagaccggaccgccggatctggcgagggacgccaaatccggcgccgccgccgccgttccgcaccaagccgcctccgcccagctgttccgcaccctgtcgcctccgcgcgcccagcccaacgccctgacgccgacgccgatgccgccgcaccgtcgccgcccccaactggtcggggtcgtgggcaccgacccgcgccctcgagggagaaggaaggccccgccgccgccttcctcgcagccacgcggtttccggcggtctgctcgggcggcggcgaggtggaggagggaggaaggcggcggtggtcgccgcccgtatcgcc

SEQ ID NO: 77994 - DNA, 150 bp, Oryza sativa
  Clone ID: PAT_MRT4530_77840C.1
atgccttgctacactcaagtaactacaaaagatgctaaatataaccctgacactatccgcttgctgagagtaacagttgctatccagcagccctatgctcattttgcaggaacagaagcagcggccaatatcctggaaatgaacaactga

SEQ ID NO: 77995 - DNA, 2331 bp, Oryza sativa
  Clone ID: PAT_MRT4530_77841C.1
atataacacccaatacacactgcttccaggatttgtcacccaattcacactactttcagaatacaccactagagtgcgaattttcttcgttccgtgacactccgtcccctagcgtcagtcctccgtcctcccggcgccaccgttgtcagtccaccgccgctcgtgcccgtgtcagctccggcgtcgccggtccgtcgctgcccgcgtcagccccgccgttgctcgtccgtcgtcacccgcgtcggccccgccgtcgctcgtccgttttgacttatgtcaatcgattggtgtatacatttcagatgttaaggtggagaaatcgatggcaggagcagaggctgtgagcgctgcatggaaagaatgggctctccaagcactggtgcttctcagcctcatggtccaagtcacactcctcatcttggcagaattccgccggtacattgactctggcgtgctaagggcctttatatggtccgcatacatgctggccgacgggacagcgatctacgtgcttggccacctctctgttaccagcaggtcaccagagcatgagctgttggcactctgggcaccgttcctgctgctgcaccttggtgggcaggacaaaatcactgcctacgccatcgaggacaaccggctgtggctgcgccacctgcagacgcttgttgtgcaggtggccgcagctgcctatgtcatctatgggtcctccatagtcattgttggcgacagccggaccttgcttctcctgtcagccaccatcctcatgttaatggtaggtgttgccaagtatggggagcgtgtctgggcgctcagatgtgccggtagtagcccaactggaaagtacgagagtgatatagcgagaagaagattttctcaaatggtgcctgagtcattcatacgtcgcttggatccagcagaaaccttgctattaaatgctcacctattgttggattttgccaaggataggtttaaggggccattacctcgtctgtttttgtgtggccccatgaatgaaggatcacgattgcaaggggaggacgagttgtacaaggtggctgagatgcaactctccctcctccacgacgtcttctacaccaagtctgagattacacacacttggtatggcctttgcatccgagtgctttcgtctctggccaccaccgttgcattctttctgtttaatatactactagtctggggaaatcatcatcagcataagctgaatggttacagcagagcagatgtcattgttacatatgtcctctttgttggagccgtcatcctggagactatgtcacttttgagggccatgttctcgagctggacatgtgcactcctggtaaagaagggatcggaaggaagtaatgtgtgtaattttcttgctcacatacccgcctgtctccgccggctggtccgtgcggcatattggaggaggaggcgcagctggtcacgctccatggggcagctcaacctgattcagttgtgcgtgcacagcagggccagccgatgcagcaagattgcgaggtggatgggagtcgaggactggtggaacaggttggcttactcgggcctgcccatccccatctcggcgtgtaccaagcagctgctgctggagaccatgaaggcgaagcaatggggtcaggaggaatttgaaagcagaggattgtacagggacccagcctgggttgctgagtccaagatggagcagaggatcctcatctggcacatcgccactgagatctacctgtgctggtacaaggatcaggagaagaagcaagcactgctgaccttatggaaacggctcaggcgctgtccaatcacatgcttttcctgcttgcatcacgtccccacatgctgcctcccgatgccagccgcaatgattatcttgtgctgtgctatgctatcactcgtcacctgaggtacagcacagctgaggatgtgctccacttgctacaacttaacgcagatgcattgaggacgaatagctctaaaccgaagtttaaattaacttgtacaaatactaatagacttggggacaagatgttgaggggaggatgctcgcttggtgcattcctcatcgaccggcaagactcgcctgctgatggcactggcacgctagagatgatctgccaggtgtgggcacagatgctgtgctgctgtggggaacaatgcagcacagattctcatgtcaagcagctcagcagtggcggtgagcttgttaccgtcactgcccttgtcgcaaaatacataggcgttggcgtggccgggaagccgccacgggggatgggccttccccattgggccccaatgggccgtcggcctcgccaccga

SEQ ID NO: 77996 - DNA, 110 bp, Oryza sativa
  Clone ID: PAT_MRT4530_77842C.1
atggtgcatcaccgtcctcttttgaacccaagctacaggaaaaagttccacttagcagggccttttacctcacaaaatatattggcgcccacccaagactacccgcccaa

SEQ ID NO: 77997 - DNA, 2301 bp, Oryza sativa
  Clone ID: PAT_MRT4530_77843C.1
atggcaggagcagaggctgtgagcgctgcatggaaagaatgggctctccaagcactggtgcttctcagcctcatggtccaagtcacactcctcatcttggcagaattccgccggtacattgactctggcgtgctaagggcctttatatggtccgcatacatgctggccgacgggacagcgatctacgtgcttggccacctctctgttaccagcaggtcaccagagcatgagctgttggcactctgggcaccgttcctgctgctgcaccttggtgggcaggacaaaatcactgcctacgccatcgaggacaaccggctgtggctgcgccacctgcagacgcttgttgtgcaggtggccccagctgcctatgtcatctatgggtcctccatagtcattgttggcgacagccggaccttgcttctcctgtcagccaccatcctcatgttaatggtaggtgttgccaagtatggggagcgtgtctgggcgctcagatgtgccggtagtagcccaactggaaagtacgagagtgatatagcgagaagaagattttctcaaatggtgcctgagtcattcatacgtcgcttggatccagcagaaaccttgctattaaatgctcacctattgttggattttgccaaggataggtttaaggggccattacctcgtctgtttttgtgtggccccatgaatgaaggatcacgattgcaaggggaggacgagttgtacaaggtggctgagatgcaactctccctcctccacgacgtcttctacaccaagtctgagattacacacacttggtatggcctttgcatccgagtgctttcgtctctggccaccaccgttgcattctttctgtttaatatactactagtctggggaaatcatcatcagcataagctgaatggttacagcagagcagatgtcattgttacatatgtcctctttgttggagccgtcatcctggagactatgtcacttttgagggccatgttctcgagctggacatgtgcactcctggtaaagaagggatcggaaggaagtaatgtgtgtaattttcttgctcacatacccgcctgtctccgccggctggtccgtgcggcatattggaggaggaggcgcagctggtcacgctccatggggcagctcaacctgattcagttgtgcgtgcacagcagggccagccgatgcagcaagattgcgaggtggatgggagtcgaggactggtggaacaggttggcttactcgggcctgcccatccccatctcggcgtgtaccaagcagctgctgctggagaccatgaaggcgaagcaatggggtcaggaggaatttgaaagcagaggattgtacagggacccagcctgggttgctgagtccaagatggagcagaggatcctcatctggcacatcgccactgagatctacctgtgctggtacaaggatcaggagaagaagcaagcagaggccaccagtggttcaggttcagctgctgaagaggagcaagcagcggccaccggtggttcaggttcagctgctgaagaagggcaagcagaggctgccagtggttcaagttcaactgctgaagaggatcaagcaaaggccgtcggtggttcagtttcagctgctgaaggggagcaaggagaggttgccaatggctcaagttcagctgctggagaggagcaaccagaggtagtcgatggttcaggttcagctgctgaccttatggaaacggctcaggcgctgtccaatcacatgcttttcctgcttgcatcacgtccccacatgctgcctcccgatgccagccgcaatgattatcttgtgctgtgctatgctatcactcgtcacctgaggtacagcacagctgaggatgtgctccacttgctacaacttaacgcagatgcattgaggacgaatagctctaaaccgaagtttaaattaacttgtacaaatactaatagacttggggacaagatgttgaggggaggatgctcgcttggtgcattcctcatcgaccggcaagactcgcctgctgatggcactggcacgctagagatgatctgccaggtgtgggcacagatgctgtgctgctgtggggaacaatgcagcacagattctcatgtcaagcagctcagcagtggcgctatgagtacctcaagcatggtgattgaacgcagcttggacaatgcagaggatggtttcgtgagagcagccaccattgaacttcggccattgaagcttgcagacagcttgaggaaagagaagatggagattgcaatcacatctgtggacgatgataatcagtaa

SEQ ID NO: 77998 - DNA, 227 bp, Oryza sativa
  Clone ID: PAT_MRT4530_77844C.1
cgcacgacttcgtgggcgccatccgttaccatctcactcccacctcagtaaaaccctaggccaaaccccacctcctctcccgccatggctgccgcggtggtcacctgccgcctactgcagcgacacctgcctgacaaggccaaccgactcgagcttcaatatccttgctccttgccgaccctaatactggcagccatgcgccggagtctgcttcacctcgcacaaac

SEQ ID NO: 77999 - DNA, 179 bp, Oryza sativa
  Clone ID: PAT_MRT4530_77845C.1
atgggcgcgcagggcagcggttgcaggcgtagggagtgggcagagcggcacgaggagtgcgcagagtgtgcggcgacgcgagctggggatttggatcagtcgctgttcatactgcaggtgatcccaatccgcgagctggacgtggccggcgagcctccgctcgaggctgtttgcctcct

SEQ ID NO: 78000 - DNA, 109 bp, Oryza sativa
  Clone ID: PAT_MRT4530_77846C.1
atggtcggcgcctcggcggtgaccggcggggccttgcgacggtggtcggcggcggtcaaacggctgtcgcatatctaccggcgattgcaacagtggccagcgggcgcgg

SEQ ID NO: 78001 - DNA, 640 bp, Oryza sativa
  unsure (1)..(640): unsure at all n locations
  Clone ID: PAT_MRT4530_77847C.1
nnnagannnnnngaagatttgtanaacnactcactnnagggcganntgggtngcgggccccccctcgagtttttttttttttttnatttttactangattgaanattcatttatcttcgaattttaaccacttanaacgaaaccaaccctntngtttctntcnttctctttcctcacccanataatcctatacattttntnattcangacacccnnaagcctcgtantccaaatanaantgaagacgcagntaagtcnntcctancataatcancanactnncagttantnancngccnnnnacatnattcnttaagcncccnnncnaancnncntcacttcacgtgcatctcagttaggcggntgcccccttgancctgtaccacttggtgctatcatgnaagntgatgatgttnangaatgccgatgccggcgataatccaatgtaangangtcnagcctccccctgttgangtcctgagccatccngttgctccaangatccgtggtcaggtgcacatngtgacaangaaccnctgangtcttcgccaccgccaattgnaaanggnaacgccccggacnactccnctgtgtccgggatntcnttnctaaaagcaaanggcgatcaggtgaaancncg

SEQ ID NO: 78002 - DNA, 687 bp, Oryza sativa
  Clone ID: PAT_MRT4530_77848C.1
gcgcgaggcgggcccatttttcccccccccccgccgccgccgtctactcgctctcgccgccgcccgcgactcccccctcctcggccgctcgcaccctcgccgcgtcgacgctcgatcgctgttcgcgcttcgcctcctcccaatcctctccgccatgcatctaaccctcgaattcgggggagggctggagctgctcctggagaagtccaccaaggtgcacaaggtggacctccagcccaacgacggcgatgggaaggtcgtgatgaaagggttgctcgcttgggtgaagtccaatctgatcaaggagaggccggagatgttcctcaagggtgattcagtaaggcctggtgttctcgtacttataaatgattgtgactgggagctatgcggtggccttgacgcggagttggaggagaaggatgttgttgtttttatctccacattacacggtggttagtacaactattaggactaccgaaatcaccactgatatcatgttgctaaatgcatcttgtaccatcagaaacagaggttgtgtgccataaatttctggagagaatggattgtggagaggaatctgctgaagttgatatggtcaatttctgtaatgaaaaggcagttgtcagttatgaatattcaatatcacagatttgcagtaaaaaaaaaaaaaaaaaaaaaaaaaaaaaa

SEQ ID NO: 78003 - DNA, 481 bp, Oryza sativa
  Clone ID: PAT_MRT4530_77849C.1
ggtcctcacaactcccaaatcttcagttaaccgattcaaatgtcttacacttgcccatttacatgtatcaccacatacatatgcaatgtcttacactttgcccatttacatgtatccacacatagttgctatcagcacaggcattcgcttctctatgggaaaaaaaaaaccacctatctacttaaaacctgaaaactatcgtaagattaaaaaatggacatctttttacatcttatgctagtttccaagtttttcactatatattttctcgacttatctactgtacatcactgcataatacatcttaatgtgtacgcccttcaagaacaaggattgattaccatgacccaacttcttgcctgcttggcttgctcctactctcaccaccggtcggccatccgcaatctccttttatcgctctcacccatgaatccacctgtatctcagacatgctcgagcattcaaacttcaaaccttgact

SEQ ID NO: 78004 - DNA, 431 bp, Oryza sativa
  Clone ID: PAT_MRT4530_7784C.1
tagtttctttcttatccgacaaggactagtatctccctatgggtataaatatgtacacccggggtcattgtaatctatcaatatatcgatcaatacaattactcttggcgcatcgccaccctctttaccgaggtttttacttatcatccgacggaatttggcacctgacgcggggctgcatcggctttcaatctccggtgaaggggtaagtcctacgttccgctggccctagtgaatctatcggctacattggtgttgttcaaggctgcaacgcttcgatctcttggattgctctggtttggttgatatatttgcctacctgatatctcaattctatctctagttgcattgtgtttagagacacatcggtttagttgggactgtctcggttaggcccgatcttctgtcttaaccgatatatctctacaatc

SEQ ID NO: 78005 - DNA, 243 bp, Oryza sativa
  Clone ID: PAT_MRT4530_77851C.1
atggggtggccggtcagaccggcctcggctcggtctgaccgaatacggctccggcggctcgggatcggccaccccgagcagcaccatcccgcccatatggccggccggtcagaccggcctatacccgccggtcaaaccagcgttgatgcggcggtcagaccggccttgacatggcggtcagaccggcgatgccagccggtcagaccggccctggcaaggccacatagtgaacgcacaatttga

SEQ ID NO: 78006 - DNA, 915 bp, Oryza sativa
  Clone ID: PAT_MRT4530_77852C.1
atggccaagttcaccctggacgacgccgacgacgaccctcccgtcgctaccgcccgcgacaagaggaagcgcgacgatggccccgccgacgccgaggacgaaccccccagggcccggggttcggcggtcgcgggccgcgagccagcggcgcccggcgcggaggcggaggcggccgggcggcgcgggccggcggaggagatggccaacggggaggtcgagggtggcctcagcgtgcagatcgaccctgacgtgctcgactgctccatctgcttcgagtccctccgccctcccctctaccagtgccaaaatggccatgtagcatgcttttcctgctggtccaagctcagcaataagtgtcacatttgttctcgcgatgccaaatttgctcgaaatattgcattggagaagattgttgagtcaatcaagtcctcttgctcatatgcaaagtggggttgctgcaagtttatcaactacgcacaaagagatgctcatgaagaagcttgtctttttgctccttcagtgtgcccaatctctaattgtggatatagaggattcactggacgttggtcaggacacttccttaccagccatagttcagatgttatgaggttcatctatggtcagccttttgaagtaaatattgaggtatcggtgccttttctggtttttcttggagaggatgaccaccttttccttctccagaacaataacctgacgcccttcgggcatgcgttttcagtagtttgtcttaggagtggcaatctaaattggatgttctcctaccaaattgaagcaactagtagaaagaaacctgaaaatagactgcaactgaaggcttctgtcacaaatacaaggcagtggacagcgttgattgccatccctttaagacaagattggggctgtgttattgggtga

SEQ ID NO: 78007 - DNA, 3385 bp, Oryza sativa
  Clone ID: PAT_MRT4530_77853C.1
ccacagagagtagtaatttgacttgatcttgtttaacttgataactacttcattcattggaactctgtcatcaggtgcatctcttgagcaaagcaagcccaactcaattatggatgctagacagatattcaagatgattgaatcctcatcttgttgtagactacagtcggcgacatttgagagctcatatgggaatgcttgactaatccattgcctgaaggtcaactcattgacgaacattggatcagttggttttttccttgtgaagacttcgaggaggacaattccgtagctgtatacgtcacttctgcgtgatgcttttcctgttgatcctaactctggtgccatgtatcctacagtgcctggcatactcgttaatgtgatagagttgtcatctccaaacagcaacttggaaattccgaagtcggcaacatgtgcaaccatatcattgtcaagcaaaatattgcttggctttaaatcaaaatgcaggacaacctcaaagtgatggtggtgtagatactccattgccatcgcaacatccagcatgacactgagcctttggatgaaactgaggtgcagcccatcatttgagtacaaccaattatccaaacttccattgggcatatactcaagaactagtgctttgaagtcaagattagagcaagtgctaacaatcctcaccaagttgcggtgatgagccattcgtaacacgcggcactctgtgtcaaagcttttggaagctacttcctgttgcatgtttaggacctttattgtgacaatggactcatcatctagctggcctttgaagactttaccaaagcttccactccctagcaggttatcatcactgaagtttcttgttgcacggacaagttcatggtatgagattaactggtaattcagcaagtctgcatctgagggtagtggcatctttcctggcttattcattttccttcttaccaacatacacaagcaaaatgctaaaataaaaaatgccacaactgcaggtaatatgaattttagtagccgttgtattgaccttgagtgagttttgctctggcatgattctattccttggctcggaaggccacatagtgccttgtttcccatcaatgacttgacagtgatgtttgagaacacacctccttctggtatctgaccctccagtctattgaaagataggttcaaattggcaagataagtgagattggccaaggactttgggatgacacccgaaagcacattggaggaaaggtctaactcctcaatacttagtaacttgccaactgaatctggtattgaaccttggagtagattactggatagattcatatagatcatcatctggagttcaccaaaagaaaatggtatatcacctgatagctggtttcttgatagatccatcttagtaattgctgtcagttttccaacatcagcaggtagagaaccactcaaagagttctgtgataaatcaagctcaataagtttctgaagatgccacaaactaattggtattgttgaagacaacgagttttgggacaataccacaacttgtaactggtttaggctaccgatggtacttggaataggactgacaagttgattgttagcaagattcagcttaactagacttgttaatccagtgatttctactgggatggtgccagacaaggtgttgttggagagattgagttcttggaggttgttcattgatgtgatctgcgtggggatcatcccgcttagctggtttcctctgagagatagcatcagtaggttggtaagcttagccaatgtactggggatgcttccagtgatcctattgttgtctgctacaaaaatttcgatcagtgtgctaaggtttccaacacagggtagtaaactcccttcaaatctattgtatgacatgccaattgtgttcagattactgcaatttgataatgcagctaggaattcaaggttcccactgagctggttcccatcaacatagatgtcacgaagattccacaagttcccaaatgacattggcaccgatccagttaatccgtttacgaacaaatctattgtggtgaggtcagagattgcctatagattcgggaatggtacctgttatttggttgtttgcaaagcttatatacctgaggtttctcagctgtccaaactctggtggtatttctccctctagattgttctcgctaaggtccaaagcaagcagcccagtatgattgctcagttcaactgggatctttccagtgagctcgttggttgacaagtaaattgcagtgaggtttggcattgtcgccagccatgatggcacagaacctgtgaaattatttacagctagggagaacaaatcaaggttttgacatttggaagggcccgatgggataggtccatcgaaccaattttcaccgagagagaaaaattccaacatagggaggtgaaagctctcgtttccaggaatcggacctctgagattgttccgtgtgactgctatggcttgcaggtaggacatattgaagatagcagcaggcatggagcctgagagaagattattttctaggactagcatctccagcttcgacaatgatccaacgctaccagcaatagcaccaggaatgctccctgttagtttgttgtaagcaaggctcaagaaaacaagctgtgacgtgccattgaacatgccacgtggtatctgcccgctcaactcgtttctgcttaatccaaggtacataatgttcttcagattgtgcaggtcgggagggatttcaccggtgaggttgttcgagtcaaggtcgaggatttcaagcacggtgaggttgccgagagacgaggggagattacctgagaggcggttgctggagagatcgagagacaggaggcgtggcaggttgccgatgccatcagggatcgggcccgagagccgggcgtcgctgaggttgagggtggagaggaaggtgagctcgccgagctcgggggccagcgagccggcgagctgcacgccgggcagctccagcgccgtgacgcgcagcgggtggcggtggccgccgcaggtgacgccgagccagccgcagtagggcgcggccgccgtccagttgccgcggcggagcacgccgctcgggtcggacacccgcgccctgaacgccagcagcgccgacagatcgtcggccgtggcgaacgcagagctcgatggaatcggaggtggcagctggctgaggctggtagctgtgcatggcgtggtggccaagcttatatcctgggagttgcgatagtggagactggagaagccagaccacgtacatcgggaagaccgaccagagactttgccccccatggaaactaaggctgcacgcaaaatgatgcatcgtattatcatatgattaattaa

SEQ ID NO: 78008 - DNA, 1557 bp, Oryza sativa
  Clone ID: PAT_MRT4530_77854C.1
atggcagggaggcacacttcacacacaatggaacacaaattgctcaaagctgttgccaccggcgatgcagacctcttagcgcaggctctaggcatatggccaacagcaacagctgagcaaggtgacgttgatcagagctgctgcctaaaaggtgtcacagcagagggcagctctgtgctccatatcgcagccagccgtgggcacctgaagctcgtcgtgatgatatgtactcacgacatctcgctcatcaagtcgaggaacaatcagctggacacacctctgatctgtgccgcgagggctggccatgccgatgtggtcgattaccttgtccgtgctgcttcagccatgcaagaacctgaacgttctgtgctgagggcatggaattcaggtggagcgaccgcgatgcatgaggcggtcaggaacggctacgcaccggtcttgcagaagctgatgtcgagcgatagcggactggccaccgctgtacttggcggttgtgtccaaccggccagatatggtcgccagcaagctacgcggggccagatggaaaaaccgcgttgcacgctgcggtctacatcggtaaaggggttcacaactcccaccctcgttttccgcgcgcacgcttttcaaactgctaaacgagaaatgagcgagtccctgaggcgctgggagccaacacttgccgaaaaggttgacatcgatggaagaactgcccttcactatgctgtattaactggggaaactggattggtcgaacttctactggacaacagttcagctgcatacattccagataatgatggcctatttcctgtgcatgttgctgctatagccggcaaggccagtgttacccgtatgttgatggaaatgtgtttaaactgtgatgagttgcttgacaacaaacagagaaatgttttacactgcgctgttgaatatggaaggttaatggtggtgtggtacatatgcagaaacccaaagttcacgaggttgttgaatgcaggagattgtgaaggaaacacaccgctccatctagctgtaaagcatggcaatgcaattatcatctcctgtcttatgatgaatactagagtgaatctcagcattattaaccatgggggatcaacacctctagatgttgccttcaacaagagcactcgttattattcattatcatggctctctagtaccagcatcaccatgtgcctacaagcttgtaatgcttataccagcagattcctaaatcgagctgataagaggttcttggaagacaaggaggaatcaagcgtttacaccaatgtgtcccaaagtatcttatgtatctccgtactaatcgcagcaggttcatttgctgctgctttcactcctcctgggggatacattgcagacggtgaggatgctggcatgccattgctcaaagaatatgctgaattctcgagctacgtggctgcaaatagcatgtcgttctattgctccacatttgcgacatgtctgcttgtgcatgacagtctaacaaataggcgtgttaggaactcccaacgattatctctcaggaactggaattaa

SEQ ID NO: 78009 - DNA, 358 bp, Oryza sativa
  unsure (1)..(358): unsure at all n locations
  Clone ID: PAT_MRT4530_77855C.1
ttgggagatcgggatgggtgtggttggatctgtgattgttgttgttgttgttgataggggttgcttgcttgcgatttgattgtgtgttcggaggttgaccttatggttatcgattttgctgtgatttgattgcttccaaatttgctgcgatttgatttgattctaagatgtagtcatgtaggggagatgatttttttttttactttttgagccaatcagcatagggaggagtgggagacatagaattctctcgcttatgaggaaaattggatgtggcatgttgctcccagccttatctcaatcgtgtgaacctccatgagaggtgagggaagctacgccaacgattgatacacggttn

SEQ ID NO: 78010 - DNA, 1143 bp, Oryza sativa
  Clone ID: PAT_MRT4530_77856C.1
tcacccacgagacacaagttgctcgaatgccacaccatgctctacaccatcctcatcgagctctccagggtgctcggcctcaccaattctcgggtcagcgagctgcggcggcggcaaggagggcaccagtgcagtggcggcgatccggttgatgtcgttgaagatggagatggttgggtcgctcctgtagttggtgcatgagctctgcagcgcgcgtgcgctcttgaagctgtacagcctgtgcgcgaactcgccgcagtgggagaacccgacggtgtgcgcgccggcgagcgccacgagctcccgcggcgtcgatcccttccgcataaacagcactgtcatggcgcgcgcggacatgttgatgcgcgggaggtaattcccctcgacatcgcgtgcgtcggactggcgcgcgtcccggcggcccagcgcgacggggtaccgggatcccctttcctcagctcgacgagtgggtattactccatgagccaccttttttttcctctccatcttgtcatgcacactattgtagggattcacggaggcatgagtcgacccgatgaagagcggagatgctagatccaggctccttcttgttggatctagcagttctccaacttggctggcgcagatctcccgaccggcctcacctccctcatcggcttcccgcggcgtcggtcccgattccggtagtgggcatgcgcgccgcgccacctcgcttgccccgtcactgtcacgcccgctcacgatgatggagaagagaggggcgatggtgaggccgcatccttgtttctcccctccctcttcctccaaatccggcatcctaacaagctcgtcgtgggcagtgcacgcgccgaggcactgtgtcggcctccacgccatcatcccccttcgtgccccgcatggacaaagcatccctcctcgtgcgctgccatggtttatatcaacgagctccgcactcgtgtggcctaccccgaggcctacatgagacaggctgccgcggggtgtgatgtgaggcaggctcgtcagttgggagccctggtttccttcccccgccacttcgcatgccactacgccgccacggtgtcaaagctcctcggcagctctgagtccaacgagagagccccagacgatgacgggccatag

SEQ ID NO: 78011 - DNA, 145 bp, Oryza sativa
  Clone ID: PAT_MRT4530_77857C.1
aggagtagaatgcatatgcccttgagaagggggagatgtggtgaagtttacagttacagctattccaaatctccagacatacaattcccgtttttcccaacttataaagtacaatactcagctctccccaaataaatatatttat

SEQ ID NO: 78012 - DNA, 579 bp, Oryza sativa
  Clone ID: PAT_MRT4530_77858C.1
tctctatcgtcacctcgtggagctcctcagccgagtggagccccttgttactgctagccagctatcatgtagctagccagaaagcaggagacttggacaggatgacggatctggatgctcgagcggtggtggcactgtcacccggcctcatctttctcatctcatcgccctcttcctcgcgccttcttacgcgttggccgccagcctcccactccatttttagccgccggatccagcggccacgagctcgaagtcgtcagatctggtgacccaaagctcttgatcaccggatctagttgttccgatggaggtgagccgtgcggccgacgagatatgcgaggctgcatcatgtcaggcgagctgcgatgctgcttctctattctttttttttgggcaaccagagtaattgtagccactagttatgatgatcatgatgatggccggctcgttgtttaaccggcgtgattatatccactaatatatgttgatgaccggcatttactttgtgtccattctcataaggaatcttttttttaatatagcaggtattttttgccaaaaaaaaaaaaaaaaaaaaaa

SEQ ID NO: 78013 - DNA, 391 bp, Oryza sativa
  Clone ID: PAT_MRT4530_7785C.1
cccacgcgtcctaaaataaattttaaaaaatttttttttaatataaaaaaaaaaataattaggggttctttattacttacttgggctcacaaaaaaaatccaataaaaaaaaaaaataaaagggcccccctttttaaagtatccaattttacttcccctttcttccaacgttttatttttttttttgttccccctaatttaatttcactgcccttctttttacaactttgtaactgaaaaaaccttgtctttccccaatttattccctttgcaaaacttccccttttctccagttggcttattaccaaaaaggcccccccctttcccctttccaaacatttgcccacccttatttgcaattggaacccccccttttccggccctttaatcc

SEQ ID NO: 78014 - DNA, 1111 bp, Oryza sativa
  Clone ID: PAT_MRT4530_77860C.1
tattaaccctcactaaatgctggagggcttggtcatcggtatgtccttggtgtgcagcgagtggcaagggagcagttgtgagaggacgaggtggcatctgtggctggcaaggacggcgtgctcggcttggtccgctaggaatagcgacgcgtcatcttggcagctgccggtggtagagcgaggatggagatggcatcatcagcatggatgcggacggggtgccagggtggcaaggacagcgcagcgccgccggcagggtcacggcacgggaggaaggggtgcggggatagagaggaaagagatgagagagccgacatgtgggcctaagagtattttagaacttttacacaatttctctcacctcttcaaccaaaaattattattttaatagatgcgatgtccaccagcaaatatttaatttttgccagtgtttttccccaaaagttgcttcatgcggtgtcctacagctaaaaccgcaaagtcacgatgtcctgtagcaaaatttgcttttatataaactatgaagagttgaagactattgttctactagagtcaattcttcagggcttcatgggtttgactccattgtagcagggcagtttagtttaatgcaaaaataaacattttagaaatttagcaatgccaaatttttggtaagtcaacagcgttaccaagttttgataggatgtgttaaatgtgatattgccaaaattttctaagctaaatatttggtaataaactaaatgtatatgcatgtttattaattttgtgaaacaatgattggtttaaaatgccaccaatcgaaacatgccaggctgcgttccatctacacttgtgcaggtagatttttttagtgtacataaaacgagaaagcttattagcacatgattaattaagtattaataattataattttttaaaacagatttgtttgaattttttaaacaacttctatatagacttttttttttaaaaaaaatacatcatgtaacagtttaaaaatcgtgctataagaaaccgagaaagttgaagtttagggttgaagaaaaaaactgggtctgagcgtggatccgtcactgctcacctaccagcatttagtgagggttaataa

SEQ ID NO: 78015 - DNA, 229 bp, Oryza sativa
  Clone ID: PAT_MRT4530_77862C.1
ggctcgtctccagctcctccgcccccgccctcgccgacgcctacgacatcccgtgggtggagaagtaccgccccacccgcgtcgccgacgtcgtcggcaactccgacgccgtcgcccgtctccaggttattgtccgcgacggcaacatgccaaacctaattctcttcgggcctctgggcaccgggaagactaccagcctactgttgttgggacacgagctggttggacc

SEQ ID NO: 78016 - DNA, 1591 bp, Oryza sativa
  Clone ID: PAT_MRT4530_77863C.1
ccggccgggccaacaggcgcggcctcctccagtcaattcctccctgaccctcctccggccgcctccgcctccgcctccgctcccgcctgctgctccggcctccgcaccaaaccctagccctgggccatcccctgcccgccgcgagatgcgccgccgccctctggccccctgatcctcaccctcctcctcctcctcctcctcctcctctctctcctccttcgccgccgctcgtcgttgcccgggcgtatgggccgccacggcatgtcccgcggcgccgcggccggagacggcgggggatgcctgccgatgcctgttatctcggcggaggtcgcgctcgctgtcatcgacgcttccatttcagtcgccgccttcgtgcagctagcaagaatccacaggcatgatcagcagcatggatggactcggcaaaagatattccattttatgattggcctatgcaacttagtattccttgtgtatttcgtgtctaccatcatcgctacctctagtccacagatattgcttcttgcttcttttctgttgctgttgtcattctgggttgacctgtgtcaccagacaaacgatgaagatgaagaggatacgaggagtcaccatgaggctttactggatagaacaaaaaataaacctggcatccgtcatgttaatgttcgcctgaggtgtgctaccagagtacagctgggatgctggcaagaatttgtgatttcggcactacttcttccatttgttgttacaattatcctccctagcctcacctgggtaggtcgaggagaaaatcgagttgttactttgttcagggaatagaccatcccctacacaggatccacaatggaggactgccgttacatcctctaaccaggccctcaagtcaagccctatttaaccagaagacaaaccgttgatgtggaaacttcagtctgtttaatctgctagaattttaccaatgcgtcatttgtgcactggcatctagtagctttctgacaggttgttggtacaaagatggatatgtaattgtattggtactcagcagatgaatacatcatcaacaatgctatcatattgtttatgtactatttcataggatcatccataccgtcaggatttgttctatgggtcatgaaagatattcctcatcggcagacagtagaaaggcccacacaatcaagagttgttattttgttcagggatagaccatcccctacacaggatccacaatggaggactgccgttacatcctctaacaagggcgttctgatcctagcagctggcatggcacgctatgctgacttcaacctgtcagcttgctacatcattcagttgctaaacaaagtcgatcggttgttagttactgctccacttgagagcaaactgccattatcatcggaaagatatgcacgactaaataatcaacctacttcaaggaatacttagtgatcagaaaagaagggaattacctgtgaatgtagcatggttctccaatgagtgcacagaatgcgtttatccattagaattaactctgggtaaggctttaaggattaacaaatgtaaatagccatagaaatgagagtttttcatg

SEQ ID NO: 78017 - DNA, 1524 bp, Oryza sativa
  Clone ID: PAT_MRT4530_77864C.1
atgaagcagctccacaagtcgtcccccacccacgcgccggcggcggcgcacgccccggcgtccaaggcgtccaaggcgtcccgccccgggccccgatcctgggtcggctacctcctccgcgagcagcgcctcctcttcgtcctcctcggcgccctgatcgcctcctccttcttcctcctccgcccctacctcttctccctctccccgtcctcccacgtccccgaccgccgcccgctcttctccttcgcctcgcacacctcgtcggcgtcgggcgtgccccccgggttccgcccgccgccgcgccgcgtcgtcgtcaccggaggggccgggttcgttggcagccacctcgtcgacaggctgctggagcaaggggacagcgtgatcgtggtggacaacttcttcaccgggaggaaggacaacgtcgcgcaccacctccggaaccccagtggttgttctgttgagatcttaggaagacgcgatagatttgttagttgtgatgcacaggtgaccaatgtcatgggaaccttgaatatgttgggtctggcaaagcgaattggtgcaaggttcttgctaactagcacaagtgaagtttatggagatccacttgaacatccacagaaggagacttactgggggcatgttaatcctattggtgttaggagctgttatgacgaggggaaaagaacagcagagactttaaccatggactatcacagaggtggtggtgttgaggtgcgcattgctcgcattttcaatacatatggccctcgaatgtgtctagatgatggccgtgtggttagcaattttgttgcccaggcattgcgtagacagcctatgacagtttatggtgatggaaaacaaactagaagttttcagtatgtttctgatctggttgctggactgatggctctgatggagggtgatcacattggccctttcaacctgggaaacccaggagaattcaccatgttggaacttgcacaggttgtgaaggaaacaattgacccaatggcaacaattgaattcaaacccaacacagctgatgatcctcacatgagaaagccagatattaccaaggccaagcacctgctacgttgggagccaaaggtctctctcagggaaggtcttcccttaatggtgaaggacttccgtcaaagaattttggatgagtaatcaaaacaatgtgtgtttactcatctggattctatatgatgctgcaaatatagtcagtagcacttcacctgctggatcacgcagtacaacgttatttactgcatacacgataaatgttgtagaattacttgatttttttgtatcttggtgagacagaacagaattagttaattatttgtccacattgtgaatcttagtaagtcttgtgagaagtataggtttgtatatcaggagctgttattggtttcaaattttcatctagctcctaattgtaatacgaatatttgattcaagtgaaatatattcagacgagttcgcttttttgctcttcaaaaaaaaaaaaaaaaaaaa

SEQ ID NO: 78018 - DNA, 722 bp, Oryza sativa
  unsure (1)..(722): unsure at all n locations
  Clone ID: PAT_MRT4530_77865C.1
ccggccgggtattggagtaccatcctcaattattgaaagaacacatcagtggaacagaaaggccaaattttcatcatttaagtgtggttgaccaattcagaaagcaatttactcaagttgaggaaaatctgaatggaagtggggctgctgtttcgctacagaggaaacattcttctttgccaaggcgagccttcaactatcgttagacctgcagtgtcctcggaaagaagcttagcgcctacacttcaatggcaaccaaatatgacgcattttctgaatcatgcattgtgttaccagaacacagtatttagcgggtcacttcttgatgcaacaggcccagcccaagccattcctcgaactactccatatgtagactacaggtccgggaacttggacctctatcagcatcatgtttctagagaggatgtacaaagtgacacagccactgcacaagcacacgctgcttctcatggcccggttccagctgtgtcttacagtcttccagggacgtatagaatcacctagacctatcagtcgttcaatcatggaggtctttctttttcttttttttcacccatncataactgattgattaccaacattgcataaaaaaggcagaggaactagatatgcatgttctttttctttctgggacttagacatgccattatgctttgccagttccggatcaaaagccctcaaatgtatgcagtttcctaacc

SEQ ID NO: 78019 - DNA, 336 bp, Oryza sativa
  Clone ID: PAT_MRT4530_77866C.1
atgggcggatggcgcccttcgcggcaggcggcagcccgggggcgcgggcgtggccactgggtagccgtggagctgcagcagcttggcagccagctgggcgccgccgccatcggggttgggaggcgatgctgcgaccccgacgcgcctccgctagtccgctgtcgctgtgcccgtgcgccgtcgggagtcgggaatcagggtcgggaggccgccagggagaagatcgaatgggaaggagaggttagggtttcattattcccttttgctgatatgggctattgggccaatgggccgaccagccgaggagaggacggaggtgggatgggatggtgctaa

SEQ ID NO: 78020 - DNA, 1059 bp, Oryza sativa
  Clone ID: PAT_MRT4530_77867C.1
atggccgacgagtggtggagtgcgtctcagaggagccacggcacgtcggcgtgctccgcggcgccgtcgccgctcacagctgacagggtctcctgcggctggacgtcccccgccgccgctgccgccgccgagtcgacgagctccataacgttccaggaccccagcaggagcagcgccgctcatcatcagcctctgtccgatgccgcttcctctcttggcgatccccacatggtggactggacgcaggccttcctgagcgggagaagcgacgctagctttcaggccgtgctccaggacgacatggcggcatccacgagaccgttccgagcccagccgacggcggccgacgaggccgtgatgaccaatccattcagggacatgggcgtgggccaaggcctgctcctcgatcaggcgtcggcgccgttgcacggcctgtcgttcgacgccggggagccagcagtggcgccggcgacgcatagcatcacgacgtcgttcggggattaccagcactcggcaagctacgacgccgcggcggcggtgatgcagttctcgcagacgccgagggcgccctcgttgccggcggctgcccagatgcagttcttgtccggcagctaccagctgcctttcggcggtgcgccgccgctgccgtcgcagcttctcttgcaggccatgcagcccaagcctagctgcagctctaacgctaacaccctcctggcgaaggtgaggaaagagaagctaggggacagaatcactgcgctccagcaactagtctcgccttttggaaagactgataccgcatcggttcttcacgaggccatcgaatacatcaagttccttcacgaacaagttgcgtctttgagctctccgtacttgaagaatgggaacccattgcagcacttccagcagaagggttctgagagcacgaaggacgcagagcagccgaagccggatctgcgcagccgaggcctgtgccttgtgccggtggcaagcacttatacggtggcgagcgagacggtgccggagttctggcacccaacattcggaggcacgtttaggtag

SEQ ID NO: 78021 - DNA, 231 bp, Oryza sativa
  Clone ID: PAT_MRT4530_77868C.1
atggcggtgtggtgcgaggaggaggcgcgagcacaacgcgatggtgctgaggcgattcttgttgggcggagggggaggggggcgctggcttggtcaacacgcgaaggcaagaagaagcgggtgacggcgacgcaacaaccaaaaggccggggtggcagggtgggtggtgtggatgtggggtttgttgggacttggaggggtggaaaattagagtttctctatcgggcttag

SEQ ID NO: 78022 - DNA, 309 bp, Oryza sativa
  Clone ID: PAT_MRT4530_77869C.1
atggcatcgtggaggactaggtggctagagggggaggggtctcaccgccttgaagataccaacattgggttgtgtgcatctgaacaggttgtcatgggggaccttttctcgtcggaagtggaggacgggcttggaaagagggtggaggagatgttgtccaagaacctggtggcggagctatgcctctccaggctctactccatcgtgccaaagattagcaaagtttccttttccttcttcacttgcaagattgcctctgatgaaagtgattgtgttgcaagtagatggacagatgaagataagggctag

SEQ ID NO: 78023 - DNA, 142 bp, Oryza sativa
  Clone ID: PAT_MRT4530_7786C.1
ggaggagtaatgacaatgcaacaattcttctggaccatgaggactgtacattaacaggaggggggccacaaactgaaactttaatggcccaaaggcagaaatctatttaaagttcacaaacagcaccttttaacaaagtttc

SEQ ID NO: 78024 - DNA, 496 bp, Oryza sativa
  Clone ID: PAT_MRT4530_77870C.1
atggtaattctatcgtatgtacgtccatcaaatctgatgctaactactccgaccgttgtcaactgtcaaggggtatatgagaggggtctattggatattatgtcaacaaagggctacttgtacccaaagacaatgtttgatgcttttcaaggggtggaagttgtttttcacacagctgctgcagaccctgacatcaacgacttccaactacattacaaggtcaatgttgaagggacaaagaatgttattgatgcttgtgtaacgtgcaaggttaaaaggctgatatacaccagttccagtggtgttgtatttgacggagttcatggcctttttgatgtagatgaatcaatgccatacccaaacaaggttctactatgtgactgatgcatatgcacaaagcaaggcagaagcagagaagttagtgagaaattccaacggcatatgtgaacttctaacttgttccatacgtcctggtagcatttttggccctggtgac

SEQ ID NO: 78025 - DNA, 120 bp, Oryza sativa
  Clone ID: PAT_MRT4530_77871C.1
atggcttcatccggctttgacagctcacaaccaacatggaacaggggaattgtcgacaaagggtctgttcggcaggccgactgcgacggctgcgactacggctgtagctgcgcacagtga

SEQ ID NO: 78026 - DNA, 273 bp, Oryza sativa
  Clone ID: PAT_MRT4530_77872C.1
attttctttaccgtcggagctttttttgctcgatcggaggatgcagcaactcatcgagcggcgcggtgccaccacgctactacgactatatcaatcacctatcgtcagcggaagatcgaccgatcattcaagccagccatcgatccattacaataagcagctagcttggagaccgatcgatcgatcgatcatatgtcgattcgattcgatccgatggagagcataaacagcagcatgcagcagaagcgtggtgatgatgtgcctgcgagctga

SEQ ID NO: 78027 - DNA, 368 bp, Oryza sativa
  Clone ID: PAT_MRT4530_77873C.1
aaagtcccctacctaataatcccaccccttagaaaaagaggtaatttttaagcccttaaaacacccatcttatactatccagggaaaaaaaaacacagggccaaaccatctcccttttttccggaaacccatcccccatccaaggggtcccaccgaccggagttggttaatgaaattaaaaaaaaaataattaaaacctccccttgaggggggggaacttaattccccccctgtggaaaaccgaaatggtaaaatcccccacaatggggaggtctatgggaagccccccctcaacctggtattaaattccccaatcccggcccatttccttaacaaagaaaaagaaaaatccttagggaattttgccc

SEQ ID NO: 78028 - DNA, 323 bp, Oryza sativa
  Clone ID: PAT_MRT4530_77874C.1
catcagtcggagccacccaggcacggccgccctggtggctttgtgctcgccgccggcggcgaggcgccaaccccctgccccctgccctacccccccggaggggactgtgtacgacgccctccttctccttctactattctgcgcagaccacgcaccgccggcaacgagcatggtttggagggtgtgacgcggtgccccaatgcttgtcacttgtacaagatgtgtggctctactaactatctatcctacttggactgaccattaatctatcatcctacacactatctactttagcccgaacaaaccaccctattggaattgga

SEQ ID NO: 78029 - DNA, 1107 bp, Oryza sativa
  Clone ID: PAT_MRT4530_77875C.1
cgccatcgcccacggcctcgggatgcgccgcgtcggcctggtgttcacgcaggcagtcgggaggaagaccagcgacactggcgagtacaccatgtccaaccgcgaggtgcttcaggccaccgagctgcaggcggagggcgggatcccggagtgggtcaccgccatagtcaagctcgaggtgggggatgatggctccggtgatgtgcacttcgaggcgttccagatgagtgagatttgtgtgaagctgttcaaggatggtgtgctggagacggagattggggacaaagacgatccccgcctgtccaagatgcggaaagaggtggtggctgggggaaaggatactatggaggtggacaatgacttcttcctggtgcctgtcaagatctctgatcatcagggtccactttcaaccggctttcctatcgagaaccgtggaaaccctgtagcaatgagcgcgctcaagagccacctggatcgtgctaagcatctaccatttgttaagcggatctcggacttccaccttctcctcctggttgctgctttcctagacataaaagcagatgttcctgccctcaccgcttgcgtaaagaaccagagcgtggtgcctgaaggctaccaactgctgatcgagtcataggctggtgcctgaagtctaccagctgctgatcgaatcatttagccagttaggcataatgttgatctctggaagcaaagcacctggtccctttaaataccccgtgctccccccggcgtaacctatgggcgtcttgtggtgtgataaaagcagatgttcctgccctagccgcttaactaaacacaaacgcaacggtgctttttaggctaccaactgctgatcgagtcactggctggtgcctgaagtctaccagctgctgatcgacttggccagttaggcataatgctgatctctggaagcaagcacctggtccctttaaatttactgccatatatcatgtgtaacttatggttgtctctggtgtgtaaaaaagtcttgatcaattcataggcgcttaactttacacaagcgcaacatcgttttttatatgatgctgaagctgtgtctccttcacttaaaaaaaaaaaaaaaaa

SEQ ID NO: 78030 - DNA, 324 bp, Oryza sativa
  Clone ID: PAT_MRT4530_77876C.1
atgtcgtcgcggtacgtggagatgctggacatgggggtgcgcatcgcggcgaggttccactcccactgcccgcacacggcgcgcatgtactacaagccgccgcagaccacggcggatcacggcggcgctgcagcaggcaagcaggtggtggcggccggcttcaggttcgaggcggtgtcgtcgtcgtccgccggcgccatggcggtggcggcggcggcggcatgggaggaccgcggcttccgcgccaccgcgccgtcggggttcgacttcgagtttgacaccgcgcaggccgtcgtcgtctacgaccacgtcgccgccgtgtga

SEQ ID NO: 78031 - DNA, 621 bp, Oryza sativa
  Clone ID: PAT_MRT4530_77877C.1
ggggaggatggtcatatttttgaagacgagagcgactacgacgacgacgacgacgaggtcggctcggccggtcaggccaggcgccaggccggtcagaccgccggcacacctccggtcagaccggcgcacgacgtgcggtcagaccggccagggtcgtcgggttcgggtactgttgatgctgatcaagatgagttcttcgatttgtgtttaccgggttttggcggtctaaccggcgatctaccgacggtcagacctgtggcaagcggcggtcagaccggcggcatacgggcggtcggcccgcagccgagccgccgctcgcgcgcgcgcgtccgcccgctgacaggtgggtcccacctgtcggacccgtcgtcctcctcgcgcccgaaccctagccgcgccgcgccgccgccgcccttccaattcggccgcgcctttccttcttcgccgtgcgccgccgccgctccggtcgtcgtcgtcgctcggaaaggtcgccatcgtgatcaccaagccgtcgccgacctcgtccgcccctctgtcgtcgccgtagtcgccggagcaccgccgtcgtcgtcaagccgaagtcgccgccgcttcttcctcgtcgccgtcgccgtccgttga

SEQ ID NO: 78032 - DNA, 362 bp, Oryza sativa
  Clone ID: PAT_MRT4530_77878C.1
aaaaaaaaaaaaaaaaaaaaaaaaaaaaaaaaaaaaataaaaaaaaaacaaaaaaaaactgagaaagaaaaatttaaagagtaggaaaaaaaactataaactaaaaaaaactataaaaaaacaaacaaaaaaccatattactactataaaaaacaaaaacattaaggctgtctccccccttaatatatccaaatttctccccccctccttaaacactgactttttcttttttggagccccaaatactaaaatcctcccctgttttctacctactgatgcctaaaaaaccgctagggtccccaacattattcgtttgtaaaatttccccttttttcagattgggtatataaaaaaaagccccc

SEQ ID NO: 78033 - DNA, 966 bp, Oryza sativa
  Clone ID: PAT_MRT4530_77879C.1
atgcactcgtacgtgcataattatggacgaatgattagaggagacgcagggcgaccctaccagattgtcttgcacaacagatggatggcaacgccccacggtcacagccgtaaatcgaggcggatggatctgatggatggcgtactgagatcgatagatcgaccgaagttagatagatcggacgggcgccggtcggcccgcggttcacccgttcacggggaccggctatcaagtatcgaattgtacaactggcggccgacgaccgggcacagcgactgctcgctctcttttcagcgaatcagccctcgccggttacagtgccctgtaccgtcgatcgatcgtgacatggtcatatcgaacggggccaatgctattgatacattcatgcatgcccgggccgctaatggaggcgcatatctagccagctacgacatcgatcgtcttgtcacttgtctcgcccgatcgatcgatcgcgactcacggacaagcaagctagttcatgtcgagtgtaccgtgtacggctcggtaaacccctggatatatatggtacgtactacgcccgtgatcgaaggccgtcccgaactgcgtaaacgatcgatcgccgcgcgctgccggaaggctaccctccaatacatccatcgatattatcgatcagcgcgcgcgggtcagtgtcgacggccgacgggacgccgtacgtcgcgatcggcgggcgaggggcggccccggccaaagctaggtcagacccagccggcgcacggcgaacgacagcgaccgccgcccccacgcgggtgtcggacccgcggcgatggagaagctttgtatgcgcgtctacgtgtgcggcgtatggccgccggggagcaccgatgcgagcgcgcgcccgcgcgctgcgtgcgtatggtacgacgtggaggcggctccatcgaccgataccataggtggcctaacacgtactccagaacacttcaa

SEQ ID NO: 78034 - DNA, 1266 bp, Oryza sativa
  Clone ID: PAT_MRT4530_7787C.1
atgtcgtcgtcgtcgtcagatgtcatatctggtggtaacatcgccgtagccatcgtgtccgtgatcacaggcggcatagtagtcatcgttgttgccattctcatctacaagtgctgcaagctgcgcatgtggcgcaagtacggcctctcgccgccggaattaccggcatcgcagccgcccaggcccaggagcgacgacgaccgtgctgtggccgcgctgaccacgacgacggttgacgtcatcaaggagcggcctgtgaggttcagctcgccgcagttgcgggaaatgactggcgactacgcggagaggcttggcgccgggggtttcggggtggtgtacaaagggcagatccccggcggtctggcagtggccgtgaaggtccttggtagcgacatggggaggcgcgcagaggagcagttcatggcggagatcggcaccatcggtaggacgtcgcatgtcaacctcgtcatgctctacggcttctgcttcgacgccgacctcaaggcgcttgtgtacgagtgcatgcccaagggctcgctggagcgctacctgttcttcctcgacgaacaggagcagggcctcggcttccacaagctgttccgcatcgccgttgggactgccaaggcgatccggtacctccacgacgagtgcgcgcggcggatcatccactacgacatcaagcccggcaatgtactcctggacgaggagttggagcccaaggtgggggacttcgggctggcgaggctgtgcgacagggagaagacgcacctgacgatgacgggcggcgggaggggcaccccgggctacgcggcgccggagctgtggaagccggtgccggtgacgcacaagtgcgacgtgtacagctacggcatgttgctgttcgagatcctgggctacatgcatggtatggagagccaggagcagtggtatccccggtgggtgtggcagcgcctggagcatggcgagacggaggcggtggtggcgcgggcgcgggcgcagggaggcgccgccgccgccgacaaggcggagcggatgtgcacggtggccctctggtgcgtgcagtacaggccggaggaccgaccgtccatggccagcgtggttcagatgctagaggcccatgaccacgtcgcagcgcccaccgtcagcccctttgctcatctcgacccccaagtcatcatcaccacttcctctttctcctcgctgttacacacggatgacaccactggaggcaccacctccactcacatctcacatcacatcacttaa

SEQ ID NO: 78035 - DNA, 2364 bp, Oryza sativa
  Clone ID: PAT_MRT4530_77881C.1
atgtcgcggtttgtcgacaagctgccgctgttcgaccggaggccgtcgccgatggaggaggccgagggcctcccgcgcagtggctatcttgggcagctgcaccaccaccagtactaccagccgcacagcaacatgctgccgctggagcagtcgccgccgacgagcacgaagcacacgtcggtcacgctcgcgcagctcctgaagcgcgtgaacgacgcgcgcagcgggtcgtcgacgcccatctcgtcgccgcgctacaccatcgagctgggcgggtccaagccggagtccgtcagcagcgagagcgacgaccaccactccgacgacggcggcagcgaggggcagccgagggcgctcgtgctcaagttcaccgacctgacgtacagcgtgaagcagcggaggaaggggtcgtgcctgccgttccgtcgtgcggcggcggacgagcccgagctgcccgcgatgaggacgctgctcgacggcatctccggcgaggcccgggacggcgagatcatggcggtgctcggcgcgagcgggtccggcaagagcacgctcatcgacgcgctcgccaaccgcatcgccaaggagagcctccacggctccgtcacgatcaacggcgagtccatcgacagcaacctgctcaaggtcatctcagcgtacgtccggcaggaggaccttctgtacccgatgctcaccgtcgaggagacgctcatgttcgccgccgagttccgcctgccgcgctccctccccaccagggagaagaagaagcgggtgaaggagctaatcgaccagctcggcctgaagagagcggcgaacacgatcatcggcgacgagggccaccgcggcgtgtcgggaggcgagcgccggcgcgtctccatcggtgtcgacatcatccacaacccgatcatgctgttcctcgacgagcccacctccgggctggactccaccagcgcgttcatggtggtgacggtcctcaaggccatcgcgcagagcggcagcgtcgtcgtcatgtccatccaccagccgagctaccgcatcctcggcctcctcgaccgcctcctgttcctctcccgcgggaagacggtgtactacggcccgccgagcgagctgccgccgttcttcctcgacttcggcaagcccatcccggacaacgagaacccgacggagttcgcgctggacctcatcaaggagatggagaccgagacggaggggaccaagcgtctcgccgagcacaacgcggcgtggcagctgaagcaccacggggaaggccgcgggtacggcggcaagccggggatgtccctcaaggaggccatcagcgccagcatctcgcgcgggaagctcgtgtccggcgcgaccgacggcaccgtgtcggtcgccgcctccgaccattctgcgccgccgccgtcgtcgtcgtccgtgtccaagttcgtcaacccgttctggatcgagatgggggtgctgacgcgtcgcgcgttcatcaacacgaagcgcacgccggaggtgttcatcatccgcctcgcggcggtgctggtcaccgggttcatcctcgccaccatcttctggcgcctggacgagtcgcccaagggcgtgcaggagcggctgggcttcttcgccatcgccatgtccaccatgtactacacctgctccgacgcgctcccggtgttcctcagcgagcgctacatcttcctcagggagacggcgtacaacgcgtaccgccgctcatcctacgtgctctcccacaccatcgtcggcttcccgtcgctcgtggttctctccttcgcgttcgcgctcaccaccttcttctccgtggggctcgccggtggcgtgaacgggttcttctacttcgtggcaatcgtgctggcctccttctgggcggggagcggcttcgccacgttcctctccggcgtggtgacgcacgtgatgctggggttccccgtggtgctctccacgctcgcctacttcctcctcttcagcggcttcttcatcaaccgcgacaggatcccgcgctactggctgtggttccactacatctcgctcgtcaagtacccgtacgaggcggtgatgcagaacgagttcggcgacccgacgaggtgcttcgtccgcggcgtgcagatgttcgacaacacgccgctggcggcgctgccggcggcggtcaaggtgcgggtgctgcagtccatgtcggcgtcgctcggcgtgaacatcggcacggggacgtgcatcaccacgggaccggacttcctgaagcagcaggcgatcaccgacttcggcaagtgggagtgcctctggatcaccgtcgcgtggggattcctcttccgcatcctcttctacatctcgctgctgctcggcagcaggaacaagcggaggtag

SEQ ID NO: 78036 - DNA, 2906 bp, Oryza sativa
  Clone ID: PAT_MRT4530_77882C.1
cagcctacaggaggcctacagcggcagcacccaccagggcaggcggggaggcaggcagtcgttcatccacatccaccgccgccgtctcccccgccgcttctcacccattcctctccaatccggccgcgccggcgccgcatctggtccaccaagaaccccttcaaagaatccccacaaccctctagggaaagatcgcgagaattcctctcaatcgccgcttggatggggtgcgggcagtccaagatcgaccaggaggaggcggtgtgccggtgccgggaccggaggaagctgatggccgacgccgtccaggcgcgcaacgccttcgccgccgcccactccgcctacaccgttctcctcaaaagcaccggcggcgcgctctctgacttcgcccaaggcgagacgcccgacctggtggcctctcacgcccacctcgccgcccccacccaggcggccgcttccgtctccgcgcctcctcccccgtccaccgccgccgtgctcatcgcgccctccccgccgcccccgcccttcctcgacttctcccacgccacactccagcgctcctcttctactccaaacatcccgatgcccgaccctaaggccgccaccaagacccaactcgccgctggcgcatccatccgggaagaggacgaggtggaggatgatgctgacggccatatcagaacagaaagcgaagatgatgatgacgacgacgaagacgacgatagcgatgatgaccaccatgagcacgatgatgtcctcgtggaagaaatggtacacggacagccgcagaagcgggttatgatgggcagcgtggggtcttctccagtaacgccgccacccccaccacggccgaacccatccccgccagccaccaggacaacaccaccacccccaatgcctgagcctcagatggctactacctgggattacttcttcggtccaaccaccacaccgccgcccaccctggagcaacctcctgaggagtcttggatggataagcgggagaaggagtcagtgccggagatgaaggcaccgattatgaaaccagctgttgatggatcagctgctcctatgcatgttgcggaggagcaaccaccacagacagcactggagaaggaaaaggccattgaacagcttgcggcaaaccttcctccatcgaagccacttattagaaagccgcccaaagcggcacctggccctccagcagaagttcgctaccagcatgcctcatctatgggtgcggttgaaactcggaaggggaagacgatgtcagggcacattgaccactccacaaaaatcatgcatgttattacttggaaccgctccttcaagaacctacctaaccaagatgattttggtgataattttgaaattgatgaaaggtttgaaactcatgccacagtacttgataggatgcttgcatgggagaagaaattgtatgatgaagtgaaggcaggggaacttatgaaaattgattatcagaagaaggtagccctacttcataaacaaaagaaacgtggtgtgaaactcgaaacccttgagaagactaaggctgctgttagccacttgcacacaagcccttggagaaaatctggcatgttggaatcgatggggaataaagacaatctcttcgatattaaaaacgaattgcattctctacctattagaagtgattgtttccaggactttgtgatgcggtattgggaaatgtttgatgagctaggttcaattcaatatttggttaatagggatgggtcacgggtcaataagtgggacatgaaaagtgatatgaggctctcatatcccatcacccatgtggaggatagaatggcaaacatgtggagttctatgcatcatcatcataagtggcagttggttatcatatcaggaataagaaattttgaggctccaccggttccaagagagacaactgatcagcattacaagcagacttgtgacctgcgtgacattgtcagggagtggcacatgcagtttgagaaactcatggaccatcagaaagggtacattagagcactaaatgcatggctcaagcttaacctcatccccatcgaaagcaacttgaaggagaaagtttcgtccccgcctaggctggtggaaccacctataaaagatctgctatatgcctggcatgaccagcttgaaaggcttccaattgaacttgcaaaaactgccatcaaaagttttgctgaagtcataagcaatattgtactacttcaggaagaagaagtcaatctaaggaggaggtgtgaggaaactcgcagggatctcaaccgaaaaaaagcacagtttgaagaatggcaccaaaggtacatggagagaaaggcatcacaaggcgaggatgctaataacagtgaagtggctgaagctgtgaactcagatcctgtcgccgacaggaagacggccatcgaggaagtagagattaggctgagggaagaaatggggcatcacaataggattgccaggcaggttagggagaaatcacttgccaaccttcggatgcacctgccagagctcttcagaaacatgactgattttgctggcttctgctatgaaatgtacagcaatttgagaaaatctgctgtactgcccaaagatgaagtgcaaggctgatgctgtgctcccaaaatgttagttatgttgattctcgagttcatcagctgtaggggaaaatactggttgtagctgttcactggtatcgttttgatgtgctgttttccttttcttttttgaagtgcatcgtagagctcgtgagaattaatgatttgatctgcctgtaaattgaaacgatcctattccatcatctattttcattttctgtgcattgatatcttctaggtggccttaaaaaaaaaaaaaaaaaaaaaaaaaaaaaaaaaaaaaaaaaa

SEQ ID NO: 78037 - DNA, 3091 bp, Oryza sativa
  Clone ID: PAT_MRT4530_77883C.1
atggcagccgtggaaaacgaaggtctttctctgaacattgtcgtgttgctcctctgtttcggacaaggaaaaactgaagcttttccagagcttcctgcaaaggtactcatcatcaattgtgccatccaaattgaagttcaaatttccactgccaagatgatcaaactccggtcagctctaggcgttcttgagatcttgtcagttctttgcatcagccttgttgctgcatacactccagtagacaactacctcatcagctgcggctcatcggtcgacacgccggttggccagcggctgttcgtcgccgacgactcgggcacggtcgtcctgacatctccggcgagtgacgcggtgaaagcctcgcccagcgcggtgtccgggttgcgcgacgacgccgccatgtaccagagcgccagggtgttcaaggcgccgtcgtcctactcgttccggatcagggaccccggccgccacttcgtccgcctccacttcttccccttcgtgtacctcggctacgacctcgccacggcgagcttcaaggtgtcgacgcaggacgccgtcctgctcgacggcttcgcgccggcggcggcggcgaggggcaacgcgtcgacgacgacgacgacggcgacggcggcggcggtgtgcgaggagttcctgctggacgtggcgcgcgacacgctcgtcgtcacgttcgtgccgctcgccggcaggctcgcgttcgtcaacgccatcgaggtcgtctcggtccccgacgacctcatcggcgctgctgactcgtcgctgtcgacgtccgactccactggccagcagctcaaccctgccgtgatgccgctgcaaacggtctatcgggtcaatgtgggcggccaagcggtggcgcccgacagcgacacgctctggcgagaatggactagtgaccagcaattattggttggacccgcaatgactaaaggagtttcttacaatcgaacaccgaactacctgcccgggcaagcgacggcgaacgacgcaccggccatcgtctacgccaccggcagggagcttatcatcatgacgaactcgacggacgacggcatgaaacaaatggcgtggcagttcgacgtcggcaggtcggcgagctacctgatcaggttccacttctgtgacatcgtgagcagcgtgcctggccgcctccacatgaacgcctatgtcgacagctccaacgcgattcaagatctcgacctctccgccattggcaatggcacgctggcgttcccgtattacagagacttcgtgctggctgctagcactccatccggcaagctcgccgtctacgttgggtcgacgtcgcagaagatcacgacacctgccgccattctcaatggcctagagatcatgaggatactcacgaccgccggcaacgtcgccgtcgtcgagccaacgatgccgccgggaacgaagaagaagaacaatttggccgtcgttcttggctcagtctgtggagctttcggtttcgtttccgtcgccgctgctcttgtcattgttcttaggaggaaagaggagaaggaggagctgcggacgccgacgacgagccagccgtcgacggcatggatgccgctcctcggccggatcagcttccgcagcgcgccgccgagcgccgtcgggtcacggtcgcccagcttcaccattgacaccaacgccaacactccaggaggaggcgccactcccggcatggccgcggcggcctcgtcttccccgagctaccgcttcccgttcgccgcgctgcaggacgcgacgggcaacttcgacgagggcctcgtcatcggcgagggcgggttcgggaaggtgtacgccgccgtgctccaggacggcaccaaggtcgccgtgaagcgcgcgaacccggagtcgcggcagggcgcgcgggagttccgcacggagatcgagatgctctccggcctgcgccaccgtcacctcgtctccctcatcggctactgcgacgagcaggatgagatgatcctgctctacgagtacatggagcacggctcgctgcggagccgcctgtacggcggcggcgcggcgacggcgacggcgacggcgctcagctgggcgcagcggctggaggcatgcgccggcgcggcgagggggctcctctacctgcacacggccaccgccaagccggtgattcaccgcgacgtcaagtcgtcgaacatcttgctcgacgacggcctcacggcgaaggtcgccgacttcggcctctccaaggccgggccggacatggacgagacgcacgtcagcacggcggtgaaggggagcttcggctacgtggacccggagtacgtgaggacgaggaagctcaccgccaagtccgacgtctactcgttcggcgtcgtgctcctcgaggcgctgtgcgcgcgccccgtcgtcgacccgaggttgcccaagccgatggtgaacctcgtcgagtgggggttgcactggcagcggagggacgagctggagaagatcgtcgaccggcggatcgccgggacggtgaggcccgccgcgctgaggaagtacggcgagacggtggccaggtgcctcgccgaccgcggcgccgaccggccggcgatggaggacgtcgtgtggagcctgcagttcgtggcgcggctgcaggaggtggacggcctcgacgcctccgacgtgagcagcctcaacatggttcatcagctgatgccgccgacgagcttgcacgctcgtcagagaagcgccggcgaaagcgagaccggcaggacggacgccgacgaggacagcagtgtggtagatgatgattacaccgatgcttccatgagaggaatcttctggcaaatggtcaatgtgcgcgggagatgatactgatcagtcatcttcaaacattccagatcatgaattagtcatcttcagactggtcagttcattgttgaacattccaggtcaaaattcacctctccagtatccagtcggaaaaagtgaacaaagacatacttagaatttaaaatatacttaccagtgaaaattttgtactgtccctaccatggagttcaaacatatgcttgaatgaaaaaaaaaaaaaaaaaaaaaaaaaaaaaactcgagactgttc

SEQ ID NO: 78038 - DNA, 438 bp, Oryza sativa
  Clone ID: PAT_MRT4530_77884C.1
tctggaggctcatttaagatcgacaaagttaaagctaacgtgctccagatattgaagatcttgtatctctcttgttggtagagtttgactacctaatcaaaagaataaagctggaagaagatgataatgcctgtgacaatcttaatccatgcacttgccaagagtttccggctcttgggagacgcaaacatgcggaatctgcaaacaaggagaaatgcatacagcttgaaaggaaagggtattacaggtgtgatgctgccatttgatgccggtcttgccaaaccattgtccttttcgctattgccagatgggacgacaaaacggccgcaacgaactaggaacctataagatggtttctggaacagcaaatacaagaatcatgttcctgataaaactggtgttgtaaacttgttgattggaattttaaacttaaataat

SEQ ID NO: 78039 - DNA, 1076 bp, Oryza sativa
  Clone ID: PAT_MRT4530_77885C.1
tttataggaaacgaggcctgccgcccggccagagggcggcaaggggccgcctgcaaaatgcccggccccgactggcttttttgcattcgggcccagggcggcaagggttttcctgcaaaaaaccctccctccgtcaccgcccggggtggacaaaaagcttggactcgtgagctcggctcgggctttggctcgagctcgtgaagctcggctcggctcgaggactaaacgagccgagcccgacctccctccacagctcgtttgcaaatcgagccgagcccgagctagctcgcaagccgctcgaaaaaacagagaaccctaccttaactgctccgtccgaccctccccatttcccatcccacgcaggcgcaggcacgccgccgcacgcgcgcacgattggcgtctggcggcgactagcgagaggagttgccggccgccgtctccggctccatcccctgcgccgccgcccgccggcccgccgcctctctcctttatccccagtcgcccgtctgtgccgccggctcgccgcctccctcccctgcgctcgcccctctgtgccaccggctcgccgcctccctcccctgtgtggctgcacagcttcggccttcctccccagcggcgctcgacggtcgacggctcgacgctccccgtgccgccgtggcgccgcctccctcccccgtccccagtcgcccctctgtgccaccggctcgccgcctccctcccctgtgtggctgcacagcttcggccttcctccccagcggcgctcgacggtcgacggctcgacgctccccgtgccgccgtggcgccgcctccctcccccgtccccagtcgcccctctgtgccaccggctcgccgcctccctcccctacgccaccggcccgctgcatccctccctcccctgtgcagctgcgctggctctagcctccctccccagcggcgctcgatggtcgatggtcgatggctcgacgctccccgtgccaccgcggcgctgcctccctcccctgcgctgcctccggcctccctcctcagtgccgctcagcctccctcacaagctggctcgagccggctcgagcttttaa

SEQ ID NO: 78040 - DNA, 433 bp, Oryza sativa
  Clone ID: PAT_MRT4530_77886C.1
gcaacaaacagtgtagaatatatacatgatgagctagaatgttgccaaaccattcataaggtttgtgttggtggtaaggaaactagagttctacaacaaataatccaacccctgtaagcatccacattcagatgtcatcagtgactagatgcaaagcaatccaaatactggcatgtggcatctgccaatttcaccacgaatattgggccatccttggatgacagaaattctgataaactaaagaatacattttgcaggttcaacctactgaaagaactgcagctgcatacgaagtttgatgccaaggttggtcagattgcaagatcttcaatcagcacagtggccccccttcaccacttgtaaggatcaatagtccactttgctgtcaaacagtgaaacttacaacccacacgctctacaatcaattttagta

SEQ ID NO: 78041 - DNA, 297 bp, Oryza sativa
  Clone ID: PAT_MRT4530_77887C.1
gataattaggacatgaagtatgatctgggggtaacgtaacaaatgagtatacacttttgacgatttgtacaaatatatttataccgatgtgaatgtgcatatgattagcctggcgctaccattgacatctccctgctttttaacctatgttgagacatacatttgtacatacatacacacttcgtgtgggcacacacatactgaaaaacaaacactgaagcacccaactggtaaagggggaaccaattcaagggggccctatttttacgtttaaaggtttcaaaaactgatatatta

SEQ ID NO: 78042 - DNA, 200 bp, Oryza sativa
  unsure (1)..(200): unsure at all n locations
  Clone ID: PAT_MRT4530_77888C.1
acgaggtcgcgggccnttnttgcggacngaccgggtccaagcggcntnangganaggcctngggganctctncaaggaggnggnngncgactagnaaggcgcccctcagaccaanggcagcttaatatcggtagagtngtctacacacatatgttggatacattanttcgcttgggaanaggaagagangnccaaaataa

SEQ ID NO: 78043 - DNA, 611 bp, Oryza sativa
  Clone ID: PAT_MRT4530_77889C.1
attcccgggtcgacccacgcgtccggcgagcggtgctgcacaacccctccgcgagcgacggcggtggcgcccttccccaccgcgagtagcggtggtgccctcccccactgcgagcgacagcggccacggtgccctccctcagcatgagcagtggcgatggcggcgacggcatcctcccgcagcttccatgggtggatcaggcggcgtcggtggcttcccgcgggcggatccgatgggcacagtggtgtcggcggcttccgcgggcagatcaggcgacaatgaagattaagataagatttgtgcatttattattattattcttggttttctttttttttttattgtccaattggattttgtatctacgtttgaatttgtgttttatccatcatacgtgatgtgttactcgcgcgtgtgggaacggaggccatcgttcgattggactcatcagacaaaaaaatgatgtgaagaacgggaaattaatttttgaagtagttataagatatgttggtttaattccagtgttgataggttagtcacggtttattagtagagtcattagcggctagagtaccaaaagtaattaggggtttcttgattagacttttcct

SEQ ID NO: 78044 - DNA, 458 bp, Oryza sativa
  Clone ID: PAT_MRT4530_7788C.1
ggagaaaggagccgggcccaaacaaaaaacacggggggggaaaagtttaaagcccaaaacccacaggggtttattaaaaaaaaggggccaaaccaaaatttttttgggggggggaaacttaaacggccggttagttcccgggggtaataatgctttccccgcgcaaaaaaaaagggacatgaagggcaagggaacaggccatcaccaattttcaaaaaaaaaacggaaacccttaaatcaccggctcaccataaaaaacaggggaccaatttttcaggaaagccaggggaattccctttatccccaagggacccccccaaggggaaaatttgggaggctaccgggtagaacggggcagctttgcaaaaatttgtttaaaagaaaaggggggggtaaaagaaaggaactgggaaaaatggaaaaaaatttcccagttaaaaaaaaggggggggggggaa

SEQ ID NO: 78045 - DNA, 309 bp, Oryza sativa
  Clone ID: PAT_MRT4530_77890C.1
atggcgtcagaggaggatatgcgggtacgcaataaggatgaagggggcgccgcaatcgatgaagaaccaattgaagatcagggaggggaatcagatgagggggatgacgaagatgctcttgggttcatcgtcctagctctgacgatggcacaccaccgtagagtcatctctgcggcaaccaccaccaccacctactattgcgacgatgtgggaggaggcagagatgtgggcggcggaagcatcgttcacgtggggtcgtggagggaggaggacaagcggcggcgctctagcggctcccgagtgaaatag

SEQ ID NO: 78046 - DNA, 437 bp, Oryza sativa
  Clone ID: PAT_MRT4530_77891C.1
aggcaacatataaaggcggaggtatcatatatgacatatacagatgcctcacccagcaacatatagacaacgcagataccaatcttacataaagacagagagcgagccggcgaaacaaaaacaaaagcagagcacgggcggtaaaactaaaagacgctgaacaaacggggaacacacgaaacaaggagggagacatgataccatcagggatgaacaattaaacaagggtatatatgacgatgacggcttagtagccaccagactactcgcagcccgatagctagtacgcgatgaagctgatgagctgtacctgcctgacgtggtcgaagccgatgatacggacgaatgcataagggtacgccttcttgaactcatcgagctccctgagcacgtgagtggcgtcagtgcacccgaacatgggcagggtctcacatgga

SEQ ID NO: 78047 - DNA, 867 bp, Oryza sativa
  Clone ID: PAT_MRT4530_77892C.1
atggtggaggacccgagcaccgatgagaccatctcgtggaacgactccggcacggccttcgtggtgtggcgccccgccgagttcgcccgcgacctcctccccaagcacttcaagcacagcaacttctcctccttcgtgcgccagctcaacacctacggattcaagaaggtggtggcggataggtgggagttcgccaacgactgcttcaggagaggggagaagcacctgctcggtgggatacagaggcggaaggggtctgggaccggaggcgcgggggcggcgccggcggggggcataccgacggcgataccgatctcgtccccgccgacgagctccggcggggagcccgcggtgtcgtcgtcgccgccgcgcggggcggcggggatcgcggcgggggtgagcggcgcggtggccgagctggaggaggagaacgcccggctgcggcgagagaacgcgaggctggcgcgggagctggcacgcgcgcggcgggtctgcgacggcgtgcggcgcctcgtgtcgcggtacgaccacgaccacggcggcggggaggaggaagcgggggagggcgacgtgaagccgatgctgttcggcgtggcgatcggcggcaaaagatcgcgcgaggagaacggggaagacgaggaggaggaggaggaggaaggggctgacgaggacggcgaagacgatgaggtggaggaagacgacgaggagagagagaggcacgcggcgcggcgggtccccgtgagggaggggaaggtcaggaggacgacggagctgtcggatctggacgtgctcgcgctgtccgtgcgggcggcggccgcggcgaggccgggcggggcctcccgtgaccgcaagagctcggtctcgtaa

SEQ ID NO: 78048 - DNA, 493 bp, Oryza sativa
  unsure (1)..(493): unsure at all n locations
  Clone ID: PAT_MRT4530_77893C.1
gaagaaccaacaaaaccctttaaataatctgaggtcaaacttatcctgaaagatcatttacaccatatatacatactactggaacaaatagatccattccaccatagatacattatctacacacatacaaatgacattntctcagatatcaaattctgcaccacacaaacaataccatcctattatatacacatcctctgtgaatatcaaaaccaaaataagaactgccctgaacatccactgtgaaccttacatacctaactaactcatctccattgctcaaattctactcatatatctgagccaggcagccgtgtactagatcatatactattctgatccacagcatgtagattaactacagctcagagatctgttgctctattctagaacgtgctaacatattgccctgccacaaccgaaccatgattcggtcacctcatctcatacctttcattcatactctaagaacctcctcttatgactgattccc

SEQ ID NO: 78049 - DNA, 675 bp, Oryza sativa
  Clone ID: PAT_MRT4530_77894C.1
gcaggctcgagtttttttttttttttttttttttttttttttttttaaaagccaaaaatgtataaggatgtttttgccagtaagctgtagctacacattacatcaatgtttttaatttgaggggaaaatatggattacccatatgaagatgaccaacattatgtgtttatacgcatgcataatcatcatgcctcaccatttttcggcatttttacatgtgccctatttctgtccaaaactcttatgaaaaattctgcacacttaacaaacaatatcagttacataagatattgtctaactccataaatcaaccaaagaccatatatcatgacaacaaaatgttctagaaaataaatttaaaccagaatatagtttatcaagtggtactttgataatgttcatgattattttctaagtagttcaggacttgtaataagttgtgattatagttatctttttgtgcacttacttcgaaaaaaatttccgattcaattgcagaaatatgacatagcaattggagacataacaattaggtacaaaagatcttcatatgtcgatttcagtctgccatacacagaatctggtgtggcgatgattgttcctgtcagagaaagcataaacatgactacatggatttttttgaagccattaacacctggaatgtggtttggaagc

SEQ ID NO: 78050 - DNA, 760 bp, Oryza sativa
  Clone ID: PAT_MRT4530_77895C.1
atggcctcggggccgaccggcggagctggcggcagcctcagggacgagcggcggtggcagcctcggggccgagcggcggcggcggcggcggtggcggcggcggcggcggcggaggcggcctcggggccgaccggcggcgacggcggcggcctcagggacaagcggcggcggcctcggggacgagcggcggagcttggcgtcgaccttgatttgtgttgccgcgatttgtgttggcgatttttccaaatcccctcggggccgagcggcgagcggccattttgttgccgcgatttgtgttccttgatttgttgccgcgattttggtgggcgtgttccttgatttgttgccgcgattttggtgggttgttccttgatttgttgccgtgattttttggtgggtgattttggggaaaacccttccacacgggcggcgcgagggcacgaacgggcggggcgcacggggcaacgcgctctacagcgctcgtttcctcgcctcgcgtgggcccgcggcaaggaggaatcgtgcttctctccgtggaagcaagcatccttgcttgggcgcggaacctagcgccacgcaagcttgattccgacgtggcgccccatagcactgatccacggtgttgcatctcctttgagtgttcggccaaggtgcgggttccgagctcgtgtttagatcgcacgaaagaaatgtaggtaggtggtttacataggttcaggctatcggctgacatgtggagcagggtagcaaaagtcttcat

SEQ ID NO: 78051 - DNA, 378 bp, Oryza sativa
  Clone ID: PAT_MRT4530_77896C.1
atgacgtctttgccgattaccactgttaacacagtgttgacccggggccagtacagcggcggagtggtgtgctgcgggcgggagggcggcggagtggcgggtggcgggcggcgggcgggagggcagcggcgttggggagacgagtcggacctcgagggagccgtaggcacgcgcggcggcgacctaggacttgcccgttggcccgcttattgtggacttctgcccttggacgatggcgccgccccacgcttgcgggagctgcatccggacgacgacgggaaggagcagacgccagcaagccatgctctaggggctctaggaggcagccgcaagatggagctcggcgagggggctttagggcagcggcgccggcagtga

SEQ ID NO: 78052 - DNA, 910 bp, Oryza sativa
  Clone ID: PAT_MRT4530_77897C.1
gttgctgtttttgtggttttgtctcgcttgtactggccgcttttttttttttttttttcggataggttcagttcagtcccaacgtcccatggtccaatcccctatatagaagagtgtcataaagccacacttaaatggcagaacaggagcattagcaagcactgttgtcttataacgaatggggattcaatttacagttcatatcggcttatagggcctcagccagagcagagcttctcaagagccatgttctcgtcgccattgacactcttcagaacacttctcaccatgtcttcagggaagcccatctcaaccagcttctgcaccttttcttccatgccggtggaggaattctttgcaaaggcctccgtccagtagcgagcagtagcagaaaatgtggaatagtcacgcaagtactgttgtgcaacgacagcatcctgaggatcatcaggtgcaggggcagaaagcagagcttggagggaaagcagtgccgtcttcaatgtaagggctgggctccattggtccttcagtatgtccaagcagattgctccgttttggctgctaatgttagggtgccatactttggtgataaactgcatcttaggaggctcaaaggggtaaccacctgggaggcggatgtcgatgacgaaggtgccgccctcgtagggcgtgccttggggcccggcgatggtgccggtgaggtgggagatggtggagccgtcgtggagcgcgatggacaccccggagacctccctgtcccggttgcactccgtcagctccttctgcaccctcgacacgtccaccatcgccgccgccgccgccgctcgccgcgattcgcctctcctccctccctccctctcgttggaagcaacgccgatgcgaatcgaatcgaacgcgacggaaaggggga

SEQ ID NO: 78053 - DNA, 632 bp, Oryza sativa
  Clone ID: PAT_MRT4530_77898C.1
cgtcttcctcgccttgcacaagatttgacttcattcatcccatccttccttccttcaaccatatatatataccacattccctacagtatcagtatgtattactgtatttccaaaacgtacctacaatatataccacgtgtcagttctacgatatatatatactacccggataaaatgatagtatcgtttctaaaatcgggataccaactgtttcatgtactagacaatatttaaattcaaaactatttaagtgtatttgtgtttatgtatcttcaaaatcaatcttaaataaaattattagaactagtgagtggctttctcttgacaaatgtctcttttcatgtactattctatttatttagaatggctatatatatttaatataaatattaaattaaacttaaaaaaataaaatattatatatcccgatactacgatgcgattaaaccatccgatactactcaccttctacatgttcaaagtgtatagtacaacttccattctagcagtatattatatactagtatatatctgttcaaagtgtatagtacaacttctcttctagatgtgatcctcctatcttattataaatatgtttttattgtgtttgtgttgtaaaaaaaaaaaaaaaa

SEQ ID NO: 78054 - DNA, 728 bp, Oryza sativa
  Clone ID: PAT_MRT4530_77899C.1
atggcgaaagctagggtgaacctgaccgtcctcggcctgtcgtccctggtggctctcctcgtcctcatcatcgccgtcgaggatgtcgccgtcgtcgcgcaggtcatcgactactcgtccatgaatcgcgaccatattcctggaacaccgcagctcaaccaccccggcgacatcgctaacaaatacacgcgtggatctcggatcgccatggcgaaagctagggtgaacctgaccgtcgtcgtcggcctgtccctggtggctctcctcgtcctcaccgccgtcgaggatgtcggcgtctccgccgacaatgaaatcggctacacgaccatgaaccacgacgacatccctggaacaccaaagctcctccaccccggcggtcccgcaaacacgtacacgcgtggatgtgagaaagaacaggattgcagggattagcaggatgtcgcgagatgtcatgcatgatcgatcgatcccactgaagcttgcaatcacgttcgattggattaaacttcgtttggtgctctaggggagcttttcaacaatataattcatatagcagtatatttttatttgagttagtaatgacttctatatatctctactatcacaaaaatttaagttgtttttaccgatattttggtacgtcatccgtgtatgagtcggtttttaagtttgtttgcttttggaaatatatatctgtatttgagtcggtttttaaaaaaaaaaaaaaa

SEQ ID NO: 78055 - DNA, 398 bp, Oryza sativa
  Clone ID: PAT_MRT4530_7789C.1
ccgaagggagaaggcgcgcggaccgggtccacgggagcggggcccacgcggcagcctcacggcccacggtggaccgggtgcacgcggctcacgccgaccggcgccgtgggccccaggcgtcagccgcaccccagggcgcgggcggctgacggccgaaccccacgtggcaaccgctcggtgcgccccggggggcggtcattgcggcgcggccggcgggaggccgcgcccgtgccccgatggtcaccgccggcgaccaccggcacggctgaacagcgaccgagagaggggagggaaagggggaaacgaaacgggggtccaccgctcaccccgagtcgaaagcgacgacgaaaactgcggccggagctgagaaagcggcggcccggcctcgggtcgaccgg

SEQ ID NO: 78056 - DNA, 303 bp, Oryza sativa
  unsure (1)..(303): unsure at all n locations
  Clone ID: PAT_MRT4530_778C.1
aacaatngancanctttattcatgtagaacggggatgaccacaaaancaataaancataaacttcttangggncaacccnctngaaantgaggnggtccaacacaggnaanttcagttgggaactncagcacggngggcatggtaggaatnagtntgggngtttaaacaggccccntccacanggtntgganaccaccnttgttgcgatagtggtttcccctntanaaacactttgggccacagggcaaantttttaanctcttccaggaaaggggaaanaaangggttccccccttcttcag

SEQ ID NO: 78057 - DNA, 202 bp, Oryza sativa
  Clone ID: PAT_MRT4530_77900C.1
ccgggctgcaggaatcggcacgaggaaattactctctgctgatcggccatgcccctcctgtttgtggttagcactgttgagatttcacagtgcattggtaaattctccacatgatgcccaggtaatcagggcttttgctgcactaatgtattttggatcatgggagggcgcagtcaacttcttgaatcaagacattggagca

SEQ ID NO: 78058 - DNA, 382 bp, Oryza sativa
  Clone ID: PAT_MRT4530_77901C.1
tgtattttactgccacttaagaagcaaagagttgatcacttgtgtttactgtttacaactgcttgcttcatatctggtgcgtgcacttatccacttgattctatgagaaagcagttacatggtaataggtgtcctttccactctctcgaaggtgatggaggattgggaccatcaaactatcaaagatattcatgtggaacttcctttattacacagtattggcatgataacatattgaagttgacgagcattgcaattctttattatgaaaaatctcttgggagttttcggtattatttctcaatcttatagacctgtttcttgttcttataatctgacggtaagccttcttttcaggtggactttgtgatggatatcatgt

SEQ ID NO: 78059 - DNA, 693 bp, Oryza sativa
  Clone ID: PAT_MRT4530_77903C.1
atggagctcgatatcgcttcggatgatcgccggaaaccgccgccgcagatgcggatggcgattgagagttcattgatccattccagccgagcgctgcagagcacccttcacttggtcgacaatggcggggagctgattctggtgcagcggatgctttggccagaccattatgctcatgacgatggtagctacagaacaaagcgcagcaggaagtacgaggcgtggagggtggatttcgatgccgggatcctcgtcccggtaaagggtttcaactggcgcgccctgttcatcagcatgtcccgcgcgatctccgtgtcggcggagaccttaccatttgtcgctgctgataccatctacttcggatactgtggaaacttagaacggtatagccttgcagatggaagcatcgaacggctttggacttatactctgagaagggtgcagtgcaatatcctacctagagaatggaaacaaccagagatgaaagaaaattggcttcgagtctctctattcaagaaacaaaagaaagatagtcactacaaacatatagccttaaaaaacttacacgcggctaaggttgtcgagcagacatcatcaccgggtctgatgccgattgcctggtggccttctggttcagccacggcgatgtcgcacgggtggacgcccaccaagagagttggcgacgtcgcatga

SEQ ID NO: 78060 - DNA, 318 bp, Oryza sativa
  Clone ID: PAT_MRT4530_77904C.1
atggagttcctcgccggtgggggagcagcaggtgaatcccgtgagagtttctttggttttaaaaatgtgattacaataatgatacttgctgccatgatttctatcactcatgcacgcattgcccttgatgattgtatgcagttgggatatattgtcatcaagcaagaaaatccttggcggttctgcttcctggaagcagtaggaacaacaagagttactgaaccagaaattgaacttgccttcttcatgcatcagatgaaccataaagggaacaacactactaccctctccaaaattgagctgctcaggacttcgtag

SEQ ID NO: 78061 - DNA, 330 bp, Oryza sativa
  Clone ID: PAT_MRT4530_77905C.1
atggatacatcaaggagcagagcccctgaggagatcctgacaatggaaagaactccgttgacatggcaacaagctaaagacaagcaagaatttgcatcatggactgttaaatttgaatccactaaggaggagaacaaccagttcgtgtcagccttctcaactcaaagtgagcttcatggacatgagcgggagcttgccatctggcattcaacaaggcaaccaggagagaagtactactcgagatactgctccagggcagagttcatcagagcagatgcaggctctgttggtgcagcattgcgtgcagtgacattgattgttgcggcctga

SEQ ID NO: 78062 - DNA, 1752 bp, Oryza sativa
  Clone ID: PAT_MRT4530_77906C.1
atggcgacgagggggaagaagctgggcggcgtcgccggcggcggcggcgcggcggtgcgcgtcgtcggcgtcgtctgcgtcatggcggtgccgttgtttgcgctgttggtgctcggcggatgggccagcgcgtccacggtttggcagagcgcggcgaggctgactgctgttactgcaggtaaaatgtttgtgatttgcagtatgagattatttagggatgcaagcggggcgggattcacgaacgcctccaaacccagcgccaccggcgacgcggccaccggcgccgacgagctcttcggcggcttgctggcggccggcggctgcttcgaccgcggcgcgtgcctgagccggcacgagtccccgcgctactacaagagctcgccattctcgccgtccccctacctcctccagaagctccgcgactacgaggcgcggcaccggaggtgcggcccgggcacgccgggctacgccaagtccgacgagcagctccggtccggccacagctcggaggtcatggagtgcaactacctcgtcggactcccctacaatggcctcggcaaccgcatgctctcgctggtcgcctccttcctctacgcgctgctcaccgaccgcgtcttcctcgtccacttccccgacgacttcgccgaccacttctgcgagccgttccccggcggcgaaggcgagacggcgacgacgtgggtgctcccgccggacttccccgtcgccgacctgtggcggctcggggtgcactcgaaccagtcgtacgggaacctcctcgccgccaagaagatcaccggcgacccggcgagggagacgccggtgtccgtgccgccgtacgtgtacctccacctggcgcacgacctccgcggcgacgacgagcggttctactgcaacgacgaccagctcgtgctcgccaaggtgaactggctgctgctgcagagcgacctctacttcgtcccgtcgctgtacgccatcccggagttccaggacgagctccggtggatgttcccggagaaggagagcgtcacccatctccttgcccgctaccttctccacccttccaactccgtgtgggggatggtcatgagataccaccacgcgtacctcgctccggcggcggagatgatcggcgtgcagatcaggatgttctcctgggcgtccatccccgtcgacgacatgtacaagcaggtcatggcgtgttcgtcgcaggagcgcatcctgccggacaccgacggtggcgacgcgccggcgccggccaggacgaacacgtccggcggcggcgcgacgacggccatcctggtcgcgtcgctgcaggtggagtactacgagaggctgaagggcaagtactacgagcacgcggcgacggcgagcggcggcgggcggcggtgggtgggcgtgttccagccgagccacgaggagaagcaggagatggggaagcgggcgcacaaccagaaggcgctcgccgagatctacctgctcagcttcgccgacgtgctgctcaccagcggcatgtcgacgttcgggtacatgagcagcgcgctcgccgggctgcggccggcgatgctgctcacggcgttcaaccacaaggtcccccggacgccgtgcgtgcgcgccgtatccatggagccctgcttccacaagccgccgcccgccgccgcgacatgtcagggcaagctcgccgtcagcgagaacgtgacacgacacatcaagcgctgtgaggatctagccggaggcattaagctttttgattaa

SEQ ID NO: 78063 - DNA, 171 bp, Oryza sativa
  Clone ID: PAT_MRT4530_77907C.1
atggccggaccagtagtggctagggttggtggtgggggtgacaccaacaagtggtttggagacggggatggcgaagatggccagggcagcaaggtcgagcgggcaaagaacggtgccggtgaacgtggtgatgttgccgagataactacgcgtcggacgttcgaggaatag

SEQ ID NO: 78064 - DNA, 294 bp, Oryza sativa
  Clone ID: PAT_MRT4530_77908C.1
gtgctgttcttcttttccccgtgtatttccatttggcacgtggaacattttacttgagttgaagttcacaggaacgtcagcaacattctaaaaagctcattaagtgtggtgtgtggtggagccatgtcacccatgtgcgcatgacttcactcattactagtggtttaagggggtgtttaggagagacttatgttttttgaaatggactaaagtttagttcctaattcccaaacacccctaaattatattaccaaaaaatacacacgtacgcatatacttaatttatcattggtt

SEQ ID NO: 78065 - DNA, 462 bp, Oryza sativa
  Clone ID: PAT_MRT4530_77909C.1
atggagaattcgctttatattaaaaagaaaagagttgaccctttagagaaaaaacagatccaaaaacttcacaactccattgttagtttagagaaaccgaaaaaaatccatatggagaggcaagacaaaaaaacttgcaatagcacaactgctgcgatccaatacaagtcatttttcccgggcttatcacaagacaagcagctccgatatgctattgcgattgacggactcaaccactactcaactccgaagcaagaccttcgaagtgaagccttcaagaaaaaaataacatcaaagacgctgacaacgcctgtttacaacattcgactaggtttttacccaaaggaaaagaaaataaaccatcagcacaacgccaccaagaaggaaaacggctcctacatacgtcaacatcactatcaccagtcaaagaccgggcagggcttacgccataggctcctttaa

SEQ ID NO: 78066 - DNA, 733 bp, Oryza sativa
  Clone ID: PAT_MRT4530_7790C.1
aaaagagagggaaaaagaaaaagaacttgggaggagaacttcggggtgtgacaccggccggcgccgtgggtcccacgcgtcagccgcacctaagggcgcgggcggctgacggccgggccccacgcggcagccactcggcgcgcccgagggcggccaagccggcacagccggcgggaggcggcgcccgcgcccctatggtcgccggcggtggccataggcacggcagagcggcggctgagagagggaaagggaagggggaaaagaagaggcggtccacggctcaccctaggtcgacggcgacgacgaaaaaggcggccggagcggaggaaggcggcggcgcggctcgggtcgacggggtccacggcgttccggcgggcggcgagcgaaatggaggggtggacgaggtcggcgaggatgcggccaacccgaaggaggcggcgccgaggtgggaggtggtccggggcgacgacggcggcggaccggagctcgacggcgactgcagagagagagagcgacggcgcgagctctattccggcgaggagaaagggcggcgagaggcggaaacggacggaagaggtgcggggagggtttaaatatagccgggtccagagagggtggccggggaagggaggaaacctgcgcgggaggtccggctgccatgaatggcgccggcgagatttgcgggggcaaatcccgccgtttgaacgagagagagagagggaaaaatgggggg

SEQ ID NO: 78067 - DNA, 654 bp, Oryza sativa
  Clone ID: PAT_MRT4530_77910C.1
atggcgacggacggagggagaggtgcgcagccggcggtggccagcgggagagggagcggcgaccgccctccgccgcaacccgcctccaccaccgagctcgtcagcgaccgcccaccggagcgaggaggacgacagccggcgacgggtgaagaggacgaaggcagcggtctagagcagaggtcagaggagggcccccagccgccaagatgggcgctcgatccgtcgcgtttcaccaccaccgagctcgtcagcggcagcccaccgaagcgaggagctttcgcttcccttccccccattgacgccaccgttgcagcagctgaggcgccactccccatgccgccgcttctgtggtgcacgccggatgcggacaggaacgccatggccgtggccgcggacgacgtcgacgtcgacctcggcgactcccaggacccccgtgccgccgccgctaccgaggggagcagcgcacggcggacctcgctgctctcgccggtgggcgccggtctcgctgccccctccagctcgccgctctcgccggaagaggagcagagaggggagagagatgaagagagggagatggggagagaggaggaagaagaggaaggggtcgaattgccacgtaagcgccgcgtcaatgccatgtcgaacgaagactga

SEQ ID NO: 78068 - DNA, 1510 bp, Oryza sativa
  Clone ID: PAT_MRT4530_77911C.1
gcacgaggcctcaatcaagtgtctgaaggtgctcgcgggccaccgggcggcagccgccctgctcggtgttcttgcggcgcgcgccgccggcgattggctcgtcgcccccgactcgggggccgccctggtgctcagctccgtgctcgcagggccccaggtgtgcatggagctgctggtgccgctgcttagaggcgcggtggtggcgtgcatggtcatgtcggtgatcgtgctcgcggagaaggtgttcctcggggtggtcagcgcggtggtgaagttgctccgccggcggccggcgaggctgtacaggtgcgatcccgtcgtcgtggaggacgacgatgaggctggccgggcgtccttccccatggttcttgtccagatccccatgtacaacgagaaggaggattcgttcacgggggtaaccttagctccacctgacaaaaacagtgaacaatgcaggctcacatggccggcagatcggttaatagtacaggtcctggacgactccaccgacgccatcgtcaaggagctggtgaggaaggagtgcgagaggtgggggaagaaggggatcaacgtcaagtacgagacgcgcaaggacagggccgggtacaaggccggcaacctcagggaagggatgcggcgtggctacgtgcaggggtgcgagttcgtggccatgctcgacgccgacttccagccgccgccggacttcctcctcaagacggtgccgttcctcgtccacaacccacgcctcgcgctcgtgcagacgcgatgggagttcgtgaatgctaacgactgcttgctgacgagaatgcaagagatgtcaatggactaccatttcaaggttgagcaagaggccggctcctcgctctgcaacttctttggctacaatggaactgctggagtgtggagaaggcaagtgattgatgaatccggtggttgggaggaccgaactacggcagaagatatggatctggcactgagagcaggactgctgggctgggaatttgtctatgttggtagcattaaggttaagagtgagctgccgagtactttgaaagcctatcggtcccaacaacatcgctggtcatgtggacctgcactcttgttcaagaaaatgttctgggaaattctggctgccaagaaagtctcgttctggaaaaagttatacatgacatatgacttcttcatcgcacggaggatcatatcgacgttcttcacctttttctttttcagcgtactgcttcctatgaaagttttctttccagaggtgcagattcctttgtgggagctgatcctcatacctacagctatcattctactccattcagttgggactccaagctactatgatcaaaaggatggtacatctcatgaactccatgtgcttcagagttaccaagaattgccgtttcaaagacaggaaagctcaacgctgcggcaattgagggcttcaacaaattgcgataagcatatgggagataagaacacattgagcaagaagaaaatcatctag

SEQ ID NO: 78069 - DNA, 873 bp, Oryza sativa
  Clone ID: PAT_MRT4530_77912C.1
ctagccaacgtccgtctgcgaaaataatcttcgcaggcggacggccgccccgcctgcgaagacccttttcgaccgcttgcgataatgcttttcatgtcttatcaaatgccatatcaactccaccaccaagctcgtcagcgactgcccaccggagtgagcaggacgacagccggcgacgggtgaagaggatgaaggcggcggtatggagcagaggtcggaggagggcccccagccgctaggatggcgctcgatccgtcgcgtttcaccaccaccgagctcgtcagctgcagcccaccggagcgaggagcgaggagcttccgcttccccttcctcccattgacgccgcagccgcagcaactgaggcgccgctccccatgccgccgcttctgtggtggcacgcccgcatctcatcaatctttggacctgcacaggagctaagcagatctcccaggccagtatgttcgattttttcgtcaacagtggcgcacgccggatgcggacggggacgccatggccgtggccgcggacgacgtcgacgtcgacctcggcatcctcggcaactcccaggggccccgcgccgccaccactaccgggaggaatagcgcacggcggacgtcctcctcctccggctgccaccgccacgcctccccgcatggctgcatctcctcctcctccttcggcggccatcgctgcacgccgccccttctccccgccggccaccgcccttctcccggccgccactgccggatctcgattgccggcgctgctctggggggagctgtgttaacaaccaaatttggtaatatcagcatcggaaaggaagatcagatcgaagcggaatcgaagatgaggattatcgctgaaacagagtaa

SEQ ID NO: 78070 - DNA, 1459 bp, Oryza sativa
  Clone ID: PAT_MRT4530_77913C.1
gtgtaaggttttcgccggtttcactttaacaaaccgtgcagttgtatggttatgtataaaacctttgctatagtggaaagattctctcctccagaggacaagaaacagctacagtcgttgattggcaaggttaattttgttagaaggtttatatctaatttgtctggaaggttagagccttttacacctttactcagattgaaagccgatcaagaattcacttggggggcagaacaacagagggctttggataatattaaggaatatttaagttcccctccagttttaatcctccacagaaaggagtgcctttcaggttgtatttatcagccgatgagaagtcaatcggctcggtttactctaggagttggaaggcaaggagagagctattttctattttagtcacaggctcttggatgcagaaacaaggtattctccggtggagaagttgtgtttatgtttatatttttcttgcacaaagttaaggcattatttgttatccaacgagtgcactatagtgtgcagccgatgtagtcaaatatatgttatcggctccagttttgaaagggatagttgggaagtggatatatgctttgacagaatttgatcttagatatgaatcacctaaagcagtcaaggggcaggccatagccgattttattgttgaacatcgagatgattcaatcggctcggttgagttagtgccttggacatcattttttgatggatcagtttgcactcatggttgtggcatcggcttggttataatatcacctaggggagcaagttttgagtttgcttatactattaaaccctatgcaactaataatcaggctgagtatgaagcagttctcaaggggttgcaattattgagggaagttgaagccgatactattgaaataatgggtgattcattgttggtgatcaatcagttggtaggggagtatgaatgcaaaaatgatgtgctactgatatacaatgaaaagtgccaagaattaatgaatagtttttggttggtaactttgaggcatgtctctcgggagcagaatgttgaagctaatgatttggctcagggggcgttagggtacaagccgatggtacaagatattgaagttgaaattgttgccattacaaccgatgattgaagatatgatgtgtgtcgacgtttgagatcgccgcggaacgggagcacccagtcaccgaagttgggccatgcatcgctcgccgtgtcgaaggagaacatgctatgccgctccgtggacacccaaatttgggagtcaccgaccaccgcgtgcgcggcgatgcggcgggcctgtcgtctctggggttgtgcaccgatcggcagtggctctggtgacgccgcctccatgacgtagaggccgtcgccgacggtgaaggcgatggggctccgcttgggcgcgtgtatgcccgggaggatgtggacagcgtgggcacgcat

SEQ ID NO: 78071 - DNA, 1618 bp, Oryza sativa
  Clone ID: PAT_MRT4530_77914C.1
atggcggccgggagaagggcggtggccggcggggagaaggggcggcgtgcagcgatggccgccggaggaggaggagatgcagccatgcggggaggcgtggcggtggcagccggaggaggaggacgtccgccgtgcgctgctccccccggtagtggcggcggcgcgggggccctgggagtcgccgaggatgccgaggtcgacgtcgacgtcgtccgcggccacggccatggcgtccccgtccgcatccggcgtgcgccacagaagcggtggcatggggagcggcgcctcagctgctgcggcggcggcgtcaatggggggaaggggaagcggaagctcctcgctccggtgggctgccgctgacgagctcggtggtggtgaaacgcgacggatcgagcgccatcctggcggctgggggccctcctccgacctctgctccagaccgccgccttcgtcctcttcacccgtcgccggctgtcgtcctcctcgctccggtgggcggtcgctgacaagctcggtggtgatcgagatttggggtgacattgggggcgagcttggtgcggcggaggggttggtcgaggcggccgagtgctcgtcggggggcgagctggcgggctcagtggagccggtggagggcgcagtggctggccccgtggagggcggtgcggtggctggccccgtggaggcgagcgcggtggctagctctgcggagccgcataagctcgtagcggcgggtgcaggagagagatgcagcgttggacatgccattggtattgaagccatggacgtgctagatactcttgtggtgaggtttcatataaaaggtgaatttgtgacagaagatgatgatagtgagtccgatgctgatatggaagtggaaagtgataaggaaagtgaagaggctgtagaggtagatgttgctcaatgtaaagctacagctgctcaatgtgatcaaactaatgctagtgggctgaagggtaaaagtgtgatggaaggtgatgaagatgataggatgcttgttgtatattaccctgagtctgctcccctggctagcttggcaccttcagagagtgaatctgacagtgactacatacctggtgatgtttgtccatctgatgatgatgaagaggctgctgaaatagagaagcattacaaagaagtgaagaagaagattaagactggacagttagaagacctagatgctgttttctttgagcaagacaggtccaagccaattgaagaacttggcagtgatggggaggttaggataaggcaggacaaacatccaagatataagaagaaggatggagttcccacatttgaacttggcatgaagttcaattgcaagaatcagttcaagaaggccatcacaaaatatgcattagctgagaagaaggtgatcaattttataaaagatgatcagaaaagggtcaggggcaagtgtgactgggatacctgtcaatgggtctgtttgctatcaaagaactccaggtctgacagttggcaaattgtgacatatgagagcttgcatgcttgcccaccaaggagggataacaagatggtgacagccacaaggattgctcagaagtattggaagttcatagctgccaacccatcctag

SEQ ID NO: 78072 - DNA, 1110 bp, Oryza sativa
  Clone ID: PAT_MRT4530_77915C.1
ggcaataagacagatattgttatcagcaagtatgagggtagctttatggttagttacaccttgcaagtgttatttattcgattggatgacaagttttcacatataaaatatgctcacctaatcataaaatctacagtactatcgaaatttgaaacctttagctctcagctttttgctgatgtttctgaaagaacagtgagaatccatccacaattccgcatacatatgttggtgcgtttatcccctagttgcaaaaaggctaggaaactgttgagcatagatttcggagtgcatgtcaggaaagatgaaagtgttttttctgatccaacctacaatgttctttttggaaagagggatgagccgttactactagcttgtgcacgccaacttatcgaacacataaggcggcgtcggtgtcttggacgctttcaaggtccatcggctctactttggcaccacgactgttcacaagagctgtcccagcttacactggctttgcaagatgtttccctctcgggggaagaggacctcagattatcgccgctttcacaacaaggtgatctcactacgagggagatttaccataccctattgccaccgtcagaaacagatctagttcacaacttcatctggaagaatgcctcacctccaaagtttaaattctttgcatggttgctctcaaaggaccgattgtcaactgccaaaaacctatttaccaaaataatcctccaatcacctcaatgtgcaatccgccagacaggggaagaaacgtcaaatcatctcttcttcatgtgcccctttgcaacagctttttggacgacaatcagagttccgcctaatgtgaccgaagtgagcaacatccatctcttagcccggccacctaacattccatcaaaacacttcaagaccttctatctactctgcttttggggtctctggaatcgcagacatgatgtcgtcttccgtgacttccaaccgtcagtccaacggttgatcctacgctgcaaggaagaatcattgctatgggcagagcgtcttaaagttaacgacagattagaggctaatgtttggtgtaatattttttcaaatagcctgtcttctctacaccca

SEQ ID NO: 78073 - DNA, 492 bp, Oryza sativa
  Clone ID: PAT_MRT4530_77916C.1
cgacgcgtgggctgagcagtttctgatgaggctaaattacaactctttcttcgagaccactgctaggggggtgatgaattctgcaggcggtaggctacggccaagcactgcaggtacccagctgtaaccatcatcgttctaagaagcgccttttctttctggtttgtgattttacacgaagggggagaatttgtagctgatgtaaatcatgacactagcatcttaatggaagtttgccctgtaaagtgagtgctagattatggttgcttttgtgctgatggtgtgtgattgtgctagcttgtctacatttctcgctttgtcatcccccggcgcctgcctgctcccccgttgagcgttggattaagccattggacgccatcagatcgtgtccttgggtaaattatgggtgttaacctgggttaactacattaaccagatgtagatcagcttgtcaacgaagtagagcacattaaggccaaaaaaaaaaaaaaa

SEQ ID NO: 78074 - DNA, 430 bp, Oryza sativa
  Clone ID: PAT_MRT4530_77917C.1
gaaagcacattatggtattttttttttttattgtttaacattgataacttttgctttgtttgtgttttcagcagaagggaaaggaaactaccgaggatacttattcaacagtttcggaacttttatgactgaccatggttaatggggtcaaccaatctttccaccttacgtttttggttacccatttttttttaaccccagcatacttcccaagagcacaacacctgcttacaagcgaaatgcctaactaacccggcgggctgctttacaaaaaaaccaaacaaactccttaacaggataaaattccgcggtaggaaaacaaagtattgaagtgttcccagaggtcccatccaactaaacaaacactcaataattttgcctcaacggatcctttggccaggggagaagatatcaaagtgtaccttcctta

SEQ ID NO: 78075 - DNA, 440 bp, Oryza sativa
  Clone ID: PAT_MRT4530_77918C.1
ttgtgtgtttttttttttttgggtttttttttttttttttttttttttttttttttttttttttttttttttttttggaacaaaaaaagggggaaaattttttttgggaaccccattaagggggacccccaggaatggcggcccagagaatcccaaggttggtccctaaagaccgggggaccgggccctggttttttggaagggcaacccggggccctggtagcttggcgggggacctttaaaagggggacctcccaaaacaaccgaacaaaatagggtccccctggcccgaaaatgggccgacataaaacgggccctactagaaaagggggggacacatacttagcccccccctttttttaccaccccacaattttttttttaccccctgaaaaccccctgggggcccgggccattggtccatttggggggtggggggg

SEQ ID NO: 78076 - DNA, 186 bp, Oryza sativa
  Clone ID: PAT_MRT4530_77919C.1
atggcgacagcgtcgtcagaggggaggcggagcggcgcgcggcgcgcggggcgcgagggcaacgcggcaaaggaggggctagggctagggaacctcgtcgaacactttaggatcggttcccagctgggtgtggcttgtagatggttccgacctaaccccatatttgccatcggcatccacttttag

SEQ ID NO: 78077 - DNA, 630 bp, Oryza sativa
  Clone ID: PAT_MRT4530_7791C.1
atggagcgcaggaccaggaaccgggtaatccgtttttgcaagctcgcgacgtcgctctctctctccgccatcgccgccgagctccggtccgccgccgtcgtcgccccggaccgcctcccacctcggcgccgcctccttcgggttcgccgcatcctcgccgacctcgtccacctctccgtttcggtcgccgaccgccggagcgccgccgaccccgtcgacccgagccgcgacaccgcctccctccgcttcggccgcctccctcatcgccgccgtcgccccgaggtgagccgtggaccgtcgcctcctttcccccttccctcccctctctcggccgccgctccgccgcgccggtggtcgccggcggcgaccatcggggcgcggggcgccgcctcccgccgtccgcgccggcttggccgcccttgggtgcgccgagtggctgccgcgtggggcccggccgtcagccgcccgcgccctcgggtgcggctgacgtgtggggcccacggcgccgatcggtgtgagcccgggtgcacccggtccaccgtggaccgtgaggctgccgcgtgggccccactcccgtggacccggtccgcatgcccctccccctcggctgacgcaataaaccatttttaa

SEQ ID NO: 78078 - DNA, 294 bp, Oryza sativa
  Clone ID: PAT_MRT4530_77920C.1
atgggcggatgcagctccaagtccaagaaagctaagaaccaaaagggcaacagcaatgcggaagccaaggcgacgaccaccaccgcagggcagcagccgccggcggcagcatccacctgcgggatgtcagccagagccagccgacggacgaacaacgactcggatccacgccgccagagcccgccgtttactgttgaagcaacggatcttccgcctccaccgcccaccgtcgtcggcggcacaggatccgccgcccctacctcccgtagtcattgtcgcctcgtcagtgcctga

SEQ ID NO: 78079 - DNA, 367 bp, Oryza sativa
  unsure (1)..(367): unsure at all n locations
  Clone ID: PAT_MRT4530_77921C.1
tacaaaatgcaaattttatgcgtggcttccgcgagagtcggctctgataccattttgtaacatcccgccttcccccaggccgagcccacttacatctgatagctttcatagaaaaataaactgccctcacagaccaacacatgtcttttctgtacactttgtcctcactcgtgtacacccaccgggaaagattttcccggtcggtcacccatcccaaattgctccaagccaagtacgcttaactttggagtctttgnagattggcttccgaaaaagaagttgcaacttgttgatatgagtattctattaatcctattaagccttagggcggggatattacagacagcgtaatcaagatcgttcatat

SEQ ID NO: 78080 - DNA, 528 bp, Oryza sativa
  unsure (1)..(528): unsure at all n locations
  Clone ID: PAT_MRT4530_77922C.1
gcgattgggtccctcgaggccggccgggctctcctctattgccgccgccgccgctcccagctcgtgctcccctcgccgccgccgccgccgcctcgcctcctcggagatcttcgctgcccttccgccaacatggggaagacacgtggtatgggagctgggcgcaagctcaagacccaccgcagaaccagagatgggcagacaaggcctacaagaagagccacttgggtaatgagtggaagaaaccctttgctgggtcatctcatgccaagggcatcgttctggagaagatttggtattgaggccaagcagcccaactctgccatccgtaagtgtgctcgtgtgcagcttgtgaagaatggggaagaagattgcttgcctttgtgcccaatgacggttgcctgaacttcaattgagggaaaatgatgaggtngttgaatttcctggattttagtcgtaaggggccatgcttgtgggagatatttcctagggtcccgatttaangggtngnaaaggtctttanagntgtcn

SEQ ID NO: 78081 - DNA, 1352 bp, Oryza sativa
  Clone ID: PAT_MRT4530_77923C.1
ccggccgggctcgcctctattgccgccgccgccgctcccagctcgcgctcccctcgccgccgccgccgccgcctcgcctcctcggagatcttcgctgcccttccgtcaacatggggaagacacgtggtatgggagctgggcgcaagctcaagacccaccgcaggaaccagagatgggcagacaaggcctacaagaagagccacttgggtaatgagtggaagaaaccctttgctgggtcatctcatgccaagggcatcgttctggagaagattggtattgaggccaagcagcccaactctgccatccgtaagtgtgctcgtgtgcagcttgtgaagaatgggaagaagattgctgcctttgtgcccaatgacggttgcctgaacttcattgaggaaaatgacgagaagatgattgctggatttggtcgtaagggccatgctgtgggagatattcctggtgtccggttcaaggtcgccaaggtctctggtgtgcctctgcttgctctcttcaaggagaagaaggagaagccgaggtcttagattactggtacatcttggttggcaagcatggaatagacagaatgaaaggctttagatgctcaagaatgaaggctttagatgctcaagaagatggttccttgctatgtttaaagtgcgctctttatattgttaacttaagattgtgttggtaaaaaccatgccttgtcagatttttgcttctgttaaggggaaagtactgtgctgagctattttctccgataaaaaaaaacaaaagatatgtatacaacgtcgatgactccagctcgtttcgttcataagttgaatattcgctcctgtaggccatctcaggccaagggcatctgatctggagaagattggtattgaggccaagcagcccaactctgccatccgtaagtgtgctcgtgtccagcttgtgaagaatgggaagaagattgctcacctttgtgcgccaagtgacgattgcctgaacttcattgaggaaaatgatgaggtgttgattgctggaatttgggccgtaaagggccatgctgtgggagatattcctggtgtccgattcaaggtcgtcaaggtctctggtgtgtctctccttgctctcttcaaggagaagaaggagaagcccaggtcttagattactggtacatcttggttggcaagcatggaatagacagaatgaaggctttagatgctcaagaagatggttccttgctatgtttaaagtgcactctctatattgttaacttaagattgtgttggtaaaaaccatgccttgtcatcagattttgcttctgtcgagggaaagtactatgctgagtttttatcttaaaaaccaaa

SEQ ID NO: 78082 - DNA, 321 bp, Oryza sativa
  Clone ID: PAT_MRT4530_77924C.1
atggagctacgcaagaggcgggcgtcgacaagcgggagaaggagggatagcggcatggactgcgtgtgcgcctgtgcagtgacctgggtggatactatgtcaagttggagctctgcaagtcggcgctctgcgacggcgacggcaacagggacacatcgtcgttgtcaccgtgctgcgcggcacgagaaagatggtggcactgacgggcggtaccgcggcgcgcgggaggtgctccaggcggcgcagtgctccccccgtgagaacgagcggtttagcatcatggccatcgtcgcgcaccgtcaccgccctgggcttctctag

SEQ ID NO: 78083 - DNA, 276 bp, Oryza sativa
  Clone ID: PAT_MRT4530_77925C.1
atggggattgggaacaagaaggatctactattgacatggcttcatcgaacaactagagaaccccacaccggaattgctgccgccattaaggagaacgagggcctcgccaccacgtcgctggagcacttccgccacttggcaccaggggcgccggataggatggcgggcaccttgcacttccccttcaccgccatggggagggaattgggaaagcgagtgaattgggaggagtggagaatggagatggagaagagagagaggagagggccacgctag

SEQ ID NO: 78084 - DNA, 562 bp, Oryza sativa
  Clone ID: PAT_MRT4530_77926C.1
gcacgagggagagagagactagtctcgagttttttttttttttttttttgaaggcaatgacatgtgggcttattgtcagctagcacaaatcttagtagaattacacatgaaggcaaaatattgcctgtccttcacaaatagaacagtaatatatgcacatcactataaataacaaaatggagatatcgatatgcatggaacaaatccacatgaagggcataaacacatctgtgagctgatcacacgccgtagataaaatccccaggcgtccaggagttgcttttaatcacttctggatttaacaagcttggcggagcctcatgcttcttctgacaagagtatgtcatcgatgtatatctcaggaacatggcagatgagatggtaatcctctccagatacgtctccacatcttgtgcttaatgcagggcagttgtagatcctaacttccctgagtgaactgaattctgcaatgcagcttggcaacttctccaacccttcgcacgcatcaatatgaacataccgaagagaggatgcagcagatttaaagctctcaggaaaaccc

SEQ ID NO: 78085 - DNA, 849 bp, Oryza sativa
  Clone ID: PAT_MRT4530_77927C.1
ctactggaaagagcacatgtaattattgagcaccacttgattgaacagttcttgccttggctcccctactgtttgcatgatgtagctgccattgtcctgggagagagagttgttgttgctgcctccctggacttgaagtgtgtagggtgtaggagaggtgtttgatgtgtccatgatggcatgagattgagctgggctactacctctgttcaggacagaagctggtattgcaactgcctcatggaacattccttccatcttctgagagtggtcactgaaagcatcactgtctatgccaaacccatacagcacagggctcagagatgcaatcctcatggaaaggaactcaacttggttctgtaaggactgcacatagttgatgatctcatccaaaatgagagcctttccagtgaccttgtcacaaccagggaccagagcctgcagcatcctcatcctctcactgatcctttctctcctcaccctctctgcaaggctgtggctatctgttgcttgccctctccttgccctgacatggatgaacccctgaggtgcctcctcctccatctgatccctgctgtgtttcttccctcccctcttcctgccattctcctttgcctccttggagtgagcagagttgaggctggcagtgtcttcttccctgggcttcctcttcttgtcctgtggagaggtgtcaagaaccacagatgaggtctccattgaggcatcttcagggatggctggagctgtggtggttgctgctcctccatggctgccatggcagaagaggaagccattgttggtgatgaggccatgctccatctgctgtgggaggtgtgagaagcctgccat

SEQ ID NO: 78086 - DNA, 363 bp, Oryza sativa
  unsure (1)..(363): unsure at all n locations
  Clone ID: PAT_MRT4530_77928C.1
atttnttggctcnactccccggcnactccagctncggcaacgtcagcatatagcagcaggatcacgtncatgcangtttnggccaatgaaggcntcnagaaattcaaaaccncctctaacctnccaccctcaccgttggaagaaccccctgaaacnaaatcaattacctccncccntccaanttgggtgccctgccncnanttcaccaaggtcggantttgtctaccgtgaaaaccncanggtccccgantactacaaaaggcnggtnctggaacatnttgaaacntgcccnttttcggannccnccaaccccccccangttctcnnggaactccaaggaagccnanaaaggggttnccctta

SEQ ID NO: 78087 - DNA, 267 bp, Oryza sativa
  Clone ID: PAT_MRT4530_77929C.1
atgcattatggtgattgtgaaatgcgattgcagcgcatcgatatcagagtccatgtccaagacgacgacgtgaacatgttcggagggtggggcaacagtggacggatcacggatgtaggagcaagagggcctgaaaagggtgaagcaggggccaggggcttcctctctccattgcccgtttcgtccaatccagatagtaatctcagcatggtccagccggatgaacacctgggaccttgctcgagagtagttgagcgactagggtag

SEQ ID NO: 78088 - DNA, 5748 bp, Oryza sativa
  Clone ID: PAT_MRT4530_7792C.1
atgtcgtactacgtagatcctaataccagcgtaccccaataccctctatatccggtctacgggtatcccccgtcgacagtggcgcgccaggtaggggaacttggtattcaaggttctactactatgccatcaagcttcgtcgacaacaacgccaacaccagcttcggtcaagttctttcgactttaataatgctggtatggactcaagtcggcgaaatcgtctacccggtttacaccacaatgccgatctcaaccggtcccccaatgactgggaacgagaacgcggtggctacgaaccaagacacctcctcgtcgaaaaatccacccgttgaaacggagaacggattaccgactacatccaaattcgtgaaggattctgatgcggccaggccttgtccctccgacacaaatcgcgggccaacaaagatgacttccaaaactaccaggtcttggtgtcctatccataaaaccaagaagcatactcttcaagattgctgggtattcgtcaacgttcgtgctgaaatccgcgcctgcaaagaacgtgggattcagcgtacttctccaactcgggacgtctattgtcctatccataagacaaaaaatcacgacctctcgagttgcaaagttctactcggcgccatgaaaactccgtctcctaagtcatacgtccccgtcaaggataacggcaaggaacaaggagcgactccggccccagatcgattcgttggggtaatcgatctcaatccctacgaaccatctgttttacatctcctcgaggactatgggtcatcgacatcagacgcggcacgggcggtgttggctatcgatgacgttggcacgtcagcacaagccaacgcggagacggcgaatcaatcgactaccccagcccaacatatcagggctgttcaagccatactaagggaaacaccttacgatcccgttctgaacaacgacctcgagcaacggagggaatcacctcaacaagctacccctccacctcgtggcactggcgatcttcgagatcaaatcaatggtcgtcgagaagcacggcgcacacgggatgacgtgaaccgctcccggcgtcatgtctcctcacgacgccatgatagaagaagtcgcccaaacgaggaccgagactacgacaatcgcgaccggcgggggtcagacaacactggtcatggccgtcgccgtaatgacgaagatgaagaagatcggcgtcgagacaacagcgagagacgaagacaagattcccgagatccaggtcgtcaccctcgtaatcgtacgccggaacaaagcgacccatcgtcatcatcatcatcatcatccgcgtcctcttcatcgtcagaccgacatccacgaagatcacgcgaccaccgacaacccaccgctccaagcgctgggtgtagggctttcggtcgttccctaagtgatgtccgatggtctaagagattccgacccggagctattgaaaagtatgatgggagcaccgacccagaagaattccttcaagtctactcgacagtgctttatgccgctggagcagatgacaacctgtggcagcagtttgtcgccaatttccaaggaacatacaagcgccacgcgatcgaagacgatcttcacgcgttaacacagaactcaggtgaatatttgagggaatacgttcggcactttaacgagtgcaggaacaccatccgcgagatcaccgacgcttctgtaattcgcgccttcaagtctgatgtcagagatcgctacactacccaggagttggcaacaaggcgcatcacaactactcgaagattattcgaaatcgttgaaagatgtgcccacgtggatgatgcactaagacgcaagaacgacaagccgaagactgggggagagaagaagtcagccgcagacacatctgagtcgaacaagaacaaaaatcgcaaaaacgggaaaagaaaagctcaagcagaagtcctcgcaacagaatacgcgaaccctcccaagtgcccggacccacaaggcagcgacacaaagaaatcatggtgccccatacacaaaacagatagacattctctggaggattgccttgttttcaaaaagtcgctcgagaagcacatggcgtttgaaaaaggcaagcgagtacgcgttgtcgagaaggacgaggagtcacctcgtcacgaatcggactccgcgtacccagactccgacctctatgtttcacacatcttcggcagctccacgacgtactcctccaagcgagaatacaagaaagtggaacgcgaagtttgttcgacgtggcagggggctgcacccaggatgaagtggtctgagcagaagatggagttctcggaagcagaccatcccaagacctcggttatcccgggacggtatccgatcgtggttgaacccactattcggaacatcaaggtagcacgagttctcatcaacgggggcagctcgatcaacctcgtttttaccagcactctggatgcaatgggaattccacaaacttacaacgccatcatcgggagaactgcacttgcaaagtttatggccacatcccactatgcatatcaagtgctcaagatgccgggaccaaagggaacaatcactattcaagggaacgcaaaactggcggtgcagtgcgacaagcggagcctcgacatggtcgagcaaacgcccactccacccgccacgtccgagccacccaagaaagaactcgcgctcatcaccttcctccgcgataatgccgacgtgttcgcttggcaaccgtccgacatgccgggggtccccagggaggtgattgagcacaaactaatggtgcgacccgatgccaagccagtaaagcaaagaatgcggagatttgcaccagatcgaaaacaagccatacgagaagagctcgataaacttctcaaagctggcttcatcagagaagtactccatccagagtggcttgccaacccagttgtggtgcggaaagccaatggaaaatggagaatgtgcgtcgacttcacagacctcaacaaggcgtgccccaaggatcattttcctctccctcgaatagaccaactggtggattcaacagccggatgcgaactattgagcttcctcgacgcttactctggctaccaccaaatcagcatgacgacggagtacgaggaaaaaacagcgttcatcacaccgttcggggtattttgctacgtcaagatgcccttcggattgataacagctaggaatactttccaacgcatggtccagggcgcacttagcaatcagcttggtaacaatgtcgaagtgtacgtcgacgacatcattgtcaaaaccaagacaagcgactcattgattgatgatctccgggaaacgttcgacaacctccgacgatatcgtctcatgctcaatccagagaagtgcacgttcggagtaccgtcgggcaaactactcggattccttgtttctggcagaggaatagaggcaaatcccgaaaagatcaaagcaatcgagaacatgaagtcgcccacaagactcaaggaggtacagaagctaaccggatgcatggcagcattaaacatattcgtcgctaggatgggagaacgaggacagccttttttcgccttgttgaagaaacaagacagatttgtatggacacaggaagctgaagaggcatttattgcactcaagcgctacctatcaaacccccctgtactcgttgctccccaacctaatgaagaattattcctttatattgccgctacgccatactccgttagcactgtcattgtcgtcgagcgagagaaagtacagcgaccagtatattacgtcagcgaagctctccatgaagcaaagacaagatacccacagattcaaaaactgctctacgtagtcatcatgacatcaaggaagctacgccactactttcaagcccacagagtcacaattgtttcctccttccctcttggcgaagttgtgagaaacaaagacgttgtcggccgcatcgcgaaatgggtagtcgagctaagccaatttgatgtccgcttcgtgccgcgaacagccattaaatctcaggtactcgctgacttcgtggccgattggaccatgccagataacaaggcaactaataacacggcagaatacgaaggactactcgccgggatacgagctgcagccgcacttggggccaagcgactaatcgtcaaaggggactctgagctagtcgcaaaccaggtgcacaaagactataaatgctctaacccggagttatccaagtaccttgcagaagtcaggaagctcgagaagaggttcgacgggatcgaggtccgacacgtctatcgcaaggacaacgtcgagccagacgacctagcgcgacgcgcatccagacgagaaccgctcgaacccggcacctttctcgacatcctgacgaaaccatcggtaaaagaagttagcggcgaagttggcccgagcacccccgacatcagctcgaaggtcaccgaggcagaacgcgccgtggctgacattgaaaccacggatgactggcacaccccattaatcaaattcatcagcagcgaggagttacccgaagacgatacagaggccgagaaaataacccgtaaagcaaaaatttactgtatgatcggcaacgatctatacaaaaaagcgccaaacgggatacttctcaaatgcgtctctaccgatgacggcagacaactcctcctcgacatacacgaaggcatatgcgggtcacacgccgccggtcggacattggtcggcaaagcctttcgacaagagtttttctggccaacagcccttaaagatgcatgcgacatggtccaacgatgtgaaacctgtcaattccacagcaagcacacaaagctacctgcacaagcgcttcaaacaatccctctgacttggccgttctcttgctgggggctagacatacttgggccattcccacgaggacaaggcggctacaaattcctatttgtagcgatcgacaagttcaccaaatggatcgaagcagcacccactggagaaatcaaggccgacaacgccatcaagttcatcagagggatattttgtagatacggtctaccgcaccgcatcataaccgacaacggctctcaattcatcagcgccgatttccaagattactgcatcggcttaggagtcaaaatatgcttcgcctcggtctctcaccctcaaagcaatggacaagtcgaaagggcaaatggcatagtactacaagggataaaaaaccgcgtctacgacagactcatgtcacacgacaaaaaatgggttgaagaactcccatcagtgctatgggccatgcgcactacaccgacaacgtccaataagggaacacccttcttcctcgtgtacggctctgaagccatgctccccggtgagctacgacatcaaagtacacgagtacagaaacattccgacgagaaccgggaggaacagcgagacatcgatgtaaaccttctcgaggagcatcgtgagcgagttgccgttcgagcagcaagctaccaacaggccctccgccgttatcacgagaagcgcatccgagcatgcatactttcgatcggcgactatgtcctccgacgagttcaaacccaagcagggcgaaacaaactctcaccaaaatgggaaggaccctacacgatcacacaagccttgcgcccaggcgcatacaagatcgcagacgacgacggtcgcgaattagcaaattcatggaacattgaccaactacgtaaattctatgtatga

SEQ ID NO: 78089 - DNA, 968 bp, Oryza sativa
  unsure (1)..(968): unsure at all n locations
  Clone ID: PAT_MRT4530_77930C.1
ctagcttagctcagcttgtcgttgatcttgcactactctttgnaaccatggctatcgaccttggttgtcacgtcggctgtgcatcgccagagacgaaacaggaggagacggcggatcccacggcggcccccgtcgtcgtcgacgacgtcgaggcggcggctggtgggcgccggccgggcgacggcggcggcgtgaactacgtggcccgcgcccagtggctccgcgccgcggtgctcggcgccaacgacggcctcgtctccgtggcgtccctcatggtcggcgtcggcgccgccaacggcaccaggagggcgatgctcgtgtcgggcctcgccggcctcgtggccggcgcgtgcagcatggccatcggcgagttcgtgtccgtgtacgcgcagtgcgacatccaggcggcccagatcgagcgcgcgcgcggcggcaaggacgccgacggcggcgaggaggaggaggagctgccgagcccaacgatggcggcggtcgcctcggcgctgtcgttcgcggcgggcgccgcgctgccgctgctggccggcgggttcgttcggccgtgggcggccagggtcgcggccgtgtgcgcggcgagcagcctcggcctcgccggcttcggcgtggcgagcgcgtacctcggcggcgcgggcgtcgcgcgctccggcgtccggatgctcgtgggagggtggctcgccatggcggtcacgtacggggtgcttaagctgttcgggatgcatggtgtttaacgggcaagtctttatattttcnccacgtaaataattaaaccaaagggattattaccaagatactccctctgtattcaattacttgtcattggataatactctctctgttttttaatgacgtcggtttagttcaatgtatttaacgatggatgtagtattcattttcaaattgactcttattcgaagaaaatgtataaataaaaaaaaaaaaaaaaaaaaaaa

SEQ ID NO: 78090 - DNA, 1965 bp, Oryza sativa
  unsure (1)..(1965): unsure at all n locations
  Clone ID: PAT_MRT4530_77931C.1
tttttttttttttcttttttaaaaattttaattaacattttatattactgtagttgcgtctaaaagaattactgtacatcaaccttcaaaattactgtattttgaacaaacggcaatatttcggatgcacaactgctctggccataggaaggaaatggctcatctcagtaggtcaacatttcacttagaagcggaatttcgcacgcctttacaacaatttcactatggatactacaagcgcatacaaaattgacttgcatcatggcctaactctaccggtaagttcatctcagaaagaagtcacaagtcctacacctaggtcctctgcaagttcatcccagagtggaatgagagtcaatacaacaagaaacactgaaactatcaatgctgctctcctccacgttccgacatcgctcacatcattcaagcagggcttttcaggtgttctctgacatattagcacgtataagccccaaggaagagatagtggccccccaagcaccccgagtccaagcaatgagtatgttgtcaagccaaatccaaacaacgcatccttgccgaaagcaccctgtaaagctcttccaccatcaagacatccaacaggaagcatattaaaggcagtagtcgttaaaccacaccagcctgcaatcacaagagggtggatagcaactgtagcagcatgcatagctctgtagccaagtgttgctctgctaacaagtccgagcaacaaggaaccctggaatagcttgctaggtacttcaactaaatcactggactaaaacttttgagacatataactgagtaattgcgccaaaagttcctagagtgaagttcggaatgaagaaaggaatgcttagtttaaccttctttggaaatgctgccaaaaagtgaccaacttcatgaaatagttggatagccaagacaccataagccaccggcaaagctgattccacaaatggaagtaagagttgcatatcaggtgggggtccagtagcatttggatcagtgaaatatgtaacaatctctggtggaagactgctaatctttgatgcaattcctagctcaacacaagagaacacagttagaaggaaaagtaacagtgaaatgacatattgccacaatgtagtaggtccaggttctgaaacttctcttctgagcaaaccaaaactaacacgtggtcctccacgtgggtcttccccttctgaattgggctcctccaccataaaaagattgtatttgtcacctgtgagttcacgtaactgctgttgaagttttgcaaatatttcttctctcttccctcggaggttcccaataaaaaggaccccttccccaagatcaccaaaaggttcttctcttgtcaaccagaatgttgtgtagccgaaaagtttttccttaatagccttgacatcagctgaatcaactttttcgggccctaggagttccaataactttactgtgtcgatgttatcaacactgaagctcaaaaatggtggctcattggatataccgggtgtcttcgcctccgccgccgccgccgcctcctcctcgccccgcttctccccgtcctncccgcccgttcctccgccgccacccccgcccccaccccctcccccgtcgatggagaagcaccgcagccggtcctcgcaccgcctcagggccctcagcccagacttgggtctccactccaagccgcatgccgcgcccctcgagcagcacgcggcggacgcgggagagggtgagggcgtcgccgccgcgggggacctggcgggcctggggaggcggagccgggaggccgtgaggtggaccatgggggagctcgcgagcgccgcggcggcggcggccatgggcggcggggcagagtggagtagaggtcgctgtggtgatgacgtgggtggtcggaggcgggagggggaaaccagctgcggaaaggataggggtggggagggggcgggggccacgccctga

SEQ ID NO: 78091 - DNA, 2941 bp, Oryza sativa
  Clone ID: PAT_MRT4530_77932C.1
atgtcgtcggcggcgaacgtgatgctggcgatccacgagaagaggaccacccccaccgacctctaccgcccgctccgcctctacatcgcctccgcctactcggagcgggaggcggccgcggccgacgacgacctcgccgcggtgcgcgacctgcgcgccgacgtcgagcagccgtcgctcccggacccgtcctccctcgagcgaaggcgggacgcgctcctcgcctacgcgcgcgccctgtccctcgtcgagccccgcttccccatctcctccgaccgcgcccacgtccactccctcgccttcacctggcacgacgccttcaagaccggcaagaaggccagcgtcgcctccatccacctcgagaaggccgccgtgctcttcaacctcgccgccgtctactcccagatcgcgctcgccgcggaccgggccaccgacgtcgggatcaggaccgcgtgcggctcgttccagagcgcggcgggggcgttcgcgtggatgagggagagcggcgtcgccgccaaggccgtcgcggccggggccaccaccgtcgacgtcacccccgagtgcgccgccatgctggagaagctcatgctcgcgcaggcgcaggagtgcttcttcgagaaggtgatagccggtgggaagccgcccgcgctgtgctccaaggttgcccggcaggtgggcatattctatgaagaagcctatgcagctcttagcgcagctcctctcagtcagcactttgataagacatgggtttctcatgtccagctgaaggcagctcagttctatgctgatgcttgctataggtgttctttggatcttcacgagaaagaagaaattgcacaggaaattgcacgtctgaagattggaattagcgctttggcagatgccaagaaggtggccaggggagttgcttccccacttcttgattctgttaataagctggagagtaatatgaagaccaacttggagagggctatgaaagagaatgaccgtgtttatctgatgagggttccggatgctagttctcttggcgcgctccctgcagcatcacttgtaaagcctacatctttggctgaagttctagatgctagcaaagagaggcttttttcatcacttgtgcctgatggaagcatgaaagcactttccaagtacactgagatggtagataacatcatcaggactcaagcggagaaattacagcaagctagtgagatcactagagttaggttgaaggaaatggacttgcccgattccattctttcattagaaggtaatatcaccttacctttagatttgaaggaagacgttgaggctgttcagataagcggaggccctgctggattggaagcggagttgcagcagcttagggatttaagcagagtcaatcaggaattacttgttcagaccgaagagatgctgcagaaggaggcgaatgaagatgctcagtttcggacgcaattcgggagtcgttggactagacctcaatctagcaccctaacaaaaaacattcaagaccgattgaatctgtttgcttctaatcttaagacagctggtgatagtgattctcagattgagcgaggtttgaaggagagctatccattgatatctattcttgacagaagaccgatagagtctgcactaccgagtatttctaggcctattatgtccttggatgggaatgaggatgctattgttggagcccttaaacaaagcttgaggcaactagaatctctaggagcacagagagcaggtcttgaagacatgcttaaagaaatgaagagaaaggatgacatactccctaaattgatggccggtgttggatcacacgatgatctttttaagaaggagatttcaaagtatgatcctgtctgtgctgagatagctgataacattgtggcgcaagaacaactgctgctacaaatacaggcacaaaatgaacagtttgctgcggtgttcaacctagaggattacaaagttgctcgtgagagatgttacaagcaaattgctgcggctgttgctaaataccgagatattaagaagaacattaatgaaggcctcaatttttatgtgacattacaggaagcaattggcaaaataaagcagcagtgcagtgacttcataatgacccgaaacattcaatgccgtgaaatgatcgaagatgtgcagaagaagctagcaggtttcagcttctcatcttcttccagccaagcaagcatgcagaggaatacttctgtgccaccagatcagaacagtccatcaccaccaccaccgtcgtcgcatgctccccatgctcagggcccatatggtgttccacccggaggcgattcaagacccgggtactctcagcccgagcaaagacctgcttactcacagccatacccgccctatggcgcgccaccgcaacagcctccatatggtgcgccgtcgcaacagcctccttatggcgcgccccaccctggtcactaccaacagccaccacaccagcaacctcccaaccatgactatggccaacaagcatatcctggaggatggcgcgggcagtactacaatccacatcagccccagccgcagccacagccgccatatcctcagccaccgtacaatgcccagggttcttaccctcctcaccagagcagctactacaggcctcaatgagagatggttttgggatgtggcagaacatgtttgtgtgcctctttttatttttcttcagactgcgcatatgtgaattacgttttatggtgtactgcttacaaagtgaggtggtgtaatatcgattggtgtcaggttggttagacaatagcctgtatcatttggtccgtattaataatgttgaatatgatatatacaggccacgcgcctgcaatccccattaatatgtaccattgttgaccagtagaaaaaaaaaaaaaaaaaaaaaaaaaaaaaaaaaaaaagggggggg

SEQ ID NO: 78092 - DNA, 436 bp, Oryza sativa
  Clone ID: PAT_MRT4530_77933C.1
cccacgcgtccgtgctactggacccccacctgatatgcaactcttacttccatttgtggaatcagctttgccggtggcttatggtgtcttggctatccaactatttcatgaagttggtcactttttggcagcatttccaaagaaggttaaactaagcattcctttcttcattccgaacttcactctaggaacttttggcgcaattactcagttcaaatccattctgccggataagaagacaatgtttgacatatcaatggctggtcctcttgctggagctgcactttctttctcaatgttctctgtaggcttgttgctctcctcaaatcctgctggggcaagtgatttagttgaagtacctagcaagctattccagggttccttgttgctcggacttgttagcagagcaacacttggctacagagctatgcatgct

SEQ ID NO: 78093 - DNA, 351 bp, Oryza sativa
  Clone ID: PAT_MRT4530_77934C.1
atggtggggccacgtgggccccatgtcattctcacccctctcctttctccatctcccctctcttcatctcccgccggcggcgaggcccaccggttcactgtcgatccccgagtcatcagcacgcacgacgatgtagccctcctccgcgtcctgcaccccaacgatgagctccaccggggcatcgaatcctacgactactttgtctacatggccagtgcctcctcgctccggcggctgccgaacccgcgcgtctcccccttccgcaacgaggaggtcgccatcgtccgctgctccggcgagacccgcttcgtcatcgccggcctcatgcccactatcaactaccccgtgtag

SEQ ID NO: 78094 - DNA, 734 bp, Oryza sativa
  unsure (1)..(734): unsure at all n locations
  Clone ID: PAT_MRT4530_77935C.1
tatcaggtgggggtccagtagcatttggatcagtgaaatatgtancaatctctggtggaagactgctaatctttgatgcaattcctagctcaacacaagagaacacagttagaaggaaaagtaacagtgaaatgacatattgccacaatgtagtaggtccaggttctgaaacttctcttctgagcaaaccaaaactaacacgtggtcctccacgtgggtcttccccttctgaattgggctcctccaccataaaaagattgtatttgtcacctgtgagttcacgtaactgctgttgaagttttgcaaatatttcttctctcttccctcggaggttcccaataaaaaggaccccttccccaagatcaccaaaaggttcttctcttgtcaaccagaatgttgtgtagccgaaaagtttttccttaatagccttgacatcagctgaatcaactttttcgggccctaggagttccaataactttactgtgtcgatgttatcaacactgaagctcaaaaatggtggctcattggatataccgggtgtccctgacgacgacgacgaggacgaagagaagctaccggagcgggtccgctcggatctcatctcctccaccgcgccacctaccttcgcctccgccgccgccgccgcctcctcctcgccccgcttctccccgtcctccccgcccgttcctccgccgccacccccgcccccaccccctcccccgtcgaaaagaagc

SEQ ID NO: 78095 - DNA, 675 bp, Oryza sativa
  unsure (1)..(675): unsure at all n locations
  Clone ID: PAT_MRT4530_77936C.1
aatcgcaattttcttggcgttacaatccctgatnttccctggaatgggaccaaccctgtgtcgtcgccacaatccccagttcaggtggttgtctggacgggtcgcaaaaacggctttggacaaattggagaagcagctggaccggagagtgattgctggctntcccccaacgacgctggctgactgaactgtaatgtagtgcatgagtgtgggcttgcagctagggtgtgatgcgtgatagccctgtgatnagtatgttgtgctgtttgaagatggacgtggacactttatggcttgtaagccacctcgtgggcaactcaatgattgacaaatggcaccttcgagatggttgctggctgagcattgcgatgttgcctgccaggtggtgatgatgagatggaaagttnaggtgtcaagttgcagatgaatgttgatgttggctaggaaggagcagcaaaaatgagagtgaatgcagtgcgaaaatggttgggtttgttgttgtgcatgctgttcaatggcaattgagtctggaattgagttagtggcacgtgctggaattgcataatcagattgggcatgtgcacatttgcatttgtttccatcggctttatgctgccagttttatttattgcacattctgccttgccctgaattgaggataaaaaaaaaaaaaaa

SEQ ID NO: 78096 - DNA, 375 bp, Oryza sativa
  Clone ID: PAT_MRT4530_77937C.1
ttaggaagaaggggaaacttcagggcatgacgatgccaacacgatgttgtaaatggtgacacgtaggtcgaggcggcggccggcacagggaaccttgtcgctgttggctactatgaccttgatgtctagcaggggtgtgtgctggacccctaggcgtcgcgccacatcgtcggagaggaaggtgtgcacgacgacctccgccttcgcgcagaccagctctcgtggtcgctcagcgttgtcttcttcactggcggcagtgcggggcttgggcccgatgggagcgtgctcgtctgtgccgacgtcccgccaattggggcagcgctgcggggcaagcagtggacagcggtacgggtcgcggtcaatgaagcggaccat

SEQ ID NO: 78097 - DNA, 849 bp, Oryza sativa
  Clone ID: PAT_MRT4530_77938C.1
atgcagcagcagcactcgaggaaggagagccggacggggcaatgcgccggcgagcggccgaaaaggagggggaaggcagcgtacccgtcgacagcgagataccagtggttactttgtcaatttcaagatatgtccgtccaatcttttggagatgctcatagagatatgtcctgtggcgcgaacgtaaatacaaccaaacccagcacccaaaatccaaacctcgcaacgaaggccgctccttcaaaatcccaccggtctctttcgccggaatcctcatccctcctccccttctccgtccaaactacccgcctccgctcccaatccggcgagatcaccaaacccctctcgccgcctccgccgccgccgccgcagcagcagcagtcactccgccggagcaccatgatgcacatgaccttctactgggggaaggacgtgacgatcctgtttgacggctggcggacggccacgtggaccgggtacctcctctccctcgtcgcgctcctcctcgcctccgccttctaccagtacctcgaggcgttccggatccgcgtcaagctcctcgcgggcgccaagccggcctccatcccgcccccggcgtcctccgacgccgcgcgggccccgctcctcctcccctcgtccgccgccggacgctggccggcgcggctggcgacggccgggctgttcggggtgaactccggcctgggctacctcctcatgctcgccgtcatgtcgttcaacggcggggtgttcgtcgccgtggtcgtcgggctcgcggcgggctacttggcgttccgcagcagcgacggcgaggacctcgtcgtggtcgacaacccctgcgcctgcgcctag

SEQ ID NO: 78098 - DNA, 440 bp, Oryza sativa
  Clone ID: PAT_MRT4530_77939C.1
ggtcccggttccgggttcccggcacgcgcccgtttttcttttgctcaaacagcagcaacagccagcgccggcttgcttagataagggcttcgccctcccaagaagaagaagatgtcttgctgcggcggcagctgctgctgctgcagcggctgacaatgcggcggctgctgctgcggatgcaagatgatccctgctgtggaggccacagtcactaccaagaccttggtgctcgctgctccatccaacaaggcgagctctggaggaatggacatggcagtggccagccgccagaacggaggctgcggctgcaacacctgcaagtgcggcacccgctgcaacggctgctactgctgctactgcaactgactctatcgtcgtctactcccgactgcctgaggatatatcgtatggatgctgctactgtcgatcagagctttgat

SEQ ID NO: 78099 - DNA, 477 bp, Oryza sativa
  Clone ID: PAT_MRT4530_7793C.1
tccacttgtcctggtatgtacgagggacaggctacgcccggtgacgcacacaagtcccccgacgcaatacgacaacacactctgcttcaagcggctcatcctcctgatgccgataaactcagcttacactccgagctactgccagggacacctccccggtggtggcgaccagccccagcacaaaaccaccgggcgtagcgacgaccgtgtgaacgacgggctcaacactcggcgcgcggagcaggaggaggagaagaagaggaaggcacaagtggggtagatcacaacggagcaggaggagcagagacaagagctgatgacccgcggctcaccgatagagattgagagatccagggctgaggagcaagtgaaaaaaagaaaggtcacactgaagagttcagacggcggcaacacccacaggcagatgatcgagctcaccgagaacaatggccgacacgtggataagctcaagctgca

SEQ ID NO: 78100 - DNA, 1230 bp, Oryza sativa
  Clone ID: PAT_MRT4530_77940C.1
ggtcaaccgcaatgttatcttccattaaaataataacataataatgataacaatacacacaagtggcttagcacgtgacagttcaacagagtagattgcgttgcacattctaacttcccaatttccgaacaaagtgttctagcaggaattacaccaatctgctggcgtatatatgtgttaggatttatctagatgagtgaggttggatggtcagtcatcaagccaaccacaggagcctggatatggaagtgggaacaaggccttcggcgcaaacgaattgaaaccattggaaagatcctggtcagtttgatcagtttcagctgccggctgtggaggcggctgggatggttcggaggaatgatcaggcgacatgtcttcttcaggtatatctagtactgcgggtgcgtcttcttgccctttgggcttcgaaggaccacgtgttaaaaggtttttgcaatcaggaaagataatgtggttcctcgcgggagttcccagttctggatcaatctcatgcttcatgcagtagatcaaaatttgatcacgaagtacgtcatcccacgccctttgcacgataccattactttcatcatcttcaaagactatgtcacttggtaagcacttcctgtggtatacagttggacagcgtctgcatactgcaaattgattttccatgtcattcttgttctctcctcccttgcatacatggcatttatgcaccggacaaaggaatttcagtccacgggcaacttcctcctcaaaatttaagggctgcatactgctatcagggtagagtagtctagctagacacttcggatggtaaaagtgtccacatttttcatcttcacattggaatacatatattagaagttgaacagacatttggagcatatgacaatgagaaaatggcatcttaatcctcagcccctgatgacaagtcttttcatcattttgcctaaagatcttccattgttcttcagttagcccaagggttgtgcactggtttatttctgtaatgtgtttctctgttgcgtggaaagacctcaaacatctgccctcacagcaaagaaaatcaccaccatcatcacaaattgaacagacatcctcccacttatcagaccctggcttgttgttgagcttgctgcttctactgtcgctgctgctcctcttccgcttcctgaaccgcagcggagggtaccggcggtcgctccccggcctcctcggccggtccat

SEQ ID NO: 78101 - DNA, 496 bp, Oryza sativa
  unsure (1)..(496): unsure at all n locations
  Clone ID: PAT_MRT4530_77941C.1
gcggggggggggggggggggttaaaaaattttttggttgcaaaaaagagtgccattatagatagatagtggacattacatggcatatatagtgtaagcttgccaaaatgggagggaacacactccttattacaatcttacaaaaccattttttttggggggggggggggacatatttctaancaaaaanancactcctcaatcttacaaaaaaaaaaacacctaactccatatccttttatctcatcccaccaccccancaaaatccaagganantnaactgatctctccttcaaattntnnaactgtttcctttattccatatannaatgtaagggcggggcttactgtttcagggaatttatccttcttaacaaaacttgaagtgctcaattatgcagccacaagtggggccgcccttgggtnatgtttctgaagctccgaagcctcctctccatgcgaatgtgtgcatacagggggaacatttgacaatctgc

SEQ ID NO: 78102 - DNA, 237 bp, Oryza sativa
  Clone ID: PAT_MRT4530_77942C.1
atattatctttgtttatacatttcacataccatgatacctgagcttatattttcacttccgaactcaaccttcttgctatttttcaatcttagctactccttatgatattaagcttatcatttatcacttaacgaccaaaggtagataccatatgtagatggcaagttaaaagtattactgtttggtttaggtaacattacatcaggtgaagggggggggccccccccccccccccc

SEQ ID NO: 78103 - DNA, 175 bp, Oryza sativa
  Clone ID: PAT_MRT4530_77943C.1
tgtcggttcgcgctcaccttgtacgtccccgccgcgccgacgttggtgagcgtgcgcctgtgcgtcaccgtcgtcgccgtcgatcctgagctctccgccgcctgtctgaatagccgtcgagtacgctcacgtggaaggacagggtacgtgtgaggattgtacaacggagtaggtc

SEQ ID NO: 78104 - DNA, 495 bp, Oryza sativa
  Clone ID: PAT_MRT4530_77944C.1
atagcattcttacaggcaaaggaggttctaggcttatgtcacgagatgagcacattcttacagcttagacataaagacatattctccactagtacaaaacaaagggaaacaaaaaggccttggcacgcagattacccccaacacgccacaggagaaaaagaactccactatcacagaaaaagaacagcatcacaatgatgagaagcggcatatcagggtcagttcagtccagctccatttccattcctatgtacatgcagggaagtgagtacagaaaattgtcatagattcggatggctcccacgaggaggaaaagcacaggtacattcagcaggaggaaagcacagcgtaagaaaaaaaaacttagcaaatgctccgactttcgaaagcaaaaacaccacccggtaaaaaaaaagaaaagaaggaatgccggtgggttaaaaccaacaggtccagtggcggtacccggaactgtaaacaggaagcaaggggggg

SEQ ID NO: 78105 - DNA, 2419 bp, Oryza sativa
  Clone ID: PAT_MRT4530_77945C.1
ccgcgccgcttcctcttctccgacgcgcgctaacccctaccagtcccatctcctccagctctcggggagcggcggcaagtaagcgatcacgatttcgaagtcttgcatgatggcagccacccagtcttcatcttgggcagatctccagatggatatcctgggccttgtcctcaggcgccttccctccttagctgatcgtgttcgactaagagcagtgtgtcgcccatggcgctccaatgctcagctgctgaccctcccccctccattcccttggctcaatctcctcgacgggaccttcctcagcatctcagatggtgaaattcaccgcatgcctttaccagatgatgcttcttgctatggctctattgataactggctcttcctcacggatagtgacgatgggtgctcactgatgaaccctttctccaaggctacactacagcttcctaagctagcccgcatttggcatcatgagaggggaaatgcgtacaatgcatgtactcgacttttctataagttggcagtgcccttgcccctggacttatcatcagattcccttgttgccgtgctgatgaatgaccctcttcgtcacagtgtagtttgtattgttcatcgatcaatttctactgactcattcagatttcatgatcgtccaatcaagaacaacttctatgatatcgcattctgtggtggaaagctgtatgcacttagttgtgggaagctcttcaccgttgagatgagtgaggtacatatagaaaagccaaaggttccacatgtagaatgcatagtggaagattttccaactgaatcccattctcaaccttgtcctgagaaccatatctgtgtgacatggccatatctagttgcatctggtggcagactgttgaacgtgattcgacttgttggtgtcccattccctccggaagatgatgatgatatcttcaaagattcacttaccttttcatttgaggtctatgaggcagacttgaacaccggctctcgtatgtggagaagggtggaatctttgggagaccaagcactcttcgttggcagacattactccaagtctctctctgctgctgaatatgttggagctcaggaggactgcatctacttcatgtgtgatgactacttccgatctgatgaagatcctctttgcgacgctggcatctacaacatgagaagcggggtgatcacgccgttgttgcaggagaacacagcgccgcgactgcatcctacaggcgaggggcatccgacatggttcttccctgcagatgatttcaagtcttgcatgatggcagctgtccagtcttcatcctgggcagacctccagccagagctcctgggtcttgtcctcacacgccttccctccttagctgaccgtgttcgactaagagcagtttgtcgcccatggcgctccaatgctcggctgcagccccttccccctccgctcccttggctcactctcctcaacgggaccttccttagcatttcagatggtgaaattcactgcatgcctttaccagatgatgcttcctgccattgctccattgacaactggctcttccttagccacgacgatggtgggttctcgcttatgaacctgttctctaaggccacattgcagcttcctaaacttgataccatttggtgtcatcatctatggtacgctgcgcccaagtttcctctcttttataagttggcagtgccctctcccctggacttttctccaacttccctcgttgttgcactgatcatgaatcgttctcatcaaaaggcattgtgcatatgccagcctccagttgccactgagtcattcagagtcgagggttctacaatggagggcatgcaggatttcaccttcttggatgggaagctatatgtgttaaataatttcaataaactcttcatcctcgagattgatgagagccacataggtaacccaaagatctcatccattgaatgcataattgactcccaggatgattcgacgactgaaccccaatcctttccagaagattatctcattatgcggaggtactatctagttgagtctggtggtggcctgttgatggtgacacggtatgttggcattgtgctccctcttgcagagcccaactccttcaaacattcgcgtactctttcattcaaggtctttgaagcggacttgaccaccggctctcgcatgtggagaagggttacatctttgggggaatgtggtgtacctcaggaggattgcatctacttcatgtgtgattattggaggccttatgctggtgatcctctttgtgactctggcgtctacaacatgagaaacggggtgatcacgccgttgttgcaggatgccacagcgccgaggctgcatcctacaggccggggggatcctgcatggttcttccctgctgatgttgctacgtaa

SEQ ID NO: 78106 - DNA, 2059 bp, Oryza sativa
  Clone ID: PAT_MRT4530_77946C.1
aaaaatcctcttcttcaggccatcaacactagtagctgcagctggatcgagcatatgctcatctcctggtggatcgatcacattggagactacagctccaatattacaagatgaacattgcttgatggtttgaaactttttgaacaaattagctagcatgcaacagtttgctgcgcgcgcaagcgaatcaatcatgcgaaagatcgaacaatccacatcaaataccactaaattgttgcccatttatcctagctatatagtagctagctacaccatttgctgctcatcttgtcaaccatgcataaccccacaaatctcaacacggctagtagaagagaaggatagggaataatattacttatgcgaagccattggggaagtacatggcgggcggcgggctccctcggccgttattgcttttcctcccctcgccggcggccacggccgccgccatttcctggccctggtacatgagcgtcgagttcatcgtcaggctcaccaagctgtcgtcggcgtcgctcctcgggaagttgccgccgtcgcttccgccggcctcggcgccgccggtgacaggcgcgccgtcgtcacgcgtggtcaccatcaccgccgactgcacgagctcgaggcagagcctgagcttgttgggctcgatgtgcgtcagccccggcacggcgcccttgaagaggaactcggaggtgaggctgcggagcacgtcgagcggcgtgacgccgtcgagcgtcctggagttcgggtcggcgtggtggtcgagcagcacggacaccatgtccggggagaccatctccgccgccaggtgcagggcggttttgcctgtcgggccggcgcgggagttgacgtcggcggcgccgagctcgagcagcgccttgacgacgtcgcggttgcagtgctgcacggcgtagtggacggcgagcgcgtcgtcgaggtccaggccctcgcccatgaccatcagtttgacgagctcgatgtcggcggcgtcgagggcgcgccgcatgcgccggatcttgttgtcgcggtccgccgcggaggacgccgggttcatggggaggtagtggtgcgtcaggaacggcgagcgcggcgcggccaccgcggcgagcggcgacttggcgcggatctcctcgatcttggcgaccacatcgatggggaggtgcttggcgaggagatcggcggagaggccggagcgcgcgacgaggtgggagcaagtcgcccacagctcctgcatctcgaacttgcgcgacgccatcagcaccttcatcacgtcgtccaccgacgcctccttcaccatgctctccagctgcttctgaaccagcagggcgagctgctcgacgccgaaggagcgcgcagcggcgagcgtgtcgagggcgaggtcgacggcggcgccgcaccgcgtgtgccagcaaccccgggcgccgcaccccgggagcggcccgctcttgggcgccgccaccgacgcctgcccgctgtacaggaactgcagcacgagcacgagcacctcgtaccggatcgagctgacggggatgacaagctccggcgtggcaggcgctcctccaccaccaccggcgccgccacgccctccaccaccagagccgccgccgcctccccccgccatcggccagtttaacggcggcggtggcggcggcggctggtgattcggatcgagcccgcagaacaacttcctgaagaacaagctccgcgccgccagcacgcagcggtgggcgtgcacgaggcggccctcgacgctgaaggcgacgtcgctgaaggcctggccattgatgagcaggttgaggtagtcaagcgacaaggatttgagcgagtcctcggagctcatgatctcatgtgcagcttatcaccaccagataaaagcgccggattggccccaacttttcaggcgcaggaaggtgaggaggagggatttggatagagattttgaggaagcaaaccaagcaagagaggtggaggggaaagggagggagcaacacaaggtagaagcaactgttgcaagaggaaaaagaaaaggttagggtgaaggagaggtgtgtgtgag

SEQ ID NO: 78107 - DNA, 237 bp, Oryza sativa
  Clone ID: PAT_MRT4530_77947C.1
atgcagttgtcggcgtcgtacggcgacggcgagaaggaagaagcaaccggtgatattcacagagccagaattgacctgcgtaaccggtggcctacagcaacaggatggatgcgtgaaatgtccattctttatttgggggttggagcagatgaggccatgagggtctatgggagcttcattggatccgtcgaatttggccgcgcgccccctgcaaaaaagataacgaatgatggttag

SEQ ID NO: 78108 - DNA, 386 bp, Oryza sativa
  Clone ID: PAT_MRT4530_77948C.1
attacggggggtggttatcgtgatttttgttttttcctgtaaaaaatttttctctccttattatacaccacatttttcctggtggtatattttttttttactgctgtgtttaatgattaaggttcttaatattattaattgcgttgtcattaatggctttttttgaggggaaaaacgtggtgcaaaatttaaattaattttttcccactaactgggaggtgaggattttttatttttggccaccatggtttttttttttttcaccaataagacaggaacaggtttttgttctttagctgctcctgttggatttgttttaaacagtttaacctggttttttgtatagcctttaaaaatgttggatggaggggattaacggattttat

SEQ ID NO: 78109 - DNA, 273 bp, Oryza sativa
  Clone ID: PAT_MRT4530_77949C.1
atggcggtcggtgcttgtgacagacgggaggtggcagagccagagcacacgccgaaagggcaggagtcgatcttgcaggcggcgcgcggaggtgtggtgctcggcgcggcattcttcggagctcgtggaggagcttgcggcggcagtggcgattccatgtggaggaatcgacgccggacttcaatgatggcggcatccggtggaggagtcgacactgagggctccggaggtgacaacgttcccaggcgattcctgaggttggcggcgtggtga

SEQ ID NO: 78110 - DNA, 294 bp, Oryza sativa
  Clone ID: PAT_MRT4530_7794C.1
atggatgaagtgctcgaggaagaagttgaatgtgtgcggctaggcggccataaatgtgcagcgccccaaccgtcccttgctgcattcaatgcggcgagggcagacgtgcggcgtgcccgaccgactcctgtcagtcggatgcgaccggtctgtgaccagtctattgccggtcatggtcgattgaacgggtggtcgtgcccccacgtcgcctctgtctccgcggagtggcgggctgccccccgtgtcaggcgggagacggcgctgggccccactcaaggaccgaccgatgcttag

SEQ ID NO: 78111 - DNA, 1072 bp, Oryza sativa
  Clone ID: PAT_MRT4530_77950C.1
gagagatctggagaagaagaggtaggaggccattgccacctgaccttctcctcttcctccattcatcttctctttcttgggacatggcgaccatcctggagaacatccagaaggcgaggttcttgccgacaaggccgctcaaggacgagctgccgacgttccagggcggcggcggcggcggtggcggtgggggtggaaaggagagccacctgatggggctgaggaagaggctgtcctccttctccgacaagatccagcccatctcctccgcgtcggcggagtgggcgttccggcggtccaagtcggcgccgtcgctgggcgcgttcgccggcggcccgctgaagcggtggtgggactggggcgtcggctggctcatgtccaagaagcccgggttcgccaccgacctcgagatgaacgaggaggaggtggccgccctcggccgcggcagcaggggcagctggggccacatcctctacaagatgcgctccggcgtccggcggctcgtcacctcgcactcgctgcccaccacgcacagggcggcggcggcggcgtcggcgtcggcccagtgcaagccggcggccacgttcaactacacccagagcttccacagcgggcaaaccgccatggcgtactgagagcttctcacatgttcctccagtgagaaacatgaccttttcttggtcgccgtctccatgggatccaaatgaagaagaagctcagggagattgatataatatatggtgatgaagatgcaactacgattacatgtaaaattacacggtaaatttgatgaatgatgaaaaaaaaattgtagctcactacgtgatctgttttttgtgtagatctagtgtcctgtagaggccgaatgtatgttcgttctttcaattctttttggagttcgttgggcgatgtaaatgtctccggtcaaattccttatgcttttgcctcctgcagtaaataaaaagctaatgaaatatggtgcttgtttaaaaaaaaaaaaaaagatcttgcagagtttcagctcagatctgagttctcattgtaatcagctaccctctttctctttaccatg

SEQ ID NO: 78112 - DNA, 484 bp, Oryza sativa
  unsure (1)..(484): unsure at all n locations
  Clone ID: PAT_MRT4530_77951C.1
atgcggttttatttagaacatccaaaggtttacaatcatcctaaggagattcattatattttggaccaaagtgtaaaattgcaggcacatcgttatctcctcccaagcccttcctggccacatatctgcgctgcggtcgcgtttgtcttcctgtcccgaatggccacatgagggcgnaggccaggcggcggagaatctgaacatatattcttctccaatctatctagctcactcatcactaccttctcctccactactcatccatcggagccgatttgagagggaatgcccttgtggtagcgacggctgaaagactggtttgggtagatccaccatagggcatccaagtcagtgccttggtagatccaccgcagnatgtctagatcaggggcattttagccatcggttaattgggtcttgtatggaggtggtatttttagggaatggggcanttggggatggcaggttttgngggnattcggtt

SEQ ID NO: 78113 - DNA, 1229 bp, Oryza sativa
  Clone ID: PAT_MRT4530_77953C.1
gagacagagaggccggagagatggcgaacctgttcctgaagcaggcgaagcagtacgcggcgacgcggccggcctacccaccggagctcttcgacttcatcgcctctaagacggcccgtcacgaccttgcttgggacgtcggcaccggcagcggccaggccatcccgccgctggcgaagctgacaaggacgtggtgggcacggacacgagcgcgcagcagctgtcctacgcgccgcgcctccccaacgtgcgctacgtccacacgccgccggacctccccctcgacggcatccacgccgccgtcgcgccgccgggctccgtcgacctcgtcaccgtggcgcaggccttccactggctcgacctgccgcgcttctacgcgcaggtccgctccgtcctgcgcgcgccgcagccgcagcaggcggcgggggtgctcgcggcctggtgctacaccgagccctgcgtcgacgccgccgtggacgacgccttctggcgcctctacaacgggtcgcagccgtactgggcgcccaaccggcggctggtcgacgaccggtacagcggcgtggacttccccttcgaccccgtcgacggcgaggcgcacacgggcccgttcgagttctcgacggagcggcgcatggacctcgacggctacctcgcctacatcacgtcgtggtcggcgtaccagacggccaaggagaaaggcgtcgagctgctcgacgaggcgacggtgcgcgggttcgccgacgcgtggggcggcgacagggtggaggtgaagacggtgaggtaccccatcttcctcaggatcggcaaggtgaggcccgagtaataggagatgagcccgccaacggggagaaattaagcttgatagacttgggcgaacgtgctttgtctagcacacattagtgcattactctgttatcttcagaggcgatctgcacctaggagattactacttcctccgtatcatattataagactttctagcattatcacatattcatatatatgttaatgaatctaaacatatatgtgtctatattcattaacatctatataaatatggacaatactagaaagtcttataatctgaaacggaggtagtagaaaatagatgcggctttgccgcataatggaccagccagtacgaaatactccatatgtttcatattgatcatcatttaacaccaaattaaatttttaaattgatcatccaaaaaaaaaaaaaaaaaaaa

SEQ ID NO: 78114 - DNA, 4560 bp, Oryza sativa
  unsure (1)..(4560): unsure at all n locations
  Clone ID: PAT_MRT4530_77954C.1
ccacgcgtccgaccaaatcaagctgctcttcgccgcggaggtcgtcggattccgggccctctcaccgcgtggatctgccggcggggagggagatgggggctcttgcgccgcggcggcgcgggtcggggatcgaaaggtggtggatgagctgctgagctaggaagcaaaagctttcttgctttcacgaggcgtactcaaccatcttgttatgctggagggcaaggataagagcaggcccaattgcttcagagctcttgggttcttggtgcggactgtagcagcagcagaagcagtagatctggaggggtcagcgaaggcgttcatcagatgttatccagtgaggagccttcaggcccctcttgctcttctatccagggtgtgagcgctgttccggcgacgtcccccggcgagtcgccggcgagccaggatcccacagatctggtgcaaccgtgcgccaaattctctataagagattatgtttttgcttcaaggagcaaaggcatcaagagaagctggcctttccatccacggtcgctgcagctttgcctgaagcgtggtgtgaaggatctgctacctccatttgaaccacctgatttgattcgatcccggtctttgagtactaccataaacgttgagcaatctgctgcaagttcagaagccaatgctccggttggtctggtgaagactagagatgatggttcgtctattgtgaatgcaagcaatatcaacttccagtcatgccaaccagtagctgagtcacttggtccttcacagtacacctcaccagaggatgggaaatctgctgttgaccaaggggagaatacaaatggattggaccatactgatgaggttatgccagtagatctgcaagtcaatagttgcaccaaagcaattcggcaaactgaggttgctgtaccctcttggcgatcgaaaaatcttgactcatcacgagagccatcagaaaagaagtgtaaattggtagtcaaagtaggatccttgacgcggacagaagaggtggcatctaattctagcacggtttcagacccgatggcctcaaaaacctgtcctgtttgcaaagtgtttgcttctacttcaaacacaaccttgaatgcccatatggaccagtgcctttctgttgaatctaatactgagccagtggaaaaagttatcttgaaaccgaaagttaagccaaggaagaagcgactgatggtggacatttacaagactgcccgtctgttcactcttgaggatcttgatcagaggaatggcactaactgggctatcgaattggctacacccaccacgaacaaggaggtttgcactgagaaccgtagcccagaagtggtgccgtttgacccaagagacgacgaaagagaatgtcgggtgagcatttccagggattctcaggtgcacgatcaaagtgcgatggctagaccagtgccagcttttactggaaggccggttccacagttgaacataggtttgcgtgcgtcttcatcgttcagcacatatcaaagaaccagcacaaaggcaaatccttgcttagattcacatgatcagacattagctggtaaggtttcagctgagcctaccatgaatacccaggttcgaacacatacagatggagatatgcatgagcacacctctgaggacgaagagtcaaatcctatgcatgtgcagaaacctactgaaagcacaagttatggtggctccgaaactataaggcaatgggtgggctccaaacgctcaggtctctctaagaattgtgcccgagaggttactgataaagcatccaagagtataacgcctggaaccaagaagttggctaggagcagcattcgtggttttgatgattctcaaatatcagatagtcctcctgaggcattttcttcgcaaccgccggaagagatgacgatcacttcagaagctaatgatgatgacgagaggaatggtacttcgagattgctcagatcgattcctagatggtctttaaaaactactccatccagcaatgtcataccaaaagtacctaggtctgctgctgctctagccaaaaggaaaataaaggagatcggaaggagagagtcctataggtctgataactaccgaacagtgtggcatcaagccccttttactgccttccatcccaaaaccagcttttcccaagggagagtgctgttggacccctgcctgtattcacaaacattaacccaattgttggtgttagctcatcaagtcaaggaaacaacgcagaagtagcacatccttacatgtcaaatccattctatgtgcaatctccggctggttacataaacccatcggtctactattcgcagaatttacggtgatgattcctcagtaactcaaatgaagaagagaactgcaattggtcatcaatgccaacgtgggaataatgagagctttgtgatgagtctaaaattctgagagtagtgaaccttcataagatgcctgactttttcatgaggttttttcacataggttgcctctttagtttttcgtttcaggtaaacttgtttgccttcaaagtacttcaattacatcctgcaaagttccagtaagttatagtatggcattgtccaatagtgctcaaggatatacctcactatttatcgaagaaactaatagcttacattgcagcaaaagattatccttataaaaacaacgacgttgccaataatgaggtggaagaatggcaaattgatccgtcttcaactaaggaatctagtgcctgcttgaccaataatagggacatgggtcttggagctcctcaggataactcatcgattacatcaaacagagaagattctaaccttgatcacggtttggtttttgatcgtggctcatccggctctcctgtttcaactgcctccacactgtctccttcaacttctttgagggactctaggactaacaggtctgagccaggtccatccactgttagtcttccaactgttgaggaacgggtttctgggagctcgaatcaagaaaccaagtcgacacctcttgccagagaaggtgaacagttgcctgaaaagtcctgttgttgcaattgtcgggagagcatttccagggattctcaggtgcacgatcaaagtgcgatggctagaccagtgccagcttttactggaaggccggttccacagttgaacataggtttgcgtgcgtcttcatcgttcagcacatatcaaagaaccagcacaaaggcaaatccttgcttagattcacatgatcagacattagctggtaaggtttcagctgagcctaccatgacccacccatcttatacgacagattgtatgagcccatcaatacaaactcagcttccttcaccatcaaatcctattttgagattgatgggcaagaacttgatggtgatgaacagtgaggagagtggacatcctcaggcacccagttcagattacatcatgagaggaaattacatggcacctggttgttttatgcctcaaaactaccaacatattggtgatcctgcatttatgaacacaacaccgtcaacagccaatcatcaaattcctctgtcaagtgtacaagctggcaacttttctgctcctacgttgcataatggttccatggtgcaatctgattatcattctccacaaaagccatacaggaacctccttccagtcatgcatcatccatcctacatgatgaaagaagtaatcatgattgatgactctcctgagcacagaagcgatccacaaatcagtatgcttcttccttctgcaccttctccagctacaatctcggtcccgaacactgtggcatcaaggccattttactgccttccatcccaaaaccagcttttaccaagggagagtgctgttggacccctgcctgtattcacaaacattaacccaattgttggtgttagctcatcaagtcaaggaaacaacgcagaagtagcacatccttacatgtcaaatccattctatgtgcaatctccggctggttacataaacccatcggtctactattcgcagaatttacggtgatgattccccaggaacccaaataaagaaaaaaactgcaattggtcatcaatgccaccgggggaataataagagctttgtgatgagtttaaaattttgagagtagtgacccttcataaaaggcctggctttttcatagggttttttcacaaagggggcctctttagtttttggtttcgggtaaacttgtttgccttcaaagtacttcaattccatcctgcaaagttccagtaagttatagtatggcattgtccaatagtgctcaaggatatccccccctatttttcgaagaaaataatagcttccattgcagcaaaagtttttccttttccctacggtttccccctttgctttttgggttgtttttcgccagtttgtgaaagttgaggcaccaccagtaaagaggttgccaagatataaagtagtgacctttgcttaaaaaaaaaaaaaaaaaaaaaaaaaaaaaaaaaaaaaaaaaaaaaaaaaaaaaaaaaaaaaaaaaaagggcggccgctctagaggantcaag

SEQ ID NO: 78115 - DNA, 680 bp, Oryza sativa
  Clone ID: PAT_MRT4530_77955C.1
cagacgacgaaaacaaacatctacacttctagcagattgtctgattgatcatcactggttagcatggtcgacttcttcgcggtggtgctgatggcggccatggtaggccatctccggtgcgcacctgaccgagtcggatatgaggttcatggacaggcagtgccagcggaaggcgcaggacagcccgctggacgcgtgccgccaggtgctagaccgacagctcaccgtgcggcagaggttccattcgatgttcctccggccgggcgcgctcggcctgcggatgcagtgctgccagcagctgcaggacgtgagccgcgagtgccgctgcgccgccatactgcggatggtgtagagctactaggagagcatgccgatgcccctggagcaaggctgcccgtctgcgctgacggataactacagcggcgaggcgtcgacgccggagcaagggtactacggggaggagtcgtcggaggagggctactactgagagcagcagcatccgccggtgatgacccgcgtgaggctgaccattgccaggcagtacgcgtcgcagctgccgccgatgtgccgaattgagccccagcagcgcataatcttctgcgccggacagtactacgcttagctgtcttgcctcatagctagaaggatcacaccgttgctgtgttgcatgcaacgagata

SEQ ID NO: 78116 - DNA, 280 bp, Oryza sativa
  Clone ID: PAT_MRT4530_77956C.1
caacacttgcgctgttaagaagttcgagcttgggaagaacattggaaccaaattaatcttcagaaccacctcaagcttagtgtccactattttagtcatattttgttataccagggtaggaattcttaatatatcaagatgtgaaagaggttagtggttgccagaggaggagaatttgggttcatgatatatagtaatagtagtaggccctcctgtttgctaaccgacttcgtaagaccataaccagtggacctggtaactaaaaaaaaaaaaaaaaaaa

SEQ ID NO: 78117 - DNA, 243 bp, Oryza sativa
  Clone ID: PAT_MRT4530_77957C.1
atggcggtggcggccgtcgctgttggtcagccgcagcggtctcaggtagccaagttcttggtgacgcagctccacaactccactccagactcaactcctggagttatatttaggagttggagctgtaccaaacaggctgcagggaagccggcgtcgtctcccagccgagaaaatcaagacaagggaaaggtgaagaagaccggggatggtggtcttcttgggttttgggggaattgcacatag

SEQ ID NO: 78118 - DNA, 354 bp, Oryza sativa
  Clone ID: PAT_MRT4530_77958C.1
cacgcgatgtctactggtggtggtgcttccggtgcggcaggagatggggcgccaggaacaggaggtggcgcgcacggtgcggcaggaggtggtgcgccaggaacaggaggtggcgcaccgatcgagaacaccaacggaggcaattctgcctcacaatccagcggagggacttttataggatcatttcacactgtgcatgtcatgtttatagtcttaatattttggattaaaatatgccgatttatgaccatatttccaacactctcttgatcagattgggctttaagtcatttgctctttaaccgaaccttttccccctgtttatttctaacttcccctttttctatgaaaaca

SEQ ID NO: 78119 - DNA, 557 bp, Oryza sativa
  unsure (1)..(557): unsure at all n locations
  Clone ID: PAT_MRT4530_77959C.1
gcacagggtcgcagctgcgcgtggcgtaccagggncgtccccggtgcgtacagcgagaaggcggccgggaaggcgtacccgggctgcgatgccatcccctgcgaccagttcgaggtggcgttctcggccgtggagctgtggatcgccgaccgcgccgtgctccccgtggagaactcgctgggcggcagcatccaccgcaactacgacctcctgctcaggcaccggctccacatcgtcggcgaggtgcagctccccgtgcaccactgcctcatggcgctcccgggggtccgcaaggagtgcctcacccgcgtgatgagccacccgcaggcgctggcgcagtgcgagcacacgctcaccgccatggggctcaacgtcgtccgcgaggccttcgacgacaccgcgggcgccgccgagtacgtcgccgccaacggcctccgcgacacggccgccatcgcctcctcccgcgccgccgagctgtacggcatggaggtgctcgccgacggcatccaggacgactgcggcaacgtcacccgcttcgtcatgcttcgcccgcgagc

SEQ ID NO: 78120 - DNA, 3038 bp, Oryza sativa
  Clone ID: PAT_MRT4530_7795C.1
tgatgatgaatcgacgacgacttgtgttagggaggaggggttgggagccctcctctccgtttctctcgccacccacctcgccgtcctcctcccccctccccttctcccctcattcagcgctgccctccccccgcgagttcggagatgtctttccggaagaactacccggtatgccgcccaagcgagagattgaattccggatagatcttgctccaggaaccactcctctgtacaagcgaccctaccgtatggcagcaaatgaactggccgaagtcaagaaacagttagaagagttaaaagaaaaggggtacatacggccgagcacttccccccggggtgctcctgtgatttttgtggagaagaaagacaagacaaagaggatgtgcgttgactatagagctctcaatgaagttactatcaaaaacaagtaccctcttccccggatcgatgatctgttcgatcagcttaaaggtgccactgtcttttctaaaatcgatcttcgttccggatatcaccaattgcgtattcgtgaagaagatatcccgaagaccgcattcaccacgcgatacggactgtatgaattcacggtgatgtcgttcggtctgaccaatgctcctgccttcttcatgaacttaatgaacaaagtgttcatggaatacgtggataagtttgttgtggtctttattgacgacattctggtgtactcgcaatcagaggaagaccatcagcaacatctccgtctggtgttgggaaagttgcgggaacatcaattgtatgccaagcttagcaagtgtgagttctggttgtccgaagtcaaattcttagggcacgtgatatctgctaaaggagttgctgtggaccccgaaatagtgaccgccgtcactgattggaagcaacccaagacagttactcaggttcgcagccttttgggtttggcaggatactaccggaggttcatcgagaacttctccaaaatcgctcgacccatgacacagttgttgaagaaagaagaaaaatttgtgtggaacctgcaatgcgagaaggcgttccaaactctcaaggaaaagctggtttcctcgccagttttaatcttaccggatactcgcaaggacttcatggtgtactgtgacgcttcgcgccaaggattggggtgcgtgctcatgcaggaaggtcatgtggtagcctatgcctcacgccagctacggcctcatgaaggcaactaccctacccatgatttggagttggccgctgtggttcatgctctaaaaatctggcagcattatctcattgggaatcgctgcgaaatatataccgatcataagagtttgaaatacatcttcacccagtcggatctaaatcttcggcagagaagatggttagagctcatcaaggattatgatgtgggaatccactatcaccctggtaaggccaacgtggtcgcagacgcgctgagtcggaaaagccgttgcaacactcttggcgtacgtggcattccaccggaacttcatcaacagatggaagccctgaacctaagcatagttggtcgtggattcttggctacgctggaagccaagcctaccttgctcgatcaaatccgcgaggctcagaagaatgatccagatatgcatgggatcctcaagaatatgaagcaaggtaaagccgctggtttcacagaagatgaacatggaaccctatggaacggaaatcgtgtatgcgttccggacgacaaggaacttaaatagctgatacttcaggaagctcacgaaagtccttattccatccaccctggcagtacgaagatgtacttagacttgaaagggaaatactggtgggttagtatgaagcgggaaattgcagagttcgtggccctttgtgatgtgtgccagcgtgtcaaggcagagcaccaacgaccggccggacttctccaacctctccaagtaccagaatggaaatgggatgaaattgggatggatttcatcaccggacttccaaaaacccagggcggttatgattctatatgggtagttgtggaccgactaaccaaggtagctcggtttattcctgtgaagaccacctatggagggaacaaactagctgaactctacttcgctaggatcgtgagtctccatggcgttcctaagaaaattgtatctgataggggaagccagtttacctctcatttctggaagaagctccaagaagagttgggtacccgcttaaatttcagcaccgcgtatcacccgcagacagatggacagaccgagcgtctaaatcagatcctagaagatatgcttcgcgcatgtgtcctagattttgggaagacatgggataagagtctcccctatgccgagttctcctacaataacagctaccaagccagcatacagatggcaccgtacgaagcgttgtatggccgcaaatgccggacaccactattgtgggaccaagttggggaaagccaagtgttcgggaccgatatcttgagagaagctgaagcgaaggtcagaaccattcgggagaatctaaaggtggcccagtctcggcagaagagttatgcagacaaccgacgccgtgacctggaattcgcagtggatgactttgtatatctccgggtcacgccgttgcgaggcgtacaccggtttcagacgaaagggaagctcgcacctcggtttgtgggtcctttccgtatcattgctcgacgcggagaagtcgcttaccagttggagctgcccgcctccttgggcaacgtgcatgatgtgtttcatgtgtcgcaactcaagaaatgccttcgagtgccatccgagcaggccgactcagagcagattgaagttcgcgaagacttgacctacgtggagaggccagtgaaaatcctggacaccacggagcgcaggaccaggaaccgggtaatccgtttttgcaaggtccaatggagcaaccacgccgaggaagaagctacttgggagcgtgaagacgagctgaaggcagcccatcccgatctcttcgccagttcttccgaatctcggggtcgagattccgtt

SEQ ID NO: 78121 - DNA, 1969 bp, Oryza sativa
  Clone ID: PAT_MRT4530_77960C.1
cggacgcgtgggcggacgcgtgggttcgcactcgtctcgtcttactcaccccgcacgtttccacttcccctctcccccacctcaccaacactcctcgccgtcccaccaaaccctactaaccgccgcgcgcgagagggtcccatccccgacttcgccgccatggccggcgctcccccgacggaggcggagaaggagtccctcgtcacctccttcctcgagatcgccgccggccagacgcccgagacggccacccagttcctccagatgacgagctggcatctggaggaggcgttgcagctgttctacatcgacggcgaggccgcccttgcggcgcatccggccccatcgccggctgctgcggcggaagcggcggcggcggcggtggcagcagctgctgaggtggaggacgcgatgaggttcgctccgcccccagctgctgcactgggtgatggaatgctgcagggacttggggaggaagaggatgtgcgggcaccgctgcccacaaagcgggagactctctacggcgatgcccccatggtcgtcgttcggcctaattcaacagttgcatttcgtaactttgaagaggagtcaaggcaatctgctgtttgggattctgagcagaatgctgcatctagttctcgtgataatctggcggcattgtatcgtccaccatttgctttgatgttcaatggacccttcgacaaggcaaagttagaggcttctgttctggacaagtggctcttgatcaatttgcaatcgactgaagagttcagctctcacatgtttttactcttgagtgtttctttcatgaagcttaatcgggacacttgggctaatgaggctgtggctcagacaattcgatcgaactttattttctggcaggtttaccatgacaccagtgaggggaggaaggtatgcacctactacaatttggtctctgttcctgccattcttctgattgaccctatcactgggcaaaaaatgcgtgggtggaatggaatgattcacccggaccgtttgctggaggatttgatgccttacctggacaaaggtccaaaggagcaccatgcagctcaacctcaaaaacggccaagaaaagttgatcaggaaacttctatcggcaaacaaggatctggttacgtgcaatgcatttcaaggttgaccaaaagcacatgttcacagttccatttctttgtaggtaaaacccctgtacccgtagtagccacagaggatgaagacgaagaactagcacgggcagtagcggcttctcttgaggagagtaaaggctctgacactagtgaggaaaagattgaacctgaggtagaaaatgagcctagcctgagtgctaagctgaactatcctcctctccctgaagaacccaaaggaagtcgggagcttttgtgcagagttgcaattcgcctacctgatggtaggaggatccagaggaatttccttcacacggatcctattaagctcctgtggtcattctgctatcctcaagtggaggacggggataagaaggctttccatttcgtacagcccattcctagggcatccacaaacctggagtacgagagtgataaaactttcaaagaagccgggttggccaactcgatgatcaaccttttgtgggactaaaagcctattttatcaactcatgttatttctttattggctccaagtcaagattatcgagtgattttctgtgagggttcataattgcttctcttatttttctttttccctcctggtgcttggagccaaatgacgaatctggtttctttggtgtggaaatgcccatattccttttgtagtggttcctagtatgtttatagaactcttgagtaggtttactccagttctcttttaatgcatataatattattatacctgaacagatgctaataaaaaaaaaaaaaaaaaaaaaaaactcggactagttctctcctcgtgccgatcctgcgcccgg

SEQ ID NO: 78122 - DNA, 135 bp, Oryza sativa
  Clone ID: PAT_MRT4530_77961C.1
atgaagaaagaaacaaatggcaggcgtgcaatggggattgggagtgactgcaactttggcagtagccacggatccaccatccaacagatctacgagacactccgttactccgtagaaacctatgaggttttttga

SEQ ID NO: 78123 - DNA, 2368 bp, Oryza sativa
  Clone ID: PAT_MRT4530_77962C.1
atgtcgcgcctcgacgccacctccctcctcctctctccctcgctgacgccgccgcacaaacctaccaccccgcgccggctcatctgcgtcgtctcctccaccctcgccgccctcggagcctccctctcgctgctcctcctcgtcgtccactccgcaccagcgccgaactatggcagcctgttcctctccctcgcctccaacgataccgcggcgctccacctccgggcgctcacgcttcacccccacgtcgcgggcaccagggccaactcgctcaccgccgcctacgtctgcgacgccttctcgtccctctccatcccggcgcacatcacgccctactccgtcctcctctcctacccggtcgagcgctcgctctccctcgccgtccccggccgcgccaccaccacgagcttcgccctgtcgcaggagacgtacccgaacgacccctacgcgtcggccacggcggaggtcatgccgacgttctacgcctacgccgcctccggttcggtgtccgccgaggccgtgtacgccaactacggccgcgaggaggacttcgcctacctcgcctcccgcggcgtcgacgtcgcgggcaaggtggcggtcgcgcggtacgggaggatccactgcgaggacatcgtgcacaacgcgcgcgtggcgggtgccgcggccgcggtggtgtacaccgatcctctgcagtacggcggcgccccgggggaggcgtggttccccgactcccggtggctgccgccgaccggcgtgcaggtgggcagcctgttccggggcgtgggcgacccgacgacgccgatgtgggcgtcgtccgaagggtgcgagcgcgtgagtgtggaggaggcgatggacaccgacgacatgccggggatccccgcgctgccggtgtccgcgcgtgacgcggcggagatccacgccgctctgggcggcgacgctgcgccggcggactggcagggccgggagggcagcccagtgtaccgcctcggccctggcccggcgatcctgaacctgacgtataccgggaatgatacgatggccaccatcgagaatgtcttcgcggtgatcgaaggtgcagaggagccggacagatatgttatccttggtaaccatcgtgatgcctggacgtttggagcatcagatcccaatagcggaacggcagctatgattgagctagctcaaaggctttcggtgctgcaaaagcaaggatggagacctagaagaactataatcttctgcagctgggatgcagaagagtatgggctgacaggatcaactgaatgggttgaagaaaatagggagatgctttcctcaagagctgttgcttatcttaacgttgacgtttcagtagttggcccggttcaagatcctgacaattcatctcaagccgtgtatgattcatgggtcaaatccaacatttcccccttggaccaggctatcccatatatcattcgttatacgatgacttcgtgtggatggagaaattcggagatccagggttcagtaggcacgctgcagcggcattttcgtattacagctgctagcatctggggaatgatggctttgaggcttgctgacgaagagatcctgcccttcaattacatgtcctaccctgttgaacttgaggcatatacgaaggtagtagagaatgaagtaaggggaacggctatcagttgctctccactgcacaatgcaattagagctctgaaaacggcagctaccaaagtaaatggcgagagaaaggcagaacgggcattcactaacagggaaggcctgttcaagcgagaatggttcaaacatctggtctatggaccatcagaacagaatgactgggaaagtgcatcttatcctggtgtagaaaatgctatagctagtgcaaggaaggaaaacactacagaatcgtggaagtttgtacagcacgagattcacagagtcgcgagggcaataacacaggcttctgttgtacttgccggcagcctgacataacatcattgaactcaataggctggacattgtttcagcaatcaaacaatccaacaggccaaagaacgtttgacctgcatggatagtcatgttatgctggctattgatcctctttacaatttgattccttaagtacaaggaaaagaatgaagatatacacaattcatggcgatcgattcaagcacgaagttggaatgttacttgtacagatgcttgtgtagatttttttgtacacatgcttgtgtactacttttgtagttgtattatgtgtatagcttatagatatacaatactgctttgattttgtattgcgttctctgagaaaacgcttgaacgtcaatgggattaagaaataagcactccatgataaacaaaaaaccacccc

SEQ ID NO: 78124 - DNA, 444 bp, Oryza sativa
  Clone ID: PAT_MRT4530_77963C.1
ggtttgtcccacgcgtacccctattcttccggatgatttttaccaagaattacccgaacagaatccgatcgaccggcggccagaccacgctgcaacctgccctctacagacccagcgtggccgatgaggaagcgaagcccatctccccccgcggagaggaggagaggggcctcatgccgccaaccgcggaccgggatattccactcaccaccccggaaaccgccacggaaaagggccaggcgctccctattcgggggcctcgtccccctcatgggggaagaggggccccggaggggatgccccaacgcggcggaggggacaggggaataacaggtcaaccccactcccgaaagcggaggcctccgaagacagcaagggcgggtaccgcttggcaaccgagcacatcgcggggggggatccacccgggcagaccagaatgcagaa

SEQ ID NO: 78125 - DNA, 1534 bp, Oryza sativa
  Clone ID: PAT_MRT4530_77964C.1
atggtcctcactttcacaaacctcacaatgataatggataagatctccagcggtgaagaagttggcggtgctgggggtgcgtactcatacaacgcattgaaaagactggatcaaatatggtctagcatatgtgaagcgcaatcagattccaaagtccctgaagttgttactcgagtccaagggccattggttgattatgatcttggtgatggctcagagatctttgatgtattagtgtgtggtggcacattaggtatatttgtagctactgccctcagttataaaggccttcgggttggaattattgaaagaaacataatcaaaggtccggagagaacaagagtggaacatttcaagaaaagagcttatggaacttgtagaagttggcatcctttctgaagaggagattgaacagataatatcaagtgatttcaatcctactagatgtgcatttgagagtaaaggtgaaatttgggtggagaacatccttaatcttggaatttcgcctgctaaacttgttgagatcatgaaagaacgcttcgtttcttcaggaggagccatatttgaggggaaaagtttgtcaagcatttctgttcatgatgactttgctgtattaaacttgagtgatggtggttctctgccttgtcgacttgttattgatgctatgggtaatttttccccaattgtgcgacagggttttcctgctggttctggtcccacggatcgcactacatacatgttcacctatgttgatccacattctgggggcccaaagctagaagaacttttggagacgttctgggatcttatgcctgcttacgaggatgtggttcttgaaaacctggatataatgagagtcatatttggaattttcccaacctatcggaataggcatgccatttctctgcttcggaagcctgttggctgtacccatttctcccccttaactagtaacgcccttcactgctttgcacttcaggttggtgatgctagtggaatccagtcacctgtttcttttggaggttttggaagcttgacaaggcatcttggtcgtttgtcaaatggtatatatgaagcagtttcaggagatcttctggatgcacgtagtttgcagctgctgaacccttatatggttaggccaaatttaagtgcatcatggttgttccaaagagcaatgtcagcaaggccgcagatcgatgtttccccaacttttatcaatgagcttctctttgctaattttgagtcgatgcaggatgtaatacaatttggacctctggttaaaactctgggtctagtaatgatcactcgaccacagattttgccttccatttttaagcaggctggacctggagtcattcttaactggtcaggccattttgtgatgcttggttactatacattcctttccacctttatagacccaatcctcaggccttgggttgaatccttgccattgaggaacaaatatcaatggaaacgatatctcgaagcatggaagtatggagctggcttagattatcgccaaggggaataa

SEQ ID NO: 78126 - DNA, 177 bp, Oryza sativa
  Clone ID: PAT_MRT4530_77965C.1
atgaccttcatcggcttcaaccgcaccccgtcacggttgatggccatccgtgacgggccctaccctaggggactaagattctgcctctctcgggccatcattgacgaggctttttgcggcccgacaaacatgactttctttgtgacaggcctcttgcctccgtcatggatagcctga

SEQ ID NO: 78127 - DNA, 461 bp, Oryza sativa
  unsure (1)..(461): unsure at all n locations
  Clone ID: PAT_MRT4530_77966C.1
gtcggggaagattttcgtcggaggcgttgcttgggagacaaccgaagaatcattctccaagcattttgagaagtatggggctataactnattctgtaattatgaaggacaagcatactaagatgcctcgtggatttggatttnttacatttnccgatccatctgttatagacaaggttttggaggatgagcacgttatagatggaagancggttgaagttaaaaggacagtcccaagggaagaaatgtcatcaaaagatggtccaaagacaaggaaaatctttgttggtggattaccttcatcactaactgaagatgagttgagggagcacttctccccatatggtaagattgttgaccatcaaataatgcttgaccatagcctgggcgtcctagaggatttggtttttgtcacttttgaaagtgaggatcctntgggaaggggtatatcagagggaagat

SEQ ID NO: 78128 - DNA, 336 bp, Oryza sativa
  Clone ID: PAT_MRT4530_77967C.1
atggcggcggtggcggtcgagacgacagcggtggcggtggggacgaggatggcagcagccaaggagtgcaacgctgtggcgatggggaggaagaagggaaggagagggaggatgacatggatagatcgactcccagaagtcggcggcggccggacctggaccggctacaagaagggcaagttgggaatgggcaggttggtgacggttggttgcagtgagggaggaagtgaagtccggcgagattggctacgccgccgccagggacgacggaaggggatcgggaagagacagattatcaggtcggggacttgtaccgtctctatgaaaattgactaa

SEQ ID NO: 78129 - DNA, 423 bp, Oryza sativa
  Clone ID: PAT_MRT4530_77968C.1
gtgcccgtgccggcccgggccgtgccgccgttttggacacctatatcccaaaccctagccgccagcccactcgctgcccctccccctctctcgctttctccccctctccaggcggcgaccgggcctcgctcgattttccctgccggcgacaacctctcccgcgcgccctccgctgctctccgtcatctcctcctctcgaccctgccactccgtcgctgcagcaccatggtggagactcaccaaagcacccccactgccgcctccaagtactcctccctgtccccttcctcctccgccgccaagcagcggcgcccgcgcccgcaaagagcgccggttcgtgcgaggatgcgttggcggccaagagaggtgacgattttttttgtcttttcagcgcgtgagttggtggcatgggcttgggattga

SEQ ID NO: 78130 - DNA, 495 bp, Oryza sativa
  Clone ID: PAT_MRT4530_77969C.1
aaatataaaaaatattttaaaaaatttttttcatataaaatttataatatgaggggtattatgggtgaattttaacaaggaacggggggggggctaaaaaaaaaaaaaataaaagggggggggttttaacccaaacggggaaaaaggaaaaatcactggaaaaaaagggccaaggagggcccaggccaaaaagggggggaaaaaccggggaaaaagaaggaagcccgaaattacactcttcggggggaggaatagaaaaaaatccggagccggggttaatgggggaaaaaaaaaaaaaaacaaaacgtaaaaagaaaaaggggggctaaaccgatgaggggggacccccccttaaattaaaaacagacaaggggccccctggcggggaaagaaatcccccttgaagaaaaaagaggaagccaaacggcggaaaccggccaaaaaaaaaaaaaatttgggcctctgagaaaaaaaaaaaaaaaaaggggccccccc

SEQ ID NO: 78131 - DNA, 404 bp, Oryza sativa
  Clone ID: PAT_MRT4530_7796C.1
atctggtcgaccgcccacaaccgccggcacggctattcgaatagttttactctggccagaggtgtacaactgtacccacaagacacagccccatgacacgtttccatgcgccgacatgccaccacgacatactggaaagaggccgtgacaggaccattcgcataaccccctctaaccgatcgcaccacacctcaaggttcgcccccgtccccagcaggcaacgggaagcccccctctcgtgccttagtgaatccggaagccgatcagccagacaccccggccgacccaactccatcacgcccaccctcgcctgggtacattggctagacgaaagctacactacaagcccagccgttgcccacgctggcttgtggtaagcatgataaattcttccagggtttccc

SEQ ID NO: 78132 - DNA, 312 bp, Oryza sativa
  Clone ID: PAT_MRT4530_77970C.1
tgcggttgtcgaccccggtacccgtaatttctccacaaaaagggatacctttcagattgtacctatcggctggtgataagtcgattggctcagtattgattcaagagcttgaaggaaaagaaagggctatattttatttaagtcgtaggctcttggatgcagagacaaggtattctccggtggaaaaattgtgcttatgtttatatttctcttgcaccaagttgaggcattattgtcgcgaccgggaaaattgcattttcccgaacgctagtgtattaacatattctccaaagcttctcttactgaagaggg

SEQ ID NO: 78133 - DNA, 216 bp, Oryza sativa
  Clone ID: PAT_MRT4530_77971C.1
atgacccgatcagtgttcagtaagaatgcagaagcatcatccaaagggaagaagttcgatacacctaccagagtcagtcgccaaaaagaggctgctacagatgccaacttggatgatcatggtgccgaaagcaagagtctttttgcagctcctaggtcgtcggcatctggtggcggcggcgttcggcagcggcgacggtggcagccgcgacagtag

SEQ ID NO: 78134 - DNA, 1791 bp, Oryza sativa
  Clone ID: PAT_MRT4530_77972C.1
gtcgtcaagttatattcacattccgaagggaagaacattgcacgcgtgaatagttagtttagtgcatcattcatctgcacttgggtaacatgtttcacacgaacagaaaaatgttgttatgtacatatcatataccttacatggcaatagatagggtaggtagtcacacacaatgtacagaaacagcgttaggaactacattgaactagatgtgagatttcgcacaagacagcacccactgttggcagacactagctgcagcgctcatctcaattttctgcaccttgaggagcccggccagcacgcctgaaccatgtcttgaaggctgcgatcaagtgcgggcagtcgtcgacgttgcgagtcgagaacccgaggcactgttgcagcaactcctgagcatctgggacaggcaaggtggagatgatctgaagaaatgtctcctctagctcttggcaatttggtgacttgtatccacactgcataggctgaaccatgttcctgcagacgtttaggacaggaagccaacttctgacaagcttcgtcctcacctgacgaggaactattgtctccccattcacaaccgaattggcgaacctgagcgtgcatctggtaacaagcacaggaagcccaggagtaatattcttccacatatccacatcattcagcaacttctgcagatcagcagtcagtgcagcctgctcactccacagcttaaccgcattaccggccaccctcatttcgaccatcctctcgatgagccagagcaagtgtctcacattcaataccgcggactgcaggttcagcctctgtatcgcgtcccgctcatcgctgtccaccgcgaccctgaaatccgggctggcatacttccccatgagctccttgacagtctccagccgtgacaggaacgcctcgtcgagcaccttctggacgcagtcacgggaggggtagtccttgaggagcatcgcgacgaacgccttggttgcggcggggaccgggtgcccatggatggcggagtggatcaagccgtgcagcatcgcctcggagggcgacctggcggcctcgcccccggcggcggaggcggaggcggctgggggaggcgtgatccgagcgaggaggtcggcagcctcatcggcggggaggagaggcgcgatctcgaggacgcgggcctcctcgtcgggcgaccagggtaccgcctcgaggaaccgcgtgcacgcctcgacgcacgcgtcgaagaggagctggagcgcgacggggaggatgtcgagggcgtcggcgggcgagtggatggcgccggcgaagtcgagggtgtggaggaggcggacgacctcgacgtgggcgtggaaagggtgcgaggcagagcgcggagcggccacggccagcgagaggtggccgtgcccccccgcggcggaggtgggggcggggctccagcggtcggagaggagagcggcgaagtagcgggagcggagcagggacgccgaggagacgtggaggtcgagggaggggcggtgatcctcgccggcgtcgaggtccgcgtcgtcgtcggggcaggggtcgaggtggaggcggaggacgaggtcggcgttggggaaggagagcggaggggaggaggcggaggcggcggcggcggcggtgtggggagccggcgaggaggagagggtgctgaggcgggagctgctcgccgaacgctggcgcttgcggagggacattgccggcacgccgctgctcggcgtagggggaattggggattttttttttccggttcctttctcgggacggcggggaagaaggcga

SEQ ID NO: 78135 - DNA, 3220 bp, Oryza sativa
  Clone ID: PAT_MRT4530_77973C.1
tgtgtttcgttccttcgttgcgttgcgttggttgatggatagatcgttctcgatggtgatggagggcatgggcatggcggcggcgtgggcggcgggggacctgtgggtgctggcggcggcggtggtggccggcgtggtgctggtcgacgcggtggtgcggagggcgcacgactgggttcgcgtggcggcgctgggggcggagaggaggtcgaggttgccgccgggggagatggggtggccgatggtgggcagcatgtgggcgttcctccgcgccttcaagtccggcaaccccgacgccttcatcgcctccttcatccgacggtttgggcggacaggggtgtacaggacgttcatgttcagcagcccgacgatcctggcggtgacgccggaggcgtgcaagcaggtgctcatggacgacgagggcttcgtcaccggctggcccaaggccaccgtcaccctcatcggccccaaatccttcgtcaacatgtcctacgacgaccaccgccgcatccgcaagctcaccgccgcccccatcaacggcttcgacgccctcaccacctacctctccttcatcgaccagaccgtcgtcgcctccctccgccgctggtcctcgccggagtccggccaggtcgagttcctcaccgagctcaggcgcatgaccttcaagatcatcgtccagatcttcatgagcggcgccgacgacgccaccatggaggccctggagcggagctacaccgacctcaactacggcatgcgcgccatggccatcaacctccccggcttcgcctactaccgcgcgctcagggctcgccggaagctcgtgtccgtgctgcagggtgtgctcgacggccggagggccgccgccgccaagggcttcaaacgctccggggccatggacatgatggaccgcctcatcgaggccgaggacgaacgcggccgccgcctcgccgacgacgagatcgtcgacgtcctcatcatgtacctcaacgccggccacgagtcctccggccacatcaccatgtgggccaccgtcttcctccaggagaaccccgacatcttcgcaagagcaaaggctgagcaagaggagatcatgagaagcattccagcaacgcagaacggattaaccctcagggacttcaagaagatgcacttcctctcacaggttgtcgacgagacacttcgctgcgtcaacatctccttcgtgtccttccgtcaggccacaagagacatctttgtgaacggttatcttatccccaaggggtggaaggttcagctgtggtacagaagtgtgcacatggatgaccaagtttatcctgaccccaaaatgttcaacccttcaagatgggagggaccccctccgaaagccggaacattccttccatttggactgggagcaagactgtgccctggaaatgatcttgcaaagctggagatctctgtcttcctccatcattttctcctgggttacaacgccttccgcctcgccggcgagcaagccggcgccgtcgacggcctcctctccctcccggacccgccctctgccctcctcccctgcgcgacctcctcgctcgctcgcccgcccgcccgacctccgtctccgggtttggtttctttgcctagagctgacccatccagcgtcttcctgatctctttcgggcgtcgtgctgtgcttgtagcagttcatagcagctttgttaggagtgaaatggatggggttgtcgccgcttcggctgatgccaccagggacgagattaagattatgaatgtgtacatatgggacatggatgaaaccctcattctgctcaagtcgctgctggatggctcgtatgctggtgcctttgatggcctcaaggaccatgataagagtgttgatatagggaagaggtgggagaatctcattctggaactctgtgacgagcatttcttctatgaggagattgagaattacaatgaaccctttctcagtgctgtcaaagaatatgatgatgggaaagacttgacaacatatgattttgaagctgactgctttagttcgccttatgatgatctgaataaaaggaagcttgcttacaggcaccgtgctattggagagaagtatacaaagggtttggaaaaaattctggaccaccacatgatcaaagtctggaatgatctgtatagcgcgaccgacaaatacaccgatggttggctttcttcagctcataagttgttggaagaagcaatgggtaaatcaacagctgagtccactgccaaacattcaagcatcaattgcatagttacatcagggtccctgattccaagtcttgccaaatgtttgctctatcgtctggatgatgtggttgcattcgagaatgtttacagctcctgggaagtcgggaaactgcagtgcttcaaatggatcaaggagcgctatgatggcccaaacgtccgtttctgtgcaatcggagacggacacgaagaatgcaccgctgcgcagataatgaagtggccatttgtcaagatcgagttccaccctgatgcccctcataggttccctggcctgaaccttccaaccattcatcgcatcatggataccgtttatgattcatcgagcaacgatggtgacgggagcgaacaagttccagggcctccttccattctgctcaagcagcagcagggggaggaagaagcggtgaaggagaaggtgaaggacaaggtgagcgcggtgaaggcgaaggggaaggtgagcaaggccaaggccgacgagaagaaggaggtggcgacggcgaggtcccacgccgagagggagctggcgcacgagcgcgctaaggccagggtcgccgccgccaagatggagctgcaccaggacaaggccctccaccgcgaggaggccatccagcacaggctccataagcatggcgccggaaccaccgccggcaaaacacgaggcctgggagatctgcttaactccagtgcaggtccaaaactcgccttcgggtatgctagcgtgccggttgatttgatcctacaatcaacaagaaataactacgtccactgtgttggcttccctgtcattactacgtcggcctcacacgccgtcactcgggccagcctccatgccattgcccgtactgacctctcgctccatcacccactcgtagcaccagcctcccatggtcccatctccaccaaccacgccggtctccgcaaacgccagctacgcctcctcgtgtcgcgctag

SEQ ID NO: 78136 - DNA, 494 bp, Oryza sativa
  Clone ID: PAT_MRT4530_77974C.1
cacgaggtgcctttgctcaactattttgataggtaaatctgaaaccactgaactaaatagttgagcaaaggcaactattctgtattcaggttagcaggctaaatatcgtgcatacagaatagttgcctttgctcaactattttgataggtaaatctgaaaccactgaactaaattaattttgctttggtgagttcatttataaggtagggagcttgtcctacatcacattcctgactccagctttctatatactacaatagttgtctttttctatgtttttgagaattgtgcctgaatttcactagatcgcgtctttttgaaatgatatcttaggttgtttgcatgacatgggtactactagattgctaccaggttaactggttaagtctattattgatatgaaggattatttcagtcagacttacaaactgaaagatttccaaacttgtcagtgacttacaaaaatgttgcaaatgtatctgttgtcttccat

SEQ ID NO: 78137 - DNA, 1574 bp, Oryza sativa
  Clone ID: PAT_MRT4530_77975C.1
aagaaaacaatgcacaccgattgtcaaagctatcagaagcattcaagctgcattaacaaacggaacatcatgtcactgccgaaaagtaacatcatgtcactgccgaaaagtgtgttgtgtgtgtgtgtatatataattcacagctcatgagactttcgtcacttgtcaagacaacaattccgagagctgcacgtacaaaaatatatccaggaaaatttccaacaaggcgctctagcaagaattagcctcaactgcatgcatgctttgatggaccagcttccaattcttcagaagatgtagtcaggcgggtgcagagggaaaggagctatgtcggcaataaaagggcttcctctaggctgaccacacctccaagggacaagcgtcaagttgcccatcacggatccaggctccagtgctgccgatatggaacacccatagacaaacagctcctcgccgcacctcaggagaggacacttgccatggccgccatagttgcatgtgtaagggaggacttcatctccaatctgaatagtgtagtggcatgagctgaagctggaaggaagaataccacttgcaatctacatgccatgcatactggcggaagacgagtaaggaaatagtactggaatctaactgatatgccttggcagcatcggggttttccggcgctgcgcctgcagcggcccatcctgtaggcgactaaggtgctcttccaaccacagcagaaatccatcttgaggcatgccatgatcatcatccacagcgacccttattgtcgcttttggcacgcatgccatgatttctctttcttcattccaatacttggtgccgacataaagacggccactcgcacaatcaagaagaaatatcttctccccaaaacaactcgtcgcaactacaatgtagtttgagtttttctgaacagcatggtgcgcgagcggtagcaagcgcacggtatacctctggtgaacataatcatagcctcccataacgccgtacgagacctcctcgccgcggccaatgtgcagctggccgttgcagaaacggtacagtagctttgtgggcataggaagcacaaggcccaggttacattccgcgacggctatctcggcttccgaaacgccttcccctagagtcctcagcccttccgggaaatactcgcatagccatgccctgaatgagctccagaagatcttcaccctcttaacaagtggcaaagggtacatcccaaaagattggaaccaagctttgtaagcatccttgaaggaagggagagggaggtcgccgggagcgaggggggcgtcgagggcgaagtcgtcggagcagaagtggcgccagagggcctcgccggaggcggcggcgcggagggtggagctggcgcaggcgagcgcggcggcgcagcgggggccggccttggcgatgatgatcgcgagcgggagcgcggggagggtctccagcaccgaggccccctccggccgccgctgcgccttcgccggcgacgccatcggccgccggtgggttttcttctacgagggttttcgcagtctttctttttttccccttcgtcctctttt

SEQ ID NO: 78138 - DNA, 938 bp, Oryza sativa
  Clone ID: PAT_MRT4530_77976C.1
atggcgccggttggtctccctccaggctttagatttcatccaactgatgaggagcttgtgaactacttccccccgaggaaggtccatggcctcagcatcgacctcgacataatcccagaagtagacctctacaaatgtgagccctgggaattggaagagaaatccttcctgcctagtaaagactccgagtggtacttctttgggccaagggatagaaagtatcccaatggatgccgcacaaaccgtgcaaccagagcaggatactggaaatcgacggggaaagatcggcggatcaactaccagaacaggtcaattggtatgaagaagacactagtctactacaaaggtcgagctcctcaggggattagaaccagttgggtgatgcatgagtaccgcatcgaggaaagcgaatgcgagaacgccatggggattcagttacaggactcctatgcgctatgtcggattttcaagaagaatgtggtgttgggtgaatttgacaagaaaggggagtgcagttcatcacaggctaaaggaaatgaagaagttacagatttcggggatgctggacaatcctcgggagcaaatgagaatgataaagacaattcatggatgcaattcatagcagaggatctatggtgcaccaacaaactaaagtgaactagaaaactgagagaaaacagcttgttaacttcatctaaccagatatttcggtattagttatactgcgcgtatcttctgtatatgtttgataaggacacttctcactttgcataggaggaccactttaagtttggatgctggttcttaaattaggtttatacttttgttcctttagtactgtataatatatctaaaattgtgctactttgtacttcaatcttcaattaacatgtacctatcatctaatgaaatgataccaaaaaaaaaaaaaaaaaaaa

SEQ ID NO: 78139 - DNA, 381 bp, Oryza sativa
  Clone ID: PAT_MRT4530_77977C.1
atgggtttatgcttagtactgaagaaattgaagaatcggatgaaaaagaacatgatactgtttgcagatcgtgtcatcaactggaaatggctcgtttgctcaaattgttctgcggctccttgcacggcggtcggacgcggtcggaggagatgctcccactactcgccgcacgtggtcggaggagatgctcccagtaagaagagctggcgacctcctcctctgcctcctcctcctccggccaccttcgccgcccacggcctgctgtcgtcgccgctccgcctacccctccgctccgccctgccgctccacccgcggcctgccgccgcgccgcttagccagcatgcttcggccgccgccgtcgtcggaggcagcggggactga

SEQ ID NO: 78140 - DNA, 1140 bp, Oryza sativa
  Clone ID: PAT_MRT4530_77978C.1
atggtggcgaagcgcggcgccggcgcttgtgccctctcctgggatgaggagggcgaggtgtcccgcggcgagaagaggaggagggcggatggggatggctcgtcggacgttggcggcggcggcggcataggggcgttcgacgcgctgcacgacgagctggtcgtgtccatcctcgccgacgtggccgcctccgccggctcgccggctgacctcgccgccgccatgctcacgtgcaggagattcagggagctggggaagcacgggctggtgctcgcccgggcctcgccgtcggccgtcgccgtgcgcgccgcggcatggtgcgacgacgcgcaccgcttcctcgtccgttgcgcggaagccggaaacgtcgaagcctcctaccttctcggcatgatcatgttctactgcttcgagaatcgcaagctgggggcggagctgctcggcgcggcggcgcggcgcgggcacggcgaggcgctctactcgatggcgatcatccagttcaacggcagcggcctccccaaggacgggcgcaacctccaggctggtgcccagctgtgcgcgcgcgccgcgtcgcgcggccacaccgacgcgctccgcgagctcggccactgcgtctcggacggctacggcgtccgccgctccctctccggcgggcggcgcctcctcatccaggccaacttccgcgagctgtgcgccgcggtggcgaacggcggggccaggttcgccgcggcgctggggcgcagcggcgagtgcaagccgccgggcccgcacatgtgcctcctgagcgactacgggtgccacgtcgccggcgcggcggggcggcgcgcgcacgcggcgaacgcgttcctggccgggtggtacgcgtcgcggccgctggcgtccggcgccggcgccgcggcgctccggatgtgctcgcagcccacctgcgggcggccggagacgcggaagcacgagttccggcggtgctccgtgtgcagcggggtgatctactgctcccgcgcgtgccaggcgatgcactggaaggtggcgcacaagagcgcgtgcgtgccgatggcgcactggctcgtcgccgccaacgccggcgccggcaatgcggtcggggccgcggcggcggcggcggcgcagatggcgatgccgtga

SEQ ID NO: 78141 - DNA, 743 bp, Oryza sativa
  Clone ID: PAT_MRT4530_77979C.1
ccggccgggctgatccccaatccccaatccccaatcgatcaatcctcacttccccagccagcccgtctgcggagaaatcgatcccgcacttcctgcagccgccgccgatcccgcatcgctccaccggctactgccttttctcatctccaaccttcgctcttcccccacaatttctgcctgtctacggctgtggggttgcctgctgctggttgtcgttcagcgtccatcgggcaggcagcagcgttccagtggatctcattgacgccggccacaacgcccggttcaacaccgcattccccttggctcaccctctccggcgatgagctcgagcgggcgaggcggcaagcggcaaggggcgccgcccccagcgccattcggggctgcggcgaagagggcccaaccccacggtgggcacctagcagatgactccatccgcgctagcggtgacctctcatctcctatcggttcagcgcctaacggtcgctgcctcctcttccacaggtgtttttcaggaacatcaaatttatgtatgcttttgttatgctcgatgaaatggatgaatcggctgtacataatttgtcagctcgctgccacactatgatcagcaaaggcgcaagttgatccaatttccatctgcatctggtccttggtctctgatcagttatcaatttgcaagagtgcttgattttccaagtttcgataccggacaatcttccttgctatgacaactaagagttctttct

SEQ ID NO: 78142 - DNA, 660 bp, Oryza sativa
  Clone ID: PAT_MRT4530_7797C.1
atggcggccggacctcctgcgccggtctccttcccctccggccgctctctcccccttccaaccctatttaaaccctccccgcacctcctccgtccgtttccgcctctcgccgcccttcctcctcaccggattcgagctcgcgacgtcgctctctctctctccgccgtcgccgccaagctccggtccgccgccgtcgtcgccccggaccgcctcccaccttggtgccgcctccttcgggttcgctgcatcctcgccgacctcgtccacctctctgtttcgatcgccgaccgccggaacgccgtcgaccccgttgacccgagccgcgccgccgcctccctccgctccggccgcctcctccgtcgccgccgtcgccccggggtgagccgtggaccgtcgcctcctttcccccttccctcccctctctcggccgccgctccgccgcgccggcggtcgccggcggcaaccatcggggcgcgggcgcgctgcctcccgccgaccgcgccggcgtggccgccctcgggcgcgccgagtggctgccgcgtggggcccggccgtcagctgcccgcgccctcggacgctgcagcttcggaagatccgctcttcgtggaggttgaagccgacgtttgggaaagcgagcaaggcaagtcacatcatccttga

SEQ ID NO: 78143 - DNA, 410 bp, Oryza sativa
  Clone ID: PAT_MRT4530_77980C.1
ggcaaggattgctcttccagtgtggccggatatgctagctcggcagctctgactgcttctacggaggcctttgtgaggtgcggcgaaccaacccctagacttcttattccggctggtgagtggcctggatcagtctatagcatctcatctaggccacacagtgagctgatggtgatgttctgatcttgaagcacatatgcttacacgtgattcggaggtggaatatgtacatgtgtttctttagcctgttcgagcccatctaggcctgctataatatatgtatcaagagtgaattacacccacggtacaactacttgctaggtgggtgcgatataccgcaagtacttgagaattgaacgttcgagtgtaacaacttgacaacgtgttgcgttctagtacaagaacttgac

SEQ ID NO: 78144 - DNA, 457 bp, Oryza sativa
  Clone ID: PAT_MRT4530_77981C.1
tggagggacgacccacgcgtacgcccacgcgtccgaacattacagcaaaagcataagaactataaaccaaccacagtgaaaatcatttttttcttggctctccttgttattgctgcatgcagtgcctttgcccatttagatgctgttactcaagttcacaggcaatatcaggctgcagccgcatctcatgctgcagcaacagatgcttaccccatgcagcgagttcattaggcagcagtgcaacacagtggcaacccccttcttacaatcacccgtgtttcaactgataaactgccaagtcatgcagcagcagtgctgccaacagctgaagatgatcgcacaacagtctcactcgacatccattagcagctgttcaggctattgtgcaacacctactgctacaacagttagctagcgtctacttctatcagagtgaagctcaagcccaagctatgtt

SEQ ID NO: 78145 - DNA, 636 bp, Oryza sativa
  Clone ID: PAT_MRT4530_77982C.1
atggcatatgtggaatttccagcattaaagaaactccaattacatgatttagagagcttcgagagctgggtggcaacaccaggaaaagaagagctgtcctttccagtgcttgaggagattgatattaggaactgtccgaagttgacgagtctgcctggaccaccaaagggtgtcctaacttccagtgcttatgggggagggggacaggtgatacagagtccgattaatttacaggtggagcatggcaatgacctcacgcccacaagtgtctcagagaagccaggaaataactatttaccttgcctagataccctattcataatgggttccgataagttggccatgcttcgaaatctgcctccatctctcaagaacttgtcaatttatcactgtccagagcttcgctccatatcagggaatttggatcaactcgtggacgtgagtattgggggctgcaataagttggactcgcctgattgggggaacctacctgcattagaagactttggacttttgaattgcaaacgtctgacatcattacctggtaatcttgggaattactctgctctcaggagggttctcgtcaaatactgcccagccataaatatgaagcctctttataagcacctaccatga

SEQ ID NO: 78146 - DNA, 540 bp, Oryza sativa
  Clone ID: PAT_MRT4530_77983C.1
ggatgctggatataatggcagttcagtaatcggtaggactatttaggaggagtttctgcagagtgcaggatgaaattatgagggaaccaacaatttctggcaaagtgggaggtaatcaaacaaatgaatttagtgggagccgaaggattcacatacgtgcaacattgaaagggatcaataatatgcagcgtgaattgttacatagtgttgcatgggtcgcatgcatcgtcggatgggaacaaatcagatgggttgggttggttgagtgtgataggctggattcacccggcaaggatgaatgacacagattagaagcaaggagccaagaaagacagacaaaatcaagaaacacaaaaccaaatggtggatcaccttgtgactgaaaaataagcattacttgtatagttgcataggatgcatggaacgctaagagcttaattgttcttaattgttaatcagtttccttttatgatagtgtaacagtaacacaagtttattttttcttgtcagactggtggtatttctcaacgacattactag

SEQ ID NO: 78147 - DNA, 1794 bp, Oryza sativa
  Clone ID: PAT_MRT4530_77984C.1
tcgtttccagttgatacgacgaccaatagctgatgcgtgctcggaatcctgcctccgtgcatggggcaatgttgatagcgcaagaggcgagcacaccttctcaaaatgccatgtcagcactagccaggaaaacagtgagcattcagtaacatcaacatccagtccaaagtctaaaccatctttagtgatggtaagattgatgcccagcaccagcaccatagccatggccggctccaaatgtcgctccaggtccaccgtacagcaccccagcacggcgcgtgcccatggagcttcccggtgcgaagtgcggccgagcacctggtgccggtccgacaaaaccggcacgatcggtgtaggggaaagagtgggaggccgggttccgaaaagatgacccgtagttcgagttcgagccccttgagtactgatgatggacttgtaggcgttgcactccgagttgtttgcctcttccacaacagaatttgaatgtcttccacctctcagtgcaacctgagtcttgttagttattctctttatataagacttaagaagcggtacaggtggaaatcgctcaagcaaaccagcctcatgggcgatatgaatagcttctatctcatttcctgactttatgaattcctcaataacatctctgaggctatcctcgaaaccaaggacgcaagcgattctggcaagttccctcctccgtccattatcaactaatagccgcctcaagaaatctacatcatacctatcttttagtccaaatgcagcaaccatctgcaggaatatctgcacctctgcctgtccacccttctctccctccttcacctctcttcccgacgccttcttatcttcctcgactttcctcttctctacttcccctgtcttcgccgcattggccaccttggcttccgcctctcctccttccttctctacttcctctgggtcctcttcttccttctctacctcctctgcatctgcctcttcctccgacgcgggcaccatttcctctgggtcctcctcttcctcctcttcttcctcatctacatgctcttctttcttctctgtcgctgttgcgttctccaccaaaggcgcttctgtcatctccacctcattgttatccggtgcatacaattccatcttgatcccaaatttctctgaccaattcttggcaactccggccgccctctcaaccagcgtatctcctatctccggcggcttccggccatcggaatcaaacaacgagcgcagcagtatgccgagcacccagaactggtcctcacctgcaccatcctccgcggccaagaagtcggcgagggcgtcgagcacgaggcggggcgggtcgaccgacgcggcgacggcggggccgacctccttccggacggcggcgagctcccgccgccgcgccgccatgaagcgccacagcgcgggggcgtccatgcggccgcacatccaccggagcgcgccgcggacgtcggcgggcgggggctccgcggacccggcctccgcgacggccgcggacagcgccgcctcggcctcggcgaggcgcgccgggacggcggcctcgcgggcctcgagcgccgcgagggactcggaggtggaggcgcccgcggcggctagggcgtcgtcgagcgacgcggagcgggcggcgaggtcctcgtcgagcgaggcgaagtgggcgagcgcgcgcgaccaggcgtcgtggcaggaggcgaggagctgctggtgggagtcgaggtgggcgaggaggcgccggacctcgccggcggcggcggcggaatcgccggtggcggccat

SEQ ID NO: 78148 - DNA, 381 bp, Oryza sativa
  Clone ID: PAT_MRT4530_77985C.1
atgaaaaagacaaatcaaatctaacttttcttggaaaaaccgacgccaacgttaagatcagtctcctttctttttggtggcatccttccgcattggcggcaagtggaagagttgggttcgattccctttatacgcgatgtggcccttgcttctgttaactacgcatatctcctgtttctatacttgctagctagcaacctcttatcacacagaaagcgtgacatgaatgcatacccccgtgtatacaactccttactatctctaatataccattgcttgttcggcgcatagacctattattattatcggtcaggcttggaggacgacgtaccatgatactttcagttttgtcgagccctgctttggtctctggtttgatgg

SEQ ID NO: 78149 - DNA, 1818 bp, Oryza sativa
  unsure (1)..(1818): unsure at all n locations
  Clone ID: PAT_MRT4530_77986C.1
aattgggttatttatagcttcactagctacggctgcgcgttccatggtccaaatctatggtttgtgttcggtagtgtttttttttttgtttttttcttttttntttttttttttttttttttttttttttttttttttttttttttttttacaagcaaaaactcaaaatctcttgtattatgggagggagggagtagcatgcaacaggcggcactagtgcacgttgtcctaccgagccttgccaccggagctagcttagcctttgaccacccttgttcccaccagcgaggagcacctcgtggatgagccgatccagcccacactccgcgggcccacccggccgcgccgccctcgccgccgcctccttccaccccgccgcgcgccgtcgcatctccgcccccttctccccctccatggcctcccgtatcagcgccgccacctcccctcgccgcgcctcgccgccgatctccatcccgacgccccactccgtccgcttgtaccggcagttcgtctgctgctccgcgaagaacggccagctcagcatcggcacgcccgcggcgaggctctccagcgtcgagttccacccggagtgcgtcaggaacacgcccaccgcagggtgttcgatcacctgctcctgcgggcaccacgtcgtcagcagcccgcggccctccacggcggcgaggaactccggcggcagcacggcggcgtcgcccttgacgaggtcggggcgcacgttccagaggaacgggtagccgctgtgagcgaggccccaggcgaactcgaggagctgctcgttcgtcatcacggcgatgctgccgtagttgacgtacacgacggagcgcggcggccggccgtcgagccactcgagaaggccgccctgctccttccagaggttggcgccgacggcgacgtcgagctgggagcccgcggggacggcgcggcggacctggaggaggagcgggccgacggcgtagacgggcggcgggaggaccctgcgcatttcgtcgagcgcctggcgctcgaggtcgtcgaaggtgttgacgatgacggcgtcggggagggagaggcgctcgcactcgcgcatgaggaagttgagcatggtgtccccgcggtccgtggtgcggatgaagctcgggaggtcgcggagccggacgccgtcgcacatgccgcgcgcgccgtcgaccaccgtgtcgaggtacccgtcggtgagctgcgccgcgtccctgagcggcacgaggccccgctccacgagatgccggtagtggcggtaccccatgagcccgcacgcgctggccgtccacagcgcggcgcacggcacgccgatccgcctcgccgcgtcgtacgcgaacgacatgacgccgtcgcagacgacgcacgtcaccggcggcgccgcggcggcgtcggcgttgatcgtggcgaggagcgcgtcgaggtgggggaggcaggtggtcatggtggagtagcagagcgcggggatgtcctgggtggcgtcggggtcggagggcgggaggccgtcggggatggcggcgaagcggaacccggggacgacgccgtcgagcgcggcggcgccacgggaggcgaggaggcggcggtggttgaactcggtgttgacgaaggtgacgtggaagccgcgcgcgtggagcagcttggccagcttcagcatcggcgtgacgtggccctgcgccgggtacggcaccatcacggcgtggtgctgccgcctcgccgtcgccgtcgatcccatgccgcgatggagcccatgtctctgtatgcgtcactgtactcgtgaacctcgtgtggtcactgaaccgtgtccagtaa

SEQ ID NO: 78150 - DNA, 1428 bp, Oryza sativa
  Clone ID: PAT_MRT4530_77987C.1
tcagtcacgggcgtccaaagcttgacgcttcttcccaccactgagcagcacctcgtcgataagccttgtcaagttgatatccgcggttccaccgggcagcgtcaccctcgtggccatctccttccactccgccgcgcgacgccgcatctcccgccctttctcccctcccatggcctcccgtatcttggcggccacgtcgctccgctccacctcgccgccgatctccatcccgacgccccactccgtgcgcttgtaccggcagttcgtctgctgctccgcgaagaacggccagctcagcatcggcacccccgcgccgaggctctccagcgtcgagttccacccggagtgcgtcaggaacacacccaccgcggggtgctcgatcacctgctcctgcgggcaccatgtcgtcagcatgccgcggccctccacggcggcgaggaactccggcggcagcacggcggcgtcgcccttgacgaggtcggggcgcacgttccagaggaatgggtagccgctgtgggcgaggccccaggcgaactccaggagctgctcgttcgtcatcacggcgatgctgccgtagttgacgtacacgacggagcgcggaggacggccgtcgagccactcgaggaggccgccctgctccttccagaggttcgagccgatggctgtgtccagcgggctgccccggagggaagatggcgcgcatggcgtcagcgccggccgctcgaggtcgtcgaaggtgttgaggatgacggcgtcggggagggtgagccgctcggcctcgcgcatgatgaagttgagcatgatgtcgccgcggtccgtggtgcggatgaagctggggaagtcgcgcagctggacgccgtcgcacatgccgcgcgcgccgtccaccaccgtgtcgaggtacccgtcggcgagctgcgccgcgtccttgagcggcacgaggccgcgctccacgagctgccggtagtggctgtaccccacgaagccgcaggcgctcggcgtgcacagcgcggtgcacggcacgccgatccgcctcgccgcgtcgtacgcgaacgacatgatggcgtccgccacgacgcacgtgaccggcggcacaccggaggtcgggtcattgagctcggcgaggagggcgacgacgtgggggaggcaggtggtcatggtggagcggcagagcgcggggatgtcctgggtggcgtcggcgtcggacggcgggaggccgtcggggatggcggcgaagcggaaccccggcacgccgccgtcgagcgcggcggcgccccgggaggcgagcatgcggcggtggttgaactcggtgttgacgaaggtgacgtggaagccacgcgcgtggagcagcttggccagcttcatcatcggcgtgatgtggccctgcgccgggtacgggatcatcacggcgtggcgctgtcgcctcgccat

SEQ ID NO: 78151 - DNA, 1445 bp, Oryza sativa
  Clone ID: PAT_MRT4530_77988C.1
gcacgaggggagcgtcgaaatcccatttcctttcagcgaccgcacagaaaccttctcttctagaatcctctagaacctcttgacctcccccgcctctgcagttccctccgatgaggtggctgccccggctgctctcccacgccgcggcggctgggagggccacggcgaggaccactggcagccatgccaggggatccaatgggttcgcgagcggccgcgggggcagcgatggtgcggtggtgcctcgggagtggctacggaagctgtggaccgaggagctgaggaggcagagggatgctgcgaggcggtgggggaggcgcgcggtcgcgaccaccgacggcggcggtgcggattcgttcagcgatttcgccagggcgccgtcgaggagctaccagcacgacgaccgggacctcacgcccgtagaggccaaactaaagcctctcctctcaagggccaacctccttatcgctagggacatagaatgggcaaatattgtgttggctttcgagcaggagagtagatatatcataatggatccgctctttcctcaatcacctgttggtttcattcgagagaaaagcaatgtcatatttaggcagctatttcgctcaagaaggccatttgttgcagaaattactgatgctatgggcaatgagatcttcacggttcgacggccattttggcttatcaacagttccatttatgcagaagtgaatggcaagcttggtctgccaccttttgtgttctttaggaataggcaatttgctgtggtcgagaatcctggattttggaactggacctttactctcactgatgaggatgacaatgtactagcccagattgatcgtaattggaggggaatcggttttgagctcttcacagatgctggccagtatgcaattcgatttggtgatgcaggactaaaccgtaaatttggtctcgcttcagatatcgatgaactgcatgttgttcgccagctgagtttacctgaaagggctgttgcacttgctcttgctgtgtctctggattgtgattatttttcaaagagaggtggctggggacttccttttcttattgccacagagtagacgcatatgacctactaccattttcaatgcaagaggaaaaccaatgaccttcgcattgttgattagtgaagaaacttaatgggtctactattttacgcgattgagatcgttaccgaagcacgaaacgtttttttgtgacactgcatgtgctctgctaacttcacctgcctgctagtacgtgtgaatttcgaaagctgatgtcacaagaagtttgagcttgacatccagctcggtttcattttgctacagtacaaacttgcagtagctcttcgttggatggatctggtagctttcaggctggaattttttttcgtttttagatttttttttaatatttacagaaataatctatcgacc

SEQ ID NO: 78152 - DNA, 1053 bp, Oryza sativa
  Clone ID: PAT_MRT4530_77989C.1
atgaggtggctgctccggctgctctcccacgccgcggcggttcgctccgatgaggtggctgctccggctgctctcccacgccgcggcggctgggagggccacagcgaggaccactggcagccatgtcgggggatccaatgggttcgcgagcggctgcgggggcggcgatggtacggtggtgcctcgggagtggctacagaagctgtgaaccgaggagttgaggaagcaaagggatgttgcgaggcgaatagctggataggtttgaagggtataggatataggatgaagatggaaaccaattttttgaatgaacaagatggacacttttgtgggcaggccaaactgaagcctctcctctcaagggccaacctcctgatcgctagggacatagaatgggcaaatatcatgttggcttttgagcaggagagtagatatatcataatggatccgctctttcctcaatcacctgttggtttcattcgagagaaaagcaatgtcatatttaggcagctatttcgctcaagaaggccatttgttgcagaaattactgatgctatgggcaatgagatctttacggttcgacggccattttggcttatcaacagttccatttatgcagaagtgaatggcaagactcaaattactcaattctttgtgtaccttttagtattgctttactgcctgacacttgatctgccaccttttgggttctttaggaataggcaatttgctgtggtcgagaatcctggattttggaactggacctttactctcacagatgaggatgacaatgtactagcccagattgatcgtaattggaggggaatcggttttgagctcttcacagatgctggccagtatgcaattcgatttggtgatgcaggactaaaccgtaaatttggtctcgcttcagatatcgatgaactgcatgttgttcgccagttgactttacctgaaagggctgttgcactagctcttgcggtgtctctggattgtgattatttttctaggagaggtggctggggacttcctttccttattgccacagagtag

SEQ ID NO: 78153 - DNA, 531 bp, Oryza sativa
  Clone ID: PAT_MRT4530_7798C.1
gggcgcacggcggcggttcacgcgaacggacggccgagatcgacttgatccaaaacggacgaccgagatcgaacggtccacgaccggctcacgggagagggcgacgatgacgtcgacgatgacgtcaccaccagcggcggcggctcggcggctcggacggcgcacgctcgccggcgaacggcggcgcttcggcacgaacggagggcaccaacgggtagcggacggcacggcgaactcaccggcgaccaaagcgacggcggaagaggaacgaacggcgacggcgacgaagaagaagcggcggcgctcttcggcttgacgacggcgacggtgctccggcggtctacagcgacggcgaaggggcggacgaggacggcgacgacttggcgaccacgacgacggtcttcccgagcgacggcgacgtctggaacggcggcggcgcacggctggagcgacggcggcgacggcggcgcaagggcacacgacgctagggcgctacggacgacgagaggcgaaggcgaaggtggcggcggg

SEQ ID NO: 78154 - DNA, 1159 bp, Oryza sativa
  unsure (1)..(1159): unsure at all n locations
  Clone ID: PAT_MRT4530_77990C.1
ctaggaacccctcctatttagcaaaaattcagtttccaatccgagcacgacaacatcacgccccgctgcctgtggcctcaagcagtgacctgtgtctcccctttcggatcggataattctcggatagttcggatacggatacgaatatggatattttctcccggatacgaatacgaatatggtaccagggtttccgtcggatacggataataattcggatatccggtgaacagtgctatttggatatccgcaggacacatgagacataccacatttctttctaactctataaccttcaatataccgtttaaaactcaacgacaagataagggaccttagatgaacttttttgggagatgaaaacattccagcctcatgggcctgtgcatatgagtatacggcagcagagcgctgcacgacctccgcctcccctatccgtcccgtctcctcgcccgccgccctcgactcgcgtctcctcgcctgccctgccgctggcatcctgctagcagaggtggcgctggcgttctcctgctcccgccgcattcgctcaccggtgagcatcctaatccatcccatccggcctcggcctcgagtttcgtctcctcgcctgccgcttgcgccgatccccatcctgcgaggagaggtggcgcccggcgtcctcctgcttccaccgcatcgtcgctcgccggccaaactgaagcctctcctctcaagggccaacctcctgatcgctagggacatagaatgggcaaatatcatgttggcttttgagcaggagagtagatatatcataatggatccgctctttcctcaatcacctgttggtttcattcgagagaaaagcaatgtcatatttaggcagctatttcgctcaagaaggccatttgttgcagaaattactgatgctatgggcaatgagatctttacggttcgacggccattttggcttatcaacagttccatttatgcagaagtgaatggcaaggaggtaggtgtagtccacagacgttggcatctctggcgtagaatttatgacctgtacttanggaataggcaatttgctgtggtcgagaatcctggatttggaactggacctttactctcacagatgagggatgacatgtactagccccagattgatcgtaattggaggggaatc

SEQ ID NO: 78155 - DNA, 456 bp, Oryza sativa
  Clone ID: PAT_MRT4530_77991C.1
atgccggccggaacccgccctcagcgccggggccgcttcgacgcggcgccgctcctgccactgccgtccaccgcgccgcgcgacgaggcgacaaccccagatccgaccgctagggtcccggatcggcgcgccaagcctagccatcaccgacgagtggggagaggggggggggtggcgccgacgagaccgcgggagggccagctccgccgcgcccactctggcctccaccccgcccactccggcctccaccccgccgaccgccagcacaagcgccgccgctccgcctcctccgtgcggatggtagtgacgctcgcctccggccaggtccagcggcagggcgccggatccagccacgggggtgccagatccggtggtggcaccgccggatccgaagcttcatgccgcgccgttgccgtcgcccgcccatcgcgcgccgcgtcgtcgtcctcgcgctga

SEQ ID NO: 78156 - DNA, 288 bp, Oryza sativa
  Clone ID: PAT_MRT4530_77992C.1
atgaagaaaatcgatctattgcgcggagaaaagggatctagccgatgggcacgtacctcagcatacttggctgatggtgcgacagacgggctggcggaggtcgacatcgccgcgggcggaaatttggccggagaggaaatcgccttgcgcaccgaggggatcgccggagagagagaggacagagtttgcttcggtggtgaaaacggtggaaacggtgtgaaacttctcaaggatgaagaaggaattgaggcggagttcgagatggagatcgttccagaaacagagtag

SEQ ID NO: 78157 - DNA, 213 bp, Oryza sativa
  Clone ID: PAT_MRT4530_77993C.1
gggcaaaaaaagggccctctctcaggaaaactttccttttatagaaaggggttttcccagggggccccttaaaaaccccatgggttggaaatggaagagggaatcaacattcccggccccccttttatggggccccccccctaagcccgctggggccgggggcccccccccggggacccctttttggccatcccccctcaaggcccccccccc

SEQ ID NO: 78158 - DNA, 516 bp, Oryza sativa
  Clone ID: PAT_MRT4530_77994C.1
ccggccgggacacagtgcataaaaagaaagaaagaagagaaagaccacacaagtagtagaggaagcatctcgttctcatatccatgggttcgcgtctcgctacctgtgtccttgtactacttctcgtcctttcttgcgatgcacatactgccgcggcgccggctggagtcgcaggcaacctgactgcagccctggtgcatctgcacgaggagctgcaggcacaagacccgctgggctgcgacgacacctgccaagggtgccttgtgaggggtgcgcagctgtgtttcggcgagtacttcctgcaccccctcggcctcgccgagtgcttcatcgagcacattgtcgtcgaccggtgcttcgggaacatgtgacgtgattgtcaccactgccatgtgtgtaccggcttcagagtgagcgtgtgcttttttttcttttcttttttttttacatttgtttgtgcgtggtttgtttgcgcgtgtgccttttttttttggtttgttgtgcgtgtgctttttt

SEQ ID NO: 78159 - DNA, 291 bp, Oryza sativa
  Clone ID: PAT_MRT4530_77995C.1
atggcggacatcgtcagcgtcgggacggaggagaagaaaacccgtcgaacctgcaagagccgctgctgccccggctgcaactcctgctgttcctacaaaaccatgcattgtgccgtcggcagcatcggcgtcctagtcttcgaagaggaggccgaaggctacggctacttcattaatttggtggtcggaggtggccttgctggcggccgccagggagatgtcctcgacggtggtggtccagttcaggatgtcctcgatggtggcacctctgcccagttctgtagggcatga

SEQ ID NO: 78160 - DNA, 3249 bp, Oryza sativa
  Clone ID: PAT_MRT4530_77996C.1
atgccgagcaaagatgctaccgatcttaagaaccagcagtccctggtgagaatatctgatctggagtctgaactctcaaagttgcaggctcaactggagaaaattgaagggaaagtacagatgctggagcaggaactcaaacataagaaagaagaagtggatagtctccaaatcagcatacaagatgaagcccataagcgcagtgaaggtgaagcagctctccttgcaatgacgaatcttaactctgagtctcaggaggaagtgaataggttgaccctggaaactaagaagctgaaagtgaagttaagtgaggtggagaacagtaatacagatcttgagaatatcgtagccaagcacacacaggatatccatgtccttcgtgaaaagaatgtttccactgaacttatgataaaagaacttcatcatgagttggatgccctgaaggaattgaatgtgaaacttgagagtgaaatggggttacatataggcgaaaaggaagcacttcagagagactttgcttgtcaaaaagaagagaagcaaaatctagaggggatacaccattctctcgctgaggaaatgagtactttaaaaagcagatcagcagcaaaccagaagttgattgaggacttgcagatcatgaacttaaaactgaaggaagtgtgtgcgaagaatgaggtagaaaaggcacttctctcagaaaaggttcaagaggtggagaagctttctgaagaattttcactcatggagaactcactttcagatgcaaatgctgaaatggattcactgagggagaagattaaagtgttagaaacttcagaaggctctctgaaggatgtaatttcctctcacgtttctgaaaaggctatccttacatcagatctagaaactcttggtaaaagttatgctgatatttcagagaaaaattctaacttggatatcttaatatctgatatgaaagctgagattgaaaatttgagaacaaagctgacagattctgaagaaacctgccaggctcaccttgcaaataactcagctctttctgatgaaaagaacaatgtgttctctcagctggagagcgttacagtggttatgaaagccctggaaagtaaacatgctgatttggaagacaagagctcctctttatcaagagagatgaatcttgcatatgatcaagtaagagaattgcaggatcagttaagagtaaaggatgaagaatatgaagcatttgttaagtcacatcaaacacaagtcaatgactttgaggagcagatctcttctctgcaaaagaaaagctattacatgaatgagttgcttgaacaggaacaggagaaccacatgagtgcatctattaatgtagtgatcttggagaactgtttggctgatttgaaagacaagaacgttgatcttttcaatgaatgccaaaagtttgcagaggcaaatcatgccgcagagatgttaatttcacagatgaaggatgaagccagatatcatcaagatgagaggaaatttttgctaattcatactgagaaactaagagaagggatttcacagcacatgaagatcctaaatatatgcaaggatctaggtcctgctaatatagcggaggacaaaattattttgcagactgtctcagatgaagcctccaacatcatgaaacttaaagagcaaagtgaagatgcaaacaggctcatgtacactgagctgacagttctcgcaacagttatgttgcaagtaggattggaactcagagatctgaatttgcagaagcgtgcccttgagaaagaattggaaactagggcagcagagttcattacattgcaaaataacaatgtccagatgttggagtggaacgaacagctgaagcaagagttacagcaaggctgtgaaagggaagaggttctgaaagctgaaatacttgttttacaagagaagctatcttgctcaagagagtcctaccagacttcacaaaatgaaattgtgagcttgactgagaaaaatgagaccttgtgtaaagaataccagtctttgattgagaactacaatgctttggaggatgagaatggaacccttctttcagaatgcatgaggctcgagcacttgtctttgttccttaggggccataacaatgaggtagcaactgcattgggatctcttactgatgagatggctttgttgagtgtaggtaaggatgaacttgattgcgaagtccaagagcttagcagaagaggtatgatgcttgaatcggaaaacaataacctaaaggagtattttatctacctgatagagattctcagcgctcagttagccctctcagagtttgatttgaatatcaacaaaagcatttgccaggagttggccagtgaacttgagagctgcatggcacagctgtcgcagaaggatgatgagctacttgaagcagaagataaggttcatttgttgcaaggaaagaaccgagaattatgtggagttgttggctcgcttcaggttgccattgaaggggctaaaattgtgaaagaggaactcgagaagaaaatcacaacgttgactgaagagggaaacaccaaagatggtgaaatttcgcttcttcgccaagcaaacgagagactgcaggtggaagctgacatcctaaaagacaaggaagacagtttgacttcctcacatgaattactgtcgaaagaggttgaacaacatgaaggggaatttgttgtgttgatggatgatgcgatatcctcttcagtgaatgcggcagtctatgaagagaaggcacttgaacttatgacggaaaataccgaactaaaggccaacttgagcacacatgtagctctgatagcatctttgtctgatcatgtcaatgagctggaagaaaacactctttctctgtcaaagccctctcgcgcagaaagcaaaaaggaagatgcagaggtaccttttatgcaagagcgcaaccatgggccagaatctcaccccttgccggaaggaactccagagctacagcggttaattgcaagaatgggagcacttcaagttgctattcgaaatgccaaagatcttcatgatcaggagtcaaccaagtctgctgctacgttggcagcagcacacagagatattcaagagcttaaagcaagaggcgggtcgcagatggaggcaagggaaatatactccgacaatgagaagctgaacaacgtcgagggctccaaagggaagcaggtacagatgatgaaggatatcgaacttgatcaaatatccaca

SEQ ID NO: 78161 - DNA, 372 bp, Oryza sativa
  Clone ID: PAT_MRT4530_77997C.1
atgggtaaaattaaaaaaggtaaacacaaaaaacaacgaattagaaagaccacattttcactagtctaaaacggctgaatgccagggctttacttacaccttggtcactgaaggtccccgaggggggggggggggggggggggggagggcctggggagggtgcctcatctctgaagcaccttgaggcatttatggcgttcccaaagtggatcgtcgaaggaccagaccagccgcaggattgaatgaaatggcaggagtgaacaaagccccagcacccttcttccggaccttttgatacactaatatcttgggctctcccttagtagaacctgcagacccgcacaaggtctttaccctaaagaacccgaaacc

SEQ ID NO: 78162 - DNA, 152 bp, Oryza sativa
  Clone ID: PAT_MRT4530_77998C.1
gttcgtcctaatttcaaacatgctttatgaaactcaccagtgggaagacatgaaaaggctcaggaagctaatgagagagtggggcatgaaaaagaatatgggtgtgttcattgaacaacgaacatatgattgactgaggctgactaactaac

SEQ ID NO: 78163 - DNA, 474 bp, Oryza sativa
  unsure (1)..(474): unsure at all n locations
  Clone ID: PAT_MRT4530_77999C.1
cgcaagctgcggcgatggcggccgtgacccgcgcggcgagatcgcgcgccctcctcctcctcccccgcgcctccgccgccgctccccacttctccaccaccgcttcctccggggcggctgcggcggcggcggcgccgggggggaggaggagtgcgcgcgctttcgacgcgcgggggggggggggggttgncgcggnggagccggcggcgccgccgccgaagcggtgggggctgcggaagttgngggccttccggggggtgtgcggggctctcggcgccggcggggactccagctacgcttatacgcttgaggaggtggatcagaagacgcgggaagtcaggaaggccatgactaccccccgccccgtttgnggaggacgcctntggatttgaaaagttncaggctatgatttactcnacngntatnaaagctnctgnnggaaaaatagaatnnttcatggatggtnaacacaca

SEQ ID NO: 78164 - DNA, 159 bp, Oryza sativa
  Clone ID: PAT_MRT4530_7799C.1
atgatcttgtcagattatgcggagacaaatgaccataaattgagttttccaacttcacggctgggggctaaggtcagcgctttttcaaccaaggcaggtcaagggtccaagagccttatctcccgagaacaattctctgacgacaaggctgggggctag

SEQ ID NO: 78165 - DNA, 498 bp, Oryza sativa
  unsure (1)..(498): unsure at all n locations
  Clone ID: PAT_MRT4530_779C.1
caaccgcgatttcggcgtcagctggaacaatgtgaaattggacaactcaaaagagaagaataccaagctggagataccaaacaatggccatttgggtcctggcaactatagacacaaaaggagaggntcttggctgtgtttgagctgttcgccctanaagattgaatcgtggagctcttctcaccggggcacaagaatggtgcccttgcgattgggactattgtgacaatgctgcttattgtgttgaatgcaagcctaatggggatggatgccaacctgaagctgtcactgcatggtaacaagaaccatgtgttgacaacagcttgaagtgatgcttgaccccagaaacccccacttacaccgtgaacaaattgcttggtatcctgtatatactaatgtggaccattgtcggcttttggaatccatacactttcacactgattttgatggaaacagcttggaacatatgaaattcatacgaaaaaaaaaaaaaaaaaa

SEQ ID NO: 78166 - DNA, 540 bp, Oryza sativa
  Clone ID: PAT_MRT4530_77C.1
ccgggctgcaggaattcggcacgagggtgacagcaataatgagaaagagaagtcatatggttacatgatgatggaaaggctgagaggttcaccagatggtcggattgaccatgtacttcaggttatcagacttttcctattaaagcaagttcaatttcactctctgctggtgtatgtgtaagcattgaaattgtgtggtctgctgtggatatgaaaagtactgtacattgctttggacatgaatggtgagagcttaaatcaccctaaccaatataagtgattagtttaacaccctaaattagcttcagggttaatcttcacaagagagttaaacccataaactctaaagttggttaaattttggctcataaaagagcacataaatccaagaggttaaatactgttaaatgcacttatataccaaatgagtgagaacatgatttaaaatatgcctaatatgttcagtaaccctttagctaacctatcttaaccaactactgtgccttgaaggaactgacagtggaaatcatataaccactg

SEQ ID NO: 78167 - DNA, 2169 bp, Oryza sativa
  Clone ID: PAT_MRT4530_78000C.1
atgcgtggcggcggtttcgttaacgaaatgaggcatactggcaaacgccctcagcaacacagggaccatgacagagaagaaaggagggaccaaaagaggaggccagtgccacgtgcccaggaaaactctggtaatgatgaattggttgtttaccgcatactctgtccggacagagtaataggtaatgtaattggcaagaacggcaaggtgataaactctatccgacaacagacgagtgctaaagtcaaggttgtcgaccctcaccctggtgcagacaagagggttattttggtatattgttttgtcaagcatagaaacctagatgttaatgacgacgatgacagggagcctgtttgcacagcacaagatgcattactcaaggtacatgatgcaattgttgatgctctgtccatcactagggactctgatgatgaagaagcaaatatccttgtaccagctagtcaatctgcaagtgtcataggaaagtctggtgctgtcatcaagaggcttcggtcaacttcgaaagcatttattaaagtgagcccaaaagatccaaatgaagttacacattcatgtgctatgagctttgataattttgttcagataaccggtgatgctagagctgtcagaaaggcactatttgcagtatcaaccatcatttacaagtgcccatcaaaagagaccattcctcttgaaacttctgtttcagaccttcctccaagcattatagttccttctgagcttcctgtttacccatctagtaacttctactcaccctctgatgctgccatatcttctggacatccaagtctatcaatcttagggtcaacacctcatgttcctgaacttacagtatcggctgatgctcatagtcgactgcccatttaccaatctgtgcttcctgtaattcctgcttataatacaccgaaatgttctggggagctagtattgcgtgttttatgccctgctggcaagattgggttggttattggtaaaggtggggtgaccataaagagtataaggaaagagagtggtgcaaggatagatgttgatgactcaaaaaatgaccgagaggaaagtataatcaccattacatccaatgaggccaccgatgatgctaagtctgcagcagtggaagctgttctgcttctgcaatcgaagatcaatgatgacaatgaaggtaaggtaataggctgtcttattggcaagggcggttcgattgtcaatgacatgcggagtaagactaaggcagctatctacatatcaaagggtgaaaaaccacggaaggcatcttccagtgatgagcttgtcgaggtgtttggagaagtggaaaatctgcgtgatgctcttgtacagatagttttaagactcagggatgatgttttgagggacagtgtggacaggcaaaattctgagaaagatgggaagctaactgttgccactactgatcctttgtatgcaagcagttatcctttgcctgcattattaccttacagacaacagatcactcccctgggctatgatcataggggtgacatagaacgtggtttggaagtatatccgcatagcagtttgtatgggtacagctccttgcaggctatagatgatggctattcagcagtctcgtcatatgcatcaaagggatatggaggacgtcctccacatatggaaatgactattcctgctagtggcctgtcaaaagtaatggggaaacatggcacaaacctggacaacattataaagatttctggagctcacattgaaattattgaatcaaaatcgtctcgtcatggccatgttgctcgcatatctggcaccactgaacagaagcaatcggcagagaatttgatcaaagctttcattatgtctacttaaggttcctgttatagtgtttcaatatagctggacacttcaatctgttccgtttcaacttctcgtgccatcccataatttccttgggtccaggaaagagcatcaaatacccgtccacacaagtttcgatgaatctcatgcttatccaagtgtgttcccagggtgaacctagcattctatgttccttaggttctcaaccttgacctatttgtgttgccttgtccatcttatttggcatgttcaaatatacccggttaatctcaaatgattctcaaatggttaaaaaaaaaaaaaaaa

SEQ ID NO: 78168 - DNA, 1023 bp, Oryza sativa
  Clone ID: PAT_MRT4530_78001C.1
atggaacaagtggatggaagtggaattcctgcctctgttgggaggggaagaggaaggggtcatagcaccggagatgctctagtggcctcagcatttgggggtttggggaaggaggagaaggcagcagcatcggcacggggtatggaagaggaaagggagatggaagaggagcaggtggcattgggcgagcaacggcggcaacaaagaaagcttaactgtctttactttaaagttgtgataaagttgactcaagagcatggtaagggggtgcgtccaccttctggcacacaagtagatggtgtttaccttcagtcgaactatgaggagttaattgagataatggatggattcaagactagttggaaggattatggaattacggtaatgtgtgattcatggacaggaccaaccatgatgagcattatcaacttcatgatatactctaatggtcaaatgtatttccataaatctatgaatgaaactggtaaattacaaaattcaaatttcttgtatgattgcattagagaggtggttgtcaatgatattggtgccgagaatgtagtgcagctagtaacagacaatggatccaactacaagaaggcttgcaagacgctgatacaagaacataaacacattgtatggcagccatgtgcaacgcatgccatcaacttaatgttaaaggacactgggagtttgtctccagttgaccaagtggtctctagtgccaaaaagatatccatgtttttctgtaaccataatagatttctgccaagaattttaaaggcgagacaagagcttgagagtcaatttggtgacgcatcacaagaggagaagcctgtattggagaagatcaatacaaggataacgagtttgcttgacacgggtttcatgcgtgcaggtaccaggttccttgatgagcctaaccatgcatgtgccaatagaaggagagcaaataagaagaggaagaagaatgcaaaaacaacgtatatagatgaggaggatgttgctagtggtgatgtctga

SEQ ID NO: 78169 - DNA, 333 bp, Oryza sativa
  Clone ID: PAT_MRT4530_78002C.1
atggcggcggcggcatcggcgctccctcgggcagatccggcggaggtggtggcagcggcatttccggtgggcggatttagcggtcctctccccccctctccctctgtccgaagcttctcccttggatccggtggcggcggcgacgtcagtggcacccgtgggtggatccgaccgagaggatctgcccgctgccacgccgctgtcccctcggctggatccgccgagtggctggcgccgccgtccttctgccgacgtggtggggcgatgctgaggtggcaggggaagcgcgccagagtggctaggggtgaaaatagagcggattcggacggatag

SEQ ID NO: 78170 - DNA, 255 bp, Oryza sativa
  Clone ID: PAT_MRT4530_78003C.1
atgtctttcgtgattagtctcacccttctcaccataatagaagatgctataactggaaataatttgattagctcctggtttggaatggtacattcctggtttgaagatagaactgtgcagccgggatggttgtatagaacggttgggcctatacaacagggtatgttgtatagcgttggtttaatattatttaattattacttaactgttttattaaattctcaaatgtttgctaaatgctgctttttttgcaaa

SEQ ID NO: 78171 - DNA, 379 bp, Oryza sativa
  Clone ID: PAT_MRT4530_78004C.1
gaaaccgtgacgggcggtgcaaaatagcatcaaacacaatacggatacacattctcccgggactccatggtgcaatatgcctaagggaaggcctgacttaagacgaacacaagacttacaaccattctaggggtctagcacaaccatgacacatagcagatcactcgagagcacaaaaatgagtgtcaatgctcgggactctgcgaccgcgctctctgagttcgtacggctgatcacgtcatccatcctcaggatagtcatggccggctgcgtggcaaactgaataatctgtactaacactcaatgctggctcaatgacaccatattgaaggctgacgcgaatgatacctaccgaaaggccaggaccgatgctaggaaa

SEQ ID NO: 78172 - DNA, 980 bp, Oryza sativa
  unsure (1)..(980): unsure at all n locations
  Clone ID: PAT_MRT4530_78005C.1
aatctcccagtagcctcaactgcctctctcggtttcntcggtntctctctcccccccagctgcagacaccacggtggncgtgccggggcgagacgtgtttgtcgtaatggcgacggtgggcgccgtggacggcgttgaagttgtgagcgcactgatcggccagtactacgacgggctggcgctggagctcgtggtgttctccctcgccatcgtcgtcctgcggtacgccgcggtgctctacgcgaaccacctggtcgacagcctgagcgagctccaggcggcggtcggcgccgggatcggcggctcgtcgtcgggaggcggcctcgactccgccgccattgcgcggctgccctgcttcgtgctccctccccgccgcggaggtagtgcggcggcggcggcggcggagtgcgcggtgtgcctgggcgccgtggaggaaggggagacggtgcgcgcgctcccctgctgcccgcacgccttccacgcccgctgcgtcgacgcctggctgcgcctgcggccgacgtgccccctgtgccgcgccgacgtgccggtgccggcgaggccgacagctccacgacgcaggcacgtgcctcgtggcacagtggagtgacgtttgctcgcaaattgatcccacgcgaattcacgcgagagcgggtgagaaatctcacctcgacgatctctattgttcattctaattctagttcgatttttctttctctttctcattcgtagtacgtacagaaagcgttttctcgctggtgtaattttatcggtcaacagaaagagagtcgcaactcattcagccattgtttgttaatttcatttcatttatcttggactgttgggcctgttccgttaaaaaaatagaactagttgtgttttacactcaaggcccaaaaggctctaacaaacaagcccatatgtgactactagtctatttcttgagggaataagttcatctaaggtcccttaattttacaccg

SEQ ID NO: 78173 - DNA, 2023 bp, Oryza sativa
  Clone ID: PAT_MRT4530_78006C.1
actatattattttttaagagtcgcagtgtttttttttttctttttatctgctcaagacttaactgaattttttagataagataaaaattacatcttcaacgtctgcatcataagatgcacacagccaacagttttgcaggatattactgagaacaataaagcatggggagggaattagctagtaacaatgaagcaatagagctagaggaaacaaggatactaggacctagtactactacagtactacacaaaggtttattgttcagcttaaagtaaaaacaagctgaggggcacgaggggaacaatgaattattggaagatatctagactgagcactctaagaataaatacatcaaactgagcaacaagatggctaataatgcgcgtgagctcacagcattcttggcacccaatcagtgaccgtttgcaatgccgttgcagcccttgatttttccctcggcggctttcttgtcatagaacctcctgtacatcgaatcaacttttgtaagatagaatgttcctggtggcaacaagctggtatctttgcttgtttcaaaatcttttgctccatagcggtgctccatcagcttcaatgtctcaataaacttctcaggtgaggtcacatgtcttgactcaagctttgtcgtcacatcaagcacagaagcaatgttcattaagctaaagggatgttgaccatcatgtagtctcaacgaaaacatagtggatgtcaatccactcccataagaaaacatgagaattcgctggccatccagactgtcatgcttgttgtagatcacagatgccaatgcagcataaagagatgcagtgtacatattaccgatctgttttggaagcagagttgatggttgaactttgatatcatacagatgctttgctacttgttgagaggccttttccaagtcacgactttggtagctttcttcactagtcaaatttgcaaaaggctgaagcttctctttagcatcattatcaaccgtgctgcaattacgcatgaagtcattgaaataaagtcgggcgaaactcttttgtacaagcttattatatggagaatggaagacacagtattctgcatcagaaatcgagaattgttctcccactatcttttcatacttggtacaatattgcctatagcacgaatcaagagccatcagatagcatgtctgagaaagttttccatcaacaaccgggtattcacttgcaagatcaggcttgtagaaatcgtaaacatgggccatgtgtgaagccctatatttactttcaaaagaaatgggagcattcggaccaataagcatagcaatagcagcagcaccacctgttggacgagctggcccttctgcataaaccgcgcatatctgttgcaaacaacaagccgttgcatgaggatactttccacccaattaacacaattcaacagggcagctgttccaccatagcatgcgttacttgagtcaaccccctcaatgtcagtattgccactctcctcgaaaatatgcatcagccatgttttgatggatttgcttttgtctatcactgtctcactaccaacctccaggcggccaatttgcttaggatcaatgttgtactttttcagcagtgatgcaacaaccgtcaagctcatagagataacatcttccacctcgctgcaataggccatgcagtcctgcccaagaccaattgtgtacttacccttgctggctccatcgtgcgcttccagcgcttcctggtggacgcaggcgggagggaagtagatgtccatggcgaggatcccgacgtcgttgggctgctccatctcgcgatctctctcgatctcccctccgcttccgcgcttcgcttctcgaagtggctggctcgcgcgggcgccgcctgaagtgtgaggggggcgggggcttgacgacggagcggagcggagcggagcagcacgtcgcgtgaaggatggagatgagactcgaatacggatctcgcgcccttgcctcctggtagtgtgggacccgcgcacgcgtgc

SEQ ID NO: 78174 - DNA, 990 bp, Oryza sativa
  unsure (1)..(990): unsure at all n locations
  Clone ID: PAT_MRT4530_78007C.1
cagacaagtagaatatacactggatacaattcttttttcaatggtaatacaagtagtacaaataattgggccaaacaattcaggccttttgtaaagtaaggctcaaggttttaggaaaaaagaggggcaacatatttaaacaaccctttatgacctgcctatgatctatatgatctatccagcagtggaatcctgacatggtactcaacagtaagtcaataacccagaaacatccatcgacgttcaaatatccatgattggtgacaaccacagtggcaagtaaactcaaaagagaaaacctggacattccgtgtgatcaccggcaatgtacagtgcaagaacagctgtaatccacaacaaagatggcagtacaaatccttaacacatgttaagtcagcacagatgatatatatagtttcatgagtgaaccaataatacaagaggctaaaaactttaagagggcaggttcttatcaagactatgacttgcagacagaaaagtaaagcacataaggagcacgctcccactagcaaccagattaatacacgcttcgcctccattgactaaaacatccgttgccgctttggaaaaatagacaagaaatagcaccaccattcaccgtcaacatcatcttccatctgaacattcttttaaattgtgtcaaccatttgtgcagacttaacacacatacatcagcttcttttcattagtccaaacgtccactaccaaaagactgaccgaccccaccacaaagtgtatggctagtgcactacagacccaaaaggaaatgatatgagcgcatgccagactctttggtagctctacccatcactcacactcgataggggcattgaaagatgtaggagcatgagaacatcgcttaccatatctttgcaatcaaagcacctttgaagaaaagaagaaaagaggagacgacatcatataccatgggtctactttgaggagaggatccttangccttttccagnt

SEQ ID NO: 78175 - DNA, 312 bp, Oryza sativa
  Clone ID: PAT_MRT4530_78008C.1
gaaacaaaaggcaaacttgggaaccccaaaaaaaatttattattacagcaacagggggaaattcaaaaaaagcattattcctcccttgcaaaaaaaaacccaaaccttaattaaaacggaaaaaaaaaacgggaaaaaaaaggctggatcggccgaagatacagaaaaaactgtgggcaattgtttttagagaagggaaaaaacctagggtatacgggaatccccccggctgggcaaaagacccttaaacgaggacaagaaacaagcctgggtcttgagggcctttttggaaatggggaagcaaaccttttt

SEQ ID NO: 78176 - DNA, 588 bp, Oryza sativa
  Clone ID: PAT_MRT4530_78009C.1
atgctgcaaccgacttgtgcgccgctgccctgccaccctgcgacctcgccacctcaactagagaagggaggagaggaccgtcacccactggagaaggtgaagtggaggagcccgatgttgagatatcgcgccgccgcccgatttgcgatgctggagctgatgtccagagaggggagaggagagccggggtctgtcgccgtgccatggctcgtcctcaactctcatgagaggggagaggcgacgacaatggcggtcgagctcccacgccactccaaatctgtgccaccgtcgttgaggtcctcgccctctaaggagagtaggagtggaggggcaccgtggctctgccgccgcctcggcctcctcgaccaccgccgcatctccgtgtgggttgggctcgagcggcgtccaggagtggagaggtgccgcgatggggagaaggaagaggctggcggcggtgccagagttcattgccgaggtggggagagtggggagaggccggaggctgcggtatcaccggtgaactcgtctaggtgggtgggtgggggaagtggagatggttgtggacctagtggtggtgggtggggttga

SEQ ID NO: 78177 - DNA, 1136 bp, Oryza sativa
  Clone ID: PAT_MRT4530_7800C.1
atcaatatgtgcatggatagaaagagtgatacatatagcttgatcccggatgtcacgaccggaaatatcccaacgggagttcctttcgtgcgtgtattattccttgtcccaggaggcaagactgagccacaaactaagccttacccactagacatgtggaagtatggtagtgctttgcaatagaggcccgaagaccggtccttatatggccgagccgggccccacgcggcagccactcggcgcgcccgagggcggccatgccggcgcggtcggcgggaggcggcgcgcccacgctccgatggtcgccgccggcgaccaccggcgcagcggagcggcggccgagagaggggagggaagggggaaaggaggcgaccgtccacggctcaccccggggcgacggcggcgacgggggaggtggccggagcggagggaggcggtggcgtggctcgggtcgacggggacggcggtgctccggcggtcggctaccgaaacggagaggtggacgaggtcggcgaggatgcggcgaagccgaaggaagcggcgccgaggtgggaggcggtccggggcgacgacggcggcggaccggagctcggcggtgacggcggagagagagagcgacgtcgcgagctcgaatccggcgaggaggaagggcggcgagaggcggaaacggacggaggaggtgcggggagggtttaaatagggttggaagggggagagggcggccggaggggaaggaaaccggcgcggcgttctcgggctccatcaatggcgccggcgggattaggggagggtttccaaatgaatccaagggagagagggagggaaaattggggggaaagggagagggaatcacggggaataattcccccctattgattgcacgcggggacgacgggatgcggcggattcggcggcggcggcggcgcttggcgtgggcggagcggcgggagcggcgggaggtcagagatgacgggtaggccccacccgtcagcgagggtggcgggcgggcccgcccgtcagcggcgcgcgcgcggggttgggctgagtgggccgcggggagaggagagagagggagagggagatgggccaagccggcccaagagggggaggggggaattttaaggtttttcttttta

SEQ ID NO: 78178 - DNA, 245 bp, Oryza sativa
  Clone ID: PAT_MRT4530_78010C.1
gtgccgccgttgtcgtgccgccgcgccgccgcctttgaagccgccgcgccgtgcgttgccgccttgcgccaccgttgagcccgagggagttgcggatccaagcgaaggacaagacccgcaagactttgagcaaggcaagtcatcactattccttgaacatgttgatcccaactgcgaaattattttgtttacaaataaaaattgcatgaaatgatgaacatcctacttgcgattatgccatgcct

SEQ ID NO: 78179 - DNA, 606 bp, Oryza sativa
  Clone ID: PAT_MRT4530_78011C.1
gagagagactagtctcgagtttttttttttttttttttttttttttacgtaaatttcatccaaatgccgaaatctgccaccaaacgccttggcctcatatgccattcaacatttcatccagatgtactatacactacggtgccgttcttacaagtttgtataacttgaattccatagttcagactgcaacaatccgaaatccatgaaaagtataagtaacttaagggtgaattaacttaaattctaaattagtactacagttcatggaacagatacttcctataacttgggaagttctctgccgaaaatcagttgttctgctcagggtacccttttgactgctccagggaatcagttgtgttccatgtctcttagttgacgtaattttgtacaattgcttccgcacaccagtcgtgcactcgtgcttccaatgttatgcctggcgacaaactgccagtgacacttccacagttcaactgatgctacacgttggagcagatttcttcgtaggtattacctccttcctgaaaatatcagggatttttgcattgccgaaatcccttatattttgagatgaaggtagtaacatgcttttcgtcttccacg

SEQ ID NO: 78180 - DNA, 1616 bp, Oryza sativa
  unsure (1)..(1616): unsure at all n locations
  Clone ID: PAT_MRT4530_78012C.1
ttcattgtgatgttgggcattgggttagccaatgcttcgagtacttctaatggaaatggcaccggatggggagagggtggtggatctattgacggggccggtggagggtccgggagtggtactggatctagtgtgagtatcgtaaatgagggaggctctgtccacggaagtggtggtggtggtggtggaggcggcaatggtggtggacggtacagtggatctgggcatggttctgggtctggtcgaggctcaagctcaagccagggacaaggtcaaggtggtgggaacggtggtggatacgtgaacggtggtggcgtaggaaatggtaatggttatgggtctagtgagagcggaagcggagtcaccgcaactgctgggggaggaggttggggaggtggtggctcacagtacaatggtactggatttggcagtggatccggggcgggctcaagctctggccagatggccgaaggttattaccctggctatggaggacatgcaagtgctggtggaggtggaggtggcaatggcggtggacaagctggaggagttgatgggtccggtggttatgggactggcggtgggaatggatctggcaatggcaatgggaacggtggtggtcaaagtggtggcagtggtagtggtggtggcggtggatctggatatggtcaaggctcgggtaccgggagtggtggtgggtacgtgaatggcggcggtgtagggaacgggaatggttatggagttagccagagcgggagcggaacccatgcgaatgctgggggagggggttggggtggaggtggctcgcagtacaatggtactggttttggttctggatcaggccaaggctcgagctcgggctcggtgagccagggtggtgggagtgcgagcgccggaggaggcggtggtggtgttgccggtggacaagctggaggtgttgatggatccggcggttatgggactggcactggcagcggaaccggatctgctgcggcagacggtggtgcttcccctacatcctccccgccatatgcaaatgccaatgcaactggcgatggtaacggcaacggtggtggccaaagcggtgggagcggaagcggtgggggtggtggatctggttacgcgtccagggagaactggtgcggcatcgaggattcgaggctagggcctagggcagttactggcttactgccgccgatccaacaggagactgggaagtgggaagccgctgccgtccccaccttgtcgggagcctgaatgactgcggcaggcggctggtgggtgctcgcacatcntccaccctgagatcccaaagcccaagctccagcctatgctagatccagagccggtgccagaaccattgtaatgcgaacacctccacctccagaccccctcccccagcattcgcatgggttccgctcccgctctggctaactccataaccattcccgttccctacaccgccgccattcacgtacccaccaccactcccggtacccgagccttgaccttgagcattggctaatctagacacccttgcggcattggctaacccaatgctcatgaggacaacgaagctaagagctacaagctttgttgccgcccggacgcgtggg

SEQ ID NO: 78181 - DNA, 754 bp, Oryza sativa
  Clone ID: PAT_MRT4530_78013C.1
gctgacatgcgggccccgcctgtcggcgccggccccctctcttgctgactcgaggctagtcggacgggcgccccggtcgctccaccccaggggtgacgcgggcggcgaaacctcatcgtcgccccctcccttcccctcctcttccccgcctcgctgccgcccgagcagccgccgtcaaagccgggcgactgtaaagacggcggcggcagggctcccctttccccttactcctagtcaaatggttggggcgccgacgagaccgaagcacgagaggcgcagcccggtgacgatggccagatccggcgccatcgagttcggatccggcccttccttggtcggatctgtgctagatgcgtgggtcggccgcggaggcggcgggcgcgagggccgcacggcggcggcggcggcgtcatgagggccgcgcggaggcggcagcgatcgcagcacgaggacctgcacgacggtggctgcggcttgtggaccgtgcatcagctgctgcctctctctggcctgtgcacggggaagcgggtggcggcggaggcgtctcttcttcccagccggctgaaaaaacccaccttcgtggagctcctcccctcctatggccagatcctgtcctagccatggggagcttcgggagagggtggacgcggtggcttgtgcaaaggacgacggtgccatggcgacatgcgagagcaggccgtgagcctacctaagccatggggtggtgaactgggctaactggtggctgataaga

SEQ ID NO: 78182 - DNA, 187 bp, Oryza sativa
  unsure (1)..(187): unsure at all n locations
  Clone ID: PAT_MRT4530_78014C.1
taggttttaccnnagcgatacatggagnnaagnnagaatnaaactntcagaagctttgcaatcgaatggtcgagatgccactncggatggcagcgatagtgaactnaagaacaatcgcaaaaattatcnnntgagtatangtgcaattnatggtggtccnaggctncgncttcntcnagctacccnt

SEQ ID NO: 78183 - DNA, 323 bp, Oryza sativa
  Clone ID: PAT_MRT4530_78015C.1
aaagcaggattacatgatgtcatgtaattgtatatttagttacatagactccctccatccactaaagttacacctattacttttatcaccatgaccaagaagaacttaattaatcatgcatataacaaaaattaaggagcgtatacacgtatgcagctactgaatattaatattgctccttgggttctaatcaaagatttaatttacctctctatttcagttttcttgcatagaaactacaaataggaacaaattatttagaaaaactaaaatatgaaatatggctaactcttgggatggagtgagtatatctatctattata

SEQ ID NO: 78184 - DNA, 498 bp, Oryza sativa
  Clone ID: PAT_MRT4530_78016C.1
caaaaaggattagattattactccaaaaaatatatatccaggagacaaattctgctcaaattaacttcaaaacttgaagtgcctcctagttcttacaacttttagggtgagaaatggtgtataggaactcagttgtggcttgcatagctacgcataaaaagaaaatctcatataatgttagaaacatatttacatctgctaagtcagattctcctggaactgctgttacattagcaattattatttagatcagcagaattgtagatccaaatgtgagtaactcaaaagtagcctagctcagtcatcatcaaaataaaatgcgttgtggtagtacttattacatgttgaataaggtcatgcaaaggtccatgaagtagcgaagcatcaaaatgctgtcaaatacctacagaaacagaaaggcgggatccaaaaagttcgggacaaaattgtgatggaaaatatgagacatagaatgtgaccagaaaacaaaccttaaaa

SEQ ID NO: 78185 - DNA, 193 bp, Oryza sativa
  Clone ID: PAT_MRT4530_78017C.1
aaaaattggcgaacccctgattcaacccagtaatttcggaccgacccctgaaggcaccccaaatttccctacaaggaacctgaatagagcccagcttaaccatgggaaaagctttttcctgtggaaaataataatggcctaaaacggccacatagtaaaagagccgcaaacctaaattgtaaaacctggggcg

SEQ ID NO: 78186 - DNA, 604 bp, Oryza sativa
  unsure (1)..(604): unsure at all n locations
  Clone ID: PAT_MRT4530_78018C.1
ccggccgggctccggctcattcttgcccacgccgcgccgcctcctcctcctcctcctcctcctcctagggcttcttcttcttcccctcctccgagcgccgccgccgccgccgccgccgacgagatggtgctatccaacgacatcgacctcctcaaccctcccgggagctcgagaagcacaagcacaagaagaagcgcctcgtgcagtcccccaactcattcttcatggatgtcaagtgccagggatgcttcaacataacaaccgtgttcagccactcccagactgttgttgtgtgcccaggctgccaaacggtgctctgccagcccacaggagggaaggccaggctcaccgagggctgctccttccgccggaagagcgactaggttaggctgtgtggcttgttgttactgggacagaaatgccctgctgaacaatactatcccgttacccttcctgatgtgtactccataaattttgttaattatgcctacctgtttactgccctgcatgatgtagcaatgcgttatgtatcttgcattttgtgctggagaaagctacttcgaaaaaaaaaaaaaaccanaaaaaaaaaaaaaaacccgcggcc

SEQ ID NO: 78187 - DNA, 991 bp, Oryza sativa
  Clone ID: PAT_MRT4530_78019C.1
ccggccgggcccaccccacccctttctcgtttcgttggaagaagaagaagaagaagaagaaggtggtttcgctggaagaagaagaaggtgaaaccctagatctgatctcggatgacggcgcgatcgttgttggccggtaggatggtggcggcggctcgccgcgccttccgcagctggcccctccacacaatcacaaccaccaccaccaccgacgccgccactgccatcgccaccaaggaacagcacaaggtggtcagtcgtcttgatgtgatggaggatataagaaaaaaactccggccggccgggccctcttcttccagccctagcccccctcccccccgcgccgccaccacctcgctctccgccgccgccgccgccgtctccaacttcaagatggtgctctcgaacgacatcgacctgcttaacccgccggcggagctggagaagctcaagcacaagaagaagcgcctcgtccagtcccccaactccttcttcatggatgtcaagtgccagggctgcttcaacataacgactgtattcagccactcccagaccgtggttgtgtgcccgggctgccagaccgtgctctgccagcctactggtgggaaggccaggctcacggagggctgctccttccgccggaagagcgactaggttaggctgtgtggcttgttgttactgggacagaaatgccctgctgaacaatactatcccgttacccttcctgatgtgtactccataaattttgttaattatgcctacctgtttactgccctgcatgatgtagcaatgcgttatgtatcttgcattttgtgctggagaaagctacttcgtataatgcgtgcccctccacattgaacaattctctctgtatccaagattttggtttttggttttagccttgcgttgctcatgagacagaaaaaaaaaaaaaaaaaacccgcggccacagtgccaagtaccccaaaaaaaaaaaaaaaaacccgcggcc

SEQ ID NO: 78188 - DNA, 2202 bp, Oryza sativa
  Clone ID: PAT_MRT4530_7801C.1
atggtgaacactcgcagcaacgggaatggccccaacaacaacaataacaataacaatgaagggaacccaactcttgctcaagttcttgctcaacagactcagttaatgaacatgatgatgcagcaactccagaaccagcagaaccaaggaaataaccatacacctccccagaacaagttagcagaatttcttcgtgtgaggccgcctattttctctagtaccactaatcctgttgaagctggtgattggttgcatgccatagagaagaagttggatttacttcagtgcactgatcaggagaaggtttcatttgcatcacatcagttgcatggccctgcttctgaatggtgggatcacttccgcctgaataggattactgctgaacctatcacatggcttgaattcaccgctgctttccggaagacgcatataccatcgggagtggtgtctctcaagaagaaggagttcaggtcgctcactcagggatctcgctctgttacggagtatttgcatgagttcaatcgtctggctcgttatgctccggaagatgtgcgcaatgatgaagagcgccaagagaagttcttggaaggacttaatgatgagctttcttacccactcatgactggagattattctgatttccagaaattagtggataaggctattcgtcaggaggacaaatacaatcgcatggagcagaagaaacgccggattgctcaattcaagcgccagttcttcaacaacaatgctggcaacaacatccgcaatcaagctccacgtcctgttgcagctccaacacagcaacaacctgccaagagggagcaaggcagcaagcccgtagtgtgcttcaactatggagacccaggacattatgctgacaagtgtccgaagccccgacgcgcgaaggttgtccctacccagagcaactctatcgcaccagcatcaaaggcccgtgtcaatcatgttgctgctgcagaagctcaagatgctcaagatgtgattttggtccgggagtatcccgatgtgttcccagatgatttacctgccaatgagttggcagaagtcaagaggcaagtagacgatttgcttcagaagggatacatcagaccgatttcgtcaccatggggagctccggttatttttgtggaaaagaaagatcatacccagaggatgtgtgtggactatcgtgcactaaatgatgtgactatcaagaataagtatccgttacccagaattgatgatttgtttgatcagcttaaaggtgccaccgttttctccaagatagatcttcgatcagggtatcaccagttgagaatcaaagaggaagatatacctaagacagcttttaccactaggtatgggttgttcgaatgtactgttatgtcttttggacttaccaatgcccccgctttcttcatgaacttgatgaataaggtgtttatggaatacctagacaagttcgtggtagtctttattgatgatattcttatctactcccgaaccaaagaagagcatgaagaacatcttcgccttgcattggagaagctacgagaacatcaactgtatgctaagtttagcaagtgtgaattttggttgtctgaagtgaagttccttggtcacgtcatctcagcaggaggagttgccgtcgatcctagtaatgtggaatccgtaaccaactggaaacaaccaaagacagtttcagagattcgcagtttcctaggcctcgcaggatattatcggaggtttatagagaatttttccaagattgctaagcccatgacacagctgcttcagaaagatgtgaagtacaagtgccgtgcgccgccgccgttccggtcgtcgtcgtcgctcgggaagatcgccatcgtggtcgccaagtcgtcgccgtcctcgtccgctccttcgccgccgccgaagaccgccggagcaccgccgccgtcgtcaagccgaaggtcgccgccgcttcttcctcgtcgccgtcgccgtccgttgctcctccgccgtttctttggtcaccggtgggttcgccgtgccgtccgctacccgttggtgcccttcgttcgtgccgaagcgccgccgttcgccggcgagtttgcgcgcccgagccgccgagccgccgccggtggtgacgtcaccgctgacgtcatcgtggccgtctgccaggaagagttctacaatgatgctgatggtgtggaggattag

SEQ ID NO: 78189 - DNA, 707 bp, Oryza sativa
  unsure (1)..(707): unsure at all n locations
  Clone ID: PAT_MRT4530_78020C.1
atgggtcgcggcggccgcggtggaggaggaggagggaggtcaagcttccgcggcagcagcacgggcacgaaagcagtaccccgtgctgctccggcgaccacgccggcggcgaagagcacaggcacagctccggccaccaagaatacttcctccggcagcaatgactccgtcataggatccatcggatctgctttctttgatgggtggggatggggcacgggttacgggatggtgcagagggggatggacgccgtcttcggccctcgcaccgtcaacgtcgtcgacgccacgtccacttcgtcttctccggcgccggcggccgccgctgcggctcatccaatgttggatgcgtgcggcgcccacaagaaggcgttccaggaatgcgtcgcccagcaagggatccacgtcagcagatgccagccctacctcgacatgctcaacgactgccgccgggactccgccgcctccgccgccgtcggcgttgccaccaccaccagaattctctgatggatggatcgcctgccagcctgatgcatcatatccatgatagcaatgcaatccatcgattgattaaattagtttgattgcttgtttatttatatccgttttgcagccacacgtaataataataatcatgcgacnctgtatgctactgcatggatggaccttaataagtgaagttaatttatttgcttcaaanaaaaaaa

SEQ ID NO: 78190 - DNA, 426 bp, Oryza sativa
  Clone ID: PAT_MRT4530_78021C.1
ggtcagtggtttttgaatcatgaacagtaggaggaattgtatttacatgatatgggtcataaccggctttgatgccatctaagaccgacgctacaagggggcatgatggctaaagagggagatcatcaaattcatcaatgccggcttctattgtacacggcatccaacaggcacgtgatgcaggaggccgcacacctgggcggggatgcttcggcgtattgacaccctcgtacacggttcctaagttgtacgtttaacgagactggcggtcataaccaagctggtcagagccaacgaaacgccgagcctgatggtccggggtaccataagcgctttcggagatttggagcgatgtcctgcatagccgaactcatgaggggtcgcgcaagctctgggggcggctgacgggatgggcgtgaggcattc

SEQ ID NO: 78191 - DNA, 507 bp, Oryza sativa
  Clone ID: PAT_MRT4530_78022C.1
atgcgtgacgagcggcctcgacgacagccggacgagtggaggagcgtgcacagtggatccggcgccaccgagtcccccgccttaggatctgccgccgcagccctccccatcgctggtttcgccgctaccgccctccccaccactagatccgtcgtcgccaagccccccaccgccgccgtcgccgagcccaccgttgtcgtcaccgcaggcgcttccgagggcgaccagggcggtgagcagggtgtcgtcacgacgttcgctcgtcctaggtgggacgagttcgtccgcgaggtttggccggatcgattggtcccagatctgaaaggaatattcgtctccagggaccaacccatcccactcacccctaaaactacgtttgtcccatcccataccattcttgcaaccaaacactaccctactgaatgggcctggattgtgtcctccctaaaaaggccaaagttcacttttggtcccttatttgaccccgagtctgaaattcaccgctaa

SEQ ID NO: 78192 - DNA, 302 bp, Oryza sativa
  Clone ID: PAT_MRT4530_78023C.1
acgcgcaggggtctccggccagcgaccaagggacgacggtcggaggggagggtggcttcgtcggcggtggggaggcatggaggcagcggatatggcggcacgtggcccctcctctcctcttcccctccctccccttggatatccggtggagacgagctaggggtgtcttcggccggcgaccacggggacgacggccggagaagagggtggcgtcggtggcgatggggaggcatgggggcgacggatccggcgtgggtgacgagagcggcagcggatccagcgtctggagcgggcgacaatga

SEQ ID NO: 78193 - DNA, 231 bp, Oryza sativa
  Clone ID: PAT_MRT4530_78024C.1
atgaaggttgaggattggctaggggtgacgatgacaatgacatcagctctccaacaggggcgctgtgtcccctttgttgtgatggcggcgctgatgacaagcagcgtcatctccccggcgctggggaaggtcggtgaggcagccgagggggggagtggacgggaggcttttccggtgagggcacataggcagtggcgggtggagaccgtggacggtgatggtaaatcgtag

SEQ ID NO: 78194 - DNA, 462 bp, Oryza sativa
  Clone ID: PAT_MRT4530_78025C.1
atgaccgaaatacccattgagtcatctaacccaagcaccaatcgttcagtgccccaacccagtacctttattcctcttcgtacgccgcccttcccagcgcaaccatgccgcatcgcctcccttcctagtgccgccacgcgcacctccacccgccactgcctatgtgccctcaccggaaaagcctcccgtccactccccccctcggctgcctcaccgaccttccccagcgccgctgtagccaatggctaccctggttccaacgggagagccgccttcctacctaggtcggcccaaccggcgtcccaagcggcagcccgaccaccatccctagcgccggtgcaaccgatgggagatgacacccctgctgaagagccgccgtcgcaacagacgggagatgacgctgcttgtcatcagcgccgccatcacaacaaaggggacacagcgcccctgttggagagctga

SEQ ID NO: 78195 - DNA, 626 bp, Oryza sativa
  unsure (1)..(626): unsure at all n locations
  Clone ID: PAT_MRT4530_78026C.1
atgcactactccgcctcctccttttttccctcctccctctctccccaccaccacttcttctctacccggcggcgccaatccgagccgcactgctcctcctctcctccctcaacccccgccaccactcctgcttctcctcctccgcgtcacaccggatccggccgcttggaggtcggggccgccagatccagccaccacgcgcggcagcagcgcccctcctcctttgcgtcacgccggatccggccaccacgtgcagcagcagctcctcctccggccttcttccggcagcagcaccacggcaacagctcctcctctggtcttcctccagcagcagtgcaaagccaaggtctgcatggtggggttctaaatggggttgggaagggcgtggagacgaacaccgccaaggtggaggaggcagtcggcgacgacctccaagggctcctcctaaaggaataaaacgctagctatgaacttgtagcttgaacaaacaaaatgtatatgaatcaaaaggtcacaaacatggtatctaagcaatatataaggtcaccatatatatctactaagcatacangtagatcgggtaaaatcaagctcaagcacaatatgagagatggcaaaatggacaa

SEQ ID NO: 78196 - DNA, 440 bp, Oryza sativa
  Clone ID: PAT_MRT4530_78027C.1
ataaaggtaacccgcatctccatatttactattatgatcatagaagggcccgtaccgacacctgggatgacagtccatcaatggattgacacacggacatggttaaaatgatttttgcaggtgaccggaatatcgagctaattgccctggatgctgatactcggacttttgcacacgccccctttgattctaaaaaaatttgaatagctgtcacgaagagaggaaatgccggtgacccaaccggactgtgtagagatgtcgttctcggaactggttggctgacctgattttgccgactagatgcgatctctatttttgcggatggcgatatgtggtcgtcactacccccaggctcgccacaggctgtcgattgtaagaccatcatccttgaatgctatctttctctttcggcaagtatcatagctcacaccatggtcgac

SEQ ID NO: 78197 - DNA, 117 bp, Oryza sativa
  Clone ID: PAT_MRT4530_78028C.1
gcagcttgcctgggtgcccccgtgccgcttttggacgctcccttcttggtgcattagccgggatcatggtgtcacatgggggattaatactcgacgggttcttaattgctccctcag

SEQ ID NO: 78198 - DNA, 585 bp, Oryza sativa
  Clone ID: PAT_MRT4530_78029C.1
atggaggcggtgcctgtacatttcaacgttgtggtgtggacgacggtgacgatggtcagcggcgagggccctaggatccattcgtggaacgcaaatggtattggcagggcctcttcttctctgcctctgctagagagcgtcggtgggcgaaggggcggcatcgtcagcggtggctccgaggaggagcggcagaggggaggggcgtttgcagcggcgcgggcggagaggaggggcaatggcggcaacatggccgaaggggagctggagatggtgacgggcggggtggcagttcctggatggcgacgtgcgggtgcggcggatcaggtgacgggtgtggtcatcttcctcgtcgtcatggtcgtctttttcgtcgtcatggaagtcgacggtggtgcgattcccctaccctccctcccccactccctctttgtctccctcacagatctggcggagggggcgaaggcggtggcatggccagagggggagagggcagcagcgggtgggtggtggctttttttttctccgaaaacattttcgcaagcaggtggctatagtgcctacgaatatggagatgccgcctgctaa

SEQ ID NO: 78199 - DNA, 2511 bp, Oryza sativa
  Clone ID: PAT_MRT4530_7802C.1
atgggggtgaaggaggaagaagaggaggaggaaagggagaagggaattgggtgtggatattcatgcgaagcttcctgtcatggccgaccgagggggatttggcctgggcctcctttgggcttgggttgtggaagtagagacatgaagcagtactacaaccccaggtgcttgatccccgccgtctctctcctcctactcgtcgtcatcctcaccgtctctaatacatacttccccttcccgacaactaagtcgcgaacactgtcttactcttccttctcctcctcccacggtgggcagaaggccgccgacgaggcctgcaacatatttaggggagagtgggttccggatcctgatgcaccttactacaccaacgacacctgctcggtcatccacgagcactatgactgtatgaagtacggaaagccggaccttggcttcgtgcagtggcggtggcatcccgacagttgtgatctcccccgtctcgacccggcgcgcttcctctcctccatgaggggtaagaccttggccttcattggggattcccttgccaggaaccacatgaactccctcatctgtctactgaccagggtcgccgagccgacgacgagctggccgagcagcgagcacacggtgtaccactacggcggcggctacaacttcaccgtcctcagcttctgggcgccgttcctggtccggaacgagctcatcgacaccgacaggccggcgcacacgggcctatggaacctctacctcgacgagcccgacgcagtgtgggcgtcgcacgtcccggcgttcgactacgccgtcgtgtcggcgtcgagctggttctaccggccgtcgatgctgtacgaggccggccggctcgtgggctgccaccactgcctcctccccaacgtcaccgacctcacgctgcggtacgcgctccgcatggccacccgcgccgcgctccgcgccgtggtgggcggcggcggcggcgtgaccgccgtgctgcggaccgtgtcgccgtcgcagtacgagggcggggagtggaacaaggacggcaactgcgtccgaacgcggccgtaccggcgcggcgagaagacgctgcagggcgtcgagctcgacttccacacgctgcaggtggaggagttcgaggcggcgaagagggcggtgaccgcgagcggtggcagcggcggcgcggtgaggatgatgctgatggacacgacggaggcgatgatagtgcgggcggacgcgcacccgagcaggtcgatgatgaagtttcacgaggtgatcaagctgccatccattgctcattacggcctacgctatgtgctccccgccgccgccgtcgccgcgtgcgttctggtgctcgccgccgtcagcctaccgggccgcgtgccgctgccgccgctgctggcgccggaggtgacgaagaacacggcggatggcgtgggcggcgaccggtctggttgtgatattttcaagggcgagtgggtgccggacatgtccggcgagccgccgccgtacaccggcgagagctgtccggtgatccatgggcactatgattgcatgcggtacggacggccggatcttgggtacgtccggtggcggtggcggccggacggcgggtgcgagatgcggcggttcgacgcggcgaggttcctcgccgcgatgaggggcaggtcggtggcgttcgtcggggactcgctggcgaggaaccagatgcactcgctggtgtgcctcctgtcgcgcgccgagcggccggcgccgtggacgaacggcagctacgcgtaccgcttcgagcgccacggcctcaccgtcgcggcgttctggtcgccgttcctcgtccgcgccgtcgagacggaccccgacggcccgacggggagcggcgccggcctgtggagcctccacctcgacgagcccgacgccgggtgggcggcgcacgtcggcgcgttcgaccacgtcgtcgtctccgccgggagctggttctaccggccgtcaatgttctacgaccgccgcggccgcctcgtcggctgcaacacctgcctgtccccgaacgtcaccgacctcaccctccgttactccctccggatggcgttccggagcgcgctccgggcggcggcgacggggggcgcgcgccgccgcggcgggcgcgccgcgaggaggacggtgatcgtgcggacgatctcgccgtcgcactacgagaacgggacgtggaacgggcacggggactgcgtccggacgaggccggcgcggcgcggcgagtgggagctgaacgccatggagaaggacatgcaccggatacaggtcgaggagttcgcggcggcggcgaggaagagggggaaaggggcggcgaggatgatgctgatggacgcgacggaggccatggcgcagcggccggacgcccacccgagcaagtacaggctgtggcagccggacaagttcaaggtgtcgcgggactgcgtgcactggtgccttcccggcgccatggacgcctgcaacgacatgctgttccacatgctcatcgggtga

SEQ ID NO: 78200 - DNA, 203 bp, Oryza sativa
  unsure (1)..(203): unsure at all n locations
  Clone ID: PAT_MRT4530_78030C.1
ccctctttctcaccaccagtcgncatcaaacccctacctcccgcggcgtcgtcgtcggcggcgtccgncgncgagctccggacagacagagnagggcgcgacgnagaggncgaggagggaaggagngagggagncgacagncaatgnggaccctcggngcgcgcgatcttcacgttgggggaagtngnatccgcggnacgggg

SEQ ID NO: 78201 - DNA, 2502 bp, Oryza sativa
  Clone ID: PAT_MRT4530_78031C.1
atgtccagttcagccagaggaatcaccctcctctgcctcctcttgatcgtgtcatccactgttctccacttctcgatcggcggcggcagcaatggcgagaagaggagagacgatggtgatggtgacggtgacgatgagaaggtgaggttgttgcttggtgccaacgctctgggcgagcgggataggcggcatgggcatgggcatggaggtggtgtctcttcggcgccggcgccggctccggctccggctcgtgcccacctgccgccgccgctgctgcacaagaacgcgcggctcccggacccggtgcccggtagagtcgggctcgggcacaggagggggaacgccaccgcggcgcacagacggcgcagcgagcgggaagggaagaagagcacgccgcttgtcgtggtcgccgcgggcgccgcgctgtccggcgcggcggcggtgctcctcgtcgtcctcgtggtgttcctggcgtgcaggaggttccagaggagggccatgccgggcgctgaccagagcgggacaaacaaggtgagcttcgatcctggccccgacgtgttctacctggacgccgtcaagccgtacgtcgaggccgaccatggcggcggcggcggtgttgtgaagacggcgccggagttggccgggccgaaggaagagcccaggtgcgaggaggaggacagcggagttgccctgtccgacgacggcgccgactccgtccattcctcgtgctgcttccactcgtcgcacttctcctactccgagctccgggacacgaagccggggagcaatggcgtgtcgccatcgccatccggccggtcaagacgacggagctccgcccctgtgacgccctcagagaagaacaaggctgcgagcccttattcgccgcagtgcccgcgcacgccgagcaacagggagcgatcgtctcgcgcccactccccgagctcgtcggtttcggacttgacatcggtgtcgacatcggtggtcaaggatcatgaagtccggcgagccgtccattccctgatgtttccagaagcgcagagcggcggcgcggggcacgtgaaggaagacgaggcagaatcaggcaatatgaggccgcctcctcctcctcctccgccgccgccgccaccgccgccggcagtaacacagcagcaggatgtcaagacaagctgtggaccggccgttcccccaccgccaccgcctacgcctccgccgccaccgccactgctcgcaccgaaacagcagagcagcggcggcccgatcctcccgccggcgcccgcgccgcctcctctgttcaggccgtgggcgccggcggtcgggaagaacggcgcgccgctgccgaagctgaagccgctgcactgggacaaggtgcgcgccgcgcccaaccggcggatggtgtgggacaggatccgatcgagctcgttcgagctggacgagaagatgatcgagtcgctgttcgggtacaacgcgaggtgttcgacgaagcacgaggaggtgcagagccggagcccctcgctcggccaccacgtcctcgacaccaagaggctgcagaacttcaccatcctgatgaaggccgtcagcgccaccgccgagcagatcttcgccgccctgctgcacgggaacggcctgtcggcgcagcagctggaggcgctcatcaagatggcgccggccaaggacgaggccgacaagctgtccgcctacgacggcgacgtcgacggcctcgtcccggcggagaggctgctcaaggtggtgctcacgataccgtgcgcgttcgcgcgagtggaggcgatgctgtaccgggagaccttcgccgacgaggtcggccacatcaggaagtcgttcgagatgctcgaggaggcgtgcagggagctgatgtccagcaagctgttcctgaagctgctggaggccgtgctcaagaccgggaaccggatgaacgtcgggactgcccgcggcggcgccatggcgttcaagctcgacgcgctgctcaagctcgccgacgtcaagggcaccgacgggaagaccacgctgctgcacttcgtggtgcaggagatgacccggtcgcgcgccgccgaggcggcggacatcgccgcggggctcggcgccgagctcaccaacgtcaggaagacggcgaccgtggacctggacgtgctcaccacctcggtgtccggcctgtcgcacggcctgtcccggatcaaggagctggtcgggagcgacctgtccggcgacgagaggaaccagtgcttcgtggcgttcatggcgccgttcgtcgcccacgccggtgaggtgatccgggagctggaggacggcgagcggcgggtgctggcgcacgtcagggagatcaccgagtactaccatggcgacgtcggcaaggacgaggcgagcccgctcaggatcttcgtcatcgtcagggacttcctggggatgctggagagggtgtgcaaggaggtgaggggagccaagaattgccatggcgggaatcctgccctgaacctgaacaatgtatga

SEQ ID NO: 78202 - DNA, 505 bp, Oryza sativa
  Clone ID: PAT_MRT4530_78032C.1
catgagttgcttcagagtttcgtttcacttttcaaggatgaatacaaattaccaaaggggtccgtgattgagctctcaagggagtcgagccatgtgcttaaaataagtattgaaggagaagaattggggagcatacagagcaagcttttgtgcaagtctattttagatctttacattggagacgatccatttgacaaaaatgcaaaagaaagcgtccaagaaaacatggcttctattcttaagaactgaaagggaggcgggttaaatggcagatatcatgttttgaagagctcgccgttttatttctggtagttctgacttatgagagcactcttatgtctgctcaagtatattcttcgcagcctttcttatctgcgtactaattttactcttctagccttgaactctctcttgaaacggaatgaacggagtaaccttgaatttttcgtcttgcaaggcatttcaacgaatggaaattgacccaagtaaacatattcagagggag

SEQ ID NO: 78203 - DNA, 162 bp, Oryza sativa
  Clone ID: PAT_MRT4530_78033C.1
tccgaatcccggtcgaccacgcgtccgcttgcacacgcgcagctcgagccatggccggagtgagcaccagcgtcgtcggcttcaatcctgccgcggcggtgccgcaattggccgtcttgtcggtgcctaagcgcgtgcacgtctctgtacctcccaaggagg

SEQ ID NO: 78204 - DNA, 519 bp, Oryza sativa
  Clone ID: PAT_MRT4530_78034C.1
atgggcggctacggtgtcactaggttcgtggcggcgtgcctcgccgcgagcctcgtcgtgctcctgctccgctgctcgtggtgcgaagggcgtaagcttatgctggcggcggaggagcgaggcggtgatgaggttatgcacttcgagggcggcttggagctcagggtagccgtctggcgccgccgccgcggcggtggcagcggcgtggcagtgttgcctccgccgaggccgcggggattctcggcgagcggcggcagaaccgagcggttaatgcgatcagtgccgagtcctgccgctacgcacgacgccggccccagccacgaccgtactcgcatcggccaccggccgcgccatggccgcgagggtcgcgccgtcctggctaccacccgccggccgttgaggccacaaccgcatggccgcgccaccgcgcctgcaccaggccgcgcgcactcccctgcgtccgcgccatcgccaccgcatcggccgacggttgcggaaggagatggaataagaagatag

SEQ ID NO: 78205 - DNA, 844 bp, Oryza sativa
  Clone ID: PAT_MRT4530_78035C.1
gtgagtgactcacaggcacagctcgatcgatcgatcgatcaccatggccgcctccgccactcgcagtagtaagctcctcgcgttgtggctgtgctgcgcgctgccgctcatcatgtcctccaccgccgccggcaccaccactgccacgacgccggcggtccagcagcagcctcagcctacggcggcggcaggcgccggcgaaggtgtcgtgccagctccgacgacctcgacggcggcgtcgaacgtggcagctgccgatacgacttccaagaagataccagtggaaggagcagggccgcacgaggagtacgtgccggcggcggaggtggcgtcggcgctgccggtgccgatccccgacgggaaccccgtggagggcgccttcaccaacggcggcctcggcggcaaccaggccttcttccccggctccagcggctacggcacggcggcgggcctcggcgccggcggcttcggcccgtacggcggctacggcggcggcccagggacgtacggctacaacggcccattgtacttcggctccgcgccgacgagaaccggctcgccggccggatcttgcgccgccgccgccgtgttgctccttctctccgccgcggccatgtatatttgagataataattagttaattactcggttataaatcctaattaattaagctagtatgcgggagcagtaaatttacactcatgttaatgttaattacctaagtaatactcctatatatgattaatgatttgtatatgttaatggtgattatttttcgaggggatagacagtgagttcctgccaaaaaaaaaaaaaaaaaaaaaaaaaaaaaaaaaaaaaaaaa

SEQ ID NO: 78206 - DNA, 112 bp, Oryza sativa
  Clone ID: PAT_MRT4530_78036C.1
atggccgcggacgccgtcgttcattgctgcctaccgtggatttgtggttctaattttcattctttggatgtcatgacaagtcacccggcaatctactcgtccaaaaatataa

SEQ ID NO: 78207 - DNA, 369 bp, Oryza sativa
  Clone ID: PAT_MRT4530_78037C.1
ggttaaaaatgtatagaggggggatagcctattattcagggctttcactccataatcagtacatactacatagttcttttctacaaaattaacagaagatatcattcatttacacagtataaccaagctccttagtacaaacaaatcaatcatttacacagtataaccaagctccttagtacaaacaaatcaatcatttacacagtaacaactaacaaagagtgatagatagagctggaggttgaggaacacctgcttactgttgccgctaggctgctggaggcgttggcgtcggctctgcatctatggcggtgaggaagccagtggggtttgagatgtcttctgtgtggtgtggctgtggccctgtgg

SEQ ID NO: 78208 - DNA, 198 bp, Oryza sativa
  Clone ID: PAT_MRT4530_78038C.1
tcagaagaagccgtcttccacaccaaagccaaggaatgtgtggaaggagaagccaaagacgcccgctccatcacctccggagacgggtggaaaatccacgaactgaactggatggaggtacagtcttgcacgtcggactttaaatgacacgaccgttggaacccaacggccgaaagcggggacggttgggcccaccat

SEQ ID NO: 78209 - DNA, 552 bp, Oryza sativa
  Clone ID: PAT_MRT4530_78039C.1
atggcgggcaagcgggcgggcggccggcgggtggtggcggcgggagcgggcggccggcgagcggatctgccacccccgtcctcgagagtgatggcggcgcgcggatctgctttacccaacctcaggagtgtcgacagcgggagtgggagaccagcgcgtggatccgccgtctccccgccaacggtgacgagcagatctgcagcccccgccctcgtagcgaccgcggagtgcggatttgccgcccccaacctcgggagcaggcgacatatttggcaccgccgccctcgggagcgatcacagccacggcgacggctgaaggccatctgcgagacgaagctttgcctggatattgatgtgaagagcgtgatggttatattgcttctcgctgatcagcaccagtgcgacatgctcaaacaggcatgcttctccttcattgccaatccgaacacactggaaacggtgactggaacaccagagtatcatcagtttaagagtttatacccaattctactaatcgaggttctggagaatgtttgcatacttcgcaaatga

SEQ ID NO: 78210 - DNA, 441 bp, Oryza sativa
  Clone ID: PAT_MRT4530_7803C.1
atgcccgcaaggtctatcgggcaaaatcctatgcccgtgcgcatgcccgtcgggcacgggcatgctcgatgggtacctatcaggcctgcctacgccgtgcgccaccaccgccgtcgtgcgatgccgccaccgtcgtgcgtcgccgccaacgccgtcgtgcgtcaccgcctgagccgtgcgccgtgcgatgccgcctgctcctgtgcgccgccgccagccgtgcagacgccacagacgccagccgctagcccgcgccgccaccgccaccagccgtcgtggagattgggggcgggcatgcccacgggtaaaatattacacccatgcccacccatgcccatcgggccggatatccgcggatatccggacctaatggtcgtcatcatgtcaactaacaagtttgatgttgctggtgtacacatgtgtgatactaaattcttctag

SEQ ID NO: 78211 - DNA, 1113 bp, Oryza sativa
  Clone ID: PAT_MRT4530_78040C.1
atggggacagagccgctgccaatgtcaaggaagctgagcagtgggggcgggtggtttgatggtgaggatccagtggaggaaggagttcttggtgatgacgcagcaaaagccgacgcaggcggtgttggcgggggagaggagttgtattctgctgctagtgcatgtgttaacataacaagaaatctctccctccctatcaaaacaaatccagaacatgatatatcttcatgtgagcaaggtctcttaagtgaaccgcatggaaaaatacccttcctcttctcagagatattttctcatcacttcaaactttttaactcctctccactctctcccttccttcctcctcctctcctctcctttgctctctccttttctcctctcttcgcctcctcaccgagtgcgacgagggacgactacggcaccaacgatggcgggcaagcgggcgggcggccggcgggtggtggcggcgggagcgggcggccggcgagcggatctgccacccccgtcctcgagagtgatggcggcgcgcggatctgctttacccaacctcaggagtgtcgacagcgggagtgggagaccagcgcgtggatccgccgtctccccgccaacggtgacgagcagatctgcagcccccgccctcgtagcgaccgcggagtgcggatttgccgcccccaacctcgggagcaggcgacatatttggcaccgccgccctcgggagcgatcacagccacggcgacgccgggatggatctaccaacaacaagagcaacttgaacaagtgatggattcgtcgatgaaccctagcccattgatgtggtttgataacacaactcataacttgcttcgtgctgctgactgttatgggctggaaaggctgaaggccatctgcgagacgaagctttgcctggatattgatgtgaagagcgtgatggttatattgcttctcgctgatcagcaccagtgcgacatgctcaaacaggcatgcttctccttcattgccaatccgaacacactggaaacggtgactggaacaccagagtatcatcagtttaagagtttatacccaattctactaatcgaggttctggagaatgtttgcatacttcgcaaatga

SEQ ID NO: 78212 - DNA, 1721 bp, Oryza sativa
  Clone ID: PAT_MRT4530_78041C.1
atcccccggcgcctggggtgcccgcgcctggtgggggccagccccgggtttacaattcttttaattaacacataacaccttgcagtaataattatttgtttgatggatacaccatgaagataattaaacaaccttttcatggacaaaatacattgaggtccctttgagcagggtgcctttacattttgtgccattaaggtaaaaaaaaaacagagagaaagggaagaacagggagagcaaaaaagacataattatgggacaggtactactggtacatgttcttggcttctttcttatgtataagacaagatgacacacttaggaacttaatgactgcaacagaacagaaactgaccacaacaccaaaatgactttcactgatcaggaaaggtacagacttggagatgaggacagcaagcgagtatgatacagggatgaggcaaagctgcaattaagaaaagctatagatagattgttgcatctgatgatgatccatccgtttttgatggcgacatgttcttctttctcagcttctgttcttgcatttctccattgccctcggtgcaaggccaatagcttctgatcctttcattatcctaaggcgcttgcatgattcaacaaacatctcccatgggacgtcgccgacgagcatccagtcgccgtccttgtcctcgtaggttggcacatattcagagccgttgagcagatcagcaatcttgctctcgttcatgccgttcaccccatgagacccacagtttccaatggtgaaggagctgaacatcttctcgagtgccttggagagctcaaggtagctcttgtacatcttgaggtccaccttgcgcaggtatggcgcgccgtccatgctcaccttcacgaaggcggcggcggcggcgccggcgccggacttgtcgccgccgccgtcggcggcgtccttgcccttgtcggcctgcacggccaggatgttcttccggtatgaccggaccggcggccacccaaccacctgtgccttgggagcccttggcttctcggggtcggcggcggcggtgacgacgctgctctggctcggcgaccgcttcatcccgccggcggcggcggcggccggcggcgaggcgtcgtcgttgtcagctccgacgatgtcgaccttcttctcccggtcgtcagccgccgcctcctccttgtcgtcgtcgtcgtccaccgccgcggccgccggctccagcttcagcttgaggtcgatggtctcggcgaagcccctcttcccggaggagctcctcgccgccgccgccgcggcgtctccatcaccgccgccgccgggcaggccgagccggagctcggtcgcctcgaaggccaggtccgccgccattgccgccgccacctcacctcaatatagctagctaactaaatgtcttcttcttcttcttcttcaaagctaagtggatcaatggagatgatgatgaatcaatggacctagctaattagatagctcaaagaatttcttggtttcttcttggctatctactagtggctaatagtaccaaaagctagctctcttcttgttggtttgagcttgatggtgatgatgagagggtggctagaaatgtgatgtaaaggagtgaaatggaaatgccaatggcaatagataaagaggagaagggagaggtgatgttggggggcccaagaaatgataatatcccccggccgattcctcagcccggggatccact

SEQ ID NO: 78213 - DNA, 144 bp, Oryza sativa
  Clone ID: PAT_MRT4530_78042C.1
atggggacgttcgcgtggtctacagatcccaacgttgaaccgttggttgtaaagcccggcataaaccacacccaaggtcgaagtgctgctcctggcaccccacgcctcgatagcgccgatatgatgtctatcgacaccggctag

SEQ ID NO: 78214 - DNA, 271 bp, Oryza sativa
  Clone ID: PAT_MRT4530_78043C.1
tccgtggggggtcgctggggagtccatgcctctggttgtagagggggtgattatgatccaggtatggtgcactgtggtgagttgtgttgtgcgaggggtattgtcacagttcctttccgaggtaccgtggtggtattgaggcgcatggtgacatatcgtggagctgtgtcttgtgggtacagtgttgcatatttgctgtgtggcttgttgagtatgtcatatgctcattcttgcaatattcattcatcagaggaggagtatttcagtgaag

SEQ ID NO: 78215 - DNA, 2268 bp, Oryza sativa
  Clone ID: PAT_MRT4530_78044C.1
ccctagtagcgtagacgtaatcgaaacaagccgtcggagagaaagagaaatattcgccaccggctgcaggcggcggcggcggctgaacccctaaacccaatgtcgccggcggcgaggagcctcctgctatcggccgcccgccgtcaacgccgccgcttctcgacggaggccccgtcgtcgactccgcagcagcagctcctccccaaggggaagcggtgggacgcggtggtgatcggcggcggccacaacgggctcgccgccgccgcctacctcgcccgcgccggccgctccgtcgccgtgctcgagcgccgtggcgtcatcggcggcgccgccgtctccgagtccgacctcgtcccgggcttccgcttctcccgctgcagctacctcctcagcctcctccgccccgccctgatccaggagctggagctggagaggcatgggctgaagctcttgccgcggagcccgtcgtcattcacgccatgcctagacggcaggtatctccttctcggccccgacgctgagctgaaccactcggagatcagcaagttctccgagaatgatgccggtgcatacccgaggtacgaggagaagctggagaagttctgcaaactcatggactttgtcatagactcgcctccccctgagatgaggcatgaataccacctctccatggtggacaggatgaaggataaggttgacaagtctgtgttctggagcaaacttcttgggattgtgatgcagcaggggcagaaggacatggtggatttctttgaccttctcctttcaccagcatccaagatcttgaacaactggtttgagggtgatgtgttgaaggcaactcttgcgactgatgctgtgataggttctatggctggtgtccacactccaggatctggttatgttcttctgcatcatgttatgggggaaactggtggccaacgtggagtatgggcgtatgttgaaggtggtatgggttcagtatcgtcagctataagcaaagcagctcttgaagcaggtgtggaaattttaacaaatgcagaggtttcccagatatctgttcatcacacttctgggaaggtacagggggtagttttggctgatggaacagaggtgctgacatcagttgttttatcaaatgcaactccatatagaacatttgtggacctagtgcctgccaatgttcttccagacaacttcctctctgctatcaaaactgcagattatagctctgcaacaacgaaaattaatgtggctgttgacaggctgccacagttttcctgttgcaaagactttaatcctgaaggcggtccagaacacatgggcaccatacacattggatctgaaagcatggaggaaatcgatctagcgtacagggaagctgcaaatggcgtctcatccacaagacctgttatagaaatgacgattccttctgtgttggataagaccatctccccaccaggccagcatgttattaacctttttgttcagtacacaccatacaaactttcagaaggcagctggcaggattctaatgttagaaaatcctttgctgaaagatgcttttccttgattgatgaatatgcaccgggttttagctcatcagtggtaggctatgatatgctgactccacctgatcttgaaagggagtttggcctaacaggtggtaacatctttcatggcgcaatgggcttggattcacttttcctcatgaggcctgccaagggatggtcagattacagaactccagtgaagggattgtacctctgtggcagtggtgcacacccaggaggtggggtaatgggcgctccgggccgtaacgctgcctccgttgttttggaagatctcaggacaaaatagatggtgacccgaggaaacatggaaacggtgattgacaccaggctgggtctcgttcaagcactgcactgcaaaagcaaccgaattccatcagaatgaaaagcccctcatcagacatcaggtataaacacctgtgccatgtgagctcccatattaaggaaatggacaaacatttcttgaggagaggcacattttctgaattaattggccgactttctagtttagagaggggaacattctttgccccctgaccctatttcccagtatgaagatattttgcatttgttctcttctatttgcagcctgtctgaaatatattattcatcggattatctacttgattgtaggataaattaaatatttttttaacaattatcaaatatcttggaacaaaaaaaaaaaaaaaaaaaaaaa

SEQ ID NO: 78216 - DNA, 333 bp, Oryza sativa
  Clone ID: PAT_MRT4530_78045C.1
atggtgctgccggccgcacgccgacaagatgcagcagaaacatgggacaatgatggatggtggcttggaggtagaacagcggggtcaccaaggaagctgctgctactagccaccacttctatggcttccgaccaggactactctagcaagatcgcctactatggcatcgaggacgatgacgacgggtgcttgatttggcagaaggaggacaccaacaagatcgacacgctgatgagcacgaaggatggtgaggaggaggacgtgctgacgttcggcaaaatttggcatatactgtcagtcaaggagaaagtaaaaacggaaataatggcatga

SEQ ID NO: 78217 - DNA, 1251 bp, Oryza sativa
  Clone ID: PAT_MRT4530_78046C.1
gcccggccgggcaaacccccgcgacccacacccaaacccgccaccgattccgagcgcgccgcggcgagcgagcgggagagaggggggtcgcaagcgcagcttcctccccggccatggatctcctgcacggggagagcgtccagaccacggtggccatcgccgtcgccgtcgtcgcggtcgccgcgggcggcgccttcctcctcctccggtccaggaagcccaagggctgtttggatcctgagaacttcaagaagtttaaacttgtggaaaagaagcaaataagtcataacgtggccagattcaaatttgctcttccaactccaacctctgtattgggccttccaattggtcagcatatcagttgcagaggacaagatgctacaggcgaagaagtaatcaaaccttatacccctactacattggattctgatctagggcattttgagcttgttattaagatgtaccctcaaggaagaatgtcacaccatttccgtgaaatgaaagttggtgattatatgtctgtgaagggacctaagggtcgtttcagataccaagttgggcaagtgagagcttttggaatgctagctggtggatcaggcatcactcccatgttccaagttgcaagggcaattcttgagaaccctaatgatatcacaaaagttcatttagtctatgcaaatgtcacgcatgacgacattcttctgaaggaagaactggacaacatggccaaaacctaccctgatcgctttaagatctactatgtcttgaatcagcctcctgaagtctggaacggtggcgttgggtttgtgtcacaggacatgattaaagctcatttgccagcacctgccgaggacattcaaatcttgaggtgtggtcctcctccgatgaacaaggcaatggctgcgcaccttgatgagctcgggtacaccaaggagatgcagttccagttctaagctctcctaatggcggagtaccagaataatggaccccatggcctacgctgtcttacgctctcttgtgtcatggagacgtcgtctgacctcttttgttagttgatagcaatacatgattagtcgtgacccaacaattcatgtatcactccatttttatgggcaaatgttatctgcaattggcagaagccctgtgactgccatctggtttacaaactgaacattggatgctgcaccgcggggaaactattcaatccctcgaggggatgttctctcgtttgctcaaaaaaaaaaaaaaaaa

SEQ ID NO: 78218 - DNA, 391 bp, Oryza sativa
  Clone ID: PAT_MRT4530_78047C.1
tcccggggcgacccacacgcgcgtttctcctccggctcttcttgagtgtcacaggggtgtcttgtagtagggccggcgccaccaccagagcaagggggggcagcgggccgatcaacacggaggacccgctcaactggggcgcggcggcggccgagatggtcggcagccacctctactaggtgaagcacatggtggcgcatttccgtgagccgctggtcaagatccagggggccaccctccgcatcgggcatgtgtgcggcgtcgcccatgccaaggacgccgtcaggcgtggcgaccagctcgacgaggagggccgcccccgggtcaaggccagcagcgagtggatcctcaactgcatcggccacagcggagacatctacagcggcaccac

SEQ ID NO: 78219 - DNA, 528 bp, Oryza sativa
  Clone ID: PAT_MRT4530_78048C.1
atggagtggcacacggtagagttcagacacggaggaggcaatgagggagagccggagagggccagagccactagatctgatgcctcttgggcagttccaatgccctcccgctgtctggatctaaagcctcccgggctgttgcgaacgtggaccgacgatggagatgatgtgcattgggaccagaaacgaggcaacggggtgccgccgagcaagggtcgttgtatccgcagcaggggaagggtggatgcggtgagcaagggcctgcgacggcgtggtggagtagcatcggtgtggcagagaagggcatatggcagaattcggtttgtggtgcaacgtcgaggttacaacaacaatgagaggtatgttataggcgccttgatgacatttcatgttcgggctgataacggtggtgctctaggcaatgcgatccctcttgagggcgtacgttgttgtgatgcctccttctctctctggcggtatgagtccaagtttgacaagcagcgggacctccttggagacgtcatctag

SEQ ID NO: 78220 - DNA, 258 bp, Oryza sativa
  Clone ID: PAT_MRT4530_78049C.1
gtcttttcccccattccatcgcatccgcatacaaaccccaaccctagccgtctccgtgctagggccgccgccgccgacgcgcgccgcgacccgagcgtcgacgtatcgttagtttaccacccaatcccccgagatcggtggcgtacctggtgattggcggaggaaactgaagaggcggcggtggcgcggagggcatatggagctccatggctgaggatgtctgtgctgcgtattgcggagaggagggcccgtaaggcg

SEQ ID NO: 78221 - DNA, 231 bp, Oryza sativa
  Clone ID: PAT_MRT4530_7804C.1
agcggacggaaaagttcgtggtgtgtaaactggaaaccacttctctggggaagaagatgccaacaatcatgaatgcagatgtggtcagtggttggttgttggctccagagtggttcttgtggacatgtttgcatggtaatgaggatggatggatggtccttccaaacttgtacaattctacaggaaatcaaacaagaacatggaaaaatataaaaaaaaaaaaaaaaaaaa

SEQ ID NO: 78222 - DNA, 1698 bp, Oryza sativa
  Clone ID: PAT_MRT4530_78050C.1
atggatcctcgctcgacggccgatcctgccagctcgagtacttccacccactccaccaccaccacctcccctacccctaccccctccccctcctcgctgcggaagcgggtgctctcgatagacacgtcgtcgcgtgactcgcgtggctcgcccggcagggagagggagagcaaggcgcggcaggaggaggaggaggaggagagcgtgatggcatcggcggcggcgtcggaggcggagagggagagggacgtggaggccgcggtgccggtgccgatgagcccggcggggcggctgttccgggagaccaacttcaactgctacatcgtggcggtgatcgggctcggcgcccgggtggacgtcgcggcggcgcgcgccgggctggaggccaccctcgtccgccacccccgcttctgcagcgtccaggtgtcggatgaggcgagcaagcgggcgaagccacggtgggtccggacgacagtgaacctggacgaccacctcatcttccccgagctggaccccaccgccacgtcagccagccccgaccaggtcatcgaggactacatgtccacgctgtccacgcagccgatggaccactcccgcccgctctgggagctccacgtcctcgacttcccgacctccgaggcggccgccaccgtcgccgtcaggatgcaccactccctcggcgacggcatctcgctgctgtccctcctcatcgcgtgcacgcgcagcgccgccgacccggcgaggctgccggcgctgccgccggcgccggcgcggcgggacgggccagtgtacgcacgccggcgaccgccgctctcggcggggatcgtggcgctcgccgcgtgggcctggtcctacctcgtgctcgccttgcacacgctcgtcgacgtcgcctgcttcgtcgcgacgtcgctgttcctccgcgacgcgcgcacgccgctcatggggacggagggcgtcgagttccggcgcaagcggttcgtccactgcacgctcagcctcgacgacgtcaagctcgtcaagaatgccatgaagtgtactgtgaatgatgtgttagttggagtgacttctgcagcattgtcgcgctattacttccgcaaagaaaatgatacgaacagcgagaagcgtacgcgacgaaagcacatccgtgtgcggtctgctcttcttgttaacatcaggaaaacacctggcttacatgtattggcagaaatgatgaattccaacaagaacaatgttgcgagatggggaaatctaattggttacatcgtacttcctttccgtatagccatgttccacgatcctcttgaatatattcgtcaggggaaaagaacagttgacaggaagaagagctcgttggaagcaatcttcacttattggagcggcaacctaatagtcaaactttttggcattaagactgcagctgctctctgccatggcatgctcgctaataccactctgtcattctcgagcatggtcggacctgcagagaaggtggagttctacgggcatcctatcgagtacattgccccaagtgtatatgggcatccacatgcactgacagtacattaccagagctacatgaacattatcaagcttgtcctcgccgtcgatgatgcacagttcccggatgctcaccagctgctggatgatttcgctgagtccctcaggcttatccggcaggcagcttcaacaaaatcatag

SEQ ID NO: 78223 - DNA, 504 bp, Oryza sativa
  Clone ID: PAT_MRT4530_78051C.1
atgaaatgtcatcaaggcgcctataacatacctctcattgttgttgtaacctcgacgttgcaccacaaaccgaattctgccatatgcccttctctgccacaccgatgctactccacctgctatttctcatcggacaaggagctccactgcatcgatgacccttcgtcggctcctttgcagcacccctcctcccgcggccccctcaccccaaaagtctacgccaccctttctgtagacacgaagcaacgagcaccactgtctcctacattaatattgctatgccaccacagggtcacatccaccatgtctccgagccaccgcaaggcccctctcctctcatgccgtgtcaccacgccgtcgcaggcccttgctcaccgcatccacccttcccctgctgcggatacaacgacccttgctcggcggcaccccgttgcctcgtttctggtcccaatgcacatcatctccatcgtcggtccacgttcgcaacagcccgggaggctttag

SEQ ID NO: 78224 - DNA, 534 bp, Oryza sativa
  Clone ID: PAT_MRT4530_78052C.1
ccacccaaaccccacccctgggggggaaaccggggggggataaacccccccgccgggggggggggggggaaaaaacccccccccccaaaaaaggagggggggggggggcccccccccacaaaaataataatgggttccaagggtaaaaagggcaaattcccccaaaccccgtgggggcgggcccagaaaaaaaccctggggggccttctttttcggccggtttgggccccgcccaacccgaacttttttcaaaaaaaaaggaccggcggggggccaaacccgggggccccccccccccccccgggggcccgagggggggggcccccacccccctggacagggggctgggccccctcgttcttagggacgggggaaaaggcccccggggggctttgggcctggaaagcctccccaggggtaataataacccttggggggggggtttaaggggggaagggggcaaaaccggccccgggggggtcccgccccccaggggaaaggctggaaaaaaattggcccgggaaaacccccggg

SEQ ID NO: 78225 - DNA, 294 bp, Oryza sativa
  Clone ID: PAT_MRT4530_78053C.1
atggctaccgccgcctcgtgcctctcggtgttcgctggcgccgccgcgacgacggtggccgcaagcagccggctgatgtcgcggcgggcggtcgcctgtgctggctacgcggggatggatgatggtggtggcggcgaggggatgatgatcatggcgcgacgacgccgcctggttgtgccggggatcatcgctacggccggcggcggcgtgaggcttcgaccggctaccaagggtgcgtatacatgcgcacgtgcacagcgtgcaagaggatatactccctccgtctcatattag

SEQ ID NO: 78226 - DNA, 458 bp, Oryza sativa
  Clone ID: PAT_MRT4530_78054C.1
tcttctactcgttctctttaatttactcaaccatatgatccttctgagtgactctcttgctagaactgcactagagagcctagtagcctcgtgtaaagatgtctttcaagcagggtctccccttgctgacattttgcattggttcgctgacctcgctattgcatcgaatgaggatgcactggtctgtattatcgaaagtgacatccataatgaattttaagcattcacactacacttagaagaaatccaaggctattaactctacttaacaccgaaaacaccagttgagcatataagcaattaataccatggttctggtgtaccctcacttcttcagacaaaactctcaagaggccgtgcacgaaagcgttcccagaagaaagatttccagaaagacattctaccaaacctcgcttttctgtccaagcacgaggtgttagaggatctttacacccttt

SEQ ID NO: 78227 - DNA, 198 bp, Oryza sativa
  Clone ID: PAT_MRT4530_78055C.1
atggcctctcacccaccacacccgtcaccatggcgacgccggtgctggcagctggcgaccaccactgagctgaagaaggaactgaggaggatttcggtggaggtgtacggcaccaaggccagcgtcctcaacaccgactgtgccatctgcctcggtgatttcgccgacatcgataagaacatagataagtacatataa

SEQ ID NO: 78228 - DNA, 2699 bp, Oryza sativa
  Clone ID: PAT_MRT4530_78056C.1
tgccacctaaattatccatctgacaagaacaatcatcagagtcggtgttaaaggaattattaacaggagagttatgtttatttgattccatcatgttagtgtccaacgaaagacgttttgcatttgcgtctttctcctctgatccatcagttgagcattctgaacttgggagttctgtaacttctccacatgagacagactcagccttggggccaatatgaatgtcaccggcattaattccttctttcattggattagaggagaaaagagtgggggacagagtgaccttttccctttttttttttttcaactgggaactaaaagttgcattttatttgaagactgaaactgtacagttggttgcgactgataaatacatcgggggctgatgagtgatgacaagttaagaaggattaaaaagatatttacattttttttttgtgcgcaagaaagcgcatgctatgtacacaaatgacatgagagcttagctgcatgcacaaggaggagaagcagaggtgtcaattgcttatgtcgaagtacttgggatcagcagggaagtcgtgttcgacacgcagctcgccttcatctgcatctgagtgtctttgaggaaagacaactctaagatcattgtaaaggtagaatcgtctgtcttcctcaggccctgaactatggttgtatggttctgatgatagatcggatttgcaacgctgcatagatcttgacggtttcttggcaaatgggctcagaaatcgtaggtgcaaagcataacgaagagcacctccagctggatcattgatcttggacgatctacagcagtatttcttttcacctaagggaaatgtgtctgattgacaacagcaaacattggtactactgccattttctgaagtttctagagagctagagtcatttgattctctaatgtcacactccatagagcaacatgtcatgttcttgcggccgcccttttccgagtcatcgatcaagttgcagttctgccctggtctacagcctttacaaccagaaataagaagttcatggatggtgtaaagcacatctatgtgtccagcatgaattagatggctggcagcattgtccatataggcaattataaatatgccatcataggaactccaagacaatgcagaaacatttgcagttaccaccagcgtataagtcttggttccagcaggcatgtcactcaaatcatagttgcagaagaaggtatgtagcggtgtcttctctgggttactgacaaccagctgcacacgccctttaactgggatacgtaaccgactcttcgctgatcgtgaatcatgattactcaggcttcttttgagctttgggcttttgctactgctcataggcagcctccccacaagatcgatcgatgaatagtagagtaaggagctgttctcatcaatgctggtagctgaaaatggaagcttctgagttgggggagagaagttaccaccagtcacattcaggacagcaaggaaaccgtcaatattctgattgtcttttccacaggaatagcgaccagataaaagagattcctcaaaagagccaattaacgaccttcgtacaggaaggagaccaatactccgaatacatccaatgcgtggggatacagaggcagattccgggccccagttttgagattttctatctgaactcttcttagggatcctcatatcaaagtcatcatgtaagatattagttttttcaaacgcatctcttatccttgacctaccatgaccttctgaatacccttcacaggttgaaccttcagtttctctcaatgattctccatgagatcctacagtatttgttccatgcatccatgttgggccaagaggagacagattaagcagaggaggatgtgccaattttgcaagtggaacagcaacactttcaagagcttccaggtgatctgaacaaggaaatgactccctgctctcaagcaaaggaccatcagtgaatgtactaccactaaatttatcgacaccctgctctgtactccagttggagtatctcgaagctggccatgtaggtgcctcaaaagaatcaagaattgcagtatttgcctttttacgatcttgaaagccagaagtataaagtctcctagcacaatcagaatgctgaattttggcatcaccagaaccaatattcagggcatcacctcggaaatgtccagggagcgcattgttcaaaggcgacaacacccttttcctcgcatgaggcccatgctgttcaatcaatgaatggcaattatcaataactaaaggtgaatccgtattgtcagctaccatcgtatcaggacctccagtggaattagcaaaacctgattcaaagccaacaatcctcattgcaggcatctgaacatttgatcccaatttagggcctgatctggaacctacatcccctgtatcaggttttagaccttggaagcctgcaggcccataagcagcatggctggctctaaaattgccatcaaatccattcaaagaatctaaaacatcatttctcttgaaatcactgatgtatgagcatggagatgccctgttacttgagctttctgcaggaagcttacccaaatgacaggtgctattccccgcaaaatgaggacgaacaataagagatgcactcattgtaggaagcacttcctccttgattgcaggaacctgaggcaaacccat

SEQ ID NO: 78229 - DNA, 204 bp, Oryza sativa
  Clone ID: PAT_MRT4530_78057C.1
cccacgcgtccgcccacgcgtccgcatgatctgagctgaatcatccatggcgttcttcaacctaacaatctctagggaagctaggtttttcgcgagttcgtgcaattgattagcggaaaatgctcttcttgggctagtcttgtaattttgtttcaccttttcattgtgattttattgtggagaaaatatgggaaatggtgtgtg

SEQ ID NO: 78230 - DNA, 951 bp, Oryza sativa
  Clone ID: PAT_MRT4530_78058C.1
gggttttgtttgttgggaactaaaagttgcattttatttgaagactgaaactgtacagttggttgcgactgataaatacatcgggggctgatgagtgatgacaagttaagaaggattaaaaagatatttacattttttttttgtgcgcaagaaagcgcatgctatgtacacaaatgacatgagagcttagctgcatgcacaaggaggagaagcagaggtgtcaattgcttatgtcgaagtacttgggatcagcagggaagtcatgttccacacgcagctcgccttcatctgcatctgagtgcctttgaggaaatacaactctaagatcattataaaggtagaatctgcgatcgtcctctttcgcggcattactatcatatggcaccgatgatggatcggatttgcatcgtagcatcgattttgaggatttcttggaggaagggcatagaaagcgcaggtgcagagcatagcgaatcacacctccacccgagctatcattaatcctagaagatgcacagcaataattcttgccacctaaattgtccatctgacagcaacaatcatcagaatcggtgttatttttcttattcacaggagagttatgtttatttgattccatcatgttactgtccaacgaacaacgttttgcatttgcgtctttctcctctgatccatcagatgagcattctgaactttcccgttctgtaacttctccacatgagacagactcagccttggggccaatattaatgtcaccggcattacttccttctttcattggattagaggaggaaagagtgggggacagagtgaccttttgccgcatgaaagtcttggtccctgaaggcatgtctgtcaagtcctagcgcgtgaagaaagtatgaagtggagtcttctcagggttgctcacgaccagctgtatcctgcccttaacagggatccgtaagcgac

SEQ ID NO: 78231 - DNA, 810 bp, Oryza sativa
  Clone ID: PAT_MRT4530_78059C.1
atgagaagtccagcagcgcttctcccggtggttgcagatggtggtggtggtgttggggtggaggaggagatggatgtggacgaggacatggcgatgtgcggcggccgcggcggcggcggcggggagaagaagcggcggctgagcgtggagcaggtgcgcgcgctggagcggagcttcgagacggagaacaagctggagccggagcggaaggcgcggctggcgcgcgacctcgggctgcagccgcgccaggtcgccgtctggttccagaaccgccgcgcgcggtggaagaccaagcagctcgagcgcgactacgccgcgctccgccaatcctacgacgcgctccgcgccgaccacgacgcgcttcgccgcgacaaggacgccctcctcgccgagatcaaggagctgaaggggaagctcggcgacgaggacgccgcggcgagcttctcgtcggtgaaggaggaggaggacccggcggcgtccgacgccgaccccccggccaccggcgcgccgcagggctcgtccgagagcgactcgagcgcggtgctgaacgacgcggagatccttccacacaagccagcgccggcggccgccgccgacgccgcggcctcggaggagacggaggcggtggtgaccggcgccgcgctgctccaccacgccgaggtgttcttccacgggcagcttctcaaggtggacgacgacgaggcggcgttcctaggcgacgacggcgcggcgtgcggcggcttcttcgccgacgagcatctcccgtcgctgccgtggtgggccgagcccaccgagcaatggacgacctag

SEQ ID NO: 78232 - DNA, 2367 bp, Oryza sativa
  Clone ID: PAT_MRT4530_7805C.1
atgacgcctcttaataatctctgcaattttcgtgtcaagaagcagtactacaaccccaggtgcttgatccccgccgtctctctcctcctattcgtcgtcatcctcaccgtctctaatacatacttccccttcccgacaactaagtcgcgaacactgtcttactcttccttctcctcctcccccggtgggcagaaggccgccgacgaggcctgcaacatatttaggggagagtgggttccggatcctgatgcaccttactacaccaacaacacctgctcggtcatccacgagcactatgactgtatgaagtacggaaagccggaccttggcttcgtgcagtggcggtggcgtcccgacagttgtgatctcccccgtctcgacccggcgcgcttcctctcctccatgagggggaagaccttggccttcattggggattcccttgccaggaaccacatgaactccctcatctgtctactgaccagggtcgccgagccgacgacgagctggccgagcagcgagcacacggtgtaccactacggcggcggctacaacttcaccgtcctcagcttctgggcgccgttcctggtccagaacgagctcgtcgacgccgacgggccggcgcacacgggcctgtggaacctctacctcgacgagcccgacgcagtgtgggcgccgcacgtcccggcgttcgactacgccgtcgtgtcggcgtcgagctggttctaccggccgtcgatgctgtacgaggccggccggctcgtgggctgccaccactgcctcctccccaacgtcaccgacctcacgctgcggtacgcgctccgcatggccacccgcgccgcgctccgcgccgtggtgggcggcggcggcggcggcggcgtgaccgccgtgcttcggaccgtgtcgccgtcgcagtacgagggcggggagtggaacaaggacgggaactgcgtccggacgcggccgtaccggcgcggcgagaagacgctgcagggcgtcgagctcgacttccacacgctgcaggtggaggagttcgaggcggcgaagagggcggcgagcggcggtggggcgaggatgatgctgatggacacgacggaggcgatgatactgcgggcggacgcgcacccgagcaggtacaggggatggacgcgtcgcaagggatggatgaaggagtacttcaccatctccaacgactgcgtgcactggtcgatgatgaagtttcacgaggtgatcaagctgccatccattgctcattacggcctacgctatgtgcttcccgccgccgccgtcgccgcgtgcgttctggtgctcgccaccgtcagcctacccggccgcgtgccgctgccgctgctgctggcgccggaggtgatgacgaagacggcggatggcgtcggcggcgacacgtctggctgtgacatcttcaagggcgagtgggtgccggacatggccggcgagccgccgccgtacaccagcgagagctgtccggtgatccatggacactatgattgcatgcggtacggacggccggatcttgggtacgtccggtggcggtggcggccggacggcgggtgcgagctgctgcggttcgacgcggcgaggtttctcgccgcgatgaggggcagctacgcgtaccgcttcgagcggcacggcctcaccgtcacggcgttctggtcgccgttcctcgtccgcgccgtcgagacggaccccgacggcccgacggggagcggctccggcctgtggagcctccacctcgacgagcccgacgccgggtgggcggcgcacgtcggcgcgttcgactacgtcgtcgtctccgccgggagctggttctaccggccgtcgatgttctacgaccgccgcggccgcctcgtcgggtgcaacacctgcctgtccccgaacgtcaccgacctcaccctccgttactccctccggatggcgttccggagcgcgctccgggcggcggcgacgggctcgcaccgccacgccacgaggaggacggtgatcgtgcggacgatctcgccgtcgcactacgagaacgggacgtggaacggggacggggactgcctccggactcggccggcgcggcgcggcgagtgggagttgaacgccatggagaaggacatgcaccggatacaggtcgaggagttcgcggcggcggcggaggagacggcggggaagagggggaaagaggcggcgaggatgctgctgatggacgcgacggaggccatggcgcagcggccggacggccacccgagcaagtacaggctgtggcagccggacaagttcaaggtgtcgcgggactgcgtgcactggtgccttcccggcgccatggacgcctgcaacgacatgctgttccacatgctcatcgggtga

SEQ ID NO: 78233 - DNA, 110 bp, Oryza sativa
  Clone ID: PAT_MRT4530_78060C.1
gtcaatcatgttctgtgaagtaggcccgtatggtcaatgctctgatggccgtagacagcacaagtgtatggcagttatgacgcctcttcttcccttggtaggcatccccg

SEQ ID NO: 78234 - DNA, 292 bp, Oryza sativa
  Clone ID: PAT_MRT4530_78061C.1
aagctttttttttttagagcaatatgttctttatctgaaagtcatactctcatacgattatgtaagaaaaatgaattctggacacaaattaagatcataagcaatttgactttatgtacaaaaatatagatagatttagagtatagctatgcacatcaagatatgatactatagtttgctacccacagatatagtaaacaaaaataaaaattaataattagtcctttgagggtcgcctaacctcactccgagccactgtgttatcagagggctctacgcgttgcgtaagctt

SEQ ID NO: 78235 - DNA, 410 bp, Oryza sativa
  Clone ID: PAT_MRT4530_78062C.1
acagccaacgggctttgctccgtgcctggggccaatgcgtggaaaatggtgcgacggagatgtcatcggccaagagtcacgctatacagcaagtgggttgacgtaatgtaagataggatacatggtacttgtgtatgaaatggagcaacttgctagagcacaagattgttatggtctctcctattcctcagttttttttcccctccttttggccaccagatacgagcaactaggtcagaaaccgaagcacatggtttcaacataaaaacgcgagttttttgcgctaaagtgtgagccttgaatagcccaaaggtggcaaggtgtagtatcttccgagctggggtttgggaaggggctcgattgatccagtgatttacacaggctgggcattttcacaattggcagttagt

SEQ ID NO: 78236 - DNA, 205 bp, Oryza sativa
  Clone ID: PAT_MRT4530_78063C.1
tgcaagagtagtgttagaggactttggggtcctgttgtggaaggggggagagattacaactggtgggggaggagggctggttcaccatgctgtcagttattccggatttttacaatctactatctggcttataatactaaatcaaaagctgaactgcttagagcaacttctagttctagaatttactgtagcagctagaagctcc

SEQ ID NO: 78237 - DNA, 175 bp, Oryza sativa
  Clone ID: PAT_MRT4530_78064C.1
ggcgccggtgatgtggccatcaagacgggcgccgcgtatcgcggccaggacttgcgccgaccagagcgcataagaggattggtggaggcagtgcttgacgaggaacctgccatcacgccggactttgaggctctgataccatataaaactcaggtgtatgcaggaaagcgtcacg

SEQ ID NO: 78238 - DNA, 385 bp, Oryza sativa
  Clone ID: PAT_MRT4530_78065C.1
cggacgcgtggggctggtcgggctcgacgacacgctccgggaggcccacgagcttgtgatttcttttcaggagaagaacgcgatgcaccggttggtaatggcaggtcgacaggctgagaaattcagagaagttcagagcaggatcgactcgttcctcttcgtcatccccatcatcggctacatcggtgttacccggcgccttgatcgaatatacagagttcttcttccgagtgacacgtccgtgccatctgcatctacaggctcccggactcatgagctggcacacatttctgcttcagctaaatggacaccttaacattcttgtatgctttaaattaatgaagagaaacttaaaacttgtctgcgtttgtccaggagctcgcag

SEQ ID NO: 78239 - DNA, 633 bp, Oryza sativa
  Clone ID: PAT_MRT4530_78066C.1
atgcttaagaaggtaaacccaagtaaatttactataatcatcaataaaactgacataaaacttctttccaccaacagaaataggagcagggccccagacattagaaaaaataagttctagaggttgacttgacacacttgaagacttaggatagggaagctgatgactcttgcccttttgacaggcatcacaaattgagtctttatttgctacggtagaacaaggtaaattattcttgctaagaactctagtgactatgggcacggctgggtgtcccaaacgactatgccatcgggagaaggaaggagttgtggcggcatggacttgcttggcaggtgatgtaggaagggagtagaggcgacggcggcatctccccttaagaatcgtgttcctcgtggctcgatcctgcaccgcttgcggtgtgaatcttgtctcctcccttgtacttctcccgaacatctaacttgtcgagttcgttggtgatgtggtcggttgcccctgtgtcgaggtaccaattggtgtcgatgccatatgcagctgctgcagccgcactcctttcatcagggacataggtctcatcgtacctatgccaacactctgcagcgacgtgccccctcttcaggcacacttggc

SEQ ID NO: 78240 - DNA, 4335 bp, Oryza sativa
  Clone ID: PAT_MRT4530_78067C.1
ctaacactcctcctcaatcttaactctttctaggttaagattgttcttgaacatctccatttgtctcactggtatagcttttgtaaaaccatctgcaacctgatctttagtagatatatatgcaatttcaagcaactttctagctaccctttctctcacaaaatgaaagtcaacttctatatgctttgtacgagcatgaaagattggattagcagaaagatacttagctccaagattatcacaccatagcttggctgctcgaggcgattctactcctagttcttgcaacaaagtctgtacccacataatttctgctgttgcattagccagagctttatactcagcttcaatactagaccttgatactgtagcttgttttctagcactccatgatacaagatttgggcctaaaaacactgcaaaacctcctgttgatcttctgtcatctggagatcctgcccaatctgcatctgaaaaaccactaacaagcagagagggattcctacagaacttaagacctgtatcaactgtatatttaacatatcttaatatcctttttacagctgcccaatgagttgtagttggagcatgtaagaactgacacaccttatttatcgaaaaagaaatgtctggtcttgtcaaagttaaatactgtaaagcaccaactacactcctatactgagtagaatcctgaggtccaagcaatgttccctcatttactgatagtttttctgaggttgacagaggtgtactgaccggtttacactcatacataccaacccgtcgtagaagatctgatgcatacttctcttgactaagcatgagaccatccttcactttatggacctcgattcccaagaagtagtgcagatcaccaaggtccttaagagcaaagtccttgcttagttcctgcagaagtgttgaagttgcatctggtacagaactggccacaataatatcatcaacatatatcagaagaaatatagaaacctgtcctttcttatagaagaacagtgatgtgtctgcctttgaaggtacaaagcctaactcacttaacttagtacttaacctggagtaccaagctcgaggcgcctgtttaagtccataaagagctttatctaatttacagacatagttaggcatagacttcttttcataccctggtggttgcttcatatagacctcttcttctaggactccatgtaggaaggcatttttaacatccaattgtctaagactccaacctctagagacagcaagagacaaaactattctgatagtagcagctttaacaaccggactaaaagtatcttcataatcaatgccatacctttgcttgaatccttttgcaaccaaccgtgctttatacctgtctagactgccatctgctttccttttgaccttatacacccatttacaatctatgacatttcttcctttctgaggaggaaccaaatgccatgtcttgttttctatcagtgccatgtattcagcatccatggcctccttccagtgtttattattcactgcttcttccagactcttttctttcctgatcccgctttggagacgtgtttttggtctgatcggtgcaacagctgcttctggcatggcctgatcagtttgatcagactgatcagtagtcacatcatcatgcacgccagccgatgatgcaacagatggcgatgtggacgacgctgtttgtggggacgcctgcaccaggtgctcctcctggattggattgccatgctgctcagctgccgacgccatcgcatcatctgtcacaggcgaagagtgctccggcgacgcatcatatgccacaccatgcacgtcgtcctgtgcaccaccatttgctgctgctgctgcattttcatctgctgctgctgctgcattttcttcaccgtttgctacaatttcttcaccgatttctgcattttcttcaccaaactgatcagtaacattaggcggataattaagcacatggttattctgttctccccctaatgaagaaagatgcggaaccaaggatggtggaaggagagatatttccgctctaaggcgtgcgccggcatttgagtggagttcggagaaaggaaaaatgctttcatcaaaggttacatccctggagacatagactctgcctgtggcaatttctagacacttgaaccctttatgtaggttactatagcctagaaaaacacatctcttggaacggaaagctaatttgtgtttattgtaaggccgaaggttgggccaaacagcacacccgaatattctcaatgctgtatagtttggtttttccttgaacaattgttctaaaggacatgcaaagttgataaccttgctaggagtgcggttaataaggtatgccgcagcaagaacggcttcgtcccaaaatttaattggcatagatgcatgtgctagtaatgtgagtgcaacctcaatgagatgtctatgttttcgttcagctgaaccgttctgttggtgagcataaggacaggaaacatgatgagagatacctatcttagcaaagaaggtgttgagtttttgatactctcccccccaatctgtttgaacagcaagaattttgtgaccaaaaaatctctcaacaagagtttgaaactcctgaaacttttggaatacttccgacttatgcttaagaaggtaaacccaagtaaatttactataatcatcaataaaactgacataaaacttctttccaccaacagaaataggagcagggccccagacattagaaaaaataagttctagaggttgacttgacacacttgaagacttaggatagggaagctgatgactcttgcccttttgacaggcatcacaaattgagtctttatttgctacggtagaacaaggtaaattattcttgctaagaactctagtgactatgggcacggctgggtgtcccaaacgactatgccatcgggagaaggaaggagttgtggcggcatggacttgcttggcaggtgatgtaggaagggagtagaggcgacggcggcatctccccttaagaatcgtgttcctcgtggctcgatcctttatcaaaaaataattggaatgaacctcaaggaaagcaaaattatccatagctaaacgatgagcagagataaggttctttttcgcttgaggaacatgtaaaatatttttgagatgtaattcacgagtaggggtatgaatgacagaatcaccaatgtgcttaatttccatacctgcaccgcttgcggtgtgaatcttgtctcctcccttgtacttctcccgaacatctaacttgtcgagttcgttggtgatgtggtcggttgcccctgtgtcgaggtaccaattggtgtcgatgccatatgcagctgctgcagccgcactcctttcatcagggacataggtctcatcgtacctatgccaacactctgcagcgacgtgccccctcaccccgagtctgatttcctccagtgccgcgcccacgtcctggagcagcaggattgctgcgcccacgtgtgccacggccgccgctgcgaccacgctgaaaaccaccacggccgcgttcgccgaagcatgagcttgccgaagagcttgcctgttctcaaagttaagaagctgagagtacacttccgccattgtggtcgactcattgcgtgccacaatagcagatacaacaggttcaaaatcatcatctagcccattcagaacataagcgactaaatcttcctcatcaaggggtttccctgaactagcgatttcatctgctagtgctttcatcttgccacaatactcagatatactcatgttacctttctgggtattggtgagagtaagccggacgttgagcgaccgggctttggtttgtgcagtgaacatggcgcacacctgctgccatgcctgcgccgccgtggatgccgtcgccacttgggtgagaatgtctcttgacagcgtggagagaaggaagcctaggacctgttggtccgaggcaaaccactcctggtaggcggggttgacgatcttctccgtcgtcttgtcgctcgccgtcttctcgatctccatggatggagcggcggtggcgccggtgatgtggccatcaagacgggcgccgcgtatcgcggccaggacttgcgccgaccagagcgcatagtttcctttggtcagtttctctgaaacttgaacgccaaagagaggattggtggaggcagtgcttgacgaggaacctgccatcacgccggactttgaggctcattgtgggtgctctaatgggtggccatcgttctcgtgggccccacggctgactagattcctattctttttctcccccgtgtgggccccacccat

SEQ ID NO: 78241 - DNA, 1848 bp, Oryza sativa
  Clone ID: PAT_MRT4530_78068C.1
ctagcactccatgatacaagatttgggcttctcttgactaagcatgagaccatccttcactttatggacctcgattcccaacaagtagtgcagatcaccaaggtccttaagagcaaagtccttgcttagttccaggtgctcctcctggattggattgccatgctgctcagctgccgacgccgtcgcatcatctgtcacaggcgaagagtgctccggcgacgcatcatatgccacaccatgcacgtcgtcctgtgcaccaccatttgctgctgctgctgcattttcatctgctgctgctgctgcatttttttcaccgtttgctacaatttcttcaccgatttctgcaccgcttgcggtgtgaatcttgtctcctcccttgtacttctcccgaacatctaacttgtcgagttcgttggtgatgtggtcggttgcccctgtgtcgaggtaccaattggtgtcgatgccatatgcagctgctgcagccgcactcctttcatcagggacataggtctcatcgtacctatgccaacactctgcagcgacgtgccccctcttcaggcacacttggcagatggggcggtcattaccaccccgagtctgatttcctccagtgccgcgcccacgtcctggagcagcaggattgctgcgcccacgtgtgccacggccgccgccgcgaccacgctgaaaaacaccacggcagcgtgcggccgcgttcaccgaagcatgagcttgccgaagagcttgcctgttctcaaagttaagaagctgagagtacacttccgccattgtggtcgactcattgcgtgccacaatagcagatacaacaggttcaaaatcatcatctagcccattcagaacataagcgactaaatcttcctcatcaaggggtttccctgaactagcgatttcatttgctagtgctttcatcttgccacaatactcagatatactcatgttacctttctgggtattggtgagagtaagccggacgttgagcgaccgggctttggtttgtgcagtgaacatggcgcacacctgctgccatgcctgcgccgccgtggatgccgtcgccacttgggtgagaatgtctcttgacagcgtggagagaaggaagcctaggacctgttggtccgaggcaaaccactcctggtaggcggggttgacgatcttctccgtcgtcttgtcgctcgccgtcttctcgatctccatggatggagcggcggtggcgccggtgatgtggccatcaagacgggcgccgcgtatcgcggccagaacttgcgccgaccagagcgcatagtttcctttggtcagtttctttgaaacttgaacgccaaagagaggattggtggaggcagtgcttgacgaggaacctgccatcacgccggacttgcagatcacgccggactttgaggctctgagatcaaatcgcatctcatcccatcgcatcccatcgcatggtgccatgcatgcggtcgacgggcaggtaggattttccttggcgtgtgggaacaccgcgcactgtatcgtggcgcctgtcagcgcactagcaacggggtgaaatgcataagctaggccagaaagattgatgccctggcatggcctgttttgacttttaacttccgtctcgctctcgcgcgccgagtcgagtccgcccgcgttgacccgtccgaacccgcccttgacctgctgacgtgtgtggcgcgggcgctggcaccgccgccgcgtctcgttgctcgccagactgtctttaatttgccgggggccacaccgccccccgcggcggcggcggtgcatcgcgttgcgtcgcgtcgcgcggatcttctgctccgcccacgacgatctccgcat

SEQ ID NO: 78242 - DNA, 481 bp, Oryza sativa
  Clone ID: PAT_MRT4530_78069C.1
tttatgaggagggtgtcacagagacacctgcccacagcggttgtcacttggttaaagggtaggcactacacacaactgggtcaactagtaggagtgatggatgttgggggttaaacgtggcacacagagtgaattggtccagttggattcgcgccacactgtgcaccactgcgcccaatgaaaaatagggatacgctatggatggacctggaggaaatattgatggacaccctgtggcgcctaacgcaatggtttaattttgggtaatggtggtagtagataagatcaaagtatcgaactggaatgttatcccactggtatggcgtgctactaagggcccgattcctcttggttaacctgttgctgcgcctgtattggctgctgtgatgggaaccaagctccaccagggtaacatgttgctagagtaccagttatcaatggaattaattgttgcaaaatcctccaaaaaaaaaaaaaaaaa

SEQ ID NO: 78243 - DNA, 492 bp, Oryza sativa
  Clone ID: PAT_MRT4530_7806C.1
cccacgcgtccgcccacgcgtccgcccacgcgtccgcccacgcgtccggatagatatagattcttagtttcctcccagtgccaatgacgcctcttaataatctctgcaattttcgtgtcaagaagcagtactacaaccccagaaggccgccgacgaggcctgcaacatatttaggggagagtgggttccggatcctgatgcaccttactacaccaacaacacctgctcggtcatccacgagcactatgactgtatgaagtacggaaagccggaccttggcttcgtgcagtggcggtggcgtcccgacagttgtgatctcccccgtctcgacccggcgcgcttgctctcctccatgagggggaagaccttggccttcattggggattcccttgccaggaaccacatgaactccctcatctgtctactgaccagggtcgccgagccgacgacgagctggccgagcagcgagcacacggtgtaccactacggcgg

SEQ ID NO: 78244 - DNA, 4197 bp, Oryza sativa
  Clone ID: PAT_MRT4530_78070C.1
atgtgcggaaaaatcccaaggcaaaaattaactaatgcctggagtactaatactctggccacggaagcggaaagactccatgatagccaccgtgtgctgctagttgctcgcctctggccattgcgtcgcttcgcctcttgccaccgccgctcgtcgcgcaccagcatcttggatgccaagctgcaggacgccgccgtcgcacatgaagacgaggtgaccatcagcgccatggatgctgaggttgcgccggaggacgacatgacgacgggcagcatcgtggaccacctcacgcaggaggacgccatggatgctgaggttgcgctggaggacgacatgatgacggacggcatcgtggaccacctcgcgcaggaggacaacagcgccgacgccatggaggtggagcagctcacgcaagtgtgcgttcactgcagccgagtccacgagaatggtcttgacgagatcaagtcaaatccaatatggggtggttcaaagttcagatcaaagccaatagcctcaaagtccggcgtgatctgcaagtccggcgtgatggcaggttcctcgtcaagcactgcctccaccaatcctctctttggcgttcaagtttcagagaaactgaccaaaggaaactatgcgctctggtcggcgcaagtcctggccgcgatacgcggcgcccgtcttgatggccacatcaccggcgccaccgccgctccatccatggagatcaagaagacggcgagcgacaagacgacggagaagatcgtcctaggctttcttctctccacgctgtcaagagacattctcacccaagtggcgacggcatccacggcggcgcaggcatggcagcaggtgtgcgccatgttcactgcacaaaccaaagcccggtcgctcaacgtccggcttactctcaccaatacccagaaaggtaacatgagtatatctgagtattgtggcaagatgaaagcactagcagatgaaatcgctagttcagggaaaccccttgatgaggaagatttagtcgcttatgttctgaatgggctagatgatgattttgaacctgttgtatctgctattgtggcacgcaatgagtcgaccacaatggcggaagtgtactctcagcttcttaactttgagaacaggcaagctcttcggcaagctcatgcttcggcgaacgcggccgcacgcggccgtggtggttttcagcgtggtcgcggcggcggccgtggcacacgtgggcgcagcaatcctgctgctccaggacgtgggcgcggcactggaggaaatcagactcggggtggtaatgaccgccccatctgccaagtgtgcctgaagagggggcacgtcgctgcagagtgttggcataggtacgatgagacctatgtccctgatgaaaggagtgcggctgcaagagctgcatatggcatcgacaccaattggtacctcgacacaggggcaaccgaccacatcaccaacgaactcgacaagttagatgttcgggagaagtacaagggaggagacaagattcacaccgcaagcggtgcaggtatggaaattaagcacattggtgattctgtcattcatacccctactcgtgaattacatctcaaaaatattttacatgttcctcaagcgaaaaagaaccttatctctgctcatcgtttagctatggataattttgctttccttgaggttcattccaattattttttgataaaggatcgagccacgaggaacacgattcttaaggggagatgctgccgtcgcctctactcccttcctacatcacctgccaagcaagtccatgccgccacaactccttccttctcccgatggcatagtcgtttgggacacccagccgtgcccatagtcactagagttcttagcaagaataatttaccttgttctaccgtagcaaataaagactcaatttgtgatgcctgtcaaaagggcaagagtcatcagcttccctatcctaagtcttcaagtgtgtcaagtcaacctctagaacttattttttctgatgtctggggccctgctcctatttctgttggtggaaagaagttttatgtcagttttattgatgattatagtaaatttacttgggtttaccttcttaagcataagtcggaagtattccaaaagtttcaggagtttcaaactcttgttgagagattttttggtcacaaaattcttgctgttcaaacagattgggggggagagtatcaaaaactcaacaccttctttgctaagataggtatctctcatcatgtttcctgtccttatgctcaccaacagaacggttcagctgaacgaaaacatagacatctcattgaggttgcactcacattactagcacatgcatctatgccaattaaattttgggacgaagccgttcttgctgcggcataccttattaaccgcactcctagcaagtttggtgaagaaaatgcagaaatcggtgaagaaattgtagcaaacggtgaagaaaatgcagcagcagcagatgaaaatgcagcagcagcagcaaatggtggtgcacaggacgacgtgcatggtgtggcatatgatgcgtcgccggagcactcttcgcctgtgacagatgatgcgatggcgtcggcagctgagcagcatggcaatccaatccaggaggagcacctgagtctggaagaagcagtgaataataaacactggaaggaggccatggatgctgaatacatggcactgatagaaaacaagacatggcatttggttcctcctcagaaaggaagaaatgtcatagattgtaaatgggtgtataaggtcaaaaggaaagcagatggcagtctagacaggtataaagcacggttggttgcaaaaggattcaagcaaaggtatggcattgattatgaggatacttttagtccggttgttaaagctgctactatcagaatagttttgtctcttgctgtctctagaggttggagtcttagacaattggatgttaaaaatgccttcctacatggagtcctagaaaaagaggtctatatgaagcaaccaccagggtatgaaaagaagtctatgcctaactatgtctgtaaattagataaagctctttatggacttaaacaggcgcctcgagcttggtactccaggttaagtactaagttaagtgagttaggctttgtaccttcaaagacagacacatcactgttcttctataagaaaggacaggtttctatatttcttctgatatatgttgatgatattattgtggccagttctgtaccagatgcaacttcaacacttctgcaggaactaagaaaggactttgctcttaaggaccttggtgatctgcactacttcttgggaatcgaggtccataaagtgaaggatggtctcatgcttagtcaagagaagtatgcatcggatcttctacgacgggttggtatgtatgagtgtaaaccggtcagtactcctctgtcaacctcagaaaaactatcagtaaatgagggaacattgcttggacctcaggattctactcagtataggagtgtagttggtgctttacagtatttaactttgacaagaccagacatttctttttcgataaataaggtgtgtcagttcttacatgctccaactacaactcattgggcagctgtaaaaaggatcttaagatatgttaaatatacagttgatacgggtcttaagttctgtaggaatccctctctgcttgttagtggtttttcagatgcagattgggcaggatctccatatgacagaagatcaacaggaggttttgcagtgtttttaggcccaaatcttgtatcatggagtgctagaaaacaagctacagtatcaaggtctagtactgaagctgagtataaagctctggctaatgcaacagcagaaattatgtgggtacagactttgttgcaagaactgggagtagaatcgcctcgagcagccaagctatggtgtgataatcttggagctaagtatctttctgctaatccaatctttcatgctcgtacaaagcatatagaagttgactttcattttgtgagagaaagggtagctagaaagttgcttgaaattgcatatatatctactaaagatcaggttgcagatggttttacaaaagctataccagtgagacaaatggagatgttcaagaacaatcttaacctagaaagagttaagattgaggaggagtgttag

SEQ ID NO: 78245 - DNA, 4770 bp, Oryza sativa
  Clone ID: PAT_MRT4530_78071C.1
ctaacactcctcctcaatcctaactctttctaagttaagattgttcttgaacatctccatttgtcttactggtatagcttttgtaaaaccatctgcaacctgatctttagtagatatatatgcaatttcaagcaactttctagctaccctttctctcacaaaatgaaagtcaacttctatatgctttgtacgagcatgaaagattggattagcagaaagatacttagctccaagattatcacaccatagcttggctgctcgaggcgattctactcccagttcttgcaacaaagtctgtacccacataatttctgctgttgcattagccagagctttatactcagcttcagtactagaccttgatactgtagcttgttttctagcactccatgatacaagatttgggcctaaaaacactgcaaaacctcctgttgatcttctgtcatctggagatcctgcccaatctgcatctgaaaaaccactaacaagcagagagggattcctacagaacttaagacctgtatcaactgtatatttaacatatcttaagatcctttttacagctgcccaatgagttgtagttggagcatgtaagaactgacacaccttatttatcgaaaaagaaatatctggtcttgtcaaagttaaatactgtaaagcaccaactacactcctatactgagtagaatcctgaggtccaagcaatgttccctcatttactgataatttttctgaggttgacagaggagtactgaccggtttacactcatacataccaacccgtcgtagaagatccgatgcatacttctcttgactaagcatgagaccatccttcactttatggacctcgattcccaagaagtaatgcagatcaccaaggtccttaagagcaaagtccttgcttagttcctgcagaagtgttgaagttgcatctggtacagaactggccataataatatcatcaacatatatcagaagaaatatagaaacctgtcctttcttatagaagaacagtgatgtgtctgcctttgaaggtacaaagcctaactcacttaacttagtacttaacctggagtaccaagctcgaggcgcctgtttaagtccataaagagctttatctaatttacagacatagttaggcatagacttcttttcataccctggtggttgctccatatagacctcttcttctaggactccatgtaggaaggcatttttaacatccaattgtctaagactccaacctctagagacagcaagagataaaactattctgatagtagcagctttaacaaccggactaaaagtatcctcataatcaatgccatacctttgcttgaatccttttgcaaccaaccgtgctttatacctgtctagactgccatctgctttccttttgaccttatacacccatttacaatctatgacatttcttcctttctgaggaggaaccaaatgccatgtcttgttttctatcagtgccatgtattcagcatccatggcctccttccagtgtttattattcactgcttcttccagactctgtggttcaccagaagaagtaaaatttagccatttaacagttccatcagtatataccttttctttcctgatcccgctttggagacgtgtttttggtctgatcggtgcaacagctgcttctggcatggcctgatcagtttgatcagactgatcagtagtcacatcatcatgcacgccagccgatgatgcaacagatggcgatgtggacgacgctgtttgtggggacgcctgcaccaggtgctcctcctggattggattgccatgctgctcagctgccgacgccgtcgcatcatctgtcacaggcgaagagtgctccggcgacgcatcatatgccacaccatgcacgtcgtcctgtgcaccaccatttgctgctgctgctgcattttcatctgctgctgctgctgcattttcttcaccgtttgctacaatttcttcaccgatttctgcattttcttcaccaaactgatcagtaacattaggcggataattaagcacatggttattctgttctccccctaatgaagaaagatgcggaaccaaggatggtggaaggagagatatttccgctctaaggcatgcgccggcatttgagtggagttcggagaaaggaaaaatgctttcatcaaaggttacatccctggagacatagactctgcctgtggcaatttctagacacttgaaccctttatgtaggttactatagcctagaaaaacacatctcttggaacggaaagctaatttgtgtttattgtaaggccgaaggttgggccaaacagcacacccgaatattctcaatgctgtatagtttggtttttccttgaacaattgttctaaaggacatgcaaagttgataaccttgctaggagtgcggttaataaggtatgccgcagcaagaacagcttcgtcccaaaatttaattggcatagatgcatgtgctagtaatgtgagtgcaacctcaatgagatgtctatgttttcgttcagctgaaccgttctgttgttgagcataaggacaggaaacatgatgagagatacctatcttagcaaagaaggtgttgagtttttgatactctcccccccaatctgtttgaacagcaagaattttgtgaccaaaaaatctctcaacaagagtttgaaactcctgaaacttttggaatacttccgacttatgcttaagaaggtaaacccaagtaaatttactataatcatcaataaaactgacataaaacttctttctaccaacagaaataggagcagggccccagacatcagaaaaaataagttctagaggttgacttgacacacttgaagacttaggatagggaagctgatgactcttgcccttttgacaggcatcacaaattgagtctttatttgctacggtagaacaaggtaaattattcttgctaagaactctagtgactatgggcacggctgggtgtcccaaacgactatgccatcgggagaaggaaggagttgtggcggcatggacttgcttggcaggtgatgtaggaagggagtagaggcgacggcggcatctccccttaagaatcgtgttcctcgtgactcgatcctttatcaaaaaataattggaatgaacctcaaggaaagcaaaattatccatagctaaacgatgagcagagataaggttctttttcgcttgaggaacatgtaaaatatttttgagatgtaattcacgagtaggggtatgaatgacagaatcaccaatgtgcttaatttccatacctgcaccgcttgcggtgtgaatcttgtctcctcccttgtacttctcccgaacatctaacttgtcgagttcgttggtgatgtggtcggttgcccctgtgtcgaggtaccaattggtgtcgatgccatatgcagctgctgcagccgcactcctttcatcagggacataggtctcatcgtacctatgccaacactctgcagcgacgtgccccctcttcaggcacacttggcagatggggcggtcattaccaccccgagtctgatttcctccagtgccgcgcccacgtcctggagcagcaggattgctgcgcccacatgtgccatggccgccgccgcgaccacgctgaaaaccaccacggccgcgtgcggccgcgttcgccgaagcatgagcttgccgaagagcttgcctgttctcaaagttaagaagctgagagtacacttccgccattgtggtcgactcattgcgtgccacaatagcagatacaacaggttcaaaatcatcatctagcccattcagaacataagcgactaaatcttcctcatcaaggggtttccctgaactagcgatttcatctgctagtgctttcatcttgccacaatactcagatatactcatgttacctttctgggtattggtgagagtaagccggacgttgagcgaccgggctttggtttgtgcagtgaacatggcgcacacctgctgccatgcctgcgccgccgtggatgccgtcgccacttgggtgagaatgtctcttgacagcgtggagagaaggaagcctaggacctgttggtccgaggcaaaccactcctggtaggcggggttgacgatcttctccgtcgtcttgtcgctcgccgtcttctcgatctccatggatggagcggcggtggcgccggtgatgtggccatcaagacgggcgccgcgtatcgcggccagaacttgcgccgaccagagcgcatagtttcctttggtcagtttctctgaaacttgaacgccaaagagaggattggtggaggcagtgcttgacgaggaacctgccatcacgccggactttgaggctctgataccatataaaactcaggtgtatgcaggaaagcgtcacggtggacgcagggtttcgtgttacgcgtgggcggacgcgtgggcgctgagtttacagatatatatgcgtgcagatgtgttggttcggtgatcctaattacaagggattagagtcctatcctctatctatccgaaccaacatgcatccgtgcatatccatacagagaatgataagatatgataagatctaacactcctcctcaatcttaactctttctaggttaagattgttcttgaacatctctatttgtctcactggtatagcttttgtaaaaccatctgcaacctgatctttagtagatatatatgcaatttcaagcaactttctagctaccctttctctcacaaaatgaaagtcaacttctatatgctttgtacgagcatgaa

SEQ ID NO: 78246 - DNA, 279 bp, Oryza sativa
  Clone ID: PAT_MRT4530_78072C.1
atgcaggcgatcgaattctcgctcctagctcgatcgatcgctgccaatccggtgccgcaacctaaagacaatgtcctttgcggatattactcgtgtgaattccttagggttaatgagaagtacacgaccaacgcagaggataaattatgctcatttatcgcctcctctcccaccaacccagtgttgtggaaaacggtgttaacggccgttaatacgtccgataatacggatacggagatcagtccgtcacgtcacgccgatgcggtcatcattagtcgg

SEQ ID NO: 78247 - DNA, 403 bp, Oryza sativa
  Clone ID: PAT_MRT4530_78073C.1
ggctgagcccggaggcggcagcggcgtgcggctgccggctgcgcccggagacggcagcggcggctgcggctgcgcgtgacggcggctgcagctgcggcctcgcttggaggaggcggcggcggtggcggcggcagctgcgaccggaggctgcaacggcggaagttgctcccggaggctacggcggcgtgcagcccatttctcctctcccccaagtgtccctgtacctgatctcccccaagcaccatgtcccagccagatacaactaaatggcttagctgcagctatagcccgctatagctgatgttcgctgttgaaagctcaagcagctaaggcccttagccggctatttaaatccctgggtatcctgcgtaagcgcaattgtgcacttctacaggcgacggcg

SEQ ID NO: 78248 - DNA, 111 bp, Oryza sativa
  Clone ID: PAT_MRT4530_78074C.1
ggaaaagaatcaagcggctcaagcatgaagtcacctttaaaagattatctgaggctgaaatttatgcttatattgcaactggcgagcctatggataaagcgggcgcttatg

SEQ ID NO: 78249 - DNA, 168 bp, Oryza sativa
  Clone ID: PAT_MRT4530_78075C.1
atggaggtggagggcgacgacgttaggaaaggagacgatgaaagacgtgctagaggtggagagggcctgcaacagctgtggggaggtgacgaattaacgatggctaggggcggcgacggggctgccggggcagccgagctctgggcgaggtgcgcatgccctggctag

SEQ ID NO: 78250 - DNA, 1102 bp, Oryza sativa
  Clone ID: PAT_MRT4530_78076C.1
tttttctttttttttttttttttttttttcaataaggtcacttttatatccatctttgaagtacctttgtttttttgttctgaaagataactaggcatattcattcatctatgttgttgtggagaccattcactaacgtaaattttttcacaggcatacaacactggaggtctcatagtgtgcttattgtacaaagaaaagctctccggttattttctcaggcttatcttggtgattcgcgctacaacactcttacagattagagatgcctgctattcaaaaacaccatggcatatatttacatatatacaacaaggccgaagcatatggaccactgcacgtctaaacctccagcagggcttccaactcgcgaagaacgtcagcacgggtaactatacctatcacttgtctgtcctgatttacaattggtaatctgtggatcttcttctttagcatcagagctgccgcatccattactgttttgtcagatggtagagtgatggctggagaggtcatcacttctgcaatcttcgtctttgacccatgagaagccctggcccggtcactcttgacgatcactccaacacatctgaggctggcatctataactgggagacctgagaccgtctcaaagtggcactcaacctcctccagcgtctgctcggcagtggctaccagcacaggcgccgacatggcttcactcaggagcgccacacgctggttgtcggcttgagcagcggcctcctgtgactggaggtaggcgcggagatcgtcgtagctgagcagggagaagttctccggccactcaccggagatgatggcttcagggttctcgtcgatctctagccggaggctcccgtccatgaacgtcgatgcccggcaccggaaggttggtgatcccctccctcctccgatcttggtaccattgatctttgctcccttgaggacggagcagctctggaatgtgttgatgcaggccattgtatcactgtgtctatactttttcttccttagcttctgaccgtttttttccccggccgcccggacgcgtgggcggacgcgtgggcggacgcgtgggcggacgcgtgggcggacgcgtggg

SEQ ID NO: 78251 - DNA, 1372 bp, Oryza sativa
  Clone ID: PAT_MRT4530_78077C.1
acaaagaaaagctctccggttattttctcaggcttatcttggtgattcgcgctacaacactcttacagattagagatgcctgctattcaaaaacaccatggcatatatttacatatatacaacaaggccgaagcatatggaccactgcacgtctaaacctccagcagggcttccaactcgcgaagaacgtcagcacgggtaactatacctgttaatagtgtttggaactccatttagcatgcaacatactctgaattatcaatgttaaggatggtataaaatcaaggggaaaaaatgaaagccctttttttttctgtattggccactgctcaaaactcacctatcacttgtctgtcctgatttacaattggtaatctgtggatcttcttctttagcatcagagctgccgcatctgtagacattgcatatgccttgttagcttaactggtagctaagtggaaaataaccaaaaaaaataagggcgaaaacaacgatggattacccattactgttttgtcagatggtagagtgatggctggagaggtcatcacttctgcaatcttcgtctttgacccatgagaagccctggcccggtctgctcggcagtggactccagcacaggcgccgacatggcttcactcaggagcgccacacgctggtcaattcaccaaccatgcaaccagttcagagtttagcaagatcttaagaagaagatcgacagttggtgatctgaagaagaagaatctatgtatatatggtgtgatcagtgcacctggttgtcggcttgagcagcggcctcctgtgactggaggtaggcgcggagatcgtcgtagctgagcagggagaagttctccggccactcaccggagatgatggcttcagggttctcgtcgatctctagccggaggctcccgtccatgaacgtcgatgcccggcaccggaagatcgtagccggaggccttcatttatagtgaactggatacttgcgtctattgtcagggagctgaggtggataggaatgcatgggaggtgctggcccaccaatgactgctactgctcagatcctattggtggactttgacctcatccatgctcagatcttttttaatactccattagtgcttgttagtatctcatcatcatttgtttctgctatcagagattcagaggtggcatttatcatagtccatgcatatggcaaaacttatggatctgcaaattgcaagctgaagatgactattttgcatattctgaggtttggctgaaacttagtaattagattgagattagtgtattcaggatagtgatttgagagcagcagaatggtgcatggggtggttttaaccaaggtgtcactgacaagggcctgaac

SEQ ID NO: 78252 - DNA, 313 bp, Oryza sativa
  Clone ID: PAT_MRT4530_78078C.1
aacgaacagacatgcatttatatttcatctgggggattgcccaaagagcggattggtccatacacattatgctacacttgctacctactcacatggcttggatctcactgcacaccagagcctcttactcaacactgctctacacatgcttgtccattggctgtacacgcacattagagtcgtcaacgagagtggtggcctatcacatacagaaacaccacttttatatcctctgtacataaacgagccctgggatactactgaggggaccatccatgcttgcaaggagctatcgtacacaccgtcaaacact

SEQ ID NO: 78253 - DNA, 131 bp, Oryza sativa
  unsure (1)..(131): unsure at all n locations
  Clone ID: PAT_MRT4530_78079C.1
gcagcgagagaagatcgtgggatattttttttcgcctgtttgtgcaatatgtgtgttgtgtctccgatccctctaccctgtacgtgctaacaaacacagagagaggcgccaggnacataacaaccacgcag

SEQ ID NO: 78254 - DNA, 1125 bp, Oryza sativa
  Clone ID: PAT_MRT4530_7807C.1
atggcgcttcttaataatctctgcaattttcttgtcaagacgcagtactacaacggcagaggcgaatgggtgccagaccctgatgcaccctactacaccaacgacacctgctcgttcatccacgagcactatgactgtatgaagtacggcaagctggaccttggcttcgtgcagtggcggtggcgtcccgacggttgtgatctcccccgtctcgacccgttgcgcttcctctctgccatgaggggcaagaccttggccttcattggggattcccttgccaagaaccacatgaactccctcatctgtctcctgaccagggttgccaagccaacgacgagctggccgagcagcgagcacacggtgtaccactacggcggcggctacaacttcaccgtcctcaacttctgggcgccgttcctggtccggagcgagctcgtcgacgccgacgggccggcgcacacgggcctgtggaacctctacctcgacgagcccgccgccgtgtgggcgccgcacgtcccggcgttcgactacgccgtcgtgtcggcgtcgagctggttctaccggccgtcgatgctgtacgaggccggccggctcgtcgggtgccaccactgcctcctccccaacgtcaccgacctcacgctgcggtacgcgctccgcatggccacccgcgccgcgctccgcgccgtggtgagcagcgacggcggcggcgtcaccgccgtgctgcggaccgtgtcgccgtcgcagtacgagggcggggagtggaacaaggacggcaactgcgtccggacgcggccgtaccggcgtggcgagaagacgctgcagggcttcgagctcgacttccacacgctgcaggtggaggagttcgaggcggcgaagagggcggcgagcggcggcggggtgaggatgatgctgatggacacgacggaggcgatgatacggcgggcggacgcgcacccgagcaggtacaggggatggacgcgtcgtaaggaatggatgaaagagtacttcaccatcttcaatgactgcgtgcactggtgtgttcccggcgccattgacgcctggaacgacatgctatcacacatgttgctcactgtcagcgtcaccagatggactcaacacaactaa

SEQ ID NO: 78255 - DNA, 711 bp, Oryza sativa
  Clone ID: PAT_MRT4530_78080C.1
tgtacgatgcaatacatagatgctgagatcatacggtaacccatcagttacctgtacccaacaaggatatgtcaaacgcaagatgctgtcactctccaagagaattccaagcatcttgagaacaagacgcctaaagaaataaaggaattatatgaagggcttgcacaaaacaaagttgcttaccgtggctgtctatattggacaagcattcctaatttttcaagataaaagagtaataatggccgcataactttaacgataattttacatttgcttcttgctctacctgaagtactgcaccattacatgtcttgaccccctcgattataatcacaagccatatagacaattcctaacaatcttagaaagtgcatatgactactacaaaacaaaaagcggggaacaactggcaactgggagaagttgctatgtcacaagcaacataaagacagtgtcctttttggatattacacttgcgagttactcagggttaataattggtgcttgaccaacccaaaatataactctcttaactgatggaatgtgcatctaacttcaacgataaaggcattaaaaacatatagcgggacctctgtcattttatccactgcaagtgcagccataaagatggactgttctttgaccttcgaaggcagcctagcgatgattgaagaatacaagtctctttggaagtggagtcacgtgcttgtg

SEQ ID NO: 78256 - DNA, 867 bp, Oryza sativa
  Clone ID: PAT_MRT4530_78081C.1
atggcgaggttcgaggtgtacgagaacaacggcggcacgtgcgtggccgtcgccggcgccgactactgcgtggtcgccgccgacacgcgcctctccgtcggatacagcatcctcagccgcgacagctccaagatcgcccacctagcggataaatgtgttttggcctcatctggatttcaaggtgatgttaaagctttgcagaggaaccttactgccaaggaattgctttatgaacacaaccataacaagaaaatgagctgccctgcgatggcgcaattactgtccaacacgctctactacaaaaggttcttcccatactatgccttcaatgtgttgggtggacttgacagcgaaggtaaaggatgtgtcttcacatatgatgctgttgggtcttatgaaaggacaggttatagtgctcaggggacaggtgcagctttgatgatgcctgttctggacaatcagctaaaatctcctagcccattactacttccagctcgggatgcagtgacaccattatctcaatcagatgctgtcgatctggttaaggacgtttttgcatcagccacagaacgagacatatacactggagataaactggagattgttgtcatcaacagcgccggctctcaccgtgagttcattgagctaaggaaggattagcgtgggatactatcaaaccacctcgtacctgtgcaacaacaataccattcagttactagcagaatgtgccttttccttgccagatgtatttaaattaccgttgtattattcagtgttcaccattattacggaagtggttacgtaagacattttgtagtctttctatctgaactatgcgtatctgaattgctcaccaaccttttcttg

SEQ ID NO: 78257 - DNA, 2796 bp, Oryza sativa
  Clone ID: PAT_MRT4530_78082C.1
atggccggactgttcgcatccatggcaatcgaaggtgcactcgacagcctctcctccctgctgcaactgcaagccaacaatccaacgcctcctccggcgacaacggcggcggtgccgccggcggagacgagccacgcactggagaacaccagggagaagtccgccaacctgcggctggaggagatcaaggagctcgcctacgacgcggaggtggaggcgacggccgctcagggcggcgacggcgccagcagcagcagcagcagcagcaggaagcgcaagatccacaaggtacatgacgaggattacttcattgaggctggcataattccagtgccaaaagagttgactgtcagagcaaggaaagttatacaaagatttggtgagatcgaaggctactatggtagtttcaccttgtctgagaatgatggggacagaaggattatccctgatatcaatagtctgaggcagactagctcttttgtatttgcgcctataattgttggaagagaccaagacaaggagaacgttatcaagaagatgatgaccttggaaggaagccgcattggaggttgcatgtcagttttggccattgttggcatgggaggattgggtaaaacaacgttagcgcaacttgtttacaatgatccaaagaatgagcaaagtgattactggaagtcgttgtgtatgccgatttttgcctctacgcgttgtgacattatagtaactactcggagtgaggcagtggcaagctggttgttattcaagcaaacagcgtttgttgagcatgataatgtcagtccagcaaacctagtagagattggccagaggattgcaaagaagtgccaggggttaccgttggcactcaagactctaggtagcgtattgcgctttgaaaccaatgtaatgaaatggagagatgttttgcagagtgaactatgggacttggagcggtcacagaacgaagttttgccagccctggagttgagctacaagcacatgcctatgcacctgaaactttgttttgtttccctttctctatatctgaaagatacttacttcgatgaaagtattgttgtttggttgtggaagtcacttcatttacttcagtgtgacggaactgataacagcaatgaaattggaggtttatattttactcaattagttcagcgatcattgattcaacaagtcgatacccacggacgcatggctatacatgatcttgtccatgatcttgcgtgctttctagctggggaagagttctttagactcgaggaagatggatatgttgaaattccaaagggtgctcggtgtatgtccataatgccacatccacaatgtaagaggagtactcaaatatcaaatgcctcgcaatctctcagagtaatcatattgatcaggagaattaatatcaaaaatccagaagcattgtttatgaactgtaaaaagtttcagatcattcaagtcatagatgacagttttgcaaatgtgttgcttgacttcatgggtgacatgaaactactacgtcatttcaggcttataagaagctgcaacgaggtaaagttagtaatatctgattcaatgtcccagcaattcaatttgcaaacactgaactgtgaagcatatagtctacatggaattgggcggctagctaacttgcaaaatttgcctaatatacacctctggaaatgtggttgctacttaagggagctgaggaatatgaacaaaataaggaggctgcacatatatggactttgtaatgtatctagtattcaagatgtaaatgaagctcatttacatagcaagaaggacctcgagatactagaattggactttgagagtggagggatttgtaaagttcacaaagaggaagctgatgttaatcaagcaattagcactgtatctggtggctcaatacttgagagcctaagaccacatcatcagagtcttaaagtactaaggatgaagaatttgaatgaggtaaattatcccagctggttgggcagtgcttccttttccaaattaacaaaattgcggttagagaattgtcaatctcagcaccttccaacgctaggtgagctaccttctctcaaatccattgatatccgccaaatggagtacgtggaaaacatcggtcgggtgttttgcagccttgatccaagcgtcaaagggttccgctccttagcacacctgagattccaagacatgaatcgattctcagagtggtccgaagtgcatgatggcgagttttcgtccctggaaacactgctgatctggagtgcctctgaattgagctctcttccatcggttccattctcaagcttgcgtagcttcgaactatgtgattgcaaaaatcttgttacttttcctgcatcagctacccttcagatactaagcatctcgtcttgcgagaaactgaaggaactgccggctctcccgtccctccgttcactgaaactgagtggctgtgaaagcttggttgcagttggtcacttcccgtcactcaccgtcttgcatatgagtactgaatttgaagaagaggtacttcacaagttgatgaatttacacttaaagctggaagaattgtcaatttcgtctgataccatgaagttaatcaatcttgagccacatagcctgcctttacttagagagctcgagttagtatgccctaacttgcagaattgtgatgcacttgccagcctcagttccctcgagatactatgcgtaaatcgttgttctccccaacttcgggtgcctaattcacttcaaagccagctggaaaaactctacagtccttga

SEQ ID NO: 78258 - DNA, 361 bp, Oryza sativa
  Clone ID: PAT_MRT4530_78083C.1
gagcacactggaaccaaccacagaaaatcttatctcaaacggacaaagtatgaagcttgtagaatttttcaaagttctatccgaataggtcccaaagcttctcgccacgaaaacagaattttgcaagcggaatttggcgattttaaatttgccgaacccggcgaagatgggaagaattggatgtaactttttctgtagatgtccatggatatattataagcctaatttcgagtccgccaacatgcacgctgcgagccggtagcaagtagctaactctatcatcaaaacccaagtgttcttggcggcgattagaggtataagaagaggggaagaacaaccacagggtcgtgctccaacccta

SEQ ID NO: 78259 - DNA, 162 bp, Oryza sativa
  Clone ID: PAT_MRT4530_78084C.1
atggcggcacctagggaaggagagggaatgagggtgcatggtggtgagcattgctggccggaggagaggggaatggtggagctcactggcgaacgagggaggcgggttcccatgttgaggaatggcgaccaaccggtggccgagaggttgattggggactaa

SEQ ID NO: 78260 - DNA, 228 bp, Oryza sativa
  Clone ID: PAT_MRT4530_78085C.1
atgcagaaggtggctggcggcaaagacggcgttgtcgggcgctggagttgggatcgattcgactcggagaaggccaggaagaacgtgtgttggcctagtgctgagctcgaggaaggactctgggactgcctcccgccgggcttcctctgcatcatcgtcggccaccgggttcccctcaccgccatggcttcatgtgcttctaggagaccatcggatccggcggcatga

SEQ ID NO: 78261 - DNA, 1272 bp, Oryza sativa
  Clone ID: PAT_MRT4530_78086C.1
tttttttcgcgttcttgttcttgtttgtttttaacagcagaagaatatgttctttcaagtttcaatccgatatactgttttagatcttcagttgtattttacaacgagattacaggatgcttcagcttcgagcatccaacacaccatcacctagtcttgctagaactacggcgtggtttcattttagggcatcacaatatatatgtacacaatagatgcttagaaagaacaaaatagaaaataacgatatttacaacaagaataattttgggccttctgatccaccagatgcttggctatggtttgaattccttttcgagctcttcaatgacaggctccacagcagcgtctatccgattgctgacatcttcaatcttctttatgatgatttcaaccttctgtgcatccttatccactatctcagcaatgtactcaacctcctcggccaacttatgcagggtaccattctctggtagagcattggccacattagcagctaacttctctgtcacctccgcggcgtgctccacaacctccaatgcagtttccacattttttgtcacctcatcttcggctttcctggccctattgtagaacggcacggccgtgtagactacgcctccaagcaccatctgcacccaaattggaagcatcggtaacggcgagaacccaagctgtcggtggccggcgtcagcggcagcggcagccaaatccgccggaactatgtcagatttccccagaacaacccatccggagtcgatgccgctcgaatctcccgcaccatcgccaggattcttgatcccgcttgggtcttcctggccgggttgcgcggcggctccggtcgccggcagcgtgagggttgccatggggagagatcaattaggggaacaagcggtaggtggacggagggaagaaacgacccatatgttattgccgtgttctacggaccccgggataatggtaaacagtcaaatttaatattgataattcaggtagtgacaacaagaaactatgtatagtgtgttcagtagcaacagcaacctgttgttcatctcctctagaagatagagttgtcttctaaatttataattgtgcgccaccagcgtgttgcgagagaagccatgtcccactctctttgttttctttcccagtgcaaagtgaacatatgctttccccagcccaaagccatgtgtaattcatagtttatgaagccgccacacaaagaattgaatctgtccaattcatagtttatgaagctgctgaaaaaaagaa

SEQ ID NO: 78262 - DNA, 2001 bp, Oryza sativa
  Clone ID: PAT_MRT4530_78087C.1
atggcgtcctcctccgccgccgccgcctcgtccgctcatggtgttggtgttgtgcagaggttatggctggaggagcaggagcggaagccgccgccgaagcgtggcggcggcaagcggaggtgggcgtgggcgccgctcgagccgcggcgggcggggtggtgggcgcgggagtgggacagggcgtacctcctcgcctgcgcggcggggctcatggtcgacccgctcttcctgtacgccgtgtccgtcagcgggccgctcatgtgcgtcttcctcgacgggtggttcgccgccgcggtcaccgtgctccggtgcacggtggacgccatgcacgcctggaacttgctgatgcgcctccgggcggcggtgcggccgccggaggaggacgacggcgccgacgaggaggtggcggcggagcggggagccggcggcaatggcggcgggccggcgccggctcaggtggcgaggccggtgtccaggaaagggctcatgctggacatgttcgtcattcttcccgtaatgcaggtgatcgtctgggtggcggcaccggcgatgatacgcgccgggtcgacgacggcggtaatgacggtgctcctggtgtcgttcctgttcgagtacctgcccaagatataccacgccgtccgcctcctgcgccggatgcagaacacctacgtgttcggcaccatctggtggggcatcgcgctcaacctcatggcctacttcgtcgccgctcacgcggtgggcgcgtgctggtacctgctcggggcgcagcgcgcgaccaagtgcctcaaggagcagtgcgcccagggcgggagcgggtgcgcgcccggtgcgctggcgtgcgcggcgccgctctactacggtggcgccgtgggcggcgtgggcgcggacaggctcgcctgggccctcgacgcctccgcccggggcacgtgcctcgacagcggcgacaactaccagtacggggcgtacaagtggaccgtcatgctcgtggcgaacccgagccggctggagaagatcttgctccccatcttctggggcctcatgacactcagtacatttgggaacttggcgagcacaacagagtggctggagatagtgttcaacatcatcactatcaccgggggcttaatcctcgtgacgatgctcataggaaacatcaaggtgttcttgaacgcggcgacgtcgaagaagcaggcgatgcagacgaggctgcggggcgtggagtggtggatgaagcggaagaagctgccgcagagcttccggcaccgggtgcggcagcacgagcggcagcggtgggcggccacgcgcggcgtcgacgagtgccgcatcgtccgcgacctgccggaggggctccgccgcgacatcaagtaccacctctgcctcgacctcgtccgccaggtgccactgttccaacacatggacgacctggtgctcgagaacatctgtgacagggtcaagtccctcgtattccccaaaggagaaattatcgttagagagggcgacccggtgcagaggatgctgttcatagtgcgagggcacctgcagagcagccaggtgctgaggaccggcgccacgagctgctgcacgctggggccgggcaacttcagcggggacgagctgctgtcgtggtgcatgcggcggccgttcctggagcggctgccggcgtcgtcgtcgacgctggtgacgatggagagcacggaggcgttcgggctggaggccgcggacgtcaagtacgtgacgcagcacttccgctacaccttcaccaacgacagggtgcggcgcagcgcgcgctactactcgcacgggtggcgcacgtgggcggccgtcgccgtgcagctcgcgtggcggcggtacaagcaccgcaagacgctcgcgtcgctctccttcatccgcccgcgcaggccgctgtcgcggtgctcgtcgctcggcgaggagaagctccggctctacaccgcgatcctcacctcacccaagcccaaccccaaccaggacgacttggtgtga

SEQ ID NO: 78263 - DNA, 830 bp, Oryza sativa
  Clone ID: PAT_MRT4530_78088C.1
ttttttttttttttttttttcaaaccaaataccaattttaccaaggctaatgcatgtgtggtgtgtatgtagtgtgcgtgccaacatctgcatcacactatttttacctgtagcacaatctctatgtacagttgaaacattaaaacaacacagctacacacacgactatgggtgacacattgggaccaaatgtcaggctcattatgtaccacttttttctctctctctctcttttttttttgcagcagagaaactgtcaccatctttctcccaggaccagctctcaaacgtcacaacaatgagaagacatggagtatatcatcgttatgcagaaaatgccgggctgcaccaacagctgcctatcattttggcccatttcccccaacaatacgttaacccagaggtctaaataagaggggggaaaaagaaaaggagaaatcaacatatgtacaaatgatgaagaaaaaagagagaaaaaaggggggcaagatgctatctactgacttggtcggatggagcagatgagctcctttctatcaacaaaaaagatgggtagtcttgcatcggctcaagccggaaaaagcgttgtcgtcagtcgtccctgaaatctctcctcccatcccgggaagagtccctgctggacgccttgatcgcgtcggccatcatgagagcaactgtggccttgtggagggcaaggtcagccttgtgcatcagcaggtgggccttctctctctagagcttggccatggccaccgcatgctgcgctgcactggaggcatctcgctgcttgagctcctctatgtcgacgcggcggcttttggacgcacccg

SEQ ID NO: 78264 - DNA, 216 bp, Oryza sativa
  Clone ID: PAT_MRT4530_78089C.1
atggaagttgcggtgcgagagattgctacggtttactggttcgagaaccagcgagcgagtagaattatctctcgaacaccaatggaggttgcggtgcgtgagattgctacggtttactggttcgagaaccagcgagtagaattatctctcgaacaccaatggaagttgcggtgcgagagattgctacggtttactggttcaagaaccagcgagtag

SEQ ID NO: 78265 - DNA, 455 bp, Oryza sativa
  Clone ID: PAT_MRT4530_7808C.1
tttgtttttttaatttttttggtttttatttttttttttttttttttttttttttttttttttttttttttttttttttaaccgaaaggaaatttattgacataaaaactttacagggcccaaggacaaaaaaaattcagggggcagggggattagggcaaaagcaccctgggaaggccatgtccccaatttataaaaacaaccctcagggctaaaaacagggcaaaagggcggggtgctttacaaacccccacctttagggtaaaaagcccccaaacagctttttgaaatccctccaaaaacaaaaaggggggggggggggcgcataggaaaccaccacgcgaccctttttggaaaccaaaaatttggagaaattccacttggtgctataaccaaaaagcccacctttgttaaacataaaatccttggccgggggggcaaattttgtaccgcgg

SEQ ID NO: 78266 - DNA, 424 bp, Oryza sativa
  Clone ID: PAT_MRT4530_78090C.1
ttcttattttgggacaaacgaaaggatcccaaaatgatcttattatgggacggaggaagtattgaattatgcttagtgtgctgacccatatgaagtgatattttcaaagcatgtctagtttaacatatattattttatcatgtctcatgtttatgcataattatcggatgtgacctctctattcacccaatcaacaactcaagatattgggtcggttggagctgtttgttacagatggggttcctggtttcattttagtggcaaaaatagtaaggtcttaaatagcttatttggttcaactggaataagtagctaccttagttggttaccagacagatgaagcacacatttttagaaactttaagctggtggagcaagccagcagctgtatacttctatgctgtcagttcacgccaaaacagtc

SEQ ID NO: 78267 - DNA, 854 bp, Oryza sativa
  Clone ID: PAT_MRT4530_78091C.1
atggcgatcgcgcaatccgcggccgcggtatcatccgccgcaagagcctcccgcccaaggccgacccgcgccgcgccgcgccgcatcgccgcctccgcctcctccgtggcgccgccggagcccgccgcgcggcgcctcgtggcggcgttcgacccggcggtcccgctggcctccgccgtgacgccgccgagcgggtggtacaccgacccggactttctccggctcgagctcgaccgcgtcttcctccgcgggtggcaggctgttggccacatatggcaagtcaagaacccaaatgactacttcacaggaagtagacttggaaatgtagaatttgtcatatgtcgggatgcaaatggagaactccatgcttttcacaacgtgtgtcgccatcacgcctcactccttgcatgtggaagtggtcagaagacttgcttccagtgcccttatcatggctggacatatggactggatggagtcctcctaaaagccacacaaatatcaggaatcaagaacttcaacaaaaatgattttggtctcattcctattaaagtggctacatgggggccttttgtattggccaaatttgatagtggtttctctcaagaaactgctgataacacagttggagatgaatggctgggtagtgcttcggatctgctgagtagaaatggcattgacacctcgttgcctcatatttgcaggcgagaatatataattgaatgtaattggaaggtcttttgtgacaactatctggatggtggctatcatgttccatatgcgcatggaaccctagcatctggtctacagcttcaatcctacgaaacacatacatatgaaagagttagtgttcaaag

SEQ ID NO: 78268 - DNA, 2865 bp, Oryza sativa
  Clone ID: PAT_MRT4530_78092C.1
atgcgtggggcgaggatgaccaagaacccttccacagaaaacaccaaagagccaaaaaccctagcgcgccgcatcccccgccgccgcctccgcctccgccgcgggtaaatccctcctcgtcgtctcctccgctcctcgtgccatctcgcggctgaacaggggaggggatcctggttgctgttactgccatattttcacatggattcgactaagcaagatttccaaccccggacattctccatcaaactgtggccaccaagtgaaagcactcgtctcatgcttgtggagaggatgaccaagaacctttccacagagtccatattttctcgcaagtacggccttttgggcaaggaagaggctcatgataatgctaaaaggatcgaagaggtatgctttgcctctgcagacgagcatttcaaggaggagcctgatggggatgggagttctgctgtccagctgtacgcaaaggaaactagcaagttgatgctggaagttctgaaaagagggccaaggaccactgtggaaccagaagtacctgttgctgatacacctcttgagcctgctgattctgtatttgatatatctggtggcaagagtgcgtgtgtttgggcagggggagcgatagtccgtagaatcgcgatgaacctccgaggaagtgcatttgaccacatatgctgcagcaccagcagcttggggattggttctggaagttgtgctggacctagaggaggatcaggctgacggcgacccgcacaggcggagcttccaggccttgttgctggcgcacgtcgagatggtgcacgttttgggtaacctagatccttacaggttcttgtcctcttcgtgaagaagttttggaacgtttgccctgccaggttgtatttgcactttgacgtttcaacagaagcacgtgcagacagacagtttatagcgtggtgattcatcgttgcctgtgaaactaaccattagaatttgtttcatgtattagcaacagcctggttagtcaagacctaaggtcagctgtagctgtatcctagcatcaaatacactcaaacagtcagcaccccagttggaggtccttgaaatggctgggaatgaaattaacgccaaagcatcccaagctttagcagaatgcctgacagcaatgcaatcacttaagaagttgaccttggcagagaatgaactgaaggatgatggtgctgtggtgattgcaaaatcactggaagatggacaccaggatctgaaggagcttgatgtaagcacgaatatgctgcagagggtgggagctcggtgctttgcccaggcaatcgcaaacaagccaggttttgtgcaactgaacataaacgggaatttcatctcggacgaagggattgatgaggtgaaagatattctgaagagtggtgagaactctgtggaggtgcttggtccactagatgagaacgaccctgagggggaggctgaagatgatgaggaagaggaagaggaggaagaggatgacggtgagctggactcgaagcttcagagcctgaagatcaacggcgtggattgcgccaccggagcccgcatccgcatccaccacctccgctcgcaatcactctacaacagatcggaaacctcgcgggcggcggcggcggcggcgcgggtaagcgagcggacaccggcgacgagcgcgaggaggaggaggaggaggaaggagaagatggcggcgacgctgtcgcagctcgacgacgggatcgtccgcgggatggccatcggcgcggtattcaccgactacgctgggaagataaactgcctcgacttccaccgcaaggaggatctcctcgtcacctccagcgaggacgactccatacgcctctacaacatcaccagcgccacgccttctgttgcatatgatcagcagggacttgtttttgccgtggcaatggaaggaggtgctattaagctatttgattcccggtcatatgacaaaggtccctttgacactttcttggttggtggagatacagctgaagtttctgacatcaaatttagcaatgatggcaagtccatgcttttgacaacaaccaacaaccatatatatgttctggatgcatatggaggggataagaggtgtggctttagtctggagtcatctcccaatgtagcaactgaagctgcttttactccagatggccaatatgtaatttcaggatctggtgatggtaccttgcatgcttggaacatcaatacaatacaagagattgcttgttggaacagtcacatcggtcctatcactgctttgaagtgggctccccgtcgagcaatgtttgcaactgcgtcaactgccctaactttctggattcccaacaattccagttcgaattaggtgcctagcaaaaaggatggaacgtgtgatatgctgattcaacaaacacttgtatcctgttctttcctgcacaagatgggtatcgtgtatgaagtatcaatctctttattaccatctgtggcaaaaaatgatgatgtacaccttcccattgtattctcttatggctattgttaatacacataaaattttctgcatcaaaaacccaaaatcttcctttgcacttctctcagtgcatcatcaaaaatggaaagttgagcaggtccattagtcatgtttaggttaaacttgaactatcttttttctttcttgaattagcttcaaaacgttttgctgccaggttgtactttcactttgatgtttgaacagacacactgcaggcagatggttcatagcctggaggtttatctatgcctgtgtaactgccattagaatgtgtttcatgtattagcaacaacctggttagtcaagaccaaaggtcagctgtagctggatcctgcatc

SEQ ID NO: 78269 - DNA, 201 bp, Oryza sativa
  Clone ID: PAT_MRT4530_78093C.1
atggcggtttgggaatcgtcgtcaaactccaagcaaggaagagggagaagactcaccaatggcaacgactcctcaacaatggtgacgaccagtttccagggtaggggtcgtgagggaatggccgtgagcagtggtaagaccggcggtgggtggcggagtacatgggcggtgggtaacggagatgccaccgaagctgtgtag

SEQ ID NO: 78270 - DNA, 797 bp, Oryza sativa
  unsure (1)..(797): unsure at all n locations
  Clone ID: PAT_MRT4530_78094C.1
tccngggctgcaggattcggcacgagctcgtgccgaagacggtggaactgncanacctctacttcagtnanngaatcatacggatgtgcctgttagaaaagccgctgtttatgcattggaaaaactaagtgtcagttccatagtctgtgagcagatcaaaacagatggtggtctaaaactgcttgcagacatagtgaaggatcccaataccccagttgagcaactggagaagataatcatcatgctttctcgaatattcaacacgggtatcagcatggtagctgtgcctgatagctcagctattaatgggtctgaggatacaatgcattctgagaagagtaatggtagctgtggtgatattgatggtggaaccaatggaacttccttcgcatatttgaaacaagaggagacatctagtgtgtcaatcatcgatttcgacgtcatttcacgcttaactagagttctgagggaagcatctccaagtttgcaagaacaagtcgcttctgtactggagcatttagcagcttttgatcagcatgcaacggcgatgactgctgctcgcattgagtcagtgattgaagctgttctggaaatgggagttattcatggtaccatgggcgatcctgaaaactttgatgagcttcctactgttgtgatcgagcaagttagtcgggctgtttctgccactgttaggttactcacaaaattactcgactttgatatttttgttcgcagcataaatacccgagaaatgtattgctctgttaagaaaaatgttcaagtccaagtattcctct

SEQ ID NO: 78271 - DNA, 486 bp, Oryza sativa
  Clone ID: PAT_MRT4530_78095C.1
agccaggttttgtgcaactgaacataaacgggaatttcatctcggacgaagggattgatgaggtgaaagatattctgaagagtggtgagaactctgtgaaggtgcttggtccactagatgagaacgaccctgagggggaggctgaagatgatgaggaagaggaagaggaggaagaggatgacggtgagctggactcgaagcttcagagcctgaaggttgagcaggacgattagtcatgtttaggttaaacttgaactatcttttttctttcttgaattagcttcaaaacgttttgctgccaggttgtactttcactttgatgtttgaacagacgcactgcaggcagatggtttatagcctggtggtttatctatgcctgtgtaacttccattagaatttgtttcatgtattagcaacaacctggttagtcaagaccaaaggtcagctgtagctggatccttgcatcattggcattcatttgctgtg

SEQ ID NO: 78272 - DNA, 390 bp, Oryza sativa
  Clone ID: PAT_MRT4530_78096C.1
atgggtctagggcgcaagagttttgcggaatttttatatgtccactaccgcatccgcgcgctgggcgaggtaaggtggcgacactaccggtcgctgctcgtcgcggcggaggcacgccggatgagggagaaggaggcggaggcctcgaatgcgctccagcaagtggcggtcgcggcacaagcgagaggcaaggcggtggaggacgacaacaacaacatcggcgcggcgaacaatgctgagtcagggttcatcgacccagatagagtataggcaggagaaggcgatgacgtgaatgaggtggcggaggagaggcgtgagaagggaggcggcggtggcagggagggagaagaagaggccacggcgatgccgaggaggcgaggatggggatga

SEQ ID NO: 78273 - DNA, 474 bp, Oryza sativa
  Clone ID: PAT_MRT4530_78097C.1
cccacgcgtccgaacaaggataggatctgatggtggggtggctctggctgaggcattagggacttgtactcgtctgaagaaacttgatctcagggacaacttgtttggagttgaggcagggttggctctcagcaaaaccctttcaaaacttcctgatcttgttgagctgtatctcagtgatctcaatcttgagaacaagggcactgtagcaattatcaataccctcaaacagtcagcaccccagttggaggtccttgaaatggctgggaatgaaattaacgccaaagcatcccaagctttagcagaatgcctgacagcaatgcaatcacttaagaagttgaccttggcagagaatgaactgaaggatgatggtgctgtggtgattgcaaaatcactggaagatggacaccaggatctgaaagagcttgatgttagcacgaatatgctgcaaagggtgggagcttggtgcttttg

SEQ ID NO: 78274 - DNA, 475 bp, Oryza sativa
  Clone ID: PAT_MRT4530_78098C.1
tgagcctgtcccaaagaataaaaatagctgttgacatagcagatgcattgaatattacaccatgactgtgagaatcctataatacactgtgatctaaagccaagtaatgtcctcctagatgatgatatgactgctcatttgggagattttggcatagcacatttctacctcaaatccaagtcacctgccgttggagattcgagctcaatctgttcgatcggtttgaaaggaactatagggtatattgccccagaatatgctggaggaggattcctctcaacctctggagatgtatacagctttggcgtagtactattggagttgctaacagggaaaaggcctactgatcctctgttctgcaatggacttagcatcgtcagtttcgtcgagaggaactatccagatgtgatagatcatatcattgatacttacctccgaaaagatctcaaggagcttgctccagcgatgttggacg

SEQ ID NO: 78275 - DNA, 529 bp, Oryza sativa
  Clone ID: PAT_MRT4530_78099C.1
cgtccgcccacgcgtccgcccacgcgtccgcgaagagaagagagagctagcggcggcggcggcggcggcggcgaggcagctggttgtttgttgttggttccctctccacggcgacctcattgcctctccatctctctcgagaaccctccgcgcggcgacctagctccaccgtcatctcagaggaggggggattaggctgtagtagtgtgagatggcttcgccggagccggccgcgggggcggacggcgcttcggctagccagacggccgtggtggagccgatccggttgccgacgccggaggagatcaaggggcaggacatctggaacaactgcgccgtccgcagcgtcgtcagtggagtcatggggggtggtttaggcgtgcttatggggctattctttggagctttggaaaacccaagtacagcaaacgagatgacggcgaggacatccaaatagcataccaagctaaacagatggggaggcgaagtattaagcaatgccgaaacctttgcagtcatggggcctgat

SEQ ID NO: 78276 - DNA, 609 bp, Oryza sativa
  Clone ID: PAT_MRT4530_7809C.1
atgaagtttcacgaggcgatcaagctgccatccattgctcattacgccctacgctatgtgcttcccgccgccgccgtcgccgcgtgcgttctggtgctcgccgccgtcagcctacccggccgcgtgccgctgccgctgctgctgatgacgaacacggcggatggcgtgggcggcgacacgtctggttgtgacatcttcaagggcgagtgggtgccggacatggcccgcgagccgccgccgtacaccggcgagagctgtccggtgatccatgggcattatgattgcatgcggtacggacggccggatcttgggtacgtccggtggcggtggcggccggacggcgggtgcgagatgcggcggttcgacgctgcgaggttcctcgccgcgatgaggggcaggtcggtggcgttcgtcggggactcgctggtgtgcctcctgtcgcgcgccgagcggccggcgccgtggacgaacggcagctacgcgtaccgcttcgagcggcacggcctcaccgtcgcggcgttctggtcgccgttcctcgtccgcgccgtcgagacggaccccgacggcccgacggggagcggctccggcctgtggagcctccacctttga

SEQ ID NO: 78277 - DNA, 996 bp, Oryza sativa
  Clone ID: PAT_MRT4530_780C.1
atggcttcttggatcatcactcgatctacttggatcatgagtgtgttcttcgtcatcctatcattctttcaaggtattgagattggcaatggtgaattgaattcttggttcttgggtttgttctgtttggttggtaatggtgggcggcgtgacgttcacgttcacgaacaggtgcggcggcacggtgtggccaggggtgctgtcgaactcggggagctcggcgctggggacgacgggggtcggcgctgggcgccggcgacacgcggtcgctggcggcgccggcggggtggtcggggaggttctgggcgcggacggggtgcacgttcgacgacgacggcaagggcacttgcgcgacgggggactgcggctccggcgaggtggagtgccgcggcgcgggggctactccgccggcgacgctggtggagttcacgctgggcaccggcgccgccgggcgggaaggactactacgacgtgagcctggtggacgggtacaacctgcccatggtggtggaggcggcggcggcggggtgcccggcgaccgggtgcgtcgtggacctcaaccagcggtgccccgccgagctgaaggccggccatggccaggcttgccggagcgcgtgcgaggcgttcggcacgccggagtactgctgcagcggcgaccacggcaatccggacacgtgtcacccgtcggtgtactcgcagatgttcaagagggcgtgccctaggtcgtacagctacgcctacgacgacgccacgtcgaccttcacctgcaccggcaccgactactccatcaccttctgtcctcgacccggcaatcccaacagtcagaaatcgagcaatgacccgtcgccgaggccgaaggatccgcagctggaggacgactcatggctggcgagcttggccaccggcgaggtcgacggcgcggcgccggcgtcgacgtcgttgttgctgcaagccacattagcagtggcagtaatggctttgcttgtgctacactag

SEQ ID NO: 78278 - DNA, 747 bp, Oryza sativa
  Clone ID: PAT_MRT4530_78100C.1
atcacggcgtggattgcgccaccggagcccgcatccgcatccaccacctccgctcgcaatcactctacaacagatcggaaacctcgcgggcggcggcggcggcggcgcgggtaagcgagcggacaccggcgacgagcgcgaggaggaggaggaggaggaaggagaagatggcggcgacgctgtcgcagctcgacgacgggatcgtccgcgggatggccatcggcgcggtattcaccgactacgctgggaagataaactgcctcgacttccaccgcaaggaggatctcctcgtcacctccagcgaggacgactccatacgcctctacaacatcaccagcgccacgttgttgaagactacatatcataggaaacatggtgctgaccgtgtctgtttcactcaccatccgagttctatcttatgttcatcaagatacaatctagagtcagcagagtcacttcgttatttatcactgtatgacaaccgttgcttaagatattttaaaggacacaaagacagggttgtttcactatgtatgtcacctgtcaacgatagttttatgtcaggatcacttgatcacagtgtcaggatatgggatcttcgtgtaaatgcttgtcagggtatactacgtttgcgtggtaggccttctgttgcatatgatcagcagggacttgtttttgccgtggcaatggaaggaggtgctattaagctatttgattcccggtcatatgacaaaggtccctttgaca

SEQ ID NO: 78279 - DNA, 2983 bp, Oryza sativa
  Clone ID: PAT_MRT4530_78101C.1
ttcgagctcaatctgttcgatcggttttaaaagtaactataggggtatattgccccagaatatgctggaggaggattcctctcaacctctggagatgtatacagctttggcgtagtactatggcggtgggtgaggtggtggtggtcgggttgtgcttgtgcagcccagttgcagtgaaaaacaaggccgagcccaaagccgatggtggagccgcatccaagaaaaaggggttcggggtcgacgagggggagggtgctccggtggtcgacaggctcggcgaaggggtggacaaggacagcggcgtcgcggcgaagccggtgagggcggcgccgaggcgaggcgacgtcccgagcggcgcgagagctcggcggcgacgagcgacggcggcggcatggattcgggggccacacggcctccgcacccctgggtcatcgtcgaggccaccgttgccgaggtcgtcgtcgcaagccgctgccaccgccgtcgtctacgccgtctccccgaatccacgccgcccgccgttgcccccacgttgtctccgatggccgccggcggcaactatggtccatggactgtggcagctcgacctcagtcagatccatggcgaggtggccctcaacttcaggcggtcggcattgctccaccttgcagatccaagtgctgtggaccactgcttttttcttccctatggagcacccgttccttgtacaaggggtgctgacatcatgcgaggtcattcctcgttcgtcttctccaccacgctgtgcataagagtctacatgaatgcaaagatccctcataagggtacaagcaagcagcacatggaactgggtatgtttataccgtgcaccttggtgttgttattactgtcatatggagctggaggcatcaagggcggcgcatcaacgcaagatggggacgtcaatggcacggacttggcctcgctcctagatttcaagcgagcgatcacgaacgatcctttcggagccatgagctcgtggaacaccaacacacacttgtgccggtggaagggcgtcacatgcgaccagcgggcgcatcgcgtcgtggcactggacctcgttgggcaaacattgaccgggcagatctcccattcccttggaaacatgtcgtacctcacttctctgagcctccccgacaacttgctctccggccgagtgccacctcagcttggcaacctgcggaagctggtgtttcttgacctgagtggcaactcgttgcagggtattattccggaggcactcataaactgcaccagattgaggacgttggacgtttcaaggaaccatctagttggtgatatcactcccaacatagccctcctctccaacctgcgaaatatgcggcttcactccaacaacctcactgggatcatcccaccagaaatagggaacatcacttcgctcaatactgtcattcttcaaggcaacatgctcgagggatccattcctgaggagcttgggaagctgtccaacatgtcctacttgttgctaggtggaaatcggctgtcaggcaggatcccggaggtgctcttcaatctgtcacacatccaagaaatagcactaccacttaatatgctgcatggtccattgccatctgaccttggcaacttcattcctaaccttcagcaactttacttgggtggtaacatgttgggaggtcatatccctgattcattgggcaatgcaactgaactgcagtggctagacctatcatataaccaagggtttactggccgaatccctccttctcttggtaaactccggaagatcgaaaagcttggtcttgacatgaacaatcttgaagcaagagacagttggggatgggaattcctagatgcattgagcaactgcacgcgtcttaagatgctctcactgcaccaaaatctactgcaaggtgtcctgccgaattctgttggcaacctctcctctagcatggacaaccttgtgttgagtaacaacatgctttcaggcaacaacttcactgggaacattccagatgccattggcaacacctcccagatgtcagaattgtttctttcaaacaatcaattccatggtctcataccatccagcctaggaaaacttcgacagctctcaaagttagacctcagttataacaatcttgaaggcaacatacctaaagaggtcttcacagtacccacaattgtccaatgtggattatcccacaataatttgcaaggcctgatcccttctttaagtagccttcaacagcttagctatcttgatctttcatcaaataaccttactggggaaattcctcctactttgggcacatgcaatgatttcaaggctctagtgtataagttcatgcccaatggcaacttggatacttggctgcaccccgcaagtgggaaaaggcctactgatcctctgttctgcaatggacttagcatcgtcagtttcgtcgagaggaactatccagatgtgatagatcatatcattgatacttacctccgaaaagatctcaaggagcttgctccagcgatgttggacgaagagaaggcagcataccagttgctgttggacatgcttggagtggcactttcctgcacacgccagaatcccagtgaacgaatgaacatgagagaggcagcaacaaagctgcaagtgatcaacatatcgtatatatctggaatgtagagctaagtatactatacacttcattagtgcgcgtaccacagtgtataaaatggcaggtggcatttacaagtaactgtcttttgttatccatacatttgattataagggcaatgcaagtacaaaatttactcatctgtagacgcgggcagtctccccgtagctgctgtagcctgttttggaggagtttggtgtagaatgtaatctctgtagcttgattcaaaaaaaaaaatgtaatctctgtagcttgtaactctcttgccgaaaaatcttaataaactttggctggcatacgccagcctgcg

SEQ ID NO: 78280 - DNA, 461 bp, Oryza sativa
  Clone ID: PAT_MRT4530_78102C.1
ctccggaagatcgaaaagcttggtcttgacatgaacaatcttgaagcaagagacagttggggatgggaattcctagatgcattgagcaactgcacgcgtcttaagatgctctcactgcaccaaaatctactgcaaggtgtcctgccgaattctgttggcaacctctcctctagcatggacaaccttgtgttgagtaacaacatgctttcagggttagtgccctcgagcataggaaatcttcataggttaactaagtttggattggatttcaacagttttactggtccgattgaagggtggattggaagcatggtaaatttacaggctttatacctagacagcaacaacttcactgggaacattccagatgccattggcaacacctcccagatgtcagaattgtttctttcaaacaatcaattccatggtctcataccatccagcctaggaaaacttcgaca

SEQ ID NO: 78281 - DNA, 222 bp, Oryza sativa
  Clone ID: PAT_MRT4530_78103C.1
atgggaaagaagaggcacagactagaggagggaaggaagcacagcgtggaggggagggagagccgcgcaccaggaggggaggaggggcggaggcggcgcaccgagaagaagacggccgggccagcaattgataatgtcggactagttattgtctatacattagtcatatcacttgttcaaggagttgtttggatgaaatcatcacgtgacgtcggaccttga

SEQ ID NO: 78282 - DNA, 339 bp, Oryza sativa
  Clone ID: PAT_MRT4530_78104C.1
atggcgatggggaagtacgcggcgtacggggacctgctgggcatgaccgcgagggtcgccgtcagggcctactcgcactgcccccagacggcgcgcatgtactacaagcccccgccgacggcgacggcgacgaccgccgcgtccggcgacaagaggagcgcctccgctgccaccgcctcgtcttctcgctcctcctcgttcggcgccgacaatgccggctcgtctaccggcgcggccgcgtcgccgtgcgcgagcacgaagcagcaggcggcggcggcggccagggtggcgttcgacggcgcgggcttcatcctctacggcgtcgagcgcgcggcgtag

SEQ ID NO: 78283 - DNA, 2756 bp, Oryza sativa
  Clone ID: PAT_MRT4530_78105C.1
gttgggttttgagatcgaaaatttttgagatttcaaacctcctccattccctcccttcctcgcccccaaaaaccctagccgccgccgccgccatgcctgatctcccctgcgacggcgatggcgtctgcatggtctgccgcgtcgcctcccctcccgaggtcgatctcctccgttgctccacctgcgccaccccgtggcactccccctgcctctccaagccccccgcccttgccgacgccgcccaatggagttgccccgactgctccggggactccaccgacgccccgcccccggccccggcaccgctcgcccctgggagtgccggccaactcgtcgccgccatccgcgccatcgagtgcgacgccaccctctccgaccaggaaaaggcacgccgccgccaggagcttctcggcggcgccgcgcccgccggtgccgacgccgatgatgacgagggggacgacgtcctcgaggtcatcggcaagaacttcagctgcgccttctgcatgaagctgcccgaacgccccgtcaccgtcagtactcttgcggggcctttcccccattgcttccagaaatggatccacagcggaaaaaggacatgtggtaaatgccgggcacaaataccagcaaaaatggcagagcagccaagaatcaactcagcattagtttctgttatccgtatggctaaggtttcaaagaatgccaactcagctgtctctgcagctgcgtatcattacatacgaaatgatgatagacctgacaaggcttttacaactgaaagggctaagagggctggaaaagctaatgcttcaagtggccagatctttgttactatcccacccgaccattttggccccattcttgcagagaatgaccccaagagaagcattggtgttctagttggggatacatgggaagacagacttgagtgcaggcaatggggtgcccattttcctcacgtggctggtattgctggccaatccacacatggtgctcagtcggtagccctctcgggtgggtatgtcgatgatgaggaccatggggaatggtttctatatactggaagtggtggaagagatctaagtgggaacaagcgtacaaacaaggagcagtcctcagaccagaaatttgagaagctgaatgctgctcttcgtattagttgcctcaagggttaccctgtcagggttgtgcggtcccacaaagagaagcgttcttcatatgctcctgaagctggtgtgaggtatgatggagtttacaggattgaaaaatgttggaggaagattagtgttcagggtaaattcaaggtttgcagtgatatttatggtgaccgtccgaggccactccccaaagttgatgagctgaaaggtgcaacagacatatcagagaggaaaggaactccttcatgggactttgatgagaaagaaggctggaagtgggtgaagcctccaccaatcagcagaaagcctaacctatcaggggatcctgcaactgacaaggaaatccggagggttgcaaggcgtgcccagatgtctgtgactgaaaggctgctgaaagagtttggatgttccatttgcaagcaagtgatgaaggaaccactcactactccatgtgctcataacttctgcaagttgtgtttggttgggacatatggtagtcaatcgtctatgagggagagaagccggggtgggcggactctaagggcacagaagattgtgaagaagtgcccttcatgtccaactgatatttgtgacttcctagagaatccacagatcaatcgagagatgatggatttgattgagtccttgcaaagaaaggctgttgaagaaggagataccaagacaagctcagatgttagcaatggtgctgagtcatctggagatgatggaaacaacgaagctttagagaagggagaggatgatagcagcttgaaggatgatggcagcttgaaggatgatggcaaagtggtcaaggctgtggttgtaatcaaggaagaggacctgcagcctaagaagagcaaaggagaagatgagaaagaacaaggtgacaagaagatggacagtgctgatgtggtggacattgcagttgaaaagaaacaggcgacgaagcgggcttctgagaaggctgagaagaagcaggcaaggaagcgcaagggggatgctgttgccacaaatgatggtaaaaggatgaaaacaggtggtgatgctatggagacagcagcggaagaggatgctcccctgagcggcggaactcctgtgaagcgcaacagcaggaagagtagtgaggttgatgccaaaggcggtggcggtagtcctgttgtgagcagccctcgcagggtgacgaggagcaatgccaaggctagcggtgaagctgatggtagccctgcgacaaggaccaggagggctacccgcgctgaagcctgaatgaagatggatgaatggctggttggctggctgtagaggggaagaagacggagactggagccattttggggtcgtattcgtatattctatctatttagtaatttaggccgtttgccttgtgctgttgctctagctcttttgatccacaaggggtgaactggaactgccgcggtgtgcttttgggatggcttgggttgggttgttagttgaaggaatatatacttatatacagtggttgctttacctttacctgtatggatgtatgatggatgttcctcatacaactttccaattccaattactggcatggtttgccttggattctcatgctaaaaacaa

SEQ ID NO: 78284 - DNA, 252 bp, Oryza sativa
  Clone ID: PAT_MRT4530_78106C.1
atgctcggcggccacggcttcgtgaagctgccacctctcgaggaccagctctgcttcgacgccgacgcctcggcagccaacggcctcgcctactactccactgcggccattaggctgctcggtggtgccaacggcggcgtcatcggcagcgacgacgacctatggagcttcatgcagtcggcaccaccggcgccgctgccatcggcccccctcttcccgtcccacacggcgacggccgcatccagaccctag

SEQ ID NO: 78285 - DNA, 538 bp, Oryza sativa
  Clone ID: PAT_MRT4530_78107C.1
tccagaaatttgagaagctgaatgctgctcttcgtattagttgcctcaagggttaccctgtcagggttgtgcggtcccacaaagagaagcgttcttcatatgctcctgaagctggtgtgaggtatgatggagtttacaggattgaaaaatgttggaggaagattagtgttcagggtaaattcaaggtttgcaggtatctctttgtacgttgtgacaatgaaccagctccttggactagtgatatttatggtgaccgtccgaggccactccccaaagttgatgagctgaaaggtgcaacagacatatcagagaggaaaggaactccttcatgggactttgatgagaaagaaggctggaagtgggtgaagcctccaccaatcagcagaaagcctaacctatcaggggatcctgcaactgacaaggaaatccggagggttgcaaggcgtgcccagatgtctgtgactgaaaggctgctgaaagagtctggatgttccatttgcaagcaagtgatgaaggaaccactcactactccatgtgc

SEQ ID NO: 78286 - DNA, 1887 bp, Oryza sativa
  Clone ID: PAT_MRT4530_78108C.1
atggattatcgaactggaagctcaagtgctagtgctagtgcatctagccatcctagtggtagtccggctcctaattctgctactgatttatcaagaggaactagtggtccagcaagggcaagcaacctcttgaatgcttgccgtgtgattcctcccaatgacaatgaaaacaagccattgtggaggtatgttgagttaatggagaaaacaggtaaaggccagggagggaatgtaaggtttagatgcaggctttgtggtaatattatgcatgggagctactcaagagttaaagcacatctcttgaaggtgggatctaatggtgtagctccctgtccaaaggtaacaatcgatgttcttagtcaacttcatgatgaaatggctagagctgcagcagttgctgaaaggaacttgcctaaggacatcccactgccagcagagggcgcgagtagggggaagagaagggctgtttcagctattgagtctagcttcaattcagatactcgttccaaccttgatgctttgattgcgagaatgttctacacagcaggcattcctttcaatgttgcaagaaacccatatttcaggaaggcttttatgtttgcttgcaacaatgcgcttgggggctattcccctccaagttacaacaagctacgaactactcttcttgttcaagagaagacacatgttgagcggttgttaaatccccttaagtcgacatggcctgtaaaaggtgtgagcattgtgtccgatgggtggtctgatgctcaaaggcgcccactcttgaattttctagcagtgacagaagatgggccaatgtttttaagagcaatcaacactgaaggagaaattaagaggaaggaatatattgctgagaagatgattgcagtcattgaggatgttggaccaaagaatgtggtacaggttatcactgacaatgcagctaattgcagggctgctgggttgatagttgaacagaggtacagccacattttttggacgccgtgtgttgtccataccttgaacctggccttgaagaacatatgtgcagccaagagttcaagtggggatgcttatgaagaatttcagtggatcactgaggtagcagcagattcttctttcataaaaaacttcatcatgaaccactcaatgaggctctccatgttcaatgagttcaggaagacaatcaagttcaagcacagcaagtcaaagagaaggtactactgcgaaagctggttggctgaggttccaacccgtgaagctcctcacatggatgcagaaatttcagaaatgagaaacaaatgcttcagaaggtattttgctggtgatgaattaaggaagatcaagcagcagtttgcagatttctcgctgtttggaaatgggtttaattcctttgactcaatcaaggatagagctcatttggatgcaaagcaatggtggggaatttatggtaactctgcccctgagttaaaaaaattggcgctaaaattacttggacaaccaacatcatcatcttgtgctgaaagaaattggagcacctatggtttgatccataattcaatgagaaacaagttctgttccttctcttacttagtaaatttcttgctaaaccctggacgtgctgaagatttggtgtttgtgcaccagaatttgcgtcttctttccaggaaatctgaagagtactgtactggtccatcaagaatgtgggatgttggaggagacagctttgagatgttcgagggtggtgctgattttcttcaagaagctgctctttcacttgatgagcctgaccttgagagggtgctagaagatcttggtgcattggatctgtctgctgatgctgaaccttcagccacttcagttaccatgattgatacaagcagcaattaa

SEQ ID NO: 78287 - DNA, 425 bp, Oryza sativa
  Clone ID: PAT_MRT4530_78109C.1
ccccccgcccttgccgacgccggccaatggagttgccccgactgctccggggactccacagacgccccgcccccggccccggcaccgctggcccctgggagtgccggccaactcgtcgccgacatccgcgccatcgagtgcgacgccaccctctccgaccaggaaaaggcacgccgccgccaggagcttctcggcggcgccgcgcccgccggtgccgacgccaatgatgacgagggggacgacgtcctccaggtcatcggcaagaacttcagctgcgccttctgcatgaagctgcccgaacgccccgtcaccacaccatgtggccataacttttgcttgaagtgcttccagaaatggatccacagcggaaaaaggacatgtggtaaatgccgggcacaaataccagcaaaaatggcagagcagcc

SEQ ID NO: 78288 - DNA, 333 bp, Oryza sativa
  Clone ID: PAT_MRT4530_7810C.1
cctacgtgttcggatccttgctaccatcttcatggaggacatcgctgttgacatgacaatagagctgaccacgaaggacaccacgattgtgtgcatgctgttgttgaattactgtgtgacatattctgacaatttgaccactatcttgacgactaaacatactatagcattgactctacacgtgctaggtagcgcgaaaggtgctgtgtcagttgttgtctcaatgataatattaacgagtaccgtatctgtaaccgaaatgctcacatacactgttacagttataggcgtaaaactctacagtgaatgcaagacccgcatcttgcactgagt

SEQ ID NO: 78289 - DNA, 623 bp, Oryza sativa
  Clone ID: PAT_MRT4530_78110C.1
ccccgggctgcaggaattcggcacgaggcacctaacatgtggtgatgtttattgacctgaaatctcactttattatgtaacccttgtactggactctacattctgtactcaaacatacatcatacctttgtaagattcagccagcatatcacaacttaagatacaattataatatcttcacaataggaatattttgtttcttatctggatattctttccatgatttgggaatattttgttttgaatttatgtgccatcaaattaagcttatatattgagtcttcttggatttgattgaaaatttcttgagtttttaatttcctactgttattaattcatactgcgacaggtaccactaccacagtggcatttccaccagttgtgcgtccttcatactctgttacactcctagatgatactaatgattgtttgttgtttcattgtgattttagattctgactgagctatgtctgatcatgatgttttccttgtggcgttgtatttgtattccacattgttgttttccttttccccctctctctcccttcttttcattcttggtctaatgtagcattttgctccagcaaacaaaaaactagtttttgaagaaatgaagaaagcag

SEQ ID NO: 78290 - DNA, 2652 bp, Oryza sativa
  Clone ID: PAT_MRT4530_78111C.1
atggttgattggaaaggaaaagggaagggtaaggcaccacaacctagtggcaatagcaacaggcattgcaacaggtgtggatctgactatcatgttgctaaagattgccgcatcccaacaacatcttttctcctgtatcagaaatccctaaaggagaaaaagtcttctgaggaactaagatttgaagctcacttcaatcttacaaaagaaagacctgaggttgaaagtttttaccaggctcctattgaaccagagaacaacctcgctcttctcccagaagataccactgcactttctacaatggatgacatgctcatcgagtactgctcaacgaacccacttggagatttactgttgtatgacttgctagtcattagaatgtctaaggatatcactccgattggagaggaattatgtcttgtggacagtagtaccacaaactctatacttagggagatcaaatactttcaaactctcaaaaagagagaaggcaaagttttgactatcgctgggtgcgatactgtgatagttggctcaggacgagcaattattacactcccaatgggtacacaaattacaatcgaggatgctttattgtatcctgattcaacccgtaccctactaagttatagagatatccgtcaaaatgggtttcacattgaaacccatatggataatcgagaagaatttcttctcttaaccaaacaaaacggatatggcaaacgcatttgcgagaaaattccatctctcacatcgggattgtactatacatacattaagcccattgcacatgttgcgtacaaagtaatttttcaaaatgttgatgcattccacacttggcatgatcgacttgggcaccccagtatcgggatgatgagaaaaattattggcaactctattggtcatcatttgatcactgataaatttcccaaatcctctgattacgtatgcactgcatgtgctactgagaaactgattttgagaccatcttatctcaaaattagagccgaaccacttaaatttcttgaacgcgttcaaggagatatctgtggccttattgtgccaagatctggaccgttcaggttgaaggcaaattaccctgaacataggattcaatcaatccgtatggacaacgctgccgaatttacatctcatgctttcgatgattattgtatggcattgggaattcaggtccagcactctgttccatatgtccacacacaaaatggtttggctgaatcgttgatcaaaagaattaagcttattgctcgaccattattgatgaattgcaaattaccttcgtcatgttggggtcatgcagttctgcacgctgctgaccttgtccaactacaaccaactgcatatcatgaaacttccccaatgcagttagtatgtggaaatcctccaagtatttcccatttgcatgcatttactaattataaaggtgtgactaaatctttcattcctgctcagaatgcgccaaaaagagtggaggtaccaaataaaaccactcaacttctactcactaaaaagagaggaagtatggccactcagcgagaaacaattgctaataagcaaagaaagacggtaaatgcaaaccaacctttagttggtacacaccaaattgatactatatatcaagcagatcatgatagtctgcaacctagctcggtggtgcacaatgctaagactaggaattcggaagaccatagacacattgtttcgggagatcacgatgagtctataagggttgatgaaattgccatcaactactctgaaactggagaatcttttgatagaagagctacaattgtcgacattaatttttctgaacaaattgctgattgcctccaagttgatccagaacctaggtctataaaagagtgccaaaagtgctctgactggaacaaatggaaggacgcaattgacgcagtattagcctcactttacaaaagagatgtattctcggctgtaatgcctactcctcgtggtatctttcctgtgggatacaaatgggttttcgtccgaaaatggaatgaaaacaacgtggtgttgatggacgtagtgactgcatatctttatgggtcacttgattctgatatttacatgaaggttcctgacggcatcgacatcccgaatcagaagacggaatttgagatgaaggatttgggtcaaaccaaattttgcttaggtctacaacttgagcatttatcttctggaatccttgtgcaccaagattttccatatcttagtgctattggtgcacttatgtaccttgcaaatagtacgaggccagatattgctttctcggtaaatctattggtaagatacagcgctgctcttaccaaacgccattggactggagttaagaatgtctttcgatatcttaatggcacaagagatcttggacttttctttaaaaagaaccaggattcaactttaattgggtatactgatgctggctatctatctgatccccacaacgccagatcacaaacagaattcgtatttttacaaggtggaactactatttcatggaagtcttctaaacagactctagtagccacttccacaaattattctgaaataattgcattatatgaggcatcacgtgaatgtgtatggcttcgcagaatggttaaccacatataa

SEQ ID NO: 78291 - DNA, 2208 bp, Oryza sativa
  Clone ID: PAT_MRT4530_78112C.1
atggtcgacagaaagatgtctaaggatatcgctccgattggagaggaattatgtcttgtggacagtggtactacaaactctatacttagggagatcaaatactttcaaactctcaaaaagagagaaggcaaagttttgactatcgctggacgcgatactgtgttagttggctcaggacgagcaattattacactcccaatgggtacacaaattacaatcgaagatgctttattgtatcctgattcaactcgtaccctactaagttatagagatatccgtcaaaatgggtttcacattgaaacccatatggataatcaagaagaatttcttctcttaaccaaacaaaacggatatggcaaacgcatttgtgagaaaattccatctctcacatcgggattgtactatacatacattaagcccattgcacatgttgtgtacaaagtaatttttcaaaatgttgatgcattccacacttggcatgatcgacttgggcaccccggtatcgagatgatgagaaaaattattggcaactctattggtcatcatttgatcactgacaaatttccaaaatcctctgatttcgtatgcactgcatgtgctactgggaaactgattttgagaccatcttatctcaaaattagagccgaaccacttaaattccttgaacgcattcaaggagatatctgtggccctattgtgccaagatctggaccgttcaggtactttatggttttgattgacgcatctactagatggtctcatgtgtgtcttctatcgacacaaaaccatgcctttgccaaattaatgtctcaaattataaggctgaaggcaaattaccctgaacataggattcaatcaatccgtatggacaatgctgccgaaattacatcccatgctttcgatgattattgtatggcattgggaattcaggttcagcactctgttccatatgtccacacacaaaatggtttggctgaatcgctgatcaaaagaattaaacttattgctcgaccattattgatgaatttcaaattaccttcgtcgtgttggggtcatgcagttctgcacgctgctgaccttgtccaactacgaccaactgcatatcatgaaacttccccaatgcagttagtacgtggaaatcctccaagtatttcccatttgcgtaagttcggatgtgctgtatgcataccgatctcaccaccacagcgtaccgctatgggcccacacaggaaagtggggatctatgtgggattcaaatctccgttgatcataaagtatttagaaccgttaacaggtgatctatttactgcccggttcgctgactctatttttgatgaggaacatttcccggcattaggggaagacttcaagtaccagaaagaatgccaggaaattgattgggatgcccaagatgcatttaccaattataaaggtgtgattaaatctttcattcccgctcagaatgcgccagaaagagtggaggtaccaaataaaaccactcaacttccactgactaaaaagagaggaagaagtatggccactcagcaagaaacaattgctaataagcaaagaaagacggtaaatgcaaaccaacctttagttggtgcacaccaaattgatactatatatcaagcagatcgtgatagtctgcaacctagctcggtggtgcacaatactaagactaggaattcggaagaccatagacacattgtttcgagagatcacaatgaatctataagggttgatgaaattgccatcaactactctgaaactggagaatcttttgatagaagagctacaattgtcgacactaatttttctgaacaaattgctgattgcctccaagttgatccagaacctaggtctataaaagagtgccaaaagcgctctgactggaacaaatggaagtacgcaattgacgcagaattagcctcgctttacaaaagtgatgtattctcggctgtaatgcctactcctcgtggtatctttcctgtgggatacaaatgggttttcgtccggaaacggaatgaaaacaacgaggtgttgatggacgtagtgacaacatatctttatgggtcacttgattctaatatttacatgaaggttcctgacggaatcgacatcccgaatcagaagaagtcactttatggcttaaaacaatcgggcaggatgtggtataaccgattaagtgaagaatacatcacttaa

SEQ ID NO: 78292 - DNA, 2511 bp, Oryza sativa
  Clone ID: PAT_MRT4530_78113C.1
atgggtacacaaattacaatcgaggatgctttattgtatcctgattcaacccgtaccctactaagttatagagatatccgtcaaaatgggtttaacatagaaacccatatggataatcgagaagaattacttctcttaaccaatcaaaacggatatggcaaacgcatttgcgagaaaattccatctctcacatcgggattgtactatacatacattaagcccattgcacatgttgcgtacaaagtaatttttcaaaatgttgatgcattccacatttggcatgatcgacttgggaacctcgatatcgggatgatgagaaaaattattggcaactttattggtcatcatttgatcactgataaatttctcaaatcctctgatttcgtatgcactgcatgtgctactgggaaactgattttgagaccatcttatctcaaaattagagccgaaccacttaaattccttgaacgcattcaaggagatatctgtggccctattgtgccaagatctggaccgttcaggattcaatcaatccgtatggacaacgctgccgaatttacatctcatgctttcaatgattattgtatggcattgggaattcaggttcagcactctgttccatatgtccacacacaaaatggttttgctgaatcattgatcaaaagaattaagcttattgcccgaccattattgatgaattgcaaattaccttcgtcgtgttggggttatgcggttctgcacgctgctgaccatgtccaactacgactaactgcatatcatgaaacttccccaatgcagttagtacgtggaaatcctccaagtacttcccatttgcgtaagttcggatgtgctgtatacataccgatctcaccaccacagcgtactgctatgggcccacacaggaaagtggggatctatgtgggattcaaatctccgtcgatcataaagtatttagaacccttaacaggtgatctatttactgcccggttcgttgactctatctttgatgaggaacatttcccggcattagggggagacttcaagtaccagaaagaatgtcaggaaattgattgggatgcccagggtattctagccccagacccacgtactactgaaattgaacttcaagttcagaaaattatacatttgcaaaggcatgcaaataacctgccaaatgcatttaccaattataaaggtgtgactaaatctttcattcccgctcaaataaaaccactcaacttccactcactaaaaagagaggaagaagtatggccactcagcgagaaacaattgctaataagcaaagaaagacggtgagctacaattgtcgacattaatttttctgaaaaaattgctgattgcctccaagttgatccagaacctaggtctataaaagagtgccaaaagcgctctgactggaacaaatggaaggacgcaattgacgcagaattagcctcgctttacaaaagagatgtattctcggctgtaatgcctactcctcgtgtacaaaatcgtctatttatgcatttgatggacatagtgacagcatatttttatgggtcacttgattctgatatttacataaaggttcctgacggaatcaacatcccgaatcagaagaagtcactttatggcttaaaacaatcgtgcaggatgtggtacaaccgattaagtgaattcctttcactaaaggaatacactaaaaatgatgattgcccgtgcgtctttatcaaaaagtcccccacaggattttgtattatctcggtatatgtcaatgatctcaacatcattggcaatacacaagatattaatgaagcacgtcattatttaaagacggaatttgagatgaaggatttgggtcaaaccaaattatgcttaggtctacaacttgagcatttaccttctggaatccttgtgcaccaaagtgcatatacccagaaaattttggagaaatttaatatggacaagtcatatccttctaaaacccctatggtggttcgatctctaaacgtggagaaagatccatttagaccaaaggaagatggtgaggatgtgcttggacctgattttccatatcttagtgctattggcgcacttatgtaccttgcaaatagtacgaggccagatattgctttctcagtaaatctattagcaagatacagcgctgctcctaccaaatgccattggaccggagttaagaatgtctttcgatatcttaatggcacaagagatcttggacttttctttagaaagaaccaggattcgactttaattgggtatactgatgctggctatctatttgatccccacaacgccaaatcacaaacaggattcgtatttttacaaggtggaactgctatttcatggaagtcttctaaacatactttggtagccacttccacaaatcattctgaaataattgcattatatgaggcatcacgtgaatgtgtatgccttcgcagaatggttaaccacatattaacatcttgtggtattggttcattggaataa

SEQ ID NO: 78293 - DNA, 237 bp, Oryza sativa
  Clone ID: PAT_MRT4530_78114C.1
atggccgggcgcaggctggcagaggtggcggcggcggcggcggcgggcacccctcccatggctggtggctggctggcagaggcggcggcggcggggaggcagaggggaggcggcgagctcccctccgctagatccggcgccaggggagctagtggggaggcagcgggctcccgcctggcagaggcagcagcggcacaacttggtggcagcagcggccgcaccctccccatgcggtga

SEQ ID NO: 78294 - DNA, 2133 bp, Oryza sativa
  Clone ID: PAT_MRT4530_78115C.1
atgaaatggtcgattagaaaggaaaagggaagggtaaggcaccacaacctagtggcaatagcaacaagcattgcaacaggtgtggatctgactatcatgtcgctaaaaattgccgcatcccaacaacatcttgttctcctgtatcagaaatccctaaaggagaaaaagtcttatgaggaactcagatttgaagctcacttcaatcttacaaaagaaagacctgaggttgaaagttctcacctggctcctattgaaccagagaacaacctcgttcttttcccagaggataccgctgcactttctgtagtggatgacatgctcatcgaatactgctcaacggacccacttggagatttactagctgaaccacctaaattccttgaacgcattcaaggagatatctgtggccctattgtgccaagatctggaccgttcaggctgaaggcaaattaccctgaacataggattcaatcaatccgtatggacaatgctgccaaatttacatcccatgcttttgatgattattgtatggcattgggaattcaggttcagcactatgttccatatgtccacacacaaaatggtctggctgaatcgttgatcaaaagaattaagcttattgctcgaccattattgatgaattgcaaattaccttcgtcgtgttggggtcatgcagttctgcacgctgctgaccttgtccaactacgaccaactgcatatcatgaaacttccccaatgcagttagtacatggaaatcctctaagtatttcccatttgcgtgtaactaaatctttcattcctgctcagaatgcgccagaaagagtggaggtaccaaataaaacaactcaacttccactcactaaaaagagaggaagaagtatggccactcagcgagaaacaattgctaataagcaaagaaagacggtaaatgcaaaccaccctttagttggtacacaccaaattgatactatatatcaagcagatcgtgatagtctgcaacttagctcggtggtgcataatgctgagactaggaattcggaagaccatagacacattgtttcgggagatcacgatgagtctataggggttgatgaaattgccatcaactactctgaaactggagaatcttttgatagaagagctacaattgtcgacattaatttttctgaacaaattgctgattgcctccaagttgatccagaacctaggtctataaaagagtgccaaaagtgctctgactggaacaaatggaaggacgcaattgacgcagaattagcctcgctttacaaaagagaattgatggacgtagtgacagcatatctttatgggtcacttgattttgatatttacatcaaggttcctgacggaatcgatatcccgaatcagaagaaaattttggagaaatttaatatggacaagtcatatccttccaaaacccctatggtggttcgatctctagacgtggagaaagatccatttagaccaaaggaagatggtgaggatgtgcttggtcctgattttccatatcttagtgctattggggcacttatgtaccttgcaaatagtacgaggccagatattgctttcttgaaccatgattcgacttttattgggtatactgatgctggctatttatctgatccccacaatgccagatcacaaataggatttgtacttttacaaggtggaactgctatttcatggaagtcttctaaacagactctggtagccacttccacaaatcattctgaaataattgcattatatgaggcatcacgtgaatgtgtatggcttcgcagaatggttaactacatattaacatcttgtggtattggttcattggaatcacctaccattatctatgaagataatgctgcttgtgttgttcagatggaaactgtttatattaagagcaacataactaagcatattgctcctaaattattttatcctcatgagcttcagcaacatggagagataaacaccttgcaaactaagtcatgtgataatcttgatgatttattcacaaaatctctgccatactccacattctttaaatgtgtcaaaggaattagtatgagacgacttaaaaatttacaggattcagggggagtatcttcctctggaaaataa

SEQ ID NO: 78295 - DNA, 648 bp, Oryza sativa
  Clone ID: PAT_MRT4530_78116C.1
cagctctcacctctccctgctctagatcactttttccgtccgcacaaatcgcctactcctactccacatgagccccaccgccgttcatcagagattcggagtcaatttccaccgccgttggaaaccacgtacgccgcgaagctccgccactgttgccaaatcaaagcccacgcacctcatatatcatgttcctctcatgctgaaccatcagatcgatggttgctgcgcgctagatcgatgttgtccttatgaagaagaagaagccgttgttgccatgccatatctcatgccgccttgtggctgttctgttgattgagcaaacaagcagctagaagaagtggttctgagttctgttgtgtcagtggatttggggatctttttttctgtttctttttacatcttctctcgatatatacctgttgtttatttacacaaagtagatgatttttttaggagcgatgcaattgtgataagatttggatctttccatcaacacttcactagcagtaattatctaaagactaatcatttttttacgaattcttgttgatatcacaagttcacatcatacagatggctacacagatatagtttagttttgatcatacacatttatcttggcacacataattaattatttgatcaccg

SEQ ID NO: 78296 - DNA, 234 bp, Oryza sativa
  Clone ID: PAT_MRT4530_78117C.1
gatctctcgttttcctgtgtatttttaaggatcaagtgcaaagttaatttagttgttgacaaatgtaggatggatccatgtatgcacatgaaaagttgatgaaataacatgagaagaactaattaaaaaaaaaaaaaacaagaaattgaaaatatagagtccagaaatgcaaaggaaatgaagataatgggggggcgcgtttaaagagaccaagcttacatacacgaggatggg

SEQ ID NO: 78297 - DNA, 298 bp, Oryza sativa
  Clone ID: PAT_MRT4530_78118C.1
agatacctcggttgatgatgctgctgctgctgcctgtgatgtcatacttttttctagtaatacgaaactcctgctggacatctatgtcatggatacgaaacttcagtgggacataaaagcgtggatctgtctgaatctcaggtgagatgatagcattatatggtatcaatgacatgttctctcagaaagttgtatttcgtcgggctgctcgctctaagcaggcaggtggtgcatgttctaactgaaactaacagcatctgctctgatgaaactaaaaatttctctgaacttgttcatg

SEQ ID NO: 78298 - DNA, 1566 bp, Oryza sativa
  Clone ID: PAT_MRT4530_78119C.1
atggcctacttcggcgtgtcgacgaacctggtgaactacctcaagtacaggctgcacgagggcagcaagtcggcggcgaacaacgtcaccaactgggagggcaccggctccattgcgccgctcgtcgccggctacctcgccgacgccttcctcggccgatactggaccatcgtgctctccatggtcatctccgccgtgggctatggcgtgctggcggcgagcgcgtcggtgatcaggctggagagcgcggcgctgtacgccgggatgtacctggtggcgctcggcggcgtgctggagccgatcatggcgccgttcggcgccgaccagttcgacgacggcgaggacgatcagcgcggccggcggcagagctccttcttcaactggttctacctctcgctcaactgcggctcgctcgtcggcggcaccgtgctggtgtgggtgcagaccagcgtcgggtggggggtcgggtacggcgtcccggcgatcttcagcgcgctgtccgtcgccgtgttcctcgccggcaccgccacgtaccggcgggaccagccgccggggggcagcccgctgacgaggatcgcgcaggtggtggtcgccgcggtcaggaagttcgacgtggagataccgtcggactcgtccatgctgtacgagagcgacgccgtcgatggcatgccggcgatacatggccgccgccgactcctccacaccggtcagtttaggttcttggacagagctacggtgaagactgccggcgagaaggcggcgcagagcccgtggcgactgtgcacggtgacacaggtggaagagctcaagtgcgtgctccggctgctgccggtgtgggcgaccggcatcatctacgcggcggcgtacacccaggtgaccaccaccttcatcctccagggcgacacgctggaccgcagcctcggccgcttcaaggtacccgccgccgcgctctccatcttccacaccctcagcgtcattctctgggtggcgctctacgaccgcgccatcgtgccgctggcgcgccgcgtgacgcgccacgacggcgggttcacgcagctggcgcggatgggcgtcggcctcgtcatcctcaccgtcgccatggccgccgccggcgcgctcgaggcggcgcgccgccggctgatcgcgcggccgtcggtgttctggcaggtgccgcagtacgcggtggtgggcgcgtcggaggtgttcacgctgatcgggcagatggagttcttctacgaccaggcccccgacgccatgcgcagcctctgctcggcgctctccagcacgtcgttcgcgctcggcgactacgccagctcggcgctcgtcgtcgtggcggcgcgcaggggcggcgcgcccgggtggatccccgacgacatcaaccgcggccacctcgactacttcttctggctgctcaccgcgctctgcgtcgccaacttcgccgcctacctcctcatcgcacgctgctttctctccggccaaagcaaaaacaggcgaaaattcccctcgccctggaacacctccgtgcaacaaacgcgatccctcatctgtcttgtactcatctactaa

SEQ ID NO: 78299 - DNA, 631 bp, Oryza sativa
  Clone ID: PAT_MRT4530_7811C.1
cgactacgacgtcgtctccgccgggaagctggttctaccggccgtcgatgttctacgaccgccgcggccgcctcgtcgggtgcaacacctgcctgtccccgaacgtcaccgacctcaccctccgttactccctccggatggcgttccggagcgcgctccgggcggcgacgggcgcgcgccgccgcggcgggcgcggcgcgaggacggtgatcgtgcggacgatctcgccgtcgcactacgagaacgggacgtggaacggggacggggactgcctccggaagcggccggcgcggcgcggcgaggggagctgaacgccatggagaaggacatgcaccggatacaggtggaggagttcgcggcggcggcggcggcggagggggagacggcgaggaagagggggaaagaggcggcgaggatgctgctgatggacgcgacggaggccatggcgcagcggccggacgcccacccgagcaagcacaggctgtggcagccggacaagttcaaggtgtcgcgcgattgcgtgcactggtgccttcccggcgccatggacgcctgcaacgacatgctgttccacatgctgcggcatggggagagaagcgagatgatggcacagacgaggatgagggcaagc

SEQ ID NO: 78300 - DNA, 1338 bp, Oryza sativa
  Clone ID: PAT_MRT4530_78120C.1
atgggtacacaaattacaatcgaggatgctttattgtatcatgattcaacccgtaccctactaagttacaaagatatctgtcaaaatgggtttcacattgaaacccatatggataatcgagaagaatttcttctcttaaccaaacaaaacggatatggcaaacgcatttgcgagaaaattccatctctcacatcgggattgaactatacatacattaagcccattgcacatgttgcgtacaaagtaatttttcaaaatgttgatgcattccacacttggcatgatcgacttgggcaccccggtatcgggatgatgagaaaaattattgacaactctattggtcatcatttgatcactgacaaatttcccaaatcctctgatttcgtatgcactgcatgtgctactgggaaactgattttgagaccatcttatctcaaaattagagccgaaccacttaaattccttgaacgcattcaaggagatatctgttgccttattgtgccaagatctggaccgttcaggaaagtggggatctatgtgggattcaaatctccatcgatcataaagtatttagaacccttaacaggtgatctatttactgcccggttcgctgactctatctttgatgaggaacatttcccggcattagggagagacttcaagtaccagaaagaatgccaggaaattgattgggatgtccaaggtattcccgcctcagacccacgtactactgaaactgaacttcaagttcagaaaattatacatttgcaaagacttgcaaataacctaccagatgcatttaccaattataaaggtgtgactaaatctttcattcccgctaagaatgcgccagaaagagtggagttgatggacgtagtgacagcatatctttatgggtcacttgattatgatatttacatgaaggttcctgatggaatcgacatcccgaatcagaagaagtcactttatggcttaaaacaatcgggcaggatgtggtacaaccgattaagtgagttcctttcactaaagggatacactaaaaacgatgattgcccgtgcatctttatcaaaaagtcccccacaggattttgtattatctcggtatatgtcgatgatctcaacatcattggcaatacacaagatattaatgaagcacgtcatcatttaaagacggaatttgagatgaaggatttgggtcaaaccaaattttgcttaggtctacaacttgagcatttaccttctggaatccttgtgcaccaaagtgcatataccttgcaaatagtacgaggccagatattgctttctcggtaaatctattagcaagatacagcgctgctc

SEQ ID NO: 78301 - DNA, 1755 bp, Oryza sativa
  Clone ID: PAT_MRT4530_78121C.1
gtggatccccgggctgcaggaatcggcacgagggcgaagatgagcagctggccttcacagctctatcgatcgctccaaacggttcagtgcagagaatcctgcaatggccggcacgccgacgccgacgatcgccggacgtccaagaaggatcgccggaccacgtgggccagcgctttcatcctcgtgaacaacttcatgcagtacacggcctacttcggggtgtcgacgaacctggtgaactacctcaagtacaggctgcacgagggcagcaagtcggcggcgaacgacgtcaccaactggcagggcaccggctccatcacgccgctcgtcgccgcctacctcgccgacgcgttcctcggcaggtactggaccatcctgctcttcatggccatctccgtcctgggctacggcgtgctcgcggcgagcgccgcggcgccggcgctgctgcacggcggcgcggcggcgttctacgcggggctgtacctggtggcgctcggcagcgggctcctggtggtcatggcgccgttcggcgccggccagttcgacgaggccgacgagggcgagcgccgccggcagagctccttcttcaactggttctacctctcgctcaacttcggctcgctcgtcggcggcaccgtgctggtgtgggtgcagaccagcgtcgggtgggggatcgggtacggcgtcccggcgatcttcagtgcgctgtccgtcgccgtgttcctcgccggcaccgccgcgtaccggcgttgccagccgccggggggcagcccgctcaccaggatcgcgcaggtggtggtcgccgccgccaggaagcacgacgtcgaggtgccggccgacgcgtcgttgctgcacgagtgctgcgacgccgtcgatggcatgtccgcgatacaggggagccgccggctcgtgcacaccgaccagtttaggttcttggacaaggcggccgtggagaccgccggcgacaaggcagagccgagcccgtggcggctgtgcacggtgacgcaggtggaggagctcaagtgcgtgctccggctgctgccggtgtgggcgagcggcatcatcttcgcggcggcgtacacgcagatgaccaccaccttcgtcctccagggcgacacgctggacccgcgcatcggcggcttcaaggtccccgccgccgtgctctccgtcttcgacaccctcagcgtcatgctctgggtgccgctctacgaccgcgccatcgtgcccctggcgcgccgcgtgaccggccacgatcgcgggttcacgcagctggcgcggatgggcgtcggcctcgtcatcctcaccgtcgccatgctcgtcgccggcacgctggaggtggcgcggcggcgcgtgatcgcgcggcacggcctgtacggcgacgacggcgacggggggtacctgccgctgtcgatattctggcaggtgccgcagtacgtggtggtgggggcgtcggaggtgttcacgttcatcgggcagatggagttcttctacgaccaggcgcccgacgccatgcgcagcctctgctccggcctgtccagcacgtcgttcgcgctcggcaactacgcgagctcggcgatcgtcgtcgtcgtggcgcgcgccacggcgcgcggcgggcggctcgggtggatcccggacaacatcaaccgcggccacctggatgacttcttctggctgctcgccgtgctctgcgtcgccaacttcgccgcctacctcctcatcgcacggtggtacacgtacaagaagaccgtagattag

SEQ ID NO: 78302 - DNA, 3260 bp, Oryza sativa
  Clone ID: PAT_MRT4530_78122C.1
attggagatgaattatgtcttgtggacagtggtaccacaaactctatacttagggagatcaaatactttcaagctctcaaaaagagagaaggcaaagttttgactatcgctgggcgcgatactgtgatatttggctcaggacgagcaactattacactcccaatggatacacaaattacaatcgaggatgctttattgtatcctgattcaacccataccctactaagttatagagatatccgtcaaattgggtttcacattgaaacccatatgcataatcgagaagaatttcttctcttaaccaaacaaaagggatatggcaaacgcatttgcgagaaaattccatctctcacattgggattgtactatacatacattaagcccattgcacatgttgtgtacaaagtgattttttaaaatgttgatgcattccacacttggcatgatcgacttgagcacccggtatcgggatggtgagaaaaattattgacaattctattggtcatcatttgatcactgacaaatttcccaaatactctgatttcgtatgcacagcatgtgctactgggaaactgattttgagaccatcttatctcaaaattagagccgaaccacttaaattccttgaacgcattcaaggagatatctgtggccctatggtgccaagatctagaccgttcaggttagacaacgctgccgaatttacatctcatgctttcgatgattattgtatggcattgggaattcaggttcaacactctgttccatatgtccacacacaaaatggtttggctgaatcattgatctaaagaattaagcttattgcccgaccattattgataaactgcaaattaccttcgttgtgttgtggtcatgtagttctgcacactgctgaccttgtccaactacgaccaactgcattgaggaaactgcatatcgtgaaacttccccaatgcagttagtacgtggaaatcctccaagtatttcccatttgtgtaagttcggttgtattgtatacatactgatctcaccaccacatcgtaccgctatgggcccacacaggaaagtggggatctatgtgggatttaaatctccgtcgatcataaagtatttaaaacccttaataggtgatctatttactgcccggttcgctgactctatctttgatgaggaaaatttcccggcattagcgggagacttcaagtaccagaaagaatgacaggaaattgattgggatgcccagggtattccagcctcacacccacgcactactgaaactgaacttcaagtttaggaaattatacatttgcaaagacttgcaaataacctgccagatgcatttactaattataaaggtgttactaaatctttcattcctgctcagaatgcgctagaaagagtggaggtaccaaataaaaccactcaacttccactcactaaaaagagaggaagaagtttggccactcagcgagatacagttgctagcaagaaaagaaagacaataaatgcaaaccaaccttaagttggtacacaccaaattgatactatgtatcaagcagatcgtgataatctgcaacctagcccagttgtgcataatgctgagactaggaattcagaagaccatagacacattgttttgggaaatcacaatgagtctataagggttgatgaaattgccatcaactactcggaaactggagaatcttttgatagaagagctacaattgttgacattaatttttctgaataaattgctgattgcctgcaagttgatccagaacctaggtctataaaagagtgccaaaagcgctctgactggaacaaatggaaggacgcaactgacgcagaattagcctcgctttacaaaagagatgtattctcggctgtaatgcctactcctcgtggtatctttcctgtgggatacaaatgggttttcgtctggaaacggaatgaaaacaatgaggtggtgagatataaagcaaggcttgtagcacaaagttttacgcaaaaacatggcgttgatttcaactaaacttactctccagttatgggtggtataactttccgatatttaatatcattgatagtacaaaatcgtctatttatgcagttgatggacgtagtgacagcatacctttatggatcacttgattctaatatttacatgaaggttcctgacggaatcgacatgccgaatcagaaggtaaatcgtaacatgtattgtgttaagttgcagaagtcactttgtggcttaaaacaatcgggcaggatgtggtacaaccgattaagtaaattcctttcactaaagagatacactaaaaatgatgattgcccatgtgtccttatcaaaaagtcccccacaggattttgtattatctcggtatatgtcgatgatcttaacatcattggcaatacacaagatattaatgaagcacgtcatcatttaaagacggaatttgagatgaagaatttgggtcaaaccaaattttgcttaggtatacaacttgagcatttaccttctggaatccttgtgcaccaaagtgcatatacctagaaaattttggagaaattcaatatatggacaagtcatatctttccaaaacccttatggtggttcgatctctagacgtggagaaagtcccatttagaccaaaggaagatggtgaggatgtgcttggacctgattttccatatcttagtgctattggcgcacttatgtatcttgcaaatagtacgaggccaaatattgctttctcggtaaatctattagcaagatatatcgctgctcctaccaaacgccattcgactagagttaagaatgtctttcgatatcttaatagcacaagagatcttagacttttctttaaaaagaaccaagattcgaccttaattgggtatactgatgctggctatctatctgatccctacaatgccaaatcacaaacaggattcgtacttttacaaggtggaactgctatttcatggaagtcttctaaacagacactggtagccacttccacaaatcattttgaaataattgcattatatgaggcatcacgtgaatgtttatggcttcacagaatgattaaccacatattaacatcttgtggtattggttcattagaatcacctaccattatctatgaagataatgccgcttgtgttgtttagatggaaactggttatattaagagcaacatcactaagaatattgctcctaaattattttatcctcatgagcttcagcaacatggagagat

SEQ ID NO: 78303 - DNA, 1776 bp, Oryza sativa
  Clone ID: PAT_MRT4530_78123C.1
atgtctaaggatatcactccgattggagaggaattatgtcttgtggacagtggtaccacaaactctatacttagggagatcaaatactttcaaactctcaaaaatagagaaggcaaagttttgactattgctgggcacgatactgtgatagttggctcaggacgagcaattattacactcccaatgggtacacaaattacaatcgaggatgctttattgtatcctgattcaacccgtaccctactaagttatagagatatccgtcaaaatgggtttcacattgaaacccatatggataatcgagaagaatttcttctcttaaccaaacaaaacggatatggcaaacgcatttgcgagaaaattccatcactcacatcgggattgtactatgcatacattaagcccattgcacatgttgcgtacaaagtaatttttcaaaatgttgatgcattccacacgtggcatgatcgacttgggcaccccggtatcgggatgatgagaaaaattattggcaactctattggtcatcatttgatcactgacaaatttcccaaatcctctgatttcgtatgcactgcatgtgctactgggaaactgattttgagaccatcttatctcaaaattagagccgaaccacttaaattccttgaacgcattcaaggagatatctgtggccctattgtgccaagatctggaccgttcagacttgcaaataatctaccagatgtatttaccaattataaaggtgtgactaaatctttcattcctgctcagaatgcgccagaaagagtggagttgatggacgtagtgacagcatatctttatgggtcacttgattctaatatttacatgaaggttcctgacggaatcgacatcccgaatcagaagaagtcattttatggcttaaaacaatcgggcatgatgtggtacaaccaattaagtgaattcctttcactaaagggatacactaaaaatgatgattgcccatgcgtcttcatcaaaaagtcccccacaggattttgtattatctcggtatatgtcgatgatctcaatatcattggcaatacacaagatattaatgaagcacgtcatcatttaaagacagaatttgagatgaaggatttgggtcaaaccaaattttgcttaggtctacaacttgagcatttaccttctggaatccttgtgcaccaaagtgcatatacccagaaaattttggagaaatttaatatggacaagtcatatccttccaaaacccctatggtggttcgatctctagacgtggagaaagatccatttagaccaaaggaagatagtgaggatgtgcttggacctgattttccatatcttagtgctattggcgcactcatgtatcttgcaaatagtacgagaccagatattgctttctcggattcgactttaattgggtatactgatgctggctatctatctgatccccacaacgccagatcacaaacaggattcgtatttttacaaggtggaactgctatttcatggaagtcttctaaacagactctagtagccacttccacaaatcattctgaaataattgcattatatgaggcatcacgtgaatgtgtatggcttcacagaatggttaaccacatattaacatcttgtggtattggttcattggaatcacctaccattatctatgaagataatgccgcttgtattgttcatatggaaactggttatattaagagcaacatcactaagcatattgctcctaaattattttatcctcatgagctttag

SEQ ID NO: 78304 - DNA, 352 bp, Oryza sativa
  Clone ID: PAT_MRT4530_78124C.1
ggaggaaacaacaactgtagagatgctaaacacaactccatatgcatatacagatcatgctcaggatcaagacaacatccataatgacagaggaggatatgtaggacactgaaagccgcctagtatacatttatgatgcacacaaatgtaaacagtggctcgaagcacgcaggaagaactcttctacatgagtgaacataaataagacgatgactgtgagtccaccacatggtatgaagatggatgaacaggcccaaatgactcctgacgaactgaaggagcgtattagacaaacagagagaatcaatttttgcacatcctgcactaccagcagtctatctatgtagacatg

SEQ ID NO: 78305 - DNA, 279 bp, Oryza sativa
  Clone ID: PAT_MRT4530_78125C.1
atccccacattcctgtgtgggcccatagcggtacgctgtggtggtgagatcggtatgtatacagcaaatgggaaatacttggaggatttccacgtactaaatgcattggggaagtttcatgatatgcaattggtcgtagttggacaaggtcagcagcgtgcagaactgcatgaccccaacacgacgaagccaaaccattttgtgtgtggtcatatggaacagagtgctgaacctgaattcccaatgccatacaataatcatcgaaagcatgggatgtaa

SEQ ID NO: 78306 - DNA, 1473 bp, Oryza sativa
  Clone ID: PAT_MRT4530_78126C.1
atgatgagaaaaattattggcaactctattggtcatcatttgatcactgacaaatttcccaaatcctttgatttcgtatgcactgcatgtgctactgggaaactgattttaagaccatcttatctcaaaatcagagccgaaccacttaaattccttgaacgcattcaaagagatatctatgggcctattgtgccaagatctggaccgttcaggattcaatcaatctgtatggacaatgctgccgaatttacatctcatgctttcgatgactattgtatggcattgggaattcaggttcagcactctgttccatatgtccacacacataatggtttggctgaatcgttgatcaaaagaattaagcttattgctcgaccattattgatgaattgcaaattaccttcgtcgtgttggggtcatgcagttctgcacgctgctgaccttgtccaaatacgaccaactgcatatcatgaaacttccccaatgcagttagtacgtggaaatcctccaagtatttcccatttgcgtaagttcggttgtgctgtatacataccgatctcaccaccacagcataccgctatgggcccatacagggaagtggggatctatgtgggtttcaaatctccgtcgatcataaagtatttagaacccttaacaggtgatctatttactacccagttcactgactctatctttgatgaggaacatttcccggcattagggggagacttcaagtaccagaaagaatgccaggaaattgattgggatgcccagggtattccagccttagatccacgtactactgaaactgaacttcaagttcagaaaattatacatttgcaaagacttgcaaataacctgccagatgcatttaccaattataaaggtgtgactaaatctttcattcccgctcagaatgcaccagaaagagtggagttgatggacgtagtgacagcatacctttatgggtcacttgattatgatatttacatgaaggttcctggcggaattgacatctcgaatcggaagaaaattttggagaaatttaatatggacaagtcatatccttccaaaacccctatggtggttcgatctctagatgtggagaaagatccatttagaccaaaggaagatggtgaggatgtgcttggacctgattttccatatcttagtgctattggcgcactcatgtatcttgcaaatagtacgaggccggatattgctttctcgatggaaactggttatattaagagcagcatcactaagcatattgctcccaaattattttatcctcatgagcttcagcaacatggagagataaatatcttgcaaactaagtcatgtgataatctttctgatttattcacaaaatctctgccatactccacattctttaaatgtgtcgaaggaattggtatgagacgaattaaaaatttgcaggatttagggggagtatcttcctctggaaaataa

SEQ ID NO: 78307 - DNA, 1292 bp, Oryza sativa
  Clone ID: PAT_MRT4530_78127C.1
ccggcggggctcctgtcccactccccgttcgtccgggtctcctctcctcccccgccgacgcgcactcgatcccccccgcctccgcctccgcctccgcctccgcgtcgcccatctcgagatcccccgcatggcgacgctcaccgtcccctccgccgtcccgcccgtcgccgacgactgcgaccagctccgcaaggccttccaagggtggggcacgaacgaggcgctcatcatctccatcctggcccaccgcgacgcggcgcagcggcgcgccatccgccgcgcctacgccgacacctacggcgaggagctcctccgcagcatcaccgacgagatctccggcgacttcgagagggccgtgatcctgtggacgctggacccggcggagcgcgacgcggtgctcgccaacgaggtcgcgaggaagtggtacccagggagcgggagccgcgtgctggtcgagatcgcgtgcgcgcgcggccccgcgcagctgttcgcggtcaggcaggcctaccacgagcgcttcaagcgctcgctcgaggaggacgtcgcggcgcacgccactggtgacttccgcaagctcttggtgccacttataagtgcttaccgctatgaggggccggaagtcaacacaaagttggcacattcagaagccaaaattctgcatgagaagatccagcataaggcatatggtgatgatgagatcatcagaattctcactactaggagcaaggctcagttgattgcgacattcaatcgttacaatgatgaatatggtcacccaatcaacaaggatctcaaggctgatcccaaggacgagttcctttccacgctgcgtgcaatcatccgctgcttctgttgccctgacaggtacttcgagaaagtcatcaggttggccatcgcaggcatgggaacagacgagaactccctcactaggatcattaccactcgtgccgaggtggatctgaagctgatcacggaggcgtaccagaagaggaacagtgtcccgctggagcgtgcggtcgcaggggacacctccggggactacgagaggatgcttcttgctcttctgggtcaggagcagtgagccatgcctatcttgcccagtcacacacttcatgtgatcatgtcatatcagagaataaacctgttatgcaggggacacagccgtggtgattatgatgttgtttttccagtgtacggtactgtttgctgcagcttgcataacagtgacgatgaaataaatcatagtggaatgcgttggctcctcaaaacaccaaaaaaaaaaaaaaaaaaaa

SEQ ID NO: 78308 - DNA, 472 bp, Oryza sativa
  Clone ID: PAT_MRT4530_78128C.1
cccgccaaacgcaaatggtatataaaaatcaggggatatatcacaagatgatggctaaaaaagggggagacgaggaaaaatgaagttcctttggccccaaagccagtcaccacagggacaacaatccctgggtttgcacatggccaaagttgcaaaaccatgagctcctcggccggccgccgaaccaccaaccccgccggtgaccggggaccatcctgagtcgtaatcactcgtcgctgggctgatgcacgtgcaatctgctgccgaaagtcaaccccggcaacgggtggaaaaggatgctcctgagctcctgcatcacggccggaaacctgcccaggcctcccccgtgaacccggggggccgggtggaacaaccgccggccgccgccggagtgggcggcccccccgcgtgcggacttggaggagtcatagcactcgccggggggaagctggaagcggaagacggggcagga

SEQ ID NO: 78309 - DNA, 496 bp, Oryza sativa
  Clone ID: PAT_MRT4530_78129C.1
gctaaacaatatacgatgtggaagctaaagtttggtgagggggcaagcaacccactgctccgctccagcaacggcttcctcggccgggagacgtgggagttcgaccccaacggcggctcgccggaggagcacgccgtggtcgagaggctccgccgcgacttcacccgcaaccgcttcacacagagggagtgcagcgacctcctgatgaggatgcagtttgcaaaagagaaccaagtttacagtaaacatgaagtaagcaatcttaaagacagttcagaagtcacagaagaagttctattaacgtctttaagacgtgttcttgatcaatattcctctttgcaagcaccagatgggtattggcctggcggttacagcgggattttgttcattctgccgctcatgatatttgccttacatgtgactaagtcactaaacgatgtcttatcatctgagcatatacgtgagatatgccgctacatctacaacattcaaaatg

SEQ ID NO: 78310 - DNA, 327 bp, Oryza sativa
  Clone ID: PAT_MRT4530_7812C.1
atggcgttgtttcctcgaggccatcaggactgcgtaaagcattttctgggtctgatggtatcgggttttcgcgtcccagagtgcctctctaacgaagtagacgggccgctacatctttcggcggggccggtctttatcgtcaggggtgcctgccttggggcgctcgtccatcggggcctcggatgggctccctaccccgttcgtgcgagtggtctcgtggccgcctaccagagcctcccgttctcccgtggtggcctcggggcctacctagggttcgggggcttcggcagtcgggtcgctgggggacgaggggccgtcaccggttaa

SEQ ID NO: 78311 - DNA, 317 bp, Oryza sativa
  Clone ID: PAT_MRT4530_78130C.1
caaaatggaagactttcattggattcaccgccggaatagaccaccccatgcaccacaaggctgtggggaggggatactcacactgtgctgatgaaaccatgtaagggtctacagttaccagataacacatcaatttggtaactgagtacagtgaatataataggcgaaatgcactacataactgggcgtccaagattttcagctacggacgtttgcattgatcactcgaagagcacctggatcctgatgcgagctgcatcctaaccatcaagcgccaatttgactttatggcactgctctgaatcttgacgccagat

SEQ ID NO: 78312 - DNA, 276 bp, Oryza sativa
  Clone ID: PAT_MRT4530_78131C.1
atggtgaatcaggaggagacagaggtaaccacatcacaggactcgatgatctttgatgtcaggattgcaggtgtcaacacggtaattgagttggctgctgatggggcacaacttgatgccgcacataccatcattgctaaagcaaaggtgcaagtagaagcaggtgggaagcatccctctcaagaagttagacaacgctctcgtcaaccgattgatcctacaccaacacgtcaaagtgaactacagaagacaatgctaaacgagaaaactgattag

SEQ ID NO: 78313 - DNA, 469 bp, Oryza sativa
  Clone ID: PAT_MRT4530_78132C.1
ctggatttctgtgaagcttacatgaatgtgcacggcgactgggcgctagaaaccatcctttcagatgccaccctgcgctgcgagctagctgattgtgagcttgctcaactgttgatggctgatgccaaggacgccaacccggtagaccggagaatcactccattgacacccaaatctgacatatactccattgggagcgtgacacataagggtactaactgggaagcaggctgcaagccttcccagtgcaatatggcgggctacagtccagctgatagctgtggtcattggtacatccaacaactgctgagtggcctatggcagagggccgacatttaacataaatgaggctcaagtgcctagaggcatcatgtacacagcttctgacttcagagactgggcgagatctgcaacaggtccacctgacgaggggtactagactagtgccctccttcttactgtgcccgat

SEQ ID NO: 78314 - DNA, 2451 bp, Oryza sativa
  Clone ID: PAT_MRT4530_78133C.1
atggcctcctcttcttctccatcccatctgcacctcctcatactcttcttcttcgccatagccgcctcctctctattgtccaccgcgacctccacgcgcgcctcgccggccgacactgccgtcggcggcatcgccgccaaggtgtacaccaaggtgtgcgacgcgacgaggttcgccggcctgggcctgaacatgacggagttccgctactgcgacgcgtcgctgccgtacgccgaccgtgtccgcgacctcatcggccggatgaccgtggaggagaaggtcggcgccctcggcgactggaccgacggcgctgcccgcatcggcctgccggcgtacaggtggtggtcggaggcgctgcatggcctctccagcaccggccccaccaccaagttcgacgacctcgccacgccgcacctccactccggcgtctccgccgtctacaacgccaccgtcttcgccaacgtcatcaacagcgccgcctccttcaacgagaccctctggaaatccatcggccaggctgtgtcgacggaggcgagggcgatgtacaacatggggaagggagggctgacgtactggagccccaacatcaacgtggtgcgcgacccgaggtgggggagagctctggagacgcccggcgaggacccgtacgtcgtcggccgctacgccgtcaacttcgtccgcggcatgcaggacatccccgggcacgaggcggtcgccgccggcggcgaccctaacacgcggccgctcaagacgtcggcgtgctgcaagcactacgccgcctacgacctcgacgactggcacaaccacacgcggttcgagttcgacgcgcgcgtcgatgagcgcgacatggtggagacgttccagcggccattcgagatgtgcgtccgcgacggcgacgtgagcagcgtcatgtgctcgtacaaccgcgtcaacggcatcccggcgtgcgccgacgcgcgcctcctgtcgcagaccatccgccgcgactggggcctccacggctacatcgtctccgactgcgacgccgtccgcgtcatgaccgacaacgccacctggctcggctacaccggcgccgaggccagcgccgccgcgctcaaggctggcctcgacctcgactgcggcgagagctggaagaacgacaccgacggccacccgctcatggacttcctcaccacctacggcatggaggccgtcaacaagggcaagatgagggagtccgacattgacaacgccctcaccaaccagtacatgacgctcatgaggctcggctacttcgacgacatcgcccagtactcctccctcggcaggcaggacatctgcaccgaccaacacaagaccctcgcccttgacggcgcacgccagggcatcgtcctcctcaagaacgacaacaagctgctgccgctcgacgccaacaaggttggcttcgtcaatgtccgtggccctcatgtccaggcccctgagaagatcatggatggagactacacaggtcctccgtgccgatacgtgacgccgcgccaaggtgtaagcaagtatgtgaggttttcgcatcgcgccaacactaccatctacttcggaggcctaaacctcaacattgagagggagggcaacgacagggaggacattctcctgcccaagaaccagacagaggagatcatccgtgtcgccaaggcgtcgccgaacccgatcatccttgtcatcttgtcaggaggtggcatcgacgtctccttcgcgcagaacaaccccaagatcggcgccatcctctgggctgggtaccctggtggtgaaggaggcaatgccattgcagatgtcatctttggaaaacacaatccaagtgggaggctgccattgacatggttcaagaacaagtacatctaccagctgcccatgacatccatggatctccggccggtggcgaagcacggctaccctggaaggacatacaagttctacgacggcccggacgtgctctacccgttcggctacggcctcagctacaccaagttcctctacgagatgggcaccaacggcaccgccctcatcgtccccgtcgccggcggccactgcaagaagctcagctacaagtccggcgtgtcaaccgcaccggcatgcccggcgatcaacgtgaacggccacgtgtgcaccgagaccgtcagcttcaacgtgagcgtcaccaacggcggcgacacgggcggcagccacccggtgatcgtgttcagcaagccgccggcggaggtggacgacgcgccgatgaagcaggtggtggcgttcaagagcgtgttcgtcccggcgtggagcacggtaagcgtgagcttcgagctcaacgtgtgcaaggcgttcggcatcgtcgagaagacggcctacaccgtcgtgccgtccggcgtcagcaccatcctcgtcgagaacgtcgactcgtcggtgtctttcccagtcaagatcgacttcgctatttag

SEQ ID NO: 78315 - DNA, 801 bp, Oryza sativa
  Clone ID: PAT_MRT4530_78134C.1
tgagactagaaaaccatcattcacccccttcaaatcttaaaaacctttgtggtggaaaagattttctttggcatgagaaacctcctatcaagcatctcaatttgagagagattgatctttcggggagacaattcacctgggccaataacctcgaaaatccaacttatgagaagttggatagagtgttaatgaacactgactgggagcaaaaatatcctttagttacgtgtcaagccttacctcgagccatttcagaccactctccaattatactgagatccggctcgcatgcacatttcggcaatcagccgccatttcgttttgaattaggctggctagagcgggatggattctttgagatggtagccaaagagtggcaaagcgtaaacaagggaaagaatcctatggaacgttggaaacacaagatcgtccaccttaggcaacatttaagaggttgggcgcgaagtttaagtggcacatataaaaaacaaaaaataaagcttttagctttaattgacacactaaacaaaaaagccgaacacataactctctccaacacagagttagcttcgttgaagcaggccaaaaatgatttggcaaaactgttaagggaggaagagttgtattggtaccagcgatctaagacaaatcatttactccaagggggatagtaatactaaatattatcacttgatagccaatggattatttggtcctccagatcataatcatgtatccatgatagagggatggactgatgatattcctcaagtgtccgacttggaaaatgacatccttact

SEQ ID NO: 78316 - DNA, 303 bp, Oryza sativa
  Clone ID: PAT_MRT4530_78135C.1
gtggatacggaggtggatacggtggtggtgggggttacggtggaggatatggtggtggtgggcgcgacgaagaagcagttgaatggtacataatatgcatgtttgtgtgtgctaaataagtcatgtatgacagatttgctttaacatgtaattgcttcaatggtggtgtagtagtgagagctttgaagacccacctttgtttggtatttatgtttcatgcatgtattttagaatctagtattgtaatatggcatgtttgaaagtaattaaatctcgtccttctttcatgaacaaaaaaaaaaa

SEQ ID NO: 78317 - DNA, 500 bp, Oryza sativa
  Clone ID: PAT_MRT4530_78136C.1
attaaaaggatcatgggctccttttatttcagtaataatatacataggcaaaaaaacgccggtatttgttacccctccctcagtaaggagaccaatattcagcagtatccaaaataacagggcccaaggcaaatgatcaaaggaaagatacaaaaaagatggccctcaggcaatctctcctaagtcttaaccagtgttctgcaaccctgcagcaatgcccttcatggtcaggatgagggtgtcctccagccctggcgcgtactcgctacccgggttcagcttcacaagctccgcggccggtttgctcccatccatcacctccttggacaggtgagggcgcaccgtgacgtggtaatccgggtcgcggatccgtttcagcgtgtaggcttggcagacattcagggtggttatgtaggcgtcgcggagtcggagccgctgcttcaggtaggggtcacctttaaaaaaatccctatggccagcaacctgaagaaacagctttt

SEQ ID NO: 78318 - DNA, 2441 bp, Oryza sativa
  unsure (1)..(2441): unsure at all n locations
  Clone ID: PAT_MRT4530_78137C.1
acggcgacggccatggcgaacagcaagagcctgctcctctgctggtgctcgctcctcctcctcctcctcgccgccgcagcgccgcccgccctcgccctcccgctctgcaccgactccagggcgccggtgccgctgaacgggacgacgctgggcttctgcggcggcggggggagcgggagcagcagctgctgcggcgccgcggatgatgccgcgctgaggaagcggttcgaggcgatgaacgtctccgacgccgcgtgcgccggggtcgtcaagtccgtcctctgcgcgaaatgtaatccatattcggctgagttgttcaactcaagctcaaagattcggatggttcccgtcctgtgcaatggatcagcttcagctagttctactcaatcgaaggattctacacaagactactgcaaactagtttgggaaacatgcaagaatgtgacaatactgaattctccttttcaatctcctttgcaaggtggtgcaacattacctagttcatcatcaaaacttactgatgtttggcagtcagaaaatgacttttgtacatcatttggtggctcatctgacaaccagtcagtatgcttaaatggaaatgaagtttcatttagcacttcagaaccatcacccagtcctaaaggggtgtgtattgagagaattggaaacgggacatacttgaacatggctcctcatccggatggatccaacagagttttcttgtctagccaagcaggtaaaatatggttggcaactgtcccagaacaaggctctggaggcattctgcaatttgatgaagccagcccatttattgatctaactgatgaagtccactttgattctgagtttggactcatgggtatagcatttcacccaaagtttgctaccaatgggcgcttctttgtttcttataattgtgacagaactcagtcatctaactgtgctggtaggtgttcatgtaattctgatgttaactgtgatccttcaaagcttggatctgataatggtgcccagccatgccagtaccaagttgttgttgcagagtactctgcgaaagtctcatcatcaaatgtttcggaggcaacatctgctaatccatccgaggttagaaggatatttacaatgggactgccatatacagcccaccatgggggacagatactttttggacctacagatggatatctgtaccttatgatgggtgatggtggaaacaaaggcgacccttttaatttttctcaaaataagagatcacttttggggaaaattatgaggcttgatgttgatggcgttcaaagccagagtcaaatcattaaccagagcttgtggggtaattattctgttcctaaagacaacccattcagtgacgaccgagacttacaaccagagatttgggccttgggcttgaggaacccatggagatgtaattttgattctgagaggccttcctatttctactgtgcagatgttgggcaggatttatatgaagaggtagatttgatctcgaagggtggaaactatggatggcgtgcatatgagggcccatacatttatcatccagaatggactcctggagggaatacatcgcttaattctataaatgccatcttccctgttatgggctacagccattctgctatcaacaagaacactgggtctgcatcaattacaggtggatttgtttatcgagggtcttctgatccctgcctatatggaaggtacatatatgctgatctttacgcgtcagcaatgtggaccggcacagagaccccagagagcagcggaaactacacctcaactctgattccgttcagctgctccaagaactctccaataccctgcgaatctgcatcaggcagcaaccaaccatcgttgggctacattttctccttcggcgaggacaacaacaaggatgtcttccttctaacatacaaaggcgtctaccgagttgtccggcctagcctctgcggctacacctgtgccgcggagaaaccagagaccaacaacaatggaacgtctccctcaggctcttcatcatttgcttcaggaaggaggatagggaagttggcagtagtaatggcgtttgttttgtgtgcattattcttctgagatgtccatccctgttagcttgttatatatcatgtatggtttctttcgccaccctgctgtacagcattgacgagccctacacgtctgtgtgactgtttgtgattattagtagtatttggttgtgcttagttctccaaaaaaaaaaaaaaaaaaaaaaatgtaagccattgtagatggacttgaaaaattaattaagcccgtgctttgccnttttagggattgggccaatgggccaaagaaatatttggncaaagtgggaacccaccgttactgttatnaaataaaagttgnacgggggggtaagcttttgttctaaaaaaaaaaaaaaaaaa

SEQ ID NO: 78319 - DNA, 1860 bp, Oryza sativa
  Clone ID: PAT_MRT4530_78138C.1
ttttggttttttttttgaataatgaaccagattagtacattgtgatcctgacagggcaacctgtcttggccacaactagcaatttgttgttacaagaggtcaaccagagattgacctcgttctcacactgacaagcacatccatttttacaacttattgcaaacaggtcaacaagacgttgacctcacccacgcattcggaagctaaaaaaactttttacaagcagcaagcaggtcaacaaaaagttgagctgcaaatgctgaagaaatgaagatatctgaactttgtctgaaaaaaaggaaaaaactttgaacatttcaaaattcaaactgacggattggcgttcgtcagttggtgcaggaagggaagacccacaccggcggcggccacttccagagcaggtcgcgcacggcgccgcgtggcaccttgtagctcccgtcggcgaggtcgagcacgccgacgtcgggaaccacctcgtggcacctctcgtgcgaccatggcccgtcgtcggtgaagtagacgcagttgcccttcacctccgggcagcaatccgccgggacgcacagcgacgcgctcttgcccaagaacagcgcgcgcccggcgaggatgccggcgccggcgccgtccacccgcgcccactcgccatggccgccgccggcggcgttccactcgaagagctcggccttgacggtggtgtactcgacgcgttcttgccggggctcccacttggaccgcgcgtgcgccttgtccctgagccggtgcacctggagcaggtgtcccggcgagagctcgacgaggtatttgctgcaggggatcgacatggagcacgcgcggccggagcagcagcacggcggcgcgatctccctgggcggcggcggcgtcgtgcccgccgccgtgacgtccatgtcccatgcctcgacgcgacccacggagtccagcgtgtacaccgcttggtgcccgtcggcggcgggggcggaggcggcgcgcacggcgtcgacccagcatcgtgatggcatgtcgaggagagtccacttcgtgtcccctgctctggcaatggcgagacggtacagtggctggcagatgagcagcacggcgtagccgccccaagaccccggcggcgtcgtctgcctccgcggcggtgcaacgaggatggccttctcgtagagctcgtacctgagcctgtccggcgcgaacgactccggcgggacgagcacctcgtcgccgtcgttgtctccatcgccgaagcagcagcggaggtcgtagctcgcgacacggccgtcggcgtcgcggctggcgtcgacgaagggcagcgtggtgaccgagggtagctggacctgcgcgccggtgagcgggttcaggaggtggagctcggaggcggcgtcggcggtgacgagccacccgtcggacgagccaacacatagccgctcagacaccggcggcgccggctgcgggatggcgtacgccctgccatcggagaggctcaagaacctcgcctccaagaacctaccatccccaccgccgccgccgctcgggctctgcctgcgcgccgtcgggttgaacgggagcatgagccacggcggctgcgcggcgcgaaaccgtgcggtggcggaggccgcatcagccgactgccacgccgtgcacacgccggggaagcggaggcggtccggcacggggaggcggccgagcacggactcgaggaggtcccgcgggaggtcggcccacccaggccgcctcaccgcggcgccgactagcttgttcatcgccattgccagagcagagcaaagctcgatcgcatgacaaggaggagaagatcagaggaggaggaagaagaagatgagacggtttgcttgttgggattgc

SEQ ID NO: 78320 - DNA, 508 bp, Oryza sativa
  Clone ID: PAT_MRT4530_78139C.1
aacgggggtcatcgtggcggatgggcgacaagcccgaaagttcttggaaaaggcacgggcgcggcccgccgctgtccttgcaagccggtgggcggcgagaaggcttcttcttgctggaggaggagaaggtggtcttgaagcggaagggcggatgaaggaatggatgccggcgccggcgtctggaccaaagggaaaaaccggcggcggcggcggaagaagagaagacacagcctgccggcggcgctcctgaccggagatgaggaagaaaatggagtggtgtgggcggggggaggagcgggttagtgttacggctcgccggcggagaacggtggcgcgcgggtgggagaaaaggcggggggcggcggcgccggcggcggcggacgcgacgctcgactcggtagagggtagagaggaaggggagggctgtgagacgatggatctccatccgacgtccgaaaaattatccaacgttggacctttcgaatgcgttgaacaaccacatcacgag

SEQ ID NO: 78321 - DNA, 660 bp, Oryza sativa
  Clone ID: PAT_MRT4530_7813C.1
gccgagggcttctcccgctctctctctctctctctctctctctctctctctctctcagccatggctcgcctcctctcgcgaaccctagccttggcccgcgcggactccgccgcggtgccctcctacggccgcctccatgtccgtggtgtctcatcgaaggtggagttcatcgagatcgacctgtcgtcggaggacgccccctcctcgtcgtcctcgtccggcgtcgaggggggcggcttcgggccgcgggagatggggatgcggcgactggaggacgccatccacggggtactcgtgcggcgggcggcgccggagtggctccccttcgtgccgggaggatcctactgggtcccggagatgcggcgcggggtcgccgccgacctcgtgggcaccgccgtccgcagcgcgattggcgccgcctggaacgcggaggcgatgacggaggaggagatgatgtgcctcaccaccatgcgcgggtggccgtcggaggcttacttcgtcgaaggttgattttctcatccagtggagagttcaagaaaagttgctactcaaactgatgaagaggaaagctaatttgtttgcatcactttagcagggaccccctgagaaataggaagcttggagctgtcgagttctgctgatgttgtacatacagacagg

SEQ ID NO: 78322 - DNA, 3429 bp, Oryza sativa
  Clone ID: PAT_MRT4530_78140C.1
atggcaacggcgtccccttctctgttcggccaaccggtggcagaaaagctaggaagaaacaacttcctgctttggaagacacaagttcttccggccgttcgcggcgcacagatgatgggctacttggacggcaccacagtgccgccggcccgtctcatcgacgtcaaagaaggcgagaaggtggtgaaagccaccaatccagagtacaccaagtgggtggttgcagatcaacaagtcttgagctacctcctttcctccctcgcgagggagatcctgacacaggtggtgtcaatagaaactgcagccgagctctggaggactctagagaacatgctgtgctcccagactgaaaattaccacaagatgaattcttttagtgatgagatggcgatgaccacaaccaggaaaggaaagctttgcggcaaagttggtcacatggtggccgactgctggtaccgttacaacgaggactttgttccggagaagagtgcagctgcagcaatccatggctacaacatcgataccaactggtatgcagatacggcggcgacagaccacatcaccggcgagctagacaagctctccgtgcgtgagaggtacaatgatggcgaacaaatctatacagcaagtggctcagaacttgtgtactcagatgtctggggtcctgccactgattcagttggcagaaagaactattatgaatctctcacagggtctcttgccctcacgcacatcaacaaaatggtgctgcggagcgcaaacatagacacattgttgaaccctctccacaaaggatttaaatgtttacatgtatccaccggtcgcatctacatttctcgggatgttatttttgatgagaatgtgttcccctttgcaaagcttcatcctaatgctggtgcacttcttcgcaaagaaattgatcttactcccagtctttttcttcctttttctgggggtgaccatgtgcctaataatgctaatcaaaatactgtgcctgaaaatatgtctaatggagaaaattctgcgagttttgctgatgattcggtgcagatttcacatgaaatatcagcagcaatagatgccgcggagcaccagaccgattcggctgctactaactccgttgcaggtgctgaatcgacgtcagaatcatcgtctgccacgaccgatgatccagcagctgacgtgtggagcgcagggggaaattctctcgcctcgccgtcctctgcaccagcgtcgcccaatcctccgtcgccacctccctcaccgcatgccgcatcgaccactgtgagctcgccatctggtacgcgcactgatgaggaagagctggtttcaagatcctctgtggcagaggatacagcggcaaacaaccctcgaccacacactaggctacaaagtggtgtgcacaagcccaaagtttatactgatggctgtgtcaggtatggctgctttacatctactggagaacctgaaagtctagaagaggctttaaaacataaggattggaaggtagccatggatagtgagtttgatgctcttaaacaaaataaaacctggcatctagttccacctgaggatggtagtaatctcattgattgcaagtgggtgtacaagtgcccggaacctcctggtgaagaacaccggaacttcctggcagaaatgagcagcccggaacttccggagttcttgagccaggaacttccgggcaacagagaaaatcaaaatttggggaggcaaaacaggctagttgctaagggttttaaacaacgttatggcatagattatgaagacactttcagtcctgtggtaaaggcaaccactattagaacagttttatcaatagcagtgtctagaggatggagtttgcaccaactagatgtgaagaatgtgtttttacatggcattcttgaggaggatgtttatatgagacaaccacctgagtatgaagagatatctaagccacactatgtttgcaaacttgacaaggccctatatggtttgaaacaagcccctagagcctggtattctagactaagcatgaagctgcaacaattaggattcagtccttcaaaggctgatacctcattatttttctatagaaaaggtagtgtgactatctttgtcttggtatatgttgatgatataactgttgcaagttcgtcacaagatgctgttagctctttgcttcataatcttaagatggattttgccttgaaagatctaggtgatcttaattactacttccttgggatagaagtaaagaagataagtgatggtttagttctgtctcaagacaaatatacacatgatatattgaagagaataggtatgtcgacctgtaagcctgcgccaacccctttgtcaacatcagaaaaattatctgtacaggaagggagtcttttaggtcctggagatgcaactaattacaggagtattgttggagctctccagtatctgacattgactcgacctgatattgccttttcaattaataaggtatgccagttcttgcactctcctactttgacacattggtctgctgttaaaagaattatcagatatttgagaggtactgttggtatgggactcaagatacagaaatctcagtctatgcttgtaaatgcattctcagatgcagattgggcaggatgtgttgatgatagaagatctactagtgggtttgctgtatttctaggaagtaatcttatatcctggagtgtacgcaaacaagctactgtatctagatctagtacagaagcagaatacaaggctttggccaatgcaacagcagaagtaatctgggtgcaaactttgttaaaggaacttggtatacaatgtccgtccatggcaagattgtggtgtgataatttgggtgcaacttatttgtctgctaacccaatatttcatgcaaggacaaagcacattgaagtttatttccattttgtgagagaacgggttgcgcagaagcttcttgagattgagggtgcatcggcggtagatgagaagatggtgcgtaccgttggagaaggtggcgttgatctgtcattctgcaacaatggcaactcaggcagtcctgatgatgagggaatcacggaggagaagaggatcgagatggagttaccggttgcaagaggagatcgccgaccggagtttgggcgtgaatcgagggggtcacgcggtgtccggcgaggaggtgccaatcacggagatggcgtgattcgcttgggcctcggggagtgccgacagttgcagaccagtgaggccttttgtggcagtgaccccggcgaggcacaaagtgccagcaggctggcgccaccaccggtggctcatgacccatggcaaggagtttcatgggaattatatgggatactcccagacataaacaatgtatcaaatctatacctaattctaattcaatatcatgacaaataa

SEQ ID NO: 78323 - DNA, 3006 bp, Oryza sativa
  Clone ID: PAT_MRT4530_78141C.1
atggcaacggcgtccccttctccattcggccaaccggtggaagaaaagctaggaagaaacaacttcctgctttggaagacacaagttcttccggccgttcgcgacgcacagatgatgggctacctggacggcaccacagcgccgccggcccgtctcatcgacgtcaaagaaggcgagaaggtggtgaaagccaccaatctagagtacaccaagtgggtggttgcagatcaacaagtcttgagctacctcctttcctccctcacgagggagatcctgacacaggtggtgtcaatagaaactgcagccgagctctggaggactctggagaacatgctgtgctcccagacgcgggcacaatccttcaatactcgtgtggcgatgaccacaaccaggaaaggtaatctgaaaattacatattatattaacaggatgaagtcttttagtgatgagatggcagcggctggaaagccaatggacgacgaggagattgtcgcatacatcttggcaggccttgatgaagaatacgacccggtggtctcgctttgcggcaaagttggtcacatggggggcaactgctggtaccgttacaacgaggactttgttccggagaaaagtgcagctgcagcaatccatggcaacaacaccgataccaactggtatgcagatatggcggcgacagaccacatcaccggcgagctagacaagctctccgtgcgtgagaggtacaatggtggcgaacaaatctatacaacaagtggctcagaacttgtgtactcagatgtctggggtcctgccactgattcagttggcagaaagaactattatgtgagttttattgatgattttagcaaatttacttggatatatttccttaagtacaagtctgaggtactccaaaaatttcaagaatttctgagttttgttgagaggcttttagatcgaaaaataattgctatgcaaacggattggggtggtgaatatgaaaaactaaattccttttttactaaaataggaatctctcacagggtctcttgccctcacgcacatcaacaaaatggtgctgcggagcgcaaacatagacacattgttgaagtaggtttagccttgcttgctcatgcgtctatgccactaaagttttgggatgaggccttttgcaccgcgacctatcttattaatcgtactccggccaagacgattaattttgatacgcccctagagcgtctctttcatcaaaaaccagaatatgcttcccttcgcacatttgggtgtgcatgttggcctaatttgagaccctacaattcaaagaaacttgtcttccgatccacgcaatgcgtgtttcttggctatagccgtctctacaaaggatttaaatgtttacatgtatccaccggtcgcatctacatttctcgggatgttattttttatgagaatgtgttcccctttgcaaagctccatcctaatgctggtgcacttcttcgcaaagaaattgatcttactcccggtctttttcttcctttttctgggggtgaccatgtgcctaataatgctaatcaaaatactgtgcctgaaaatatgtctaatgcagaaaattctgcgagttttgctgatgattcggtgcagatttcacatgaaatatcagcagcaacagatgccgcggagcaccagaccgattcggctgctattgactccgctacaggcgctgaatcgacgtcagaatcatcgtctgccgcgaccgatgatccagcaactgacgtgtggagcgcagggggaaattctctcgcctcgccgtcctttgcaccagcgtcgcccaatcctccatcgccacctccctcaccgcatgccgcgtcgaccattgtgagctcgccatctggtacgcgcactgatgaggaagagctggtttcaggatcctctgtggcggaggatacagcggcaaacatccctcgaccacacactaggctacaaagtggtgtgcgcaagcccaatgtttatactaatggctgtgtcaggtatggttgttttacatctactggagaacctgaaagtctagaagaggctttaaaacataaggattggaaggtagccatggatagtgagtttgatgctcctaaacaaaataaaacctggcatctagttccacctgaggatggtagtaatctcattgattgcaagtgggtgtacaaggttaaaagaaaagaagatggcacaatagatagatataaagcaaggctagttgctaagggttttaaacaatgttatggcagagattatgaagacacttttagtcctgtggaggatgtttatatgagacaaccacctaggtatgaagagaaatctaagccacactatgtttgcaaacttgacaaggccctatatggtttgaaacaagcccctagagcctggtattctagattaagcatgaagctgcaacaattaggattcagtccttcaaaggctgatatcttattatttttctatagaaaaggtagtgtgactatctttgtcttggtatatgttgatgatataattgttgcaagttcgtcacaagatgttgttagctctttgcttcatgatcttaagatggattttgccttgaaagatctgggtgatcttaattacttccttgggatagaagtaaagaagataagtgatggtttagttctgtctcaagataaatatacacatgatatattgaagagaatgggtatgtcgacctttaataagatatttgagaaatattcttggtatgggactcaagatacagaaatctcagtctatgcttgttcggagaaaacaacacttacattgagcatgacccccaaggcctcggcgatgaacccaaatcggcccctgctcttctgtgcttgtgccgcttccatgggctgctctgggccacctcctccatccactacatctggtgcgacaatcggtgagcttcagcggcatgtggagccctggatcaagtcgaagccgtggaggcttgctctcaccctgcacaccgacgtgtaa

SEQ ID NO: 78324 - DNA, 479 bp, Oryza sativa
  Clone ID: PAT_MRT4530_78142C.1
atggaccccaaaatgaagcaacttcaaaaagctctagttgacatcgaaactgatgcagagcaacttcttctggcaagacatcagttagtggaaaatgacaagataaggaattctaagggcgaagcgctaacaacgctccggaaaagagctaggacaaccaaaactagtgtgccatctcccttcgaggttataatgaaggagatggaaggaacttctggcaagctgctggttacggagatatgctcgactcgcggaaatcacaatcccaaagaggatacctggctaatgtttccatgatcagatatctttgctcgtgttccatttcatgtagcacacattgtttttgataaagatcaagagcgtctagactacgacaccaagaagctatacagagctttgtgaaggagaaatcatttgtgatctccgagaaaggcgccctcggcatcgtgaaatccctcgtcagccttacaggtaaaccc

SEQ ID NO: 78325 - DNA, 361 bp, Oryza sativa
  Clone ID: PAT_MRT4530_78143C.1
cgggggaacaacaacgatgggttcttagaaccataatctctagcctacttgttgactgccaataagggtttcatccgatgagttgtctggacgttgcatcggcttacaaggatcgcatataattggtttctattggattatattgttttattacattatcattagccgattgcctttatttacatcaagtgtcagactccacatcaaacacatagccgatagctcaaaaccctatcggcatcggctggatcaaactgactgacatgcccgcacctcaccaagattcagacttgcactagagctaagcagatctcccaggccagtgtgtgtttttcgcatcaacagcagccacctagctagt

SEQ ID NO: 78326 - DNA, 531 bp, Oryza sativa
  Clone ID: PAT_MRT4530_78144C.1
caaaagcaatttgttatttgtagaaaaaatcaggatccagccagttcactatgcgaacattgaaaacaggccggctcgggcccggaaaaataaaaaggggcacccaaaacaaaaagaaaacctaacaggccgcccaaacagggcaacccatgtaaattacaacaaaactttttggctcccgggctacgtaaaacggcccaatccttgggtgaaaaaagccccccctggtatcaaaaaagaggaattgttccagagcggggacctccaggaccccctaaagcaactacccccaatgtggggggcttccccctaaacctttccatgaatggaccctgggcctaaaggggggtttaaacaaaggcctttaaagcatcatcagccaacttatgggcctgggtggcatattctacaacagcaaacaagggccaaaagcaacctttccggttctttccccgaggcccaaaccttaaacaagttatggggagcccatctttcccagaaagggaccaattcccaacaacctaaagtaaa

SEQ ID NO: 78327 - DNA, 233 bp, Oryza sativa
  Clone ID: PAT_MRT4530_78145C.1
atggctaataagtttataagtaagccccatgttttcgatggaacggatttttgttattggtgtagtaagatgcaatcttacattatgatcttaatatttggagaaaagtttctaatccttatgtaattcctaatcaaattaatactgttgttttaaaaaatgaatttgaaaataattgcaaagctcacaattttcttttgagtgggatgagcaagcttgagtattctatagtg

SEQ ID NO: 78328 - DNA, 453 bp, Oryza sativa
  Clone ID: PAT_MRT4530_78146C.1
atggccatgcggagcttgctactaacttctttcttccgtgaagaacgtgctgaggctattcggctgcaaactgcagcggcaacctatcacaatcttgactcttctaactgcaagcgtacactgacatcgcatctgggcttgggtcatgatcgcgagttcgcgaccaacaaacggtctcttttgattgggccgtaccggatggcgacgaagatgaagcgggcgctctaccacctgttccacccgcaactgttccagcacagggagaggaaggctgtggaaggcgcggccggcgaggttgaggcaaggcgggaggaggtggacactgaggacgacgcgactggcgaggttgaggcgggattagcggaggcggacgctgaggacggcgcggcccgcggcatcgaagacgagggcgagaagaagggtcattggaatgggcatgcgcggggaaattga

SEQ ID NO: 78329 - DNA, 2331 bp, Oryza sativa
  Clone ID: PAT_MRT4530_78147C.1
tcgacgtcggctcgatggttctacttttatactttgggtcgggtgggggcagacggatttctattttttttttttttttttttagacattacaacatgtgcatactggcacgtcatagctcattaattttcagcgtcaagacaaaagtttatcatcacattacaacaatttcaaattataaaagaacatcacatatagatttgcatttcgtcattttagctgttatatgcactagttctcactttcccccaccactgggctttgcgaacagcttctttggtagcttctccagaggtgttgttttcagaaggaaaagcctggcagcacgctcttgtaaggtgccaccacattttagtccacgattctgcaactctagcttgagtctctccatgccaagtacctccaattctgcagctgaactgtaaattgtcaggtccagtggttcctgtgaaagaggagatatatttccattggcaggttcttctactggaggcgcctctaggtcattaagatgtgatgtggctgaagcagaagcagtgttatcctctgcttttacatctggtttcaacacttcttctgaaagagcactaacaccattctcaggtgtgtgctcatccaccactccaatctcatgctccaccacaccatctgatataaaatcaccgcattcaccttctgacctaattgtaggttccctggactcctgaacaccgtttccattctcctctgattcagagcgtccagacttctcacctgaggtctctccttctgaaggtgattcagtaattgaacccagatcaaccttctcgtcctcacttttggatccatgcgaggaattcccatcatcaagaattatggattttgtatctgcaccctcatcatcatccatttcactgtcactatcgctatcactctcatcctcttgtaccttcttcttgcccagccaaatcttaagcttcttggcatcttccccaccgcgtggcttgggcacggtcttcctcttcccaagagaggcgcgcacagactcctcaaccgcattaacgcaactctcggcatccttgcggtacttctcgaggtatttgtccacctcggccgccttcacaccaccgcgacccgcttccttagccttcttcttgatgaaatcctccgcgagcttctcgagctggcgatctgcggcctcggccttccactcctcgaggcggcgctcggcgttaacgtggcgcaggcggcggccgttgatatcgcggcaggcgtcgaagttgctggtcttcttctggccggccttggaggcggcgccacggaggagcgagccaaacccgcccttgcctccgcggaggcgaaggagcgcggatgcggaggggaatcggccgtcggcggaggaggcgaggacggaggacggcgagacgtcgaggcggccggtgacgaggcggagggacgcggcggggacgcgggagagcgccgagacggcgtcgaggagcgccgcgccggagacggtcgtcgtcgagaagcggaggcagcgtgtgcggccgtcgaggagccgcaccaggatctggtactggttggcctcggccatggcgcgcggtggcggtgctcgaaaccctagcccgcctctcgccgccgatgtcgcctcgcagaatcggagagaaaagaggaggtggtatgggcccactcaggttattgttgcttaaatttaaatgtctcaaattggggaggtgaaggtcagggatgggtccagaaagagagttattctggaggagcaatgcagtaagttgagtgatattttgcactttcaatgggatttctccatcgaaagagttatacgacaggtctaggaatgttaggttggaagatagtgaagttggtataattccggacaagttgttgtgctgaaggtaaagagaatgcagggaaggaatggatgctacatcaggggggaggctaatggtgagacgattggatctaaggctcaacacctgtagcgcgtcaagcttgccaagtgtgtctgaggggatgggaccaaagagccctactgcaggtagacgcaattcacgaacacgcctcccatctggtgtgcatttaatcccaacccacaatgtgcagacttgagtcgtgagagtccagttgagttttcgaccatggggcactgatgcagcaaatgcaagaagggcctgcctgtctgagtttaggtcagcacatctggcacaagggatgtgcagaaacaaaacgaagcagaaagaaaggctatgagcacaaggtgctgcattgttaggattaacttgaccataatgaggaccagaattatcctcgtgccgattcctgcagcccggggat

SEQ ID NO: 78330 - DNA, 184 bp, Oryza sativa
  unsure (1)..(184): unsure at all n locations
  Clone ID: PAT_MRT4530_78148C.1
tgggtgggacgcagctgagaatggagctagntgatgtagttagggcttggcatagttgtgaggatttgtgtgaaatttaggggggtgtttgtaaatggcaagggactcttttgtagtttggagatgtaattgtataatatagcaatgtatgaatgctagatttattctcaaaaaaaaaaaaaaa

SEQ ID NO: 78331 - DNA, 3729 bp, Oryza sativa
  Clone ID: PAT_MRT4530_78149C.1
atggcactcatccaagaaaaagatcaccctgttgaaccctctaaacacatcagtgtggatgatgaggaaatcacttctccgccggtggaagaaaaggcagctgctgcggcggacaaaaagttcccattctttgggctgcttcgctatgctgatggactagattggctgctcatggtagcaggaacaatggggtccttcctgcatggtatggggccttcgatgtcatattacttggtcggcaaaggcatcgatgtggtcgggaacaacataggcaatcgggaggccacagtccatgaactctctaagttaattccttatatgtgggcattggcaattattacacttcctggtggaatgattgaaattacatgttggatgtataccagtcagagacaaatgtcacgcatgcggatggcatacttgagatcagtgctgagtcaagatatcggagcttttgatactgacctaaccacagcaaacgtcatggctggagcaaccaaccatatgagtgctatacaagatgcaattggtgaaaaggtgggtatgctctccatgctggttgttcctatgctcctcatggttggcgcaacatatgcaaaaatgatgattgacgcatcgatgaaaagaatagctttggtctctgcagcaaccacagttgtagaacagactctttcacatatcaagactgtcttctcatttgttggagaaaattcggcaatcaaatcattcaccaaatgtatggacaagcaatataagctaagcaagatagaggcaatgacaaaaggactaggtttgggaatgttacagatcgcaactttctgttcgtattcattaacagtgtgggttggagcagctgctgtagttgatagatctgcaaaaggaggtgaaacaattgcagctgtcattaacatcctctctgccgcaatatatatctcaaatgcagcaccagatcttcagtccttcagccaagcaaaagctgctggcaaagaagtatttgaggttatcaatagaaatccagcgataagttatgaatcaaatggaacaatcctagaaaaggtcactggaaatattgaaattcgagaggtggatttcatgtatccatccagagtcgacaagccaattctcagaagtttttcactatccataccggcaggcaaagttgtggctcttgtggggagcagtggatgtgggaagagcactgtgatttctcttgttcaacggttctatgatcctatatcaggtaatattcttatcgatggtcaaaatattaaggaacttgatctgaagtccctcaggagaagtataggttctgtctctcaagaaccatcactattttccggtacgatcatggataacttgagaattggcaaaatggatggaactgatgaagagataattgaaatagcaaaatcagctaatgtgcactcctttgtatccaaactcccaaaccaatactcaacggaggtaggagaaagaggtgtgcagttatcaggaggtcagaaacaaagaatagcaattgcaagggctatgctaaaagatccgccaattcttcttcttgatgaagccacaagtgcacttgattcagaatcagagaagttggttcaggaagctcttgatggagctatgaaaggaaggacagttattttgattgcccacagaatgtcaacaatcataaattcagacaagattgttgttgtggagaatggaaaagtagctcaatctggaactcatgaagaattgctggagaaaagtccattctactcgagtgtatgcagtatgcaaaatctagagaaggaatctggcaagagtgaagaaagatttactgatcaggtcagagaagaacaagacaatggaagtggaacaagcaatgagccgtcttctactgcacatgaacaagagaagagtctagaactgaacccaaaccaaccgaagcaggatatcagaaacagagcatctgctttctacagaatgttccttggaacatttatgctggagccaggaaagattcttctgggctcaacagcagcagcaatctctggggtctcaaagccaatatttgctttctatatcatgaccgttgccatagcatactttgacccggatgcaaagagaatagttgccaagtactcgataattttgttccttattggattgctcacatttttcagtaacatcttccagcactatatatatggccttgtcggtgaaagggcaatgaataacctaagggaggccctcttttcagtcattctgcagaacgaaatcggttggtttgaacaacccaagaacagtgtcggtttcctgacatcacgcgttgttggtgacacctccatgattaaaaccatcatatctgatcgaatgtcagtgattgtgcagtgtatctcttcaattttgatagctacaggattaagcataggagtgaactggaggatgggtctggttgcatgggctctgatgccatgtcagttcatcgctggcctcgtacaagtaaggtcagcaaaaggttttgccactgacacctctacatctcaccggaagctcatctcactcacttcagaggctgttagcaacattcgtacagtggcctcttttggtcaggaagaggaaatactaaagaaagcagatttgtcgctgcaagaaccaatgcagacaagcaggatagagagcataaagtatggggtggtacaaggggtttccctctgcttgtggcacatgacacatgccatcgcattgagttacaccattgtgctacttgacaagagcctagcaacatttgaaaactgtgtacgggcctatcaagcaattgcactgacaataacttccatcacagagttatggtctttgatccctatggttatatcggccatcgcaatattggatcctgcactcgacattctcgacagagaaacgcagatcgtgccagatgaaccaaaagtgcattgtgaagacagaattactggcaacattgagtttcaagatgtcagtttcagctacccatcaagacaagatgtgatcatattggatggattcagtctagctattgaaccaggccaaagggtagcattagttgggcccagtggtgcaggaaaatccacaatcgtatctcttctgctaagattctatgatccttgcagagggcaggtacttgttgacggtaaggacgtcagagaatacaatctgaggttcctaagaaaacagataggactagttcagcaagagccaatcttgtttaatttgtccataagagagaacatcagctatggaaatgaaggtgcatcggaaacagaaatagttgaggctgcaatggaggcaaacatccatgagttcatcagtggcctgtcaaatgggtacgacacggtggtcggggacaaaggaagccaactttcaggagggcagaagcagagaatagccattgcaagaactatactgaagaggccagtcatactactcctagatgaggcgacaagtgcgctggatggtgaaaccgagaaggtggtgatgagctccctggcagcaaaggagtggaaaagcaaggaaggtgagctatcgaacaagatcacgagtatcacaattgcgcacagactatccacagtcacaagtgcagatgtgatcgtcgtgatggacaaaggcgaggtggtcgagatgggcagccacgaaacattggtcacaacaagcaatggcgtttactcaagattgtactgtatgcaaagcaaaggaatgaaagactga

SEQ ID NO: 78332 - DNA, 307 bp, Oryza sativa
  Clone ID: PAT_MRT4530_7814C.1
gccgtaccaccgtccggcgacgccgcggcaactgccaaccggcggccccgcgccccagatgatcgaagtggaaccacacagaccgggaacccagcccacgcggaagaccgagctcagccgcgccaaccgaagtgctcacgcacgagggacccctgcctcggtgcggcgtatacagtctcggggcccgggcgcggagcggaaaagtagtccggcggagatgagcaacaggcgggcgctcagtgatggactgggagaggtagatgaagcgagagtggagatgccgagatctccgctcaaaaccgtgtag

SEQ ID NO: 78333 - DNA, 1512 bp, Oryza sativa
  Clone ID: PAT_MRT4530_78150C.1
cttctttttctttttctttttttttctttttttctttttttttttctttttttttttttaagggctaaaaaataaattttattatctaagggccggggaggcgaggtctttaccatacacatactaattacctaccaataacaccaaaaaagcctgctcccccggggttatgtcttctaaaaaaaaaaattgggttttcctaccctgatgttcaactcctgcaagaaacttgaaatggcgtttttttgccatccttagaagcttttttgatcaatatgggcaaaaatctctcctcctggaaaagccgtttttgtggcttcataaaaaactttaagggaatgcttccacataccgccaacgtaagccacatttttaccattcatctgcttgggttcctccattggcaaaaaatacccaaaaagcaaggggcccacccatacaccatttttcgttacaatatccatatgacgaggagcataatgacgggttttttttttttttttttgttttaaataattcccatgccaattggactcaaatctaccaaaataccgatgggcattgaactcgaacattgatttatttgatacaacatgctagtacactacagatgtatcactttgtgcaattaccaggtccaccatataatagacgggctccatcatcgttgaacctgatatctccagcatcatagcagaatggtctagtactgcctgaaaatgtgttgtgtgtgcctggaatgaagtactggctgtctttgttgatgactttgatactcctcacataggcagctttcccaggtccagtggctgcccaatgtccactgcccagttctggaaggtgtaattgaactgttggtccatggacttgcccaccccaaaaacaagcacttgctttttcattcatgtaggtgaaaattgaaggaggccaatatccaagtggttttttatcacgcccatatgctagccaccaatttccggtcttcgggtcctttgatatagtaacagtaatttcatactgatctccattataggtagaaactggttcaattctcccaccaataccaacactcgtactgacttgtacaaagccaggacacatatgatcaaagcatggcatgttcaccgtattaacttgccagtatatatgaaatctggcaaagttgtcaccatggtagtttggccatacccttctctcgctcctccggccgatcccgacggctaggagctcgccgccatcatggtgcctagccaccgcgacgatgctgctgggggaggcttgccggggacagctgtggatgggtagaagcgcggcgagaccgaggccggcatggcggtcgttccgagaccccatggcaagcagcgagagtgcgctgagcgccacgaggaggagcagcgccgcccgtaccaccgtaatgtacgacaacttctccccgccgctctttcccctcctcctcctgcagctatgtctgcacatcagtgcacatggattgccggcggcggcccgcggcat

SEQ ID NO: 78334 - DNA, 801 bp, Oryza sativa
  Clone ID: PAT_MRT4530_78151C.1
atgcccacgggagctccagtgcatgcaccgagcgccgtggatctggaccacgccaagatgagtcgtcgcgccaccagcttcccctcgaggtcctctccaaaatacctcaagatttcccaatattcgtccaccggagatggagattgccttcgtcttctccaactccggctaaatgccgccgtggccgattccttcctctccggtgagcatccttttgatttctatgatcctagagacatacatgcatggcagatagttgaaggaaaacaagccatctctgtttgtctgagaaggtgtgtcaccgttgggaggacatttaccgcaaaggccagtctgaccgccattgtgtggccggtcagacaggacaatacactgcggtcagaccatgtgtctaaggctgaattagctatatggaggagaaagagccgagccacccctcaaataggggaaagcttgcccttcgacgactgccccagaggcgacaagttcgcccagatcaccctccttgacaaacaacttgcccaagaagctggacaagtcatccggcatcgctccgagatcgggcccggttgtcgcggccgaagcagtcttcctaggagccatttcggcttgagaagtggcgaagctacaaaggagagatatagcgttgtctctgatctcgccggatgcggactcgaggaggaaagctaccctgttgtcgactacgagtcagaccttcagaccgccatgcatgccatgaggaccttcgaccatgtcaccgaaacgccatccacaaccaccaaggcgtaccacatgcggtag

SEQ ID NO: 78335 - DNA, 745 bp, Oryza sativa
  Clone ID: PAT_MRT4530_78152C.1
cgcactccgcacacacacacacacaccaacacacgcacacacgctcacatcaccacacgcaagctccacatcatcactcgaacaacaacaaacatctcccccgcatcgcgcaacggatcggcagcgagcaactctctcgcacaatcaacgcaacagctcaaacatccgaaaaatcctagctcgtgctgattcatacaacccacgtgctcggcaagcgatcctcaacctgtcaacaagcccagcaagtctcccccattccttaaaacctccattccaaaatcgaagcttgctcacccaccagtacacaccctcaatacccaccaaatcgcctcattcctcctccacccattcctcggcaatgtcaaatgctcatagtttggtctatatgcatccacacgggcacatctcccagcttcaaagttcgtttaagttaacctccttcgcgcaaacacccaccccgccgcctctcccgcaatcgggttgtttcccctttcccgccccccctcgcgcaacacaccctaattcgaaatcactctcccacaaacattaatgctgtctcgcaaccaaagcaccagcgtgaacgatgccaatatattgcaatccacaccaacgctaacgcctttgttagccaccttgcacgaaaaaaactcagtattccgcgcccttaccagtcgatgtggtcgctaatgcttaacgcatctcaccggagccagcccgaagcatccagaacaatacggagaagagc

SEQ ID NO: 78336 - DNA, 258 bp, Oryza sativa
  Clone ID: PAT_MRT4530_78153C.1
atggagcttgttaattccaccggatccacacctctggaggctgatggcagcataaatccgccgccactgtcattgtctctgctctcagtgcccaccgacagcggatccgtccttcacaagactggcaccatcaacgccgccactactggggtcacaacgatcaatgttgccgctcgcatgcatatcggcagtggatccatcattccagaggctggcatcgttgtcgtcgctgcttctgaggttgttggccgccgttga

SEQ ID NO: 78337 - DNA, 423 bp, Oryza sativa
  Clone ID: PAT_MRT4530_78154C.1
cactactcgtcatagtactaatgtatgttcagtttactgacaaagtacgctatctgggcacagtttactgacaaagttggttaaattaaaactaccaccatcacactcattttcagcttactaatgtatgtctagtaaagttgttgacatgatgcatgattgagtagtatctgagcacttagaggtgtactatccgcttcatgtttctcaggtgtatgatcagatgattgtatgtgaactagatatttattactaccttcatacgttacgatacggagggagtattcattatcgcgtgatgcctgcatcagctgatatctgtgtagagctacgacctgactctcaccgtctctgtttctgcaggcacagcaacaccagcagcgtccaccacctacacggactcgggaggtgaaccctgcaccg

SEQ ID NO: 78338 - DNA, 492 bp, Oryza sativa
  Clone ID: PAT_MRT4530_78155C.1
atggtcggatgtcctgagcacgcagctcgtcaggatactaagaggtctaaagctgtaattatcccattatgtgagctagtggcgggaggaggtggcgccgacgtagcgccaggagggcaccaacgcgaggcggcgccagggcaacacgtggacggcccagatcgccccgaagggggatcgggcggccacggcgagagtgaggcggccaaccggccggctgagcacaccgcggcgcggcagcgacgcgccggcccaaaggccaccggcagcgagctgcggcgggcagcacggggagcacggggagcggtggaggagggcatggagggggatggggagctcaccgagcgtgcgggccggcgaggaagtgcggggagtggctggcggcggggactaggcggtggagcttgtcgggatggctcggcaatgacgatccggcggtgttccgcgagcgggaagcagcggacgagggtggatgcgacctggggatcgtga

SEQ ID NO: 78339 - DNA, 2691 bp, Oryza sativa
  Clone ID: PAT_MRT4530_78156C.1
atggcgcccaccgccgcggttgccgggggtggcgtggaggcggaggcgctgctggggctgctgcagcgggtgcagtcggaggcgctgcgggcgttcgggccgaacgacttcgaccccaagctctacgtcgacctgccgctcgccgccgacgccagcgcggcggccgcgctggcgtcgctgccgcgggcggcgccgtcgaggggcgagatggaggcctacatctcgaggtacttcgcgctggccgggtccgacctcgtcgccgccgccgacccgccggacttcgagcgcgacccccccgggttcctgcccagggtggagcgcgccgaggcgcgggcctgggcgctggaggtgcacgcgctgtggaaggacctgacgcggcgggtggcgccggccgtcgcggcgcgccccgaccggcacacgctgctgccgctccccggcagggtggtcgtgccgggctccaggttccgggaggtctactactgggactcctactgggtcgtcagaggtttactggtgagcaaaatgtatgagacggcaaaggatatcgtgcttaatcttgtgtatcttgttgagaaatatggttttgttctgaacggggcaagatcgtactacactaaccgaagccagccaccacttttaagctccatggttttagacatatacatggcaactggtgatatggcttttgtgaggagggtatttccctcactgctgaaagagcatagtttctggatgtcagaggttcacaatgtggcagtaatggacaatcatggacgggatgaggaatttgcttcaaaactttctacggctgctaaagaaaaattctaccaccaagttgcttctacagctgaaacaggatgggattttagctctcgatggatgagggattctactgacatgacaactctgacaacatcttgcataatacctgtggacttgaacacattcatattgaagatggaacaggacatagctttctttgctaaactcattggagagagcacaacatcagaaatattttcagaggcttcaaaagcacgccataatgcaattgattctgttctgtggaacgctgacatggagcaatggcttgactactggcttcctactgatggaaactgccagggagtctaccaatggaaatctatctcacagaaccgcgccatctttgcttctaattttgtacctttgtggttaaatgctcaacattcaggcttggagcaatttgtcgatgaggcaaaatcagtgagagtcatgagaagcctccagaaatcaggattactgcaacctgcaggaatcgcaacttccttatcaaacacagggcaacaatgggattttccaaacggatgggccccgttgcagcatctgatagtcgagggattgttgaggtctggttcaggagaggcaagggaacttgctgaggacattgccacgaggtgggtgagaacaaactatgatgcctataaggctaccggcgcgatgcatgagaagtacgatgtggtgacctgtggaaaatctggaggtgggggtgaatacaaaccccagatgcagaatgtggctaggctaggcagtcgcctctgcctcggcaaaaccatggcccggggagtagggcgctgccggcgaaggtcactaccgcaaacaagtaggccgcagcgcgtcgctttgatggacgccgccgccggtcgcgatccggcggacgcggtagaatctctcagcgagctcgcactcgtgcctcgcaggagcagaggggaggagccagagccggccagcgaggaaggaggcgcatggccctggtcatgggctcatggcggcgcgccggcggcgaggcgggatgtccgagcaaaggggattgttttgcaaagtgccgttgccaattcaccttggatggatcagatccgcctatatttgaatgcaaatgctaacctatgctcatggaaaattaaagggttagagaaaggagggttcctcggcttagagggaggcgggggaggccttgtgggcgctggtgctaggaggacgaagagggtgccagtggagccgcagggatggaggacggtgcggcgagagccaccaaagacggagaaggatgggatgggggtgctcgctgtagctcagcgagaaaccatggtgggtgatggttggtggagggctcattggcagtttcccgacaccgaggttgctgacaccaaagaccatccgcgcggcggccaaagcaagcagtcccaaggcatccagctcgtgcccctctccctccgccacgccatcaagcggtaccttcgagaccaggacaaggcacagatgaacctgaaggtgttgctgctctcggcctccttcgagcgcaccaagggaacctgcaccgagctagccgcgactgccacgggcggcgtgctcatcgatgacctgcgtgcgccctcgggctctgagcagcaagccgcgcggtggaaggtgcggtatgcctatggagatattggccttcagtatcgcgagtatgagacggtcacgtacgttgcctcccggatgctggccatctatgccgcgtgccaccgtgtgctccatgaggttcgtcggaggttatcagatgttgcgcttgccaaagtgttggatttttccactcctctcgagggttttttccacgccttcggactagatgatcttttcccaggtctggacaataggggaaccccgtggtga

SEQ ID NO: 78340 - DNA, 348 bp, Oryza sativa
  Clone ID: PAT_MRT4530_78157C.1
atgccttcgcccggaagccaagccacgattggccccttggtggggcccggcgccatcccccgcctgacacagggggaggcaggcctgtcattcgcccttaaatgggcaaagaccggtggccgctctcctctgacggagaggagtccagatggtgttcttgatgtgacaatacgtagctacctccactccgccggggacaaaaaaggcgtggaggactgttgcacgcctatcggacgtgaccgcactaaatgctttgaggggcggttggggcaccggccattaatgaccgcccagcctgatcctccctcgcccatgcggcagctgggcaagggcctcgggcttaggtga

SEQ ID NO: 78341 - DNA, 720 bp, Oryza sativa
  Clone ID: PAT_MRT4530_78158C.1
gtccctctattcataatttcctaagttttggaaggttattaagaacataagaaccggcatgatacattattagaaaatatcttattttcagcatgttacagtaatatactcaaaatcgtctggatatatacctctgcagcaacatgcggacatggcatatggaatgctttattttgttgatggcatatttcacaaaataaccatagaaacttaatttttggcttccccgaatgcagacttgatctctcttttgaaaaaaaaaggattatagagaggttaagaattatttcaaaaaaaaaagcacacatgtctatcacttagatgttgatgccactcttatattcagagccagccgtaaagctttcggggatgacgtcatcgacgacacggtagccgccgttcttgacaaggaagcggacggagaaggggcccttgagtgccgcctcactcttgagcgaccaggtgttagtcgacgactccttgagcgccacccagtccttgccgcccttctccttgatctccacctcagagatggcgacgttggtgacgagctctagactttttccgctagagccctcaccgaccttgaaggcgacctcagtggcgcatgagccaacgaccaacaatgccgccactgccacggcgagccggaaggagtacaacgaggccattggcgagctagctagtttgttggtgttgtctttcttgtttcttgaaagg

SEQ ID NO: 78342 - DNA, 1229 bp, Oryza sativa
  Clone ID: PAT_MRT4530_78159C.1
atgaaggcacttgtagcagcagcagcagccctccttgctcacctcctcacagcagctggtcatcgtcgcagctaccattgccaccagttagcacagccctcgcatcgggcctggagtggcgcaaggccagcattgtcaccgccaaccaagggcttccccgcggccgctagttacgttcctcctcttcgtcgtgtcaccactagctcaggcagtatgaggctactcctccccttcaccatcactgacacccctacccttctccttcgccgcagtcgccttcaccaagccctccgccgaggctcgccctcgagcttcaaaggtgacctcattgtcgctgccctcttctgagttgggcattaaagagctattgccagcttacaaagatcaggaccttgaactaaatgacctacttactggtgtggcctttgcctcaggaggcagtggatatgatcccctcacttctatatcgactgccatatcgagttcaggacaactcaatttattcagtgactacaagcagaagcttacatctttgatcggagaggaggcaatgacacgtattctctcagaagcagttttctttactgtcatgggagcaaatgacttgctcaacaattattttacgcttcctgtgaggcggcatcaatatgacattcctggctacgtggactttgttgtctctaacgcagttaactttactctgacaatgaatgagatgggtgctaagatgattgggttcgttggtgttccaccacttggttgttgtccctcacagagaactggtccatcaagagaatgcgaaccattacgaaatcaagcatcagaattatttaatactagaatgaagcaggaaatcgatcgactaaatgtcgaacataatattgatggtttaagggttgtttattttgacatatactacaatttgctcgacctgatccacaatcctggttattatggtttcaaggatacatctgatggatgctgcggcaacacagtgctaaatgctgctatattcattaaatatcacagtgcatgtccaaatgtttatgattatattttctgggatagcttccatcctaccgaaaaggcatacgacatagtggttgataagcttatccaggaaaataagcagtatctgatgtaaatgaaatatattatcttatatattacatgtgcttaaacggaatatacaacgcctataaatgtattctataagttgatttccaatt

SEQ ID NO: 78343 - DNA, 567 bp, Oryza sativa
  unsure (1)..(567): unsure at all n locations
  Clone ID: PAT_MRT4530_7815C.1
tatgcttccggctcgtatgttgtgtggaattgtgagcggataacaatttcacacaggaaacagctatgaccatgattacgccaagctctaatacgactcactatagggaaagctggtacgcctgccaggtaccggtccggaattcccgggtcgacccacgcgtccggctgtcgatagtcagatcgtcagggaaggcctccattcttcgtgctctacccgttgacgtggtcgccaatgcttataggctttcaagggaggactctaggcatgtaaagttcaaccgcggcgatgagatggctgtctttgctccgaggcgtgggccgcaacagtatgctgagtggcagatcaacgagaagtaaactaaatgtgtaacgatcttactgtaatgaataatgtgaagaagttcccctacaaaaaaaaaaaaaaaaaaaaaaaaaaaaaaaaaaaaaaaaaaaaaaaaaaaaaaaaaaaaaaaaaaagggaaaaaaaaaaaaaaaaaaaaaaaaaaaaaaaaaaaaaaaaaaaaaggggaaaaaaaaaaaaaaaaaaaanagggggggggctttt

SEQ ID NO: 78344 - DNA, 749 bp, Oryza sativa
  Clone ID: PAT_MRT4530_78160C.1
ttttttttttttttttttgggaaatcaaatccacacaatcatcttaatgaaagctgaccaaatatatttttttcgatacatcttctataaacaacatatatttaaaatcgtgctcacatacagctccacaacaatattttggaaccacgcaattatgccttattttgccattggcctattaccaaaaaaataaccataggaaattaattgtttgctcgctcacatgcgacgcgatctctttttagacaaaattatatagatgttaatgattcccatgcaacccaatgcaagagtacgcatgtctatgaattagatgttgatgccactcttgtattcagtgccggccgtaaagctttcggggatgacgtcgtcgacgacacggtagccaccgttcttgacaaggaagcggacggagaaggggcccttgagggtcgcctcactcttgagcgaccaggtgttagtcgacgactccttgagcgccacccagtccttgccgcccttctccttgatctccacctcagagatggcgatgttggtgacgagctctagactttttccgctagagccctcaccaaccttgaaggtgacctcagtggcgcatgagccgacgaccaacaatgccgccactgccacggcgagccggaaggaggacaacaaggccattggcgagctagctaattttttggtgttatctttcttgtttatgtactggtagagggcggacgcgtgggtcgacccgggaattccgg

SEQ ID NO: 78345 - DNA, 750 bp, Oryza sativa
  unsure (1)..(750): unsure at all n locations
  Clone ID: PAT_MRT4530_78161C.1
ggacatatatatgtactaaaattttgagaaatcaaatacacacaantcgtcttaatgaaagctaaccaaatataacatttttccatacatccactataaacagcatatatttgaaatcgtgttcacatatagctccacaacaatgttttggaaggacacatgtatgccttattttgccactggcttattacaacaaaataaccacaagaaattaattgtttgcttgctcacgcatagcatgatctctttcaagacaaaattatttagaggttaataattatcatgcaacccaatgcaagaatactcatgtctattaattagacgttgataccactcttgtattcagagccggccgtaaagctttcggggatgacgtcgtcgacgacacggtagccgccgttcttgacaaggaagcgaacggagaaggggcccttgagcgccgcctcactcttgagcgaccaggtgttagtcgatgactccttgagtgccacccagtccttgccgcccttctccttgatctccacctcagagatggcgacgttggtgacgagctctagactttttccgctagaaccctcaccgaccttgaaggtgacctcagtggcgcacgagccgacgaccaacaatgccgccactgccacagagagccggaaggaggacaacgaggccattggcgagctagctagtttgttggtgttatctttcttgtttcttgaagggtagagcccacgcgtccgcccacgcgaaccg

SEQ ID NO: 78346 - DNA, 1013 bp, Oryza sativa
  Clone ID: PAT_MRT4530_78162C.1
catactgtcatacgaaagaagataaacgagcttcattgatatggaaatacatatacatatgtactcaaactttagaaaaataaaatgtaagaaactatctagatgaaggttcaccaactatactttttcccacaaatattatatacgtaatatactcaaaatcgtctggatatatacctctgcagcaacatgcagacatggcatacggaatgctttattttgttgatgacatatttcacaaaataaccatagaaaattaattattggcttccccaaatgcagacttgatctctcttttgaaaaaaaaggaatcatagagaggttaagaattatttcaaaaaaacacacacacaaccatatattcgaaatcgtgttcacatatagctccacaacaatgttttggaaggacacatgtatgccttattttaccactggcttattaccacaaaataaccacaagaaattaattgtttgcttgctcacgcgtagcgtgatctttttcaagacaaaattatttagaggttaataattatcatgcaacccaatgcaagagtacgcatgtctattaattagacgttgataccactcttgtattcagagccggccgtaaagctttcggggatgacgtcgtcgacgacacggtagccaccgttcttgacaaggaagcggacggagaaggggcccttgagcgccgcctcactcttgagcgaccaggtgttagtcgacgactccttgagcgccacccagtccttgccgcccttctccttgatctccacctcagagatggcgacgttggtgacgagctctagactttttccgctagagccctcaccgaccttgaaggtgacctcagtggcgcatgagccgacgaccaacaatgccgccactgccacggcgagccggaaggaggacaacgaggccattggtgagctagctagtttgttggtgttgtctttcttgtttcttgaagggtagagcggacggacgcggggtcgacccgggaattccggccc

SEQ ID NO: 78347 - DNA, 219 bp, Oryza sativa
  Clone ID: PAT_MRT4530_78163C.1
atgatgagagtaaagaaggttttcaattttatttcaattgaatggttttgctcacgtggcaacctagtggttcgcctgccacggcgagcgcggggggaggggctcatcaaccgtgatgcctcctctatggtcggctctgccgacagtgatggctgctactcagcggtagtgtcagggtgcttgagctcgtcatgggaggagacattggcggtggcttga

SEQ ID NO: 78348 - DNA, 330 bp, Oryza sativa
  Clone ID: PAT_MRT4530_78164C.1
cgtataggcacttcttgggtgttggaccgttttggaagcactcggaaccccgttgtagttttctgatggggttaatcctaactgggcccgctgtctccttatgttcttgcctgaggagaaaggaccgcgctgtggtgtttgtgaccacgggctgcacaggggctgatgccctgtgtgtatgagttggcgccaaagtgggttggggggggtttattgtctgcagatgcactggttgtggtgttgggttgtgtgggtgtgtggtgtggggtgttggcggaacacagaacctggggtgtgcctgagaacttgagtggtggtggtggcggtgtc

SEQ ID NO: 78349 - DNA, 268 bp, Oryza sativa
  Clone ID: PAT_MRT4530_78165C.1
ttttgtggtgtttttatgtttatcattgtgttttgtatattttttaaggaaagcgcgttttttgatttggtatcagggtggtgataaactaatcaaggatccattaaccacggttgggacacaccagggtgtgttttaacacattaaagaagggtaatgcaggccaattagagtatggagcgtaacaggtcaagggggctcctgcccagaaatgattttggccaaactttgcaaccgggggaagcttgtgctgggtttggcggaaaca

SEQ ID NO: 78350 - DNA, 225 bp, Oryza sativa
  Clone ID: PAT_MRT4530_78166C.1
ctattccgttagggatatggactgtactttgtaatacagaccccttcccctatataaggaggggtccgggtacctcttggggcgcgattttctcccgacgtcgccccacccgcgcgtcgccgattccccatacacgatttctctcctctcccgcgccgcccctccatcgtcgtcgcgtgaagtcctcgtcgccaccgccgccatcgaatcctgccgccccgccat

SEQ ID NO: 78351 - DNA, 210 bp, Oryza sativa
  unsure (1)..(210): unsure at all n locations
  Clone ID: PAT_MRT4530_78167C.1
ttcccggggggacccacgcggccggctaatatttgtccatcccggcaacaactggccacagggcggtgtggactactccagggccgcagatataccttggacccttaggcgnggagagcaccaccagatggcgagcacggggcgaccgatgctgctggcactgatcctattcacagtgacggtgtctatgctggagatgtactgggccaa

SEQ ID NO: 78352 - DNA, 493 bp, Oryza sativa
  Clone ID: PAT_MRT4530_78168C.1
gcgaagcaatattgtgaagaagatcgttagtaacactgtctgaatagttattgggtgatatatgagaagatacagaagaatgaacatagtgaagaggataaaattaaggactgaataaaggactgagtacctgactcagtgggtgatgctgacgttgattcttaaggctggtcatcaggtatcataaataatcacatgaaaaaacacaaaggagtgaaacaaagagatacacggaatgatgtactagctgatgagctaaacaaggatcataacaaggcagatgctaaggaagcaattatactggcaatgctacagacattgctcgataaggtgttaaactactgagtaatctatagaaagatgaatagtgagatggagctagtgatggagatatagtcaaaatgcccacagatgtgcatatacatgtatatatacaggtttattgacagcaaaatcgtggactagttcgtggagagtaactgcaaagtcaaca

SEQ ID NO: 78353 - DNA, 488 bp, Oryza sativa
  Clone ID: PAT_MRT4530_78169C.1
cccgggctgcaggaattcggcacgagccccctttttttttttttttttttttttttttttttttttttttttttttttttggtggtttgccatgtaatttatatgcgttttcaatccaaccaaaaatatcttttttttttttcatcatgtctgaaatcaattacagaacatgcattcatacaaagtcatctatataatgtattcatacaagtaaccagcagaaaacgaaaatcatcaaaagtaggctacacaaacacaatttctctctaggatcagcacatgcatctgtacaacttgtctatcttcagcaaaatatgaagctttgtatcttcagaagaatattgcacctacaacaaaaatatgcagcttctgccaaaaacatcctggtaattgcactctatattgccagaacagctgcaataggcaagcaactagctgcaatatccttccaattcagtcaaatgacgttgcagtcacttcatcttggg

SEQ ID NO: 78354 - DNA, 672 bp, Oryza sativa
  Clone ID: PAT_MRT4530_7816C.1
atggtgacaggaggcggagaggaggatggcacgacaggtggcgactggtggggagaagaggcgccgggacgggcggcgaccggcgggggcgccgggacgggcggcgaccagtggggagacgcggggcagcacggccgtgggcggcagcggcggcgaggtcggtcccctcctcgagggagacgtgaggcagcacggctgtgggcggcggcggctgctgttggtgatggcatcgtcatcgtcactacacgctcctcatcgtcgtcggctacgggcgtcctccaacaacggcgccaggagcccccctgggccagacaccatcgcggcgaggatggcgacggctcgacgttatctgcccgccctcgctccaccccgcttcggccgccgcccgccccgcttcaccccgccggcgcccgctccgaccaccgacgacgcggcggcagcggcgaccacaggtccatcgcgcgggagcgccgccggccgagtccacgcgggtctcctccccacgcgccggcggccggcgtacacgaggtccacgatgacgtgcaggccgtctccgccagcgcggtggcaagcggcaagcgcgccagacctccgcatcgtcggcgccgctcccacgcgacgctcgccgactccaaccgccgccgccgccggagagggaagaagagaggatag

SEQ ID NO: 78355 - DNA, 551 bp, Oryza sativa
  unsure (1)..(551): unsure at all n locations
  Clone ID: PAT_MRT4530_78170C.1
cccgggtcgacccacgcgtccgcatcatacgtcctcctcgattgctcctggccctgattccgatccactccgaggcctcatggcggcgaccgattctcgtcgccttgcagacctagatgtcgacgagctggaccgcctcctcccgttgatcaaggtcacccccttcgccgcgcaccgcacttctgcccccagaggatgtggtgctcgttnggcggcgccgaggcggatggaggagtctcaggcctcgtcggagaggactccaaatcccccccacaatcgctcagtcgcctttggacaattccaagaaagactccgagaaagctttacgcagtaagtacatgattttatcatacaagaaaagaaaagcaagcaaataataaagccaataattgtgggaagttaatttactcacttatgggggtggcatgtattacccgacccatcattaataaaatggttataaggtagagtatatctaccttccagcataaaaaaaaacttatgggggtgccattgtccaaagaatgagatctggggtcgaagaattacga

SEQ ID NO: 78356 - DNA, 657 bp, Oryza sativa
  Clone ID: PAT_MRT4530_78171C.1
atgcagcaaccaagtgttggcatcgtcgtcccaaacgcctgcagccacccgcgaaatgatgccgtgccccgtgcaggatcatcgcgctctcgccgcagtagcctgcacctcgccggccgccactcgcaccgctgccatgcacgggctctctgcgctgccccggacctccattcccgcgaagctatcgtctctgccaaagacaacaccaaccaggatgccaaattgagggcgcgcaagttcttcgagttggagatgagcgtcagcgattgcgacatcgacccttacggcgttgtcaacaacgctgtctatgctaattacgtcgaacgagcacgagaggaactggctgcaattcttggagtgagcgcaagaacggtagcatgcacaggcaaagcgttggcaatctctgagcagaatctcaactacctcgcccctttgaagcgtggggccaagtttgttgtaaaggtgacactacatatcaagggtgtacggatatacgctaagcaattcatcgagaccctgcctgatcgcaagctcgttttggaatcgacggccatcatcgtctgcctcaacggagaataccgtccaactcgcgtgttcccggagctgtcctccaagttgcttgacttcttctcgccccaggaaagctgtagcgattaa

SEQ ID NO: 78357 - DNA, 3252 bp, Oryza sativa
  Clone ID: PAT_MRT4530_78172C.1
tcaacaaacaggttggttgcggtgcgctgttgcagacggtgccgctcccctacgcaaccaattgcagtggacctgaatgaaccggagacgagactctgcagtgtggcgatcgtcgaggaagaactgatgccagcatgcgtcgtcacggaacagttgggctgccatgtaccacaactcgctgcccggggggtatccatcggcctccaccatgtccatgcaagcctccaagcctctcaccttcttctcctcctccctttcagcgaggctctccatggactcgaccctcgaatcatcagctagcctgtggagagcctcgtcgctggagtcactgcatgtcctgctctttgaagagctccctgaagttccactctcagtggcagaaggcctcttgcccttcaccctggctgcagccgatggtgggggtaggggtggtgccctaatgtcctccacattgatcattggttgatgtgctggttgctggtcaaccactggttgtgctccgggcacattggagtgatcctcgacgaccatgcgtccttggaaaacagcatggtgctcgtcgatacacttgagaggagcatccttgaatgccttcgctcctttcctttccgactcctggctttcccaccacttgtcgggagcgaggatggcctgagtcaccggatcacgtgcaaatccggtagccttggattccagccaagtttgcttcttggttactatctttcctgccctctctagcatcttcctctccaaattgatgaacccttgtgcttcgggggacgaggagatgatgttgcgtgcctgaatctcctccaagcaactctggaggaagacacgaagctcttcctcggtccaatgtgttcgaccctccgcaatcttccttgcctcgccagacgggacgaggtcccaatcgatggcgcggaacactgcttccggagtgagtcgctggacgaacgcgaggagggcttcgggcgacctgacgacgacggcgatgaggagccgcgaagcagcctcggctgcgtcgtcttgggtaagcctcgtggtggcgtccgacagcagcgagtcgcacgacccctgatcggaatccggatctgccaccaccaccacccccaggcgccggtcagccgagccacgagacccggatggaggagacggcggccgccctgctccgatgatgcccgggtcctcctcggctagcttgcgtttcttgctgcctctcgccgccatggcggcgacgggcaatgcgctgggcgacgacgacgacgacgacgacgacgaggaggcggatgaacgaaaggggaacggaaacctcgctaacggccgtcgaccgcgtttaatgctcgttgccgccgtcgcagcctcgctggggaagaaggggggaaaaggggggaatttcgcgcccaaatgtgggccatgagcatcattcgctcgttgtatcttctccatgacctctccagttggattcacaagtataagctctagtccatgcttctctgttgatttcttcaagtcgatgaggaacgatatgccacttgtatcaattgcagggacagtttgtttggttcctgcagaactttcttcttctatccatcttttaatcctttcatttaggtagttggtgtttgcaaagtttataggagcctcaactgtcaggattaagaacccaggaactctttgagcgtccttgtacctgaatattgatataccaaccgctattgcaaggccttgttggactgagatgaagattacaccagcaaatgcacatagacacacaaggaaatccatcttgtccatcttccagatgttgtatacagcagggagatcaatgagcccaatcacagcagcaattatgattgctccaagaacaacattcggtgtgtacacaaacagtggcatgaggaacaacagtgtgaccatgacagtcagtgccatgatcacatttgacatggcagtcttgcaaccagcattgtggttcacagcagaacgagagaatgctcatgagcccacaatgttcatcaatcctatggccatcatctctttgttaccatctacctggtagtccttgagtgaagcaaatgtcctaccaactgccactccttccgttagggagatgattccggtgacaaggccagtctttacagtgaggcccaaatattgaggatcaaagagtagtttatcccatgaagggcgattcaggccacatttgagctgcccaatctgcaagatctgttcagttcttccagggtcaaaaccaatgtggccatgtggccttgagaggcccaacactattcctctggagctagtagcatagatcagtgtcggttgcattatttcgtcttgggctgctccatttgtagccttccagtcagaacctacggacacatgcctcgccgtgagcaggagcaccaggaagcacacggccatcaggatcgtctgccacgaccactccttggtgtggtggatgacggaggccatgacggggacgaggcccatctcggtggtgaagtggacgatgccgagcagcgccttgagctgctgcagcgacacgatgatcgccgcgccggccatgaacccgacaagcgtcgccttcgacaggaaatcgatgatgaaccccagccggaggatgccgagggaggcctggacgaggccggcgaagaaggtggaggtgaaggcgagctggaggaagagcagcggctcggcggcggggctcaccgcctgccgcagcatggaccccattatcagcgacgcgatcgacaccggccccaccgccaggtccctcgagctccccagcaccgcgtacaccatcggcggcacaaagctcgaatagaggccgatgatcggaggcaagctcgccagcttcgcgtagctaatgccgaggtcggatttgaagagggagaaggagtagctgggcacccagtcgaggatcgggaacaggtactgcaccgccatgacccacttggtcgtcagcggcttccccttgaacccgcggaacgggtcgtcggggaagaaggtctccttcaccctcgccttcagcttgctcgccgtgctctgcgccggcggcgccgccaccttgtgtagcaccgccatcgccgcgatctccgcctccgcctccccccctccaactactacgccaccctcgttgccgttgtcattgtagccataagctccacgcatccccaccatgtgagagagattttttgttgttgttgttgttgctatagcaaagctaggttttactatccaacaacttag

SEQ ID NO: 78358 - DNA, 3043 bp, Oryza sativa
  Clone ID: PAT_MRT4530_78173C.1
gttccctttactcatcatctgcttctaatacgtggacagcattattgtggtcttcttttccgaggaactccaatgcaacactatagccatcaggagagaggcgttccgggtaacaatttacactctcggattctgtattcaaacttgtctctatcaccattgctttaagaaatgttgcattccggagaatatgaagtgcaagttccagttgatctttctcaccgaaaaatcctgttatctgaacccaactgagatgggagtgtgggcatctaggtagactccttaactcaccatcatcttgacaatatcgctgatgcacacataccatcttcatatgcagttctagtttttccatgaaaggagcagccttcaatagagaagcaaagtcaagtaaatcaatcttcctttgtggcaggtcagatatagttaaccccaatgtcaaatggcgtagagaaataagtctgggaagcctacttagcatatcaatcctctcaacttgttttgactttaaagttagcgtctcaagattagtcagagtactgggtaagtcactgaagatgtatccaagagcagaatggaaagttaataaactgatggaaacatttgttgtttgcgacggtatagcaagttgcaatggtataaatgggcctcgataatccagggctgtcaagccgcagctcaatttgatctctcgtagtaaggggcagatcgcaacgagcagactcttaagctgattgagatgaccaggaacccttagattagtaagcatcctacagtcagtaatatccacctcccgcagatgattgcattcagacaaaaattggtgaagatcttcatcggtgatgtccacctctcgcaggctaagcttagtgaggttcagtgatcccctggaatcagcaggaaccttgggaagattacagagttgaagcttgggtatctttctcttggcaactgctgatccgtggaggtgaagtcctggtgcagttttcctcttcctacttgcacctgagtcacctgacattgcttttcgcccaacggcccattcccgattggtacgggccgggatcctcagcggccagcgccgcacggcccgcacgcgcacggcggccaccgacggcgacgccacgttgctgacaccaataggcaataactccgaactcttctgaatgaaccggagacgagactctgcagtggtgcaatcgtcgaggaagaactgacgccaatacgggtcaaggaacagcgcgagtgccatgagccacaaatcgctgcacgggcggtatccatcggccaccaccatgtccatgcaagcccttgcgcctctcgccttcttcttctccgcacggctctccatggactcgaccctcgaatcatcatcagctagcctgtggagagcctcgtcgctggagtcactgcatgtcctgctctttgaagagctccctgaagtttcagtctcactggcacaaggcctcttgcccttcgccctggctgcagctgctgctggggatggtggttgtgccctaatgtcctccacattgatcattggttgatgtgctggttgcacattggagtggtcctggacgaccgtgcgtcctcggaaaacagcatggtgctcgtcgatacacttgagaggagcatccttgaatgccttggcccctttcctttccgactcctggatttcccaccactcgtcggaggcgaggatggcctgagagacggtgtcacggccaagtccggtggccttggattccagccaagtccacatgccgaaatttttgcgagattttgcccagcgccacttcacttgcttcttggttactctctttcctgccctctctaacatcttcctctccaaattgatgtacccttgtgcttcgggggacgaggagatgatgttgcgagcctgaatctcctccaagcagctatggaggaagacgcgaagctcttcctcggtccaatgtgttcgaccctccgcaatcttgcgcttcttgctgcctctggcggccatgaaggaaattaaagctaacatagaattactccctccgtttcatgttataagtttttttaaaactttttttctactcaaatttatttaggtttactaaatttaaagaaaaattttgcaatatctacaacatcaaattagttttattggatgtagcattgatataataaatttaatttgtattggaaatattatttttcatataaatttgatcaaacttaaaaagaaaaatgactgataaagaaatcgaagcgatttataatataaatcggacggagtaccttccttgcctcgccagacgggacgaggtcccaatcgatggcgcggaacactgcttccggagtgagtcgctggacgaacgcgaggagggcttcgggcgacctgacgacgacggcgatgaggagccgcgaagcagcctcggctgcgtcgtcttgggtaagcctcgtggtggcgtccgacagcagcgagtcgcacgacccatcggaatccggatctgccaccaccaccacccccaggcgccggtcagccgagccacgagacccggatggaggagacgtaccctaatattatataccaaccgctattgcaaggccttgttggactgagatgaagattacaccagcaaatgcacatagacacacaaggaaatccatcttgtccatcttccagatgttgtatacagcagggagatcaatgagcccaatcacagcagcaattatgattgctccaagaacaacattcggtgtgtacacaaacagtggcatgaggaacaacagtgtgaccatgacagtcagtgccatgatcacatttgacatggcagtcttgcaaccagcattgtggttcacagcagaacgagagaatgctcctgtagttacatagcatgatgtacatgagcccacaatgttcatcaatcctatggccatcatctctttgttaccatctacctggtagtccttgagtgaagcaaatgtcctaccaactgccactccttccgttagaaagatcattccggtgacaaggccagtctttacagtaaataac

SEQ ID NO: 78359 - DNA, 3204 bp, Oryza sativa
  unsure (1)..(3204): unsure at all n locations
  Clone ID: PAT_MRT4530_78174C.1
tttgttttgagaattactatatattctgtactgttggtgtgtttgccctcatgtagacaaatactgatgggtatgcacaaggtacatattctcagtacttctactgccaagtttgcatcacatagtctgaatacctcggaagattgggggtacaaacataaccgggaaatacgttgctggaggcacttctattgctgagagaacagggtggaaaatcttgcattgcaaacttagcagcgcagttagaataataatgaaaatgacaaccttagaatcagctctaaggcgctgtcatcttggaaaatgtagagagtgaagccactgcttccccagtggttaagtacagactatctgatttgaaatgaccatgagcatcattcgctcgttgtatcttctccatgacctctccagttggattcacaagtataagctctagtccatgcttctctgttgatttcttcaagtcgatgaggaacgatatgccacttgtatcaattgcagggacagctgacagatccaaaattacgaaatggagttcactttgtttggttcctgcagaactttcttcttctatccatcttttaatcctttcatttaggtagttggtgtttgcaaagtttataggagcctcaactgtcaggattaagaacccaggaactctttgagcgtccttgtactgatgaagatttcggtaaatatcagtgcctttgatgttcccttgaatcatcatctttggccttgtgatttgcaacagtaccctgaatattgatataccaaccgctattgcaaggccttgttggactgagatgaagattacaccagcaaatgcacatagacacacaaggaaatccatcttgtccatcttccagatgttgtatacagcagggagatcaatgagcccaatcacagcagcaattatgattgctccaagaacaacattcggtgtgtacacaaacagtggcatgaggaacaacagtgtgaccatgacagtcagtgccatgatcacactcggcatggcagtcttgcaaccagcattgtggttcacagcagaacgagagaatacgcaacactatagccatcaggagagaggcgttccgggtaacaatttacactctcggattctgtatgcaaacttgtctctatcaccattgctttaagaaatgttgcattccggagaatatgaagtgcaagttccagttgatctttctcaccgaaaaatcctgttatctgaacccaactgagatgggagtgtgggcatctaggtagactccttaactcaccatcatcttgacaatatcgctgatgcacacataccatcttcatatgcagttctagtttttccatgaaaggagcagccttcaatagagaagcaaagtcaagtaaatcaatcttcctttgtggcaggtcagatatagttaaccccaatgtcaaatggcgtagagaaataagtctgggaagcctacttagcatatcaatcctctcaacttgttttgactttaaagttagcgtctcaagattagtcagagtactgggtaagtcactgaagatgtatccaagagcagaatggaaagttaataaactgatggaaacatttgttgtttgcgacggtatagcaagttgcaatggtataaatgggcctcgataatccagggctgtcaagccgcagctcaatttgatctctcgtagtaaggggcagatcgcaacgagcagactcttaagctgattgagatgaccaggaacccttagattagtaagcatcctacagtcagtaatatccacctcccgcagatgattgcattcagacaaaaattggtgaagatcttcatcggtgatgtccacctctcgcaggctaagcttagtgaggttcagtgatcccctggaatcagcaggaaccatgttcacatacagataaaataggtagctcagccatgtcaagacaactncnaattgcaatacatccatcatatcttcaattccagaaatcaccaagcattgcatgtcccttaaaacatacagaaatataaaactagcacacccatgaccaagttggtacctcgaggtaccatgcaatcgccactgttcgatcttgggaagattacagagttgaagcttgggtatctttctcttggcaactgctgatccgtggaggtgaagtcctggtgcagttttcctcattcctacttgcacctgagtcaccctgacattgcttttcgcccaactacaacacacaagaacggcccattcccgattggtacgggccgggatcctcagcggccagcgccgcacggcccgcacgcgcacggcggccaccgacggcgacgccacgttgctgacaccaataggcaataactccgaactcttctgaatgaaccggagacgagactctgcagtggtgcaatcgtcgaggaagaactgacgccaatacgggtcaaggaacagcgcgagtgccatgagccacaaatcgctgcacgggcggtatccatcggccaccaccatgtccatgcaagcccttgcgcctctcgccttcttcttctccgcacggctctccatggactcgaccctcgaatcatcatcagctagcctgtggagagcctcgtcgctggagtcactgcatgtcctgctctttgaagagctccctgaagtttcagtctcactggcacaaggcctcttgcccttcgccctggctgcagctgctgctggggatggtggttgtgccctaatgtcctccacattgatcattggttgatgtgctggttgcacattggagtggtcctggacgaccgtgcgtcctcggaaaacagcatggtgctcgtcgatacacttgagaggagcatccttgaatgccttggcccctttcctttccgactcctggatttcccaccactcgtcggaggcgaggatggcctgagagacggtgtcacggccaagtccggtggccttggattccagccaagtccacatgccgaaatttttgcgagattttgcccagcgccacttcacttgcttcttggttactctctttcctgccctctctaacatcttcctctccaaattgatgtacccttgtgcttcgggggacgaggagatgatgttgcgagcctgaatctcctccaagcagctatggaggaagacgcgaagctcttcctcggtccaatgtgttcgaccctccgcaatcttgcgcttcttgctgcctctggcggccat

SEQ ID NO: 78360 - DNA, 1309 bp, Oryza sativa
  Clone ID: PAT_MRT4530_78175C.1
ttgctaccgacttattctcgccaatataaggaagaaatatcccaacgcatcacctggggacattggtttacactttttaatgtagtattagcattatgtatctcaactcgttacgcgtttaacgctgattggccaaatacactgtccggtaaactgtatttctttactagtttatttgggcattttagctttattgtttttgctgcttacctacttcttttatttccactttcttttatcattaaaaatgaacgcacctttcgtggtttatccgttattatcgccacgattgggcaaactgttttattggttgatactgaagtatttaaacagttttatttgcatttatcaccattagtttgggatttattagttactccagatgataatagtgagctctctcatcaatggcaattattatttgtgcctatgccgattatcttgctagcacaaatgctttactctcgttggtgttggcagaaattacgtagttttagccggcaaaaatggggtaaatttgtcgcgctattctttgtagcttgctttactgcaacacatttaatttatgcttgggcagatatgcgcttatatcgcccaattacatcacaaaaagccaactatccattatcacacccaatgaccgctcggaatttccttgtttaaacacggggtgatcaatcgtacgaaattacagttaaacattgcagaaaatggccggcttgatagtttctacctcaattatccaaaacaacatttaacttttaaccgcaaaccatatactaatgttttaatagtaaatatgtctggcttagcaaatgaaatgattgtggcggaaaaaatgcctcatttaacacaaataagtgaaaaaacataccgctttatgaatcattatggcagtggcgattctaacgcggctaacttattgggaatattttatagcttaagcggtcaatatttagactcaatgctcgctaataagcaaacttcaccattattaaccgcatttaaacaagcaaattatcaatttggtttattttctcataatagtttcgccgcacctatttaccaacaaagtatttttgcgggtttttcattacctaaaataaaaggcaatgcacaagcgattgaaaaatggactgcttggctcaatcaacgtttagctaaaccttttttcagttacttggatctcgctatgccaaggactcacaatagtctagcaccacttgaacatgttgatgcacaatttaatcaaatttggtacgcgttacagcaacataatttattaatgaatacgttagtgattattacc

SEQ ID NO: 78361 - DNA, 755 bp, Oryza sativa
  unsure (1)..(755): unsure at all n locations
  Clone ID: PAT_MRT4530_78176C.1
cttatggaaggacttaatgaactgaagtagtttgtgttggcagtgatctccattggatatcccgtctcttcagccggtcgtcaatgatacaaccaggtcacgcatgaggtagcagtccactccaacccacctactgaagacttgtctcatttggtttgattgatgcgtggagtgaggcacatgctgtccagatcaagtagaacatcagcttatgagatctgaaagcaacaaaagggtaccaattttacacccatgtaaaatccagtgatttcagtccattctttgtggctattttcatactgcatcttggcatttgctatccgtttaatatgcttggcaaatgaacttgaattagtacaagtggatctttagatttgtatgtagaaggtcgagatgtttgcaaatgacatatgagttgagttgagtgatctagaatttagttcctatagtggaatatggatagctccagaaattgatttttttagtccatttattttaagctctactatttgttaagtttattctcaaaatatttaatttatagtattatccacaataattggagggcaaaactgaccaaattaaagttgccatatgttcatctggagtctgaaagctggccttggtctgcttcattttggtgnntgttgtgactccaaccggtgaccggagcccgtactcaccgttagctaccatccccaacctgccccaatctttctccaggntatgttgctagcacttgatctgtacacgct

SEQ ID NO: 78362 - DNA, 172 bp, Oryza sativa
  Clone ID: PAT_MRT4530_78177C.1
atgtcgactctggcggcgactctagttgatggggagctgacctctgccctccatcccttcggcgtagatcaatccgcactcatggaggatggacacaacgacggcgaggctaacaaggatagacacagcaaccgctgtgataacgcagctcgacgagtaggccatggccggg

SEQ ID NO: 78363 - DNA, 437 bp, Oryza sativa
  Clone ID: PAT_MRT4530_78178C.1
aatactctggaacactcaattaattaatggggtcaattcaatgttacaatgtattcaatcccttttaatagaatttagtaccaaactgcatacccttataaacaggttcttgctcatcatacaaccacagtcctatgttaccaaacacctgcaacacagaaaatgtcatataacacgaaaaacctacatatagattgaaatgaacaagaaaaaggagaacttatgcacaaattattccaatcccatatcaaaaaagaacaacggtagagtgacttgcaagtcgctacgaagaaactgatacaacggattaattctgaacttgctcacaagcttagtacaatttattgcaacctgaagtcttactgatagctctgactacagcagcaagctcattaatgaacagcattttcgggtgcacataaagcagacaggggaca

SEQ ID NO: 78364 - DNA, 1233 bp, Oryza sativa
  Clone ID: PAT_MRT4530_78179C.1
atggtcacatcaggcttccaggagaaggagcgacacagtggtggcaggagtgatgtggcgcgtgtctataggttggacagcgacggcgcggcttccccggagcacgtgtcggcggcggatgagatggacggcgctgatgtgggcccgcatgtcgacatcgagactgaggaggcttacgagatggatgacctcatccatggggaggggtgcaagggcatggcgaccgagctgaacatggaggtggagcagcgcgacacggcgtggcgtggcggcctggcgcaccggccctgcccggctcggcattgtgccgagcaggtggatcaatttgtccgcgggtgttacaccgacgatctgccgaccatagacccggacgttgaggaatacttggagaatgaagaaatggaggaagccattgatgatgctgtggctgatgttttggccgatatgttttcctttgacagtaaccagttcatggacgaagaacgggaggaggctaccagtaaagccctagtccctattaatgatgatatcaaggccaaacttgtagatatcgctcatcggctaaggaactctttggattccttagtcatcgactgtgggccgatcagagccaggtttgaagaaatccacagccagatcccggaagcccttgctgacatcatttctccagttgtgtatttagagcaacatcggttcaaactggaatgggcgaggcagaggatcgcagacaggcgcgagaggactaagctgaagcgccctagccggcgccaccgacgctgccatgtctctagccgccccgcgccgtcgctgtggtcgccgccgctgttcgccgtcgccgtcattgacaagcacctccctgcccttcggagcacatcgtcggccatctccttcgctgtccgtcgtcgcgtaagtgttggtaagaatcgccgtcgccttctctacctcccggtgccctccgtttgcactattgtgctgtggttcgccggcaaccgccgctcccatgccgtttaccgctgctactttgccggctgtgccgccgacactagccgcttagccgccgctgtgccgctccctgccacagccgtgctgctgctactgcgtgttgtcgttgccgcagacgtgccgctgttaatccgtgtcatgtcgctgcctagccgctgccccaaatcgtgcaacgccgtcgctatcctgtgtcgtcgttgttgtggtttgatcgctgccatagcctggtag

SEQ ID NO: 78365 - DNA, 282 bp, Oryza sativa
  Clone ID: PAT_MRT4530_7817C.1
atggccacattaagcaccaaaactggcaagattactcttacgagccccttgcaccaaaacagacgtgaggatgaaagacaaactaatgctccggacaaaattcctgggactaacttatatggggactccgcccccgtggctgctcttataacaccctcggggtcctccgggctgcaagaatgggacccccaatgtccagaaagtcgttcacggcacctcctcctggcgcaccagctccggatccagctcctgtcggcggcggcgcaccacctccgccaatag

SEQ ID NO: 78366 - DNA, 350 bp, Oryza sativa
  Clone ID: PAT_MRT4530_78180C.1
cccaaagcaagacgcgatgtgggagagacaccaatccgagagcgcagcctggaaggtataaaacaggaaaaaaacagtgagcacaagtatggctggcacaacatcggcactgcaatggggaaatcgagagcgagcacagcaggaacggtcggaccacacgagacgatgcgggctctccgcgtagtggagcagcagccgtagccaaccccgtcgccgccgtacgcccatggcagagcactatcgtcgctccgtcgctgatgtctccgccgtcatcgtcatcacgatgtcgtcctcgatcagtatcgcccggcatccgctgctcgcgattggtgtgttcgtggcggttgtgg

SEQ ID NO: 78367 - DNA, 284 bp, Oryza sativa
  Clone ID: PAT_MRT4530_78181C.1
gctctctctctgatctcgtcgttctcgatggactggaaacccgaacacgttacagctacaggtggcggcggcgtcgccgcgctcccgtgacaacaacaacaacgacggcggcagggcggtccacgccgacccgaggggcgtgaccccggtgaagaagcacgagctcttcttgcgccgctacgacgagtgggtgaattaccacttccagacctaccaagggttgcatgcaattggagcaagagtcgagctagacgttctcaaggacctgattatcaatggcggac

SEQ ID NO: 78368 - DNA, 762 bp, Oryza sativa
  Clone ID: PAT_MRT4530_78182C.1
atggagggcgtgggcgcgcggctcgggcgcacctcggcccgctacggcaccacgacgacgttcacggggcccgtcaggaagtggcgcaaggactgggtgcccgtcgccgccgccgccgccgcggcggcggcggcggcgtcggccgcctcctccacggcgggggccggatcccgcgggaacaatctcgtgctcttcaagtggaccccgatgaacggcgccaacggcaacgggggcggaggagacggagaccaggcggcggcggcggccgccgccgcggaggaggagaaggccacgaaacggcggcggtacgtgccggtttctgtagttgaagatgaaaggcaagaatctggaaaatctgacgatgaaaataaggcaaatgatggagaaccatcatccgccgaaactgagccatctaatggaaaaactaatattaatgatacaccaatggatgaatctcaggcatcagatgaggcccgatattctggcaaaaatggcggtggaaccgacctaaatttaaacttgggtctgaaggaccctgacggagacaatgatattgatactgaagaacaagatgctgaaaacaacacacacacagaaaataggctgaagaggaaatctgtagctcctgaccttgagatgagaatgtaaccggctgcttcatttattccttggattctttactatctgcctttgggcctattgtgcaaactttcttgacatattgtcatatttagaggcaattcaacacgatagcttacagga

SEQ ID NO: 78369 - DNA, 1578 bp, Oryza sativa
  Clone ID: PAT_MRT4530_78183C.1
atggggatttcctccgcttcctatcatcccccaaccttgcagcttccgtcctccgccgtcggcgcctcccgacgctgcggctctcccgactgggtcatgctggatgaaacagcgtacatctccgaccgccggaacaaatccaccgctgagtcccagacgagcgagggccagatcatccaggtgtccttctggctcgtcgatccgccgggtctttcctacttcactgtccattgcccgggactggaggaggacggcctcgacttgagcccatgcgattacttcgtctacagggctgccccctggagtccatggctcgacctgcttcctgaccccaatgtcatgtccttcaactccaagaaatttggcctcttcccttgtcgcagcggtgtcagtgagcactataatgtggccttcctcaatattgaatgggtgccctctgatgtagcttgccagtttgagctatacatcttctcatccaagaacagaaagtgggacgttaaaccagtcttgcaggacttgtcccgttctgagaatcacaaggtagccctcgagcatgagatcgacaagctgatcaatataggacacgattcgttgtgcttggttgatctctggcatggtattattctgctcgaaaagatgttcgacgactacccagttgtgagatatatgacattccctaagccagtggtgtacaccacggatgcctatggtgaaactgtatgcggcgaaacagccccagagtgtgtacgggatgttgcctgctgcaatggtttgatcaagtttgtggacgtagaatactgctacactgacgagaccaatggtaatggttggaaagccacaacatggaataggttgccttcttggaaagattggcgcaagcgtttcacagttgacaaaactgacatcttggttgatcccagttatgccgctgttttgcctgagctgtgggacaataataccaaaaacatggaactgaagagactgatttgttctatccccactctgagtatgcttgatgatgactttctttacatgataaccaagatgaacgaagaagacaaaaatgcctggatcatctctgttgacatgaaacataacacactgcaagatgtggccccaatttctgctgcaaggttctccattctcagttcaatttgccatccctgtgcaatctctaagtacctcaagattagctggataagtgctattgctgttggtgatgcaaatgggtatatctatgaagggcagtatggcccatggagcagagggcgacggcggccggctcgagccgggacggctgggccatggcggggtggcggcggcggcggcgcatcgccgggacggcttggccacagctgggcggcggcggcggcgcatcgccgggacggcttggccacagcggggcggggacggctcggccacggcggggcggcggcggcgctcgacgaccacagtcggaaggctctccacgacggccttccccgccacgcgcacgccggctcgtgctccgcggcgagctgcccgaacagcacgtcgtcggcgtcatcgaggaagaacgtgtcgattccaccgtcgtag

SEQ ID NO: 78370 - DNA, 2548 bp, Oryza sativa
  Clone ID: PAT_MRT4530_78184C.1
gtcctttttttttttttttttgttttgaagacgatagaagttaattcattttgggacaaagtttgaattacaaaagttcatttattttgggatggcgggagcacacatttgcacctggcgtaaaatgacataaacagggtgctaaaaatggggaggaggcggtcgtgagatcatgttagaagcggagcaacaacggagcccgtaaaggaggtaggaggtggcataatggctactataagttctctgatctgtccccagtgtgcagtgccatgttgcctttttgcccatctcaatgccatccatgttgtcggccatttgtgtactcgtcccatccgtctgcggtgtaagactcctgctctcacacaaaaattctacaagatcaaaacgtacacagcccggaaaattatcacttatgcccccatctggagtatgacgggaatgatcacgatggtcttggtacacgtaaacgtaaatgtgcatgttcccatcatggtccacagggaatgtgaacggtgggaggtcgtcaacactacactcgccattgacggttatgaatcaaccctgaatcatatcttaggtggcagctattgtaagcaaattatattgtcggttctctccaatttggtacacctcaaacccgaaacaaaaccttaccgatttgaggctagtgaccattcttagaccaagaatgatgaagtgaccagtgccgatgtgcctagggagcctttgaagttctccatagaaagatggagcgtagatagagtagccatcgattaatacttcatcttctccctctatttggcccttaataattaaggaatactcaataagtacaagtccaactgcataaatgcctcgtgaaggggttatgagaggttgcagcttatgagcaccccagcggctttcccacttcggcagttgaggaaagagatgctccacagatactcgatttggatccacttggaattgcccctcaacctgaagtgacccctcccaaacaaacgagaaatcgcatgtagcgtttgctttgggcactggaaactccatctttcctaggatttcattctcccatttctcctccctatcagcagcgtaataagggttcccatcttcgtagtaaaattcatgcccgtatccaaaaaagctatgcccttcatccgcatctgcatattctacatcagagtcatattcatatagatcacttgctccacatatatcactaagttcatgatcaaccttgtctctcagagaagccaaatccatgtcgaactccacacccttcctcggtgtttcagagtcgatgtctggagactttttgctgcgatatgaagagatcttaagatcaatctggatgcacttgcccagccattgatatgagttgcccccacatagcccaatggttggagctgtgcaccaaccctgaaaacgtgacaattcatttggttctttgcctacaaggtcaccatagttgctgttgtgttgtagaagtattgagcctttaatatacttctttggccttggtggcgcattttccttcaccacatgttccttgcttgaacttgctaattcatacttgtctctttgcttgtttttcttatccatcttctcacgcttctggtcctctataataccctcctcccttgttttacctttctcatttatagaaccctccagcatctgcatctcctccttatcgtcaaattcatagatttggccatcagcagtcctaaatcctctcatccacatgttttttccttccactatggcagttacagttgaagcaccatcagtaaaggctacagcaaagacttcaatcccttcttcagatgcttggagaggatagagggggtgatgtgcctgtacaatgtacttgagctttccgttggtgtgcgaccgctgtttgattcgtcccgccgacgcggaggcggagggctgggggcgggcgcagtaggggagagggcggcggcggcagaggcacgcgacgcggatacggcttgacgccgcagaagctcgccgatcgccggattctgaaggtgccctaggtggggaatgcaggtaggcttgaggttgagaacggaggccgacgccgccggcgatcggcggccaaaaaccccacccgcctttcaactctaggagagtccgctcgcaggcaggagggtcccactcctcagcacgcaacaacgtgcgggaccaattatttgttgacacgtcaatgtttaacttatcgttgacaggcaggaacaaaatccagcacagcttctcccacgagctcctcccagactccaccctcaatttgctcggtgatgtcaaccaactgcgtcctcatcgttttcacccagcatgttccttcaacctcctgcttcacaactctctctatcatgatcccagcattatctctcctgctcaccacgaacatccgtgccccgtaaatccaatctttcaggatgctccagacttctatccccaatgcaggagaggaggcgtccatccatgttcttgagtgtgctttgctccatgggaatgtacttagcaaggtgttctcgccgat

SEQ ID NO: 78371 - DNA, 573 bp, Oryza sativa
  Clone ID: PAT_MRT4530_78185C.1
tcacatctgcatctcctccttatcgtcaaattcatagatttgggcatcagcagtcctaaaacctctcatccacatgttttttccttccactatggccagtacaggtgaagcaccatcagtaaaggctacagcaaagacttcaatcccttctggggtaatacagaattcctttctcttggaaccagtacccttcacaatccttctgaacctgcgcttaagttctttgcgggctttatcaattttttgggtagatgatctcaggatagcactgaagtcattagcatgagttaacttcaggtctaaagtaaatagcagttcggatggcatgtcatacactccaaatgactgttcatcacccattctgaattagaaacgagctgatagacaagttgtgttgaatatatcacttcagatgcttggagaggatagagggggtgatgtgcctgtacaatgtacttgagctttccgttggtgtctggtcaaaacactgcactgttcagcttctccttgtactgctagggttttccgccgtgatgcgtcccctgctgccaagacaaacgcgcggacgcgtgg

SEQ ID NO: 78372 - DNA, 348 bp, Oryza sativa
  Clone ID: PAT_MRT4530_78186C.1
gtggaggaggtggaggagagacggggcagaggacggtggaggtggctagggccaccttcgccgccaccaccaagcacatcgcctggctgaccggggggaaacatacgctgaaggacctacccgcccaggctgatcaggagcggcgccaccgccggcccggacgacaagctactgcaactaggtctacttttgtcgggcgacgccgtgtctccggcggtgtccgggcaatcttggcactgatggatgggccgctctccttgacgagatcaggggctccctcccgagctaagtgctgcacgtggccatgcccgccatgactagcgagggggacaagaaacgcgacatgct

SEQ ID NO: 78373 - DNA, 639 bp, Oryza sativa
  unsure (1)..(639): unsure at all n locations
  Clone ID: PAT_MRT4530_78187C.1
atggcccaacgacgcagatctggaaggcccaacataagctggaatcctggaattttgatgggccacgaaccacgtttggaaaaagttcactgccggcaaagggagagagggagccagcgagtccggtgcgaggaggccgtggccggggtcggcgacctggcggcggcgcaggagagaggcggggagaggcggttgacgaccggtgcgagtaggttgtggccggggtcggcgacctgtcggcggtgcagaagacaggacctgtcggctatcaagaggagaggaaaactcggcggcggcgtcgtctggctcgagcgaaaacnggcgncgacgatgaaagggagaggccggcacgggggagctcgggacagcggcgtcggcgcgggctgtcgccacggccgggcgcgcgcacgggagggaggcggcacagctcaggagaaaggtggtgcggcgcagtggcttggccacgcgcagctaggaggcgacgccgaggggaggaaaggaggaagggacacgcggctgggaggcgccgcgcggcgtgtcctcccccaatcaccgtcgtcctccctccctcccgtcaacgaggctttggctgccccggcgacacctcccccctcgcgcacctcagccgcttccgcatga

SEQ ID NO: 78374 - DNA, 270 bp, Oryza sativa
  Clone ID: PAT_MRT4530_78188C.1
atggagaagcttttgcttactgtccccaaatccaaaacatgggatcctgttgtcttcgtcgaacgagttgttgatcctcaggttgccgatctcatctctattcaggcgtacagtccaagaataaatggtccagaacagcagcaagaaagtagaaaagaacatgccgattctcgaagaaagaagaagactgtgaagaaagagctcagcacgaagatgaaggcgtttcacagtagcatgacaaagtgcagctgttttgctagcactgactaa

SEQ ID NO: 78375 - DNA, 2037 bp, Oryza sativa
  Clone ID: PAT_MRT4530_78189C.1
ggctttcggatggatgggacactggtcgttcacgatcttgtcataaatactgacgcgcggtcgttgatatgatgaatgtgttgtagccactagatcctcgagcttacgcttgtgatccttgtaattgattctgctaccacacgccccattaattgctgccactgtccttggatttccagctactgctcgactgcttggaggcccgaacagcatcatcggacttagcatactcgttggccttctcgaacatttgcttgaccgtcctgggaggcttgcgtccaaacttgccgacgagtaggtcgttgcgaaccccttttgtaaacgcagcaatgatgttgtcgtcggtgatgtcggagatcttgttacgctgctcagaaaaacgccaaatataatccctaagagattcatcgggcctctagatcacgttgtggagttcgaagtgtgtgctgggccgctcgaaggtgccttgaaaattggcgatgaagtggtcaaagagctcgccccaagaaccgattgtgcctcgtggtaacccagcgagccagttccgggccgagtcaacaaacgcaacaggtaaataatacgccattgccttgctatctcctcctgctgcttggattgcgagagtgtagatagtgagccacgactcggggtcggttttgccgtcgtacttctcgataccagtcggcttgaagccagtcggccaatccactcgacacatgtcacttgtaaaggcagcaactccttcatcgttcgcgtcatagcgatccggtgtgtggtgacgtcgtcagtcgtctctttctgctcggcgacggttaagggtgtcacgtaggtcgacaggctgccgtggacggggggagcgaggccgtttgtggtcggcatgatgctctcgatgtctgttggcggaagagtgaacggaatgctctcgatgagccctgcccccgtgctgtgatcttgagttggtgacgttgagacttggttgacaataatcccgagatcagagtggtgggacccaaatgcccgacgttgtacgaactgaaccagagggctgccgagtgcttcccgagtcaactaggaccgacgcggcgatcatcgtctttgtttgattcagaatttgagcgacattctctggtgctccggtagccatgagggtatccaagagcgcgattgctgcaaccgtgttctgctgtggagtacggaacacattagtgccatcaatgttctgttatccaatcagctcacatgctcaacgcccagatgccaaagcatgttgccttcgttcctcagcctctcttgctagtcgcttccattcttgctgctcacgcagcaatctggcttgcccttgctcttgccgttcccactccaacctgagtcgctcggcttcttaacatgctcgttcctcattagcttcacgcacgagccgctgttcttccgtctcattgtctgccataaaaacgttgaaaaagagaggagtatagtcgtcttcatagttgtcgtcgaattcttcatcaaggtcatcgtaatcgtcgaaattgtcatagtcgatagtctcagtcggagcgtaggaatcgatgcttggagtgttgaggtattcttcgatttcttctgtagaacacgattcgagtcgttgaaggattatgccgacttccttggagctagatccgactgtggtcgaagccgagtcagatctaggcctacggggagaaggcgctcttgaaccaaaaacagtagctagatcatctggtagccgcatcatgattgatggataaactgtgctgtcttgatctaatcttgaagatgaaaacgtcgaggtcccatctgagtggtttgaagccaagtcagatgagaaaaccctggagtagatctcggcctagtccgggagaccgaatggggcgagccgctatctcctcccgactggttcgaatccgaatcgagaagagagatcttgctgaagctgtcggtggtgaagtcgaggctaccgaactggtacgcctgcccgggagggaaggcgaagtcgtcgatgcccgaaacgaatcgcat

SEQ ID NO: 78376 - DNA, 1141 bp, Oryza sativa
  Clone ID: PAT_MRT4530_7818C.1
ggatgaagtgtctaaatttactggtattgcgaaggcacacgctgaaaagaacaatatgaggaagataatttgtccttgtgctgactgtaagaatgaaatagcctgggaagatgcttctaaagtgatggagcagttagtaactcgtggatttatggaaaagtacgaaatatggacacaccatggcaaagaacaagtggacgggcctgaaaatgtagttccgacacaagttgaagacatggtgcatgacgatggttcaggtttaaataactttgaagctttacagaaggcagctaaggaagttttgtacgatgaatcaaagggctatgacagtgagttcacaacattacgggaccccgtcagcctggtcaaattaaaggtaaaaacaggatgtgtgatctgcttgaatggaacgtactataagtatctcccgggttccaacaagcttttgtacatgtggcaccggcggttcctacgcacaaatcacaagtaccgcaagatgaaggcggagttcgatggcaccgaagagagtgatcctacacaaaaaacctacatcaggggaaaaagcgggaaccctagaaattttggcgccatcagggtgccaaattttttctccgccgcctgcctgcaaccatcgccctcagaccgtcgtcatccactgccgccgaccgccatcctccgccgccgccgaccgtcgtcctccgccgccgccaaccgtggagtcgcgatctcggccgaacggcttcttcggccggtcgtcgtccacgagcgaagtcatcctcagccgaacgacgtcttcggccagtcggcgtccacggccgaacctcgtcgtcggcccttccgtcgtcgtccacgaccgaacctcgtcgtcggccgttcattgtccacggacaagtacgaaacgatggccaatggtactaaagggactgaagagaagggtttaggggaggaagagccgtcccttcctattgtggttgctccggaaccaacggtccagccgacagatagttccgacagcgacatagctgacgaggatgatgagtactcgtcgccaagtgatccttgtccaagcccgaagagaaggaaaaagggcgagggtgaaaaaggcgacaaggactacattccccctaaagaagggaactag

SEQ ID NO: 78377 - DNA, 442 bp, Oryza sativa
  Clone ID: PAT_MRT4530_78190C.1
ctttgttggtacagttgcgcgctgttatggtccaggtgctgtatgactgtacccatggttgtattttagttgtttcccaaggtatacatgaagatcatgatctggttgaagcaagaaaccatcttgtcgcagataaggagcatgcattttgatcggtgtcaattgcattctacctgtaaagatttttattctctttgtaattaggtcacagtttgtgccatacctatcattcaggaattaggatgttttatacactacagaaaacaattcttaccagaatgcgtgtacagacctacatgctacagtggattgtttgtgttttttttacatgtaacacaattattttgcggacatgacatactgtatagaccatagagtgtatgatcatataatgtgaaagactcctgttgttagaaatttaccttaaaaaaaaaaaaaaaaa
